United States Patent Application Publication US 2024/0327476 A1 - sequence listing, part 56

SEQ ID NO: 106672 - DNA, 8451 bp, synthetic construct
  misc_feature 1..8451: note = Description of Artificial Sequence: Synthetic coding sequence
  source 1..8451: mol_type = other DNA
aagctgctcgaaaagcagcctcccattgagggggattgcgtcgttaccgttttgctcgccgaggaggacaaggcagaagatgatgtcgtgttttatttggtcttcctgggctctactctgcgccactgtacatccaccagaaaagtgtcatccgacactttagaaacaatcgctcctgggcatgactgctgcgagacagtgaaggtgcaactgtgcgcttcaaaggaaggattgccagtcttcgtggtggcagaggaagattttcactttgtgcaggacgaggcctatgatgctgctcagtttctggcaacctccgccggtaaccagcaagctctgaactttaccagatttctggatcagagcgggccacctagcggcgatgtgaactccctggacaaaaagctggtgctagctttccgtcatcttaagctcccaaccgagtggaacgttctggggaccgatcaatcattgcacgatgcagggccacgagagacgctcatgcatttcgccgtaagactcggcttgctccgtctgacctggtttctgttgcagaagcccggcggcaggggagctctttccatacacaatcaggaaggggcaacaccggtttctctggctttggaacgggggtatcacaaactccatcagctgcttacagaagagaatgctggcgagccagacagttggagtagccttagttacgaaattccatatggggactgttctgtcagacatcacagggaattggatatctatactctgacatcagaatccgactcacaccatgaacacccttttccgggggacggatgcactgggcccatcttcaagttaatgaatattcaacagcagcttatgaagaccaacttgaaacagatggattcacttatgcccctgatgatgacagcgcaggatccgtcctctgcccctgagactgacgggcaatttctgccttgcgcacccgagcctacggaccctcaacgcctttccagcagtgaagaaaccgagagtactcagtgctgccccggcagtccagtcgctcagacggaaagcccttgtgatctcagttccattgtggaggaggaaaatacagatcgcagttgtagaaaaaagaataagggggtggagagaaaaggtgaagaggttgagcccgcccccatcgtggactccggaaccgtcagcgaccaggacagttgccttcaatccttacccgattgcggagtcaagggtaccgagggactctcaagctgcgggaatcgcaatgaggaaacaggtacgaaatcttctggcatgccaacagaccaggagtcactgagttcaggggacgcagttttacagcgcgacctggtcatggaaccaggcactgcccagtattcaagtggtggcgagcttggcggcatcagtacaaccaatgtgagtacccccgacaccgcaggtgagatggaacacggattgatgaaccccgatgccaccgtgtggaagaacgtacttcagggaggggagagtaccaaagagcgatttgaaaactcaaatattggcaccgccggggcttcggacgtgcatgttacttcaaagccagtcgataaaatttcggtgcctaattgcgccccagcagcaagcagcctggatggaaataaaccggccgaatccagtctagccttttcaaatgaggagacttctactgagaagaccgctgagactgaaacatctcgatccagggaagagtcagccgacgcaccggttgatcagaatagcgttgtgataccagccgccgcaaaagacaaaatcagtgatggtctggagccctacactctgttagcagccggaattggcgaggctatgagccctagcgatcttgcactgctggggctggaagaagacgtgatgccgcatcagaactctgaaaccaactcaagtcatgcccagtcacagaaaggaaagtcaagtccaatttgttcaacaaccggcgatgataagctttgcgcagacagcgcctgtcagcaaaacacagtcacctcctcgggagatctggttgccaagctctgtgacaatattgtgtctgaatcagagtcgacaaccgcaagacagccctcttcccaggatcctccagacgcctcccactgtgaagatccgcaggcacacaccgtgacttctgatcccgttagggatacccaggagagggcagacttttgtccattcaaggttgtagacaacaagggccagcgcaaagatgtcaagctggacaagcccctgacaaatatgctggaggttgtatcacacccacacccagttgtgcccaaaatggaaaaggaactggtgccggatcaggcggtgatttcagactctacatttagtctcgctaactcacctggatctgagtccgtgacaaaggacgatgccttgtctttcgtaccatcccagaaagagaaaggaaccgcaacccccgagcttcatactgcgacggactaccgcgatggtcctgatggaaacagcaacgagccagataccaggcccttggaagacagggctgtgggcttgtcaacaagctcgaccgcagccgagctgcagcacggtatggggaataccagcctgactggtctcggtggcgagcatgagggcccggcaccaccagccattcctgaagccctgaatatcaaaggaaatacagacagcagcttgcagtcggtcggtaaagcaacattggccctggatagtgttctgactgaagaaggaaagctcctggttgtctccgagtcctctgcggcccaggagcaggataaagacaaggccgtgacttgtagctcgattaaagagaatgctctaagctcaggaacattgcaggaggagcagaggacgccgccccctggacaggatacacagcagtttcacgaaaagagcatttccgcagattgcgccaaggataaagcacttcagctctcaaacagtcccggcgcctcctccgcttttctgaaggcagagacagagcacaacaaggaggtcgcccctcaagttagtctactgacgcagggcggagccgctcagtcacttgttcctccaggagccagcctggccacagagagcagacaagaggccctgggtgccgagcacaattctagcgcactgctgccctgcctgctccccgacggatcagacggaagcgacgcactgaactgctcacagcccagtccactcgatgtcggcgtcaagaacacccaatcccaaggtaagacctcagcctgtgaggtcagcggtgacgtcactgtggacgtgacaggcgtgaatgctctccaggggatggcggagcctcgccgcgagaacatcagtcacaacacccaggacatcctaatcccaaatgtccttctctcccaagaaaaaaacgccgtgctggggttaccggtcgcgcttcaggacaaggcagtgaccgaccctcagggcgtgggcacacccgagatgatacctctggattgggaaaaggggaaactggagggcgctgaccatagctgcacgatgggagacgccgaagaggcccagatcgacgatgaggcccaccccgtgttgctccaaccagtggccaaggagcttccaacggatatggagttatcagcccatgatgacggggcaccggccggtgtgcgcgaggtgatgcgcgctcccccaagcggaagagagaggtctactcccagtctgccctgcatggtgagcgcccaggacgcccccctgccgaaaggcgccgaccttatcgaggaagctgccagcaggatcgtagacgccgtgatagagcaagtaaaagccgctggtgcacttctcacagagggagaggcctgtcatatgagtctctcctcccctgagcttggccccctaaccaaaggactcgaatcagcctttaccgaaaaagtctctacctttccccctggcgaaagcttgccaatgggttcgaccccagaggaggcgacgggatccttggccggatgttttgcaggaagggaggaaccagaaaaaataattcttcctgtgcagggaccagagcctgccgcagagatgcccgatgtgaaggccgaggatgaggtggatttccgcgccagctccatcagtgaggaggttgcagtcggctcaatagccgccaccttaaaaatgaaacaggggcctatgacccaggccatcaaccgggagaattggtgtacaattgaaccctgcccagatgccgcaagcctgctagcttctaagcagtcacccgaatgcgagaatttccttgatgttggcctcgggcgcgagtgtacatccaaacagggcgtcttaaagagggaatctggtagcgactcagatcttttccactcaccaagcgacgacatggactcaataattttccccaagcccgaggaagagcacttggcctgtgacatcaccggttccagctcctctacagacgacacagccagtttggacaggcacagctcccatgggtcagatgttagtctgtcgcagatactgaaacccaacagaagtagggatcggcaatccctcgacggcttctactcgcatggtatgggagcagaggggcgggagtctgagtccgagcccgccgatcctggtgatgtcgaagaggaagagatggactccatcaccgaagtccctgccaattgctcagtgctccggtcctcgatgcgcagccttagcccatttcggcggcacagctggggcccagggaagaatgccgcctcagatgccgagatgaatcaccggtccatgtcctggtgccctagtggagtgcaatactctgctgggctctctgcggacttcaactaccggtccttctcactggagggattgaccgggggggccggcgtgggaaacaagccatcatcgagcttggaagtgtcttcagccaacgccgaggagctgcgccacccttttagtggggaggagcgagttgattccctggtgtcccttagtgaggaggacctggaaagcgaccaacgcgagcataggatgttcgaccagcagatttgtcacagatccaagcaacagggcttcaactattgcacctcagccatctctagcccacttacaaagtctatcagcctgatgacaatctcccacccaggtcttgataattccagacctttccatagcacctttcacaatacgagcgccaacctaacagaaagcatcaccgaagaaaattacaactttctcccgcattccccgagcaaaaaggattctgagtggaagtcaggcaccaaagtaagccgtaccttttcttatatcaaaaataagatgagttcctctaaaaagtccaaggagaaggagaaagagaaggacaaaattaaggaaaaggagaaggactccaaggataaggaaaaggataagaaaactgtgaatggccataccttttctagcatacccgtggttggtcctatttcctgcagccagtgcatgaaaccatttacaaacaaggacgcttacacatgtgctaattgctctgccttcgtacataagggatgtcgtgaatctctcgcaagttgcgccaaagttaaaatgaaacagcctaaagggtctctccaagcccacgatacaagctctttgcccaccgtgataatgaggaacaaacctagtcagcctaaggagcgccctagaagtgccgttttactggtggatgaaaccgccacgacaccaatctttgcgaatcgacggagccaacagtccgtgtcactgtccaagtcagtgagcatccagaatataaccggtgtgggcaacgacgagaatatgagcaatacgtggaagtttttgagccactctacagacagcttaaataagataagtaaagtgaacgaatcaaccgaatctcttacggacgagggagttggtacagacatgaacgaagggcaactgcttggggatttcgaaattgagtccaaacagttggaggccgaatcctggtctcggatcatagactctaagttcctgaagcaacagaaaaaggacgtggtcaagcgccaggaggtgatctacgagctgatgcaaaccgagttccatcacgtgcggacacttaaaatcatgtccggcgtctacagccaaggtatgatggccgatttgctattcgagcagcagatggtggagaaactgtttccttgcctggatgaactgatctccattcactctcagttcttccagagaattctggaaagaaagaaagagtccctggtcgataagagcgagaaaaattttctgattaagcgtatcggggatgtgctggtgaatcagttttccggagaaaacgccgagcggctcaaaaaaacctacgggaagttctgtggccagcataatcagtcagtaaattattttaaagatctgtatgccaaggataaacgcttccaggcattcgtcaaaaaaaagatgagctctagcgtcgtgcgcagactagggatcccggagtgcattctcctcgttacccagcgcataacaaagtaccccgtgctattccagaggatcctccaatgcaccaaggacaacgaagtggaacaggaggacctggctcaatctctgtcactggtgaaggacgtgatcggtgcggtcgacagcaaggtcgcctcctacgagaagaaagtgcgcctcaacgaaatctacacgaaaaccgacagtaaatcgatcatgagaatgaagtccggccaaatgttcgctaaagaggatctgaaaaggaaaaagctggtcagggatgggagcgtgtttctaaaaaacgctgctggaaggctgaaggaagtgcaggcagtcctacttaccgatatcttagtgttcctccaggagaaagatcagaaatacatatttgcctctctggatcagaagagtaccgtgatatctttaaaaaaactgatcgtgcgcgaagttgcgcatgaggaaaagggtctgtttcttatttcaatgggaatgaccgaccctgagatggtggaggtacatgcctcttctaaggaagagcggaacagttggattcagattatccaagacacaattaatacactgaaccgggatgaggatgaaggcatacccagtgaaaacgaagaagagaaaaaaatgctggatactagagcacgcgagctaaaagagcaactacatcagaaggaccagaagatcctcctcctgctcgaggaaaaagagatgatatttcgggatatggccgaatgcagcactcccctgccggaggactgtagcccgactcacagccccagagttctgtttaggtctaacacagaggaggcactgaaaggcggtcctctgatgaagagcgccatcaatgaagttgagatccttcaaggcctggtgagcggcaatctcggcggcaccctcggacccaccgtgtcgtctcctatcgagcaagacgttgtcggcccggtgtccctgccccgcagagctgagactttcggcggctttgatagtcatcagatgaacgcttccaaggggggggagaaagaggaaggcgacgacggacaagacctgcggcgtactgagtcggactcaggccttaaaaaagggggtaacgccaacctggtattcatgttaaaaagaaacagcgaacaggtggttcagagcgtcgtgcacctgtacgagcttctctcagccttgcagggagttgtgcttcagcaggactcctacattgaggatcaaaagcttgtgttatcggagcgagccttgaccaggtctttgagccgacctagctctctcatcgagcaggagaagcagcgttccctcgaaaagcagaggcaggacctggccaacctgcagaaacagcaggctcaatatcttgaggaaaagcgcagacgggagcgggaatgggaggcaagggagcgcgagctgcgggagcgggaagccttactggctcagcgggaagaggaggttcaacagggacagcaggacctagaaaaggaaagggaggagctgcagcagaagaaaggaacctaccagtacgaccttgaacggctgcgcgccgcacagaaacagctggaaagggagcaggaacagctcagacgcgaagccgagcgcctcagccagagacaaaccgagagggatctttgtcaggtgagtcatcctcatactaaattgatgcggattccgtcatttttcccctcacccgaggagcctccaagtccctctgctcctagcattgcaaaatctggctccctggacagcgagctatccgtgtcacctaagaggaactccatcagccggacacataaagacaaaggcccctttcacattttgtccagcacgagccagacgaataaagggcctgaagggcagtcgcaggcaccagcaagcacatccgcctccacaagattgttcggcctgaccaagcctaaggagaagaaagaaaaaaagaagaagaataagacctctagaagccagccaggcgatgggccagctagtgaggtgtccgccgagggtgaggaaatcttctgctag

SEQ ID NO: 106673 - DNA, 8442 bp, synthetic construct
  misc_feature 1..8442: note = Description of Artificial Sequence: Synthetic coding sequence
  source 1..8442: mol_type = other DNA
atgaagcttaatccacagcaggcaccactgtatggggactgcgtcgtcacagttcttttggctgaagaagataaggcagaagacgatgttgtgttctacctggtgtttctcgggtctacactcagacattgtaccagcactcgcaaggtcagctcagataccctggagaccattgccccagggcacgattgctgtgagactgtgaaggtgcagttgtgtgccagtaaggaaggtctgccagtattcgttgtggctgaggaggatttccactttgttcaggatgaagcctacgacgctgcacagttcctcgccacatcagccgggaaccagcaagcgctgaactttacacgattcctggaccagtcagggcccccatccggggacgtcaactccctggacaagaaacttgtgctagcgtttcggcatctgaagctgccaactgagtggaacgtcctgggaacagaccagtcactacatgacgctggtccccgcgaaaccctgatgcacttcgccgtgcggttgggattactgaggttgacttggtttctcctgcagaagcctggaggccgaggtgccctatccattcacaatcaggaaggcgcaacgccggtctcacttgccctcgagcgtggttatcacaaactgcatcagcttttaactgaggaaaacgccggagagccagactcttggtcatccctcagctacgagattccctatggagactgctccgttcggcatcaccgcgagctggacatatacacactgacctctgaatccgatagccaccatgagcaccccttcccgggggacggctgcacgggccccatattcaagctaatgaacattcagcaacagctgatgaagactaacctaaagcagatggactcactgatgcctctgatgatgacggctcaagatccctcctcagctccggaaacagatggccaatttctaccttgcgcacccgagccgactgacccgcaacgcctgagctcgtcagaggagaccgagtctacacagtgctgccccggtagcccggttgcacagaccgaaagcccatgcgacctgtctagtatcgttgaggaggagaatactgaccggtcttgcaggaaaaagaataaaggcgtggaaagaaaaggtgaagaagtcgagccagcccctattgtggattcaggcactgtctccgaccaagactcttgcctgcagtccctgcccgattgcggagttaaaggcactgaggggctatctagctgcgggaaccggaacgaagagactggaacaaagtcaagcggtatgccaaccgatcaagaatctctgtccagcggcgacgcggtcttacaacgcgacctcgtgatggaaccaggaaccgcccagtattcatctgggggggagcttggtgggataagtaccaccaatgtgtccacaccggacacagctggggagatggagcacggactgatgaatcctgatgccactgtctggaagaatgtactgcagggtggagagtccaccaaggagcgatttgaaaattctaacatcgggaccgctggggcaagtgatgtgcacgtgacatctaaaccagtcgataagatcagcgtgcctaattgtgcacccgctgccagcagcctggatggcaacaagcccgcagaaagctccttggctttcagcaacgaggaaacttccaccgagaagacagcagaaaccgaaaccagtcgatcgcgagaggaatccgcagacgccccagttgatcagaacagcgtggttattccagccgccgctaaggataaaatcagcgacggactggaaccctatactctgctcgccgccggtattggtgaggcaatgtcgccttctgacctcgccctcctggggctcgaggaagatgtgatgccacaccagaactctgagacaaatagctctcacgcacagagccagaagggcaagtcatctcctatctgctcaacaactggcgacgacaaattgtgtgccgattctgcctgtcagcagaataccgttacatccagcggcgatttggtggcaaagctgtgtgataacattgtctccgagtctgagtccacgacagctcggcaaccctctagccaggaccctcccgatgccagtcattgtgaagatccacaagctcataccgtcacaagtgacccagtgcgcgatacacaggagagagccgatttctgtccattcaaagtggttgataacaaaggtcagcgcaaggatgtgaaactggacaaacctctgacgaacatgctggaagtggtttcccacccacaccctgtcgtgcctaaaatggagaaggagctggttcccgaccaggccgtgattagtgattcaacttttagtttggctaactctcccggaagcgaatccgtgaccaaagatgacgctcttagtttcgtgccaagccagaaagagaagggaacagctacaccggaacttcatacagcaacggactatcgtgacggacccgacggcaactccaatgagccagacacccggcctctggaagatcgcgcggtgggactgagtacttccagtacagccgccgagctgcagcatgggatggggaatacttccctgaccgggctggggggggagcacgaggggcctgctccgccagctatccccgaggctctcaacatcaagggaaatacggattctagcctgcaaagcgtgggcaaggcaacgctagccctggattccgtcttgaccgaggaaggaaagctccttgtcgtgtctgagtcctccgctgctcaggagcaggataaggataaggccgtgacatgctcaagcataaaggagaatgctctgagttccgggaccctccaagaagaacagcgaaccccccctccggggcaagatacgcagcagttccacgagaaatctatctctgccgactgcgcaaaagacaaggccctccagttatccaattcacctggggcttctagcgctttcctgaaggccgaaaccgagcataataaagaggtagctccacaagtcagccttctgactcagggaggcgccgcccagagtctggtaccgcccggggcctctctcgcaaccgaatcaaggcaagaggctttgggggccgagcataacagttccgctttactaccttgcttactgccagacggctctgacggcagtgatgccctgaattgttcacagccctctcccctggatgtgggcgtcaagaatacacagtctcaaggaaagacatcagcctgcgaggtgtcaggcgacgtgaccgtggatgtgaccggagttaacgccctgcaagggatggcagaaccccggagagagaacatctcccataacacacaagacatactgatcccaaacgtgctactatcccaggaaaagaacgccgtgcttggactgccagttgcactacaggataaagccgtgaccgatccacaaggagtgggcacccccgagatgattccacttgactgggagaaaggtaagctggaaggcgccgaccactcctgcacaatgggtgatgctgaagaagcccagatcgatgatgaagcgcaccccgtgcttctccagcccgtcgccaaggaactccccaccgatatggagcttagcgcccatgatgacggggcgcccgccggcgtccgcgaggtgatgcgggctcctccctccgggagagaaaggagtactccaagtcttccttgtatggtgagcgcacaggacgcccctttgccaaagggagccgacttgattgaagaggctgccagtcgaattgttgacgcagtgatcgagcaggtgaaggctgctggcgcactattaacggaaggcgaggcctgtcacatgtccctttctagtcctgagctggggcccctcaccaagggactcgaaagcgcctttacggagaaggtgtcaacctttccccccggagagtctctcccaatgggctcaacccctgaggaggccactggcagcttggcaggctgcttcgcaggccgggaggagcccgagaagatcatcctcccagtacaaggccctgagcccgcagccgagatgcctgacgtgaaagctgaggacgaggtagattttcgagcctcatccattagtgaggaggtcgccgttggatcgatcgcagccactctgaaaatgaagcaagggcccatgacccaggctatcaaccgtgaaaattggtgtaccatagaaccgtgtcctgatgccgcatcccttctcgcgagtaagcagtctcccgagtgcgagaatttcctggacgtgggactaggtcgagaatgtacttcaaaacagggcgtcctgaagcgagaatccggaagtgacagcgacctcttccacagtccttccgatgacatggactcaattatatttcctaagccagaggaagaacacctcgcctgcgacattacaggctcttcttcttccacagatgatactgcttcactcgatagacattcaagccatgggagtgacgtcagcctgtcacagatcttgaagcccaaccgcagcagagaccggcagtctctggatgggttttactcccatggcatgggggccgagggccgcgagtccgagtctgagccagccgacccaggcgacgtggaggaggaagaaatggactccattaccgaggtgcctgcaaactgctcagtcctgcgcagctccatgaggtctttgagccccttcagaaggcactcctggggccccgggaagaatgcagcatctgacgctgagatgaatcaccgttcgtctatgagagtactgggagacgtggtacggagaccgccgatacacaggcggtcctttagtcttgaaggcttgactgggggagccggcgtgggcaataagccaagcagttctctggaagtgagtagtgctaatgcagaagagctgagacacccgttctctggggaggaaagggtcgactctcttgtgtcattgtcagaggaagacctcgagagcgaccagagagagcataggatgttcgatcagcaaatctgccatagatcgaaacagcagggcttcaattactgtacatcggccatcagctccccattaaccaaatcaattagtctcatgacaatcagccaccctgggctcgataactctcggccctttcatagcaccttccataacacctctgccaatctcaccgagtcaattacagaggaaaattacaactttctcccgcacagccctagtaagaaggactccgagtggaaaagtgggactaaggtctcacggacattctcatacatcaaaaataagatgtcttcctccaagaaatctaaagaaaaggagaaagagaaagacaaaattaaagagaaagagaaagattctaaagataaggaaaaagacaaaaaaacggttaatggccacacattcagctctattcccgtcgtggggcctatatcctgcagtcagtgtatgaagcctttcactaataaagatgcttatacttgtgctaactgctcagcattcgtccataaggggtgtagagagagtctggcatcatgcgcaaaagtcaagatgaaacagcctaagggtagcttgcaggcgcacgacacatcctccctgcccactgtgattatgagaaataagccatcccagccaaaggagagacccagatccgcagtccttctggtggatgagacagctaccacccccatatttgcgaacagacgatctcagcagagcgttagtctcagtaagtcagtcagtatacaaaatatcaccggagtcgggaacgatgaaaacatgtccaacacctggaaatttctgagccattcaacagactccctcaacaaaatcagtaaggtcaatgagtctacagagtcgctgacggacgaaggggtgggcaccgatatgaacgaaggccaacttcttggggatttcgagattgaatcaaaacagttagaagcagagtcctggtcaaggattattgattctaaattcctgaaacaacagaagaaagacgtagtcaaaagacaggaagtcatctatgagcttatgcagaccgagtttcaccatgttaggaccctcaagattatgagtggggtatattcccaggggatgatggccgatctcctgttcgagcagcagatggttgagaagctgttcccttgcctggacgaactgatttctattcactctcagttcttccagaggattctggaacgcaagaaagagtctctggtagacaagtcggagaagaactttctgatcaagcgcattggggacgtgctcgtgaaccaattcagcggcgaaaatgcagagcgtttgaaaaagacctatggcaagttctgtggccaacacaatcagtccgttaactacttcaaggatctgtatgccaaagataagaggttccaagcctttgtgaagaaaaagatgagctcctcagtcgtgaggagattgggcattccagaatgcatattgctcgtcacacagagaatcaccaagtaccctgtgctgtttcagaggatacttcagtgtacgaaagacaatgaggtcgaacaggaagacctcgcacagagcttgtccctcgtgaaagatgtaattggcgccgtggattcgaaagtggcctcctatgagaaaaaagtgaggttaaatgaaatttatacaaagacagatagtaagagcataatgaggatgaagtccggacagatgtttgctaaggaggacctcaagcgcaagaaattagtaagggatggcagtgtttttctgaagaacgcggccggtcggcttaaggaggtgcaggcggtgctgcttacagacatcctcgtgttcctccaggaaaaggaccagaagtacatcttcgcatcactcgaccaaaagtctaccgtgattagcttaaaaaaactgattgtgagggaggtggcacatgaggagaaaggcctctttctgatttcaatgggtatgaccgaccccgaaatggtagaggtgcacgcatctagtaaagaagagcggaacagttggattcaaatcattcaagacaccatcaacacattgaacagagacgaagacgaaggtatccccagcgaaaacgaggaagagaagaagatgctcgacacccgggcgagggaacttaaggagcaattacaccagaaagatcagaaaattctcctgctgctggaagaaaaggagatgatttttcgggatatggcagagtgctctactcccctccctgaagattgctcccccacgcatagtccacgcgtgctgtttcggtctaatacggaagaagctttgaaaggcgggcctcttatgaaatctgcgattaacgaggtcgagattctccagggccttgtttcaggcaacctggggggcacattaggtcccaccgtgagctccccaatagagcaggacgttgttggccccgtaagtctaccacgcagggcagaaactttcggtggatttgattctcaccagatgaacgcctccaagggaggagaaaaagaagagggagacgacgggcaggacctgcgacgcaccgagtctgactccggacttaagaagggcggcaacgctaacctagtcttcatgctgaaacggaatagtgaacaggtcgttcaaagtgtcgttcatctctacgaactgttatccgctcttcagggcgtcgttctgcagcaggacagctacatcgaagatcagaagttggtgttatctgagagggccctgactagaagcctgagccggccctcgagtctgattgaacaggaaaaacaacggtctctggaaaagcagcgccaggatctggctaacctacagaagcagcaggctcaatacctcgaagagaaacgtcgacgcgaacgggaatgggaagccagggaacgagaactgcgggagcgggaagccctgctggcacagagagaggaagaggtacagcaggggcagcaggaccttgagaaagagagggaggaactacagcagaagaaggggacctaccagtacgacctcgaacggctgcgcgctgcgcagaaacaactcgaacgagaacaggagcagttgcggagagaagcagaacgactgagtcaacggcagactgagcgcgatctttgccaggtttcccatcctcatactaaactaatgagaatacctagcttctttccgagtccagaagagcccccctcacctagcgccccgtctatagccaagtccggatccctagattctgaactttctgtgagtcccaaaaggaactctatcagcagaacacataaagacaagggtccttttcacatcctgagtagcacttcacaaaccaacaaaggtcctgagggacagtcgcaggctcctgcctctacatcagcctccacgcggctctttggactgacgaagcctaaggagaagaaggagaaaaaaaagaagaataagaccagtcggagccagccaggcgacggccccgcctctgaggtgagcgctgaaggcgaagaaattttctgctag

SEQ ID NO: 106674 - DNA, 1245 bp, synthetic construct
  misc_feature 1..1245: note = Description of Artificial Sequence: Synthetic coding sequence
  source 1..1245: mol_type = other DNA
atgtcgaacacctggaaatttttgtcgcatagtactgattccctcaataagatttccaaggttaacgaatccacagagagtctgaccgacgaagggaccgatatgaatgagggccaactgttgggcgattttgagatcgaatccaagcagttagaagcggaatcctggagcaggattatagattcaaaattcttgaagcaacaaaaaaaagatgttgtcaaacgccaggaggtcatatatgaacttatgcagaccgaattccatcacgtgcggaccctgaagatcatgagtggagtttacagtcagggaatgatggcagatctgctctttgagcaacagatggtggaaaaacttttcccgtgcctcgacgagctaatatcgattcactcacagttctttcagcggatactggagcggaagaaggaaagcctcgtggacaaaagcgagaaaaatttccttattaaacggatcggggatgtcctggttaatcagttctctggcgagaacgccgagagactgaagaagacgtacggtaaattttgcgggcagcacaatcagtctgtaaactattttaaggatctctatgctaaagataagagattccaggccttcgtgaaaaaaaaaatgtcatccagtgttgtgaggagactgggaatccctgaatgtatactgcttgtgacacaaagaattactaagtatcctgtgctcttccaaagaatactccagtgcacaaaagataatgaagtggaacaggaggacctggcacagtccttaagcctggtcaaggatgtgattggcgcagttgactcgaaagtcgctagctacgagaagaaagtgcgtctaaatgagatttacaccaagaccgatagcaagagcattatgagaatgaaatccggtcagatgtttgccaaagaagacctcaagagaaagaaactggtgcgagacggtagtgtgtttcttaagaatgctgccggccgactcaaggaagttcaagctgttctgctgaccgatattctcgtattcctgcaggagaaggaccaaaaatacattttcgcttctctagaccagaagagtacagttattagcctaaagaaattgattgttcgggaggttgcacatgaggagaaaggactttttctcatctccatgggcatgacggacccagagatggtggaggtgcacgcctcatccaaggaagagaggaatagctggatacagatcattcaggacacgataaacacctag

SEQ ID NO: 106675 - DNA, 1158 bp, synthetic construct
  misc_feature 1..1158: note = Description of Artificial Sequence: Synthetic coding sequence
  source 1..1158: mol_type = other DNA
atgtatgagaggcacaagcggcggtattctctatgcgacatatctaaagttgataggaccgtggacgtcgtcctcctgaagattaatagggagaattggtgcaccatagaaccctgtcccgatgctgcgtctctacttgcctccaagcagagcccagagtgtgagaactttctggatgtggggctgggcagagagtgcactagcaagcagggggtgttgaaaagagaaagcggatctgactccgacctctttcactcgccttctgatgacatggactcaataatcttccccaaacctgaagaggaacacctcgcttgcgatatcacaggttcttcatcttcgaccgacgacaccgcttccctggatcgccactccagccacggctcggacgtgtccctgagtcaaattttaaagcccaacaggtcccgagatcgccaatccctggacggattctacagtcatggaatgggagccgaggggcgggagagcgaatctgagccggctgatcctggtgacgttgaggaggaggaaatggattcaatcacagaagtgcccgcaaattgcagtgtgctgagaagctcaatgcggtcactgtccccatttcggaggcattcatgggggccaggtaaaaatgctgcatctgacgctgagatgaaccatagaagcttttccttggagggtctaacgggaggagccggagtcgggaataaaccttctagcagtctggaagtttcttcagctaatgctgaagaactccggcaccccttctcgggggaagagagggtcgattccctggttagcctgtcggaagaagatcttgaaagtgaccagagagaacacagaatgttcgatcagcagatctgccaccgttctaagcagcagggattcaactactgtacaagcgctatctcatctccccttacgaagtcaatcagcctgatgactatatcccaccctgggttggataattcgaggccctttcatagcacttttcataataccagcgctaacctgaccgagtctattaccgaggagaattataacttcctcccccactccccctctaaaaaggacagcgagtggaagtcagggactaaagtgtctagaactttcagttacataaaaaacaaaatgtcaagctccaagaagtctaaatag

SEQ ID NO: 106676 - DNA, 8379 bp, synthetic construct
  misc_feature 1..8379: note = Description of Artificial Sequence: Synthetic coding sequence
  source 1..8379: mol_type = other DNA
aagctgctggagaagcagccacctattgaaggtgactgtgtggtgaccgtcctgcttgccgaggaagacaaagccgaagatgacgtagtgttttacctggtcttcttaggctctacactgagacattgtacctctacccggaaagttagcagcgatacattagagaccattgcacccggccacgattgctgcgagacagtgaaggtgcagttatgtgcgtccaaggagggccttcccgtatttgtggtcgccgaggaagactttcatttcgttcaggatgaagcctacgacgctgctcagtttctcgctacctctgctggaaaccaacaggccctgaattttaccaggttcctcgaccagtccggcccgccctctggggatgtcaactcgctggacaagaaactggtgttggcttttcggcacctgaaacttcctaccgagtggaacgtgttaggtactgaccagagtctgcacgatgctggacctagggagaccctcatgcacttcgccgtaaggctggggctactgcgcctaacgtggtttttactacagaagcctggagggcggggagccctttcaatccataaccaggagggggccaccccagtttccttggccttagaacgaggttaccataaactccaccaactactgactgaagaaaacgctggagagccggactcctggtcaagcctttcctatgaaattccttacggcgactgctctgtgagacatcatagagagcttgacatctataccctaacaagcgagtctgacagccaccacgaacacccattcccgggcgatggctgcaccgggcctattttcaaacttatgaacattcaacagcagttgatgaagaccaacctgaaacaaatggacagcttgatgccattgatgatgacagcgcaagacccatccagtgcgcccgaaaccgacggtcagtttttgccttgcgctcctgaacccaccgatccccagagactctcatctagcgaagagaccgaatccacccagtgctgccctggcagtcctgtcgcccaaacggagtcaccttgtgatttaagttcgattgtggaggaagaaaataccgaccgttcatgccgtaaaaagaacaaaggagtcgagcgaaaaggcgaggaagtcgaaccagctccgatcgtggacagtggcactgtgtcggaccaagatagttgcctccagagtctccccgattgcggcgtgaagggaaccgaggggctctctagctgtggcaaccgcaacgaggagaccgggactaagtcctctggcatgcctacagatcaggagtccctgtcttcaggagatgctgtcctgcaacgcgacttggtgatggagcctgggaccgcgcaatatagctccggaggagagctgggcggaataagcacaaccaacgtttctactccggacacggccggggaaatggaacacggtttgatgaatccagacgcaactgtctggaagaacgtgctgcagggcggcgagtcgactaaggaaagatttgagaatagtaatatcggcactgcgggagccagcgatgtacacgtaacctctaagcccgtggataagatctccgtccccaactgcgcccctgccgcatcctccctggatggcaacaaaccagctgagtcgagcctcgccttcagcaacgaggaaacctcaactgaaaagaccgctgaaaccgaaacatctaggtctcgagaagaaagtgctgacgccccggttgatcagaattccgtggtaatcccagccgccgccaaagataagatcagtgatgggctcgagccttacactctccttgccgctggtataggagaagctatgtcgccgtccgatctggccctcctaggtctggaggaagatgtgatgcctcaccagaatagtgagaccaattcctctcacgctcagtcccagaaaggcaaatccagccccatttgctcaaccaccggtgacgacaagttatgcgctgattccgcctgccagcaaaacaccgttacatctagtggcgacctcgtggctaagctctgcgacaacatcgtatcagaaagtgagagtaccactgccaggcagcccagttcacaggatcccccggatgcgtcacactgcgaggatcctcaggcacatacggtcaccagcgaccctgttcgggacacccaggaacgtgccgatttctgcccttttaaggttgtggataataaaggtcagagaaaggacgtgaagctggacaagccgctgacaaacatgctggaagtagtgagtcacccgcacccagtggtgccgaaaatggaaaaagagctagtgcccgatcaggcagtcatctcagattccactttcagcctcgccaacagtccaggatcagagtcggtgaccaaggatgacgctctgagctttgtacctagccaaaaggaaaaagggaccgctacacctgagcttcatacagctacagactacagggacgggccggacggaaattctaacgagccggacactaggccgctcgaggatcgcgcggttggccttagtacttcctccaccgctgccgagcttcaacatggcatgggcaatacttcactcaccggactcggtggagaacatgaggggcctgcgccaccagcaattcccgaggcactgaacatcaagggaaataccgacagcagcctgcaatccgtaggaaaggccacacttgccctcgatagcgtgttgaccgaagagggcaaactactggtggtgtccgaaagcagtgctgcccaggagcaggataaagacaaagccgtgacatgttcatcgatcaaggaaaacgctctgtcctccgggacgttacaagaagaacagcggaccccaccacctgggcaggacacacaacagtttcacgagaagtccattagcgccgattgtgcgaaagacaaggccttacagctgtcgaattcgccaggcgcctcctcggccttcctaaaggccgaaacagagcacaataaggaggttgcccctcaggtgtcactgcttactcaagggggagccgctcagagtttggtgccacccggcgcgtctctcgctactgagagtagacaggaggcccttggagcagagcacaacagttccgcccttctgccttgtctgctgccagacggtagcgatggcagcgacgcactcaattgttctcagccatcccctttagatgtgggcgtgaaaaacacccagagccagggcaaaacttcagcgtgcgaggtgagcggcgatgtgactgtggatgtgaccggggtgaatgctctccaaggtatggccgagccccggagggagaacatcagtcacaatactcaggatatcctgatccctaatgtgttgttgagtcaggagaaaaatgcagtgttgggactgcctgtggccctgcaagataaggcagttaccgatcctcagggcgtggggaccccagaaatgatccccctggattgggaaaagggcaaactagagggcgcagatcactcctgcacaatgggggatgccgaggaggcccagattgacgatgaagcgcatcctgtgctgctacagcctgtggctaaagagctgcccactgacatggaactgtccgctcacgacgacggtgctcccgccggggtgcgagaggttatgcgagcccctccgtctgggcgggagcgcagtactccttccctcccgtgtatggtctctgcccaagatgcccctctccccaagggcgccgaccttattgaggaagcagccagcaggattgtggatgccgtgatagagcaggtcaaggcagccggagctctgctcaccgagggggaagcatgtcatatgtcactgtccagtccggaactcggccctctgaccaaggggctggagtccgccttcaccgagaaggttagcactttccctcctggagagtcactgcctatggggtccaccccagaagaagccacaggaagcctcgccggatgctttgccggacgggaggagcctgagaaaattatcttgcccgtgcaggggcctgagccggccgccgaaatgccagatgttaaagccgaggacgaagtcgactttcgcgccagtagtatctcagaggaggtggcagtcgggagtatcgcagctacactcaagatgaaacagggacctatgactcaggcgataaatcgcgagaattggtgcactattgaaccttgtcccgatgccgcctccctgctagcctctaaacaaagtcccgaatgcgaaaacttcctggacgtggggcttggtagagagtgtacgagtaagcagggggtgctgaaacgcgagagcggaagcgactctgatctgttccacagtccctctgacgatatggactctattatcttccctaagcccgaggaggaacatctagcctgcgatattactggatcgtcgtctagcacagatgacacagcgagcctggatagacactctagccacggctcagatgtgagcctctcgcagatactcaagcctaacagatccagagatagacaatctcttgacggattttattcccacgggatgggtgccgaaggtagggagagtgagtccgaaccagcagaccccggtgatgttgaagaggaggagatggacagtataactgaggtgcccgctaattgcagcgtactccgctcatccatgagatccttatctccttttcgacgacatagctgggggccggggaagaatgccgcctccgacgctgagatgaatcaccggagcttttccctcgagggactgacaggaggcgcaggggtgggtaataagccatcaagttctttagaggtatcgtcagcaaacgctgaggagcttagacatcctttttctggagaggagcgggttgattccttagtcagtttaagtgaggaagacctcgagtctgaccagcgcgaacatcgcatgttcgaccagcaaatctgtcaccgttctaaacagcagggcttcaactactgcacttctgcaatttcatcacctctcacaaagtcaatcagtctgatgactatcagccacccggggctagataacagtcggccatttcattctacctttcataacacttcagctaacctaaccgagtcaatcaccgaagagaactacaatttcctgccacatagtccctctaagaaagactcagagtggaagagtggtacgaaggtgagcagaactttctcatatatcaagaacaagatgtcgtctagtaagaaatccaaggagaaggagaaagagaaggacaaaatcaaagagaaggagaaagactcaaaagacaaggaaaaagataaaaagaccgtgaacgggcatactttttcatccatcccagtcgttggccctataagttgtagccagtgcatgaaacccttcactaataaagatgcctacacgtgcgccaactgctccgccttcgtgcataaagggtgcagggagagtcttgctagctgcgccaaagtaaagatgaagcaacccaagggaagtttgcaggcacatgatacatctagtttgcctacagtgatcatgagaaacaaacccagccaaccaaaggagaggcctaggagcgctgtgctgcttgtggacgagactgccactactccaatttttgccaaccggcgctcacagcagagtgtctctttgtccaagtcggtcagtattcagaacattactggagtgggaaatgatgagaatatgtctaacacatggaaatttctgagtcactctactgatagtttaaataagatcagtaaagtgaatgaatccactgaatctctcaccgacgagggcactgacatgaacgagggacagctgctgggagatttcgagattgagagcaaacagctggaggccgaatcctggtcccgaatcatagatagcaaattcctgaagcagcagaaaaaagacgtcgttaagagacaggaggtaatctatgagcttatgcaaactgaatttcaccacgttcgtactctgaagattatgagtggagtctactctcaggggatgatggccgacctgctcttcgaacaacagatggtggagaagctgttcccttgtcttgacgagctgatatccatccactctcagttcttccaaaggatcctcgaacgcaaaaaagagtccctagttgataagtctgagaagaacttcctgatcaagcgcataggcgacgttttggtgaatcagtttagcggagagaatgccgagcgactgaagaagacttacggcaaattttgtggccaacacaatcagtctgtcaattactttaaggacctgtatgctaaggacaagcgattccaggcatttgtaaagaagaagatgtcttcttctgttgtgaggcgactaggtattccagagtgtatcttgctggtaacacagcgtataacaaaatacccagtgttgtttcagcgaattctccagtgcaccaaggataacgaggttgagcaagaggatcttgcccagtcattgtcgctggtgaaggacgtgataggagccgtggatagcaaagtggcatcttacgaaaaaaaggtgcgcctgaacgagatttacactaagacagattcaaaaagtattatgcgaatgaaatctggccagatgttcgctaaggaggacttaaaacggaaaaagcttgtcagagacggtagcgtgttcttgaagaacgccgcagggcgcctgaaggaagtgcaggcagtactgctcaccgatatcctcgtcttcttacaagaaaaagaccaaaagtatatctttgctagtctcgaccagaagtcgacagttatcagcctcaaaaagctgatagtgcgggaggtagcccatgaggaaaaaggcctgttcctaatcagtatgggaatgactgatcccgaaatggtggaagttcatgcttcctctaaagaagaaaggaactcgtggatccagattatccaagatacgatcaataccctcaacagggatgaggacgaggggatcccctcagagaacgaggaggagaaaaagatgctggacactagggcccgcgaattgaaggaacagcttcaccagaaagatcagaagatcttactgctcctcgaggagaaagagatgatctttcgagatatggctgaatgttcaacacctctccccgaagattgttcccccactcacagcccaagggttctatttagatcaaacaccgaggaagccttgaaaggaggtccactgatgaagtctgcgattaatgaagtggaaatcctgcagggactggtgtcaggtaatctaggtgggaccttgggcccaactgtgtcaagtcctatcgagcaggacgtggtcggtcccgtttctctgcctaggcgcgcagagacctttggaggcttcgactcgcaccagatgaatgcttccaaaggaggggaaaaagaggaaggggatgatggccaggacctgcggcgtaccgagagtgactctggattgaagaagggcggaaacgctaacttggtcttcatgctgaagcgaaactcagagcaggttgtgcagtcggtcgttcatctttatgaactgctgagtgctctccagggagtcgttcttcagcaagattcgtacatcgaggaccagaagctggtacttagcgagcgtgctcttacccggtcactctcaaggccgtcaagcttaatcgaacaggagaagcagcggtctttggagaaacaaagacaagacttagccaacctgcagaagcaacaggctcagtatctggaggaaaaacgcaggcgggaacgggaatgggaggctcgagaaagagagctgagagaacgagaggcactcttggcccagcgcgaggaagaggtgcagcagggccagcaagacctcgagaaggaacgggaggaattgcagcagaaaaaaggaacctatcagtacgaccttgagagactgagagcagctcagaaacaattggaacgggaacaggaacagctgaggagagaagcagagaggctttcccagcgccagaccgagcgggatttgtgtcaggtgtctcatccccacaccaaactgatgcgcatcccctctttctttccttccccggaggagccaccaagcccctctgcaccttcaattgcgaaaagcggcagcctggattccgaactgagtgtgagtccgaaacgcaacagcattagccggacacacaaagacaaggggcccttccatatcctttcttccacttcgcaaaccaataagggtcctgaaggacagtcgcaggccccagctagcacttccgcgtccacacggttatttggcctcacaaagccaaaagagaagaaggaaaagaagaaaaagaataagactagtaggtctcagcccggcgacgggcctgccagtgaggttagtgccgagggggaggaaatcttctgttag

SEQ ID NO: 106677 - DNA, 5238 bp, synthetic construct
  misc_feature 1..5238: note = Description of Artificial Sequence: Synthetic coding sequence
  source 1..5238: mol_type = other DNA
atgaagctgaatcctcagcaggcacccctctacggggattgcgtggtgactgtcctgctggccgaagaagacaaggccgaagatgatgtggtgttctatctggtcttccttggatcaaccctgagacactgcacatccactcggaaggtctcctctgacaccctggagacaatcgccccaggtcacgactgctgcgaaaccgtgaaagtgcagttgtgtgcaagtaaggaagggctgcctgtgttcgttgtcgcagaggaagacttccacttcgtccaagatgaagcctatgatgccgctcaatttctagcaacatctgctggaaatcagcaagcactgaatttcacccggttcctcgaccagtcaggtccaccttccggtgatgtgaactctctggacaagaaactggtgctggcctttcgccacctgaaactcccaacagagtggaatgtgctgggcacagaccaaagccttcacgacgctgggccgcgggaaacattgatgcacttcgccgtaaggctgggcctgctgcgactgacctggttcctgctccagaaacctggagggcggggcgccctctccatccataaccaagagggagcaacaccagtgtctctggcattagagcgggggtatcataaacttcaccaattgctgaccgaagaaaacgcaggagagccagactcatggagctcgctgtcctacgagattccatacggcgactgtagtgtccgccatcacagggagctggatatctacacattaactagcgagtccgattcgcaccatgagcatcccttccccggcgacgggtgcaccgggcctatctttaaactcatgaacatccagcaacaactgatgaagactaatctgaagcagatggattcactcatgccgctaatgatgactgctcaggatccttcatccgcccccgagaccgacggtcaatttctgccttgtgcccctgagccaaccgatcctcagcgactgtcttccagcgaggagactgagagtactcagtgctgccctgggtccccagtggcccagacagaatccccctgcgaccttagctcgattgtcgaagaggaaaatacagacagatcgtgccgaaagaaaaacaagggagtggagcggaagggcgaagaggtggaacctgctccgatcgttgactccggcacagtctctgatcaggacagttgcctgcaaagtctcccggactgcggtgtgaaagggaccgaaggcttgagctcttgcggaaaccgcaacgaggagacaggcaccaaatccagtggaatgccaacagaccaggagtctcttagcagtggagatgcggtgctgcagagggatctagtcatggaacctggtaccgcacagtactcctctggcggagagctcggggggatttctaccaccaatgtgagtacccccgacacagccggagaaatggagcacggcctgatgaatccagacgccactgtctggaaaaacgtcttgcagggcggagagtctactaaggaaagattcgaaaactcgaacatcggtaccgcgggcgcctccgatgtgcacgttacttccaagccagttgacaaaatctctgtgcccaactgcgcaccagccgcttccagccttgatggaaacaaacctgcggaaagcagcctcgccttctcaaatgaagaaaccagcaccgagaagactgcagagaccgaaacatctagaagtcgggaggagagcgccgatgccccagttgaccagaactcggtggtcataccagcggcagctaaagacaaaattagtgacggcctcgaaccgtacacactgctggccgcaggcattggggaagctatgtctccttccgatctggctctgctggggttagaggaggacgtaatgccgcatcagaactcagaaaccaattcttctcacgcccagtcccagaaaggcaagagcagccctatctgttctactacgggcgacgataagctgtgcgccgacagtgcctgccagcagaatacggtcacatcatcgggcgatctcgtggccaaactctgcgataacattgtgagtgaatccgagagtacgacggcaagacagccatcctctcaagatcccccggatgcatcccactgtgaggatccccaggctcacactgttacctctgatcccgtgcgggacacacaggagagagctgacttttgtccatttaaagtggttgataacaaagggcagagaaaggacgtgaagctcgacaaaccgctgaccaacatgctggaagtggtttcgcaccctcatccagtcgtacctaaaatggagaaagagctggtccccgaccaagcagtgatcagcgactcaacattctccctggcaaattcccccggttcggagagcgtgactaaggatgacgcacttagcttcgttcccagccagaaggaaaaaggtaccgctacacccgagctgcatacagctaccgactatcgcgacggacctgacggcaattccaatgaacctgacaccaggccactggaggatcgtgcagtggggctgagcacctcttccacagctgccgagttgcaacacggcatgggtaatactagcctgacagggctgggcggggagcacgagggcccagcccccccggcaatacctgaagccctaaatattaaaggaaacaccgattcctctctgcagtcagtgggtaaggctaccttggccctggacagcgtacttactgaagaaggaaagctgctggtagtgtctgaatcaagcgcagcgcaggaacaggataaagacaaagccgtaacatgctccagcattaaagaaaatgcactgagtagcggtactctgcaggaagagcagcgaacaccaccacctggacaggatacccagcagttccacgaaaaaagcatttctgccgactgcgcaaaggataaggctctccagctatctaattcccccggtgcaagcagtgctttcctgaaagccgagacagagcataacaaggaggtcgccccgcaggtttccttgctgacgcaaggtggagcagctcaaagcctcgtgccccccggtgcgtctctggctaccgagagcaggcaggaagccttgggggctgaacataacagcagcgccctcctcccgtgtctccttcccgatggcagtgacgggagcgacgcattgaactgttcacagccttctccgctcgatgtcggtgtgaagaatacccagtcccaagggaagacatcagcctgcgaagtgtccggcgatgttaccgtcgacgttactggggtgaatgccctacagggaatggccgagcctagacgggaaaatatctctcataacactcaagacattttgatacctaatgtgttactgagccaagagaagaacgccgtgctcggactccctgtggccctgcaagacaaggccgtgacagaccctcagggcgtgggaaccccagagatgatacctttggactgggagaaggggaagctggaaggcgctgatcactcgtgtaccatgggcgacgccgaagaggcgcagatcgacgacgaggcccaccccgtccttctgcagccagtcgcaaaggagctgccgactgatatggagttgagtgcacatgacgatggagcccctgccggggtgcgggaagtgatgagggccccaccttctgggcgtgaaagatctacaccttccctgccctgcatggtgtccgcccaagatgccccactgcccaagggtgcagacctcattgaagaagctgcctcccggatcgtcgacgctgtgattgaacaggtgaaggcagccggagctctgctgaccgagggtgaggcttgtcacatgagcctgagtagtccagagctaggacccctcacaaagggtttggaatccgccttcaccgagaaagtgtccacctttccaccaggtgaaagcctgcccatgggatctacgccggaagaagcgaccggcagcctggctgggtgcttcgccggccgagaggagcccgagaagatcatcctgcctgtgcaggggcccgaaccggccgcggagatgcccgatgtgaaagcagaggacgaggtcgactttcgggccagtagcattagcgaggaagttgcagtgggcagtatcgctgcgacacttaagatgaaacaggggcctatgacgcaggcaatcaaccgcgagaattggtgcaccatcgaaccttgccccgatgcagcttccctgctggcatctaaacagagcccggaatgcgaaaatttcttggacgttggactgggcagagagtgcactagcaaacagggcgtgctgaagagagaatccggaagcgattccgacctgttccattcaccctccgacgacatggattccattatattccccaaacccgaggaagagcacttggcctgtgatatcacgggtagcagctcatctacagatgacacagctagcctcgaccgccactccagtcacgggtccgatgtgagcctgtcccagatcctgaaacccaatcgaagtcgcgatcgacagtctctggatgggttctatagtcacgggatgggtgccgaagggcgcgagtctgaaagcgaaccagcagatcccggggacgtcgaggaagaggagatggacagcattacggaagtgcctgctaattgctccgtgctacgtagctctatgcgctctctcagcccctttcggaggcactcttggggtccagggaaaaatgctgcatcagacgcagagatgaaccaccgatccttcagtctcgaaggactgacaggaggtgctggcgtgggcaataagcccagttcctctttggaagtgtcatcagccaatgcagaggaactccgacaccccttttcaggagaagaaagagtcgactcactggtcagccttagcgaagaagacctggagagtgaccagcgggagcaccgcatgttcgaccagcagatctgtcaccgatctaaacagcagggcttcaattattgtacgtctgcgatcagctcccctttgacaaagtctatttcccttatgaccatcagtcaccctggtctggacaattcccgcccattccactccacttttcacaatacgagcgctaacctgactgaatcaatcacagaggagaattataacttcctgcctcattctccttcaaagaaggattcggaatggaagtctggtaccaaggtgtctcggacattttcctatattaagaacaagatgtcaagctcaaagaagtcaaaatag

SEQ ID NO: 106678 - DNA, 828 bp, synthetic construct
  misc_feature 1..828: note = Description of Artificial Sequence: Synthetic coding sequence
  source 1..828: mol_type = other DNA
ccatccgatgacatggacagcataatcttccctaagcccgaggaggagcatcttgcatgtgatattacaggcagcagcagctctactgatgataccgccagtctcgatcgacattcttcccacggatccgatgtttccctctctcagatccttaagcctaaccgctcgcgcgatagacagtctctggatggcttctactcccacgggatgggcgccgaaggccgggaatccgaaagcgaaccggcggaccctggagacgtggaagaggaggaaatggactcgattacagaggtgccagcaaattgctctgtgctgagatccagcatgcggtctctttctcctttccgaaggcattcttggggacccggaaaaaacgctgcatcagacgccgagatgaatcaccggagtagcatgagagtgctgggagatgtggtcaggcggcctccgatccacagaaggagcatgtcatggtgtccatctggagtgcagtactccgcagggctgtccgcagactttaattataggtccttctccctggagggacttactggtggggcgggcgttgggaacaagccatcctccagcctcgaggtatcaagtgcaaacgcagaagagctccgccacccgttctcaggcgaggaacgcgtggacagccttgtttctttgtccgaagaggatctggagagtgatcagcgggaacatcgcatgtttgaccagcagatttgccatagatctaagcagcagggatttaactactgtacttccgccatctcttcccccctgactaagtcgatctcactcatgacgataagccaccctgggttatag

SEQ ID NO: 106679 - DNA, 117 bp, synthetic construct
  misc_feature 1..117: note = Description of Artificial Sequence: Synthetic coding sequence
  source 1..117: mol_type = other DNA
atgaagctcaatcctcagcaagcccctttatacggcgattgcgtcgtaactgtgttgctggccgaagaagataaagccgaggatgacgtggttttttatctggtctttctgggatag

SEQ ID NO: 106680 - DNA, 540 bp, synthetic construct
  misc_feature 1..540: note = Description of Artificial Sequence: Synthetic coding sequence
  source 1..540: mol_type = other DNA
atgaagctaaatccacaacaggcgcctctgtatggcgattgcgtagtgacagtgctgctagccgaagaggataaggctgaggacgacgttgtgttttatttggtgtttctggggagcacgctgcgacactgtacctctacaagaaaagtcagcagtgacacactggaaaccattgcaccgggtcacgactgttgcgaaaccgtgaaagtacagctgtgcgcctccaaggagggtctgccagtgttcgtcgtcgccgaggaggactttcacttcgtgcaggacgaggcttacgatgcggcccaatttttagctacctcggctggaaaccagcaagcgctcaacttcactcgatttctcgaccagagcggtcccccatcaggcgacgtgaacagcctcgacaagaaacttgtactggcttttaggcacctcaagttgcctaccgagtggaacgtgctgggtactgatcagagcctgcatggcgagaatctgtacgacctccagacacacttcaagttcgtgatatttctcttgttcttctag

SEQ ID NO: 106681 - DNA, 414 bp, synthetic construct
  misc_feature 1..414: note = Description of Artificial Sequence: Synthetic coding sequence
  source 1..414: mol_type = other DNA
atgtcagaaacccagaacagtacatcccagaaggccatggatgaggataataaagccgcttcacagaccatgcctaacacgcaggataagaactatgaagatgagctgacccaggttgccttggctcttgtcgaggatgttattaactatgccgtgaaaatcgtggaagaggagcgtaatcctctgaaaaacatcaagtggatgacccacggggagtttactgttgaaaaagggttgaaacaaatcgatgaatatttctcggatgctcctatagtggtctcttacgttggggatcaccaggctctggtgcaccgacccgggatggtcaggtttcgggagaattggcaaaagaacttaaccgacgcgaaatactctttcatggagagcttcccgtttctattcaatcgggtttag

SEQ ID NO: 106682 - DNA, 270 bp, synthetic construct
  misc_feature 1..270: note = Description of Artificial Sequence: Synthetic coding sequence
  source 1..270: mol_type = other DNA
atgtctgagacccagaactcgacaagtcagaaggcaatggatgaggacaacaaggccgccagccagacaatgccgaacactcaggataagaactatgaagatgaactaacccaggtcgctcttgctttagttgaggacgtgattaattacgctgtgaaaatagtggaggaggaacgcaatcccctgaaaaacatcaagtggatgacccatggggaatttacagtggaaaaagggttaaagcagatcgacgagtatttttccgtgtcttag

SEQ ID NO: 106683 - DNA, 417 bp, synthetic construct
  misc_feature 1..417: note = Description of Artificial Sequence: Synthetic coding sequence
  source 1..417: mol_type = other DNA
atgtcagaaacacagaatagtacctctcaaaaagcgatggacgaagataacaaggcagcttctcagacaatgccaaatacacaggataaaaattacgaagatgagctgacccaggtagccctggcactggtggaagacgtgatcaactatgccgtgaagattgtggaggaggagaggaatcctctcaaaaacatcaaatggatgactcacggcgagtttactgtggagaagggactgaagcagattgacgagtactttagccccgatgcgccgattgttgtgtcatatgtcggtgaccatcaggccctggtgcatcgcccaggcatggtacgattcagagaaaactggcaaaagaatctgaccgatgccaaatactcatttatggaatcctttcccttcctatttaatcgcgtttag

SEQ ID NO: 106684 - DNA, 414 bp, synthetic construct
  misc_feature 1..414: note = Description of Artificial Sequence: Synthetic coding sequence
  source 1..414: mol_type = other DNA
atgagtgagacacagaactccacgagtcaaaaagcaatggacgaagacaataaggctgcaagccaaactatgcccaacacacaagacaagaactatgaggacgagctcacacaggtggccctcgccttggtggaggacgtgatcaactatgcagtgaagatcgttgaggaggagagaaatccgctgaaaaacatcaagtggatgacccacggcgaattcacagtcgaaaaaggcctgaagcagatcgacgaatattttagtgacgcccccatagttgtgagttatgtgggcgatcaccaggcgcttgtgcatcgaccagggatggtgcgatttcgcgagaactggcaaaagaatctgactgacgcgaagtacagtttcatggagagcttccccttcctctttaacagagtgtag

SEQ ID NO: 106685 - DNA, 594 bp, synthetic construct
  misc_feature 1..594: note = Description of Artificial Sequence: Synthetic coding sequence
  source 1..594: mol_type = other DNA
atgtctgagactcaaaactctacttcccagaaggcgatggatgaagacaacaaggccgctagtcagacaatgcccaatactcaagataaaaattatgaagacgaattgacccaggtggctcttgctttagtggaggatgtgatcaattacgctgtgaagatagtggaggaagagcggaatcccttgaaaaacattaaatggatgacacatggagagtttaccgttgaaaaagggcttaagcagattgacgagtacttttccaagtgtgtctctaagaagtgctgggcacatggagttgagtttgtggaaagaaaggacctaatccacagttttctgtatatatactatgtgcattggtcgatctctacagccgatctccctgtcgccaggattagtgccggaacatacttcacaatgaaggtttctaaaactaaaccaccagacgcacctattgttgtttcttatgtaggagaccatcaggctctggtacaccgcccaggcatggtacgttttcgcgagaattggcaaaaaaacttaacagacgcaaagtattccttcatggaatcatttcccttccttttcaacagagtgtag

SEQ ID NO: 106686 - DNA, 270 bp, synthetic construct
  misc_feature 1..270: note = Description of Artificial Sequence: Synthetic coding sequence
  source 1..270: mol_type = other DNA
atgagcgaaacccagaatagcacgagtcagaaggccatggacgaagataataaagcagctagccagactatgccgaatacccaggacaagaactacgaagatgagctgacacaggtcgcactcgcactggtcgaagacgttattaattacgctgtaaagattgtggaggaggagcggaacccactcaagaacattaaatggatgacccacggtgagtttacagtcgagaagggcctcaagcagattgatgagtacttcagcgtctcctag

SEQ ID NO: 106687 - DNA, 2088 bp, synthetic construct
  misc_feature 1..2088: note = Description of Artificial Sequence: Synthetic coding sequence
  source 1..2088: mol_type = other DNA
atggccgctgctaccatcgtccatgacacttcggaagctgtcgagctgtgcccggcttatgggctatatttgaagcctatcacgaagatgactatttctgttgccctgcctcagctcaagcaacccgggaaaagtattagcaactgggaggtgatggaacggctgaagggcatggttcaaaatcatcagttttcaactctacgcatttcaaagagtaccatggatttcatacggttcgaaggtgaggtcgagaataaaagtctagtgaaaagtttcctggcctgcttggacgggaaaacgatcaagctgtccggcttttctgatatactcaaagtacgggccgcggagttcaaaatcgactttcccactaggcacgattgggattcctttttcagggacgctaaagatatgaatgaaactctacctggcgagaggcctgataccatccaccttgaaggactgccctgcaagtggttcgcactgaaagagtcggggagcgaaaagccgagcgaagatgtgcttgttaaggttttcgagaagtttggagagattaggaacgtggacatcccaatgctcgacccttaccgggaggagatgaccggcagaaactttcacactttcagctttggtgggcacttgaatttcgaggcttatgttcagtacagagagtatatgggtttcatacaagctatgagtgctttgaggggtatgaagcttatgtataagggtgaagatggcaaggcggtggcatgcaacataaaggtgtccttcgatagtaccaagcacctgtctgacgcaagcatcaagaaaaggcaattagaacggcaaaaactgcaggagctggaacagcaaagggaggagcagaaacgacgtgaaaaagaggcagaagagcggcagagagcagaggagaggaagcaaaaagagctggaggaactcgagcgcgagagaaaacgtgaagaaaaactgagaaaaagggaacagaaacagagagaccgagaactaaggaggaaccagaagaaattggagaagcttcaggccgaggagcagaaacagctgcaggagaaaattaaattggaggagcggaagctacttctggctcaacggaacctgcagagtataaggctgatcgccgagcttttgtctcgcgcaaaggccgtgaagttgagagaacaagaacaaaaagaggagaaactgaggctccagcagcaggaggagcgacggcgattgcaggaagccgagctgagaagggtggaggaagagaaagagcgcgctttagggctgcagcgaaaggaacgcgagctacgggagcgactgttaagcatcctgttatcaaaaaagcctgacgatagtcacacccacgacgagttgggggtggcacatgccgatttgctccaacctgttcttgatatcctgcaaacagtgagttccggctgtgtgagcgctaccaccctgcaccctctgggcggccagccccctgccggcgctcccaaggagtcccctgcccacccagaggccgacggagcaccgaagtcagttaatggaagcgtcgccgaggaggccccatgcaaagaggtgcagtcgagctgcagggtcgtgcctgaggacggctcccccgagaagcggtgcccgggtggagttttgagctgcatccctgacaacaaccagcagcctaaaggcatacctgcctgtgagcaaaatgtcagcaggaaggatacaaggtccgaacaggataagtgtaatagggagccttcaaaggggcgtggtcgtgcaactggagatggcctggctgacaggcacaagcgggagaggtcaagagcaagacgggctagttctcgggaagatggcagaccaagaaaggagaggaggccacataagaagcatgcatacaaggatgacagccctcggcgccgtagcacgtctccagaccataccaggtcacggaggagccattctaaagacaggcacagaagagagagaagtagggaacgtcgaggaagtgcgagtagaaaacacagtcgacatcggagaaggagcgagaggagccggtcaagaagtccgagccgacataggagcacttggaatcgctag

SEQ ID NO: 106688 - DNA, 1341 bp, synthetic construct
  misc_feature 1..1341: note = Description of Artificial Sequence: Synthetic coding sequence
  source 1..1341: mol_type = other DNA
atggcagctgcgacgatcgtgcacgacacttccgaggccgtcgaactctgtcccgcatacggactttatctgaagccaataaccaaaatgaccattagtgtggctcttcctcagcttaaacagccgggaaaatctatcagtaattgggaggttatggagaggctgaagggcatggtgcagaaccaccagttctctacattgcgaatcagtaagtcgacgatggacttcatccgttttgagggtgaagtggaaaataagtctttggtcaaatcgttcctggcttgtctcgacgggaaaacaattaagctatcaggcttctccgatatcctgaaggtgagagcagctgagtttaagattgacttcccgacacgacacgactgggacagcttttttagagatgcgaaggacatgaatgagacccttccaggagagcgacctgatacaatccatctggagggattgccctgcaagtggttcgccctgaaggagagtggaagtgagaagccgagcgaagatgtcctagtaaaggttttcgaaaagttcggagaaatccgcaatgtcgacattccgatgctggatccctacagggaggagatgactggcaggaactttcacactttcagctttggtgggcacctgaactttgaggcttacgtgcaataccgggaatatatgggatttattcaggctatgtctgcgctccgggggatgaaactcatgtacaagggagaagatggaaaagcagtagcgtgcaacattaaagtctcttttgactccacgaaacacctgtcagacgcatcgatcaaaaaacggcaattggagcggcaaaaactgcaggaactggagcagcagcgagaggagcaaaagagacgcgagaaggaggccgaggaaagacagcgcgctgaagagaggaaacaaaaggaactcgaagaactggaacgggagaggaagagagaagagaaactgcgaaaacgcgagcagaaacagagggacagggagctgcgcaggaaccagaagaagctggagaaacttcaggctgaagagcagaaacagttacaggagaagatcaagctcgaagagagaaaactgcttctcgctcaacggaatttgcaaagtattcgcctgattgccgaactgctgtctcgcgctaaagtgccaggaggctcgttgtgctccaggcagcccaggcccggttgtcctcagtgcccccccctcaagtgtggccgacgccacggggccgtgtcgcccccagctgcagcagtcgccaccaaacctgccctcatgccgaggatgacggctcccagccgcgaaggcgtggctcttgtgtgtaggtccaggtag

SEQ ID NO: 106689 - DNA, 2580 bp, synthetic construct
  misc_feature 1..2580: note = Description of Artificial Sequence: Synthetic coding sequence
  source 1..2580: mol_type = other DNA
atggaaattgaagtttctgtggccgaatgtaaaagcgtgccaggcattaccagtacaccgcaccccatggatcacccttccgctttttactcgcctccccacaatgggctgcttaccgaccaccatgaaagtctggacaacgacgtggcccgggagatccggtatctcgatgaggtactggaagccaactgttgcgattccgccgtcgatgggacttataacggcaccagcagtcccgaaccaggtgctgttgtgctagtgggtggcttgtcgccacccgtccacgaagccactcagcccgagccaacagagaggacagctagccgacaggctccaccccacatagagctcagcaacagtagccccgatcccatggccgaagcggagaggacaaacggccattcaccctcccaaccccgagacgccctcggcgattcattgcaggtgcccgtgtcaccctctagcaccactagcagcagatgtagcagcagagatggcgaattcacactcacaacactgaaaaaggaggctaaattcgagctcagggcctttcacgaggacaaaaaacccagtaagctgttcgaagacgacgagcacgaaaaggagcagtattgcatccggaaagtccggccaagcgaagaaatgctcgagctcgaaaaggagcgcagggagcttatccgctcccaggctgtcaaaaagaaccccgggattgcagccaagtggtggaaccctcctcaagaaaagacaattgaggaacagctcgacgaagagcatttggaaagccacaaaaagtacaaggaaaggaaggagagacgggcccagcaggaacagcttctgctgcaaaagcaattacagcagcagcagcagcagcctccctcgcagctatgtactgcccccgcatctagtcacgaaagggcctctatgatcgataaagctaaagaagatatcgtcacggagcagattgatttctctgccgcccgtaagcaattccagctaatggaaaatagtcgtcaggctgttgccaaaggtcaatccacaccccgcctgttctctatcaaacctttctaccggcccctcggctcagtgaattccgataaacctctcacaaatccccgtccacccagtgtcggggggccccccgaagatagcggtgcgtccgctgccaaggggcaaaaatcacctggtgccctggagacacctagtgccgccggcagccaggggaataccgcttcccaaggtaaagaaggaccttattctgaaccctccaaaaggggccctctgtctaagctctgggctgaggacggcgaattcacatctgcgcgggctgtgcttactgttgtgaaggacgatgaccacgggatcctcgatcagttttctaggtccgtgaatgtgagtctgacgcaggaggagctggactcgggcctggacgagctcagcgtccgtagccaagatacaaccgtcctggagactctctcgaatgacttctctatggacaacattagcgactccggggcttcaaatgagactacgaacgctcttcaagaaaactcgctggctgatttttcactcccacagaccccccagacggacaacccatccgagggccgaggcgaaggtgtatctaagtcattctcagatcatggattctattcaccaagcagcacattgggggactccccgctggtcgacgacccgcttgaatatcaggctggattgcttgtccagaacgccatccaacaggctatcgccgagcaagtcgataaggctgtgtctaagacatcgcgcgacggagctgagcagcaagggcccgaagctactgtggaagaagctgaggccgctgccttcggatccgaaaagccccaaagtatgtttgagccaccacaggtgtcttctcctgtccaggagaagcgtgatgtccttccgaaaatccttccggcagaggacagggccttacgcgagcgcggaccccctcagcctctccccgccgtgcagccctccggaccgattaatatggaagaaaccaggcccgaaggaagttatttctcaaaatattcagaggcggcagagctgcggagcaccgcatcccttctggcaacccaggaaagtgatgtcatggtgggccccttcaaactgaggagtcgaaagcagagaactctgagtatgatcgaggaggaaatcagggcagctcaggagagggaggaagagctcaaacgtcagaggcaggtgctgcagtcaacacagagccctagaaccaagaacgcaccatctctgcctagcaggacatgttacaaaaccgcccctggcaagatcgagaaggttaagcctcccccatccccaaccaccgagggaccttctctgcaacctgacctggcccctgaggaagccgcaggcactcagcgccccaagaatcttatgcagacactgatggaggactacgaaacacacaaatcgaagcggcgggagagaatggacgacagttcagtgctcgaggctacccgggttaatagaagaaagtcggcacttgccctgaggtgggaggcaggcatttatgctaatcaggaagaagaggataacgagtag

SEQ ID NO: 106690 - DNA, 2847 bp, synthetic construct
  misc_feature 1..2847: note = Description of Artificial Sequence: Synthetic coding sequence
  source 1..2847: mol_type = other DNA
atgcggtggccccaacctggagcagccgctaggctgcccccggagtcccctggccctcctgagtccccgggcccacctgaacgagaggccgcagcagctaggaggtggacaggcgcggaacctcaggattgcgccccggggtccggtcgcccagagaaacccccacagctgtcagaggatgacatttggcttaagagcgagggggacaattactctgcaaccttgcttgaacccgctgcgagtagcctctcccctgatcacaagaacatggagattgaggtgtccgtggccgaatgcaaatcagtgcccggtatcacgtctaccccccatcccatggatcaccccagtgctttctactccccacctcacaatggactgttaaccgatcatcacgaaagcctggacaatgatgtggcccgggaaatacggtacctggatgaagtgcttgaagccaattgctgtgactccgcggtggacggtacgtacaatgggactagctccccggaacctggagccgtcgtgcttgtcggtggcttgagcccacctgtccacgaagctacccagccggagccgacggaacgaactgcaagtaggcaggcaccaccgcacattgaactctctaattcatcaccggacccgatggccgaggccgagcgtacaaacgggcactctccctcgcagccgcgcgatgcattgggtgacagtctgcaagtcccagtatctcccagcagtacaacttcctcaaggtgtagttccagggacggagaatttaccttaaccacgctgaaaaaggaggcaaagtttgagctcagggcattccatgaagacaagaaaccttcgaaattatttgaagatgacgagcacgagaaggagcaatactgtatccggaaggtgcggccctccgaggagatgcttgagctggagaaagagaggagggaactcataaggtcccaggccgtgaagaaaaacccaggtatagccgccaagtggtggaatccaccccaggaaaagaccatcgaggagcagctggacgaagaacaccttgagtctcacaagaagtacaaggagcgcaaggagcgaagggcccagcaggagcagctcctgctccagaagcagttacaacagcagcagcagcagcctccctcacagctgtgcacagcccccgcatcatcccatgaaagggcgtccatgattgacaaggctaaagaggacattgtcacggaacagatagatttctccgccgcccgtaagcagttccaactcatggaaaattcacggcaggcagttgccaagggtcagagcacgccccgtctcttctcaattaagcctttctaccgcccactgggctcagtaaattccgacaaaccactgaccaatccgcgtccccccagtgttggcggtccccccgaagattctggtgcctctgctgctaaggggcaaaaaagccctggagccctcgagacacccagtgctgcaggatcccaagggaatacggcatcacaaggcaaagaaggaccatattccgagccatcaaaaagaggacccctctctaagctgtgggctgaagacggagagtttaccagtgccagagctgttctgacggtagttaaagatgacgatcatggcatattagaccaattttcacggagcgttaacgtaagtctgacccaggaggagctagactcaggcctggacgaattgtcagtgagatctcaagataccaccgtcctggagactctcagtaacgacttttcaatggacaatatctcagactcaggggcctccaacgaaaccacgaatgcactgcaggagaactcactagccgatttcagccttccccagacacctcagacagacaatccctccgaaggtcggggagagggggtcagtaaatccttttccgatcacggattctactctcccagcagcacgctgggcgacagcccactggtggatgaccctctggagtaccaagccggtctgctggtacagaacgcaatccagcaagcaatcgcagagcaggtggataaggcggtgtccaaaacgtccagggatggcgccgagcagcagggccccgaggctaccgtggaggaggctgaagccgctgctttcggctcagagaagccacagtcaatgttcgaaccgcctcaggtaagtagcccggtacaggagaagcgagacgttctccctaagatactgcccgccgaggatcgagctcttagagaaaggggccctcctcagcccttgcccgcagttcagcctagtggccccatcaacatggaagagactaggcccgagggttcatacttctccaagtattctgaagctgccgagctgcgttccacagcaagtctgctggccacacaggagtctgacgtcatggtgggccctttcaagctccggagccgcaagcaaagaacattaagcatgattgaagaagagattagggccgctcaggaacgggaggaggaattgaaaagacagcggcaggtcctccagagcacacagagccctagaactaagaatgctccttcccttcccagccggacctgctataaaaccgcacccggaaaaattgaaaaggtgaagccacccccatcgcctaccaccgagggaccatcactgcaacctgacttggctcccgaagaagctgctgggacccagcgcccgaaaaatcttatgcaaacgctaatggaagactacgagacacataaatccaagcgccgcgagagaatggatgatagtagcgtgcttgaggccacgcgtgttaacaggaggaaaagcgctctggccctcaggtgggaggccgggatttacgccaaccaggaagaggaagacaatgaatag

SEQ ID NO: 106691 - DNA, 3273 bp, synthetic construct
  misc_feature 1..3273: note = Description of Artificial Sequence: Synthetic coding sequence
  source 1..3273: mol_type = other DNA
atggcagaggccgagcttcacaaggagcggctgcaggccatcgcggaaaaacgcaagaggcagaccgagatcgaaggaaagcgacagcagttggacgagcagattctcttgctccagcacagtaaaagcaaggtgcttagggaaaaatggctactgcagggaattcccgcaggcactgcggaagaagaagaggctagaaggaggcagagcgaggaagatgagtttcgagtcaagcagctggaagacaacattcagaggctggagcaggagatccaaacattagaatctgaggagtcacagataagtgcgaaggaacagataatcctggaaaagctgaaggaaactgagaagagtttcaaggatttccaaaagggcttcagcagcaccgacggtgacgccgtcaattacataagcagtcaactacccgatctcccaatactgtgttcccggaccgccgagccttcccctggccaagatggcacttcacgtgctgctggggtcgggtgggagaatgtgcttctgaaggagggagagtcggcatctaatgcaacagaaacatcagggccagatatgactattaaaaagcctccccagctgagtgaagacgatatctggctcaagagtgagggcgataattatagcgccactctcctggagcctgctgccagcagccttagccctgatcataaaaacatggagattgaagtatccgttgcagaatgcaaatccgttccgggcattaccagtaccccacaccccatggaccacccgtcagccttctacagtcctccacacaacggcttgctcacagaccatcatgaatccctggataatgatgtggccagagaaatacgttatcttgatgaggtgctcgaagcaaactgttgcgactccgccgtggatgggacctataacggaacttcgtcgccagagcctggcgctgtggttctggtcggcgggctgagtcctccagtgcatgaggccacgcagccagagcccaccgaaaggactgcaagccgtcaggcaccaccacatatagaactgtcgaattcctcccctgatcccatggcagaagccgaaagaactaatgggcacagcccctcacagccccgggatgctctcggcgactccctgcaggtacctgtcagtccgtcttcaacaacatctagcaggtgcagcagtagagatggcgaattcactctgaccaccctgaaaaaggaagcgaaatttgaactcagagcattccatgaggataagaagcccagcaaactgtttgaggatgatgaacacgagaaagagcaatactgcattcggaaggtgcgcccctccgaggaaatgctggagctcgagaaagaaagaagagaacttattcgaagtcaagccgtgaagaagaatcctgggattgctgccaagtggtggaatcccccacaagagaagacaatcgaggaacagcttgatgaggagcacctggagagtcataagaagtacaaggagcgcaaagaaagacgtgcgcagcaagaacaacttcttctacagaaacagctccagcagcagcagcagcagccaccttcacagctgtgcaccgctccggcttcctcccacgaaagagcatccatgattgataaggccaaggaggacattgtcactgagcaaatagattttagcgctgcgaggaagcagtttcaacttatggagaactcccggcaggcagttgcgaaaggacagagtactccgaggctgttttccattaagcccttttaccgtccgctgggctcagttaatagcgacaagccactgactaacccccggccaccctcagtgggcgggcctcctgaggattccggagcgtcagccgccaaagggcaaaagtcacctggcgcccttgagaccccaagcgccgccggctcccagggtaacacggcctcccagggtaaggagggcccctactccgagccgtccaagagaggtcctttaagtaagctatgggctgaagacggcgagttcacctcagctagggccgtgcttaccgttgtgaaggacgacgaccacggaatcctggatcagttctcacgtagcgtaaacgtttcattgacgcaggaggaattagactccgggctggatgaactgagcgtacggtcccaagacactacagtgcttgagacactgagtaacgactttagcatggacaacatatctgactccggtgcctccaacgaaaccactaatgccttgcaagagaacagtttggctgatttcagcctcccgcaaacaccccaaaccgataacccatctgaaggtcggggggaaggggtctctaagagcttttctgatcacggcttctattcaccaagttctactctgggggattccccactggtggatgatccattggagtatcaggccggacttcttgtccagaacgcaatccagcaagccatcgctgagcaagtcgacaaggctgtcagcaagacctccagggacggcgctgaacaacagggtccagaggcgaccgtggaggaggcagaggctgcagctttcgggagtgaaaaaccgcaatctatgtttgagccgccccaggtgtccagcccggtgcaggagaagcgcgatgtgttgcccaaaatcctgcccgcggaggacagggccctccgggagcgaggcccaccgcagccacttcctgcagtgcaaccaagcggccccataaatatggaagaaacgaggccggaaggctcctattttagcaaatattcggaagcagctgaactgcgtagcaccgcaagcctgctcgctacccaggagtctgatgtcatggtgggcccatttaaattacgctcacgcaaacagaggacgctcagcatgatcgaagaggaaatacgggctgcgcaagagcgggaggaggagctcaaacggcaaaggcaggtgctgcagtcaactcagagcccaaggactaaaaacgcaccatccctaccaagtcgtacctgttacaaaacagcccccggaaagatcgagaaagtgaagccgccccctagtcccactacagaggggccttctctccaacccgatctcgcacccgaagaagccgcaggtacacagcggcccaaaaacttgatgcaaaccctcatggaggactacgagacgcataaatctaagagacgtgagcgaatggatgattcatcagtactggaagccacgcgggttaacaggagaaaatctgccctggcactgcgatgggaggcggggatttatgctaaccaagaggaggaagataacgaatag

SEQ ID NO: 106692 - DNA, 3312 bp, synthetic construct
  misc_feature 1..3312: note = Description of Artificial Sequence: Synthetic coding sequence
  source 1..3312: mol_type = other DNA
atggccgaggctgagttgcacaaggaaagacttcaggctattgccgaaaaacgaaagcgtcaaacagagattgaaggaaagcgtcaacagctggacgaacaaatactgctcctgcagcatagcaagtcgaaagtgctccgagagaaatggctgctacaaggaatcccagcgggaacggcagaagaggaagaggcgcgtaggcgccaaagcgaggaggatgagttccgggtgaaacagctcgaggataatatccaacgtctggaacaagagattcagacacttgagagcgaagaatcacagattagcgccaaggaacaaattattctggaaaaattgaaggaaactgaaaaatccttcaaggactttcagaaaggtttttcgtctaccgacggcgacgctgtcaattacattagctctcaattgcctgacctgccaatcctctgctcccgcaccgctgagcccagccccggccaagacggtacatccagggctgccggcgttggttgggagaatgttctactcaaggagggtgagtcagcctcgaatgctaccgaaacttcaggccccgatatgaccattaaaaaaccacctcagctttctgaggacgatatttggcttaaatcagaaggcgataactactcagctaccctgcttgaacccgccgccagcagtctgtctcccgatcataagaacatggagattgaggtatccgtcgccgagtgtaagtccgtaccgggcattacatccacacctcatccaatggatcacccatctgctttctactctcccccccataacggtctgcttacggatcaccacgagagtcttgataatgatgtggcaagagagattcgttacctggacgaagtgctcgaggccaattgctgcgatagcgccgtggatggaacttacaatggaacaagcagtcccgaacctggggccgtcgtactggtcggcggcttgagtccaccagtgcatgaggccacacagcccgagcccacggagagaactgctagccgtcaggcccccccacatatcgagctgagcaactctagtccagatcccatggctgaggctgagcggacaaatgggcatagccctagtcaaccacgggacgcattgggagactcactacaggtccccgtttcgccctccagcaccactagtagcagatgtagttcacgtgacggcgaatttacacttaccacactgaagaaagaggctaagtttgagctacgggccttccacgaggacaagaagcccagcaagctgtttgaggatgatgagcatgagaaggaacaatactgcatccgtaaggtgagacctagtgaggagatgctggaactggaaaaggagagaagggaacttattcgctcccaagccgtgaaaaagaaccctggcatcgccgcaaaatggtggaatccaccccaggagaaaacaatcgaggagcagctggacgaagaacacctggagtcccataaaaaatataaggaaaggaaagagcgccgcgcacagcaggagcagctgttactgcagaagcagctccagcaacagcagcagcaaccaccctcccaattgtgcaccgccccagcaagttcgcatgagcgcgcttcaatgattgacaaagccaaagaggatatcgtgaccgaacagattgacttctccgccgccagaaaacagttccagttgatggagaacagtcggcaggccgtggcaaagggccaatccactcctaggctgttttcgattaagcctttctatagaccactaggctcagttaatagcgacaaacccctgacaaacccgcgaccgcccagcgttggaggcccccctgaggacagcggggcaagcgctgctaaaggacagaagtcacctggcgcactagagaccccaagcgcagcaggctctcagggaaataccgcaagtcagggaaaagaagggccttacagcgagcctagtaaaaggggtcctctgtctaaactttgggctgaggatggtgagtttacatcagctcgcgcagtactgactgtcgtcaaggacgatgaccacggcattttggaccagtttagccggagtgtaaacgtctctctgacccaagaagagttagactcaggcctggacgagctgtccgtgcgctcccaggataccaccgttttagaaaccctttccaatgatttttccatggataatatatcggattctggagcctctaatgaaacaaccaatgccctgcaggagaacagtctcgccgactttagcctgccgcagaccccccagacggataatcccagcgagggccgcggagaaggggtttcgaaatcctttagcgatcacgggttctacagcccaagctccaccctgggcgacagcccgttggttgacgaccctctcgaatatcaggctggactgctggtgcagaatgcaattcaacaggccattgccgaacaggtcgacaaggcggtcagcaaaaccagccgggatggtgccgagcagcaggggccggaggctacggtggaggaagccgaagctgctgcattcggatccgagaagccccagtcaatgttcgaacctcctcaagttagctcacctgtgcaggaaaagcgggacgttctgcctaaaatcctgcctgcagaggatcgcgccctgcgggagcggggccccccccagccgctgcccgcagtgcagccctcaggcccgataaacatggaggaaactcggcctgaaggatcatactttagcaaatactcagaggcagccgaactcagatccacagcctcgcttctggctacacaggagtccgacgtaatggtcggcccttttaaactacggagcaggaaacaacgaacactctccatgatcgaagaggaaatcagggcagctcaagagcgcgaggaagagttaaaaagacagcgccaggtacttcaatccacccagtcccctcgaaccaaaaacgcaccgagcctgccctcacggacatgttacaaaaccgcccccggtaaaattgagaaggtgaaaccaccaccctctcccactacagagggcccatccctccagccagacctcgctcccgaagaagcggctggcacccagaggcctaaaaaccttatgcaaaccttgatggaggactacgagacccacaaatccaagaggcgcgagcgtatggatgacagtagctacacgtcaaagttactctcctgcaaggtgaccagcgaggtcttggaggccactagggtgaaccggcgaaagagcgccctcgcccttcgatgggaggcaggaatttacgcgaaccaagaggaagaggacaatgagtag

SEQ ID NO: 106693 - DNA, 2886 bp, synthetic construct
  misc_feature 1..2886: note = Description of Artificial Sequence: Synthetic coding sequence
  source 1..2886: mol_type = other DNA
atgcgatggccccagcctggagcagctgccagacttccacctgagagtcctgggccccccgagtctccggggcctccggaaagagaggctgctgccgccaggcgatggactggagcagaaccccaggactgcgctccgggaagtggaagaccagaaaaacccccgcagctttccgaggatgacatttggctcaagagcgaaggcgacaactatagcgcaacattactggagcctgctgcaagttctctgtcaccagatcataagaacatggagattgaggtatctgttgccgagtgcaaaagcgtgcccggcatcacctctacgccccaccccatggaccaccctagcgctttttacagcccaccccataatggcttactgacggaccaccacgagagcttggacaacgatgtcgctcgcgaaatccgctacttagacgaagtgctggaagcaaattgttgcgactctgctgttgatggcacttacaacggtacatctagccctgagccaggtgcggtggtgctcgtcgggggtttaagtccgccggttcatgaggccacccagcctgaacctacagagaggactgcctctagacaggccccacctcacatagagctcagcaatagttccccggacccaatggccgaggctgagagaaccaacggccacagtcccagtcaaccgagggatgctctgggagactcactgcaggtccccgtttccccgagctctacaacaagctctcggtgttctagtagagatggggagttcacattaaccaccctgaagaaggaagcaaaatttgagcttagggcatttcacgaggacaaaaagccctcgaaactttttgaagacgatgagcacgagaaggaacaatactgtatacgcaaagtcagaccttctgaggaaatgctggagcttgaaaaagagagacgggagttgatccggtcacaagccgtcaaaaaaaatcctgggatcgcagccaagtggtggaaccccccacaggagaagaccatcgaagagcagctggacgaagagcatctcgaatctcacaagaagtacaaagaacgcaaagaacgccgagctcagcaggagcagttgctgttgcagaagcagcttcagcagcagcagcagcagcccccttcccagctgtgtaccgcccctgcgtcctcacacgaaagggcctctatgatcgacaaagccaaggaagatatcgtgacagaacagattgatttttccgctgccagaaaacagttccagctgatggagaacagccggcaggcagttgcgaaggggcagtcaacccctaggcttttctccattaaaccattttatcgccctcttgggtcagtgaatagtgataaaccgctgactaatcctcgaccgcctagtgtgggcggcccaccagaggattcaggagcatccgccgcgaaagggcagaaatcccctggtgccctggagactccaagtgctgccgggagccaagggaacactgcatcccagggaaaggaaggaccctattctgagccgtctaagcgcgggcctctcagcaaactctgggctgaagacggtgaattcaccagcgcccgcgcagtcttgaccgtcgttaaggacgatgaccatggcatcctggatcagttctctcggtctgtgaatgtgtctttaacgcaggaggagctggacagtggcctggatgaactttcggtacggagtcaagatacaaccgtgctcgagacactctccaatgacttttctatggataatatcagcgactccggggcatccaatgagacaacgaatgctctccaggagaactctctggcagacttctcacttcctcagactccccaaaccgacaaccctagcgagggcagaggggagggagtgtcaaagtccttctcggatcatggtttttactcaccatcgtcgacgctcggcgacagtccgctggtggacgaccccttggaatatcaggcagggctcttagtgcagaatgccatccagcaggccatcgccgaacaggtggataaggctgtatctaaaacctctagggacggcgctgagcagcagggtcctgaggccactgtcgaggaagctgaggccgctgcttttggcagcgaaaaaccacagtctatgttcgaacccccccaagttagtagcccagtgcaagaaaagcgtgatgtgttgccaaagattctgcctgcagaagacagggccttaagagaacggggaccaccccagcctcttccagctgtgcagcctagtgggcctataaacatggaagagacacgaccagagggaagctacttctctaagtactcggaagcagctgagctgaggtctacggcttccttgctcgccactcaggaaagcgatgttatggtgggaccctttaaactgaggtcacgaaaacaacgtactctctcaatgatagaagaggagatccgcgcggctcaggaaagagaggaggagctaaagagacagcgccaggtcctgcaaagtacccagtccccaagaacaaagaacgcaccgagcttgccatctcgtacctgctacaaaaccgcccccgggaagattgagaaggttaagccaccccccagccctacaaccgaggggccctccctgcagccagacctcgcgccggaagaggccgccggaacacagaggcccaaaaacttaatgcagacattaatggaggactatgagacacacaagtctaaacggcgggagaggatggatgacagcagctacaccagcaaactgcttagttgtaaggtaacaagcgaggtcctggaagctactagagtgaatcggcgtaagtcagccctcgccctgcgatgggaggccggcatttacgctaatcaggaagaagaggacaacgagtag

SEQ ID NO: 106694 - DNA, 2565 bp, synthetic construct
  misc_feature 1..2565: note = Description of Artificial Sequence: Synthetic coding sequence
  source 1..2565: mol_type = other DNA
atgatggcctactctgataccacaatgatgagcgacgatattgactggctccgtagtcatcggggagtctgtaaggttgacttatataatccagagggccagcaagatcaggataggaaagttatctgtttcgttgacgtttcaacactgaacgttgaagacaaggattacaaagatgcagcatctagcagctcagagggcaatcttaatttaggatcactggaggagaaagagatcattgtcatcaaagacacagagaagaaagaccaatccaagactgaaggttcggtgtgcctgttcaagcaggcacctagcgaccctgttagcgtgctgaattggctgttgagcgacctgcaaaagtacgcattagggtttcagcacgctctgtctccctccacttctacatgcaagcacaaggttggggatacggaaggagagtatcatcgggcgtcgagcgagaactgttacagcgtgtatgctgaccaggttaacattgattacctgatgaaccgcccacagaatttaagacttgagatgaccgctgctaagaacaccaacaacaaccagtcgccctccgcccccccggccaaaccaccaagcacacaacgggctgtcatttcccccgacggggagtgcagcatcgacgacctgtcgttttatgtaaatcggttatcgagcctggttattcagatggcacataaggagataaaagaaaagctggagggcaagagtaagtgcctgcaccactccatttgtccttccccaggcaataaggaacgcattagcccacgaacgccggcaagcaaaatagcgtcagagatggcttacgaggcggtggagctgaccgccgccgagatgcgcggcaccggcgaggagagcagggaaggcggtcaaaaatccttcctatacagtgaactctccaacaagtcaaagtccggtgacaaacagatgtcacaacgcgagtccaaagagtttgcagacagtattagcaaaggactgatggtgtatgccaaccaggtcgcttccgatatgatggtctctcttatgaagactctgaaggtccatagtagcgggaaacctattcccgcatccgttgtccttaagagagtgctgctgagacataccaaagaaatagttagcgatctgattgattcatgtatgaaaaacctccacaatattactggcgtgctaatgacggattcagacttcgtcagcgccgtgaaacggaacctgttcaaccagtggaaacagaacgcgaccgacatcatggaggccatgctgaaaagactggtctcagcacttataggagaagagaaggagactaaaagtcagagtctgtcatatgccagcctcaaagctggttcccatgatcccaaatgccggaatcagtctctggaattttcaacgatgaaagccgaaatgaaggaaagagataagggaaagatgaagtcagatccatgtaaatccctcactagtgcagaaaaggttggagagcacattctcaaagagggtttgaccatatggaaccagaagcaggggaacagttgcaaggtcgcaacgaaagcttgctcaaataaagacgaaaaaggcgagaagatcaacgcttccaccgactcgttggccaaagatctgattgtctctgccttaaagttgatacagtatcacctcacccagcaaaccaagggcaaggatacatgtgaggaggattgccccggctccacaatggggtacatggcacaatccacacagtatgaaaagtgtggaggcgggcagagtgctaaagctctttctgttaaacaactcgagtcccacagggctcccgggccctcaacttgtcagaaggagaaccagcacctcgatagtcagaagatggacatgagcaacatcgtcttgatgttaatccaaaagctgctgaacgagaatcctttcaagtgtgaagatccctgcgagggtgaaaacaaatgttcagagcctagagcctccaaagcagcatcaatgagtaatcgcagcgacaaagcagaagaacagtgccaagaacatcaggagcttgattgtacttcaggcatgaagcaggctaatggccagtttatcgataaactggttgagtcagttatgaagctctgcctaatcatggccaaatactcaaatgacggcgctgcccttgccgagctggaggagcaagcggcctccgccaataaaccgaacttcaggggtacaagatgcatccactctggagcaatgcctcagaattaccaagactccctgggccacgaggtgatcgtcaataatcagtgttcgaccaactcactccagaagcagctccaggctgtcctgcagtggatagcagcaagtcagttcaatgtgccaatgttatattttatgggagacaaggatggacagcttgagaagctgcctcaagtgtctgcaaaggctgccgagaaaggatatagcgtgggtggcctgctacaggaagtgatgaaatttgcaaaagaaaggcagcccgatgaggctgtaggaaaggtcgcccgcaaacagctgctcgactggctccttgcaaacctgtag

SEQ ID NO: 106695 - DNA, 2538 bp, synthetic construct
  misc_feature 1..2538: note = Description of Artificial Sequence: Synthetic coding sequence
  source 1..2538: mol_type = other DNA
atgagtgatgacattgattggttgagaagccaccggggggtttgtaaggtggacctgtataatcccgagggtcagcaggatcaggacaggaaggtcatatgttttgtggacgtgagtacactgaacgtcgaggacaaagattacaaggatgcggcctcctcttccagcgagggaaatctgaatctggggtcactagaggagaaggaaataatcgtcatcaaggacaccgagaagaaagaccagagcaaaacagagggaagcgtgtgccttttcaagcaggcccccagcgaccccgtctctgtcctgaactggctcctgtccgatctgcagaagtatgctctgggattccagcacgctctatccccaagcacttctacctgtaagcacaaggtaggtgatacggaaggagagtatcatagggcttcttctgagaactgctatagcgtctacgctgatcaggtcaacatcgactatttgatgaaccgtccgcagaatctgcggctcgagatgaccgcggccaaaaacacaaataacaatcagagcccaagcgcaccacccgccaaaccaccctccacgcaaagggcagtaatcagccccgatggcgaatgttccatagatgatctcagcttttacgtgaaccggttaagctcgctggttatacagatggctcacaaagagattaaggaaaagctggagggtaaaagcaagtgtctacaccacagtatttgtccgagtcccggcaacaaagaaagaatctcaccacggacgcccgccagcaaaattgcctctgagatggcctacgaagccgttgagctaacagccgctgaaatgagaggcaccggggaggaaagtagggagggaggacagaaaagctttctatattccgaactgagcaataaatctaagtctggtgacaaacagatgagccagcgcgagagcaaagagtttgccgattccataagcaagggcctcatggtgtatgccaaccaggtagccagcgacatgatggtctcactgatgaagaccttaaaggtacactcctctgggaagccaattcctgcatccgtggtgcttaaacgggtgctgctgagacatacaaaggaaattgtgtcagatctcattgactcatgcatgaaaaatcttcacaacattactggagtgctgatgactgactcggacttcgtttccgccgtgaaacgaaatttgtttaaccagtggaagcagaacgcgaccgacatcatggaagctatgttaaaaaggcttgtttctgccctgattggcgaggaaaaagaaaccaagtcacagtctcttagctatgcctctttgaaggccggttcacatgatccgaaatgcagaaaccagagtctcgaattcagcactatgaaagccgagatgaaggaaagagacaaaggcaaaatgaagagcgacccgtgtaaaagtctgacgtccgccgagaaagtcggggagcacattttgaaggaggggttgaccatttggaaccagaagcaggggaactcctgcaaggtcgccacgaaagcatgctctaataaagatgagaaaggcgaaaagatcaacgcctctaccgattccttagccaaggatctcatcgtgagcgctcttaaactgatccaatatcacttgactcagcaaacaaaaggcaaagacacttgcgaggaagactgtccaggaagcacaatggggtacatggcccaaagcactcaatatgaaaagtgcggtggaggacaaagtgcgaaggcccttagtgtaaagcaactagagtctcacagggcccctggcccgtcaacctgtcagaaggagaaccagcacctcgactcccagaaaatggatatgagtaacattgtcctcatgctaatccaaaagctcctgaatgagaatcctttcaagtgtgaggatccttgcgaaggagagaataagtgttctgagcccagggcctccaaagccgccagcatgagcaaccgttcagataaggctgaagagcagtgtcaggaacatcaggagctagattgcacaagtggcatgaagcaagctaacggccagttcatcgataaactggtggaatccgtgatgaagctgtgtctgatcatggcaaaatactcaaatgacggtgccgcactcgcagagcttgaagaacaggccgctagtgccaataaacctaatttccgtggtactcggtgcatacactctggagcaatgccacagaactaccaggattctctcggacatgaggttatcgtcaacaatcagtgcagcacaaacagccttcagaagcagctccaggcggtattacagtggatcgcggctagtcaatttaatgttccgatgctttacttcatgggtgataaagatgggcaactggagaaactacctcaggtctccgccaaggctgctgagaagggatacagtgtgggcggtctcctgcaggaggttatgaagttcgccaaagaacggcagcccgacgaagctgtggggaaggttgcccgcaaacagctgctagattggctgctagccaatctgtag

SEQ ID NO: 106696 - DNA, 1416 bp, synthetic construct
  misc_feature 1..1416: note = Description of Artificial Sequence: Synthetic coding sequence
  source 1..1416: mol_type = other DNA
atgagtgacgatatcgactggttgcgaagtcataggggggtctgcaaagtggacctgtacaaccccgaaggtcaacaggatcaggaccggaaggtgatttgttttgtcgacgtgtcgacactgaatgtggaagataaagattataaggatgccgccagctcaagcagcgaggggaacttgaatctgggctcactcgaagaaaaagagattattgtaattaaggacacggaaaaaaaagatcagagcaaaaccgaagggtccgtgtgtctgttcaagcaggctccttcggatcctgtttctgtattgaattggttgctgagtgacttacagaagtacgctctgggcttccagcatgcactgtctccctctacttcaacatgcaagcataaagtgggggatacagaaggcgaataccacagggctagtagcgagaattgctatagtgtgtacgcagaccaagtcaatatagattacctgatgaacagacctcagaatctgaggctggagatgaccgctgctaagaacaccaataataaccagaatacttgcgaagaggactgtcctggctccaccatgggttacatggcacagagtacacagtacgagaaatgtggtgggggccagagcgccaaagccctgagcgtgaaacagctggaatcacacagggcccctggcccttcaacctgccagaaagaaaaccaacacttggattctcagaaaatggacatgagcaatatcgtcctcatgcttatccagaagcttttgaacgaaaatccttttaagtgcgaagatccctgtgagggagagaataagtgttcagaaccgcgtgcctcaaaggccgcctcaatgtccaacaggtccgacaaagcagaagaacagtgtcaagaacaccaagaattagactgtacgtcgggcatgaaacaggccaacggacagttcatagacaaactggttgaatcagttatgaagctgtgccttataatggctaaatatagtaacgatggtgccgccttggctgagctggaagaacaagccgcgtctgccaataaacctaacttcagaggtacaaggtgcatccactcaggggcaatgccgcagaactaccaggattccctgggccatgaagttatcgtgaataaccagtgtagtaccaacagcctgcagaagcagctccaggccgtcctacagtggatcgccgcgtctcaattcaacgtgcctatgctgtacttcatgggagacaaggacggacagttagaaaaactcccgcaggtgagcgcaaaggcagccgaaaaggggtatagtgtggggggcctgctacaggaggtgatgaaattcgctaaggaaaggcagcctgacgaggccgttggaaaggtcgcaaggaagcaactgctggactggctactggccaatctttag

SEQ ID NO: 106697 - DNA, 2538 bp, synthetic construct
  misc_feature 1..2538: note = Description of Artificial Sequence: Synthetic coding sequence
  source 1..2538: mol_type = other DNA
atgtctgacgatatagactggctgagaagccatcggggggtctgcaaagtcgatttgtataatcctgaaggccagcaggatcaagatcggaaagtgatttgcttcgtggacgtctctactctgaacgtggaagacaaagactacaaggacgccgccagcagtagttcagaagggaatctgaatctgggaagcctggaggagaaagaaatcatcgttatcaaggatactgagaaaaaggatcaaagcaaaacggagggcagcgtctgtctctttaaacaagccccaagcgatccagtctctgtgctgaactggctcttgagcgatcttcagaaatatgccctgggatttcagcacgccctttccccctccacttctacctgtaagcataaagtgggcgataccgaaggggaatatcacagagcctcaagtgagaattgttacagcgtgtacgcggatcaggtgaatatcgactacctgatgaataggcctcaaaacctgcggctcgagatgactgccgccaagaatactaacaacaatcagagtcctagcgcaccccccgccaaacctcccagtactcagagagccgtgatctcccccgacggtgagtgctcaattgatgacctgtctttctatgtgaatcgcctgtcctctttggtcatccaaatggcccataaagaaattaaagagaagctggaagggaaatcaaagtgcctgcaccactccatctgcccttcccccgggaataaagaacgtattagtccaagaacacctgcctctaagatagcgtctgaaatggcctacgaagcagtggagctgacagcagcggaaatgcgaggcaccggcgaggagtcgagggagggcggccagaaatcctttctgtattccgaactgtctaacaaaagcaagtccggggataagcagatgtcccagcgggagtcgaaggagttcgccgatagtatttcaaagggcctaatggtatacgccaaccaggtagcgagcgacatgatggtgtccctgatgaaaacattaaaggttcacagtagcggaaagcccatcccagcatcagtcgtgttgaaacgggtgctgctacggcatacaaaagagattgtgtcagaccttatagacagctgcatgaagaacctgcacaatatcaccggtgttctgatgacggattccgacttcgtgtctgctgtaaaacggaacttattcaaccaatggaagcagaacgccactgacattatggaagcaatgttaaagagactggtttccgctctaattggtgaggaaaaagagaccaagtcacaatccctctcttacgcttctctgaaggccgggtcccacgacccgaagtgtcgcaaccagtcactggagtttagcactatgaaagctgaaatgaaagagagagacaaagggaagatgaaaagcgatccatgtaagagtttaaccagtgccgaaaaagttggcgagcatatcctgaaagaaggtctaacgatttggaaccaaaagcaaggaaactcttgcaaggtggccaccaaggcgtgttctaacaaagatgaaaagggagaaaaaatcaatgctagcactgattctctcgctaaggatctaatagtcagcgctctcaagctcattcagtatcaccttacacagcagacgaaaggtaaggatacgtgtgaagaagattgcccaggcagcactatggggtatatggctcaatctacacagtacgaaaaatgcggcggtgggcagtctgccaaggcattaagcgtcaaacagctcgagtcccaccgcgccccaggaccaagtacctgccagaaggagaaccaacacctggattcacaaaaaatggacatgtctaatatcgttctgatgttgattcagaagttgttgaacgaaaaccccttcaaatgtgaggatccctgtgagggggaaaacaagtgcagtgaacctcgggcttccaaagccgcatcaatgtccaatcgttctgataaggccgaggaacagtgccaggagcaccaggaattggactgcacctccggtatgaagcaagccaacgggcagtttatcgacaaactagtggaaagcgttatgaaactttgtttaattatggcgaaatactccaacgacggggcagcgttggcagagttggaagagcaagcggcctctgctaataagcctaatttcaggggcacgcgttgtatccatagcggcgcaatgccccagaactatcaggactcactcgggcatgaagtgatcgtaaacaatcagtgttcaacaaacagcctccagaaacaattacaggctgttctccaatggatagccgctagccagttcaacgttcctatgttatacttcatgggggacaaagacggacagctggaaaaattgccacaggtcagtgctaaggcagccgaaaaaggctactcggttggagggctcttgcaggaggtcatgaaattcgcaaaggaaaggcaacccgacgaagcggtagggaaagttgctagaaagcagctgcttgattggttgctggcaaacctgtag

SEQ ID NO: 106698 - DNA, 765 bp, synthetic construct
  misc_feature 1..765: note = Description of Artificial Sequence: Synthetic coding sequence
  source 1..765: mol_type = other DNA
atgtccgatgacattgactggttgcggagccaccgcggcgtatgcaaggtcgatttgtataaccccgagggccagcaggaccaggacagaaaggtgatttgcttcgtggacgtcagcacgctcaatgtcgaggacaaggattacaaggacgccgcatcttcttcctctgaaggaaatcttaatctgggctcactggaggagaaagaaattatagtgataaaggatacagaaaaaaaggaccagtctaagactgaaggcagcgtatgtctgttcaaacaagccccatctgatcctgtctccgttctgaattggctgctgtccgaccttcagaaatacgctctgggttttcaacacgcactatctccctccacctcgacctgcaaacacaaagtgggggatacagaaggcgagtaccatcgtgccagctcagaaaattgctactccgtttatgcggaccaggtgaatatcgactacctcatgaaccgtccccaaaatctgcgtttggaaatgactgcagcaaagaataccaataataaccagtccccgagtgctcccccggctaaacctccatccactcaacgcgctgtgatcagcccggacggggagtgctccatcgacgacctgtctttctatgtgaatcggctgtcctctcttgtcatacagatggctcataaggaaatcaaggagaaactggaggggaaatcaaaatgccttcaccattcaatttgcccatctccaggcaataaagagaggatctctccttag

SEQ ID NO: 106699 - DNA, 642 bp, synthetic construct
  misc_feature 1..642: note = Description of Artificial Sequence: Synthetic coding sequence
  source 1..642: mol_type = other DNA
atgtccgatgatattgattggctgcgctctcaccggggagtttgcaaggtcgacctctataatccagaagggcaacaggaccaagaccgcaaggtgatctgttttgtggacgtctcaacgctgaacgtagaagacaaagactacaaagatgcggcttcatcgtcctctgagggaaacctgaatctgggaagtctggaagaaaaggaaatcattgtgattaaggacaccgaaaagaaagatcagagcaaaacagaaggctccgtgtgcctgtttaaacaggccccaagtgacccagtgtccgtgctcaattggctgctctccgatctccagaaatatgctctcggctttcaacatgcgttaagtcctagtacatctacatgtaagcacaaagtcggtgataccgagggcgagtaccatagggcctcatccgaaaattgctactccgtatatgctgatcaggtgaatattgattatctaatgaacagaccgcaaaatctgagactggagatgacggctgctaagaataccaataacaaccagaatacttgcgaggaggactgtcctggatcaacaatgggttacatggcacagtctacccagtacgagaaatgcgggggagggcaatccgccaaggccctgtag

SEQ ID NO: 106700 - DNA, 552 bp, synthetic construct
  misc_feature 1..552: note = Description of Artificial Sequence: Synthetic coding sequence
  source 1..552: mol_type = other DNA
atggataattgtctggctgccgccgcattgaacggcgttgatcgaaggagccttcagcggtcggcacgcctcgcactcgaggtcctcgaacgcgccaaacgccgcgccgtggattggcatgcgctggagagacctaagggatgcatgggggtgctggcacgggaggcgccacacctggagaagcaacctgccgccggtccccagcgagttctgccaggcgaaaagtactactcctccgtgcccgaggagggaggggccacccacgtctacaggtaccatagaggggaaagcaagctacacatgtgtctggatatcgggaatgggcagagaaaagatcggaagaagacttctttaggtccaggcggaagttaccagatatctgagcatgcacccgaagcgtcacagcccgccgagaatatctccaaggacctctatatcgaggtctacccgggcacgtattccgtgactgtaggtagtaatgacctcaccaagaagacacacgttgtggccgtcgacagcggccaatctgtggatcttgtgttccccgtgtag

SEQ ID NO: 106701 - DNA, 552 bp, synthetic construct
  misc_feature 1..552: note = Description of Artificial Sequence: Synthetic coding sequence
  source 1..552: mol_type = other DNA
atggataactgtctcgctgctgcagcactgaacggtgttgatcgcagatccctgcagaggtctgcgagacttgccctagaggtgttagagcgggctaaaaggcgcgccgtagactggcatgctctggaaagacctaaaggctgtatgggtgtactggcacgggaagccccccatctggaaaaacaacccgccgctggaccacaacgtgtgctgcccggggaaagggaggaacgcccgccaactctgagcgctagctttcgcacaatggctgaattcatggattatacttcctcccaatgcgggaaatattactcttccgtccccgaggagggaggagcaacacacgtgtaccggtatcacagaggagagtcgaaactacacatgtgcctagatatcggaaatggacaggccgagaacatctctaaagacctgtacatcgaggtgtacccaggcacttactccgttaccgtcggttctaacgacctgactaagaaaactcacgtggtggctgttgacagcggccagagtgttgacctggtttttccagtgtag

SEQ ID NO: 106702 - DNA, 633 bp, synthetic construct
  misc_feature 1..633: note = Description of Artificial Sequence: Synthetic coding sequence
  source 1..633: mol_type = other DNA
atggacaactgccttgctgctgcggctctgaatggagttgaccggagatctttgcagcgctcagcccgcctcgcccttgaggtgttggagagagccaaaaggcgagcagtggactggcacgcactcgagcgtcctaaggggtgtatgggagtcctggcacgggaagcaccacatctggagaagcagccagcagccggccctcagcgagtgctgcccggggagagggaagagaggccaccgacattaagcgccagtttcagaacgatggccgagttcatggattacacctcatcccagtgtggaaaatactattcgtccgtccccgaggagggaggcgccacacacgtatataggtatcatcggggggagagtaaattgcatatgtgccttgatattggcaacggccagcgcaaagatcggaagaagacatccctcggtcctggaggttcttaccagatatctgagcatgccccggaggcaagtcagcccgccgagaatatttctaaggatttgtacatagaagtgtatccggggacctactctgtaacagtggggtctaacgatctgaccaagaagactcacgtggtggccgtcgactccggacagagcgtggatttagtctttccagtctag

SEQ ID NO: 106703 - DNA, 552 bp, synthetic construct
  misc_feature 1..552: note = Description of Artificial Sequence: Synthetic coding sequence
  source 1..552: mol_type = other DNA
atggataattgtttagccgccgcagccctcaacggtgtggaccggcgttcattgcagagatcagccagactggccctcgaggtgctcgaacgcgctaagaggcgcgctgtcgattggcacgctttggagaggcccaaggggtgtatgggcgtcctggctcgggaggcacctcatttagaaaagcagcccgctgccgggcctcagagagtactgccaggggaaaagtactactcctcagttcctgaggaggggggggcgacgcatgtgtacagatatcatagaggagagagcaagctgcacatgtgcctagacattggcaatggccaacgaaaagacaggaaaaaaacatcccttgggcccggtggttcttaccagatttcagaacatgctcctgaggcctcacagccagccgaaaacattagcaaggatctgtacatcgaggtttacccaggcacctattctgtgactgtggggtctaatgatctcaccaaaaagacacatgtggtggccgtggactctggccaaagcgtggatctggtgtttcccgtctag

SEQ ID NO: 106704 - DNA, 633 bp, synthetic construct
  misc_feature 1..633: note = Description of Artificial Sequence: Synthetic coding sequence
  source 1..633: mol_type = other DNA
atggataactgcctcgcagctgcagccctgaacggcgtggatcgtcgtagtcttcagcggtctgcacgtctcgctttagaggtccttgaaagagctaaacggcgagctgtcgactggcacgccctggaaaggccaaagggatgtatgggggtactcgcccgagaagcaccacacctggagaaacaacctgcagctggaccccagagggtgttgccaggcgaacgcgaggagagaccacctacattatcagcctctttcagaacgatggcggagtttatggattataccagcagtcaatgcggcaagtactactcatcggtacccgaagaaggcggcgctacccacgtatacagataccataggggggaatccaagttgcatatgtgtttggacatcggaaatggtcagcgcaaagataggaaaaagacttcgctaggtccggggggttcctaccagattagtgagcatgcaccagaggcctctcagccagctgagaatatcagcaaagatctttacatagaagtgtacccaggaacttacagcgttaccgtgggctcaaacgatctgaccaagaaaacccatgtggttgcggtcgattctggacagagcgtggacttggtgttcccggtgtag

SEQ ID NO: 106705 - DNA, 1479 bp, synthetic construct
  misc_feature 1..1479: note = Description of Artificial Sequence: Synthetic coding sequence
  source 1..1479: mol_type = other DNA
atgggattccagcgaagattcttccaccaggatcagagccctgtgggggggcttaccgcagaggacatcgagaaggcaaggcaagccaaggctcgcccagagaataagcagcacaagcagactctgtcagagcacgccagagagaggaaggttccagttacgcggatcgggaggcttgccaattttggcgggctggccgtgggactaggattcggtgcccttgctgaggtagctaagaaatccctgcgctccgaggatcccagcgggaagaaagctgtcctcgggtcttcccccttcctgtcggaagcaaacgcggaacgtatcgtccgcactctttgtaaagttcggggcgctgcattgaaactggggcaaatgttgagtatccaggacgacgccttcatcaacccacacctggcaaaaattttcgaacgagtgagacagagcgctgatttcatgcctctgaagcagatgatgaagaccttaaataacgatctcgggcctaactggagagataagctagagtatttcgaagaacggcccttcgctgccgcttcaattggacaggttcaccttgcacgaatgaagggagggcgggaagtagccatgaaaatccaatacccgggcgtagctcagagcattaattctgatgtgaataatctcatggctgttttgaacatgagcaacatgctgccagaaggactgttcccagaacacctcatcgatgttctcagacgggaacttgcattagaatgtgattatcagcgggaagccgcctgcgcgcgcaagttcagagatctcctgaaaggacacccctttttttacgtccccgaaatagtggacgaactatgcagcccgcatgtgcttaccacagaactggtgtcaggattcccactggatcaggctgaggggctgagtcaggagatacggaatgagatctgctataatatcctcgtcttgtgtttgcgagaactgtttgaattccatttcatgcagacagaccccaactggagcaatttcttctacgatcctcaacagcacaaggttgccctcctggactttggggctacacgggaatatgatcggagcttcacggatctctatatccagataatccgtgcagctgccgatcgcgatcgagaaacggtcagagccaagtctatcgaaatgaaattcctcactggatacgaggtaaaggtgatggaagacgcacatctcgacgcaatacttattctgggtgaggcatttgccagtgatgaacctttcgacttcggaacgcagtctacaaccgagaagattcacaatctgatccccgtaatgctgaggcacaggttggtgcctcctccagaggaaacctactccctccatcggaaaatgggggggtcctttctaatctgctcaaaactcaaagcacggtttccctgcaaggccatgtttgaagaggcttacagcaactattgtaagagacaggcgcagcagtag

SEQ ID NO: 106706 - DNA, 1719 bp, synthetic construct
  misc_feature 1..1719: note = Description of Artificial Sequence: Synthetic coding sequence
  source 1..1719: mol_type = other DNA
atggccgccatattaggggacacaatcatggtagctaaagggctggtgaaacttacccaggccgctgtggagacccatctacaacaccttggcatcggtggcgaactgattatggggcccgcacccgcctacgtcgcatccggaccatttagagaggccgggtttcccggacaagctagcagcccgctgggcagagctaacggacggctctttgcaaatccccgggatagcttttcagccatgggctttcagcgccgattcttccaccaagaccagtctccggtcggcggactgacagcagaagatatcgagaaggcaaggcaagctaaggctaggcctgagaataaacagcataagcagaccctatctgagcatgcgagggagaggaaggtgcctgtgaccagaattggaaggctcgccaacttcggcggtttagcagtcggcctcggtttcggagccctggccgaggttgccaagaagagcctccgtagcgaggacccgtccgggaagaaagccgtcctgggatcatctcccttcttatcggaggccaacgctgagcgcatcgtgagaacactctgcaaagtcaggggcgctgccctaaagcttggccagatgttgtccattcaggatgatgcctttattaatcctcatcttgccaaaatttttgaaagggttcgacagtctgcagactttatgcccctgaagcagatgatgaaaacactgaataacgacttagggcccaactggagggacaagttggaatactttgaggagagaccgtttgccgccgcttctattggccaagtccatctcgcaaggatgaagggcggcagagaagtggccatgaagattcaataccctggagtggcccaatcaatcaattccgacgtgaataacttgatggccgtacttaacatgagtaacatgctacccgagggacttttcccggaacacctgatagacgtgctgaggagggagttggcgttggagtgcgactaccagagagaggccgcttgtgcaaggaagttcagggatttactcaaaggccacccattcttctacgtacccgaaatagtcgatgaactctgctctccgcacgtcctaacaactgagctggtgagtggctttcctctcgatcaagctgaaggcctgagccaagaaatccggaacgagatttgttataatatactggtcctgtgtctgcgggagctctttgagttccatttcatgcaaaccgatcccaattggtccaatttcttctacgatccacagcagcataaagtagccctactagacttcggggccacaagagagtatgatcgctctttcacagacctgtacatccaaataatacgcgccgcagcggaccgtgatagagaaaccgtgcgggccaagtcaatcgaaatgaaatttctgacgggttacgaagtgaaagtcatggaggatgcacatctcgatgcaatcctgatcctgggcgaagcattcgcttctgatgaaccctttgatttcgggactcagagcactacggagaagattcacaatctcatccccgttatgctgcggcataggctggtgccaccgccagaggaaacctatagcttgcacaggaaaatgggtggctccttccttatttgtagcaaacttaaggccagatttccatgcaaggcaatgtttgaagaggcctactctaactattgcaaacgccaggcgcaacagtag

SEQ ID NO: 106707 - DNA, 1944 bp, synthetic construct
  misc_feature 1..1944: note = Description of Artificial Sequence: Synthetic coding sequence
  source 1..1944: mol_type = other DNA
atggctgccatcctgggggacaccattatggtcgcaaaggggctggtgaaactgacccaggcagctgttgaaactcacctgcagcacctggggatcggaggggaattgattatggccgctcgtgcgcttcaatctactgcggttgagcagattggaatgtttctgggcaaagtgcagggacaagacaaacacgaggagtacttcgccgaaaactttggaggacccgaaggggagttccatttctctgtgccacatgccgctggagcctctacagacttttcctcggcaagtgcaccagaccagtccgccccgcctagcttaggccacgcccatagtgagggtcctgcaccagcatatgttgcctccggtcctttccgtgaggcagggttccccggacaggcaagctcccccctcggaagggccaatggcaggttattcgccaatcctagggactccttttcagccatgggattccagcgcaggttcttccaccaggaccagtctcccgtgggaggattgaccgctgaggacatagaaaaggcgaggcaggccaaagctcgacccgagaacaaacaacacaagcagaccctgtcagagcacgctcgggagcggaaagtcccagtgactagaatcggaaggctcgccaactttggagggcttgcagtagggctcggcttcggtgccctcgcagaggtcgcaaagaagtcgctgcgttctgaggacccatctggcaagaaggcggtgctgggctcatctcctttcctttccgaggcaaacgctgaaaggatcgtgagaactctgtgcaaagttcgcggcgctgcattgaaactcggtcagatgctttctattcaggatgatgccttcattaatccacacctggcaaaaatttttgagcgagtacgccagagcgctgattttatgccactcaaacagatgatgaagacacttaacaatgacctgggacccaattggcgggataagctggagtatttcgaagagagaccttttgcggccgcttccattggtcaggtgcatctcgcgcgcatgaaaggtgggcgcgaggtggcgatgaaaatccagtatccaggagtcgcgcaatccatcaactctgacgttaataacctgatggccgtgctgaatatgagcaatatgcttcctgaaggcctatttcctgagcacctcatagacgtcctgagacgggagctggccctggagtgcgattatcaaagagaggctgcctgcgcacgcaagttcagagacctgctcaaaggtcaccccttcttctacgtccccgaaattgtggacgaattgtgtagtcctcacgttcttaccactgagttggttagtggctttccgttggaccaagcagaagggctcagtcaagagatccgcaacgaaatctgttacaacattctggtgctgtgcttgcgagagctattcgaattccactttatgcaaaccgatcccaattggtctaatttcttctatgatccacagcagcacaaggtggctctgctggacttcggcgctacacgcgagtacgatcgctccttcaccgacctgtatattcagatcatacgggcagccgcagatagagaccgtgagactgtgcgcgccaaaagtatcgagatgaagttccttaccggctatgaagtaaaggtcatggaagacgcccacctggacgccatcctgatccttggggaggccttcgcttccgatgaacccttcgattttggaacccagagcacaaccgagaaaatccataacttaatcccagtgatgctgcggcatcggcttgtgccgcctcccgaggagacatattcacttcataggaagatgggcggttcttttctgatctgctcaaagctgaaggcccgtttcccatgcaaagcaatgtttgaggaagcttattctaactactgtaagcggcaggcacaacagtag

SEQ ID NO: 106708 - DNA, 1788 bp, synthetic construct
  misc_feature 1..1788: note = Description of Artificial Sequence: Synthetic coding sequence
  source 1..1788: mol_type = other DNA
atgttcctgggaaaggttcagggccaggataagcacgaagagtattttgcagaaaattttggaggtcctgagggcgagtttcacttttccgttcctcacgccgcaggcgcttcgactgacttttcatcagcctccgcgcccgaccaaagcgcaccccctagcctgggccacgctcactcagaaggcccagcacctgcttatgtagccagtggccccttccgggaggcaggtttccccggccaggcctcaagtccacttggtagagccaatggccgcctttttgcaaatcctagagattccttttccgcaatggggttccagagacgttttttccatcaggaccaaagccccgttggaggcctgactgccgaagatattgaaaaggcccgccaggcaaaggcccggccagaaaacaaacagcataaacaaaccctgagcgaacatgcccgcgagcggaaggtgcccgtgaccaggatcggccgcctcgccaactttgggggcttagcagtgggactgggcttcggagccctggctgaggtggccaagaagagtctccggagcgaagatccttctgggaagaaggctgtcctcggctcatcacccttcctctccgaagccaacgcagaaaggattgtaaggactttatgtaaggtgcggggcgctgcactcaagctgggccaaatgctgagcatccaggatgacgcgttcattaacccacacctggctaagatctttgagagggtccgccaaagtgccgatttcatgcccctgaagcagatgatgaagaccctcaataatgacctgggacccaactggagagataaactggaatattttgaggagcgtccttttgcagcagcttctatcggccaggtgcacctggctcgcatgaaaggcggaagagaggtcgccatgaagatacagtatccaggggtggctcagtcaatcaattcagacgtgaataatttaatggcagtacttaatatgtctaatatgttacccgaaggtctttttcccgagcatcttatcgacgttttgagacgggaattggctctcgaatgtgactaccagcgtgaagcagcttgcgcccggaaatttcgagatctacttaagggccatcctttcttctatgtccctgagatcgtggatgaactctgcagcccccacgtcctaaccactgagctggtttccgggtttccactggatcaggctgagggactgtcacaggaaattagaaacgagatatgctacaatattctggtcctgtgtttacgcgagctcttcgaatttcacttcatgcagaccgatcctaattggtccaattttttctacgaccctcaacagcacaaggtggctctgctggacttcggcgccacccgggagtacgatcgctcattcacagacttatatatacaaatcatcagagcggctgctgaccgggacagagagacagtgagggctaagtccattgagatgaaatttctcacgggatacgaggtgaaggtgatggaggatgcccatctggatgccatactgatactgggagaagccttcgcttccgatgaacctttcgattttggaacccagagtacaacagagaagattcacaacctcattccggtcatgctgagacaccggctggtgccaccccctgaagagacctacagcttacatcgtaagatgggcggttcctttcttatttgctctaagcttaaagcccggtttccttgcaaggcgatgttcgaagaagcctattcaaactattgcaagcggcaggcccagcagtag

SEQ ID NO: 106709 - DNA, 1944 bp, synthetic construct
  misc_feature 1..1944: note = Description of Artificial Sequence: Synthetic coding sequence
  source 1..1944: mol_type = other DNA
atggccgccatcctgggtgacactatcatggttgctaaaggcctggtgaagctgacccaagcggctgtggagacacatcttcagcacctcggaataggcggcgaactgattatggccgctcgagctctccagtcaaccgcagtggagcagattgggatgttccttggaaaagtacaagggcaggacaagcatgaggaatacttcgcagagaactttggcgggcccgaaggtgagtttcacttctccgtcccacatgcggccggggccagcaccgacttttcctcagcttctgctcccgaccagtccgcccctccctccctaggccatgcccactcagaaggcccagctcctgcttacgtggctagcggcccttttcgggaagccgggttccctggacaggcatctagccctctgggccgcgcgaatggacgactgttcgcaaatccaagagactctttctcggcaatgggatttcagcggcgcttctttcaccaggatcaatcccctgtcgggggccttaccgccgaggatatcgaaaaggcgcggcaagctaaggctagacccgagaacaagcagcataagcaaacactttcagagcacgcacgagagcgcaaggtgccagtcacacgcattggccgcctggccaacttcgggggcctggctgtcggactggggttcggagccctcgccgaggtggccaaaaagtcgctacgaagcgaagacccaagcggaaaaaaggcagtgcttggctcgagcccatttctttcagaggccaacgccgaacgaattgttcggactctctgtaaagtcaggggcgcggcacttaagctaggacagatgttgtcaatccaagacgacgcattcatcaacccccatctggcaaaaatctttgagcgtgtgcggcagagcgctgattttatgccgcttaaacagatgatgaaaactttgaacaacgacctgggcccgaactggcgggataagctcgagtattttgaggaaagacccttcgctgctgcttccattggccaggtgcacttagcccgcatgaaggggggccgtgaagtcgcaatgaaaatccaataccctggcgttgcccaatccatcaattcggacgtgaataacctcatggctgtgcttaatatgagcaacatgctgcccgaaggtctgttccccgagcatctgattgatgtgctacgccgcgaacttgccttagaatgtgactatcaacgggaggctgcctgcgcccggaaatttcgggacctgttaaaggggcatccttttttctacgtgccagaaattgtcgacgagctctgtagtcctcacgttctaacaacggaactggtttcaggatttcctctggaccaggcagagggcctgtcacaggagatcagaaatgaaatttgctacaatatactcgtgctgtgcctcagagagctgtttgagtttcatttcatgcaaactgatcccaattggtcaaacttcttttatgacccacagcagcacaaggtggcacttctggacttcggggctacaagagaatacgatagatcattcactgacctgtatattcaaatcatccgggctgctgctgaccgcgatagagagacggttagagcgaagtccatcgaaatgaagtttctgactggatatgaagtgaaagtgatggaagacgcccaccttgatgcaattctgatcttaggggaagccttcgctagcgatgaacctttcgattttggtacccagagtacgaccgaaaagattcacaaccttatccctgtcatgctccgccacaggcttgtgccccccccagaagaaacatattcactccacaggaaaatgggcggtagcttcctcatctgctcaaagctgaaagccaggttcccttgtaaggctatgttcgaggaggcctattccaactattgtaagaggcaggcacagcagtag

SEQ ID NO: 106710 - DNA, 1797 bp, synthetic construct
  misc_feature 1..1797: note = Description of Artificial Sequence: Synthetic coding sequence
  source 1..1797: mol_type = other DNA
atggccgcccgggctctacagagcaccgcggtggaacagataggaatgttcctgggaaaggtccagggacaggacaaacacgaagagtatttcgctgagaatttcggggggcctgaaggggagtttcacttcagctctgcttcagccccggatcagtcggcacccccaagtctcggccacgcccacagcgaagggcccgcaccagcatatgtagcctccgggccttttagggaagccggctttccgggacaggcatcgtcacctctgggccgcgctaacggccggctgtttgccaatccccgggatagcttctcagccatggggtttcagcgacgtttttttcaccaggatcagagcccagtgggaggccttacggcagaagatatagagaaggcgcgccaggccaaggcgcggcctgagaacaagcagcacaagcagaccctgtctgagcatgcccgcgagaggaaggtccctgtcacccggatcgggaggttggccaattttggagggctcgccgtcggacttggcttcggggctctggctgaggtcgcgaagaagagcctgagatccgaggatccctccggtaaaaaagccgtattggggtctagcccatttctgtctgaggcaaatgccgaaagaatcgtgaggaccctatgtaaggtaaggggcgccgccttaaagctcgggcaaatgctgagcattcaagacgacgccttcatcaacccgcatctggccaagatttttgaacgggtgaggcagtcagcagatttcatgcctctcaagcagatgatgaagaccctgaataacgatctggggcctaattggagggacaaacttgaatacttcgaagaacgcccgttcgctgccgccagcatcggccaagtgcacttggcacgcatgaagggcggaagagaggtggccatgaagatccagtaccctggggtagcgcagtcaatcaactccgacgttaataatcttatggccgtcctgaacatgtcgaacatgttaccagaagggctgttcccagaacatctcatcgacgtgctgaggcgcgagttggccctggagtgcgattaccagagagaggccgcctgcgctcgcaagttccgcgacctcctcaaaggccacccttttttttacgtaccagaaatagtggatgagctgtgtagcccgcatgtgttgacaactgagctcgtatccggattcccccttgatcaggctgaaggcctttcacaggaaattcggaatgagatctgttacaacatccttgtgctgtgtctaagagagctattcgagttccacttcatgcagaccgaccccaactggagtaatttcttctacgatcctcagcagcataaggtcgcactcttggattttggcgccacccgcgagtatgataggagctttacagacctgtacattcagatcatccgagcggcggctgatcgggatcgagagacagtccgcgccaagtctatcgagatgaaatttctgactggatacgaagtgaaggtaatggaggatgcccatctggacgcgatcctgattctaggcgaagccttcgcctcagacgaacctttcgacttcggtacccagtccacaactgagaagatacataaccttataccggtgatgctgagacaccgacttgtgccccccccagaagagacatacagcctgcatcggaagatgggggggtcttttctaatttgctcaaagttgaaggcaagatttccctgtaaagcaatgttcgaggaggcgtacagtaactactgtaagcgccaggcacaacaatag

SEQ ID NO: 106711 - DNA, 966 bp, synthetic construct
  misc_feature 1..966: note = Description of Artificial Sequence: Synthetic coding sequence
  source 1..966: mol_type = other DNA
atgttgagtatccaggatgatgcatttattaacccacatctggccaaaatattcgagcgagtccgtcaaagcgcggattttatgcctctgaagcagatgatgtacccaggggtggcccagtctataaattcagatgtgaataatctgatggctgtgcttaacatgtctaacatgcttccagaagggctctttcctgaacacctgatcgatgtcctgcgacgtgaactagcgttggagtgtgattatcagcgagaagcggcctgcgcgcgaaagttccgcgatctgctgaagggtcacccatttttttatgtcccagaaatcgttgacgaactgtgtagcccacatgttttaaccactgagttggtctcaggatttcccttagaccaggccgagggcttaagtcaggaaatccgcaatgagatctgctacaacattcttgttctctgtctgcgggagctctttgaattccatttcatgcagaccgacccaaattggagtaatttcttttatgacccccagcagcacaaggtcgcgttactggattttggtgccacgagggaatacgacagaagtttcacggatctctatatccagatcatccgcgccgccgcagatagagatcgcgagactgtcagagcaaagtctatcgagatgaagttcttaactggttacgaagtaaaggtgatggaagatgcgcatctcgatgccatcctgatactcggggaggccttcgcgagcgacgaaccttttgactttggaacccagtctactaccgagaagattcacaatctgatcccagtgatgctaagacaccgcctagtcccccctcccgaggaaacgtattcattgcaccgaaagatgggcggcagctttctgatctgctctaagctcaaggcccgctttccttgcaaggccatgtttgaggaggcctatagcaattattgcaaacgacaggcccagcagtag

SEQ ID NO: 106712 - DNA, 1107 bp, synthetic construct
  misc_feature 1..1107: note = Description of Artificial Sequence: Synthetic coding sequence
  source 1..1107: mol_type = other DNA
atgctgagcatacaggatgacgccttcatcaacccacacctggccaaaatcttcgagcgcgtccgtcaatctgctgactttatgcctttgaaacagatgatgaagacactcaataatgacctggggccgaattggcgcgacaaactggagtattttgaggagcggccatttgccgccgcttccataggtcaggttcacttagcccgtatgaaggggggcagggaggtagcaatgaaaatccagtaccctggggtggcccagagcattaattcagatgtcaacaatctgatggccgtgctcaacatgtccaacatgctgcctgagggtctatttcctgagcatcttatcgacgttctcagaagagagcttgcgcttgaatgcgattatcaaagggaggcagcttgcgcccggaagttccgcgatctcttgaaaggccacccattcttctacgtcccggaaatcgtggacgagctctgttcgcctcacgttcttaccactgagctggtgtcgggattccccctagaccaggccgaaggactgtcccaggagattcggaatgagatttgttacaacatccttgtcctctgtcttagggagctctttgaattccacttcatgcagacggatccgaactggtcgaacttcttttatgatcctcagcagcacaaggtcgcactgttggatttcggtgccacccgcgagtatgatagatctttcactgacctgtatatccagatcattagagcagccgccgacagggaccgggaaacggtccgggctaagagtatcgaaatgaagttcttgactggctacgaggttaaagtgatggaggacgctcacctcgatgccatactcatactgggcgaggcctttgcaagtgatgagccttttgattttggcacccaaagcaccaccgagaagatccacaatctgatccccgtgatgctccgccatcgcttggttccaccacctgaagagacctactccttacacagaaagatgggcggcagctttttgatttgcagcaagttaaaggcacggtttccgtgcaaagccatgttcgaggaggcttacagcaattattgtaaacggcaggcacagcagtag

SEQ ID NO: 106713 - DNA, 3591 bp, synthetic construct
  misc_feature 1..3591: note = Description of Artificial Sequence: Synthetic coding sequence
  source 1..3591: mol_type = other DNA
atgccgacagcagagtcagaggccaaggtgaaaacaaaagtccggtttgaggaactcctgaaaacacattcagaccttatgcgcgagaagaagaagctgaaaaagaagctagttcggagcgaggagaacatttcccccgataccatacggagtaacctgcactatatgaaggaaactaccagtgacgatccagacaccattcggtccaatctgccccatataaaggagactaccagtgatgacgtttcagctgcaaacactaataatctgaagaaaagcacccgggtgaccaagaacaagcttcgcaatacacagctggcgactgagaaccctaacggcgacgcctccgtggaagaggacaagcaggggaagccaaataaaaaggtcatcaaaaccgtgccacagctgacaactcaggatctaaagccggagacacccgagaataaagtggactcaacccaccagaaaactcacacaaagccacagcctggcgttgaccaccaaaagagcgagaaagcaaacgagggtcgcgaagaaaccgacctggaggaagatgaggagcttatgcaggcatatcagtgtcacgtcaccgaggaaatggccaaggagattaaacgaaaaatacggaaaaagctcaaggagcagctcacatactttccttctgacactctgtttcacgacgataagctgtctagtgagaagaggaagaaaaagaaagaggtcccggtgttcagcaaagccgagaccagtaccttgactattagcggcgataccgtggaaggggagcagaagaaggagagtagtgttcgatctgtgtcttcagatagtcatcaagacgatgaaattagcagcatggagcagtcgactgaggatagcatgcaagatgacacgaagccaaagcccaaaaagacgaaaaaaaaaaccaaggccgtggccgataataacgaggacgttgatggcgatggtgtgcacgagatcaccagtcgtgactctccggtctacccaaaatgtctgctggatgacgatctggtattgggtgtctatattcaccgcactgatcgccttaaatctgattttatgataagccatcccatggtcaagatacatgttgttgacgaacacacaggccaatacgttaaaaaggacgattcaggtaggcccgtctcaagttattacgaaaaagagaatgtggactacatcttacccatcatgacacagccctacgacttcaaacaactaaagtcacgtttgcccgagtgggaggaacagattgtcttcaacgaaaatttcccatatctcctgagggggagcgacgaaagccctaaggtcatcctcttttttgagattctcgatttcttatccgtagacgaaattaagaacaactctgaggttcaaaaccaggaatgcggattcagaaagatcgcttgggcattccttaaactcctcggcgccaatggaaacgcaaacattaacagtaaactcaggctgcagttatactaccctccaactaaaccccggtctcccctgagtgtggtggaagcttttgaatggtggtcaaagtgtccacggaatcattacccatcaacactgtatgtgacagtccgcggcctaaaggtcccggattgtataaagccttcctaccgatctatgatggcacttcaggaagaaaagggcaagcccgtccactgcgagcggcaccacgaaagctcctctgtcgacacagaaccggggctcgaagaatcaaaggaagttattaaatggaagaggttacctgggcaggcctgtaggattccaaataaacatctgtttagcctgaacgctggtgagcgagggtgcttttgtctggattttagtcataacggcaggatactggccgccgcttgcgcttctcgcgatgggtatcccatcatcctgtatgagatcccgagcggcaggtttatgcgagaattgtgtggacatctaaatattatctacgacctaagttggtcaaaagatgatcattacattctgacatcttcttccgatggcaccgctaggatatggaagaatgaaatcaataacaccaacaccttccgagttctcccgcacccatccttcgtatacacagcaaaatttcatccagctgtccgcgagctcgtggttaccgggtgttatgattcgatgatcaggatctggaaggtggaaatgcgagaagacagtgctatcttagtgagacagtttgacgtgcacaagagctttatcaatagcctgtgcttcgatactgagggccaccacatgtactctggtgactgcaccggcgtcatcgtggtgtggaatacctacgtgaaaatcaacgacctcgagcattcggttcatcactggacgattaacaaagagattaaagaaactgagtttaagggaatcccaatctcttacctggaaatacaccccaatggaaagcggcttctcatccataccaaagattcgacactccggattatggacttgagaattctggttgccagaaaatttgtgggagcggcaaactaccgagagaaaatccattcaaccctcaccccttgcggaacattcttgtttgctggaagtgaagatggcatcgtctatgtgtggaatccagaaacaggtgagcaggtcgcgatgtactctgatctgccttttaagtcccccatcagagatatctcataccaccctttcgagaacatggtcgcattttgcgcgttcggacaaaatgaacccatcctgctgtacatctacgactttcacgttgcacaacaggaggctgaaatgtttaaacgatacaatgggaccttccctttacctggaatccaccagtctcaggacgctctgtgcacatgtccaaagttaccccatcagggatcttttcagattgacgagttcgtccatactgaatccagcagcactaaaatgcagctggtgaagcagcgcctcgaaaccgtcacagaggtcatccgctcatgcgctgctaaggtgaataagaacctgtctttcacttctcccccggcggtgtcttcccagcagagcaagctgaagcagagcaacatgctgactgcacaagagatcctgcatcagtttggcttcacccaaaccggaattatttccattgagaggaaaccttgtaaccatcaagttgacactgccccaacagtggtggccctctatgattatacagctaatcggtctgatgagcttaccatccacagaggtgacatcatacgagtgttctttaaggataatgaggactggtggtacgggtcgattggcaaaggccaggaaggctatttccccgccaatcatgtggctagtgagaccctttaccaggaacttcctcccgagattaaagagcgctctccacccctatctcccgaagaaaagaccaaaattgaaaaatctcccgcaccacagaaacagagcataaacaagaataagagccaggactttcgcttgggtagcgagagtatgacacacagcgaaatgcgaaaagagcagtcccacgaagaccagggacatattatggacacacgaatgcggaagaataagcaagctggcagaaaggttactctgatcgaatag

SEQ ID NO: 106714 - DNA, 3162 bp, synthetic construct
  misc_feature 1..3162: note = Description of Artificial Sequence: Synthetic coding sequence
  source 1..3162: mol_type = other DNA
atgcctaccgcagagtctgaggccaaggtcaagaccaaggtgcgctttgaagaattactgaagacccactctgatttaatgagagagaagaaaaagttgaaaaagaaactggtgcgcagcgaggagaatatttcgcccgacacgatccggtccaaccttcactatatgaaggaaacaacctctgacgaccccgatacaatccgttcaaatctgccccacattaaagagacgacatcagacgacgtcagcgctgcaaataccaataatctgaaaaaaagcactagggtgacgaagaacaaactgcgcaacactcaactagccacagagaaccccaacggggacgctagtgtggaagaagataaacagggcaagcctaataagaaggtcattaaaaccgtcccacagttgaccacccaagacctcaaacccgagaccccggaaaacaaggtagacagcacacatcaaaagacacacacgaagccgcagcccggtgtcgatcaccagaaaagcgaaaaggccaacgaaggccgtgaagaaacagacttggaggaggatgaagaactcatgcaggcataccagtgccatgtcactgaggagatggcgaaagaaatcaaacgcaagatccggaagaagctaaaggaacaactgacatatttccctagcgacactctgttccacgatgataaactctcaagcgaaaaaagaaagaaaaagaaggaggtcccagttttcagtaaggcggagactagtaccctgactatttcaggcgatactgtcgaaggcgaacagaagaaagagtcatccgtccgcagcgtaagcagcgactcccaccaagatgatgaaataagctcaatggaacagtcaactgaggactcaatgcaggatgataccaagcctaagcctaagaagacgaagaagaagacaaaagccgtggccgataacaacgaggatgtggacggcgatggagtgcacgagatcacttcacgagactctcccgtgtacccaaaatgcctcctagatgatgacctggtgctcggagtttacatccataggaccgatagattgaaatctgatttcatgatcagtcacccaatggtgaaaattcacgttgtggacgagcataccggacagtatgtcaagaaagacgactccggtcgcccagtctcctcctattatgaaaaagagaacgtggattacatcctacccatcatgacccagccatacgattttaagcagctaaagagtagacttcctgagtgggaagaacaaatagtctttaatgaaaacttcccgtacctgttgcgtggctcagatgagtccccgaaggtgatcctgttttttgaaattttggatttcctgtctgtggacgaaattaaaaacaattctgaggtgcagaatcaagaatgcggcttcagaaaaatcgcttgggcctttttaaaactattgggtgccaacggaaacgctaacatcaactctaagctgagattacagctgtattaccccccaaccaaaccaagatcgcccctttccgtggttgaggcatttgagtggtggtctaaatgtccccggaaccactacccgtcaactttgtatgtcacagtccggggcctgaaggtccctgattgtataaagcctagttaccggtctatgatggcgttacaggaagagaagggtaaacccgtgcattgcgagcggcaccacgaatctagttcagtcgacacagagcccggcttagaggagtccaaggaggtgatcaagtggaaaaggttacccgggcaggcatgtcgaataccaaataaacacctgttcagcctgaatgctggagagcggggctgtttctgtctcgacttctcacacaatgggaggatattggccgcagcttgcgcgagtcgagacgggtaccccattatactgtacgagatcccatctgggcgctttatgcgtgagctgtgtgggcacttaaatatcatctacgatctttcttggagcaaggacgatcattacatcctcacctcttcaagcgacggaaccgctaggatttggaagaatgagattaacaacaccaacacattccgggtcttgccacacccgtcctttgtgtatacagcaaaattccatcccgcagtgcgcgaactcgtggtgacggggtgctacgatagcatgatccgaatttggaaagtcgaaatgcgagaggactcagcaatcttggtccggcagttcgatgttcataagagttttattaatagcctgtgcttcgacacggagggccatcacatgtacagcggggactgtaccggagtgatagtggtgtggaacacctatgtcaagatcaatgatctcgagcacagcgttcatcactggacaataaacaaggagattaaggagactgaattcaagggtatcccaatttcctatcttgaaatccaccctaatgggaaaagactgctgattcacaccaaagattcaacactacgcatcatggacctacgcatactggtggcgcgcaaatttgtaggcgccgccaactatcgcgaaaagattcatagtacattaaccccatgtgggacctttctgtttgctggtagcgaggatgggatcgtgtacgtgtggaatccggaaacaggagagcaggttgccatgtactcggacctgcccttcaagtcccctatcagggatatttcataccaccctttcgaaaatatggttgctttctgcgcctttgggcaaaatgagccaatcctactctacatttacgatttccacgtggcacagcaggaagccgaaatgttcaagcgatataacggcacgttcccattacccggtatacatcagagccaggatgctctgtgcacgtgtcccaaactgccccaccaggggtctttccagatcgacgaattcgtgcataccgaatcaagttcaaccaagatgcaattggtaaagcagagacttgagacggtaacagaagttattcgctcttgtgctgccaaagtgaacaagaatttgagttttacgtcccctccagcagtgtcctctcagcagagcaagctcaagcagtctaacatgctcactgctcaggagatactacatcaattcgggtttacccagactgactctcactttgcggaattcaacacgtgcatcctgtggtggaagaagcattag

SEQ ID NO: 106715 - DNA, 165 bp, synthetic construct
  misc_feature 1..165: note = Description of Artificial Sequence: Synthetic coding sequence
  source 1..165: mol_type = other DNA
atgcctaccgccgagtcggaagctaaggtcaaaacgaaggtgcgctttgaggaactgctaaaaacacacagtgatttgatgcgggaaaagaaaaaactgaaaaaaaaactggttaggtccgaagagaatatttctaaccaggaaaaatcaatggccgtctggtag

SEQ ID NO: 106716 - DNA, 3591 bp, synthetic construct
  misc_feature 1..3591: note = Description of Artificial Sequence: Synthetic coding sequence
  source 1..3591: mol_type = other DNA
atgcctacagctgagtccgaagcgaaggtgaagactaaggtgcgcttcgaggagttgctgaagacccactcggatctgatgagggagaaaaaaaaactgaagaaaaaactggtgcggtccgaggagaatattagccccgacactattcgctctaacctgcattatatgaaggagaccaccagcgacgacccagataccatccgctcaaacctgcctcacataaaagagactacttccgacgacgtgtccgccgcgaacacaaacaatcttaagaaaagcactagagtgacaaaaaataaattgcggaatacacagctcgcgacagaaaaccctaatggcgatgcgagcgtggaagaggataaacaggggaaacccaacaagaaagttattaaaacagtgccccaattaaccacacaggatctgaagccagagacacccgaaaataaagtcgattccacacatcaaaagacccacacaaaacctcaaccgggtgtggaccatcaaaaatccgagaaggccaacgagggcagggaagagacagacctggaggaggacgaagagctcatgcaagcctatcagtgtcacgtcaccgaggagatggccaaggagataaaacgcaaaattcggaaaaagcttaaggagcagctaacgtatttccccagcgatactctcttccacgacgataagctgagtagcgaaaagagaaagaagaagaaggaggtgcccgttttcagtaaagccgaaacgtctaccctcaccatctcaggcgacaccgtagaaggtgagcaaaaaaaagagtcgtccgtgagaagcgtcagctctgactctcatcaggacgacgagatctcttcaatggagcagagcacagaagacagtatgcaggacgataccaaacccaagccgaagaaaacaaagaagaagactaaggctgttgccgacaataacgaagacgtcgatggagacggcgtgcacgagattacatctagggactcacctgtttatcccaaatgcctactggacgacgacctagtgcttggagtgtacatccaccggacagatagactaaaatccgacttcatgattagccacccaatggtgaagatccacgtggtggatgagcatacaggtcagtacgtaaagaaagatgactctgggagaccggtttccagctactatgaaaaagaaaatgtggactacatcctgcctataatgactcagccatatgatttcaaacagttgaaatcccgcctgcctgaatgggaggaacagattgtctttaacgagaacttcccatacctcctccgtggctctgatgaatcccctaaggtcatactgttctttgagatcctggatttcttgagtgtcgacgagattaaaaacaacagcgaggtgcagaaccaagagtgcggattccgcaagatagcctgggccttcctcaagctcctgggagcaaacggcaatgcgaatataaatagcaaattgcgcctccaattatattaccccccaaccaagccgcgcagccctctgagtgtggtggaagccttcgaatggtggtccaagtgccccagaaatcattacccaagtacgctgtatgttactgtgagaggactgaaggtccctgattgcatcaagccatcgtaccgcagcatgatggcgctgcaagaagagaaaggcaaacctgtccattgtgagagacaccacgaaagttctagtgtagacaccgaaccgggcctggaggagagcaaggaggtgataaagtggaagagactccctggacaggcttgccggattcctaacaagcatttgtttagtctgaacgcaggtgagagagggtgcttctgcctggactttagtcacaatgggcgcatcctggctgccgcgtgcgccagtagggacggttaccccatcatactgtacgagatcccatcaggaaggtttatgagagagctatgcggtcacctgaatatcatttacgatctcagttggtcaaaggacgatcattatatactcacctcctcctcagacggtacagcgcgaatatggaagaacgaaatcaataataccaacacatttagagtcttaccccatccatcctttgtatatactgctaaatttcaccctgctgtccgcgaacttgttgtgaccggatgttacgactccatgattagaatttggaaagttgaaatgagggaggactctgccatattggtaaggcagtttgacgttcacaaatctttcatcaacagcttgtgcttcgacaccgagggccaccatatgtattctggcgactgcaccggcgtgattgtggtgtggaatacctacgtgaaaataaatgatctggaacatagtgttcaccactggaccatcaataaagagataaaagaaacggagttcaagggcattccgatcagctacctcgagattcacccaaatgggaaacgcctgctgattcataccaaggactctactctgcgcataatggaccttagaatccttgtagctaggaagttcgtgggcgccgctaattaccgcgaaaaaattcacagtacgttaaccccctgcggaacgttcctgtttgcgggctctgaggacggcatcgtctatgtgtggaacccagaaactggtgagcaggtggccatgtactctgacttaccctttaaatcacccatcagagatatctcatatcatcctttcgagaatatggttgccttctgtgcctttggccagaacgagcctattctcttgtatatttacgattttcacgttgcccagcaggaggcggaaatgttcaaaaggtataatggcacttttccgctcccaggcatacatcaatcccaggatgccttgtgcacctgtcccaagttgccgcaccaaggttctttccaaattgacgagtttgtgcacactgagagttcctcgacaaaaatgcagctcgtcaagcagcgcctggaaactgtgaccgaggtaatacgctcctgtgcagccaaagttaataagaacttgtctttcacctcaccccccgcggtgtcctctcagcagtccaagttaaaacagagcaacatgctgacagcccaggaaatcctgcaccagttcggcttcacccagaccgggatcattagtattgaacgtaagccttgcaaccaccaggtcgatacggcaccaaccgtggtggctttatatgactataccgccaataggagtgatgagctgacaattcataggggggatatcatccgcgttttttttaaggacaatgaagattggtggtacggaagtattggaaaaggacaggagggttacttccctgctaaccacgtggcaagcgagaccctgtaccaagagttaccaccagaaattaaggagagatcacctccattgagcccagaggaaaaaaccaaaatcgagaagtccccggcccctcagaaacagtcaatcaacaaaaacaagagccaagattttcggctgggcagcgagtccatgactcacagcgagatgcgcaaggagcagtctcacgaggatcagggccatatcatggacacaaggatgaggaaaaacaagcaagctggtcgaaaggtgacattgatcgagtag

SEQ ID NO: 106717 - DNA, 3162 bp, synthetic construct
  misc_feature 1..3162: note = Description of Artificial Sequence: Synthetic coding sequence
  source 1..3162: mol_type = other DNA
atgccgaccaccgagtcagaagcaaaagttaagacgaaggtgcgcttcgaagagttactgaaaacccactccgaccttatgagggaaaagaagaagttaaaaaagaaattggtgcgatcggaggaaaatattagccccgacaccattagatctaacctgcactacatgaaagagacaacctctgatgacccagatactatcagaagcaacctgccacatattaaagagacaacgtccgacgacgtgtctgctgcaaacaccaacaacctgaaaaagtctacacgggtaaccaagaacaagttgcgtaacacgcagctggccaccgagaatcccaacggcgacgcgtccgtggaagaggacaagcagggcaaaccaaataaaaaggtgattaagacggtgccccaactgactactcaggatctgaaaccagagactcctgagaacaaagtcgattccacccatcagaaaacccacacaaaaccccaacctggggttgatcaccagaaatctgagaaagccaatgagggacgagaagagaccgatctggaagaagatgaagagctgatgcaggcatatcaatgtcacgttaccgaagagatggccaaagaaattaaaagaaaaatcagaaaaaaattgaaagaacagcttacgtattttccctcggatactctgttccatgacgacaaactgagctctgaaaaacgaaagaagaagaaagaggtgccagtcttctcaaaggcggaaacctctacactgacaatctctggggataccgtcgagggggagcagaagaaggaaagtagcgtgagatccgtctcctcagactcccaccaggacgatgagataagttctatggaacagtccacagaggatagtatgcaagacgatactaagccaaaaccaaagaaaaccaagaagaagaccaaagcggtcgccgacaacaatgaggacgtggacggggacggtgtgcatgaaattacatcgcgcgatagccccgtttaccccaagtgtctcctagacgacgatctggtcctgggggtgtatattcatcgaactgaccgcttgaagtccgacttcatgatttcacaccctatggtgaaaatacacgtagtagacgagcacaccggtcagtacgtcaaaaaggatgattccggccggcctgtaagctcatactatgagaaagagaacgtggattatatccttccaatcatgactcagccctatgatttcaaacagctgaagtccaggctgcccgaatgggaggagcagattgtcttcaacgaaaatttcccatacttgctccgcggcagcgatgagagcccaaaagtgattctgttcttcgagattctcgacttcctctccgtggacgaaatcaaaaataacagtgaagtccagaaccaggagtgcggatttcgtaaaatcgcctgggcctttttgaaactattgggcgccaatgggaacgccaacatcaacagcaagcttcggcttcaattatactatccccccaccaaaccgcggagccccctgagtgtggtggaagcgtttgagtggtggtcaaagtgccctaggaatcactatccgtctacactctacgtgacggttcgcgggctgaaggtgcccgactgcatcaagccttcctacagatctatgatggcattgcaagaggagaagggcaaacccgttcactgtgagagacaccacgagtcatcctcggtggataccgagcccggcctcgaagagtcaaaggaggttattaaatggaaacggcttcctggacaggcgtgtcgaattcctaacaagcacctgtttagcttaaatgcgggcgaaaggggatgcttttgcctggacttttcacataacggacgcatcctagccgctgcctgtgcgagcagagatggctacccaatcatactgtacgaaatccctagcggacgcttcatgcgagaattgtgtgggcacctgaatattatatatgatctgtcatggagcaaagacgaccattacatactcacatcaagttccgacggaacagcaaggatctggaagaatgaaattaacaacacaaacaccttcagggtgttgccacatccatcttttgtttataccgctaagtttcacccagcagtacgggagcttgttgttaccggctgttacgactcaatgattcgaatttggaaagtggaaatgcgggaggatagtgctattttagttcgacagttcgatgtccacaaatcctttattaactcgttgtgcttcgacactgaaggtcaccatatgtatagcggtgattgtaccggcgtgatcgtcgtgtggaatacatacgtgaagatcaacgacctcgaacactctgtccatcactggacaatcaacaaagagatcaaggagaccgaattcaagggcattcccatcagctacctggagatccatcctaacgggaagagattgctcattcacactaaagactcaaccttacgcatcatggatctcaggattttagtggcaagaaagtttgtcggagcggctaattatcgggaaaagatccactcaacattgaccccctgcggtacctttttgttcgctggctctgaagatgggattgtgtacgtttggaatcccgagaccggggaacaagtcgctatgtattccgacttgccttttaagagccctatccgtgacatttcctatcatccctttgaaaatatggtcgccttctgcgcgtttgggcaaaacgagcccattcttctttatatctatgactttcatgtggcccagcaggaggccgaaatgtttaagagatataatggtacttttcctctgcccgggatccatcagtcgcaggacgctctgtgcacgtgccctaagttgccacaccagggatcctttcagattgatgagttcgtccatacagagtcctcatctaccaagatgcaactggtgaaacagcggttagagaccgtaacagaggtgataaggtcgtgcgctgcaaaggttaacaaaaacctcagcttcacatctccaccagccgtttcctcacagcaatccaagctgaagcagtccaatatgcttactgcccaggagattttgcaccagtttggctttacgcagacagatagccatttcgccgagttcaacacatgtattctttggtggaaaaaacattag

SEQ ID NO: 106718 - DNA, 1497 bp, synthetic construct
  misc_feature 1..1497: note = Description of Artificial Sequence: Synthetic coding sequence
  source 1..1497: mol_type = other DNA
atgagagaactgtgtggccacctgaacattatctatgacctgagttggtccaaggacgaccattacatcctgacatcatcatcagacggaacggcccgtatatggaaaaacgagatcaacaataccaacactttccgggtgctgccgcacccttccttcgtgtacaccgctaaattccaccctgccgtaagggaacttgtcgtgactgggtgttacgattctatgattcggatctggaaggtcgaaatgcgggaagatagtgctatactcgtgcgtcagttcgacgtgcacaaaagctttattaactccctgtgtttcgatacagaaggccaccatatgtacagcggtgattgtaccggcgtaatagtggtttggaatacctacgtgaaaatcaacgacttggaacactctgttcaccattggactattaataaagagatcaaagagacggaattcaaggggattccaataagttatcttgagatccaccccaacggcaagaggctgctcatccacacaaaggactctaccctcaggatcatggatctgcgcattttagtcgctcgcaagtttgtgggagccgccaactacagggagaaaattcactctactctgactccctgcggcacttttctctttgccggctctgaggatggcattgtgtacgtttggaatcccgagaccggcgagcaggttgccatgtactccgacctgcccttcaagtcgcccataagggacattagttaccatcctttcgaaaatatggttgccttctgcgcattcgggcagaacgagcccatccttctgtatatctacgatttccatgtggcacagcaggaagctgaaatgttcaagcgctacaatggtacattccccctgcctggaattcaccagtcccaggacgcactgtgcacctgccccaaactgccacatcagggaagctttcaaatcgatgagtttgttcatacagagtcatcaagtacaaagatgcagcttgttaaacagcggctggagactgtgactgaggtgattcgctcatgtgccgcaaaggttaataaaaacttgtcatttacgtctccccctgccgtgtcatctcagcagtctaagctgaagcagtcaaacatgttaaccgctcaggagattctccatcagtttggattcacacagacaggcataatctccatcgaaaggaagccctgcaaccaccaagtcgatacggcaccaacagtggtcgctttgtacgactatactgccaatcgaagtgacgagctgacaatacatcggggcgatataatccgcgtgttctttaaggataacgaggactggtggtacggctcaataggaaagggacaggaaggctatttcccagcaaaccatgtggctagtgaaacactttaccaggagttgccacccgaaattaaagagaggagcccgccattatcaccggaagaaaaaaccaaaatcgaaaagtctcccgccccacagaaagtaaaatag

SEQ ID NO: 106719 - DNA, 3591 bp, synthetic construct
  misc_feature 1..3591: note = Description of Artificial Sequence: Synthetic coding sequence
  source 1..3591: mol_type = other DNA
atgcccacagcagagtccgaggccaaggtgaaaacgaaagtgcgtttcgaagaactcctcaagacccatagcgatctaatgagagaaaaaaaaaaactcaagaaaaaactggtgcgaagcgaggagaacatctctcccgacaccatccgcagtaatctccattacatgaaggagacaacgtccgacgaccccgacacaattagatcaaatttgccccacatcaaagagactacatccgatgacgtgagcgctgcaaacacaaataatttaaagaagagtacccgcgtcacgaaaaataaactgcgtaacactcagcttgcaaccgaaaaccctaatggcgacgcctcagtcgaggaggacaagcagggcaaaccgaataaaaaggtgattaagactgtcccccagttaacaacccaggaccttaagcccgaaacccccgagaacaaggtcgactccacccatcaaaaaacccataccaagccccagcccggcgtggaccaccaaaaatctgagaaggccaatgagggtagagaggagaccgatctggaagaagacgaagaactaatgcaggcgtatcagtgccatgtcaccgaggagatggcgaaagagatcaaacgtaagatacggaagaaactgaaggagcagcttacgtacttcccctccgacactctgtttcacgacgacaaattgtcatcagagaaaagaaagaaaaagaaggaggtgccagtgttttctaaagctgaaactagcactttgaccatttctggagacactgtcgagggcgagcagaagaaagaatccagtgtgcggagcgtttcttctgatagccaccaagatgatgagatatccagtatggaacaaagcaccgaggacagcatgcaggacgacaccaaaccaaaaccaaaaaagaccaagaaaaagacgaaggccgtggccgacaacaacgaagacgtggatggggacggtgtgcatgaaattacaagcagagactcacctgtgtatccgaagtgtctcctcgacgatgacctggtcctcggagtctacattcatcggactgacagacttaagagcgactttatgatctctcaccccatggttaagatccacgtggttgacgaacacaccggacagtacgtgaagaaggatgacagtgggagaccagtgtcttcatactatgaaaaagaaaacgttgattatattctgcctattatgactcagccttacgacttcaaacagctgaaatcacggctaccagagtgggaggaacagatcgtgtttaacgagaacttcccgtacctacttcgtggatcagatgaaagccccaaagtcatattgttctttgagattctggattttctctctgtggatgaaattaagaataactcagaggttcagaatcaagagtgcggattccgcaagatcgcctgggcctttttgaagctgctcggcgcaaatggaaacgcaaacatcaatagcaagctccgcttgcagctatactatccaccaacaaaacccaggtctccactcagcgtcgtggaagccttcgagtggtggtctaagtgtcctagaaatcactatcctagcactctgtatgtgaccgttcgtggtctgaaggtccccgactgtatcaagccatcttatcggtccatgatggccctgcaagaagaaaaaggcaagcccgtccactgtgagaggcatcatgagtctagtagtgtggataccgagcccggactcgaggaaagcaaagaggtgattaagtggaaaaggctgcccggccaggcctgtcgcatacctaacaagcatctcttcagccttaacgccggggagcgcggatgtttctgcttggatttctcccacaatggtcgcatccttgccgctgcatgcgccagccgcgatgggtatccaatcatcctgtacgagatccccagcggacgctttatgcgggagctttgcggacacttgaatatcatctacgacctgtcttggagcaaggatgatcactacatacttaccagctcttctgatgggacagcgaggatttggaaaaacgagattaataataccaacacattccgcgttttaccccacccatctttcgtctataccgccaaattccaccctgctgtaagggaactcgtggtaaccggatgttacgactctatgattagaatctggaaagtcgagatgagagaggatagcgccatcttagtaagacagttcgatgttcacaagtcgtttatcaatagtttgtgctttgatactgaaggtcatcatatgtattctggcgactgcactggtgtcattgtagtatggaatacctacgtcaaaataaacgatcttgaacactccgtgcatcattggacgattaacaaggagattaaggagaccgaattcaaaggtatcccaatcagctatctggagattcacccgaatggcaagcgcctcttgatacacactaaggatagtaccctgcgcattatggatctgaggattcttgtggcccgcaagttcgttggcgcagctaactatcgcgaaaaaattcatagcacattgactccttgtgggacattcttattcgccggatctgaggacggtatcgtgtatgtctggaatcccgagacaggcgagcaggttgccatgtattcagacctgcctttcaaaagccccattcgggacattagctatcacccttttgagaacatggtagctttctgtgccttcggacagaacgagcccattctgctctatatttacgatttccatgtggcccagcaggaggccgaaatgtttaagaggtataacgggaccttccccctcccaggaatacaccagagtcaggatgccctctgcacttgtccgaagctacctcaccagggctcgttccagatcgacgagttcgtgcatactgagagttctagcaccaagatgcagctggtgaagcaaaggctggagactgtgaccgaggtgatccggtcctgtgctgcgaaggtgaacaagaatctttcattcacatcgccccccgcagtatcttcgcagcagagtaaactgaaacaaagtaacatgcttacagcccaggagattctgcaccaatttggtttcacacaaacaggaataataagcatcgaacgcaagccctgcaatcatcaggtcgatacggctccgaccgtagtggcgctttatgactatacggctaaccgcagtgatgagcttactatccaccgtggcgatattattagggtctttttcaaagacaatgaagactggtggtatggtagcatcggaaaaggccaggagggttacttccccgcgaaccatgtggcgagtgaaacgttgtatcaggagcttcctccagaaatcaaagagaggtctcccccactgtctcccgaggaaaaaacaaagatcgaaaaatcacccgccccccaaaagcagtctatcaataaaaacaaatcccaggatttcagactgggatcagagtccatgactcattccgaaatgcgtaaggagcagtcccacgaggatcagggccatattatggatacacgcatgcgcaaaaataagcaggccggcaggaaagttacactcattgagtag

SEQ ID NO: 106720 - DNA, 1218 bp, synthetic construct
  misc_feature 1..1218: note = Description of Artificial Sequence: Synthetic coding sequence
  source 1..1218: mol_type = other DNA
atgctgagctccttcctgtccccccagaatgggacttgggccgacaccttctcactcctattagcgctggctgtcgctctgtatctgggttattattgggcctgcgtcctccagcgtccaagacttgtggccggaccgcagttcctagcttttctcgaaccccactgctcgattacaacagagactttttatccgacgttatggtgctttgaagggagactgcagagtatcttccaagtccttctgcagagccagcccttagtgctatatcagtccgacatcctgcagactccggatggtggccagctactcctggattgggccaagcagccggattccagccaagaccctgatcctacaactcagcctatcgtgctgcttctgccgggcatcacgggctcgagccaggatacctacgtgctgcatctggttaatcaagcgctgagagatggataccaggccgtggtattcaacaatcgtgggtgtcggggcgaagaactacggacacaccgagccttctgtgcctcgaatactgaagatcttgaaacggtcgtcaaccatatcaagcacaggtacccacaggctcccctgctggcggtcggtattagtttcggcggaattctggttttgaatcatctcgcccaagctagacaagctgctggactcgtggccgcactgactctcagtgcctgttgggacagtttcgagacaacacggagcctcgagacccctctgaatagtctgctgtttaaccagcctctcaccgccggactgtgccagttggtggagagaaaccgcaaagtcattgagaaggtggtcgacattgattttgtgctgcaggcccgaacaatcaggcagttcgatgagagatacacatctgtggcatttggctatcaggattgtgttacctactataaagccgcctcaccacgaaccaagatcgacgccattcgaatacccgtgctctatctgtcggctgccgacgacccttttagccctgtatgcgccttgcctatccaggctgcccagcatagtccatatgtggcgctcttgattaccgcaagaggcggacatattggcttcctggagggactgctgccatggcagcactggtacatgagtcgactgctgcatcaatacgccaaggcgatctttcaggatcccgagggcttacctgacctgcgagctctactcccaagcgaagacaggaattcttag

SEQ ID NO: 106721 - DNA, 1197 bp, synthetic construct
  misc_feature 1..1197: note = Description of Artificial Sequence: Synthetic coding sequence
  source 1..1197: mol_type = other DNA
atgaggaaacgaacagagcccgtcgcactggaacatgagagatgcgccgcagcagggagttctagtagtggcagtgctgctgccgcactggacgccgattgccgcctgaaacagaatctgcgactcactggacccgccgctgccgagcccagatgcgctgcagatgcgggtatgaagcgcgccctcggacgtaggaaaggagtttggcttcgactacgcaaaattctgttttgtgtcctcggactgtatatcgcgatcccttttctgataaagctttgtccagggattcaggccaaactgatcttcctgaactttgtgcgtgtgccttattttattgatctgaagaaaccacaggaccaaggactgaatcatacctgcaactattacctccaacccgaagaggatgtgaccattggtgtttggcatacagtcccggctgtgtggtggaaaaatgcccaggggaaggatcagatgtggtacgaggatgcgctcgcatctagccaccccattatcctgtacctgcatggtaacgcaggcactcgcggcggcgaccatcgtgtggaattatacaaggtattaagctcactgggctatcacgtcgttacattcgactaccgtggatggggagacagcgtagggacacctagcgaacggggcatgacatatgatgccttacacgtgttcgattggatcaaggctagaagtggtgacaaccctgtgtatatttggggtcatagcctcggaacaggcgtggcaacaaatcttgtgcggcggctttgcgaaagggagacaccaccagacgctcttattctcgaatcccccttcaccaacatccgagaggaggcgaaaagccatccattctcagtgatttacaggtactttcctgggtttgactggttctttcttgaccccatcacttcgagtggtattaaatttgctaatgacgaaaacgttaaacacatcagctgcccactgttaattcttcacgccgaggacgatcctgtggtgcctttccagcttgggcgaaagctgtacagcatagccgccccagccagatccttccgagacttcaaggttcaattcgtgccctttcattctgatctcggctaccgccataaatatatctacaagagtcccgagcttcctcgcatcttaagggaatttctagggaaatcagagcccgagcaccaacactag

SEQ ID NO: 106722 - DNA, 1215 bp, synthetic construct
  misc_feature 1..1215: note = Description of Artificial Sequence: Synthetic coding sequence
  source 1..1215: mol_type = other DNA
atgcgcaagaggaccgaacccgtggccctggaacatgaacggtgcgcagctgctggatcctcaagtagcggaagcgcagccgccgcattggatgccgattgtcgcctgaaacagaacctcagactgacaggccctgccgcagctgaacctcgctgcgcagccgacgccggtatgaagcgggcactgggacgaaggaaaggcgtttggctcagactgcggaaaattctattttgcgtgctgggcctgtatatagcgatcccctttcttataaagctctgtcctggaattcaggcaaagctgatctttttaaactttgtccgcgtgccttatttcatagatctgaaaaagccacaggatcagggactgaatcacacttgcaattactacctgcaacccgaggaggatgtgaccattggagtctggcatacagtgccagcagtatggtggaagaacgcacaggggaaagatcagatgtggtacgaagatgctctcgcgtcctcccacccgattatcctctacctgcacggtaatgctggcactaggggtggcgatcaccgtgtcgaactgtacaaggtcctctcctccctgggttaccacgtggtcacattcgattacagaggttggggcgatagcgtcggaacgcctagcgagcgagggatgacatacgacgctctccatgtgtttgattggattaaggccagatccggggataacccagtgtatatatggggccactccttgggcactggtgtggccactaatctagtgcggcgattatgtgagagagaaacacctcctgatgccttgatattagaaagcccattcaccaatattcgggaagaggcgaaatcacaccccttctcagtgatctaccgctatttcccagggtttgactggttttttctggacccaattacttcatccggaatcaagtttgccaatgatgagaatgtgaagcacatctcttgtccactcctcatcctgcacgcagaggatgatcccgtcgtgccttttcaactgggtcgaaaactatacagcattgctgcaccagccaggtcatttcgggattttaaagttcagttcgtgccattccactccgaccttggctaccgccataaatacatttacaagtccccggagttgccccgaatcctccgcccccaacagggtccgggtagctcaccagatccgtcaatgtggtccgaattagtgtag

SEQ ID NO: 106723 - DNA, 564 bp, synthetic construct
  misc_feature 1..564: note = Description of Artificial Sequence: Synthetic coding sequence
  source 1..564: mol_type = other DNA
atgtcaggcggcggtcatggaggggtctgcttcctgtgctgtatactgcttcagggccggaagggagtgtggctcagacttaggaagatcctcttttgcgtactggggctttatatcgctatcccctttctgataaagttgtgccctggcattcaggctaagctgatatttctgaacttcgttagggtgccttattttatcgacttaaaaaagccccaggatcaaggcctgaaccacacttgcaactactacctgcagcccgaggaggacgtcactattggcgtctggcatacagtgccagccgtgtggtggaagaacgctcaaggtaaggaccaaatgtggtatgaggacgccctcgcctcctcccacccgatcattctctatctacacggcaatgcaggaacccggggcggcgaccaccgcgtcgaactgtacaaagtcctgagctcccttggctaccacgtggtaactttcgactaccgcggctggggtgattctgtgggtacccctagtgaacgaggcatgacctacgatgccctccacgttttcgactggatcaagtag

SEQ ID NO: 106724 - DNA, 1083 bp, synthetic construct
  misc_feature 1..1083: note = Description of Artificial Sequence: Synthetic coding sequence
  source 1..1083: mol_type = other DNA
atgcgtaaacgcacagagccagtggccctcgagccccgttgcgcagcggacgccgggatgaagagagccctcggccgtcggaagggagtgtggttgagactaaggaaaatactgttttgcgtgctgggactatacatcgccatccctttcctgatcaaattgtgcccaggcattcaggccaaactcatcttcttgaatttcgttagagtcccttattttattgacttaaaaaaaccccaggatcaggggttaaaccacacctgcaactactatctgcagcccgaagaggacgtgactattggagtgtggcacactgtgcctgccgtttggtggaagaatgctcagggcaaggaccagatgtggtatgaggacgctctagcttcatcccaccctatcattctttacctccacggtaatgctggcacgcgcggcggagatcatcgcgttgagctttacaaggtgcttagcagcttgggatatcatgtggttactttcgactaccggggctggggcgacagcgttggaactcctagcgaacgcggtatgacctacgatgctctccatgtctttgactggatcaaggcgcgcagcggcgacaaccccgtgtacatttgggggcactcattgggaacgggagtcgccacaaacctggtaaggaggctttgtgaacgcgagacaccacctgacgcacttattctggaatctccattcactaacatacgggaagaagctaaatctcacccattctcagtgatttaccgttactttccagggttcgactggttttttctcgatcccattactagcagcggtatcaaatttgctaatgacgaaaacgtgaagcatatttcctgtcccttgcttattctgcacgcggaggacgacccggtggtgccgttccagctggggcgaaagctgtactccatagcggcgcctgccaggtcttttagagattttaaggtccagtttgtgccctttcactcagacttgggctatcgtcataaatacatctacaaaagccctgaactcccccgtatacttagggagttcttagggaagtctgaaccagagcatcaacactag

SEQ ID NO: 106725 - DNA, 1020 bp, synthetic construct
  misc_feature 1..1020: note = Description of Artificial Sequence: Synthetic coding sequence
  source 1..1020: mol_type = other DNA
atgctttaccccggtagtgtctacctcctacagaaagcccttatgcctgtgttgctccagggacaggcccgcctggtcgaagaatgcaatgggcgcagggccaaattgctggcatgtgatggcaacgagatagacactatgttcgtagaccgtagaggaacagcagagcctcaaggtcagaagctcgtcatttgctgcgagggaaatgccggtttctacgaggtaggctgtgtgtccaccccactggaagccggctattcagtacttgggtggaatcatccaggatttgcaggctccacgggcgtgcctttcccccagaatgaggctaatgcaatggacgtggtggttcagtttgctatccatcgcctaggatttcagccgcaagacatcattatctatgcatggagcatcggcgggttcaccgctacatgggctgcgatgtcataccccgatgtgagtgccatgatcctagatgcatccttcgacgacttagtccctttagctcttaaggtgatgccagattcttggcgaggtttggtaacccgcactgttagacaacacctcaatctcaataatgctgagcaactgtgtcggtaccaaggaccggtgttactgatcaggcgtacaaaggacgagatcatcaccaccacggttccagaagacatcatgagtaaccgcggaaacgaccttctgctgaagcttttgcagcatcgatatccacgggtaatggccgaggagggcctgcgagtcgtacgtcagtggttagaggcgagtagtcaattagaggaggctagtatttactctagatgggaagtcgaagaggattggtgcttaagcgttctgcgttcgtaccaggctgagcatggtcctgacttcccttggtcagtcggcgaggatatgtcagctgatggtagacgtcagctggcactctttttagccagaaaacatctccataattttgaggctactcattgtacacccctccccgcccagaactttcagatgccttggcacctgtag

SEQ ID NO: 106726 - DNA, 1677 bp, synthetic construct
  misc_feature 1..1677: note = Description of Artificial Sequence: Synthetic coding sequence
  source 1..1677: mol_type = other DNA
atggccaagctgttaagttgtgtgctgggaccgaggctttataaaatctatagagaacgagacagtgagcgtgctccagcctcagtgcctgaaacgcctaccgcagttactgctccccactcttcaagctgggatacatattatcaaccgcgcgcactcgagaaacatgccgacagtatcctcgccctcgcgtcagtgttttggagcattagttactatagttcacctttcgcgtttttttacctatatagaaaaggctacctcagcttatccaaagtggttcccttcagtcactacgccgggaccctcttactgttactggcgggtgtggcctgtctgcggggcatcggccgctggacgaatcctcagtaccgtcaatttattaccatactagaggccacacaccgtaaccagagctcagagaataaacgccagctcgctaattacaactttgactttcggagttggcccgttgatttccactgggaagagccatcctctcgtaaagaaagccgaggcgggccatctcgcagaggagtggcccttcttcgacctgaacccctgcaccgtggtaccgccgatactctgcttaacagggttaagaaattgccatgtcagattacaagttaccttgtggctcatacgctgggccgacggatgttgtatccaggctcagtttacctccttcaaaaagcgctcatgcccgttctcctgcaaggccaggcccgtttggtggaagaatgtaacggaaggcgagcgaagctgctggcctgcgacgggaacgagattgataccatgttcgtggaccgcagggggacggctgagccccaaggtcaaaagctggtgatctgctgcgagggcaacgcgggcttttatgaggtcgggtgcgtttctacccccctggaggcaggatactcagtcctgggctggaaccaccctggattcgccgggagcaccggcgttcctttcccccaaaacgaggctaatgccatggacgtcgtcgttcagtttgccatccaccgcctgggcttccagccacaggacattattatatacgcatggtcgatcggtgggttcacggccacgtgggccgccatgagttaccccgatgtttcagctatgatcctcgatgcttcttttgacgacctcgtgcctcttgccttgaaagtgatgcccgattcctggcggggtctggtcactagaacggtccgccagcatctgaatctgaacaacgcagaacagctgtgtcggtatcaagggccagttttactgatcagaagaaccaaagacgagattataacaactaccgtgcccgaagacatcatgagtaaccgaggcaatgacctgctgttgaaactgctgcagcatcgttatcctcgggtcatggcggaggagggactgagggttgtacgccaatggcttgaggccagcagccaactcgaagaagcttcaatctacagccggtgggaggtcgaagaagattggtgcttgagtgtgcttcgatcgtaccaagctgagcatggaccagattttccatggagtgtcggagaagacatgagcgccgacgggcggcgtcagctggccctcttcttagctagaaagcacctccataactttgaggccacccattgcacacctctacctgcccagaatttccagatgccatggcatctgtag

SEQ ID NO: 106727 - DNA, 1806 bp, synthetic construct
  misc_feature 1..1806: note = Description of Artificial Sequence: Synthetic coding sequence
  source 1..1806: mol_type = other DNA
atgagccagctcgccagaagacggtcacggtatggcctgacgagtagagctcataacaccagcgaggcggggagggccgggcctgccggcgggccagcggccggccgggccgcagcacgcgcaggggccatggccaagctgctgagctgtgtactggggcctagactgtacaaaatttatagagagcgggactctgaaagggcgccggcaagcgtccccgagactccgaccgcagtcactgccccccactcctcttcctgggatacctactaccagccacgggccctggaaaagcacgctgactccatcttagctttagcctctgtattctggtctatttcttattactcatcgccctttgcattcttttacttgtaccggaaaggctacctgtcactttccaaggtggtcccatttagccactatgccggcacgctcctgttactgcttgccggagtcgcttgtctgagaggaattgggagatggactaatccacagtaccgccagtttattacaatactggaggcaactcaccgcaaccagtcgtctgagaacaaaaggcagctggccaactacaattttgacttcagatcttggcctgtcgattttcactgggaagagccatcaagccgcaaagagtctcgcggaggccccagtcgcaggggtgtcgccctgcttaggcccgaacctctccacagaggcacagcagacactcttctgaaccgagtgaaaaaactgccctgccagataacgagctacctggtggcacacactctcggacgccggatgctgtaccctggttctgtttacctgctgcagaaggcactgatgcctgtgttgttgcagggacaagcccggttggttgaagaatgcaacggacgcagagctaagctcttagcctgcgacggcaacgaaattgacacgatgttcgttgacaggcgcggtaccgcagagccacaaggccaaaagctcgtgatctgctgtgaagggaacgcgggtttctatgaggtcggttgcgtgagcaccccgctggaggcgggctattcagtgttggggtggaatcacccaggctttgctggctctactggggtgccctttcctcagaacgaagctaatgctatggatgtggtggttcaattcgccattcatcggcttggattccaaccccaagatatcataatttatgcctggagtattgggggatttacagcaacctgggccgcaatgagctatccagacgtctccgcgatgatcctcgacgcatccttcgatgaccttgtacctttagccctcaaggtgatgccagattcctggagaggcctagttactcggacagttcgacagcaccttaacctaaacaatgctgaacaactgtgtcgctatcaaggccctgtactacttatcagaagaacaaaagacgagattatcactaccacagtgccggaggacataatgtccaacaggggcaatgatctcctcttgaagctgctgcagcaccggtacccaagggtgatggccgaagaaggtctcagagttgtgagacagtggctggaagcctcatcccagctggaggaggcatctatctacagcagatgggaggtagaagaggactggtgcctctcagtgcttaggagttatcaggctgagcacggaccagactttccttggtcagtcggcgaagatatgtccgcagacgggcgcaggcagttagcattattcttggcgaggaagcatctgcacaacttcgaggccacacattgtacaccactgcccgcccagaactttcagatgccttggcatttatag

SEQ ID NO: 106728 - DNA, 795 bp, synthetic construct
  misc_feature 1..795: note = Description of Artificial Sequence: Synthetic coding sequence
  source 1..795: mol_type = other DNA
atgccaccacctgccctgttcttaagctcactgtatccacggttagaattccagaatgacttttacagatcctgcattaggaggagctccccgcagccacctcccaacttggcatggcgtcctgagagcctgtactctggcgagctggcaggagggggctatctgagtttaagcaaagtggttccttttagccactacgcggggactctgctcctgctcctagcgggagtagcctgccttagggggatcggaagatggacaaacccccagtacagacagttcattaccattctcgaggccacgcacagaaaccagtccagtgagaacaagcgccaactagccaattataactttgacttccggtcctggcctgtggattttcactgggaagagcctagcagccgaaaggagagtaggggaggaccgtcccgtagaggtgtggctcttctgcggccagagccattgcaccgcggaacagccgatacactgctgaatcgtgtcaagaaactgccctgccagatcacatcctatctggtggcccatacgctcggtagacgcatgctgtaccctggtagcgtgtaccttctgcaaaaagcactcatgccagttttactgcagggacaggcccgtttagtggaggaatgtaatggacgcagggcgaagctactggcatgcgacggcaatgagatcgatactatgttcgtagaccggcggggcactgccgaacctcaggggcaaaagcttgtcatctgctgtgagggaaacgccggcttctacgaagttggatgtgtctag

SEQ ID NO: 106729 - DNA, 795 bp, synthetic construct
  misc_feature 1..795: note = Description of Artificial Sequence: Synthetic coding sequence
  source 1..795: mol_type = other DNA
atgccaccgcctgctttattcctgtcttctctctatcccagactggagttccaaaatgatttttatcgatcatgtatacggcgctcatccccacagccacctcctaacctggcctggcgacctgagtcgctgtattccggtgagctggctggtggaggatacctgtctctttctaaagtcgtaccattctctcactatgcgggcacactactcttgctactggctggggtcgcttgccttcgggggatcgggcggtggactaatccacagtacaggcagtttatcacaatcctggaggcaactcacagaaatcagagctctgagaacaagaggcaactggcgaattataatttcgattttcggtcttggccagtggatttccactgggaagaacccagtagcaggaaagagagcagggggggaccaagtcgacggggcgtagctctgctgcgccccgaacccttacacagagggactgccgacacgctcctgaatagggtgaagaagctcccttgtcaaattacgtcatacctggtggcccatacgctagggcggcgcatgctgtaccctggcagcgtgtacctgcttcagaaagccctgatgccggttcttctacaaggacaggccagacttgtggaagaatgcaacggcaggcgcgccaagctgctcgcctgcgatgggaacgaaatagacacaatgttcgtagatcgccggggcactgccgagccacaggggcagaaattagtcatctgctgcgaaggaaacgccggattttacgaggtgggatgtgtgtag

SEQ ID NO: 106730 - DNA, 795 bp, synthetic construct
  misc_feature 1..795: note = Description of Artificial Sequence: Synthetic coding sequence
  source 1..795: mol_type = other DNA
atgcctccccctgctttgttcctaagttccctataccccaggctcgaattccagaacgatttttatcgctcatgtatcaggaggagttcacctcaaccacctcctaatttggcatggagacccgagtctctgtatagcggggaactcgcagggggtggctatctttccctctctaaagtcgtccctttctcccactacgcagggaccctgttattactcctggcaggtgtggcctgtctccgtggcattggcagatggaccaatccgcagtatagacagtttattaccattctggaagcaactcaccggaatcagtcaagtgagaataagcgccaattagccaattataactttgactttcgtagctggcctgtggactttcactgggaggagcctagcagcaggaaggaaagtaggggggggccctccagaagaggcgtcgccctgctacgtccagagcctctgcacaggggtaccgccgacacattactgaacagggttaagaagctgccatgccagataacttcttaccttgtggctcatacccttggcaggagaatgctctaccccggctcagtgtatctcttgcagaaagccctcatgcccgtgttgctgcaggggcaagcgcggctcgtggaggaatgtaacgggcggagggccaagttgctcgcctgcgatggtaatgagatcgatacaatgtttgtggacagaagaggaacagccgagcctcagggccagaaactggtcatatgttgcgagggtaatgctggcttctatgaggtggggtgtgtgtag

SEQ ID NO: 106731 - DNA, 1806 bp, synthetic construct
  misc_feature 1..1806: note = Description of Artificial Sequence: Synthetic coding sequence
  source 1..1806: mol_type = other DNA
atgtcccagttagccagacgtagatctcggtatggcctgacatcccgagctcacaatacttctgaggccggcagagcaggccccgccggcggacccgccgcaggtcgagccgccgctcgcgccggagcaatggccaaactcctcagttgcgttcttgggcctagactgtataaaatctaccgtgaacgggacagcgagcgggccccagcttcagtcccagagactcccaccgctgtgactgcccctcattccagctcttgggacacctactatcaaccccgcgctttggagaagcacgccgatagtatcctggccctggcatctgtgttctggtcgatcagttactattctagtccgttcgcctttttctacctgtacaggaagggatatctgtccttgtctaaggtggttcctttttcgcactatgcagggaccttgctgctgctcctggctggcgttgcctgtctccggggcatcggacgttggactaatccccaatatcgccagttcattacgattctcgaggccacccatcgcaatcaaagtagcgaaaataagcggcagctggctaattataacttcgatttcagatcgtggcctgtggattttcactgggaggaaccttcctcacggaaggagtctagggggggtccttctagaaggggcgtggcattgctgaggcccgaaccgctccatagaggaacagcagatacccttctcaacagggtgaagaagctcccatgccagattacttcatatctggtggcccacactctcggcaggcgtatgttgtaccccgggagtgtgtatctcctgcagaaggccctgatgcccgttctcctccagggacaggcacggttggtggaagagtgcaacgggaggcgcgccaaacttctggcctgtgatggaaacgagatcgacacaatgttcgttgatcggcggggtactgccgaaccacagggacagaagcttgtgatatgttgcgaagggaatgccggcttttacgaagtggggtgcgtgtccacccccctcgaggctgggtattccgtgcttggttggaaccaccccggttttgcaggcagcacgggtgttcctttcccccaaaacgaggctaacgccatggacgttgtcgttcagttcgcaatccaccggcttgggtttcagccacaggatataataatttatgcatggagcattggcggatttaccgccacatgggccgccatgagttatccagacgtctcagcgatgatcctcgatgcctccttcgacgacttagtccctctcgccctgaaagtgatgcccgattcctggcgaggactggtgacgcgcacggtacggcagcacctgaacctaaataatgccgaacaactctgcaggtaccaaggtccagtgcttcttattagaaggaccaaggatgagatcataaccaccactgttcccgaggatatcatgtcaaaccggggcaatgacctgctcttaaagcttctacagcataggtatccccgcgtgatggcggaggagggtctgagagtggtgcggcagtggctggaagcgagctctcagcttgaggaagccagcatctattcacgttgggaagttgaggaggactggtgtctctccgtgctgcggagctatcaggcggaacacggacctgactttccctggagtgtgggggaagacatgtcggccgatggaagacggcagcttgccctcttcctcgctcggaagcatttgcacaatttcgaagcaacacactgcacccctcttcctgctcaaaatttccagatgccatggcacctgtag

SEQ ID NO: 106732 - DNA, 795 bp, synthetic construct
  misc_feature 1..795: note = Description of Artificial Sequence: Synthetic coding sequence
  source 1..795: mol_type = other DNA
atgcctccccccgctctgttcctcagcagcttgtaccctaggctcgaatttcaaaacgatttctatagatcatgcatccgccggtccagtccgcaaccaccacctaacctagcatggagaccagaaagcctttactccggtgagcttgcaggaggtggttacctttctctgtctaaagtcgtgccgttcagtcactacgctgggactctgctgttgctcctggctggcgtcgcctgtttgagggggattgggcgctggaccaatcctcaatacagacagtttattaccattctagaagccacccacagaaatcagtcctccgaaaataagagacaattggccaattacaacttcgatttcaggtcatggccagtggatttccattgggaggaaccctcatcccgcaaagaatccaggggcgggccttccaggaggggagtggccctgctccgacccgaaccactccatcgcggaacggccgatactctacttaatagagtcaagaaacttccttgtcagattaccagctatctcgtggcacacactctgggacgcagaatgctgtacccgggatctgtgtacctattacagaaggcacttatgcccgttttacttcagggacaggctcgattggtcgaggaatgtaacggccgtcgggctaagctcttggcatgtgatggaaacgaaatagataccatgtttgtagatcgacgtgggaccgctgagccgcagggccagaagctggtaatctgctgcgaaggtaatgccgggttctacgaagtgggttgtgtctag

SEQ ID NO: 106733 - DNA, 1806 bp, synthetic construct
  misc_feature 1..1806: note = Description of Artificial Sequence: Synthetic coding sequence
  source 1..1806: mol_type = other DNA
atgtctcaactcgcacgtcgaagaagccgctatggactgacttcaagggcacataatacatcagaagccggccgagccggtcctgcaggagggcccgccgccggtcgagccgctgcgcgggcaggcgccatggccaaactgttgagctgcgtgctggggccccgcctctataaaatttacagagagagagactccgagagagcccccgcctcagtgccagagactccgaccgctgtcacggccccgcacagcagttcgtgggatacctactatcagccccgggccctcgaaaaacatgccgactccattctagccttggcctcagtattttggagtatctcgtactattcctctcccttcgcttttttttacctttacaggaagggctacctgtccctgagcaaggtcgtaccctttagccattatgccggcacattactgctattgctggcaggcgtagcctgcttgagaggtatagggcggtggacaaatcctcagtatagacagttcataacgatacttgaagccacccacaggaaccaaagttccgagaacaaaagacaattggcaaattacaacttcgactttcggtcctggcctgttgactttcactgggaggaaccctctagtagaaaggagagtagaggtggtccttctcggcgcggtgttgctctcctgagacccgaacctcttcatcggggaactgccgacactctcctcaacagagtcaaaaaacttccttgccaaattacctcttacctggtagcgcacactttgggccggcgcatgctgtaccccggaagcgtgtacttgctccagaaggcactgatgcccgtgctattgcaggggcaggcccgcttggtggaggaatgcaatggccggcgggcaaaactgctggcctgcgatgggaatgaaattgacaccatgtttgtggatcggcgagggacggctgaacctcagggacaaaaattggtgatctgttgcgagggcaacgcaggattttatgaggtaggatgtgttagtacaccactcgaggccggctactcagttctcggatggaaccatccaggatttgccggctctaccggcgtgccattccctcagaacgaagctaacgccatggatgtggtggtgcagttcgccattcaccgtctgggatttcagccacaggacataataatctacgcttggtccatcggtggattcacagcgacttgggcggctatgtcataccccgatgtcagcgccatgatcttggacgcctcattcgacgacctggttcccctagctctcaaggtgatgcctgattcgtggagagggctggtgacaagaacagtgagacaacacctgaacctgaataatgctgagcagttgtgccggtatcagggccctgttctgttgatacgacgaacaaaggacgaaatcataactaccacagtgcctgaagatatcatgagtaataggggcaatgacctgttgctgaagctcctgcaacatcgttaccctcgagtgatggccgaggagggtctgcgcgtggtgcgccaatggctcgaagcaagctctcagctggaagaggccagtatctacagccgatgggaagttgaagaagactggtgtttgtccgtcctcagaagttaccaggcagagcatgggcctgacttcccatggtctgtaggtgaggacatgtccgctgacggtaggcggcagctcgcgctgttcctggccagaaagcaccttcataattttgaggctacccactgtactcctctgcccgcccagaattttcaaatgccctggcacctgtag

SEQ ID NO: 106734 - DNA, 795 bp, synthetic construct
  misc_feature 1..795: note = Description of Artificial Sequence: Synthetic coding sequence
  source 1..795: mol_type = other DNA
atgcctccacccgccctttttctgtctagtttgtacccacgactggagttccagaacgacttctatcggtcttgtattcgacggtcatccccacaaccaccccctaacctggcctggagacctgaatccttatactctggagaactggctggaggaggatatttgagccttagtaaggtggtgccctttagtcattacgctggaactcttctgctgctactggccggagtggcttgcctgagaggaattgggcgatggaccaatcctcagtacaggcagtttatcaccatactagaagctacccataggaaccagagcagcgagaacaagaggcagcttgcaaactacaacttcgattttagatcctggcctgtggatttccattgggaagagccgtcctcccgaaaggagtcgaggggcggccccagtcggagaggtgtggcattattgaggccagagccattacatcggggtaccgccgatactctgttgaatcgggtgaagaagctgccgtgtcaaattactagttacctagtggctcacaccttaggaagacgcatgctgtatcctggtagcgtctacttattgcagaaagcccttatgcctgtgttgttgcaggggcaggctagacttgtggaggagtgtaatgggcgtcgcgccaagctgctagcatgcgacggtaatgagattgacacaatgttcgtagatcgcagaggcacagccgagccccaggggcaaaagctcgtgatatgctgcgaggggaatgcaggattctatgaggttggttgtgtgtag

SEQ ID NO: 106735 - DNA, 1806 bp, synthetic construct
  misc_feature 1..1806: note = Description of Artificial Sequence: Synthetic coding sequence
  source 1..1806: mol_type = other DNA
atgagccaactggcccgacggcgctcccggtacggcctgacctcgagagcccataacacttctgaggctggtcgggcgggtcctgccggcgggcccgccgccggcagggctgccgcacgtgctggggccatggcaaaactattgtcatgcgtgttggggcctaggttgtataagatctacagagaacgtgattccgagagggcaccagctagtgttccagaaacccccactgccgtgacagcaccacactcctcgtcttgggacacatactatcagccgcgggcattggagaagcatgcagatagtatcctcgctctggcgagcgttttttggtctattagttactatagttccccattcgcgtttttctacctttaccgcaaaggctaccttagtctcagtaaagtggttccttttagtcactatgccggtacactgttactcctgctagccggcgttgcctgcctgcggggcatagggcgctggactaaccctcagtatcggcaatttattacgattctcgaggccactcatagaaaccagagcagcgagaacaagaggcaattggccaattataattttgatttcaggagttggcctgtggactttcattgggaggagccttcaagccgcaaagagagtcgaggcgggcccagccggaggggggtggccctgctgcggcccgaaccgttgcacaggggtaccgcagatacactgctgaatcgcgtgaaaaaactcccttgtcagatcacttcgtacctggtggcacacaccctgggacgccgtatgctgtatcccggatctgtctacctgcttcagaaagccctcatgcctgtgctcctgcaaggtcaagcacggctggtcgaggaatgcaacggccggcgtgctaagctgctcgcgtgtgacggcaacgagatcgataccatgtttgtggatcggcgcggcacagctgaaccgcagggccagaaattggtgatctgttgcgagggcaacgccgggttttacgaggttggttgtgtgtccacccctttggaggcaggctactcggtcctaggctggaatcaccccggatttgcaggctcaactggcgtcccattcccacagaacgaggccaatgctatggatgtggtggttcagtttgctattcataggctcggcttccagccacaagatatcatcatttatgcttggtccatcggaggcttcacagcgacatgggctgccatgagctacccagatgtatccgccatgattttggatgccagtttcgacgatctagtccccttggctctcaaagtgatgcctgactcatggagggggctggtaacgcggaccgtgagacagcatctcaatctcaacaatgcagagcagctctgtcgctaccaggggccagtgctgcttatccggagaaccaaggacgagatcatcacaaccactgtgcctgaagatatcatgtcaaatcggggcaacgatttgctgctcaagttgctgcagcacaggtacccacgggtgatggctgaagagggactcagagtcgtacgacaatggctggaagcaagctcccagctggaggaagcttcgatatacagtcggtgggaagtcgaggaggactggtgcctaagcgtcctccgcagctatcaggcggagcacggaccagacttcccctggtcagtcggtgaggacatgtccgccgacggaaggcggcagttagctctgtttctggcgcggaagcacctacacaacttcgaagccactcactgcacaccgcttccggcccagaattttcagatgccctggcatctgtag

SEQ ID NO: 106736 - DNA, 795 bp, synthetic construct
  misc_feature 1..795: note = Description of Artificial Sequence: Synthetic coding sequence
  source 1..795: mol_type = other DNA
atgccccctcctgctctgttcctgtcctccctctatccccggctggagttccaaaacgatttttaccgttcatgtattagaagatcctccccccagccgcctcccaatttagcttggcgccccgagagcctgtactctggtgaactcgcagggggaggatatttaagtctttctaaggtcgtacctttctctcattatgccggaactcttcttctgttactagccggtgtggcgtgtcttagaggaattggaaggtggactaacccgcagtatcgccagttcatcacaatattggaagcaactcataggaatcaaagttcagaaaataaacgacagctagcaaactataatttcgactttcggtcttggcctgtcgacttccactgggaggaaccatcatcaaggaaggagtcccgtgggggcccatcaaggagaggagtggcgctgttgagacctgagcccctccatagagggaccgcggataccctcttgaatcgcgtgaagaagctgccgtgtcagatcacctcttatttggttgctcatacgctaggtcgtaggatgctgtatccaggatccgtgtatttactacagaaagctctgatgcccgtgctgttgcaagggcaagctcgcctggttgaagagtgtaatggtaggcgagcaaagttactagcttgcgatggaaatgagattgatacaatgttcgtggaccggcgtgggacggccgaacctcaaggccagaagttggtaatctgctgcgaggggaacgcaggtttttatgaggttggatgtgtatag

SEQ ID NO: 106737 - DNA, 1677 bp, synthetic construct
  misc_feature 1..1677: note = Description of Artificial Sequence: Synthetic coding sequence
  source 1..1677: mol_type = other DNA
atggctaagctgctctcatgtgtcctgggtccacgcctgtacaaaatttacagagagagagattcagagcgcgctccggcctccgtcccagaaactccgaccgctgttactgcgcctcatagcagttcttgggatacatactatcaacctagggcattggaaaagcatgcagactctatcttagcgctggcaagtgtgttttggagtatcagctattactctagtcccttcgcttttttctatttatacaggaaaggatatctcagtctaagcaaagttgttccgttctcccattacgccggaacgctgcttttgctgttggcgggcgtagcatgcttgagaggtatcggaaggtggacaaaccctcagtatcgccagttcattacaattcttgaggcaactcatagaaatcaaagcagtgagaataaaagacagttggcaaactacaacttcgactttaggagttggcctgtcgacttccactgggaagagccctcaagtcggaaggagtccaggggtggtccttcaaggagaggcgtggctctgctgcggcctgaaccactccataggggaactgccgacaccctgttgaatcgggtgaaaaaactcccatgccagattacatcatatctagtggcccatacgctgggcagaagaatgctatatcctggctccgtgtatcttcttcaaaaggctctcatgcccgtgctgcttcagggccaggcccgccttgttgaggaatgtaatggacgcagggctaaacttctcgcctgtgacggcaacgaaatcgacactatgttcgtggaccggaggggcaccgctgagccccaggggcagaagctcgtgatctgttgcgaaggaaacgccggattctacgaagtgggatgcgtgtccacacctctcgaggccggctactctgtcttaggttggaatcacccaggtttcgcggggtcaaccggagttcctttcccacaaaacgaagccaatgctatggacgtcgttgtccagttcgccattcaccgcttggggttccagccacaggatattatcatctatgcgtggagcatagggggttttacagccacctgggccgctatgagctacccagacgtgagtgctatgatacttgatgccagcttcgacgatctcgtccccttggctttgaaggtgatgcctgactcctggagaggattagttacccgcaccgtcagacagcacctgaacctgaacaacgccgagcagctgtgccgataccaaggaccagtcctgctcatccgtcgcaccaaggatgaaataatcactacaaccgtcccagaagacattatgagtaataggggcaatgacctactgcttaaactgctgcaacaccgctacccccgggtgatggccgaagagggactgcgggtggtaaggcagtggcttgaggcctccagtcagctcgaagaagcaagcatctattcacgatgggaagtggaagaggattggtgtctgagtgtactccggtcataccaggcagaacacggacccgacttcccatggtcagtgggggaggacatgagtgctgatggcagacgccagctggccctgtttctagctaggaagcacctgcacaacttcgaagctactcactgcactcctcttccggcccaaaacttccagatgccttggcacctatag

SEQ ID NO: 106738 - DNA, 1806 bp, synthetic construct
  misc_feature 1..1806: note = Description of Artificial Sequence: Synthetic coding sequence
  source 1..1806: mol_type = other DNA
atgagccagctggccaggcgtaggtcccgatacgggctcacatctagagcccacaacacctctgaagccgggagggcgggccccgccggggggcccgccgccggccgggccgcagcccgggccggagctatggccaagctcttgagttgcgttttgggccccagactgtacaaaatctatcgggaaagggactctgagagggcacctgcatcggtcccagaaacccccacagcagttaccgcgccccactcaagtagctgggatacatactaccagccccgggccttggagaaacacgcagactctattttggcccttgcctctgtgttttggagcattagttactactctagtccctttgcatttttctatctctacagaaaaggttacttgagcctatccaaagtagtccctttttcccactacgcaggaactttgcttctgcttcttgcaggagtggcttgcctgagaggcatcgggaggtggactaatcctcagtatagacaatttatcaccattctggaggcaacccatcgaaaccagtcctctgagaacaagagacagttggctaactataatttcgactttcgctcctggcctgtagatttccactgggaagaaccttcctcacgcaaagaatcacggggtggccctagccgtcggggggttgctttactgcgccctgagcctctgcaccgcggtaccgcagatacactgcttaaccgcgtcaaaaaacttccttgtcagatcacaagttatctggtggcccacacactcggccgaaggatgttataccctggatcagtgtatttacttcagaaggccctaatgcccgttctcctgcagggccaggcacggttggtggaggagtgcaacgggcgacgcgcaaaattgctggcctgtgatgggaacgagatcgacaccatgtttgtagaccgcagggggactgccgagccccagggtcagaagctcgtcatttgttgcgaggggaatgcgggattttatgaagtcggctgcgtatccacccctttggaagctggttacagtgtactgggatggaaccaccccgggttcgctggatccactggcgtgccttttccacagaatgaggcaaacgccatggatgtcgtagttcagtttgcaatacaccgtctcggattccaacctcaggatattattatttacgcctggagtattggtgggttcactgctacttgggccgctatgagttatccagatgtctcggccatgatactcgacgctagtttcgatgatttggtcccgctagctctgaaagtcatgcccgactcttggcggggtctcgtgactcgcacagtgcggcagcatcttaacttgaataacgcagagcaactctgccgctatcagggaccggtcctcctaattcggcgcacgaaagacgagataattactacgactgttccagaggacataatgagtaatcgggggaatgaccttcttttgaagttactgcagcacagatacccccgagtgatggccgaagaggggctcagggtggtgaggcagtggctcgaagcatcgtctcagctggaggaggcttctatctattctagatgggaagtggaggaggactggtgtctgagcgtgctgaggtcataccaggctgaacacggcccagacttcccgtggagtgtgggcgaggatatgagcgcagacggccggcggcaactggcactgtttctcgcacgaaagcacctccataactttgaagccacacactgcactcccctgcccgcacaaaatttccagatgccctggcacctgtag

SEQ ID NO: 106739 - DNA, 438 bp, synthetic construct
  misc_feature 1..438: note = Description of Artificial Sequence: Synthetic coding sequence
  source 1..438: mol_type = other DNA
atgttagggcactgctgctacttttggcaggtttggcccgcttccgaagccctagcagcaggccctacacctagtactggatcaagcagcccatcttggaagcagcacataggcacctctctgcagaaaacccgtggatccctgccaaccacgaccctgacatctggagcgggccagagtacctccacaggcaaaaatcctgccgctggtcggtcccttgaaggtgctctcccagcaggcgtctggccttgcttcgcacagtccccctgtaccggcgggcagcagaccccatctagcaccgggctgaggtcctgtctagtccgttctcctggaggaaaacaacagagaggcgaggcccactggggcggcggtgctatcagtggagtgctctgggagtgggccctgcattgcaagattgcggtgactcattgggcctag

SEQ ID NO: 106740 - DNA, 1677 bp, synthetic construct
  misc_feature 1..1677: note = Description of Artificial Sequence: Synthetic coding sequence
  source 1..1677: mol_type = other DNA
atggcgaagcttctttcctgtgttctgggaccgcggctctataagatctacagggagcgcgactctgaaagagccccggcatcagtgcccgaaacacctaccgctgtgacagcgccacactcttcttcctgggatacatattaccaacccagggccttggaaaagcacgccgatagtatattggcgctggccagcgttttttggagtatcagctattactccagccccttcgcatttttttacctatatcgaaaaggttacttgagtctcagcaaggtggtacccttttcccattacgcaggcacgttgttattgctactggccggcgtagcctgcctgaggggcattgggagatggacaaacccccagtatcgacagtttatcacaatcctggaggcaacccacagaaatcagagctccgaaaacaagcggcaattggcaaactacaactttgatttccgcagctggccagtcgacttccattgggaagagcccagcagtcgcaaggaatcgcgaggaggtccaagtaggcgaggcgtggcgctgctgcgccccgagccgctgcatcgtggtacagctgatactcttctgaaccgggtcaagaaactgccgtgtcagattactagctatcttgtcgcacacaccctagggaggcgcatgctatatccaggaagtgtgtaccttttgcagaaagctttaatgcccgttctactgcaggggcaggcccggttggtcgaagagtgtaatggccgccgggccaagttactggcttgtgatggaaacgagatcgacacaatgttcgtcgaccggcggggcaccgcggaaccccagggtcagaaactggtgatctgctgcgaaggcaacgccggattttatgaagtaggttgcgtctccacacctctggaggctgggtattctgttctgggatggaaccaccccggatttgccggttccactggagtgccctttccacaaaacgaggctaacgccatggatgtggtggtccagttcgctatccaccgccttgggttccagccacaagacattatcatctacgcttggtcaatagggggtttcacagcaacgtgggcggctatgtcctaccccgacgtttctgccatgattcttgacgcatcgttcgatgacctagttccactcgctttgaaagtcatgccggacagctggcgggggctcgttacaaggaccgtccgccagcatctgaatctcaataatgcggagcagttatgtagataccaaggccctgtgctcctgattcgccgcacaaaagatgaaatcattacaacgactgtccccgaagacattatgtcgaatagaggcaatgacctcctgctcaagctcctgcagcaccggtaccctcgagtgatggctgaggagggtctccgcgtcgtccggcagtggctggaggcgagtagccaactggaggaggcgtctatatacagcagatgggaggtggaagaagattggtgcctgtccgtcctgaggagttaccaggcggaacacggcccagacttcccctggtccgtcggtgaagatatgagtgccgacggccggcgccaattggctctgtttttggcgaggaagcacctccataattttgaggccacacattgtacaccgttgccagcccagaatttccagatgccctggcatctgtag

SEQ ID NO: 106741 - DNA, 1677 bp, synthetic construct
  misc_feature 1..1677: note = Description of Artificial Sequence: Synthetic coding sequence
  source 1..1677: mol_type = other DNA
atggcgaagctgctgagctgtgtgctgggtccacggctttataagatctaccgcgagcgagatagtgaaagggctcccgcatccgtgcccgaaacacccactgccgtgacagctccccatagctcctcctgggacacatactaccaaccacgggcactcgaaaaacatgctgattctatcctcgcactcgctagtgtcttctggagcatttcatactatagcagtcccttcgcatttttctacctatatcggaaaggatatcttagcctatcaaaggtcgtaccattttcccactatgctggcacactacttctccttcttgctggggtggcgtgtcttcggggcattggacgatggaccaacccacagtaccgacaattcattactatactggaggctacgcatcgcaatcagagctcggaaaataagagacaactggccaattataatttcgacttccgcagttggccagtggacttccactgggaggaaccctcatcccgcaaggaatctcgcggtggccctagccgccgtggcgtggcactgctgagaccagagcctctccataggggcaccgcggacaccttgctgaaccgggtgaaaaagctgccatgccagataacatcttacctagtagcccatactctgggccgccggatgctgtaccccggatccgtttacctgctgcagaaggctttgatgccagtgctgttacaaggacaggccaggctagtcgaggagtgtaatgggaggagagccaaattactagcctgtgatgggaacgagatcgacacaatgttcgtagatagacgaggcaccgctgagcctcagggtcagaagttagtgatttgctgtgaaggcaacgccggcttttacgaggtggggtgtgtctctacccctctggaggcaggatactccgtgctggggtggaatcatccaggcttcgccggcagcacaggggtgccgtttccacagaacgaggccaatgctatggacgtggtcgtgcagtttgccatccatagattagggtttcagccacaggatatcattatctacgcttggtcaatcggggggtttacggctacttgggctgcgatgtcctatcctgacgtgtcggcgatgatcctggacgccagttttgatgatctggtccctctggccttgaaggtcatgccagacagttggagaggtctcgtaactaggaccgtgcgccagcacctgaacctgaacaacgccgaacagctctgtaggtaccaaggacccgtccttctgattcgcagaactaaagacgagattatcacgacgactgtgcctgaggacatcatgagcaatcgcggcaacgacttgttactgaaattactccagcaccggtaccccagggtgatggccgaggaaggcttgcgagtggtgcgacagtggctggaggcatcttcccagctggaggaggcttccatttacagccgttgggaggtggaagaggactggtgtctgagcgtcctgcgttcttatcaagccgaacatggacccgatttcccatggagtgttggcgaggatatgagtgccgacgggcgccggcagctagcactgttcttggcgcggaagcacctgcacaatttcgaggcgacccattgcacccccctccctgcccaaaacttccagatgccttggcacctttag

SEQ ID NO: 106742 - DNA, 1677 bp, synthetic construct
  misc_feature 1..1677: note = Description of Artificial Sequence: Synthetic coding sequence
  source 1..1677: mol_type = other DNA
atggctaaactcctatcctgtgtgctgggccctcgactctacaagatttatcgcgaaagggacagtgaaagggctcctgcttctgtgccagagactccaaccgccgtgacggcgccacacagcagtagttgggacacttattaccagcctagagctttggagaagcatgccgactccatcctggcactcgcatcagtgttttggtctatctcctattactcctcaccctttgcttttttctacctgtacagaaaggggtatctctcactgtctaaagtggtgccattcagtcattatgccggcactctgcttctgctgctcgcgggagtagcgtgtttacggggcataggacgatggacgaatccgcaatacagacaatttataaccatcttagaggctacacatagaaatcaaagttccgagaacaagagacaattggcaaattataacttcgatttccgcagttggcccgtggacttccattgggaggagccctccagccgtaaggagtctcgaggcggacctagtcgccggggagtcgcactgctgagaccggagcccttgcacagaggcacagccgacacacttctaaacagggttaaaaagttaccttgccagatcacatcgtaccttgttgcccatacactgggtaggcggatgctgtaccctggatctgtctacttgctccagaaggcgttgatgcctgtgctgttacagggccaggccagactagtggaagagtgcaacggccgcagggcaaagctactcgcttgcgatggaaacgaaatcgatactatgttcgtggatagacgtggaacagccgaaccccaagggcagaagctggtgatctgctgcgaggggaacgcggggttttatgaggtgggatgcgtaagcacgcccctagaagccggatatagcgtcttaggttggaaccacccaggtttcgccgggagcaccggtgtcccctttccccagaacgaggctaatgcaatggacgtggttgtacagtttgctattcacaggctggggttccaacctcaagatatcattatctacgcctggtccatcggcggctttacggccacttgggctgccatgtcgtacccggacgtcagcgcaatgatactggacgcctcttttgacgatttggttcccttagcactcaaagtcatgcccgactcctggcgggggttagtgacgagaacggtacggcagcaccttaatcttaacaatgctgaacagctgtgcaggtaccagggcccagtcctcttgattagacgtactaaagacgaaattattacaactacagtgccagaggacattatgtcaaatagaggcaatgatctactcctcaagctgctccagcaccggtatccccgggtcatggccgaagaaggcctgcgggtggtgcggcaatggctggaggcctcgagccagcttgaggaggcgagtatctactcacgctgggaagttgaagaggattggtgtctgtccgtgctccgctcttatcaagccgagcacggtcccgatttcccctggagtgtcggcgaggacatgtccgcagacggccgtaggcagcttgccctcttcctggcgaggaagcatctacataacttcgaggccacccactgcacccccctgcctgcccagaacttccagatgccatggcatctgtag

SEQ ID NO: 106743 - DNA, 438 bp, synthetic construct
  misc_feature 1..438: note = Description of Artificial Sequence: Synthetic coding sequence
  source 1..438: mol_type = other DNA
atgcttggacactgttgctatttctggcaggtgtggccagcatctgaggcgctcgccgccggtcctaccccttctacaggatcctcctcccctagctggaaacagcacattggaacttctctgcagaagaccaggggcagtcttccaaccaccaccctcacttctggagcaggccaatcaacttcaaccggcaagaaccctgccgctggacgctctctggaaggcgcccttccggcgggagtgtggccctgcttcgcccagagcccatgtactgggggtcagcaaactccgagctctaccggactgcggtcatgtctcgtgcgctcacctggcggcaagcagcaacggggggaagcacattggggaggcggagctatatccggagtgttgtgggagtgggctctgcactgtaaaattgctgtgactcattgggcgtag

SEQ ID NO: 106744 - DNA, 438 bp, synthetic construct
  misc_feature 1..438: note = Description of Artificial Sequence: Synthetic coding sequence
  source 1..438: mol_type = other DNA
atgctgggacactgttgttacttctggcaagtgtggcctgcttccgaggctcttgcagccggaccgacacctagcaccgggtcaagttccccttcatggaaacagcacataggtacttctctgcagaaaacgcgcgggtcactccccaccaccacgttaacttctggtgcgggacagtcgacttccacagggaagaaccccgccgccgggaggagtctggagggggcccttcccgccggagtctggccctgcttcgctcagtcaccttgcacagggggacagcagactccttcgtctaccggactgagatcgtgtctggtcaggagcccaggggggaaacagcaaaggggggaggctcactggggcggaggcgccatctccggcgtgttgtgggaatgggccttgcattgtaagattgcagtcactcattgggcctag

SEQ ID NO: 106745 - DNA, 438 bp, synthetic construct
  misc_feature 1..438: note = Description of Artificial Sequence: Synthetic coding sequence
  source 1..438: mol_type = other DNA
atgctgggacattgttgctatttctggcaagtttggcctgcctccgaagccctcgctgccgggcctactccctctaccgggtcgtcctctcccagctggaagcagcacatcggcacgtctcttcagaaaactagggggagcctgcccactacaaccctgacgtccggtgctggccaaagtacctccactgggaaaaaccccgcagccgggagaagccttgaaggtgctctaccagctggcgtttggccgtgtttcgctcagagcccttgcaccgggggtcagcagaccccctccagcaccgggctgcgctcgtgccttgtgcggagccctggggggaagcaacagcgcggcgaggctcactgggggggtggagccattagcggcgttctgtgggaatgggccctccattgtaaaatagctgtcacacattgggcttag

SEQ ID NO: 106746 - DNA, 1578 bp, synthetic construct
  misc_feature 1..1578: note = Description of Artificial Sequence: Synthetic coding sequence
  source 1..1578: mol_type = other DNA
atgccacccccagccctcttcctgtcatccctgtacccaaggctggagttccagaacgatttctacaggtcctgtattcgcaggagttccccccagccacctcccaacctggcttggcggccagagtcactgtacagcggcgagctcgcaggcggcggatatctgtccttgtcgaaggtggtcccattctcccactacgccggaacactgcttctcctcctggctggggtggcctgtctgcgagggataggccgatggaccaatccgcagtacagacagttcattaccattcttgaggctactcatcggaatcagtcatccgaaaacaaaagacaactcgccaactacaacttcgattttcggagctggccggttgattttcattgggaagaaccctcatcaagaaaagagtctcgtggcggcccatctcggcggggtgtggccctgcttagaccagaaccactccacaggggcacagccgatacactactaaaccgcgttaaaaagctcccctgtcaaatcacctcttacctcgtggcccacaccttgggtcggagaatgctctacccgggatctgtatatctgctccagaaagctctcatgccggtgctgctccagggtcaagcccggttagtcgaagagtgtaacgggcgaagagccaaacttcttgcctgcgatggaaatgaaattgacaccatgtttgttgacagaagggggactgcagagccgcaaggacagaaactggtgatctgttgcgagggcaatgccggcttttatgaggtgggctgtgtttccacacctctggaagctgggtatagtgtgttgggctggaaccacccaggattcgcaggatcaacgggtgttccttttccccagaacgaggccaacgcaatggacgtggttgtccagttcgctattcatcggctgggctttcagcctcaagacatcataatttacgcttggtccatcggtggcttcaccgccacttgggccgccatgagctaccctgatgtcagtgccatgattctagacgcttcattcgatgacctggtgccactagccctcaaggtgatgcctgactcctggagggggttggtgacgaggactgtaagacagcatcttaacctcaacaatgcggaacagctttgccgataccaaggaccagttcttttgatcaggcggaccaaagatgagattatcacaacaacagtgcccgaggacatcatgagcaatcggggtaatgacttgctacttaagctcctgcagcatcgatatccacgtgtgatggcagaggaaggactaagggtcgtgcggcagtggcttgaagcctcctcacaactggaggaagcgtcgatctactcgcgctgggaggtggaggaggactggtgtttgtcagtccttcggagctatcaggccgagcatgggccagactttccttggtcagtcggcgaagacatgtctgctgatggcaggcggcagctcgccctgtttctcgcgcggaagcaccttcataacttcgaagcaacccactgtacccctctcccagcccagaacttccaaatgccctggcacctctag

SEQ ID NO: 106747 - DNA, 1677 bp, synthetic construct
  misc_feature 1..1677: note = Description of Artificial Sequence: Synthetic coding sequence
  source 1..1677: mol_type = other DNA
atggccaagctgctgagttgcgtcctgggtccaaggctgtataagatctatcgagagcgggactcggagcgagctccagcatcagttccagagacaccaactgcggtgactgcccctcattcatccagttgggatacatattatcagcctagggccctggagaagcacgctgactccattttagctctggccagcgtgttttggagtattagttattactcctctccatttgccttcttttacttgtaccggaagggatatttatcactatccaaagtggttccatttagccactatgccggcaccctgctgctgctgttagctggggtggcttgtctgagggggatcggccggtggactaatccacagtatagacaatttatcacaatattagaggctacacatagaaaccagagctcagaaaacaaacgacagttggccaactataacttcgatttccgctcctggccggttgatttccactgggaggagccatcttcccgcaaggagtcccgggggggccccagtaggcggggcgttgcacttctccggcccgagcccctgcacaggggtactgcagatactcttctgaaccgggtgaaaaagctgccgtgccaaatcacctcctacctggttgcccacacattaggacgcaggatgctgtaccccggaagcgtttatttgttgcagaaagcactgatgcccgtgttgctgcaaggacaggcccgcctcgtggaagagtgtaatggcagacgcgctaaactgctcgcatgcgatggaaatgagattgacactatgtttgtagatagacgaggaaccgccgaacctcaaggccagaagttagtcatttgttgtgagggcaacgctggattctacgaagtgggttgtgtgtccacccccctggaagctggctattcagttctgggctggaaccaccctggcttcgccggtagcacgggtgttccatttccccagaatgaggcgaacgcgatggatgtagtggtgcaattcgccattcatcggctgggcttccaaccgcaggatattattatctacgcatggtccattgggggtttcaccgccacctgggccgcaatgagctaccccgatgtgagcgcaatgatccttgatgccagctttgacgatttagtgccgctcgcactcaaagtgatgcccgacagctggcgcgggttggtaacccgtaccgtgcggcagcacttaaacctgaataacgccgaacagttgtgtcgctaccagggccccgtcctgttaattcggcgaacaaaggatgaaatcattaccacgactgtcccggaagacatcatgtccaacagggggaatgatttgctactgaagctcctgcagcaccgctatcctcgggtcatggcggaggaaggcttgcgcgtggtgcggcagtggttagaggccagtagccagttggaagaagcttctatttattctaggtgggaagtggaggaagactggtgcttgagtgtgttacgctcctatcaggccgagcacggacccgattttccctggtcagtcggcgaggatatgagcgctgatgggcggcggcaactggctctgttccttgctagaaagcatctgcataattttgaagccactcattgcacccccctccccgcccagaatttccagatgccctggcatctgtag

SEQ ID NO: 106748 - DNA, 1578 bp, synthetic construct
  misc_feature 1..1578: note = Description of Artificial Sequence: Synthetic coding sequence
  source 1..1578: mol_type = other DNA
atgcccccacctgcactattcctgagcagtttgtacccccgcctcgagttccagaatgacttttatcgctcctgcatcaggcgctcatctccccagcctccacccaacctggcctggaggcctgaatcattatattccggagaattggctggtgggggatatctgtccctgagcaaagtcgttcccttctctcactacgccggaaccctgctgctattactggctggagtcgcatgcttacgtggtattggcagatggacaaacccccagtatcggcaattcataacgatcctcgaggcaacccataggaaccagagctctgagaacaaaaggcagctggctaattacaacttcgatttccgctcctggcccgtggatttccactgggaagagccttcctcacgcaaagagagccgcggagggcctagccgacgaggggtggccctgctccgtcccgagcccctgcatagaggcaccgctgacactctgctgaaccgtgttaagaagctgccatgtcagattacatcctacctagtggcccacaccctggggcgaagaatgttgtatcccggatcagtctatctgctgcaaaaggccctcatgcccgtgctcctgcagggccaggccaggctggtggaagagtgcaatggccgccgtgcgaaattgctggcatgtgatgggaatgaaatcgacaccatgtttgtggaccgtaggggcaccgctgagcctcagggccagaaacttgtgatttgctgcgaggggaatgccggcttttatgaggtgggctgcgtttctacaccgctagaggctggctactccgtgctaggatggaaccaccctggattcgctggcagtactggcgttccatttcctcagaatgaggccaacgcgatggacgttgtggtgcaatttgccattcaccggctcggttttcagccccaggatatcattatctatgcttggtctatcggaggtttcacagccacatgggccgctatgagttatcctgatgtgtcagctatgatcctcgatgcctcatttgacgatttggtgccactggcattgaaggtcatgcccgactcttggagaggtcttgttacacggacagtcagacaacacctgaaccttaacaacgccgaacagctgtgtcgttaccagggtccggtgctccttattagacggactaaggatgaaatcattacaaccaccgtaccggaggacattatgtctaatcgtggcaatgacctgcttcttaaacttctccagcacagataccctagagtcatggccgaagagggactgagagtcgtcaggcagtggcttgaagccagctctcaactggaggaggcctctatttattcccgctgggaggttgaagaggattggtgcctctcagtgctacgctcctatcaagcagaacacggacccgacttcccctggtcagtcggggaagatatgtccgccgatggtaggcggcaactcgctcttttcctggcaaggaagcatctgcacaacttcgaagctacgcattgcacacctcttcctgcacagaactttcagatgccatggcacctctag

SEQ ID NO: 106749 - DNA, 1578 bp, synthetic construct
  misc_feature 1..1578: note = Description of Artificial Sequence: Synthetic coding sequence
  source 1..1578: mol_type = other DNA
atgcctccgcccgccctgtttctgtcaagcctgtatcctagactagaattccagaacgatttctatagatcctgcatccggaggtccagtccacagcctcccccgaacctggcttggcgtccagaatctctttacagtggggagttagcaggaggcggatatctgagcctgtcaaaagttgtccctttcagtcactatgccggtaccctgctgctgctgctcgcaggggtggcatgtttgcgggggattggacggtggaccaaccctcaataccgccagttcattaccatcctggaagccacccatcggaatcaatcctctgagaacaaaagacagttggccaactacaacttcgacttcagatcttggccagttgattttcattgggaggagcccagttcgcgcaaagaatcccgaggtgggcccagccgcagaggggttgcgctcctgcggcctgaacccctgcatagagggacagcggacactctgcttaaccgggtgaagaagttgccctgccagatcacctcctacctggtggcacacactttagggagaaggatgctctatccgggctctgtctatcttttgcaaaaagccctcatgccagtgttgttacaggggcaggctaggctggtcgaagaatgtaacggacgtcgcgcgaagctgctggcttgcgacggcaacgaaattgataccatgttcgttgatcgcagaggcaccgcagaacctcagggccagaagctcgtgatttgctgcgagggaaatgcgggattctacgaggtcggttgcgtcagtacacctcttgaggccggatatagtgtgctggggtggaaccacccaggattcgcgggaagcacgggagtgccattcccccagaatgaggctaacgccatggacgttgtcgtccagttcgcaatacacaggctcggctttcaacctcaggacattattatatacgcttggtccataggagggttcaccgctacctgggccgccatgagctatccagatgtgagtgctatgatattggatgcaagctttgatgacctggtccctctcgcactaaaggtgatgccagatagctggcgagggctcgtcacacgaacagtacggcaacacctgaatctcaacaacgccgaacagctgtgtagataccagggccccgtcttgctgattcgtcgcacgaaagatgagattattaccacgaccgtaccggaggatataatgtccaatcgaggcaatgatcttcttctgaagttactgcagcacagatatcctcgggtaatggctgaagaagggctgcgggtagtacggcagtggctggaagccagttctcagttggaggaggcaagcatctattccaggtgggaggttgaagaggattggtgcctgagtgtgctgagatcttaccaagccgagcatgggcctgatttcccgtggtctgtgggcgaagatatgagcgcggatggaaggcgccaactggccctcttcttggctcgaaaacacctacacaacttcgaggccacccattgcacgcctctccctgctcagaatttccaaatgccttggcacctatag

SEQ ID NO: 106750 - DNA, 438 bp, synthetic construct
  misc_feature 1..438: note = Description of Artificial Sequence: Synthetic coding sequence
  source 1..438: mol_type = other DNA
atgttgggacactgctgctatttctggcaggtgtggcctgcatctgaagctcttgctgccggcccgactcccagcacgggctcctcatccccttcgtggaaacagcatatcggtacatccctgcagaagacaaggggcagccttcctacaacaactctcactagtggggctgggcaatccacgagcaccgggaaaaatcccgctgccgggcggtcgctggagggcgctctgcctgcaggcgtgtggccatgtttcgcacagtccccatgtacaggtggccagcagacaccttcctcaactggcctccggtcctgcctggtgcggtcccccgggggaaagcagcagaggggagaggcacactgggggggcggcgccatctcaggcgttctttgggagtgggcactccattgcaaaatcgcggttactcactgggcctag

SEQ ID NO: 106751 - DNA, 1578 bp, synthetic construct
  misc_feature 1..1578: note = Description of Artificial Sequence: Synthetic coding sequence
  source 1..1578: mol_type = other DNA
atgccaccccctgccctattcctaagcagcctgtatcctcgactcgaatttcagaacgacttttatcgatcctgcatcaggaggtcgtctccccagccgccacccaacctcgcatggcgcccagaatctctgtactccggcgagctcgccggtgggggttatctgtcactttctaaagtcgttcccttctcacactacgctgggactctcttactgctgttagcgggggtggcttgccttagaggcatcggcaggtggacaaacccgcagtatcgtcagttcatcactatactcgaagccacacaccggaatcagtctagcgaaaacaaacggcagcttgctaactacaacttcgacttcagaagttggccagtcgactttcactgggaggaaccaagctcacgaaaagaaagccgcggaggcccttctcgacgcggtgtggccctcctccgacctgagcctctacaccgaggaactgccgataccctgctcaatcgagtgaaaaagttaccgtgtcagataacaagttacctggtggcgcataccttggggcgcaggatgctctatcccggctccgtctacttactgcagaaggcactcatgcccgtcctcctgcaagggcaggcccgcttggtagaggaatgcaatgggagacgggctaaattactggcttgtgatggaaacgaaatcgataccatgttcgtggaccgcagagggaccgccgagccccaaggccagaagctggttatctgttgcgagggaaatgccggcttctacgaagtgggatgcgtgtctacccccctggaagctggttactcggtgttgggatggaatcatcccggcttcgccggcagtacgggcgtcccttttccccagaacgaggcaaacgctatggacgtggtggtgcagttcgccattcatcgcttggggttccaacctcaggatatcatcatttatgcttggagcatcggggggtttacagcgacatgggccgctatgtcatatcccgacgtatctgcgatgatccttgacgcttcattcgatgatttggtgcccctagcgttgaaagtgatgcctgattcatggcgggggctggtcacccgcacggtaaggcagcacttgaacctaaacaatgctgaacagctgtgccgataccaaggcccagtcctgctgatccgcagaaccaaagatgaaattatcaccaccacagtaccggaggatatcatgagcaatcgcggcaatgacctcctgctgaaactcctacagcaccggtaccctagggtgatggccgaggaaggtctgcgggtggtcaggcaatggctcgaggccagctctcaactcgaggaagcatctatttactctagatgggaagttgaggaagactggtgcttgagtgtgttgcggtcctatcaagccgaacatggtcctgatttcccgtggtcggtcggtgaagatatgtctgccgatgggaggcgccagctcgcactgttcttggcccgaaagcacttgcataacttcgaggctacacattgtactcctttgccagcacagaatttccagatgccttggcatctgtag

SEQ ID NO: 106752 - DNA, 1677 bp, synthetic construct
  misc_feature 1..1677: note = Description of Artificial Sequence: Synthetic coding sequence
  source 1..1677: mol_type = other DNA
atggccaaattgttatcctgtgtactgggccctcgcctctacaaaatttatcgggaaagggattcagagcgcgcccctgctagcgtcccagagacaccgacggccgtcacagctccccacagctcttcatgggatacttattaccagcctcgcgccctcgagaagcatgcagatagcatcctcgccctcgcatcagtgttttggtccatttcttactacagcagccccttcgcgttcttttacctgtatagaaagggttatctgtcactcagtaaggttgtccccttcagccactatgccggaacacttctccttcttttggccggcgtggcctgcttacgagggatcggccggtggactaatccacaataccgacagtttattaccatcctggaagcgacccacaggaaccagagcagcgagaacaaacgccagctggccaactacaatttcgatttcagaagctggccagtggattttcattgggaggagccatcttcccggaaggagtcgcgcggaggtccgagcagacgaggagttgccctactgcggcccgaacctctgcatagaggaaccgctgatacgttgctgaatagggtcaagaagctgccatgtcaaatcactagttacttggtcgcacacacacttggcaggcgcatgctgtatcccggatcagtgtatctccttcagaaagcgttgatgcccgtgttattgcagggacaggccagactggtggaagaatgcaacggccggcgagctaaactgctggcttgtgatggtaatgaaattgatactatgtttgtggatcgtagaggcactgccgaaccccaggggcagaagctggtgatttgttgcgagggaaacgccggattttatgaagtaggatgtgttagtaccccactcgaagccggctactcggtcttagggtggaatcatcctgggtttgctggctctaccggcgtcccttttcctcaaaatgaagccaacgctatggacgttgttgtgcagttcgcgatccacagactcggcttccagccacaagatatcatcatatacgcgtggtcaatagggggtttcacagcaacttgggcagccatgtcctacccagacgtcagcgccatgatcctggacgcatcatttgacgacctcgtacccttagccctcaaagtaatgcctgattcttggcggggactggtcacaagaactgtgcgacagcaccttaatctgaacaacgcggaacaactgtgtcgctaccaaggccctgtcttgctgatacgcagaacaaaagatgagatcatcacaaccacggtaccggaagacatcatgtccaacagaggaaacgatctcttactcaagctgctgcagcacagatatcctagagtgatggctgaggagggcctcagagtcgtccggcagtggttggaagcctcctcccagctggaagaagcgagcatctatagcagatgggaagtggaagaggattggtgcctgagtgtgctgcgttcttaccaggctgaacacgggccagattttccttggagtgtaggagaagacatgagcgcagatggccgccgccagctggccctgttcctcgcacggaaacatcttcacaatttcgaggccactcattgcactcctctgcctgctcagaattttcagatgccatggcatctgtag

SEQ ID NO: 106753 - DNA, 1578 bp, synthetic construct
  misc_feature 1..1578: note = Description of Artificial Sequence: Synthetic coding sequence
  source 1..1578: mol_type = other DNA
atgcctcctcctgccctgtttttgtcttctctctacccacggctcgagttccagaatgacttttatcgatcttgcattcgccgctcgtcaccccagcccccgccaaatctggcctggcgtcccgaatccttatactcaggtgagctcgccggcggcggctacctgagtctgtcaaaggtggtcccatttagccactacgccggtaccctcctgctcctgctagccggcgttgcctgtttaagagggattggcaggtggactaatccccagtaccgccagttcatcactatactcgaggcaacccatcggaaccagagctcagaaaataaacgacagctggccaactacaactttgacttcaggagctggccggtagactttcattgggaagagcctagtagcaggaaagagtcacgcggcgggccatccaggcgtggcgtcgcacttctgcgaccagaacctctccatcgcggaaccgcagatacactccttaatcgcgtcaaaaaactgccttgccagatcacttcttatctcgtcgcacacactctcggacgacgcatgctgtatccgggtagcgtctatctcctccagaaggcactcatgccagtcttattgcagggccaagccaggcttgtcgaagagtgtaatggcaggcgcgcgaagttgttagcatgtgacggaaacgaaattgatactatgttcgtcgatcgccgcggaacggccgagcctcagggccagaagttggtcatctgttgcgagggtaacgcaggtttctatgaagtggggtgtgtttcgacccctctagaggccggatacagtgtcctaggctggaaccacccagggttcgctggctccacgggtgtacctttcccccagaacgaggctaatgccatggacgttgtagtccagttcgctatccatcggctgggcttccagcctcaggatatcatcatatacgcgtggtcaattggaggattcaccgccacctgggccgcaatgtcttaccccgatgtgtccgcgatgatcctcgacgcgtccttcgatgacctcgtgccacttgcccttaaggtcatgcctgactcctggcgtggactagtgacacggactgttcggcagcaccttaacttaaataatgcggagcaattgtgccgttaccagggacctgtgctgttgatccggcgcactaaggacgaaatcatcaccactactgttccagaggacatcatgtccaatcgcgggaatgatctgctcctgaagctccttcagcaccggtaccccagggttatggccgaggagggccttagggtggtccgccaatggttggaggcaagttctcagttggaagaggccagcatatactcaaggtgggaggttgaagaagactggtgtctatcagttctccggagctaccaggcagagcacgggcccgattttccctggagcgtgggagaggatatgtccgctgatggtagacggcagctagcactatttctggcaaggaaacacctgcataacttcgaggcgactcactgtacacctctgccggcacagaactttcagatgccatggcacctctag

SEQ ID NO: 106754 - DNA, 438 bp, synthetic construct
  misc_feature 1..438: note = Description of Artificial Sequence: Synthetic coding sequence
  source 1..438: mol_type = other DNA
atgctcgggcactgctgctatttttggcaagtgtggcccgcctccgaggccctggctgcagggccgacccctagcacaggaagttcttccccttcctggaagcagcacattggaaccagtcttcagaaaacaagggggagtctgcccacgaccaccctcacgagtggtgcaggtcagtctacctctacgggcaagaaccccgctgccggccggtcgctcgaaggtgcattgccagcaggtgtgtggccatgcttcgcgcagagcccctgtacaggaggccagcaaactccatcgtccaccggactccgttcgtgtcttgtgcgcagtcctggcggaaaacagcaacggggcgaagcacattgggggggaggcgccatatctggcgtactttgggaatgggcactgcactgcaagatcgcagtgacgcactgggcttag

SEQ ID NO: 106755 - DNA, 1578 bp, synthetic construct
  misc_feature 1..1578: note = Description of Artificial Sequence: Synthetic coding sequence
  source 1..1578: mol_type = other DNA
atgccacccccggctctatttctgagcagcctctatcctcggctcgagttccagaacgacttttaccgcagctgcatccgcagaagctctccgcagccaccgccaaatttagcctggaggccagagagtctatatagcggcgagctggccggaggaggatacctcagcttgagtaaagtggtccccttcagccactatgccgggactctgctgctgttactggcgggtgtcgcttgcttgcgtggcatcggacgatggacaaatccacaatatagacagttcattaccatcctggaggctacccaccgcaaccagagttccgagaataagcgccagctcgcaaattataactttgactttaggagttggccggtggattttcattgggaggagccttcaagtcgcaaagagtctagaggcgggccatcaagacggggagtcgcactcctccgccccgagccattgcacagaggcacagcggacactctgctgaacagggtaaaaaagctaccctgtcagattacttcttatcttgtggcccacacccttggccgacggatgctctaccccggaagcgtttacctgttgcaaaaggccctgatgcctgtcctcctacaagggcaggccaggctcgtcgaagagtgtaacggacggcgggctaaactgctcgcctgtgatggaaacgaaattgataccatgttcgttgaccgacgggggactgctgaacctcaagggcagaagctggtgatctgctgcgagggcaatgccggattctatgaagtcggatgcgtgtctactccactggaggccgggtactccgtgctcggttggaatcatccaggctttgctggtagcactggggtcccattcccccagaacgaggccaacgccatggatgtagtggtgcagtttgccattcaccggttaggctttcagcctcaggatataattatttacgcatggtctattggcgggtttacggcaacttgggcagccatgtcgtatcctgacgtgtctgccatgatactggacgccagctttgatgacctggtgcccctggcacttaaagtgatgccggactcttggaggggactggtaacccgcacagtgcgccagcatttaaatctgaacaacgccgaacagctgtgtcggtaccagggccctgtcctgttgatcagacggacaaaggacgaaattattaccactacagttcccgaggacatcatgtccaatcgtggcaatgatttacttctaaagttactgcagcacagatacccccgcgttatggctgaggaaggcctgcgagtcgtacgacagtggctcgaagcaagttcacaattagaagaggcttccatttactcaagatgggaggttgaggaggactggtgcctctcggtgctgcgttcctaccaggccgaacacggacccgattttccatggtcagttggagaagacatgagtgctgacggcagacgccagcttgcactgtttctcgccaggaagcacctgcacaacttcgaagctacccattgcactccattgcctgctcaaaattttcagatgccttggcatctctag

SEQ ID NO: 106756 - DNA, 438 bp, synthetic construct
  misc_feature 1..438: note = Description of Artificial Sequence: Synthetic coding sequence
  source 1..438: mol_type = other DNA
atgcttggtcattgttgttacttctggcaggtgtggcctgcaagcgaggccttagctgccggcccaactccatccaccgggtctagctctcccagctggaagcaacatattgggacctccttgcaaaaaactcgcggctctctcccaacgacaaccctgacaagcggcgccggccaaagcaccagcacagggaaaaatcccgcagctggccgcagccttgaaggtgcattgcccgcgggcgtctggccttgcttcgcccagtccccctgtacaggcggccagcagaccccgtcatcaaccggcctgagatcatgcctggttaggagtcccggggggaagcagcaacggggagaagcccactggggcggcggagcaatatctggagtcctctgggagtgggcgcttcactgcaaaatcgctgtgactcattgggcctag

SEQ ID NO: 106757 - DNA, 1578 bp, synthetic construct
  misc_feature 1..1578: note = Description of Artificial Sequence: Synthetic coding sequence
  source 1..1578: mol_type = other DNA
atgcctccacctgctcttttcttatctagcctatatccgcgcctggaattccagaacgacttttatcgaagctgcatcagaaggagcagtccgcagcctcctcccaatcttgcctggcgacctgaatccctctactcaggggaactggcaggaggcggctatctgtcattgagcaaggtagtgcctttctcacactatgccgggaccctactccttctgctggccggagtggcttgcctgcgagggataggcagatggaccaaccctcaataccgtcaattcattaccatcctagaggccacccatagaaaccagagttctgagaacaaacgacaactagcaaattacaattttgattttcgatcctggccggtcgatttccactgggaggaaccctcaagtcggaaggagagcagaggcggtccaagtcgccggggtgttgccctcttgagaccagagccacttcacaggggaaccgcagatactctgctgaatcgcgtgaagaagttaccctgtcaaatcacaagctacttggtggctcatacattggggcggcgtatgttgtatcccggtagcgtctatctgctccagaaagccctgatgcccgtcttgttgcagggacaggcaagactggttgaagaatgcaacggtcgacgtgctaaactgcttgcatgcgatggaaacgagatagacacaatgttcgtcgatcggagggggaccgctgagcctcagggccagaaacttgtgatatgctgcgagggaaacgccgggttctacgaggttggctgcgtcagcacacctttagaggccggttactctgtgctgggatggaaccacccaggcttcgcgggcagcacgggtgtgcccttcccccagaacgaggctaacgctatggacgttgtggtgcagtttgctattcaccgcctgggtttccagccgcaggacataattatttacgcatggtccattgggggcttcacagccacttgggcggccatgagttacccggacgtttccgccatgattctagatgcctctttcgacgatttagtgccactggctttgaaagtgatgcccgacagctggcggggactcgtaactcggaccgttcgccagcatctgaacttgaataacgcggaacagctgtgcagataccaggggcctgtgcttttgattcggaggacaaaagatgagatcattactacaaccgtgcctgaggatattatgagtaatagggggaatgatctgttgctgaagctgctgcagcaccgctaccccagggtgatggctgaagaaggattacgggtggttcgccagtggctggaagcaagctcacagctggaggaggctagtatctactcacggtgggaggttgaagaagactggtgtttaagcgttctccggagctaccaggccgaacatggaccggatttcccttggagtgtgggggaggacatgagcgccgatggaagacggcagctggctcttttcttggcccgaaaacatctacacaactttgaggcgacacattgcacgccccttccagcacagaatttccagatgccgtggcacttgtag

SEQ ID NO: 106758 - DNA, 1278 bp, synthetic construct
  misc_feature 1..1278: note = Description of Artificial Sequence: Synthetic coding sequence
  source 1..1278: mol_type = other DNA
atgaatgccatgttggaaactcccgaactgccggcagtttttgatggtgtgaagctagcggctgttgccgcggtactgtatgtgattgttcgatgccttaacctgaagtccccaaccgcgcctcctgacttgtattttcaggattccggactaagccgattcctgcttaaaagttgccctttgttaactaaggagtatattcctccattaatttggggaaagagtggccatattcaaaccgcactgtacggaaagatggggagggtgagaagtccccacccttatggccacaggaaatttatcaccatgtccgacggagccacgtccacgttcgacctctttgagccattagctgagcactgcgtcggcgatgatataaccatggttatatgtcctggcattgccaatcactcggaaaaacagtacatacggaccttcgtggactacgctcagaagaatggatacaggtgcgcagtactaaaccacttgggagcactccccaacattgagctcacaagcccgcgcatgtttacatacggatgcacctgggaatttggcgccatggtgaactacattaagaaaacatatcccctgacccaactcgttgtggttggtttctcactgggcggaaatattgtgtgtaaatacctgggggagacacaggcaaatcaggagaaggtcctctgttgtgtttccgtttgccaggggtatagtgcactcagagctcaagagacattcatgcaatgggatcagtgtcgtcgattctataattttcttatggccgataacatgaaaaaaatcatcctgtctcacaggcaggccctttttggagatcacgtcaagaagccacagtcactggaggataccgatctgagcaggttgtacactgctactagcctgatgcaaatcgatgacaatgtaatgaggaagttccacggatacaactctctgaaggagtattatgaagaagagtcttgcatgcggtatttgcaccgtatatacgtcccactgatgttggtcaacgccgcagacgacccactcgttcatgagagtctgctgaccatcccaaagagtctcagcgaaaaaagggagaatgtgatgttcgtgttacccctccatggcggccacctgggctttttcgaaggaagcgtgctttttcctgaaccattaacctggatggataaactggtggtcgagtacgcaaatgccatttgtcagtgggaacggaataaattacagtgttctgacacagagcaggtggaagccgacctggagtag

SEQ ID NO: 106759 - DNA, 1278 bp, synthetic construct
  misc_feature 1..1278: note = Description of Artificial Sequence: Synthetic coding sequence
  source 1..1278: mol_type = other DNA
atgaatgcaatgctcgaaaccccagaacttcccgctgtcttcgatggggtgaaactagccgcagtggctgctgtgctgtatgtgatcgtgaggtgtctcaaccttaagtctccgactgccccccctgacctgtacttccaggatagcggactgagcagattcctgctcaagtcttgtcccctgctgacgaaagaatatattcccccactgatctggggtaagtctggccacattcagacagcactttacggtaagatgggccgcgtgcggtctcctcatccctacgggcacaggaagttcattactatgagtgacggtgcaacttccaccttcgatctctttgagcccctcgccgaacactgcgtgggcgatgatattaccatggttatttgtcctgggattgctaaccacagcgagaaacagtacatccgtacatttgttgactacgcccaaaagaacgggtatcgatgcgcagttctgaatcatctcggtgctttaccgaacatcgaactgacttcaccaaggatgttcacatatggatgtacctgggagtttggcgccatggtaaactatattaagaaaacatatcccctcacgcagctcgttgtcgttggtttcagtctaggcggaaacatagtatgtaagtacctgggggaaactcaggccaatcaggaaaaggtgttgtgctgtgtcagtgtgtgtcaaggttattccgcattgagggctcaggagacgtttatgcagtgggaccagtgtagaaggttttacaatttccttatggctgacaatatgaagaagatcatactctcacatcgccaagccctcttcggtgaccatgtgaaaaagccacagagcctcgaagacaccgacttgtcacggttgtacacagcaacgagcctcatgcaaatcgacgataatgtgatgcgcaagttccatggatataacagcttaaaggaatattatgaggaagagtcatgcatgcgatatctgcacagaatctacgtgcctctgatgttagtcaatgccgccgacgatcctcttgttcacgaatcattacttacaatccccaagtcactctcagaaaaaagggaaaatgtgatgttcgtgctacccttacacggaggtcacctcgggtttttcgaaggaagcgtgctattccccgagccccttacatggatggataaactggttgtagaatatgcgaatgctatctgccagtgggaaaggaacaaactccagtgtagtgatactgaacaggtagaggcggaccttgagtag

SEQ ID NO: 106760 - DNA, 1230 bp, synthetic construct
  misc_feature 1..1230: note = Description of Artificial Sequence: Synthetic coding sequence
  source 1..1230: mol_type = other DNA
atgcagcggctggcaatggaccttcgcatgctgtcacgcgaactctctctgtatttagaacaccaggtgcgcgtgggcttctttgggtcaggtgtgggcctgtctctgatccttgggttctcagtggcctacgcattttactatctgtccagtatagccaagaagcctcagctggtgaccggcggcgagtccttctcacgttttctgcaggaccattgtcctgtggtgactgaaacctactaccccaccgtctggtgctgggagggaaggggtcagaccctgcttaggccatttatcacgtctaaaccacccgttcaataccgtaacgaactaatcaaaacagcagacggaggtcagattagcctggactggttcgacaacgataacagtacctgttacatggacgcttcgacccgccccaccatactccttctccccggattgacagggacaagcaaagagagctatatcctgcatatgattcacctgtccgaggagctgggatatcggtgcgtcgtctttaacaaccggggcgtcgctggcgagaacttgctgaccccaaggacctattgctgcgctaataccgaggacctggagaccgtgattcatcacgtccacagcctctacccatccgcccctttccttgccgcaggtgtgtccatggggggaatgctgctgcttaactatcttggtaagattggttccaaaacaccactgatggccgcagcaaccttctcagtcggttggaataccttcgcctgttctgagtccctggagaagcccctgaattggctcctctttaattattacctcacaacctgtcttcagtcttctgttaacaaacaccggcatatgttcgtcaaacaggtggatatggatcacgtgatgaaggctaagtctatcagggagtttgacaaacgctttacgtctgtgatgtttggataccagacaatagacgattactacaccgatgcgtcaccatcacccaggcttaagagcgtcggaattcctgtgttgtgcctcaactccgtcgatgacgtgttttcaccttcacacgccatccccatcgagacagcgaaacagaaccctaatgtggccctggtgctgacaagctatggagggcatatcggtttcctcgagggaatttggccgaggcagtcaacatacatggaccgggtgttcaaacaatttgttcaggcgatggtcgaacacggtcatgaactatcctag

SEQ ID NO: 106761 - DNA, 1050 bp, synthetic construct
  misc_feature 1..1050: note = Description of Artificial Sequence: Synthetic coding sequence
  source 1..1050: mol_type = other DNA
atggcagctgaagaagaagaggttgacagtgcagacacaggagaacgcagcggatggctgacaggttggttgcctacatggtgtccgacatctataagccacctgaaagaggcggaagaaaaaatgttgaagtgtgtcccatgtacttacaagaaggagcccgtgcgaatctcgaatggaaataagatatggactctaaagttcagccacaacatcagtaacaagacccctctggttctcctccacggattcgggggtgggttgggcctatgggcactgaattttggggacttgtgtactaatagaccagtttatgccttcgatctgcttggcttcggccgcagcagccgacccagattcgactcagacgctgaggaagtggaaaaccagtttgtagagagcattgaagagtggagatgcgccctgggtttggataagatgatattgctaggccacaatctcgggggtttcctagcagcggcctactccttaaaatatcccagtcgcgtcaaccatctgatcttggtcgagccatggggcttcccagagcgcccagatctggccgaccaggaccgcccaattcccgtgtggattagggcattaggagccgcacttacccccttcaacccacttgccggcctgagaatcgctggaccttttgggttgagcctggttcagcgcctgcgccctgacttcaagcggaagtattctagcatgtttgaagacgatacagtgaccgaatacatctaccactgcaacgtgcagactccatccggcgagaccgccttcaagaacatgaccattccttacggctgggccaaacgccctatgctgcagcgcatcggtaagatgcaccccgacattcccgttagcgtgatattcggagcacgcagttgtatagatggcaactctggtacatctattcagtcacttcgcccacactcgtacgtcaaaaccatcgctatcctaggtgccgggcattacgtctacgcggaccagccagaagaattcaatcagaaggtcaaagagatctgtgataccgtggactag

SEQ ID NO: 106762 - DNA, 1491 bp, synthetic construct
  misc_feature 1..1491: note = Description of Artificial Sequence: Synthetic coding sequence
  source 1..1491: mol_type = other DNA
atggccgagctgcagatgctcttggaggaagaaatccctagcggcaaaagggctttgattgaatcctatcagaatcttacccgggtcgcagactattgcgagaacaattacatacagcggcatgggtttgcggtgttgctatgtctgctctctaattcttggccgcaggcaacagacaaacgcaaagctttggaggagactaaagcctacacaacccaatcattggcttccgtcgcatatcagattaacgccctggcgaataatgtgctgcagttgctggacattcaagccagccagctgagacggatggagtcttctatcaatcacatctcccaaaccgtggacattcacaaggagaaggtggcgagacgagaaattggcatcctaacgacaaataagaacaccagtaggacgcataagatcatcgctccggccaacatggagaggccagttagatacatccgtaaacctattgactacactgtgcttgatgacgtgggccacggtgttaagtggctgaaggccaagcacggtaataaccagcctgctaggactggcactctcagccggacaaacccgccgacacagaagcctccttcacccccaatgagtggcagaggcacgctgggcagaaataccccctataaaactctcgaacccgtgaagcctccgactgtgcccaacgattacatgacaagccccgcacggctagggagtcagcactctcccggccgtactgctagtcttaaccagagaccaaggacacatagtgggagttccggcggcagcggttcaagagagaattctggcagtagctctattggaattccaatcgcagtgcccacaccgtcgcccccaaccatcggaccagaaaacatttctgtcccccctccctcaggcgcccccccggcgcctccgctagcccctttgttgccagtttccacggtgatagccgccccagggtccgctcccggaagtcagtatggaactatgacgcgacaaatctctcgccacaactcaactacttcctccacgagctccggagggtaccggcgaaccccatcagtgactgcccagttttctgcgcaaccacatgtgaatggaggaccgttgtactctcagaattctatcgccgacagccctactcctcctccccccccccccccggacgacatcccgatgttcgacgacagcccccccccccccccaccccctccggtggattacgaggatgaagaggctgcggttgtgcagtataatgatccgtatgccgatggtgaccctgcttgggcacccaagaactatattgaaaaggtcgtggctatatacgattatactaaggataaagacgacgagctttcctttatggaaggtgcaatcatctatgtgattaaaaagaacgatgatggatggtatgaaggggtgtgcaaccgggtgactgggctgttccctggaaattacgtggaatccattatgcattacaccgactag

SEQ ID NO: 106763 - DNA, 1530 bp, synthetic construct
  misc_feature 1..1530: note = Description of Artificial Sequence: Synthetic coding sequence
  source 1..1530: mol_type = other DNA
atggccgaactgcaaatgctcttggaagaggaaatccctagtggcaagcgggccctcatcgagtcgtaccagaacttaacaagagtagccgactactgtgaaaataactacattcaggccacggataagaggaaagctctcgaggagacgaaggcatataccactcaatccctggccagcgtcgcctatcagattaacgctctggccaacaatgtcctgcagctgctggatattcaagcttctcagctccgccgaatggaatcatcaataaaccacatctctcagaccgtagatatccacaaggagaaggtagctcggcgggagatcggaatcctgaccaccaataagaacacatccaggacccataaaatcattgcacctgctaacatggagcgacctgtgcgatacatacggaaacctattgactacaccgtactggatgacgtgggtcacggtgtgaagaaatggcacaagattattcacggaaacaatcagcctgcccgtactgggactctcagtcgtaccaatcctccgacgcagaaacctccaagccctcccatgtccggcaggggtaccctggggcgaaacaccccctacaaaactttagagcctgtgaaacctccaaccgttccaaatgattacatgacctcaccagcccgtctgggaagtcagcacagtccaggcagaaccgcttcgttaaatcagcggccgcgaacccacagtggttcctccggcggtagtggtagccgggagaactccggatcatcttccataggaatcccaattgcagttcccaccccttcacctcctacaattggacccgagaatatatctgtgccaccaccaagcggagccccccccgccccccccttggccccactgctccccgtatcgaccgtgattgcggctcccggaagtgccccggggagtcaatatggcacgatgactcggcagattagcagacataattctactacatcttccacttccagcgggggctaccggcgcaccccttctgtcacggctcagttttccgcccagcctcatgttaacggcggccctctgtattctcaaaactctataagtatagccccacccccaccacccatgccccaactgacaccacaaattcccctgacaggattcgtcgccagggtccaggagaatattgcagacagcccgacaccccccccgccccccccgcccgatgacatccctatgttcgatgactcccctccgcccccacctccgcccccggttgactatgaggatgaggaagcagccgtggtgcagtacaatgatccctacgctgacggcgaccctgcctgggcacccaagaactacattgaaaaagtcgtcgctatctacgactacacaaaagacaaagacgacgagctgtcatttatggaaggggcaatcatttatgtgatcaagaagaatgatgatggttggtatgagggggtttgcaaccgagtgactggactcttcccaggcaattatgtagagagcataatgcattacaccgactag

SEQ ID NO: 106764 - DNA, 1443 bp, synthetic construct
  misc_feature 1..1443: note = Description of Artificial Sequence: Synthetic coding sequence
  source 1..1443: mol_type = other DNA
atggctgaattacagatgttgctcgaggaggagattccttctgggaaacgggcattaatcgaaagctaccagaacctcacacgggtggcggattactgtgagaataattacattcaagcaacagacaagagaaaggctctggaagaaacaaaggcttatacgacacagtcgttggcaagcgtcgcataccagatcaacgcactggccaacaatgttcttcagttactcgatatccaagcctctcagctgcgccgtatggagagcagcattaaccatattagccagactgttgatatacacaaagaaaaggttgctcgccgcgaaatcggcattttgacaaccaacaaaaatacctctagaactcacaaaattattgcccccgctaacatggagcggcctgtcagatatatccggaaacccatcgactacaccgtcctggacgatgtgggacacggcgtcaagtggctcaaagctaaacatggaaacaaccagccggcgcggaccggaactctcagccgcactaatcccccaacacagaaaccccccagccccccaatgagcggccggggcaccttagggaggaacaccccctataaaacactggagcccgtgaagcccccgactgtacctaacgattacatgacctcccccgcccgtttaggatcacagcattctcccggacgcaccgcctccctgaatcagcgccctcggactcactctggatcctcaggagggagtggcagtagggaaaactctggctcatcaagtattggcattcccattgccgtgcctactccctctcctccaacaatcggcccagcaccaggatcagcccctggctcacagtacggcaccatgacaagacaaatcagccggcacaattccacaacctcaagcaccagttcgggcggctaccgcaggacacctagcgtcacagcgcaattctctgcccagccacacgtgaacggagggcccttgtatagccagaattctatctctatcgcccctcctcccccacccatgccccaactcaccccccaaatcccgcttacagggtttgtcgcccgagttcaggaaaacatcgccgactcccccacccccccaccaccacctcctccggatgacatcccaatgtttgacgatagcccccctcctccgccaccgccccccgtggactacgaggacgaggaggccgctgtggttcagtacaatgacccttatgcggacggagatccagcctgggcccccaagaattacatcgaaaaggttgttgcaatctatgattatactaaagataaagatgacgaacttagctttatggaaggcgccattatttatgttatcaagaaaaacgacgacggatggtatgagggagtctgcaacagagtgactgggctcttccccggaaattacgtggaatctatcatgcactacaccgattag

SEQ ID NO: 106765 - DNA, 1449 bp, synthetic construct
  misc_feature 1..1449: note = Description of Artificial Sequence: Synthetic coding sequence
  source 1..1449: mol_type = other DNA
atggccgagctgcagatgcttcttgaggaagagattccttccggcaagagggcactgatcgaatcgtaccagaacctaaccagggtggcagactattgcgaaaacaactatattcaggcaacggacaagaggaaagcacttgaggaaactaaggcatacactacgcaatcactggcgtcagtcgcctatcagattaacgcccttgctaataacgtgctgcaactcctggacatccaagctagtcaactgcggcggatggagtcaagtattaaccacatcagtcagaccgtggatatccacaaagagaaggtggcgagaagggaaattggtattctcaccaccaataaaaatactagccgaacgcacaagataattgcccctgctaatatggagcgtcccgttcggtacataaggaagcctatagactacacagtattagacgacgtgggacacggtgtgaagaagtggcataaaattattcacggcaacaatcagccagctcgaactggaaccctatctaggacgaatccccctacacagaagcctccctctcctcccatgtccggacgtgggaccctgggccgcaataccccttataaaactttagaaccagttaagccccctaccgtccctaacgactatatgacttcccccgcccggctgggatcccagcactctcccggccgaacggctagcctgaatcaacggccccgaactcactctggatcttcggggggatccggcagcagggaaaacagcggatctagttccataggtatccctatcgcagtccctaccccaagtccccccaccataggaccagccgcccctggctctgcacccggttcccaatatgggaccatgaccaggcaaattagtcgccataattcaaccacctcctctacaagtagtggaggttacaggcgcaccccaagcgtgactgcccaattctccgcccagccgcacgtgaatggcgggcccctgtattcccagaacagcatatcgatcgcaccaccccctcctccaatgcctcagcttaccccacagatcccattgaccgggttcgttgctagagtgcaagaaaacattgccgattccccaacgccaccccctccgccaccgcctgatgacatacctatgtttgatgactcgcccccacctcctccccccccgcccgttgactatgaggacgaggaggccgctgtggtgcagtacaatgatccatatgccgacggagaccccgcatgggcgcccaagaactatattgaaaaagtcgtcgccatttatgactacactaaagacaaagacgacgaactgagctttatggaaggggcgatcatttacgttatcaagaagaacgatgatggatggtacgaaggggtgtgcaacagggtgactggactctttcctggaaattacgttgagagtattatgcactatacagattag

SEQ ID NO: 106766 - DNA, 1272 bp, synthetic construct
  misc_feature 1..1272: note = Description of Artificial Sequence: Synthetic coding sequence
  source 1..1272: mol_type = other DNA
atggcagaactccagatgctgctggaggaggagatcccctccggaaaaagagccctcatcgagtcatatcagaatcttacacgggttgctgactactgcgagaataactatattcaggcgaccgacaagcggaaggcactagaagagactaaggcatacaccacccagtccttggccagcgtggcataccaaatcaacgccctggccaacaatgtgcttcagctgctcgacattcaagcatcacaactcagacggatggaaagctcaatcaatcacataagtcagacggtcgacattcataaagaaaaggttgccagacgcgagatcggtatcctgacaaccaataagaacaccagtagaacacataagattattgcaccggcgaacatggagcggccagtgaggtacatcaggaagccgatcgactacaccgtactcgatgacgtaggccatggagtgaaaaagtggcacaagattatccacgggaacaaccaacccgcccgcactgggaccttgtcccgcaccaacccccctacgcaaaagccaccatctcctcccatgagtgggcgcggtaccctagggagaaacacaccatataaaacacttgaaccagtgaaaccccccaccgttccgaacgactatatgacctcacccgctagacttggctcacagcattcgcccggtcgtactgctagcttgaaccagcgaccgcggacgcacagcggaagtagcgggggaagcgggtcaagagagaacagtggcagttctagcatcgggatcccaattgcggtgccaaccccaagccctccgaccattggtcccgtatcgattgctccaccccctccacccatgccccagctgacaccccaaattcctttgactggctttgtcgcaagagtccaagaaaatattgctgatagtccaactcctcctccccctcccccccctgatgacataccaatgtttgatgattctccgccccctccccccccacctccagtcgactacgaggacgaagaggccgccgtagttcaatacaacgacccatatgcagacggggatcccgcctgggctcctaagaactatattgagaaagtggtcgccatttatgattacacaaaggataaagatgatgagttgtcattcatggagggtgccatcatctacgtgatcaagaaaaacgatgatggctggtatgaaggcgtgtgtaaccgcgtcaccggactctttcctggcaactacgtagagtccatcatgcactatacagattag

SEQ ID NO: 106767 - DNA, 1359 bp, synthetic construct
  misc_feature 1..1359: note = Description of Artificial Sequence: Synthetic coding sequence
  source 1..1359: mol_type = other DNA
atggctgagctgcagatgctcctggaggaggagattccgtcaggaaagcgggcgctaatcgagtcctatcagaatctgactagggtggccgactactgtgagaataattacatccaggctactgacaagcgcaaggccttggaagaaacaaaggcatacaccacacaaagcctcgcctcagtcgcttatcagatcaacgctctggccaacaacgtcctgcagttgctagatatccaagctagtcagctgcggcgaatggagagcagcatcaaccatatatcccagaccgtggatattcataaggagaaggtagcacgccgcgagattggcatattgacaactaataaaaatacgagcagaacacataagatcatagcccccgccaatatggaacgtcctgtcaggtatatacggaaaccaatcgattacaccgtcctcgacgacgttggtcacggggtgaagtggctgaaggcgaaacatgggaacaatcagcctgctcggactggtaccctttcacgcacaaaccctccaactcagaaacccccatcccctcccatgagcggacggggtaccctgggccgtaacaccccctacaaaactctggagcccgtcaagccaccaacagtgccaaacgattacatgacgtcaccggcacgattggggtcccagcattcacctgggagaacagctagccttaatcagagaccccgtacccatagtggctcatctggggggtccggcagtagagaaaactcaggaagtagttccattggcatcccaattgcagtccccacccctagccctcccacaatcggccctgctgctcccggtagcgcccctggctcccagtacggtactatgacccggcagatcagcaggcataacagtacaacttcctccactagttccggaggttacaggcggaccccttctgtgaccgctcagttctcagcccaaccacacgtgaacggtgggcctctgtactcacaaaatagcattgctgactccccaaccccgccacccccccctcccccggacgacatcccaatgttcgacgactcacctcccccacccccccctccaccagtggactatgaggatgaagaggcagccgtggttcagtataatgatccatatgccgatggcgatccggcttgggccccaaagaattacattgaaaaggtggtagcgatctacgattatacaaaagataaggacgacgaactcagcttcatggagggcgccattatatatgtcatcaagaagaacgacgacggctggtacgaaggcgtgtgtaaccgagttaccggcctgttccccggcaactacgtagaatccatcatgcattatacagattag

SEQ ID NO: 106768 - DNA, 1431 bp, synthetic construct
  misc_feature 1..1431: note = Description of Artificial Sequence: Synthetic coding sequence
  source 1..1431: mol_type = other DNA
atggctgagttgcaaatgttgctggaggaggaaatacccagtggcaagcgggcactcatcgagtcttatcagaacctgacacgggtggccgattactgcgagaataactacatccaggctacagataagaggaaagccctggaggaaactaaagcatataccacgcagagcttagctagtgttgcctaccagataaacgccctggcaaacaacgtgttacagctattggatatccaggccagccagctgcgacgaatggagagttcaataaatcatatatcacagacagttgacattcacaaagagaaagtggcaaggagagaaattggcatcttgacaacaaataaaaacacctcaagaacccacaagataattgcacctgctaacatggagagacctgtgcgctacattcggaaacctatagattacaccgtgctggacgatgtgggtcacggagttaaacacggaaacaaccagcccgccaggacgggtactctttcccggacgaacccacccacacagaaacccccatcacccccaatgagtgggcggggcactctcgggcgtaataccccatacaagacccttgagccagtgaagcctcccaccgtgcctaatgattatatgacgtctccagcaagactcgggtctcagcactcacccggaagaaccgcttctctgaaccaaaggcctcgtactcactccgggtcaagtggcgggtctggttcaagggagaactctggttctagttcaatcgggatccccattgcagtgcctactccttccccacccacaattgggccagctgcgccaggtagcgctcctggctcccagtacggcacgatgactcgtcagatttccaggcataatagcacgacctcctctacatcctccggaggatatagaagaactccaagtgtcacggcacaattctctgctcagccccacgtgaatggagggccgttgtattcacaaaattctatcagtatagcacctcctccaccccccatgccgcaacttacccctcagatccccctcacaggattcgtagcaagagttcaagaaaacattgccgacagtccgaccccccccccaccaccgccccccgatgatatccctatgttcgatgacagcccaccgccccctccccccccgccggtggactatgaggatgaagaggcggcggtcgttcagtataacgacccgtatgccgatggggatccagcctgggccccaaagaattacatcgaaaaagtcgtcgctatctatgactacacgaaggacaaggatgacgagctatcatttatggaaggagccatcatctacgtgattaaaaaaaacgacgacggttggtatgagggggtttgtaacagagttacaggactgtttcctgggaactatgtggagtcaattatgcattatacagactag

SEQ ID NO: 106769 - DNA, 1446 bp, synthetic construct
  misc_feature 1..1446: note = Description of Artificial Sequence: Synthetic coding sequence
  source 1..1446: mol_type = other DNA
atggcagagcttcagatgctgctcgaggaggagatccctagtggaaagcgggcactgatcgagtcttaccaaaatctcaccagggtggcggattattgcgagaacaactatatccaggccacggacaagagaaaggcccttgaggagacaaaagcatacacaacacagagcctggcgagtgtagcgtaccaaataaacgccctggctaacaacgtactacagctcctcgacatccaggcctcccagttgagaagaatggaatcttccatcaaccacattagccagacagtagacatacacaaagagaaagtggctagaagggaaataggcatactcacaacaaataagaatacctcaagaacgcataagataatcgcacccgctaacatggagagacctgtgagatacataagaaagcctatagattatactgtgctggacgacgtggggcacggggtgaaatggctgaaagctaagcatgggaacaatcaaccggcaaggaccggcaccttgagtagaaccaaccctcctacgcagaaaccaccgtctccccctatgtcggggcgcggtactctgggacggaacacaccctacaagacgctggaacctgtcaaaccaccaaccgtgccaaatgattacatgacatctcctgcaaggctgggctcacagcattctccaggacggacagcctccctgaatcaacggccgcgtacccactctggtagctcaggcggctccggatctagggaaaacagcggcagcagcagtattggcatacccatagctgttcccactccatctccaccgactattggtcccgccgctccaggtagcgcaccagggtcacagtacggcactatgactagacagatctccagacacaactccactacgagcagcacttcaagcgggggttaccgccggacccctagtgtgacggcccagtttagcgcacagccccatgttaatggaggacctttatacagtcagaatagcatctctattgccccaccgcccccgccgatgccccagctgacacctcagattccgctgacagggttcgtcgccagagttcaggagaatattgcggattcccctacccccccccctccgccgccgcccgacgacatccccatgttcgatgattctccaccacctccaccccctccaccagtggattacgaggatgaagaggctgcggtcgttcagtacaacgacccttatgcagatggagatcccgcttgggcccccaagaactatatcgaaaaagttgtcgcaatttatgactacactaaggataaagacgatgaactgtctttcatggagggtgctattatctacgtcattaaaaagaacgatgatggttggtacgagggcgtgtgcaatcgcgtcaccggtctgttccccggaaattacgtagaaagcatcatgcattacaccgattag

SEQ ID NO: 106770 - DNA, 1527 bp, synthetic construct
  misc_feature 1..1527: note = Description of Artificial Sequence: Synthetic coding sequence
  source 1..1527: mol_type = other DNA
atggctgagctgcagatgctcttagaagaagagatccccagtggaaagcgcgcactcatcgagtcataccagaacctcactcgggtggccgactactgcgagaataattacatacaggccactgataaacgcaaagccctggaggaaacgaaagcctataccactcagagcttagcatctgtggcttatcagataaatgctctggcgaataacgttctacagcttcttgacatccaggccagtcagctacgccgcatggagagctcaatcaaccacattagccagactgtggatatacacaaggaaaaggtggctcgtcgggagattggcatcttgactacgaacaaaaatactagcaggactcataagattatcgctcctgctaacatggagaggcctgtaaggtacattcgaaagcccattgattacacagttttagatgacgtcgggcacggtgtgaagtggctaaaggcaaagcacggcaataatcagcctgcccggactggcactttgagcaggaccaacccccccacccagaaacctccgagtccacccatgtctgggcgcggcactctcgggcggaacactccctataaaactctagaaccagtcaagccccccaccgttccaaatgactacatgacatcccccgccaggttaggcagccaacacagcccaggacgcactgcttccctgaaccaacgaccacgcacccattctgggagctcagggggcagtggcagtagagagaatagcggctctagtagcattggaattccaatcgcagtgccaacgcctagcccaccaacgatcggacccgagaacatctctgtgcctcccccctcaggggcccctcctgccccaccgctggcacccctgttacccgttagtacagtgattgcagcccccgggagcgcccctggttcacaatacggcaccatgacaaggcagatctctagacacaactccaccacatcatccactagttccggaggatacagaaggactccaagtgttacagctcaattttcagcacaacctcacgtgaacggcggcccactatattcccaaaatagcatcagtatagcacccccaccgcctcccatgcctcaactgacacctcaaattcccctgactgggttcgtggcccgtgttcaggaaaatatcgcagacagtcctactcccccgcccccccctccgccagatgatataccaatgtttgacgacagcccacctccccccccgccaccacccgtggattacgaggatgaggaggccgccgttgtgcagtacaacgatccatatgccgacggagatccagcatgggctccgaaaaactacatcgagaaggtcgtcgccatctatgattacacgaaggataaagatgatgaactctcattcatggagggcgcaatcatttacgttattaagaagaatgacgacggctggtacgagggagtctgcaatagagttacaggcctgttcccagggaactacgttgagtctataatgcactataccgattag

SEQ ID NO: 106771 - DNA, 1428 bp, synthetic construct
  misc_feature 1..1428: note = Description of Artificial Sequence: Synthetic coding sequence
  source 1..1428: mol_type = other DNA
atggccgagctacaaatgctcttggaagaggagatcccatcgggcaaaagagccctgatcgaatcttaccagaatctgactcgggtcgcagactactgtgaaaacaactacatccaggccaccgacaaaagaaaggctctcgaagagacaaaagcttatacaacgcagtccctcgcgtccgtcgcatatcagattaatgccctcgcaaacaacgtgctacagcttctcgacatccaggctagccagctgaggaggatggaatcctctattaatcacattagtcagactgtggatattcacaaggagaaggtagcccgtagagagataggcatcctcaccaccaacaagaacactagccgaacacacaagattatcgctcctgccaacatggaacgccccgtgcggtacatcaggaagcccattgattacaccgttctcgacgacgtagggcatggtgtcaaacacggaaataatcagcctgccaggacaggcactcttagcagaactaatcctcctacacagaagcctccctcccctccaatgagcggtcgaggaaccctgggtcggaacaccccctataagacactggaaccggtgaaacctccaacagtgccaaacgattacatgaccagtcctgcacgattgggcagccagcacagccctggtcgcactgctagtcttaatcagcggccccggactcactctggatcatcaggaggctccggatccagagaaaacagtggttcctcttccattggcatccctatcgccgtgcccacaccctcacccccgacaataggtcctgcaccagggtcagcaccgggctcccagtacggaaccatgacaagacagataagcagacacaattctaccacatcttctaccagctcaggaggttataggcggaccccatctgtgactgcccagttctccgcgcagccccatgtgaacggcggccctctgtatagccagaattcaattagcatcgcccctccaccaccccctatgccacagttgacacctcagatccccctcaccgggttcgtcgctagggtgcaagaaaatatcgctgactctcccacgccacctccaccacctccaccagatgacatccctatgttcgatgactctcccccccccccacccccaccccccgtcgactacgaagacgaagaggcagcagtagtgcagtataacgatccatatgctgatggagacccagcctgggcgcctaaaaactatatcgaaaaagtcgtggccatctatgactacaccaaagataaagacgatgaactgtctttcatggagggtgctatcatttacgtcatcaaaaaaaatgatgatgggtggtatgagggagtatgtaaccgcgtgaccggactttttccaggaaactatgtggaatcaatcatgcattacacagactag

SEQ ID NO: 106772 - DNA, 1341 bp, synthetic construct
  misc_feature 1..1341: note = Description of Artificial Sequence: Synthetic coding sequence
  source 1..1341: mol_type = other DNA
atggcagagctgcaaatgctgctggaagaagagatcccgtcagggaaacgcgctctcatcgaaagttatcaaaatctaaccagagtggctgactattgtgaaaacaattatatccaagccacagacaagcggaaagccttagaggaaaccaaagcctatactactcagtccctagcttccgtagcatatcagataaacgccctggcgaataacgtgttacagctgctggacatccaggcgtctcaattaaggcgtatggaatcaagtatcaatcatatcagtcaaacagtggacatccataaagaaaaagtcgcccgcagagagatcggcatcttgactacaaataagaacacttcaaggacgcataaaataattgcgcctgccaacatggagcgccctgtcaggtacatccgcaaaccaatcgactacacagtattggatgacgttggacacggagtaaagcacggcaataatcagccagctcggacaggaaccctcagtaggaccaaccctcctacccagaaaccaccgtcacctccgatgagcggacgaggtaccctgggacgcaacaccccatataagactttggagcccgtcaagccaccaactgtgccaaacgactatatgacttccccggcccggctagggtcccagcattcacccggacgaacggccagccttaaccagcgacccaggacccactccgggagcagcgggggctcaggatccagggagaactcaggtagttctagtattggaatccctatcgcagtccccaccccttcaccgcctaccatcggcccagctcccggctctgctcctggctctcagtatggtacgatgacgaggcagatttccaggcacaactctacaaccagttccacgtcaagcgggggttacaggcgtacgccctccgtgactgcacaatttagcgcccagccccatgtgaacggcggtcccctttactctcagaactccattgccgacagccctacgcccccacccccccctcccccggatgatatcccaatgtttgatgatagccccccacctcccccgccgccaccggtggactatgaggatgaagaggcggcagttgttcagtataacgatccatacgcagacggggatccagcttgggcccctaagaattacattgagaaagtcgtggctatctacgactataccaaggacaaagacgacgagttgtcgtttatggaaggcgccattatctacgtcataaagaagaatgatgacgggtggtacgaaggagtgtgtaaccgcgtaaccggccttttccccggaaattatgtcgaaagcattatgcactacacggattag

SEQ ID NO: 106773 - DNA, 1356 bp, synthetic construct
  misc_feature 1..1356: note = Description of Artificial Sequence: Synthetic coding sequence
  source 1..1356: mol_type = other DNA
atggccgagctgcagatgctactggaggaagaaattccctcaggaaaacgggcccttatcgaaagctaccagaatctaacacgcgtggctgactactgtgaaaacaattatatccaggcaacagacaaaagaaaggctctggaggagaccaaggcctatacaactcagagcttggcttccgtggcttatcagatcaacgccctagctaataacgtactgcagctgctggatatacaagcttcgcagctgcggcggatggaatcctccataaatcatatctcacagactgtagatattcacaaggaaaaagtggcgcgccgggagattggtattttgaccactaacaaaaacacttccagaacccataaaattatcgccccagcaaatatggagcgcccggtcagatatattaggaagccaatagattatacagttctggatgatgtgggacacggagtgaagtggttgaaggccaaacacgggaataatcagcccgcccgcactggcacattatcccggacaaacccgcctacccagaagcccccctccccccctatgagtggccgtgggacattaggacggaatacgccttacaagaccctggagccggtgaaacctcccactgtgcctaatgactatatgacttccccagcacgcctgggttcacaacactctcccgggagaacagctagtcttaaccaacgtccccggacccacagcggctcctcagggggctccggatcccgggagaacagcggtagctcttcaatcggcattccaattgcggtacctacccctagtccacccactattgggcccgcacctggcagcgcccctggaagccaatacggcacaatgacacgccagatttctagacataacagcaccacctccagcaccagttctggaggctacaggcggactccaagtgtgacagctcagttcagtgctcagccccacgtcaatggcggccctttgtacagccagaattcaattgctgacagccccaccccccccccccctccccctcctgacgacattccgatgttcgacgacagtccaccccccccccctcccccccccgtcgactatgaggacgaggaagccgctgtggtgcaatacaatgacccttacgcagacggcgatccagcttgggcgccgaaaaattacatcgagaaggttgttgctatttatgattatacgaaggataaggacgacgagctgtctttcatggaaggagctatcatctatgtgataaagaaaaatgatgatggctggtacgaaggggtgtgtaatcgcgtgaccgggttgttcccaggcaactatgtggagagtatcatgcactatactgactag

SEQ ID NO: 106774 - DNA, 990 bp, synthetic construct
  misc_feature 1..990: note = Description of Artificial Sequence: Synthetic coding sequence
  source 1..990: mol_type = other DNA
atggcagagctacaaatgttgctggaggaagagatcccatctgggaagagagcacttatcgagtcctaccagaacctgaccagagttgctgattattgcgaaaacaattatatccaggcaactgacaagcggaaggctttggaggagaccaaagcttatactacccagagtctggcttccgttgcctaccagatcaatgccctcgctaataatgtgttgcagctccttgatatccaggctagtcagcttcgccgaatggagagctccatcaatcatatcagccagcacggaaataaccaaccagcaaggacagggactctttcacggacaaacccacctactcagaagcctccttcaccacccatgtcagggcggggaactcttggtaggaataccccctataagacccttgaacccgtgaagccacctaccgtacctaacgactacatgacctcgccagctcgattagggtcccagcactcaccaggacgaaccgcaagcctgaaccagaggcccaggactcattctggaagcagtggtggatccgggtccagagagaattcaggcagctcctccattggtatccccatcgctgtgccgaccccctcccctccaacaattggaccggttgcagactctccaacgccacccccaccaccccctcccgatgatatccccatgtttgacgacagccctccaccgcctcccccaccacctgtggactatgaagacgaggaagccgccgtcgtccagtacaacgatccctacgctgacggggatcccgcctgggcccctaaaaattatatcgagaaagtggtggcaatctacgactacactaaggacaaagacgacgagttgagttttatggaaggagccatcatatacgttatcaagaaaaatgatgacggttggtatgagggcgtctgcaatagagtgaccggtctgttcccaggtaactacgtcgagtcaatcatgcactacacagattag

SEQ ID NO: 106775 - DNA, 1185 bp, synthetic construct
  misc_feature 1..1185: note = Description of Artificial Sequence: Synthetic coding sequence
  source 1..1185: mol_type = other DNA
atggccgagctacagatgcttctagaggaagaaatcccttcgggcaagagagcattaattgaatcctaccagaacctgactagggtcgctgactactgtgagaacaattatatacaggccaccgataagcgtaaagcacttgaggagactaaggcatatacgacacagagcttggcgtcagttgcctaccagataaacgccctcgcaaataacgttctgcaattacttgacatccaagcttcacaattgcgcagaatggagagcagcatcaatcatattagccagacagtggatatccataaggagaaagtggcaaggcgggagatagggatactgaccactaacaaaaatacctcgagaacccataagataatcgcaccagccaatatggaacgacccgtgcgttatatcaggaaacccatagattacactgtgctggacgacgtggggcacggtgtaaagaagtggcataaaattattcacggaaataaccagccagctcgcacaggtacactgagtagaacaaatccacccacccaaaagcccccatctcctcctatgagtggacgtggtaccttgggacggaatactccttacaaaacacttgagccagttaaaccaccgacagtgcccaacgattacatgacatcccctgctcggttagggtcccagcacagtcccggaaggaccgcctcccttaaccagcggccccgcacccattcgggaagttccggcggtagcgggtctagagagaactcaggctctagcagcattggaatccctatagcggtgcccacaccaagcccgcccaccatcggccctgtcgcagatagcccgactcctccacctccccccccacccgacgacatcccaatgttcgatgactccccccccccgccaccaccaccccccgtggattacgaggatgaggaggcagccgtagtccagtataatgacccctacgctgacggggacccagcgtgggcacctaagaactacatagaaaaggtggtcgcgatatacgactatacaaaagacaaagacgacgagctttcattcatggaaggtgccataatctacgtgattaagaaaaatgacgacgggtggtacgagggggtttgcaatcgagtgacgggcttgttcccgggcaactacgtcgaatctattatgcattacaccgattag

SEQ ID NO: 106776 - DNA, 3993 bp, synthetic construct
  misc_feature 1..3993: note = Description of Artificial Sequence: Synthetic coding sequence
  source 1..3993: mol_type = other DNA
atgcctctctcccctcccgcccagggggaccctggagagccatcaccatgtaggccgcccaagaagcacaccactttccatctctggcgcagtaagaaaaaacaacaaccggcgccgcccgattgcggggtgtttgtgccccatccactccctgctcccgccggagaggctcgggctctggacgtggtggatggtaaatacgtggtgcgagatagccaggagttccctctgcactgcggggaatcacagttttttcatacaacttccgaggccctcggatcattgctgttagagtccgggatcttcaaaaaatcccgcgcccagccgcctgaagacaatcggcgtaaacctgttttggggaagttgggaaccttgtttactgctggccgcaggagaaacagtcggaatggcctggagtcccctacaaggagtaacgctaagcccctgtcccctaaagatgtggtcgcctctcccaaacttccagagagagaatctgagaggagtcggagtcagtcctcgcagctgaagcaaaccgatacctcggaggagggcagtcccagggagaacccgcgcgaagccgaaggcgagttgcccgagagcgggggccccgccgcgccaccggatgctgagctgtcccccaggtggtccagttcggcagccgccgttgcagtgcagcagtgtcacgagaacgattctcctcaactggaacccctagaggcggagggagagccatttccagacgccaccactaccgctaaacagttgcacagcagccctggcaacagcagtagacaggagaacgctgagactccagcccgatcacctggtgaagatgccagccccggcgctggacacgagcaggaggcctttctgggcgtgcgcggagccccagggagcccaacacaggagcgaccagcagggggcctgggtgaagcccccaatggcgcaccctcagtgtgtgcagaggaaggatccctcggtccccgcaatgccaggtcccagccaccaaaaggcgcatccgacctgcctggagaaccacccgccgagggagccgcccatactgcctctagcgcacaagccgattgcactgccaggccaaaaggacacgcccaccccgcaaaagtcttgacactggacatttacctgtccaaaaccgagggtgctcaagtggatgagcccgtcgttattacaccacgtgccgaagactgtggagactgggatgacatggagaaaagatcctctggccgccgctcaggtaggcggaggggcagtcagaagagcaccgacagtcccggagccgacgccgagttacctgaaagtgcggccagagacgatgcagtgtttgacgacgaggtggctccgaatgcagcttcggacaacgcttccgcggagaagaaagtcaaaagcccgagggccgccttggacgggggggttgcctccgccgctagccctgagtccaagccttcaccaggtaccaaaggacaattgcgaggggagagcgacagaagcaagcaaccccctcccgcctcttccccaactaaaagaaagggacggagcagggcgctggaggccgttcctgccccccccgccagcgggccacgggcacctgccaaggaatcaccaccaaaaagagtgcccgacccttctccggtgactaagggcaccgccgcggaatcgggcgaggaggccgcccgagcgattccacgcgaattgcccgttaagtcttcttctcttctgcctgaaatcaagcccgagcacaaacggggacctttgccaaaccacttcaacgggagggccgagggcgggagatctcgagagcttggccgagccgccggagcgcctggcgccagcgatgccgatggactgaaaccccgaaatcacttcggcgttggccggagtacagtgaccacgaaagtcaccctccctgcgaaacccaagcacgtggaactgaatctgaaaactccaaagaacctggattcactgggaaacgagcacaacccattctctcagcctgtgcacaaaggcaatacagccactaaaatctcactgttcgagaataagaggacgaacagctcaccccgtcatactgacatcagaggtcagcgaaatacaccggcaagctcaaagacgtttgttggaagagctaaacttaatctggcaaaaaaagccaaggagatggagcaaccggagaagaaggtgatgccaaactcaccacagaatggtgtactggtgaaggagacagcaatcgagacaaaggttacagtgtcagaagaggagattctcccagccactcgaggaatgaatggagattcctctgagaaccaagctctaggccctcaacccaatcaggacgacaaagccgatgtccagacggacgccggatgcctgtcagaaccagtggccagcgcccttattcctgtgaaggatcacaagcttttggaaaaggaggactccgaggccgccgacagcaagtccctcgtgttggagaacgttactgacaccgcccaggatatccctaccactgttgatactaaagacttgccgccaaccgccatgcctaagccgcaacacactttttccgatagccagtcccccgcagaatcatctcctggccctagcctgagcctttcggctcctgcccctggagatgtgccgaaggatacatgcgtgcagagcccgatttctagttttccatgcactgacttgaaagttagcgagaaccataagggctgtgtgttgcccgtcagtcggcaaaacaatgaaaaaatgccactcctggaactggggggcgagactacacccccactatcaacagagcggtctcccgaggctgtagggagtgaatgcccatcgagagtgctagttcaagtgcgctccttcgtgttgccagttgagtctacacaggacgtctcttcacaggttatccccgaatcttcggaggtcagggaagtgcagctccctacttgccattccaatgaacccgaggttgtttccgttgcctcgtgcgcacccccgcaagaggaggttctgggaaacgagcatagccactgcacggcagagctcgccgccaagtcagggccacaggtgatccccccagcctctgaaaaaactctccccattcaggcccagtcacagggatctagaacaccattgatggccgaatcctcccctaccaactctcctagttctggaaatcacctcgctacaccccagaggccagatcagaccgtgactaatggccaggacagccctgccagtttactgaacatctcagcaggcagtgacgatagtgttttcgattcatcctccgacatggagaagtttaccgaaattatcaagcaaatggatagcgctgtctgcatgcccatgaagcgcaagaaggcacgaatgcccaatagtcccgcgccccattttgctatgccacctattcacgaggaccacctggagaaagtctttgatcctaaggtgttcacctttggacttggtaagaagaaagagtcacaacccgaaatgtcgcccgcacttcatttaatgcagaatttagataccaagtcaaagttaaggcctaaacgtgcaagtgccgaacaatccgtcttatttaagagtctccacacaaatacgaatggcaatagcgaaccactggtgatgccagaaattaatgataaggaaaatcgtgatgtcactaatggtggaatcaaacggagcagactggagaaaagcgcactgttttcttccctgctgtcctcactaccacaggataagatcttcagtccatccgtgacatccgtgaatacaatgacaactgctttcagcacgtcacaaaatgggagcctaagccaatcctctgtcagccaacctactaccgaaggcgcgcccccgtgtggacttaataaggagcagagcaacctgctccccgacaacagcctgaaagtgtttaatttcaactcctcgtccacgagtcactcttccctgaagagcccctcacatatgtag

SEQ ID NO: 106777 - DNA, 5172 bp, synthetic construct
  misc_feature 1..5172: note = Description of Artificial Sequence: Synthetic coding sequence
  source 1..5172: mol_type = other DNA
atggagaaacgcagctctgggagaagatccggcagaagacgggggagccaaaaaagtacagatagccccggcgctgatgctgaattgccagagagcgccgctcgcgacgacgcagtcttcgacgatgaggtggctcccaacgctgcatctgataacgccagtgctgagaaaaaagttaaatctccaagggccgctctggatggcggcgttgcaagcgccgcatctccggagagcaaaccatctccaggcacgaagggccaattacggggtgaatctgacaggtctaaacagccaccccctgcaagttcacccactaaaaggaagggccgctcccgagccctggaggctgttccagccccccccgccagtgggcctagggctccagcgaaagaatcccctcctaagagggttcctgacccttcccccgtgacgaagggaacggctgcagagagtggagaggaagcagcaagagctatcccaagagagcttccagtcaagtcttcgtccctgctacccgagatcaaacctgagcataagagaggtcccctccccaatcactttaatgggcgagcggaaggtggcagatcacgcgaattaggcagagcggcgggagctcccggcgcatctgacgccgatggactgaaacctaggaaccatttcggagtcgggcggagcacggtaactaccaaggtcaccctccccgctaagccaaagcatgtggagctcaatttaaagacacccaagaatttagattcattgggcaatgaacacaatcccttttcccagcccgtgcataagggaaatactgcaaccaagattagcctcttcgaaaacaagcggaccaatagcagtcctcgccatacagacattcggggccagagaaacacacccgcctccagcaaaaccttcgttggcagggctaagctgaatctggctaaaaaagctaaggaaatggagcagccggagaaaaaggtgatgccgaattcgcctcagaatggtgtgctggttaaggagacggcaatcgaaaccaaggttacagtgagtgaggaagagattttaccagctaccaggggtatgaacggcgactctagcgaaaatcaggctttgggacctcaacccaaccaagacgacaaagccgatgttcaaaccgatgctggctgtctctctgagcctgtggccagcgcactaatccccgtgaaagatcacaagcttctcgagaaggaggattcagaagccgcagattccaaatcactggtcctggagaatgtcacggacacggctcaggatattccaacaacagtggatactaaagacctcccccccaccgcgatgcccaagcctcaacacactttctccgactcacaaagtccagctgagtcttccccaggtccgtcgcttagtctgagcgcccctgcccctggcgacgtaccgaaggacacctgtgtgcaaagccccataagctccttcccatgcactgacctgaaagtttctgaaaatcacaaaggatgtgtcctgcccgtgtcacgtcagaacaatgaaaaaatgccccttctggagcttggaggtgagactactccaccactgtccactgagcgttcgcctgaggctgttggatcagagtgcccatctagggtcctggttcaggtgcgcagttttgtccttccggtcgaatctacccaggacgtctcatcacaggtgatacccgagtcatcagaggtgcgcgaggtccagctgccaacgtgccattcaaatgagcctgaggtcgtgtcagttgccagttgcgcccccccccaggaagaagtgttggggaacgagcattcacattgcaccgcagagttggcagccaagtccgggcctcaggtgatcccgccagcctcggaaaaaaccctacctatccaagcgcagtcacaaggtagccggactccattgatggccgaatcttctccaaccaactcaccttcttcaggcaaccacctcgctaccccccaaagaccggatcaaactgtcaccaatggtcaggacagcccagctagcctgctgaatatttcagccggatcagacgactcagtctttgacagctcttctgatatggagaaatttacggaaattatcaaacaaatggattctgccgtctgcatgccaatgaagcggaagaaagctcgcatgcccaacagcccagcaccacattttgctatgccccctatccacgaagaccatcttgagaaggtgttcgaccccaaagtctttacatttggcttggggaagaagaaggaatcccagcctgaaatgtcccctgccctgcaccttatgcagaacctggacacaaaaagcaagctccgccccaaacgtgcatccgcggaacagagtgtgctcttcaaatccttgcataccaatactaacggtaatagtgagcccttagtgatgcccgagatcaatgataaggagaatcgtgacgtcactaacggaggaatcaagcgctctcgactcgaaaagtccgcccttttcagcagcctcctgtcaagccttccgcaagataagatattctcaccgagcgtaacctccgtgaacaccatgactactgcatttagcaccagtcaaaatggctccctgtctcagtcctcagtctcccagcctacaacggaaggagcccccccgtgcggcttgaataaggagcagtccaacctgctaccagataactctctcaaggtctttaattttaattcatcttcaaccagtcattcctccctgaaaagtccgtctcacatggaaaagtatcctcagaaggagaagactaaagaagacctcgattcacggtcaaaccttcatcttccagaaaccaaattttccgagctgtcgaagctcaagaatgatgacatggaaaaggctaatcacatcgagagcgttattaagagcaaccttcccaactgcgcaaactcagacacagacttcatggggcttttcaagtcgtctcgttatgacccctcgatcagctttagcgggatgagtctctccgacaccatgacactaagaggatctgtgcaaaacaaactgaatccccgtcccggcaaggtagttatttacagcgagccagatgtgtccgaaaaatgcatcgaagtgttcagtgacattcaagattgctcaagctggtccctgagtcccgtaattctcataaaggtagtgaggggttgctggatactttatgaacagcctaattttgagggccattccattcctctggaagagggggaactcgaattgagtgggctgtggggaatagaagatatcctggaaaggcatgaggaggctgagtcagataagcccgtggttatcgggagtattcgccacgtcgtccaagactaccgggtctcacatatcgatctgttcaccgaaccagagggactaggaatactgagcagctacttcgatgataccgaagaaatgcaggggttcggagtaatgcagaagacctgctctatgaaagttcactgggggacctggttgatatatgaagaaccaggattccagggagtccccttcatcctagaacccggggagtaccctgacctgtcattttgggacactgaagaggcctatattggcagcatgcggccgctgaagatgggtggtcggaaagtcgaatttccaaccgacccaaaggtagtagtttacgagaaacctttttttgaggggaagtgtgtggaactcgaaacgggaatgtgctccttcgtgatggagggcggcgagacagaagaggctactggcgatgatcacttgccctttacttccgtgggatcgatgaaggtattacgtggaatctgggtggcgtatgaaaaaccaggcttcaccggtcaccaatatctgcttgaagagggggagtatcgagattggaaggcctggggaggatacaatggagagctgcagtccctcagacccatcctaggcgacttctcaaatgcgcatatgattatgtactccgaaaaaaactttggcagtaaagggtcctccattgatgtgctgggtattgtcgctaacttgaaggagactggttatggcgtgaaaactcaaagtatcaacgtcctaagcggtgtctgggtggcttacgaaaaccccgatttcaccggagagcaatatatccttgacaaaggcttctacacgtcttttgaggattggggcggcaaaaattgcaaaatctccagcgtgcagccgatctgcttggactcattcacgggcccccgcagacgcaaccagatccacctattctccgaacctcagtttcagggccatagccaaagcttcgaagaaactacatctcagatcgacgacagcttctcgactaaatcatgccgcgtgtccggtggcagctgggtggtgtatgacggcgagaacttcaccggaaaccaatacgtgttggaggagggtcattatccatgcttgtcagcgatgggatgcccacctggtgccacatttaaaagcctcaggtttatcgatgttgagttctctgaacccactatcatcttgttcgagcgggaagactttaaagggaaaaagattgagctcaacgctgagactgtgaaccttcggtcactggggtttaacacacagatccgatcagtccaggtgatagggggcatttgggtgacttacgagtatgggtcttacagaggccgacagtttctgctctccccagccgaagtgcccaattggtacgagttctccggttgtcggcagattggcagtcttcggccttttgtccagaagagaatctactttaggttgagaaacaaagccacaggtctgttcatgtctaccaatggcaatttggaggacttaaagctgttgcgtattcaggtgatggaagacgtaggcgccgacgaccagatatggatttaccaggagggttgcattaaatgtagaattgccgaagattgctgcttgacaatcgtcgggtccctggtgactagcggcagcaagctcggtctagccctggatcagaacgctgacagccagttctggtcgctgaaatctgatggcaggatttacagtaagttaaagccaaatctggttctagacataaaaggaggaactcaatacgaccaaaaccacattattttaaatacagtttccaaagagaagttcactcaagtctgggaagccatggtattgtatacatag

SEQ ID NO: 106778 - DNA, 951 bp, synthetic construct
  misc_feature 1..951: note = Description of Artificial Sequence: Synthetic coding sequence
  source 1..951: mol_type = other DNA
atgcagaaacccaagaccgtggcatgggagaacctcggccccgagatgtcagcgcttggtacggcgttcagccgggagggcgggagaaaggtggagtttcctactgatcccaaggtggtggtctatgagaagccttttttcgagggaaaatgcgttgaactcgagacggggatgtgcagcttcgtgatggaagggggagagaccgaagaagcaacaggcgatgatcacctgcctttcacatccgtcggttctatgaaagtgctgaggggaatttgggtggcctacgagaaaccagggttcaccggccatcagtacctgctcgaagagggcgaatatcgagactggaaggcgtggggcgggtataacggagagttacagagcctgaggcccatcctgggcgatttcagcaatgcacatatgattatgtactccgagaaaaacttcgggtccaagggaagcagtattgacgtcctgggaatcgtagctaatctgaaagaaacaggttatggggtgaaaacccaaagcattaacgtactgagcggggtgtgggtggcctatgagaaccccgactttacaggggaacagtacatcctcgataagggcttttatacaagtttcgaagactggggaggcaaaaattgcaagatttctagcgtccaaccaatttgcttggactcgttcaccgggccccgacgtcgtaatcagattcacctgttctctgagcctcagtttcagggccacagtcagagctttgaggagactaccagtcaaattgatgacagcttctccacgaagtcctgcagagtaagcggcggcagctgggtggtgtatgacggagagaattttactggcaatcagtacgtgttagaggaagggcactatccatgtctcagtgcgatggggtgtcccccaggggccaccttcaagagcctgcggtttattgatgtgtag

SEQ ID NO: 106779 - DNA, 1629 bp, synthetic construct
  misc_feature 1..1629: note = Description of Artificial Sequence: Synthetic coding sequence
  source 1..1629: mol_type = other DNA
atgcaaaaacccaaaacagtggcatgggagaacttgggtcccgaaatgtctgctctaggcactgccttttcacgcgaaggcggacgcaaagttgaatttcccaccgaccctaaagttgttgtttacgaaaagcctttctttgagggaaaatgtgtggaactcgagaccgggatgtgctctttcgtgatggaaggaggtgagacagaggaagcgacaggcgacgaccaccttcccttcacttcagtcggaagcatgaaggtgctgcgggggatctgggttgcttacgagaagccgggcttcacaggccatcagtacctgctcgaagagggggaataccgggactggaaagcctggggcggatataatggcgaattacagagccttcgcccgattctgggagacttcagtaatgcccatatgattatgtatagcgaaaaaaatttcggaagtaagggttcaagtattgacgtgttgggcatcgtggcaaatctgaaggaaacaggttatggcgtgaaaacacagagtattaacgttctgtccggggtgtgggtggcctacgagaatccagattttaccggcgagcaatatattctggataaagggttctatacttctttcgaggattgggggggcaaaaactgcaagatctctagcgtgcaacccatctgtttagattcatttaccggacccaggcgcaggaatcagattcacttgttttccgaaccccaatttcagggacatagtcaatcctttgaagagactacaagccagatagatgactcatttagtaccaaatcatgtcgggtgagcgggggctcttgggttgtctatgatggagagaacttcactggcaatcagtacgtcctggaagaagggcactatccctgcctgtctgctatgggctgccctcctggggcaaccttcaagtccctgagattcattgatgtagagtttagcgaacccactataatcctgtttgaaagggaggattttaaaggaaagaaaatcgaactgaatgcagagactgtcaatttaaggagtttaggtttcaacacacagattcgcagtgttcaggtgattgggggtatatgggtcacctacgagtacggaagttacagggggcggcaattcctcctgtcccctgccgaagtgccaaattggtatgagtttagcggctgccgtcagattgggtccctgaggccattcgttcagaagaggatatatttccgtttaagaaataaggcaactggactgttcatgtctacaaatggcaacctggaagacctcaagttgttaaggatccaggtcatggaagacgtgggagcagacgatcagatctggatttatcaggaggggtgtattaaatgtagaatagctgaggattgttgtcttacaattgttggcagcctggtaactagcgggagtaagcttggcttagctctcgatcagaacgcagacagccagttctggagcctgaagagcgacggtagaatctatagtaagctaaagcccaatctggttctggatatcaaaggcgggacccagtacgatcagaatcatataatattgaataccgtcagcaaggaaaagttcacccaggtgtgggaagctatggtgctgtacacctag

SEQ ID NO: 106780 - DNA, 504 bp, synthetic construct
  misc_feature 1..504: note = Description of Artificial Sequence: Synthetic coding sequence
  source 1..504: mol_type = other DNA
atggttgcccagcaagagagtatccgagaaggttttcagaagcgatgtttaccggtcatggtgctgaaagcaaagaagccctttactttcgaaacgcaggagggcaaacaggaaatgtttcacgccacggtagctacagagaaggaatttttcttcgtgaaagtcttcaacaccctgttgaaagacaaattcatccctaagcgcatcatcattattgccagatactatcgtcattcaggatttcttgaagtgaatagtgcttcccgggtgctggatgccgaatctgatcaaaaagtgaatgtgccattgaacatcatccggaaagcaggggaaacacccaaaatcaacactctccagacacaaccattaggcacaatcgtcaacggactttttgtggtccagaaggtgactgagaagaagaaaaatatcctgtttgacctcagtgataacacaggcaagatggaggtgctcggtgttcgtaacgaggacacaatgaagtgctag

SEQ ID NO: 106781 - DNA, 1032 bp, synthetic construct
  misc_feature 1..1032: note = Description of Artificial Sequence: Synthetic coding sequence
  source 1..1032: mol_type = other DNA
atggaatcaaaatataaggagattctccttctgaccggacttgataatattacagatgaggagttggacaggttcaaattttttctctccgatgagttcaatatcgcaactgggaagcttcatacagccaatcgtatccaggttgccactctgatgatacagaatgcaggtgccgtttctgcagtgatgaagactatacgcatcttccagaaacttaactacatgctgctggcaaaacgcttacaggaggagaaggaaaaagtcgacaaacagtacaaatcggtgaccaaacctaagccgctttcccaagcagagatgagccccgcggcctctgctgccattcggaatgatgtggccaaacaaagagctgcccctaaagttagtccccacgtaaagcccgagcagaagcagatggtcgcgcaacaagaaagcattcgggagggcttccagaagcgttgccttccagtgatggtcctcaaagctaaaaaacctttcacctttgagactcaagagggcaagcaagagatgttccacgccaccgtggccactgagaaggagttcttctttgtcaaggtgtttaacacattgctcaaagataagttcatccctaaaaggatcattatcatcgcacgctactacagacatagcgggttcctcgaggtgaacagcgcgagccgcgtgttggatgccgagtcagatcagaaggtaaatgtgcccctcaacattattcgaaaggcaggagaaacgcctaaaatcaatactttgcagacccagccactagggacgattgtcaacggccttttcgtcgtgcagaaagtcactgaaaaaaaaaagaatattctgttcgatctttcggataacactggaaaaatggaggtgttgggtgtgcggaacgaggatactatgaaatgtaaggagggcgacaaagtgcgtctgacctttttcaccctgagcaaaaatggggagaagttgcagttgacctctggcgtccactcaacgattaaagttattaaggccaagaaaaaaacttag

SEQ ID NO: 106782 - DNA, 411 bp, synthetic construct
  misc_feature 1..411: note = Description of Artificial Sequence: Synthetic coding sequence
  source 1..411: mol_type = other DNA
atggagagtaaatataaagagattctgctgctcaccgggttggataatattaccgacgaggagctcgatcggtttaaatttttcctgtccgacgaattcaacatagccactggaaagctccatacagctaaccggatccaggtggcgacccttatgatccaaaacgcaggtgccgtcagtgcagtgatgaagaccattcggatcttccaaaaactcaattacatgctgttggctaagcggctgcaggaagagaaggagaaagtggacaaacagtataaatctgtgacaaagccaaagccattgagccaggctgagatgtccccagcggcaagtgctgcaataagaaacgacgtcgccaagcagcgtgctgcgccaaaggtgtctccccacgtaaaaccggagcagaaatag

SEQ ID NO: 106783 - DNA, 1800 bp, synthetic construct
  misc_feature 1..1800: note = Description of Artificial Sequence: Synthetic coding sequence
  source 1..1800: mol_type = other DNA
atgtctaaggaagagcgtcccgggagggaagagatccttgagtgtcaggtcatgtgggaacctgacagcaaaaagaacacccaaatggatcggtttcgggcagctgtgggggccgcgtgcggtttagccctcgaatcttacgatgatctctaccactggagtgtggagtcctatagcgacttctgggccgagttctggaaattcagcggtattgtgttttctcgcgtctatgacgaagtcgtggatacatcaaagggaattgcagatgtgcccgagtggttcaaaggctcccgcctgaactatgccgaaaatctgctgagacacaaggaaaacgaccgagtggctctgtacattgcccgtgaggggaaggaggagatcgtgaaagtgacttttgaggaactgcgacaggaggtggccctgttcgccgccgctatgagaaagatgggggtgaaaaagggagatagagtggtgggttatcttcctaatagcgagcacgctgttgaagccatgttggccgccgcctctattggtgctatctggtcgtcaacgtcacccgactttggcgtcaatggtgtgttagatcgcttcagccagatccagccaaaactgattttttccgtggaggctgtggtgtataatggtaaagaacacaaccatatggagaaacttcagcaggttgtgaaaggtcttccggacttaaaaaaagtcgtggtgatcccttatgttagttcaagggagaacattgacttgagtaagatccccaattcagtatttcttgatgacttcttggcaactggcaccagtgaacaggctcctcagttagaattcgagcagctcccgttttcacaccccctgttcataatgttttccagcgggaccaccggcgctcctaaatgtatggtgcactctgcggggggaaccttgatccaacatcttaaggagcatctgcttcacggaaacatgaccagttccgacatattattatgttacaccacagtaggctggatgatgtggaactggatggtgagcctgttagcaacaggcgccgccatggtattatacgatgggtcacccttggtgcccactcccaacgttctatgggacttagtcgaccgtattggaattactgtacttgtgacaggcgccaagtggctgagcgtactggaggagaaggctatgaagcccgtcgagacgcactccctgcagatgctgcacaccattctgtctaccggcagccctttaaaggcccaatcttatgagtacgtttatcgttgtatcaagagttctattctccttggctcgatcagcggggggacagatattatctcctgtttcatgggccataactttagcctgcctgtatacaagggagagatccaggctaggaacctaggaatggccgtggaggcttggaatgaagaggggaaagcggtgtggggcgagagcggcgaactggtgtgcaccaagcccattccatgtcaaccaacccacttctggaacgacgagaacggtaataagtaccggaaggcgtatttctccaagttccccggtatatgggcacacggagactattgcaggattaaccctaagaccggtggcatcgttatgctaggccggagcgacggcactcttaatcccaatggggtccgcttcggctcatcagaaatctataatattgtctatgcacagagacaagaatcagggtcttgtcgccagacggaccacaggtggaagagccgaggtgccaggaggtgtttcttggagccccgggatccaggctcggtgcccggccacccctag

SEQ ID NO: 106784 - DNA, 2019 bp, synthetic construct
  misc_feature 1..2019: note = Description of Artificial Sequence: Synthetic coding sequence
  source 1..2019: mol_type = other DNA
atgagcaaggaggagcgccccggtagggaggagatcctagagtgtcaagttatgtgggagcctgactctaagaagaacactcagatggataggttcagagctgctgttggggctgcttgtggcctcgcattggagtcctatgatgacctctatcactggtccgtggaaagctattctgacttttgggccgagttttggaagttctccgggatagttttctcccgtgtgtatgacgaggtcgttgatactagcaaaggtatcgccgatgtgcccgagtggtttaagggctctaggctcaattacgctgaaaatctactacggcacaaggagaacgacagagtggccttatacatcgccagggagggaaaggaggaaattgtgaaggttacttttgaagagctgcggcaggaagtagctttgtttgcagccgcaatgcggaaaatgggggttaaaaagggtgatagggttgtcggctacctccccaatagcgagcatgcagttgaagccatgctggcagcagcgtccattggggccatttggtccagcacctcccccgactttggcgtgaacggggtacttgaccgcttcagccagattcaacctaagttgatattctctgtggaagctgtcgtatacaacggcaaggaacataaccatatggagaagctgcaacaggtagtcaaaggactcccagatctcaagaaagtcgtggtgatcccttatgtctcatcccgggaaaacattgacttatccaagatccctaattccgtgtttcttgacgacttcctggccaccgggactagtgaacaagcaccccagctggagttcgaacagctgccgttctcccaccccctgttcatcatgttttccagtgggaccacaggcgccccgaagtgcatggtgcatagcgccggcggaacgctcatccagcacctgaaagaacatctcttgcacggcaacatgacgtcatcagacatcttactgtgttataccactgtcggatggatgatgtggaattggatggtgagcctgcttgcaacgggagccgcgatggtgctgtatgacggatcaccactggtaccgacaccaaacgtcctgtgggacctggtggataggataggcatcactgttctagtgacaggggcgaaatggctgagcgtacttgaggaaaaggctatgaagcccgtggaaacccatagcctgcaaatgctgcacaccatcttgtcaacaggttctccacttaaggcacagtcctacgaatacgtttaccggtgcattaaatcttctatcctgctcgggagtatcagcggtggcacagacatcatttcttgctttatgggacacaacttttccctaccagtctacaaaggtgagatccaggccagaaacctgggaatggccgtcgaagcatggaacgaggagggcaaagccgtgtggggggagagcggtgaactggtgtgcactaaaccgattccctgtcagccaactcacttttggaacgacgaaaatggcaataaatacagaaaggcctacttctctaagttcccaggaatttgggcacacggagattactgtagaataaaccctaaaacaggagggattgtcatgcttgggcgctccgacggcacactgaatcccaacggggttcggttcggatccagcgagatctataatattgtggagtccttcgaggaggtggaggactccctatgtgtgcctcagtacaacaaatacagggaggagagagtcatcctgtttctcaagatggcctctgggcacgctttccagccagacctcgtgaagcgcatccgtgatgccatccggatgggactgtcagccagacacgtgccttccctgattttggagaccaagggcatcccttacactttgaacggaaagaaagtggaggtcgccgttaaacagatcattgccggaaaagctgtcgagcagggaggagcattttccaatccggagacactagatctgtacagagatatcccggagctgcaaggattttag

SEQ ID NO: 106785 - DNA, 762 bp, synthetic construct
  misc_feature 1..762: note = Description of Artificial Sequence: Synthetic coding sequence
  source 1..762: mol_type = other DNA
atgagaaagatgggcgtgaaaaaaggggatagggtggtgggctatctccctaatagcgagcacgccgtcgaggccatgcttgcagcagctagtattggcgccatctggtccagtactagtccggactttggtgtcaacggagtgctggatcggttctcgcagattcagcccaaattgatcttcagtgtcgaagcggtggtctataatgggaaggagcacaaccatatggagaaactgcagcaggttgtaaagggccttccagatttaaagaaggtcgtagtcataccctacgtgtcttccagggagaacattgacctctcaaaaatcccgaattctgtgttcctggacgacttcctggccacagggacaagcgagcaggccccccaactggagttcgaacagttgccattttctcacccgctctttatcatgttctctagcggcaccaccggggcccctaagtgtatggtacatagtgccggagggacgctcatccagcatctgaaagagcacctgctgcacggaaatatgacaagcagcgatatactgctgtgttataccaccgttggatggatgatgtggaactggatggtgtccctccttgccaccggcgcagccatggttctttatgacggcagccctctcgtgcctacccccaacgtcctgtgggaccttgtagaccgaataggatatctgggctcatggaggttactgcagaatcagccccaagacagagggcaccgccatgcctggccagagtag

SEQ ID NO: 106786 - DNA, 1845 bp, synthetic construct
  misc_feature 1..1845: note = Description of Artificial Sequence: Synthetic coding sequence
  source 1..1845: mol_type = other DNA
atgcggcctcctcaatgtctactgcacacaccaagcctggcctctccactgctcctgctcttattgtggctcctgggcggcggtgtgggtgctgaagggcgggaggacgccgaactcctcgtgaccgttagaggaggtagactgcgcggtattcggctcaagactcccggggggcccgtcagcgccttcttggggatacccttcgccgagccccccatgggaccccgacgctttctgccgcctgaaccaaagcagccttggagtggtgtggtagatgccaccactttccagtcagtatgttatcagtatgtcgacactttgtatcccggctttgaaggcactgaaatgtggaacccaaaccgagaactctcagaagactgcttgtatctgaacgtttggaccccatatccacggccgaccagtcctacaccggtcttggtgtggatctacggagggggcttctattctggcgcttcgtccttggacgtttacgatggacgatttctagtccaggccgagaggactgtattagtgtccatgaattacagggtgggcgccttcggcttcctggccctgcccggcagccgcgaagcccctggaaacgtcggtcttctggaccaacggctcgccctgcagtgggtgcaggaaaacgtcgcagcttttgggggtgatccgacaagcgtcacgctgtttggtgaatcggccggcgctgcttctgtcggaatgcacttgttgtcccctccaagtcgcgggctttttcacagagccgttctgcaatcgggtgcaccaaatggcccgtgggcaacagtgggaatgggcgaagcacgtcgacgggcaactcagcttgcccatctagtgggttgtccacccgggggtacggggggcaacgatacggaactggtagcctgcttgagaactcgccctgcacaagttctggtgaaccacgaatggcacgtactaccccaggaatccgtcttccggtttagctttgtgccagtcgtggacggggacttcttgagtgacacccctgaggccttgatcaacgcaggcgatttccacggtctgcaggtgcttgtaggcgtggttaaggatgaaggcagctacttcctggtctatggcgcgcccggattctcaaaggacaacgaaagcttgatcagtagggccgagttcctcgccggagtgcgagtcggcgtcccacaggtgagcgaccttgccgcagaggctgtggtcctacactatactgattggctgcaccccgaggaccccgcacgcctgagagaagccctgagtgacgtggtgggggaccacaacgtagtttgccctgttgcccaactggcgggtcggctcgccgctcaaggagccagagtgtacgcatacgtcttcgagcatagggcttccaccttatcgtggcctttgtggatgggcgtgcctcacggttacgagattgaattcatctttgggattccactggatccgagccgcaattatactgctgaggagaaaatattcgcccaacggcttatgaggtactgggcgaactttgctcgcacaggcgaccctaacgaaccccgcgatcctaaagccccacagtggcctccctatacagcaggggcccagcagtacgtctccctggacctgagaccattagaggtccgaagagggctgcgcgcccaggcctgcgccttttggaaccgtttcctgcctaagctcttgtcagctactgacacgctcgacgaagcggagcgacaatggaaagccgaatttcatagatggagctcatacatggtgcactggaagaaccaatttgatcattacagcaagcaagatcggtgttctgacctctag

SEQ ID NO: 106787 - DNA, 1854 bp, synthetic construct
  misc_feature 1..1854: note = Description of Artificial Sequence: Synthetic coding sequence
  source 1..1854: mol_type = other DNA
atgagacccccacaatgcttactgcatactcccagcttagcctcaccattgttgcttctcctgttatggctcctgggcggtggtgtgggtgccgaaggacgcgaagacgccgagttgttagtgaccgtgcgcggtggccggcttagggggattcgcctgaagacacctggtggccctgtgtccgcctttctgggtattccctttgcagaacccccaatggggccccgcaggttcctccctcccgaacccaagcagccgtggagtggagttgtcgacgccactacattccagtctgtgtgttatcagtacgtggacaccctgtatccaggctttgaggggactgagatgtggaacccaaaccgagaactctctgaggactgcttgtacttgaacgtttggacgccctaccccaggcccaccagcccgacacccgtactcgtttggatctacggtggaggattctacagcggcgcctcctctctggatgtttatgacggacggtttctggtgcaggccgaacggaccgtcttggtgagtatgaattatcgcgtcggagctttcggttttctcgccttgccaggctctagggaggcgcctggcaacgtaggcttactggatcagaggctcgccctacagtgggtgcaggagaatgtagcggccttcggaggcgaccccacctctgtcacactgttcggagaatcggccggggctgcttcagtagggatgcaccttttgtcacctccaagccggggactgtttcaccgagccgtgctgcagtcaggggcgcctaacggcccatgggccaccgtgggaatgggcgaggctagaaggcgagccacccagctagcacacctagtgggatgtcccccaggtggcaccggcgggaatgacacggaattggtcgcctgcctgcgaactaggcctgcacaggtactagtgaatcacgagtggcacgtcctgccacaggaaagtgtgtttcggttttcatttgtgcccgtggtagatggggactttctctctgacacgcctgaagccctcatcaacgcgggagatttccacgggctgcaggttctggtgggagtagtcaaggacgaggggtcttacttcctcgtgtacggtgctcccggattttctaaagacaacgagagtctgatttctcgggccgaattcctcgccggtgttagagtcggcgtccctcaagtgtccgacctggcagcagaagcggtggtgctgcattatacagattggttgcatcccgaggacccagctcgccttagggaggcattgtccgatgttgtaggagaccacaacgtggtgtgcccagtggcccaactcgcgggcagactggccgctcagggcgctcgcgtgtatgcttacgtattcgagcatagggcctccaccttgtcatggccattgtggatgggtgttccccatggctacgagatcgagttcatatttgggatcccccttgacccttcccggaattatacagctgaggagaagattttcgcacagcggctgatgcgttattgggccaactttgcacgaaccggtgatcctaacgagcctagggaccctaaggctccacagtggccaccttatacagccggggctcagcagtatgtgagcctggatctgcgaccactcgaagtgcgcagagggctgcgcgctcaggcctgcgcattttggaacaggttcctgcctaaactgttgtctgcgacagccagcgaggcccctagtacatgtcctggattcacccatggagaagccgcccccagacccggtctccccctgccactgctgttactgcaccagctgctcttactatttttgagccacttgcgtagactatag

SEQ ID NO: 106788 - DNA, 1854 bp, synthetic construct
  misc_feature 1..1854: note = Description of Artificial Sequence: Synthetic coding sequence
  source 1..1854: mol_type = other DNA
atgaggcccccacagtgtctgctgcacacgccttcgctggctagtccgctgcttctactgcttctgtggttgctcggtgggggagtaggagctgagggccgcgaagacgcagaactgcttgtgacagtccgtggcggtcggctgaggggtattaggctaaaaacacccggcggtcccgtgagtgcctttttaggtatcccattcgctgagccgcccatgggcccaaggaggtttctccccccagagcccaagcagccttggtccggtgtcgttgacgccaccaccttccagtccgtctgctatcagtatgtggacacattgtatcctggctttgagggcactgaaatgtggaatcctaacagagaactgtctgaggattgcctctacctcaacgtatggacaccatatccacggccaacctcaccgactcccgtgctggtctggatttatgggggtggtttctactctggcgcctcttcactagacgtgtacgatggaaggtttttggttcaggctgagaggaccgtgctggtgagtatgaactaccgggttggggcgtttggctttctggcactgcccggaagccgcgaggcacccggcaacgtcggactactggaccagcgcctggctctgcagtgggtgcaggagaacgtagccgccttcgggggggaccctactagcgtaactctctttggcgaatcagcaggcgccgccagcgtcggaatgcacctattaagccccccaagccgtggcctatttcaccgggccgtgctgcagagtggcgctcctaacggaccgtgggcaacagtaggaatgggggaagccagaaggagggccacacagctcgcccacctggttggttgtcccccaggtggcactggcgggaacgatacagaactggtggcttgcctgaggacacgccctgcccaggtgttggtaaatcacgaatggcatgtcctccctcaggaaagcgtgttcagattcagcttcgttcctgttgtagacggtgatttcctgtcagacacaccagaagcattaatcaacgcgggcgatttccacgggttgcaggttctggtgggggtagtcaaggacgagggaagttacttcctcgtgtatggcgccccaggcttctcgaaggataacgagtcgcttatttccagggccgagtttcttgccggcgtacgcgttggagtgcctcaggtgagtgacctggcagcggaggccgtagtcctgcactacactgactggctgcacccagaggatccggcccggctgcgtgaagcactgtccgacgtcgtaggtgaccataatgttgtctgtcctgtggcccaactagccggtcgtttggccgctcagggcgcacgcgtctatgcttacgtgttcgaacacagagcttctacactgtcatggccactgtggatgggggtcccccacggctacgagatcgagttcattttcggcatcccgctcgatccttctcggaactatacagccgaggagaagatttttgctcagcggttaatgaggtactgggcgaatttcgctcggacaggagatcctaacgagccaagagacccaaaggccccccaatggcccccttacactgcaggggcccaacagtatgtcagtttggatctccgcccactggaggtgcgtaggggtttacgggcgcaggcttgtgccttttggaatcgattcctgcccaagcttctttcggctacagcatccgaggcccccagcacgtgtcctgggtttacacatggtgaggccgccccaagaccaggtctcccgctgccattactgctgctacaccaactcctactgttatttctgagccacctcaggaggctgtag

SEQ ID NO: 106789 - DNA, 1845 bp, synthetic construct
  misc_feature 1..1845: note = Description of Artificial Sequence: Synthetic coding sequence
  source 1..1845: mol_type = other DNA
atgagacccccccagtgtctgctgcacacaccatctttagcatcccccttactcttgctactgctttggcttctggggggcggagtgggagccgaagggagagaggacgccgagttgctagtgaccgttcgcggggggcgtctccggggcataagacttaagactcccggtggccccgtctcagcgttcctcgggatcccctttgccgagccacctatgggacccaggcgcttcctcccgcccgagcctaagcaaccatggtcgggggtagtggatgccacgacttttcaaagcgtgtgctaccaatatgtagatactctgtatcccggattcgaagggacggagatgtggaacccgaacagagaacttagtgaggactgtctgtacctgaacgtctggactccttaccctagaccaaccagtccgacacccgttctggtgtggatctacgggggcggattttacagcggagcctctagtctggatgtctatgatggtagattcctggtgcaagccgaaagaaccgtcctggtttccatgaattacagagtcggcgctttcggcttcctcgctttgcctgggtccagggaggcccccggcaatgtgggtctgctggaccagcgactggcgctgcagtgggtgcaggagaacgtggccgccttcggcggcgatccaacttctgtcaccctgttcggagaatcagccggggccgcctctgttggtatgcatctcctgtctcccccgtcccgtggcctattccatcgcgcagtcttacagagtggcgcacccaatgggccttgggctactgtgggaatgggggaagcgcgccgtcgggcaacacaactggcccacctggtgggatgcccgccgggtgggaccggcggcaatgacactgaattggtcgcctgcctcaggactagacctgcccaagttctggttaatcacgaatggcatgtgcttccacaagaaagtgtgtttagattcagcttcgtacccgtcgtggatggagatttcctgtccgatacaccagaggctctgatcaacgctggcgactttcacgggctgcaggtgcttgtgggggttgtgaaagatgagggtagttatttcctcgtgtatggggctccaggcttcagcaaggataatgagtctttgatcagccgggcagagttcttggcaggggtaagggtgggcgtaccacaggtatccgatttagcagctgaagccgtggtgctgcactacaccgactggctacaccccgaagatcccgccaggttgagagaagcactgagcgatgtcgttggtgaccataatgttgtttgccccgtggcacaactggctggtcgcctagccgcacaaggtgcccgagtctatgcctatgtgttcgagcaccgggctagcaccctgtcatggcccctctggatgggagtcccccacggatatgaaattgaattcatcttcgggattccactggatccctctagaaattatacggccgaagaaaagatcttcgcccagcgcctgatgcggtactgggctaatttcgctcgaacaggagacccaaacgagccacgcgacccgaaagccccccaatggccaccgtacaccgctggagcgcaacagtacgtctcactggatctgcgacccctcgaggtcaggagaggactgagggcgcaggcttgcgccttctggaaccggtttctgccgaagcttctcagtgcaacggacacactggatgaagctgagaggcaatggaaagccgaattccataggtggtcctcttacatggtgcactggaagaaccagttcgatcactatagcaagcaggacaggtgctctgacttgtag

SEQ ID NO: 106790 - DNA, 1581 bp, synthetic construct
  misc_feature 1..1581: note = Description of Artificial Sequence: Synthetic coding sequence
  source 1..1581: mol_type = other DNA
atgagacccccacaatgcctcctccatactccatctctcgcctcacctctgctcctgttgctgctgtggctgttaggggggggggtcggagccgaagggagggaagatgcagaacttctcgtgaccgtgcgcggcggccgcctgcggggcatccggctgaagacaccaggagggcccgtcagcgccttcttaggcattccttttgcagagccgccaatgggcccccgtcggttcctccctcccgagcccaagcaaccctggtcaggggtcgtcgacgccactacattccagtcagtctgttaccaatacgtggacactctgtaccccggctttgaaggcactgaaatgtggaatccaaacagagaactatcagaagactgtctatacttgaacgtatggactccttaccccagaccaacctccccgacaccggtcctagtgtggatatacggaggtggcttctacagcggagcctcttctctcgacgtgtatgacggtcggttcttggtgcaggccgagcgcaccgtacttgtcagtatgaattatagggtgggagctttcgggtttctagcgttgccaggatcaagggaggctccaggaaacgtcggcctgttagatcagcggctggccctacaatgggtccaggagaacgttgcagccttcggaggcgacccaacatctgttactctctttggggagtcagcaggggcagcctctgttggaatgcacctgctgtcgcctccgtcaaggggcttgttccatcgtgcagtactccagagtggggctccgaatgggccatgggcaacagtggggatgggcgaggccagaagacgggccacccagctcgcccacctggtgggctgcccgcccggaggcactggcgggaacgacacagagttagtcgcatgtctccggacacgtcccgctcaagtcttggttaatcacgaatggcacgttttacctcaggaatctgtgttccggttttctttcgttcctgtcgtggatggagattttttaagtgacacacctgaagctctgataaacgctggggattttcatgggctccagttagctggccgtctcgccgcgcagggcgcaagagtttacgcatacgtgttcgaacacagagccagcacactcagctggccattgtggatgggtgtgccccacgggtacgagatcgaatttatcttcggcattcccctcgaccctagtcgaaattacacggcagaagaaaagatcttcgcccagagactgatgcgctattgggctaattttgccaggactggagatcctaacgagccacgggatccgaaggctccgcaatggcctccctacacagccggggcccagcagtacgtcagtcttgatctgcggcccctggaagttaggagaggattgagagcccaggcttgcgctttttggaacagattcttgcctaagttgcttagtgctaccgacacactggacgaggcagagcggcagtggaaagccgaatttcatcgctggtccagctatatggtgcactggaagaaccagttcgatcactacagcaagcaagacaggtgtagtgatctttag

SEQ ID NO: 106791 - DNA, 1806 bp, synthetic construct
  misc_feature 1..1806: note = Description of Artificial Sequence: Synthetic coding sequence
  source 1..1806: mol_type = other DNA
atgaggcctccacagtgtctcctgcatactccatcattggcctcccctcttttgttgctcttgctttggctgctgggaggcggggtcggggccgagggacgcgaggacgcagagcttctggtcacagtccggggcggcaggcttcgcggcatcagactgaaaacccccggcggaccagtgtccgccttcctggggattccctttgccgagccacctatgggcccgcgacgttttcttcccccagaaccaaagcagccatggtctggagtcgtagatgccacaacgtttcaatctgtgtgctaccagtacgtggacactttatatcccgggtttgagggaaccgaaatgtggaaccccaacagggagctgtccgaagactgcctctaccttaatgtgtggaccccctaccccagaccgacctcccccactccagtcctggtgtggatctacggaggcggcttttactctggggcgagctcactggacgtgtacgatggacggtttctcgttcaggccgagcgaacagtattggtctccatgaactaccgtgtgggggccttcggttttctggcactgcccggtagtcgagaagcaccaggaaatgtaggactcctggaccagcgtctggcgcttcagtgggtgcaggagaacgtggctgcatttggcggggacccaaccagcgtcaccctttttggagaaagtgccggggctgcttccgtgggcatgcacctcctgtctccaccgtcaaggggtctattccatagagctgtactccagtcaggagctcctaatggcccatgggccacagtgggtatgggagaggcccgacgccgggctacccagctagcacatctagtcggctgcccgccaggggggaccgggggaaatgacacggagctggtcgcatgcttgcggacacgaccagctcaggtgctggttaaccacgagtggcatgttcttcctcaggaatccgtcttcagattctcatttgtgccagtcgttgatggcgatttcctcagcgacactccagaggctctcattaatgccggtgactttcacggccttcaggtgctggtaggcgttgtcaaggatgaaggatcttacttcctggtttacggcgctcccggctttagcaaggacaatgaaagccttatctcccgcgccgaattcttagccggagtgcgcgtgggcgtaccccaggtgagcgacttagccgccgaagcggtcgtgctgcattacacagattggcttcaccctgaagaccctgctagactgcgcgaggcactgagtgatgtagtcggagaccataacgtggtctgcccagtagctcaacttgccgggaggctggcagcccaaggcgctcgcgtgtacgcatacgtgttcgagcaccgcgccagtacactaagctggcctctatggatgggagtgccgcatggatacgagattgagttcatctttggtatcccattggacccctcaagaaattacaccgctgaggagaagatcttcgctcagagactcatgcgctactgggccaacttcgccagaaccggggatcctaatgaaccacgggaccccaaggccccccaatggccaccctacacagctggtgcccagcagtatgtttccctcgatctgcgcccacttgaagtcagacggggcctcagggcccaggcatgtgccttctggaaccgcttcctgcctaagttgctgagcgcgaccggaatgcaggggcctgcaggaagtgggcggaggggcgtaggagcacgctgcaacccatctctgctgcccctggcgtctgagtag

SEQ ID NO: 106792 - DNA, 1845 bp, synthetic construct
  misc_feature 1..1845: note = Description of Artificial Sequence: Synthetic coding sequence
  source 1..1845: mol_type = other DNA
atgcggccaccacagtgcctgctccacactccgtccttagcttcccctctgttgctgctgcttctatggttacttggtgggggcgtgggcgcagaggggcgggaggatgctgaactgctggttactgtccgggggggaagattgcggggcatacggcttaagacaccgggcgggcccgtaagtgcattccttggcataccttttgccgagccccctatgggaccccggcgatttctcccacccgaaccgaagcagccctggtccggggtggtggacgccacaacatttcagtccgtgtgttaccaatacgtcgataccttgtatcctggattcgagggcactgagatgtggaacccgaatcgtgagctcagcgaggactgcttgtacctgaatgtgtggactccataccctcgccccactagcccgacccccgtactggtgtggatatatgggggcggcttctactccggcgctagctcgctcgatgtttacgatggtagattcctggtacaggccgaaaggacagtgttggtatccatgaactacagagtcggggcatttgggttcttagccctgcccggatctcgtgaggcccctgggaatgtcggcctgctggaccagcggctggccctccagtgggtgcaagagaacgtggcagcattcgggggggatcccaccagtgtcactctctttggtgagtcagcgggcgctgcctctgttggcatgcaccttttgagccccccttcacggggactcttccaccgcgcagttctccagtccggcgcccccaatggtccttgggcgacggttggtatgggcgaagcacgcaggcgagcaactcagctcgcccacctcgtcggttgtccccccgggggaaccggtggaaatgacaccgagcttgtcgcttgcctccgcactagaccagctcaagtgttggtgaaccacgagtggcatgttctgccacaagaaagtgttttccgcttcagctttgtacctgtcgtggatggggactttctctccgatacaccggaggcactgataaacgctggggacttccacggactccaggtgcttgttggagtagtgaaggatgaagggtcttattttctcgtctatggcgcccccgggttctccaaggacaatgagagcctcatctcacgagccgagttcctcgcaggggtccgggtgggggtccctcaggtgagcgatctcgcagctgaggcagtcgtcctccattatacggactggttacaccctgaggacccagccagattgcgggaggctctgtccgatgtggtgggtgatcataatgtcgtgtgtcccgtagctcagctcgctggaagactggccgcccaaggcgccagggtctacgcgtatgtcttcgagcaccgcgcttctacactctcatggcctctttggatgggcgttccccacggttacgaaatcgagtttatcttcggaatccctctcgaccctagccgcaactacaccgcggaggaaaagatttttgctcaaaggctgatgagatactgggccaatttcgctcggactggggatccaaacgaaccgcgagaccccaaggctccacaatggcctccatataccgctggtgcccaacagtatgtgagtctggacctccggccacttgaagtgcgaagaggattgcgggctcaagcttgcgctttttggaatagattcctacctaagctgttgtctgccactgacacactggatgaggccgagcgacagtggaaggccgaatttcacaggtggtcttcttacatggtgcactggaagaatcagtttgaccattattcaaaacaagaccgctgcagcgatctgtag

SEQ ID NO: 106793 - DNA, 480 bp, synthetic construct
  misc_feature 1..480: note = Description of Artificial Sequence: Synthetic coding sequence
  source 1..480: mol_type = other DNA
atgcggccaccccaatgcctgcttcatacaccttccctagcctccccactgcttttattgctgttatggttactgggcggcggcgtaggggccgagggaagggaggatgccgaactcctggtgaccgtgagaggtgggcgtctgcgcggtatacggctcaagactccgggaggcccagtctccgcattccttggaataccgtttgcagagccccccatgggcccccgcaggtttctcccaccagagcctaagcagccatggtcgggagtggtggacgcaaccacattccagtccgtgtgctatcagtacgtcgatactctctacccaggatttgaggggacggaaatgtggaacccaaaccgcgaattgagcgaggactgcctgtacctcaatgtctggaccccttatccaagacctacgagcccaaccccagtgttagtgtggatatatgggggcggtttctactctggcgcctcctag

SEQ ID NO: 106794 - DNA, 87 bp, synthetic construct
  misc_feature 1..87: note = Description of Artificial Sequence: Synthetic coding sequence
  source 1..87: mol_type = other DNA
atgaggcccccccagtgcctccttcatacaccttctctcgccagccccctgcttctcttactgctgtggcttctcggggggggctag

SEQ ID NO: 106795 - DNA, 282 bp, synthetic construct
  misc_feature 1..282: note = Description of Artificial Sequence: Synthetic coding sequence
  source 1..282: mol_type = other DNA
atgctggggctagtgatgtcttgccctgaccgtactctggttaccaaggttagatcacatccatctggcaatcagcatcggccgactcggggtggcagtagatcctttcactgcagaaggggtgtcccacggcccgctgccctgagggtattacccaggtgccccgcattttcagacgccgcatgcccggcagccatgcggcctccccaatgtctgctacatactccatcgctcgcctctcccctgctcttgttgctgctctggctgttgggaggtgggtag

SEQ ID NO: 106796 - DNA, 1284 bp, synthetic construct
  misc_feature 1..1284: note = Description of Artificial Sequence: Synthetic coding sequence
  source 1..1284: mol_type = other DNA
atggccgtgctggccgcactgctgagaagcggagcacggtctagaagcccgctgcttagacggcttgtgcaagagatacggtacgtcgagaggagctacgtcagtaagcctaccttgaaagaggtcgtgatcgtctctgcaactcgcactccaatcgggtcatttctaggctcgttgagcctgctgcccgctaccaaactcggaagcattgccatccagggtgcaattgaaaaagctggaatacctaaagaggaagtgaaagaagcctatatgggaaacgtgctccaggggggggagggccaggcacctacccggcaagccgttcttggcgcaggcctgcccatctctaccccctgcaccactataaataaagtctgcgcaagtgggatgaaagcaattatgatggcttcccagtccctgatgtgtggccaccaggatgtgatggtagctgggggaatggaaagcatgagcaatgtaccatatgtaatgaaccgcggcagtaccccttatggtggtgtgaaactcgaagatctgattgtcaaagatggcctcacggatgtgtacaataagattcatatggggtcctgcgccgaaaataccgccaagaagttaaacattgcacggaacgagcaggacgcgtacgcaatcaactcttatacgaggagtaaggccgcttgggaagctggaaaattcgggaatgaagtcatccccgtgacagtaaccgtgaagggccagccagatgtggtggtcaaggaggatgaagaatacaaacgcgtggacttcagcaaggtccctaaattgaagactgtgttccagaaggaaaatggtactgtgaccgccgccaacgcttctacactcaacgatggcgccgccgctctggtgcttatgacagctgatgccgctaagaggttgaacgtgacgccattggcccggattgtggccttcgccgacgctgccgtcgagcctattgacttccccattgcccccgtttatgccgcctccatggttctgaaggatgtgggactcaaaaaggaagacatcgcaatgtgggaggtaaatgaggccttcagcctcgtcgttctcgccaacataaaaatgctggaaatagatccccaaaaagtcaatatcaatggaggagccgtttccttagggcaccctataggaatgagcggcgctcgaatcgtgggccatcttacccatgccctgaagcagggcgagtacggcctggccagtatttgcaatggaggggggggcgctagcgccatgctgatacaaaagctctag

SEQ ID NO: 106797 - DNA, 1194 bp, synthetic construct
  misc_feature 1..1194: note = Description of Artificial Sequence: Synthetic coding sequence
  source 1..1194: mol_type = other DNA
atgaacgctggatccgatcccgtggtcatagtgtcggcggcacgcaccattatcggatccttcaacggcgctctagccgccgttccagttcaggacttgggctctaccgtgatcaaagaggttctaaaacgcgccacagtggcccctgaagacgtatcagaagtgatctttgggcatgtgctcgccgccggatgcggacagaatccggttcgccaggcttccgtgggggccggaatcccctattccgtgccagcctggagctgccagatgatatgtggtagtggtttgaaggccgtctgtctggcggtacaaagcataggaattggggacagctccattgtggtagccggcgggatggaaaacatgagtaaggcgccgcacctcgcctatctgagaaccggagtgaagataggggaaatgcctctcactgatagcatcctctgcgacggtttaaccgatgcatttcacaactgccacatgggtattacagccgagaacgtggcaaaaaagtggcaggtgagcagggaggatcaggacaaggtggccgtcctgagtcagaacagaacagaaaacgcgcaaaaagctggtcatttcgacaaagagatcgttcctgtactagtgtctacccgaaaaggacttattgaggtgaagacggatgaattccctcgccacggatccaacattgaggctatgagcaagctaaagccatattttctgacagacggaactggtacagttacgccggcaaacgcttccggaatcaacgatggcgcagctgcagtcgtattgatgaaaaagagcgaagctgataagaggggcttaactccgctggctagaatagtgagttggagtcaggtgggcgttgaaccaagcataatggggattggccccatacccgccatcaagcaggctgtgacaaaggccggttggtctctggaggacgtggacatttttgaaataaatgaagcctttgctgctgtgtccgccgccattgtgaaggagctcggattaaaccctgaaaaggtgaatattgaggggggggccatcgctttgggccacccgctgggtgccagtgggtgtcgaatattagtgacgctcttgcatacgttggaacggatgggtcgctcccggggagtcgccgcgctgtgcataggggggggcatgggtatcgccatgtgcgttcagagggaatag

SEQ ID NO: 106798 - DNA, 1281 bp, synthetic construct
  misc_feature 1..1281: note = Description of Artificial Sequence: Synthetic coding sequence
  source 1..1281: mol_type = other DNA
atgggcagccatccagtgctccgcatttgggggaaccgtagagcaaccgctgcgtccctgggccgctcaggcgggcgactgagctccccacgtctgctgagagttgtcgcccccaccttgacttttgcccaaactagccgttgtagctttaacggcgccttagctgcagtgccggtgcaggacctcgggtcgaccgtgatcaaggaggtgctgaaacgcgcaaccgtagcccctgaagacgttagcgaggtgatatttggccacgtgttagcagcaggatgcggacagaatccagtacggcaggcctcagtgggggccgggataccttatagcgtacctgcatggtcatgccagatgatttgcggaagtggtctcaaagcggtgtgtctggccgtacagagtatcggaatcggagacagttccatcgtggttgccggcggaatggaaaacatgagtaaggccccccatctcgcctatctcaggactggagttaaaataggtgaaatgcccctcactgactccattttgtgtgacggcctcactgacgcctttcacaactgtcacatgggaatcactgccgagaacgtagccaaaaagtggcaggttagtagagaagatcaagataaggtggccgttctctcccaaaataggacagaaaacgcacagaaggccggccattttgacaaggagattgtgccagtgctcgtgtctactaggaaggggctcatagaggtcaaaaccgatgagttccccagacatgggtccaacatcgaggcaatgtccaaactgaaaccttattttctcaccgatggcacgggaacagttaccccagccaatgcatccggcatcaatgatggagctgctgcagtcgttcttatgaagaaatcagaggccgacaagcgagggctgaccccacttgctcggatcgtgtcttggtcccaggtaggggtggagccctcgattatggggattggccccataccagcaatcaagcaggccgtcaccaaagctgggtggagtctggaggacgttgacatatttgaaatcaacgaggcgttcgcagcagtctcggcagccatcgtcaaagagcttggactgaaccccgaaaaggtgaacatagaaggcggagcaattgcacttggacatcctctcggggcctccggatgccggatactcgttacgctactgcacacactcgagagaatgggccggtccaggggcgttgcggctctgtgtattgggggcggcatgggcatagcaatgtgtgtgcagagagaatag

SEQ ID NO: 106799 - DNA, 1275 bp, synthetic construct
  misc_feature 1..1275: note = Description of Artificial Sequence: Synthetic coding sequence
  source 1..1275: mol_type = other DNA
atgcagcggctgcaggtcgtgttgggacacctgcgcggccccgcggacagcgggtggatgccacaagcagctccctgtctgagcggtgcccctcaggcatcagccgccgacgtggtcgtggtgcatggaagaagaacagccatctgccgcgctggccgaggagggttcaaagacactacacccgatgagttactgtctgccgttatgactgccgtcctaaaagatgtgaatcttaggccagagcagttgggagacatctgtgtcggcaacgtactccaacccggagcgggggctatcatggcccgcattgcccagttccttagcgatatacccgagaccgtacccctcagcacagtcaaccgacagtgctctagcggtctgcaggccgtcgcttccattgcaggtgggattcgcaatggctcctacgacatagggatggcttgcggagtggagtctatgagtctcgctgacaggggaaatccgggcaacataacgtctcgtctcatggaaaaggagaaagcccgcgattgtctgattcctatgggaattacctctgagaacgttgccgaaagatttggcatttctcgcgaaaagcaggacacatttgccctggcgagccaacagaaggcagcccgcgcccagtccaagggatgtttccaggccgaaatagtccccgtgacgacaactgtgcacgacgataagggaacgaagagatctattactgtgacacaggacgaagggattcggcccagtacaacaatggaagggttggctaagctaaaaccagctttcaagaaagacggaagtaccaccgcggggaacagtagccaagtgtccgacggagccgccgctatcctacttgcgaggagaagcaaagctgaggaacttgggctgcccatattgggtgtgcttaggtcctatgcggtggtgggagttccacccgacattatgggcattggaccagcttatgccatcccggtcgccctacagaaggctggtctgaccgtgagcgatgtcgatatttttgaaatcaatgaagcctttgcctcacaagcagcctattgtgtcgaaaaacttcgtttacccccggagaaggtcaaccccctggggggagccgtcgccctgggacaccccctggggtgcacaggggcccgccaggtcattactctgctgaatgagctgaaacgcaggggcaaaagagcctacggagtggtgtcaatgtgtatcgggacaggtatgggcgctgctgcggttttcgaatacccaggcaactag

SEQ ID NO: 106800 - DNA, 1071 bp, synthetic construct
  misc_feature 1..1071: note = Description of Artificial Sequence: Synthetic coding sequence
  source 1..1071: mol_type = other DNA
atgacagctgtcctgaaagatgtgaatcttcggcctgaacagcttggagacatatgtgtggggaatgttttacagcccggggctggggcaattatggctcggatagcccagttcctatccgatatccctgagacagttccattatctacagtgaatcgacaatgctccagtggcctgcaggcagttgccagtatcgctggtgggattagaaacggttcatatgacattggcatggcctgcggcgttgagtcaatgtcactggccgatagagggaaccccggcaacataacatctcgccttatggagaaagagaaggcaagagactgtcttatccccatgggtatcacttccgagaacgtggccgagcgtttcggtatttctagagaaaagcaggatacctttgctttggcgtcccaacagaaggcagcaagagcacaatcgaagggttgcttccaggccgaaatcgtccctgttactaccactgtgcatgacgataaaggaaccaagcggagtatcacggtgacgcaggatgagggcatcagaccatcgaccaccatggagggtctagcgaaactgaagccagcgtttaaaaaagacgggagcacaacagccggcaactctagccaagtgagcgacggtgcggccgccatcctgttggcccgtcgcagcaaagcagaggaactaggcctgccgatcctgggggtgcttcgcagctacgcagtcgtaggagtacctcctgatattatgggcataggtccagcttatgcaatacctgtcgccctgcaaaaggccggtctgacagtgagcgacgtggatatatttgaaattaatgaggcgttcgccagtcaggcggcttactgtgtggagaagttacgactgcccccagaaaaggtcaaccctctcggtggcgcagtggccctgggccatcctctggggtgtacaggggctaggcaggtcataaccctgttaaacgaattaaagcgtagggggaagagagcatatggcgtcgtatctatgtgtataggtactgggatgggggcggccgccgtcttcgaataccctggcaattag

SEQ ID NO: 106801 - DNA, 462 bp, synthetic construct
  misc_feature 1..462: note = Description of Artificial Sequence: Synthetic coding sequence
  source 1..462: mol_type = other DNA
atgcagcgcctccaggtggtcctaggacacctccgaggaccagccgacagtggatggatgccccaggcagccccttgcctcagcggagctccacaggcgtctgccgccgacgtggtagtggtgcacgggcgacgcacggctatttgtcgggccgggaggggggggttcaaggacacaacccctgatgaactgctctctgctgtgatgaccgcagtgctcaaggacgtgaatttgagacccgagcagcttggcgatatctgcgttggcaacgtcctgcaaccgggcgctggcgccattatggccaggatcgcgcagttcctgtctgatatcccagagacggtgccgctgagcactgtgaaccgacagtgttcctccgggctgcaggccgtcgcatccatcgccggctggtccccatgcccgtggcttaccgaaggaaccctggagattttgctgcgagcctag

SEQ ID NO: 106802 - DNA, 381 bp, synthetic construct
  misc_feature 1..381: note = Description of Artificial Sequence: Synthetic coding sequence
  source 1..381: mol_type = other DNA
atgtccctggccgatcgcggaaaccctggaaatataacaagtcgactcatggagaaggaaaaggcgcgcgattgcctgatccctatgggaattacatcagagaatgtcgctgagcgctttgggataagcagggagaagcaggacacttttgcactggcttcccagcagaaagccgcacgagcgcagagcaaggggtgttttcaggccgagatcgtacctgtcacaactactgtgcacgatgataaaggcaccaaacgctccattaccgtcacgcaggacgagggaattcgcccctccacaaccatggagggacttgccaagctcaagccagcctttaagaaggatggcagcacaactgcaggcgaaactggcccaggatag

SEQ ID NO: 106803 - DNA, 996 bp, synthetic construct
  misc_feature 1..996: note = Description of Artificial Sequence: Synthetic coding sequence
  source 1..996: mol_type = other DNA
atgcagcgactacaggtagtgcttggacacctccggggcccagccgattctggatggatgccccaggccgctccatgcctatccggagccccgcaagccagcgccgcagatgttgttgtggttcacggtcggcgcactgctatatgtcgagctggccgggggggattcaaggatacaacaccagatgagcttctgtccgctgtgatgacggccgtcctgaaagacgtgaatttacggcccgaacaattgggtgatatttgcgtgggaaacgttctccagcctggggccggggccattatggccaggatagctcagttcttgtctgacatacctgagacagtccccctgagcactgtgaatagacagtgcagctccggcctgcaggccgtggcaagcattgcaggaggcatcagaaacggatcctatgatatcggcatggcttgcggaatcaccagtgagaacgtggctgagcgattcggcataagtagggaaaaacaagacacatttgccctggctagccaacagaaggccgctcgggcccaaagtaaaggctgtttccaggctgagattgtacccgtgacgaccaccgtgcacgacgataaaggaaccaagcgctccattacagtaacacaagatgaggggattcgacctagcactaccatggagggtctggccaaactgaaacccgcctttaagaaggacgggtccaccaccgccggactcacagtaagcgacgtagacatctttgaaatcaacgaggcctttgcttcacaggccgcctactgtgtcgaaaagcttcgcttgcctccagagaaagtaaatccactgggaggagctgtcgccctcggccaccccctgggatgcacaggggccagacaggtgatcactctcttaaacgagcttaagagacgaggtaagagagcctatggggtggtgtctatgtgcattggcacagggatgggggccgccgcagtctttgagtaccctggtaattag

SEQ ID NO: 106804 - DNA, 7377 bp, synthetic construct
  misc_feature 1..7377: note = Description of Artificial Sequence: Synthetic coding sequence
  source 1..7377: mol_type = other DNA
atggttcttttactctgtctgtcctgcttaatctttagctgcctgacctttagttggctcaaaatctggggaaagatgaccgacagcaagcccataactaagtctaagtcggaagccaacctcatcccaagccaggaacccttcccagcatccgacaatagcggcgagacaccacagagaaatggcgaaggccacactctgccaaagactccctctcaagccgaacctgcttcccacaaaggtcccaaagacgccggcaggaggaggaactctcttcccccttcccaccagaagcccccccgcaacccattatcaagttctgacgccgcaccttctcctgagttgcaggccaatggcaccggcacccaggggctcgaagcaacagatacgaatggtctgtcctcgtctgctcgcccccagggccagcaggcaggaagcccgtccaaggaggataagaaacaggctaacattaagaggcagctgatgacgaacttcattctgggcagcttcgacgactactccagtgacgaagacagtgtggctggaagctcacgcgaaagcacgcggaaaggctcccgcgcctcactgggcgcccttagcctggaggcctacttgaccaccggtgaagccgagacgagggtcccaacaatgcgtccttccatgagcggccttcacttggtgaagagaggccgcgagcataaaaagctcgacttgcatcgggatttcaccgtggctagcccagcagaatttgtgacgcgattcgggggcgaccgcgtgatcgaaaaggtgctgattgccaataacggaatagcggctgtgaagtgcatgcggtccatccgccgatgggcctatgagatgttcaggaatgaacgtgccattcggtttgtggtaatggtaaccccagaagacctcaaggccaatgctgaatacattaagatggcagaccattacgtcccggtacccgggggaccaaacaataacaattacgcaaatgtggagttaatcgtggacatagccaagcggatacccgtacaagctgtgtgggcagggtggggtcatgcaagtgaaaaccctaaactccccgagcttttatgtaagaatggggttgcatttcttggtcctccatctgaggccatgtgggctttaggcgataaaattgcgtctactgtcgtcgcacaaacattgcaggtgcctacgctcccatggtcaggtagcggcttgactgtcgagtggaccgaggacgacctgcagcaagggaaaaggatttctgttcccgaagacgtgtacgataaagggtgtgtgaaggatgtcgacgaagggcttgaggctgcagagagaataggatttccactcatgatcaaagcgtctgaaggaggcggcgggaagggaataaggaaagctgaaagcgctgaagatttccccattctttttaggcaggtgcagagcgaaatccctggcagtcctatcttccttatgaagctggcgcagcatgccaggcatctggaagttcaaattctggccgaccagtacggcaatgccgtttccctgtttggccgggactgttctatccaacgccgccaccagaaaatcgtcgaagaggcccctgcaacgattgcacctttagcaatcttcgaatttatggagcagtgcgccatccgcttggcaaagacagtgggatacgtttcggcagggacagtggagtacctgtattcccaggatggtagttttcacttcctggagcttaatccacggcttcaggtggagcacccttgcacagagatgattgccgatgtgaacctcccagccgcacagcttcagatagccatgggcgtcccgctgcatcgcctgaaggatatccgactcctgtacggagaatcaccgtggggtgtgactccgatctcattcgagacaccttcgaatcccccacttgccagaggtcatgtgatagctgcacgcattacatccgagaacccagacgaaggctttaaaccaagttccggaacagtgcaagaattgaactttagatcctcaaaaaatgtctggggttacttttccgtggccgccacgggaggtttgcacgagttcgcagattctcagttcgggcactgcttctcctggggtgagaaccgggaggaggctatcagcaacatggtcgtggccctgaaggagctgagtatccggggggactttagaacgaccgtcgagtacctcattaatcttttggaaaccgagtcgttccagaacaatgacattgacaccggctggctggattacctcatcgccgaaaaggtgcaagctgaaaaacctgatataatgctcggggtggtttgtggagctcttaatgtggccgatgctatgtttcggacatgcatgactgacttcctccattctctggagaggggccaggtactgccggccgatagcctgctaaatctggtcgatgtggaactgatctatgggggcgtcaagtacatactgaaagtggctaggcagtcacttaccatgtttgtcctcatcatgaacggctgccacattgagatcgatgcccatcgcctgaatgatggtggcctgctgctgtcctacaatggaaattcttatactacatatatgaaggaggaagtggactcatacagaatcacaataggaaacaagacgtgcgtgttcgaaaaggagaatgatcccactgttctgaggtcgcccagcgctggtaagttaactcaatataccgtggaggatggagggcacgtggaagctgggtcatcttacgctgaaatggaggttatgaaaatgatcatgacactgaacgtacaagagagggggcgcgtgaagtatataaagcgccctggtgctgtattggaggccggctgtgtcgtggcccgcctagagctggacgatccatcaaaggtccaccctgcagaacccttcacgggggagttacctgcccagcagacactgcccatactgggggagaaactgcaccaggtgttccactccgtgctggagaacctcactaatgtgatgtcaggattttgcctacctgagcccgtcttctcaatcaagctgaaggagtgggtgcagaaactgatgatgaccttacggcacccctctcttcccctgctcgagctacaagagatcatgacctctgtggcgggcaggatccctgctcctgtcgaaaaatctgttcggagagtaatggcgcaatacgcttccaatatcacttcagtgctctgccagttcccttcccagcaaatcgccactattctggactgccatgccgctactcttcagagaaaagccgatcgtgaggtattctttatcaatacccagtctatcgttcagttggtgcagcgttacagatctggcatacgcggatatatgaagaccgtcgtgctggacttgctgaggcggtacctgcgcgtggagcaccatttccagcaagctcattacgacaaatgcgttatcaaccttagggagcaatttaagcctgacatgagtcaggtccttgattgcattttctctcatgcccaagtcgctaaaaaaaatcagttagtgatcatgctgatcgatgaactctgtgggccggacccttccctctccgatgaactgatcagcattctgaacgagttaacccagttatctaaaagtgagcattgtaaggtggccctgagagccagacaaatcctgatcgcctcccatctgccctcctatgaactgagacacaaccaggtcgagtcgatctttctgagtgccattgacatgtatgggcatcagttttgtcctgagaatttaaagaagctgatactttcagaaaccacaatatttgacgtccttccgactttcttctatcacgccaataaggtggtgtgcatggcttctctcgaggtttacgttagaagagggtatatagcctacgaactaaattccctccaacaccgccagttgcctgacggaacttgcgtggttgagttccaattcatgctgcctagctcacaccctaaccgcatgactgttccgatcagtataaccaaccctgacctgcttcggcattccactgaactgtttatggattccggcttttcacctctctgccagaggatgggcgcaatggtcgcattcaggcgttttgaagacttcacccggaattttgacgaggttatctcatgttttgctaatgtccctaaggacactccactcttttccgaggcacgaacctcgctttattccgaggacgattgcaagagtttgcgggaggagcccatccatatcttaaatgttagcattcagtgcgctgaccacctcgaggacgaagcactggtccctatcctgaggacttttgttcaaagtaagaagaacattttagtcgactatggacttcggaggatcacgttcctcatagcgcaggagaaggaatttcctaaattcttcacttttcgagctcgcgacgaattcgccgaagaccggatatacaggcacctcgaaccagccctggcatttcagctagagttgaaccgcatgcgaaatttcgacttgactgctgttccgtgtgctaatcacaagatgcacctctatctcggtgctgcaaaggtgaaagaaggcgtggaggtgacagatcacaggttcttcatacgtgccatcatccgccacagtgatttaataacaaaggaggcaagcttcgaatacctccagaacgagggagagagactgctgctcgaagcgatggacgagctcgaggtggccttcaacaatacatccgtgaggactgactgtaaccatatttttctgaatttcgtgcctacagtgatcatggacccttttaagatcgaagagagcgtgcggtacatggtaatgcggtacggttctaggctatggaaactgagggtgcttcaggcagaggtgaaaatcaacattaggcagacaaccacgggatccgcagtccccatccgcctgttcatcactaatgaaagcggctattacctcgatatcagcctctacaaggaagtgaccgactcacgatccggtaacattatgttccattcctttggtaataagcaaggacctcagcacggcatgcttattaatacaccatatgtaacgaaggaccttctgcaggccaaaagattccaagctcagacactcggtacaacctatatctacgattttcccgaaatgttccgacaagccctattcaagctatggggaagcccagataagtatcccaaggacattttaacttacactgagctggtgctcgatagccaggggcagttagtcgagatgaatagattgcctggtggaaatgaggtgggcatggtggcgttcaaaatgcggtttaaaactcaagagtacccagagggtcgagatgtaattgttatcggcaatgacatcacattccgtattgggagctttggacccggggaggatttactgtatttgagagcatctgagatggcccgagctgaagggatccccaaaatctacgtcgctgctaacagcggagccaggatcggcatggctgaagagataaaacacatgtttcatgtggcgtgggtagatccggaagaccctcacaaaggcttcaagtatctctatctcacacctcaggattacacgcgtatctcatccctaaactccgtgcattgcaagcacatagaagagggcggagagtctcgatacatgatcaccgatataatcggaaaggacgatgggctgggcgtggaaaatctgcgcggcagcggcatgatcgctggagagagtagcctggcttacgaagaaatcgtgacgatatcgctggttacctgccgcgccatcggcatcggcgcatacctcgttcgcctgggtcagagagtcatccaggtcgaaaattcccacatcatccttactggggcctcggcactgaataaagtgctaggacgtgaggtatacacgtccaacaatcagctcggtggggtgcagatcatgcactataacggagtgtcacatattactgtgcccgatgactttgagggggtatacacgattttggaatggttatcctacatgccaaaggacaaccactctccggtaccgatcatcacgcctacagatccaatcgatagggagatcgagtttctgccctcccgtgcaccatatgacccacggtggatgttagccggccgtcctcaccccacactgaagggtacttggcagtccgggttcttcgaccatggttcatttaaagagatcatggcaccttgggcccagaccgtagtcacgggccgggcccgcctaggcggaattccagtaggtgttatcgccgtagaaacacgaacggttgaagtggccgtccccgccgaccccgccaacttggatagcgaggccaaaatcatacagcaggccggccaggtatggttcccagactctgcttacaagaccgcacaggccgtgaaagacttcaatcgcgagaagttacccttgatgatcttcgccaattggcgaggcttctccggagggatgaaagatatgtatgatcaagtgctgaaatttggtgcttacatcgtggacggactacggcaatacaagcagccaattttgatatacatcccgccttatgccgagctgaggggcgggtcctgggtggtaatagacgccaccattaaccctctctgtatcgaaatgtatgcggacaaagagagccgggggggggttctcgaacccgagggcaccgtagagattaaatttagaaaaaaagacctgattaagtctatgagacgcattgaccccgcctataagaaacttatggagcagctcggagaacccgatctgtccgacaaggatcggaaggaccttgagggacgccttaaagcccgggaggacctgctgctgcccatttatcaccaggtagccgtccagttcgccgacttccacgatacgccaggcagaatgcttgaaaagggagtgatctcagatatcttggagtggaagactgctcgaaccttcctctactggcgcctcaggcggttactgctggaggatcaggtgaagcaagagatcctgcaagcaagtggtgaactctcacacgtacacatccagtccatgctcaggcggtggtttgtagaaaccgagggagctgtgaaggcttatctgtgggataataatcaggtagtcgtccagtggctggaacagcactggcaggcaggggacggaccaagaagcaccattcgggaaaacattacctatctcaagcacgacagcgtgctcaaaaccatccgcggtctggtggaagaaaatcctgaagtagccgtggactgcgtgatctacctgagccaacatatctcccccgccgagcgcgcccaagtggttcatctgcttagcaccatggactccccggcctcgacctag

SEQ ID NO: 106805 - DNA, 7377 bp, synthetic construct
  misc_feature 1..7377: note = Description of Artificial Sequence: Synthetic coding sequence
  source 1..7377: mol_type = other DNA
atggtgctcctgttgtgcctgtcgtgcctaatcttctcttgtctcacctttagttggttgaaaatctgggggaagatgacggatagtaaacccattactaagtccaagtcggaggccaacctcattccatctcaagaaccattccctgctagtgacaattccggtgagaccccccaacgcaacggtgaaggtcacacgctcccaaaaactcccagccaggctgagccagcctctcataaggggcccaaggacgctggaagaagaaggaatagtctgccacccagtcaccagaagccacctcgaaaccccttgagcagctcggatgccgctccttcacccgagctgcaagcaaacgggacagggacacaggggctggaggctacagacacgaacgggctctctagttctgctagaccccaaggacagcaggcgggttcaccatccaaagaagataaaaaacaggcaaatattaaacgccagctgatgacgaacttcattctcggaagcttcgacgactactcgtccgatgaagatagcgtcgccgggtctagtagggaatcaacccgtaaggggagtagggctagcttgggagccctctcccttgaagcttacttaactaccggcgaggcagagactcgtgtgccgaccatgcgcccatccatgagcgggcttcacctggtcaaaaggggccgagagcataaaaagctggatttacaccgcgacttcactgtggcgtctcctgccgagtttgtcactaggttcgggggggacagagtgattgaaaaggtactgatcgccaacaacggcatcgccgctgtgaaatgtatgagatcaattagaagatgggcgtacgagatgtttaggaatgagcgcgcaataaggtttgtggtgatggtgactcccgaggacttgaaagccaatgcagagtacattaaaatggctgatcactatgtgcccgttcccggaggacctaacaacaacaactacgccaacgtggaactgatcgtcgatatagcaaagagaatcccagttcaggctgtgtgggcaggttggggccatgccagtgaaaaccccaagctaccggaactcctctgtaagaatggggtggcttttcttggacctcctagtgaagctatgtgggcgctcggcgataaaatcgcctccacagtggtcgctcagactttgcaggtaccaactctgccatggtctgggagcgggctcactgtcgaatggacagaggatgatctccaacagggcaaaagaattagcgtcccagaagacgtatacgataaagggtgtgttaaagacgttgacgaggggctggaggccgccgagcgcatcggatttcccttaatgatcaaggcgtccgagggggggggaggaaagggaatcaggaaggctgagagtgccgaagactttccaatcctgttcagacaagtacagagtgagattccgggaagccctatctttttgatgaagctggcacagcacgcacgacatctggaggttcagattctggcggaccagtacggcaatgccgtgtcgctctttggacgtgattgtagcatacagcgccgccaccagaagattgtggaagaggcaccagctactatcgccccattggcaatatttgagtttatggaacagtgcgcgatcagactggcaaagacagttggctacgtatcagcaggaactgtcgagtacctctattcccaggacggatcttttcatttcctggaactaaaccccagattgcaagtggaacatccttgcacggaaatgattgctgacgtgaatctcccagcagcccagctccagatcgcaatgggggtccccctccataggctaaaagatataagactcctatacggcgagagtccatggggcgtgactcccatttctttcgagactccatccaaccctcccttggcccgggggcatgtgattgcagctcgaatcactagcgaaaaccccgatgagggttttaaaccgtcctccggcaccgttcaggagctgaacttccgttcatcaaagaatgtgtggggatactttagtgtagcagcaactggaggattgcatgagttcgcggacagtcagttcggccactgcttctcctggggcgagaatcgcgaggaggccatatccaatatggtcgtcgctctaaaggagctcagcataaggggagattttcgaacaacggttgaatacctcattaatctgctagagacagagtccttccagaacaacgacatcgataccgggtggctggattatctcatcgctgagaaagtccaggcggagaagccagacattatgctgggagtggtctgtggggcgctgaacgtggcggacgccatgttccgcacctgtatgaccgacttcctccattcactcgaacgaggacaagtgcttccagcagattccctgttaaatctggttgatgtcgaactgatctacggcggtgtgaaatatatcctgaaagtggcgcggcaatcattgactatgttcgttctgatcatgaatggctgccatattgagattgatgcccatcgactcaacgatggcgggctgttgttgtcttacaacgggaatagttacacgacctatatgaaggaggaagtggacagttatcgtattaccatcggtaacaagacctgcgtgtttgaaaaggagaacgaccctactgtgcttagatccccctcagcagggaaactgacccagtacacagttgaagatggaggccacgtggaggccggcagcagctatgcggaaatggaagtaatgaaaatgatcatgaccctgaatgttcaggaacgtggaagggtcaagtacataaaaaggccaggagctgtgctggaggccggatgcgtggtggccaggttggagctcgatgatccctccaaagtgcatcccgcagaaccgtttacgggggagctgcccgcccagcaaactctcccgatcttaggcgaaaagctgcatcaagttttccactcagtactggaaaatttgacgaacgttatgtccggcttttgcctccccgaaccagtattttccattaagttgaaggaatgggtgcagaagttaatgatgaccttacgtcacccgtcactaccactactggagcttcaggagatcatgacctcagtggccggacgaatcccagctcctgtggagaagagtgtccggcgtgtgatggcacagtatgcaagcaatatcacctctgttctttgccaattccctagccagcagatcgccacaatccttgactgccatgcagccaccctgcaacgaaaggccgatcgagaggtcttttttatcaatacccagagcatagtgcagttggtgcaacggtaccgatcgggaattcggggctatatgaaaacggtggtgctggacctcctgcggagatatctgcgcgtggaacatcatttccagcaagctcactacgacaagtgtgtcatcaatctgcgcgagcaattcaaacctgacatgagccaagtgctggactgcatattctcccatgcccaggtcgccaaaaagaaccagttggttattatgctcatcgatgagctctgtggccctgacccttctctatctgacgagttgatatctatcctgaatgagctcactcaactgtccaaatccgagcattgcaaggttgccctgcgcgcgcgccagatcttgattgcctcccatctgccaagttatgagttgcgacacaaccaggtagaatcgatctttctgtctgctattgacatgtatggccaccagttttgtcccgaaaacttaaagaaattaatcctgtctgaaaccactatattcgacgtattgccaacattcttttaccacgccaacaaggtggtgtgcatggccagtctggaggtatacgttagaaggggctacatcgcgtatgagttgaatagtctgcaacaccgacaacttccggacggtacctgtgtcgtggagtttcagttcatgctgccctcaagtcatcctaatcgtatgaccgtccccatttctattactaacccagatctgctgcggcattccaccgaactctttatggattcaggcttctcaccactttgccagcggatgggtgctatggtagcatttaggcggttcgaagacttcacgaggaattttgatgaggttatctcttgcttcgctaatgttcctaaagacacaccacttttctctgaggctcgtaccagcctgtattctgaggacgactgcaaaagtttacgcgaggaacccatacacatcctgaacgtgtcaatccagtgtgccgaccacttggaggacgaagccctggttcccatcctccgaacttttgttcaatctaagaagaatatactcgtagattacggcttacgtcggatcacattcctcatcgctcaggagaaagagttccccaaattcttcaccttcagggccagggacgaattcgcggaggatcgaatttatcggcaccttgaaccagccctggccttccagcttgagctgaaccgtatgagaaatttcgatttaactgctgtcccatgcgccaaccacaaaatgcacctgtatttaggtgccgcgaaggtgaaagaaggcgtggaagtgacagaccaccgattctttatcagagccataatccggcatagcgatctgatcaccaaggaggccagcttcgaataccttcagaacgagggagagagacttctgctggaggctatggacgaactggaggtggctttcaacaatacctccgtgagaacagactgtaatcacatcttccttaactttgttcctaccgtcattatggacccgtttaagattgaggaatctgttcgctatatggtaatgagatatggttcacgcctctggaaactgagggttctccaggctgaagtgaagattaatatacggcagactaccaccgggtcagcagtcccaatccgactctttattacaaacgagtccggctactatcttgacatcagcctctacaaagaggttacggatagccgttcaggcaatattatgtttcattcctttggcaacaagcagggcccacaacacggcatgctaatcaatacgccctatgtgaccaaagatctgctgcaggcaaaacgctttcaggcacagaccctgggcaccacctacatatacgactttcctgaaatgttccggcaggccctgttcaaactgtgggggagccccgataaataccccaaggatattctcacctatactgagctggtgctggacagccagggacaactggtggaaatgaacagattgcctggcgggaatgaggttgggatggtggccttcaaaatgcggtttaagactcaggaatatccggaagggcgggatgtcatcgttattgggaatgacattaccttccggattggctccttcggacccggggaggacctgctctatctccgggcctcagaaatggctcgggcagaggggatccctaagatttacgtggctgctaacagcggggcccggatcggaatggctgaggagatcaagcacatgtttcacgtggcctgggttgaccctgaggatccccataaaggcttcaagtatctgtacctcaccccccaggactacacgcgcatctccagcctaaacagcgtccattgcaagcacatcgaagagggaggggaaagcaggtatatgattacagatataattgggaaagatgacgggctcggggttgagaatctgcgcgggtctggaatgattgcaggcgagtcatcgctcgcttacgaagaaatagtgacgatttcactggtgacctgtagagccattggaatcggtgcctatttggtcaggctgggtcaaagggtgatccaagtggaaaatagccacatcatactgaccggagcctccgcattaaataaggtgctggggcgcgaagtgtatacctctaacaatcagctagggggcgttcagataatgcactacaatggcgtaagccatattaccgttcctgatgactttgagggagtgtacacaatactggaatggctgtcgtacatgccaaaggataatcactcaccagtgcctattatcactcctactgacccaatagaccgcgagatcgagttccttccttctagggctccatacgatccacgctggatgctcgctgggcggcctcaccccactctaaaaggcacatggcagtccggcttcttcgaccacgggtcttttaaagaaattatggccccctgggcacagactgtggtaacaggacgcgctcgcttgggcgggattcctgtaggagtaattgcagttgagacacgtacagttgaggtagccgtgccagccgatccggcaaatcttgatagcgaggctaagataattcagcaggccggccaagtttggttcccagacagcgcatacaaaaccgcccaggccgtgaaggacttcaatcgtgaaaagctacccctgatgatttttgcaaattggcggggatttagcggcggaatgaaggatatgtatgaccaagtgttgaaattcggtgcctacatcgttgacggactacgtcagtacaagcaaccaattctgatctatataccaccctatgccgaactgaggggtgggtcctgggtggtgattgacgccactataaatccactttgcatcgagatgtatgccgacaaggagtctagagggggggttctagagcctgaaggaactgttgagattaagttccgtaaaaaggatctcattaagtccatgaggaggatcgatccagcctacaagaaactcatggaacagttgggagagcccgacctcagcgataaggatagaaaggacctcgagggacgccttaaagcaagagaggatctactgctgccaatctatcatcaggtggcagttcagtttgctgattttcatgatactccaggtcgcatgttagaaaagggggtcatttctgacatcctggagtggaaaactgcccgcaccttcctgtactggcggttacgacgtttgctcctcgaggaccaggtcaagcaggaaattttacaggccagtggcgagctgagtcatgtccacattcaatctatgctccgaagatggttcgtggaaaccgaaggggccgttaaggcttacttgtgggataataaccaggtagtcgttcaatggcttgagcagcactggcaagccggggatgggcctcggtcaaccatcagggagaatatcacttatcttaaacatgactctgtcttgaaaactattcgcgggcttgttgaagaaaatcctgaagtggctgtggattgtgtgatatacctctcccaacacatctccccagcagagagagcgcaagtggttcacctactttccaccatggattcgccagcgtccacctag

SEQ ID NO: 106806 - DNA, 7167 bp, synthetic construct
  misc_feature 1..7167: note = Description of Artificial Sequence: Synthetic coding sequence
  source 1..7167: mol_type = other DNA
atggtccttttactctgtctgtcttgcctcatcttttcttgcttaactttttcttggctgaagatttggggtaagatgaccgactcgaagcccattacaaaatcgaagtctgaagcaaatctgattcctagtcaagagccgtttcccgcttctgacaactcaggcgagacccctcaacgcaacggagaggggcatacactgcctaagacaccatcccaggccgaacccgcttctcataagggccctaaggacgctggcaggcggagaaactcattgcctccatctcatcaaaagccccctcgtaacccgctctcctcctccgacgcagctcctagcccggaactccaggcaaatggcaccggtacccaagggctcgaagcgacggacaccaacggactctccagctctgcgcggccacagggccagcaggctggtagtccatcgaaagaggacaagaagcaggctaatatcaaaaggcaactcatgactaatttcatcctgggcagtttcgatgactactcctccgatgaggatagtgtcgctggatcttcccgcgagtctacccgtaagggatcaagagcctctctgggcgctctatccctagaagcctacttgaccaccggagaagcagagacaagagtgccgactatgagaccttctatgagtggcttacacctcgttaaacgcgggcgggaacacaagaaactcgacttgcatcgtgatttcacagtggcctcccccgctgaattcgttacccgtttcggcggggatcgtgtgattgaaaaagtactgatcgcgaacaatggaatcgcggccgtgaaatgcatgaggtctatccgccgctgggcttacgagatgttcagaaacgaacgggccattagattcgtcgtgatggtgaccccggaagaccttaaagctaacgcagaatacatcaagatggcggatcattacgttccagtacccggggggccaaacaataacaattatgcaaacgtagagcttatagtggatatcgcaaagcggattcccgtccaagccgtctgggctggctggggacacgctagcgaaaatcctaagctgcctgaactattgtgcaaaaatggggtcgcgttcctgggcccgcccagcgaagctatgtgggccctcggagacaagattgcttctactgtggtcgctcagacactgcaggtacccactctgccctggagcgggagcggtcttaccgtagaatggacagaggacgatttacagcagggtaagcggatttctgtgcctgaagacgtgtatgacaaaggctgtgttaaggatgttgacgaaggcctcgaggccgcagagaggatcgggtttcctctaatgataaaagctagtgagggaggtggcgggaagggaatccgcaaggcagaaagtgctgaggacttcccaattctgttccgccaagtccagtccgagatccccggctcccccattttcctaatgaagctggcccagcacgcccgccaccttgaggttcaaatccttgcagaccagtatggaaacgccgtatcactcttcgggagagattgttccatccagagaagacaccagaagatcgtggaggaggcacctgccactattgcccctctggcaatttttgagttcatggagcagtgtgcgatcagactcgccaaaaccgtggggtacgtgtcagccggaactgtcgagtatctgtacagccaggatggctctttccatttcctggaactcaaccctcgtctccaagtcgaacatccctgtacagaaatgatcgcagacgtaaatttgccagccgcacaacttcaaatcgcaatgggagtgcccctccacaggctgaaggatatccgactgctgtacggcgagagcccttggggtgttacccctatctctttcgaaacaccatcaaaccccccactggctaggggacacgtgatagctgcaaggatcacaagcgagaatcccgacgagggattcaagcccagtagcggaaccgtccaggagctcaactttcgatctagtaagaacgtttggggctacttctccgtcgccgctactggaggcttgcatgagtttgctgatagccagttcggacactgcttcagttggggtgaaaacagagaggaagccatttccaatatggtggtagctctcaaggagctgtcgatccgaggggactttcgcactactgtggaatatctcattaacctgctggagacagagtctttccaaaacaatgatatagacactggctggctggattatctcatcgctgagaaggtccaggcagagaagcctgacattatgctcggcgtggtttgcggagccctgaatgtggctgatgccatgtttagaacctgcatgacggatttcctccactccctggagcgaggacaggtgctgcctgcagactcacttctgaacctagtcgacgtggagcttatatatggaggcgtcaagtatatactgaaggtggcgcgccagtcgctcacaatgtttgtgctgattatgaatggctgtcatatcgagatcgatgctcacaggcttaatgatggcgggcttcttctttcctacaatgggaacagttacacgacatatatgaaagaggaggtggactcataccgcattaccatcgggaacaaaacctgcgtatttgaaaaggaaaacgacccaacagtgctacgttccccttcggcaggaaaacttactcaatatactgtcgaggacggtggtcacgtagaggctgggtcctcttacgctgagatggaagtgatgaagatgattatgacattaaatgttcaggagagggggagagtgaaatacatcaaacggcctggcgccgtgctcgaggccgggtgtgtggttgctagactggagttggacgacccatccaaagttcacccggctgagccgtttactggggaattgcctgctcagcagactctccctatcctcggcgagaagttacaccaagtgtttcactctgtgctcgaaaatctgactaatgtgatgtcaggtttctgtctgcctgaaccagtgttcagcataaagctgaaggagtgggtgcagaaactgatgatgaccttgaggcaccccagtctgcctcttcttgaactgcaggagatcatgacctccgttgccggtagaattccagcccccgttgagaagagcgtgcggcgggtgatggctcagtacgcatctaacattactagcgtgctctgccagttccccagccagcagattgcgacgatcttagattgccatgcagcaaccctacagaggaaggcagaccgtgaagtgttcttcattaatacacagtcaattgtgcagctcgttcaatccaaggatgaactgtgcggtcccgatccttccttatctgacgaactcatcagcatactgaacgaacttacacaactctctaagagtgagcactgcaaggtagcactcagggcaagacaaatccttatagcaagtcaccttccttcctacgaactacgccacaatcaggttgaatctatttttctctcagccatagatatgtacgggcaccagttctgccctgagaatctgaaaaaactgattctatccgaaacaaccatcttcgacgtcctgcccaccttcttttaccatgccaacaaagtggtgtgcatggcaagcttagaagtgtatgttagacgcgggtatatagcatatgagctcaatagtctgcagcatagacagctgcccgatggaacctgtgtggttgagttccaattcatgctaccaagcagtcatccaaatcgtatgaccgtacccatcagcatcacgaaccccgatctgctgcgccactcgacggagctctttatggatagcggattcagccctttgtgccagcgcatgggcgcgatggtcgccttccgacgtttcgaagattttactaggaattttgacgaggtgatttcctgcttcgccaatgtccccaaagatacacccctcttctctgaagctcgaacatcgctgtactccgaggatgactgcaagagcctaagggaagagcctatccatatactgaatgtgtccatccaatgtgccgatcacttagaggacgaggcactggtccctatacttagaacatttgtccagagtaagaaaaatatactcgtggattacgggctgagacgcatcactttcctgattgcccaggagaaagagtttcccaaattctttacctttagagcccgagacgaatttgccgaggatcgcatttaccggcacttggaaccagccctggcatttcagctggaactgaaccgaatgcgtaattttgatcttaccgccgtgccttgtgctaaccacaagatgcacctatacctaggcgctgctaaagtgaaggagggcgtggaagttaccgatcatcgtttcttcatccgcgccatcatacggcactcggatctgattacgaaggaagcgtcctttgaatacctgcagaacgagggggaaaggctgctgttggaggccatggatgagttggaggtcgctttcaacaatacatccgtgagaaccgactgcaaccacattttcctgaatttcgtgcctacggtcattatggacccttttaagattgaggaaagcgtgaggtacatggtaatgagatacgggagcagactgtggaagctgagagtcctccaagcggaagtaaagatcaatatccgccagaccaccaccggctcggcggtgccgattaggctgttcatcactaatgagagcggatactacttggacatctctctgtataaagaggtcaccgatagtcgttcgggtaatatcatgtttcatagtttcggcaacaagcaaggcccacagcatggcatgctgatcaacaccccatatgtcactaaagacctcctacaagcaaaaagattccaggcccaaaccctggggactacctatatctacgacttccctgagatgtttcggcaggcactgtttaagctatggggctctccagacaagtatcccaaggatattttgacttatacagaattggtgcttgatagtcagggacagttggtggaaatgaatcgcttaccggggggtaacgaggtggggatggttgccttcaagatgcgcttcaaaacacaggagtaccctgaggggcgcgacgtaattgtgattggtaacgacatcacatttcgcataggaagcttcggaccaggcgaggacttgctctacctgcgggccagcgagatggcaagggcagagggaattcctaaaatctacgtcgctgctaacagtggagcacgcattggaatggcggaagagataaaacatatgttccatgtggcctgggtcgatccagaggatccacataaggggttcaagtatttgtacttgacccctcaggactacacacgtatttccagcttgaactccgtgcactgcaaacacatcgaagagggcggcgagtcccggtacatgattaccgacatcatcggcaaagacgatgggctgggcgttgagaatcttcgggggtcaggaatgatagcgggagagtcctccttggcttacgaggaaatagtcaccatctccctcgtgacctgcagggcaatcgggatcggcgcctatctcgtgcggcttggccagcgggtgatccaagtagaaaacagtcatatcatcctcacaggagccagtgcgcttaataaggttctgggacgggaagtctatacctccaataatcaattgggtggagtccagatcatgcactataatggggtcagtcacatcacagtgcccgatgacttcgagggggtatatacaatactggagtggctgtcctatatgcccaaggacaatcacagccccgttcctattatcaccccaacagaccctattgatcgcgaaatcgaatttctgccttctcgcgcaccctatgacccccggtggatgcttgcaggacgcccacacccaaccctcaagggaacttggcagtccggattctttgaccatggctcctttaaagaaataatggccccctgggctcaaacggtagtgactggacgggccagattagggggaataccggtgggggtcatcgcggtcgaaacccgaacagtggaagtggcagtgccggctgatccagccaatcttgatagtgaggcaaaaattatccagcaggccggccaggtttggtttcccgactctgcatacaagaccgctcaggcagtcaaggatttcaacagagagaaacttccactgatgatctttgctaattggcgcggattttcagggggaatgaaggatatgtatgaccaggtcctcaagttcggggcctacatcgttgacggcctgcgacagtacaagcagcctattctgatttatatacccccttacgctgagttgcgtggggggagttgggtggtgatcgatgccacaataaacccgctgtgcattgagatgtacgctgacaaggagagtaggggaggtgttctggaacccgagggaaccgtcgagattaaattccgcaagaaagacctgataaaatctatgagaaggattgatcccgcctacaaaaagctgatggagcagcttggcgaacctgatctgagcgacaaggataggaaagacctcgagggcaggctaaaagcccgcgaagatctgttgctccctatttaccatcaggtagctgtccagtttgctgattttcacgacacccccggccgtatgctggagaagggagttatctcagatatcctggagtggaaaacagcccgaacatttctgtattggcggctcaggaggctgttgcttgaagatcaggtgaagcaggaaattttgcaagcaagcggagagctttcacacgtgcatattcagtcaatgcttcgccgctggttcgttgaaaccgagggtgctgttaaggcctatctgtgggacaataaccaggtggtggtgcagtggctggagcagcactggcaggctggtgacggtcccaggtctacgattagggagaacataacttacctaaaacacgatagcgtgcttaaaacaatcaggggcctggtggaggagaatccagaggtggccgttgattgcgtcatctacttgtcgcagcacatctccccagccgagagagcgcaggtggtgcaccttctcagtactatggactctccagctagtacgtag

SEQ ID NO: 106807 - DNA, 5070 bp, synthetic construct
  misc_feature 1..5070: note = Description of Artificial Sequence: Synthetic coding sequence
  source 1..5070: mol_type = other DNA
cttccattcctcctcaagccaccacagacactgccaagtcccgacgcgatgtttaggacgtgtatgaccgattttctgcactctctagagaggggtcaagtcctccctgccgatagcttgctcaatctcgtggatgtggagcttatttacggaggtgtaaaatatattctcaaagtcgcaagacaaagcctgactatgtttgtgctcatcatgaatgggtgccacatagaaattgatgcgcaccggttgaatgacgggggcctgctgctatcttacaatggaaacagttatactacgtatatgaaggaggaagtggacagttacagaattactatcgggaacaagacttgcgtgtttgagaaggagaatgaccctacagtgctgaggtcccccagcgcaggcaaacttacacagtacaccgtagaggatgggggacacgtggaggcaggttcttcctatgcagaaatggaagtgatgaaaatgattatgacattaaatgttcaggagcggggccgggtgaagtacatcaagcggccaggggccgtgctagaggctggatgcgtggtggcccggctggagctagatgaccctagtaaggtccaccccgctgaacccttcactggtgaactgccagcccagcaaacactcccaattctcggggagaaattacaccaggtgttccactccgtccttgagaacctgacaaacgtgatgtcagggttttgcttgcccgagcctgtatttagtattaagctgaaggagtgggtgcaaaaacttatgatgaccctgaggcaccctagcctgcctttgctggaactgcaggaaatcatgacatccgtcgcgggaagaatcccagctccggtggagaaatcagtgcgcagagtgatggcccagtacgctagcaacatcacctctgtcctctgtcagttcccctcccaacagattgcaacaatattagactgccacgctgccacattgcaacgcaaggccgaccgagaagtgtttttcatcaacacccagtccatcgtccagctggtgcagagatataggagcgggatccgcggatatatgaagactgtcgtgctggatttgctgcgacgatatctgcgtgtcgaacaccattttcagcaagctcattatgataaatgcgtgatcaatctccgagaacagttcaaaccagacatgtctcaggttctggactgtattttttctcacgcacaggtggcaaagaagaatcaactggtcatcatgttgatcgacgagctgtgcgggccggacccttcgttaagtgacgagctgattagcatcctgaacgaactgactcagctgagtaaatccgagcactgtaaagttgctctgcgggcgaggcagatcttaatcgcctcccacttgccgagttacgagctacggcataaccaagttgagtctatttttctctccgccatcgacatgtatggccaccaattctgtcctgaaaatctgaagaagcttatcctgagtgaaacgactatcttcgacgtgttgcccactttcttttaccatgccaacaaagttgtctgtatggcttccctcgaagtgtacgtgagacgtggctacatcgcttacgaactgaacagtctgcagcaccgccagctccccgatgggacatgcgttgtggaattccagttcatgctccctagctcacatccaaatcggatgaccgtgcccatatcaataaccaacccagatctcctgcgccactctaccgaactctttatggactccggctttagccccctgtgccagcgaatgggagctatggtggccttccggcgatttgaggactttaccagaaatttcgatgaggttatttcttgcttcgctaatgtgccaaaggatacaccactgttttcagaagcccgcacctccctttacagtgaggatgattgcaaaagtctaagagaagagccaatccacattctgaacgttagcattcaatgtgccgatcacttggaagatgaggcactagtccccatcctgcgcacctttgtacagagtaaaaaaaatatcctagtcgattacgggctacggaggattacctttctgatagcgcaagagaaagagttccctaagttctttacgttccgcgcacgagacgaatttgcggaagataggatatatcgtcacctggagccagccctggccttccaattagagcttaataggatgcggaattttgatttaaccgctgtgccttgcgccaaccacaaaatgcacctctacttgggtgctgccaaggtcaaagagggtgttgaggtaactgaccatcgcttcttcattcgggccatcatccgccacagtgacctcattaccaaggaggcaagcttcgaatacctccagaatgagggcgagcggctcctcctagaggcaatggatgagctggaagtggcatttaacaatacctccgtccgcacagattgcaaccatatctttttaaacttcgtgccaaccgtaatcatggacccattcaagatcgaagaatctgttcggtacatggtcatgcgttatgggagccggttgtggaaattgcgagtgctgcaagccgaagttaaaataaacattagacagacaacaaccgggagtgccgtcccaatacggctgtttattaccaatgagtccggctactatcttgacatttccctgtataaggaggtgactgattctcgtagcggcaatattatgtttcatagctttggcaataagcagggccctcagcatgggatgcttataaacacgccatacgtcacgaaagatctgttacaggccaagaggtttcaggctcagacattaggcactacatatatatatgacttcccagaaatgtttcggcaggccttgttcaagttgtggggttcaccagataagtaccctaaagacatcttaacctacaccgagctggtcctcgacagtcaaggacagcttgtggagatgaaccggctccccgggggtaatgaagtcggaatggtagccttcaaaatgcgctttaagactcaggagtacccagaggggcgtgatgtaatagtgattggtaatgatattacctttcgcattggcagttttggcccgggagaagatctgctctatttgcgtgcaagtgaaatggcgcgagctgaaggcatcccaaagatctacgtggcggcaaattcaggtgctagaatcggaatggctgaagagattaaacacatgtttcatgttgcatgggtcgatcccgaggacccacataaagggttcaaatacctgtatctgacaccacaagattatactcgcatcagcagtctgaactctgtacattgtaagcatatcgaggagggaggagagtcacggtacatgattacggatattataggcaaggatgacggacttggggtcgagaacctgagaggcagcgggatgatcgcgggcgagagtagcttagcttacgaagagattgtgaccatctctcttgtaacctgtcgtgccatcggcatcggcgcatatcttgtccgcctgggccagagggtaattcaagtggaaaactcccatatcatcttgactggagcaagcgctctgaacaaggtgctcggtcgcgaggtgtatactagcaataatcagctgggcggcgtgcagatcatgcactataatggggtcagtcatatcaccgtgccggatgactttgagggtgtctatacaatactggagtggctctcctatatgcccaaggacaaccactcaccagtacccatcatcacaccaaccgaccccatcgacagagaaattgaatttttaccttcaagagccccatatgatcctaggtggatgcttgcgggcagaccccatcctacgctgaagggcacctggcagtcgggctttttcgatcatggctcattcaaggaaataatggcaccatgggctcagaccgtcgttactggcagagcccggttgggggggatacccgtgggagtgatcgcagttgaaaccagaaccgtggaggttgctgtgcctgctgatcccgcaaacttggactctgaggctaaaattattcagcaggccggccaggtttggttccccgatagcgcttacaagacggcccaggccgtgaaggattttaatcgagaaaaattgccattgatgatattcgctaactggaggggcttttctggcggcatgaaagacatgtatgatcaggtgctgaagttcggggcttatattgttgatggactgcgacagtacaagcagccaatcttgatctacatccctccttatgccgagctaaggggaggatcctgggtagtaattgacgcaacgatcaatcctctttgcattgagatgtatgctgacaaggagtccagagggggtgtcttagagcccgagggcacagtggaaataaagttcagaaagaaagacctgattaagtccatgagaagaatagatcccgcatataaaaaactaatggaacagctcggggagcctgacctgtcagataaggaccggaaggatctggaggggagacttaaggcccgggaagatctgttgctacccatttatcaccaggtcgcagttcagtttgctgacttccacgacacacccggccgcatgctcgaaaagggcgtgattagcgatattcttgagtggaagacggctcgaaccttcctctactggagactgagaaggttgctgctagaagatcaagtgaagcaagaaatcctccaggcttctggcgaactaagtcatgtccatatccagagtatgctgcggagatggttcgtggagacagagggcgcagtaaaggcttacctgtgggacaataatcaggtggtggttcaatggcttgaacagcactggcaagcgggagacgggccgcgtagtaccatcagggaaaacattacctatttgaagcacgactccgttctgaaaacaatccgtggcctggtagaagagaaccccgaagtggccgtggattgcgtgatttacctgtctcagcatatctcaccagcagagcgcgcccaggtcgtgcatctgctgagcacaatggattcaccagcgagcacttag

SEQ ID NO: 106808 - DNA, 432 bp, synthetic construct
  misc_feature 1..432: note = Description of Artificial Sequence: Synthetic coding sequence
  source 1..432: mol_type = other DNA
atgacagatagtaaacctatcacaaagtccaagtccgaagctaaccttatcccctcccaggagcccttccccgccagtgataatagtggagagaccccgcagcgcaatggggagggacatactctgcccaagaccccgagtcaagcagagccggcttcccataaaggcccgaaagacgccggtaggcgccgcaatagtcttccaccttctcatcagaaaccccctaggaatcccctgtccagcagcgacgctgcacccagtccagagctccaggcaaacggtacaggtactcaaggcctggaagccactgacaccaatgggttatcatcgtccgccaggccacaggggcaacaggcgggtagcccttctaaagaggacaaaaaacaggcgaacatcaagcgccagctcatgacgaactttatccttggctag

SEQ ID NO: 106809 - DNA, 2577 bp, synthetic construct
  misc_feature 1..2577: note = Description of Artificial Sequence: Synthetic coding sequence
  source 1..2577: mol_type = other DNA
atgacagttcccatatctatcactaatccggatctgctcaggcattctactgaattgttcatggattcaggatttagccctctgtgccagcgaatgggggccatggtcgccttccggagattcgaagactttacgcgcaatttcgacgaggtcattagctgtttcgcgaatgtgcccaaggatactccgttgttttctgaggctcgtacttcactctacagcgaggacgactgtaaatccctacgcgaagaacccattcacattctgaatgtgagcattcagtgcgcagatcacctagaagatgaagcattagtgcccatactgcgcacgttcgtgcagtctaaaaaaaatatcctagtcgactacgggctcaggagaattacctttctgatagcacaggagaaggaatttcctaaattttttacattccgcgctcgggatgagtttgcagaagatcgcatttataggcacctggaacccgcccttgcgtttcagctggaactcaaccggatgaggaattttgatctcactgccgtgccttgtgccaaccacaagatgcacctctacttaggtgctgctaaagtcaaggaaggcgtcgaggtcactgatcacaggtttttcatccgggcgataattagacattccgaccttatcactaaagaggcatccttcgagtacctacagaacgagggcgaaaggctgctccttgaagccatggacgagctcgaagtcgctttcaacaacacctccgtccgaacagattgcaatcacatcttcctgaatttcgtgcccactgttattatggacccattcaaaatcgaggaatccgttcgatacatggtcatgcggtacggctcgcggctgtggaaactcagggtgctccaagcggaggtcaaaatcaacattagacagacaacaacaggctcagccgtgccaattcgtctctttatcacaaatgaatctggctattatctggacatctccctgtacaaggaggtgacggacagtcgctctgggaatataatgtttcactcatttgggaacaagcaggggcctcaacacggcatgctaattaataccccttatgtcacgaaggacctgctgcaagcgaaaagattccaggcgcagaccttaggtaccacatacatctatgactttcccgagatgttccgacaagcgctatttaagctatgggggtctcctgacaagtacccaaaggatatactgacttatactgagttagtcctggattcccagggtcaactggtggaaatgaataggctgcccggcggaaatgaggttggcatggttgcgttcaaaatgcggtttaagacccaagaatatccagagggccgggacgtaattgtgatcggcaatgatattacatttcggatcgggtcatttggtcccggagaagatctgctgtacctccgagcctcagaaatggcccgggcagagggcatacctaagatctacgtggcagcaaattccggtgcccgaatcggcatggcggaagagatcaagcacatgttccacgttgcatgggtcgacccggaagacccccacaagggatttaagtatttatacctcaccccacaggactacacaagaatcagtagcctgaattcagtacactgcaaacatatagaagagggcggagaatctagatacatgatcacagatataattggtaaggatgacgggctcggagttgagaatctccggggaagcgggatgatcgctggcgaaagcagcctcgcatatgaagagatcgttactatttcgctggttacctgcagagccatcggtataggcgcctacctggtgaggctaggccagcgggtgatccaggtagagaattcccatataattctgacaggagcgagtgctctcaataaagtgcttggccgggaagtatacacaagcaataatcaactcgggggagtacaaattatgcactacaacggagtgagccacattacggtcccagatgacttcgaaggggtctatacaatactcgaatggctgagttatatgcccaaggacaaccacagtccagtgccaattatcacacctactgatcccatagatcgcgaaatagaattcctcccttccagagccccttatgatcctcgttggatgctggcaggccggccccatccaaccctgaaaggcacatggcaatctgggtttttcgatcacgggagtttcaaggagatcatggccccttgggcccagactgtggtcaccggccgcgctagactgggcgggatcccagtcggtgtgatcgctgtggagacacggacggtagaagtggctgtccccgctgatcccgccaacttggatagcgaagccaagattatccaacaggcagggcaggtgtggttccccgattccgcttataagaccgcccaggccgtgaaggattttaaccgggagaagttaccactgatgatctttgctaactggagaggattttcaggtggcatgaaaggttgcctcgggacgtggcgcgatgtctcctggtggaagatcagagcaatgctgccaatgcatataggggagggtagtgtctag

SEQ ID NO: 106810 - DNA, 1038 bp, synthetic construct
  misc_feature 1..1038: note = Description of Artificial Sequence: Synthetic coding sequence
  source 1..1038: mol_type = other DNA
atgggatcttccgaggaccaggcctatcgccttctaaacgactacgctaacggcttcatggtgtcacaggtcctgtttgcagcctgtgagctaggcgtgtttgatttgctggcagaggctccaggtcctctggatgtggccgctgtagcggcgggtgtgcgggccagcgctcacggcacggaattgctgttggacatttgcgtgagcctgaaacttcttaaggtggaaacccgcgggggaaaggctttttatcggaataccgagctctcttctgattacctaaccactgtctccccaacttcccaatgcagcatgctcaaatatatgggacgcacaagctatcgctgttgggggcacttggcagacgcagtacgcgaaggacggaaccagtacctggagacctttggggtccccgcagaagagctctttactgcaatatacagatccgaaggggaaaggcttcagttcatgcaggctttgcaggaagtctggtcagtcaacggccggtccgtgctcaccgctttcgacttgagcgtcttccccctgatgtgtgatctgggaggaggcgccggggccctcgccaaggagtgcatgagtctctacccagggtgtaaaataacagttttcgacattccggaggtggtgtggaccgcaaagcagcacttctcgtttcaggaggaagagcaaattgactttcaggagggcgatttctttaaggatcctttgccagaggccgatttatatatcctcgcacgggtacttcacgactgggccgacggaaagtgttctcacctgctggagcggatctaccatacttgcaagccgggaggaggaatattagttattgagtctctccttgatgaagatcggaggggacccctgttaacacagctgtacagcctgaacatgcttgttcagacggagggtcaggaaaggaccccaacccactatcatatgctgcttagctctgcgggatttcgcgactttcagtttaagaagacaggcgcgatatacgatgctatcttagcccgtaaatag

SEQ ID NO: 106811 - DNA, 897 bp, synthetic construct
  misc_feature 1..897: note = Description of Artificial Sequence: Synthetic coding sequence
  source 1..897: mol_type = other DNA
atgggctcttccgaggaccaggcgtacaggctgcttaatgattatgctaatggcttcatggtgtcgcaggtcttgttcgctgcttgcgaactgggcgtgttcgacctgttagcagaggcgccaggccccctggacgtggccgccgttgccgccggggtaagagcgtcggcccacggtaccgagctgctcctggatatttgtgtctcgttgaaactgctcaaggtggaaacccggggcggaaaagccttctaccgcaacactgaacttagcagcgactatttgacaaccgtatctcccacttcccagtgcagtatgctgaagtatatgggccggacatcttatcgttgttgggggcaccttgccgacgcagttagggagggacgcaaccagtaccttgaaactttcggagtgcctgctgaggagttatttacagccatctatcggtctgaaggagagcggctgcagttcatgcaggctctgcaagaagtctggtccgtcaatggtaggagtgtactgacagcattcgacttatctgtgttccccttgatgtgcgacctgggcggcgatttttttaaggatccactgcccgaggcagacctgtatatactggcaagagtcttgcacgattgggccgacgggaagtgtagccaccttctggagagaatttatcatacatgcaagccaggaggtgggattcttgtcatagagtccctgcttgatgaggacaggaggggaccgctgttgacacagctgtattctctcaacatgctcgtgcaaacggaaggccaggagcggacgccaactcactaccatatgctgttgtcctccgcaggttttcgggactttcagttcaagaagaccggtgctatatacgatgctattcttgcaaggaagtag

SEQ ID NO: 106812 - DNA, 1122 bp, synthetic construct
  misc_feature 1..1122: note = Description of Artificial Sequence: Synthetic coding sequence
  source 1..1122: mol_type = other DNA
atgggctcttctgaggatcaggcctatcggctgttgaacgactacgctaatggatttatggtgagccaggtcctgttcgccgcttgcgagctgggtgtctttgacttactcgccgaggctccagggcccctggatgtggcagccgttgcagcaggagtaagagccagcgcgcacggtacggagctcctgctggatatttgtgtgtccctgaagctgctgaaagtggaaacaagagggggcaaggctttttataggaacacagagttgtcctcagattatctaaccactgtttcgcctacatctcagtgctccatgctgaagtacatgggacggacatcatatcgatgttggggccatctcgccgatgccgtgcgagaaggtagaaaccaatacttagaaacatttggcgttcctgcagaagaactcttcacagccatttacagatcagagggcgaaagactacaatttatgcaggccctacaggaggtatggagtgtaaacggtcgctcagttcttaccgcttttgatctgagcgttttcccgctgatgtgtgacctgggtgggacctggataaaattggagacgattatcttaagcaagctgtcgcagggccagaaaaccaaacatagggttttcagcttgattggaggtgcaggcgccctcgccaaggagtgtatgagcttgtaccctggatgcaaaatcacagtgttcgacattccagaggtagtgtggacagccaaacagcactttagttttcaagaagaagagcagatagattttcaagaaggggacttcttcaaggacccacttcctgaggctgacctgtacattcttgctcgagtgctccacgactgggccgacggaaaatgtagccacttgctcgagcggatatatcacacttgcaaacctggtggcggaattttggtaatcgaaagcctgctggacgaagatcgtagaggacctctccttacacagttatactcccttaacatgctcgttcagaccgagggacaggaacgaacaccaacccactatcacatgctcctgtcctccgcgggatttcgcgactttcagttcaaaaagacaggagccatatacgatgctatccttgctcggaagtag

SEQ ID NO: 106813 - DNA, 375 bp, synthetic construct
  misc_feature 1..375: note = Description of Artificial Sequence: Synthetic coding sequence
  source 1..375: mol_type = other DNA
gattgtcgcttaacctccgtatgtctaccgtgcgtaccaggagatttcttcaaggaccctcttccagaggcggatttgtatatcctggcaagagtcctccacgattgggccgacggaaagtgcagccacttgctggagcgtatctaccacacctgcaagccgggtggtggcattctggtaatcgagagtttgctcgatgaggacaggaggggaccgctgctgacccaattatacagcctgaatatgctggtccagaccgaaggacaggagcgcacgccaacccactatcatatgttgctgtcttccgccggatttcgggatttccagtttaaaaagaccggggccatttatgacgccattctggccagaaagtag

SEQ ID NO: 106814 - DNA, 711 bp, synthetic construct
  misc_feature 1..711: note = Description of Artificial Sequence: Synthetic coding sequence
  source 1..711: mol_type = other DNA
atggagtctagcgccaagatggaaagcggaggggccggccaacagccccagccccagcctcagcagcccttcttacctccagccgcctgtttctttgctacagctgccgcagcagccgcagctgccgctgcagcagcggcccagtcagcccaacagcaacagcagcaacagcagcagcagcaacaagccccccagctgcggcctgccgccgacgggcagccatctgggggcggacataaatccgctcctaagcaggttaagagacagcgctcttcatcgcccgagttgatgcggtgtaaaaggaggctaaacttctccgggttcggttactctttaccccaacaacaacctgctgccgtcgcacgccgtaacgagagggaaaggaaccgtgtgaaacttgttaatctgggattcgcaaccctgcgggagcacgttcccaatggggccgccaacaaaaagatgagcaaggtggagacgcttcggagtgcagtggaatacatccgggccctccagcagctgttggatgagcatgacgcggtatctgcagctttccaggcaggggtacttagccccactatttccccaaactacagcaatgatctgaatagtatggccggcagtccagttagttcttatagctcggacgaaggctcatacgacccactcagcccagaagagcaagagctgctcgacttcacaaactggttctag

SEQ ID NO: 106815 - DNA, 582 bp, synthetic construct
  misc_feature 1..582: note = Description of Artificial Sequence: Synthetic coding sequence
  source 1..582: mol_type = other DNA
atggacgggggcacgcttccacggagtgccccacctgctccacccgtgccggttggatgtgccgccagacggaggcccgctagtccggaacttcttaggtgttccaggcgcagacgccctgctaccgctgaaacaggagggggggccgcggctgtggcaaggcggaatgagcgggaacggaaccgcgttaaattggtgaatctcggattccaggctttgcgccagcacgtcccacacggaggggcaagcaagaagttaagtaaggtcgaaaccctccggtctgctgtggaatacattagagccctccagcgcctcctggctgagcacgacgctgtacgtaatgcactcgcggggggccttaggccgcaagctgtgagaccgtctgctcccagggggccccccgggactaccccagtcgccgctagccctagtcgggccagctccagtccaggccggggtggtagcagtgagccgggctccccgcgatcagcatattcctccgacgacagcggatgcgaaggggcgctctcacccgccgagagagaactgctggatttcagtagctggctgggaggatattag

SEQ ID NO: 106816 - DNA, 1542 bp, synthetic construct
  misc_feature 1..1542: note = Description of Artificial Sequence: Synthetic coding sequence
  source 1..1542: mol_type = other DNA
atgtgtagccttggactgttccccccacccccgccacgtggccaggtgacactgtatgagcacaataacgagctagtgactggctcctcttatgaatctccacctcctgacttcagaggccagtggatcaatctccctgtgttgcaactgaccaaggaccccctgaagactccaggcagattggatcacggcacgagaaccgcttttatccaccacagagagcaggtatggaagcgctgcatcaacatttggagagatgtggggctgtttggagtgctgaacgaaatagctaattccgaagaggaagtgtttgagtgggtgaagacagcaagtgggtgggcgttagccttgtgtcgatgggcaagtagtctccatgggagcctgtttccacatttgagcctgagatctgaagatctcatcgctgaattcgcccaggtcacaaattgtactattgtgccatcgctcaaacatcgcctgcaaagaaacgtcgccagcctggcctggaagcccctctctgctagtgtgctcgcggtggcatgccagagctgcatcctgatttggacattggacccaacgagcctgtctacacgtccgagtagtggctgtgcacaggtcttaagtcacccaggacacaccccagtgaccagcttggcctgggctcccagtggcggcagactcctgtcagcatcaccagtggacgctgctattagggtctgggatgtatccacagagacgtgtgtccctttgccatggttccggggaggcggtgtaacaaacctgctctggtcccctgacggcagtaagattttggctactactccttcagctgtgttccgggtgtgggaagcacaaatgtggacttgtgaacgttggcccaccctgagcggaagatgccagacgggctgctggtccccagatggctctcgcctgttgttcacagttctcggtgagccgctcatatactctctgagctttcctgagcgctgtggtgaggggaagggttgcgtgggcggcgcaaagtcagccaccattgtcgccgacctttctgagacaacgatacagactcctgacggagaagaacgactcggaggcgaagcccacagcatggtttgggatcccagcggcgagcggctcgctgtcctcatgaaaggaaagccacgcgtgcaggatggcaagcccgtgatcctgctgttccgaacccgtaacagtccagtctttgaactgctgccatgcgggattattcaaggcgaaccaggcgctcagccacagctgatcactttccacccgtcctttaataagggcgccctgctgtccgtcggatggtcaactggcaggatagcccacattcctctttatttcgtcaacgcacagtttccaaggtttagtcccgtattaggtagggcccaggaaccaccagcaggaggtggggggtcgatacacgatttaccgttgtttaccgagacttctccaacgagcgccccttgggatcccctaccggggcctccgccagtgctgccacactctcctcactcccatctctag

SEQ ID NO: 106817 - DNA, 1683 bp, synthetic construct
  misc_feature 1..1683: note = Description of Artificial Sequence: Synthetic coding sequence
  source 1..1683: mol_type = other DNA
atgccgcagacaagaagtcaagcacaggcaaccatatctttcccaaaaagaaagctgtcacgcgcactgaacaaagctaaaaactcttctgacgccaaactggagcctactaacgtgcaaacagtaacctgttcaccacgggtgaaggccctccctctgtccccacgcaagagattgggagacgataacctttgcaatactcctcacctgcccccttgctctcctccgaagcagggcaaaaaggaaaatgggcccccccactctcacacgctgaaggggaggcgtttagtgttcgataatcaactgacgatcaagtctccaagtaaacgcgagctggccaaagttcaccagaacaagatcctgtctagtgtgagaaaaagccaagaaattacaaccaattctgagcagaggtgtccactgaagaaggaatctgcttgcgtgcgtttatttaagcaggaaggcacatgttaccagcaggccaagctggtgctgaataccgctgtgccagacaggctccccgctcgggaaagggagatggacgtgataagaaatttcctccgcgagcatatttgtggaaagaaggcggggtccttgtacctgtccggcgctccaggtacggggaagacggcctgtctttcccgcatcctccaggacctgaagaaagaactgaaaggcttcaaaacaattatgctcaactgtatgagccttcgcacagcccaggcagtgttccctgcaatcgcacaggaaatctgccaggaggaagtgtcacggcctgctggaaaggacatgatgcgcaagctggagaaacacatgacagccgagaaagggccaatgatcgttctggtgctggatgagatggaccagttggatagtaagggacaggatgttttatataccctgtttgagtggccttggctgtctaattcacacttagtactgattggcatagccaatacactggatctcactgatagaatcctgccaagactccaagcccgcgaaaaatgtaaacctcagctcctgaatttccccccttacacaaggaatcaaattgttacaatcttgcaggatcgcctgaaccaggtttcacgagaccaagtcctggacaatgccgccgtgcagttctgtgcacgtaaagtatcagctgtgtccggggacgtgagaaaagccttggacgtgtgcaggcgagccatagaaatcgtagaatccgacgtgaagtctcaaaccatactgaagcccctttcagaatgcaagagccctagtgaacctttgatcccaaaaagggtaggcctcatccacatttcccaagtgatctctgaggtcgacggcaaccgcatgaccctgtcccaagagggcgcccaagacagcttcccactacagcagaagatcctggtgtgctcattgatgctgctcatcaggcaactgaaaattaaggaggtcaccctgggtaagctgtacgaagcctatagtaaggtctgcagaaagcagcaggtagctgccgtagatcagagtgagtgtttaagcctgtctgggttgcttgaggcaagaggcatccttgggcttaaaagaaacaaggaaaccagactgaccaaggtcttcttcaagattgaagaaaaggaaatcgagcatgccttaaaagataaggctcttattggcaatatcctggccaccggtctgccttag

SEQ ID NO: 106818 - DNA, 339 bp, synthetic construct
  misc_feature 1..339: note = Description of Artificial Sequence: Synthetic coding sequence
  source 1..339: mol_type = other DNA
atggccgaacaggctaccaaaagcgtactcttcgtctgccttggaaacatttgcaggtctcctattgcggaggccgtattcaggaaattagtcactgaccagaacatctcagagaattggagagtggatagcgctgccacatccgggtatgaaatcggaaaccccccagattatagggggcagtcttgcatgaaaagacacgggattcccatgtcccatgtggcgagacaagtcccaagcctggacctgaagctttgcgtactttgcttttccgggagcctgacagctgtactgtttcttactggcacatgggccgggccccagacccaggagctgtag

SEQ ID NO: 106819 - DNA, 477 bp, synthetic construct
  misc_feature 1..477: note = Description of Artificial Sequence: Synthetic coding sequence
  source 1..477: mol_type = other DNA
atggctgagcaggcaacgaaatccgtactgtttgtgtgtctcggcaacatttgcaggtccccaatcgcagaggcagtgtttcgaaagctcgttactgaccagaacatatccgaaaactggcgcgtggacagcgccgccacgagcggctacgaaattggaaatccccctgattacaggggacagagttgtatgaaacgccacgggatccctatgagccatgtcgccagacagataactaaggaggactttgctaccttcgattacattttgtgcatggatgagtcaaacctccgcgacttaaatcgcaaatctaaccaggtgaaaacctgtaaagcaaagatagagttactgggttcctatgaccctcagaaacaactgatcattgaagacccatattacggaaatgacagcgactttgagaccgtgtatcagcagtgtgttaggtgttgtagggccttcctcgagaaggcccactag

SEQ ID NO: 106820 - DNA, 477 bp, synthetic construct
  misc_feature 1..477: note = Description of Artificial Sequence: Synthetic coding sequence
  source 1..477: mol_type = other DNA
atggcggaacaagcaactaagtcggtactcttcgtatgcctaggaaatatctgccgctcacctattgccgaagcggtattcaggaaactggttaccgaccaaaacatctccgagaattgggtgattgattcgggggccgtgtctgactggaatgtggggagaagcccggatcccagggccgtatcttgcttgcggaatcatgggatccataccgcccacaaggcccgccagatcactaaagaggatttcgctactttcgattacatcctttgtatggacgaatctaatttgcgtgatctcaaccgaaagagtaatcaggttaagacctgcaaagctaaaatcgagctgctggggagctacgaccctcagaagcaacttatcatagaggatccatattatggcaacgattcagactttgagactgtttaccagcagtgtgtgaggtgctgcagagcctttctcgaaaaggcacactag

SEQ ID NO: 106821 - DNA, 219 bp, synthetic construct
  misc_feature 1..219: note = Description of Artificial Sequence: Synthetic coding sequence
  source 1..219: mol_type = other DNA
atggcggaacaggctacaaagagcgtgctgtttgtgtgcctcggtaatatatgcaggtcccccatagctgaagcagtttttagaaaactcgtgaccgaccagaacatttccgagaattggcgcgtggactcagccgctacaagcgggggaagtctcactgccgtgctttttctcaccggaacctgggctggcccccaaacgaagagctgcgcggcctag

SEQ ID NO: 106822 - DNA, 483 bp, synthetic construct
  misc_feature 1..483: note = Description of Artificial Sequence: Synthetic coding sequence
  source 1..483: mol_type = other DNA
atggcaggcaaacgaagcggctggtctcgggccgccttgctccagctcttgctcggagtaaacctcgtcgttatgcccccaaccagagcaaggagcctgcgcttcgtcaccttgctgtacaggcacggcgacaggtctcctgtcaaaacgtatccaaaagatccatatcaagaggaggagtggcctcagggctttggccagctgaccaaggagggcatgctgcagcactgggagctcggtcaggcacttagacagaggtaccacggctttctaaatactagctatcataggcaggaggtttatgtgaggtcaactgattttgaccgcactctcatgtcagcggaggctaacctggctgggctttttcctcccaacggaatgcagcgttttaaccccaacatcagctggcagcctattcccgtccatactgtgcctataacggaggacagggtccgcgttgccagcccgtccctgggatggtag

SEQ ID NO: 106823 - DNA, 1272 bp, synthetic construct
  misc_feature 1..1272: note = Description of Artificial Sequence: Synthetic coding sequence
  source 1..1272: mol_type = other DNA
atggccggaaaacgatcagggtggtcaagggccgctctgctgcagctgctgttgggagtcaatctcgttgtaatgcctcctacccgagctaggagcctgagatttgtaactctgctttatcgccacggggaccggtctccagtcaaaacgtatccgaaagacccataccaggaggaagagtggccacagggcttcggacagctgactaaagaagggatgctgcagcattgggaattgggacaggcgctgcggcagcgctaccatgggtttcttaacacgtcttatcatcgccaggaagtgtacgtgcgcagcaccgatttcgacagaacattaatgtctgcggaagcgaatttagccgggttgttcccccccaatgggatgcagagatttaacccaaatatctcctggcagccgataccagtgcatactgtccctattaccgaagacagactcctgaaattcccactcggtccttgcccacgttacgaacagctccagaacgagacacgccagacccctgagtaccagaatgaaagctctaggaatgcccagttcttagatatggttgccaacgagaccgggttgacggacttaacactggaaaccgtgtggaatgtttacgacacccttttttgtgagcagacccatgggctgcgtttgccgccctgggcgagcccgcagaccatgcaacggctatcccgcctgaaagacttcagttttcgcttcctgttcggcatctatcaacaggcagaaaaagcacgcctacaggggggtgttctgctggctcagattcgtaagaatctgacactcatggccacaacctcacagctccccaagctgctcgtctatagtgctcacgatacaacactcgtcgctctgcagatggcactcgacgtgtacaatggggaacaggcaccttacgccagctgtcacattttcgaactgtaccaggaagactctggtaatttttctgtggagatgtatttccgaaatgaaagcgacaaggcaccttggcccctgtctctgcccggatgtccacaccgttgccctctacaggatttcctgcgactcacggaacccgtcgtccccaaagattggcagcaggagtgccagctggccagcggaccggccgacacggaagtcatagtcgccctggcagtgtgcggaagtattttgttcctgctgattgtgttgttactgaccgtgctattccgaatgcaggcccagcctcctggttacagacatgtggctgacggcgaggaccacgcatag

SEQ ID NO: 106824 - DNA, 1176 bp, synthetic construct
  misc_feature 1..1176: note = Description of Artificial Sequence: Synthetic coding sequence
  source 1..1176: mol_type = other DNA
atggctggaaagcgctcgggatggtcgagagccgcactgttgcagctgttactcggcgtgaatctggtggtgatgccccccacccgggcaaggagccttagattcgtaacccttgagggcatgctgcagcactgggaactgggccaagccctgaggcagcgatatcacggttttctcaacacgtcctatcataggcaagaagtgtacgtacgatccacagattttgatcggactctgatgtctgccgaagccaacttggcaggcctttttcctcctaacggcatgcagaggttcaaccccaatatcagctggcaaccaatccccgtacacacagtgcccatcacagaggaccggcttttgaagttccccctgggcccctgcccgcgatatgagcaactgcaaaacgagaccagacaaacccctgaatatcagaatgagagctcaaggaatgctcagttcctcgatatggtggccaacgagacgggcctgactgacttgacccttgagacggtgtggaatgtgtacgatacgctgttttgtgaacagacacatggattaaggttaccaccctgggcctccccacagaccatgcagagattgtcacgcctcaaagacttcagcttcaggtttctcttcggcatctatcagcaggctgaaaaggctcggctgcagggaggcgtgctcctggctcagattagaaaaaatttgacgttaatggccacaactagccagctgcctaagttgcttgtgtattctgcccatgacaccaccctggtggccctgcagatggcactggacgtctacaacggggaacaggctccttatgcttcttgtcatatctttgaattgtatcaggaagatagtgggaatttctcagtggaaatgtactttaggaatgagtcagataaagccccctggcctttgtcccttccaggttgtcctcaccgctgtccgctccaggactttttgcggttgaccgaacccgtcgtaccgaaagactggcagcaggaatgtcagctggcatcgggccccgctgatactgaggttattgtggctctggccgtgtgtgggagtatactcttcctgttgattgtgcttcttcttaccgtcttatttcgcatgcaagcccaaccacccggctatcgccacgtggcagatggagaagatcatgcctag

SEQ ID NO: 106825 - DNA, 711 bp, synthetic construct
  misc_feature 1..711: note = Description of Artificial Sequence: Synthetic coding sequence
  source 1..711: mol_type = other DNA
atggtggccaacgaaacaggcctaacggatctgacgttggagacagtttggaatgtttacgataccctcttctgtgagcagacacacggcttaaggctgcccccctgggcttctccccagactatgcagcgtctatcccgtctcaaagatttcagttttcgcttccttttcgggatctatcagcaagccgaaaaagccaggttacaaggcggtgtcctgttagcccagataaggaaaaacctgaccctgatggccacaacctcccagctgcccaagctccttgtctactcagcccatgataccaccctcgtggcactgcagatggccctggatgtatacaacggcgagcaggctccttacgcgtcatgtcatatctttgagctctaccaggaagatagcggcaatttctctgtcgagatgtatttcagaaatgagtcggataaggccccgtggccactcagtctgccgggatgcccccatcggtgtccccttcaggacttcctgcggttaacagagcccgttgtgccaaaggactggcaacaggagtgtcagctcgcctctgggccagctgatacagaggtgatcgtggctctagcggtgtgtgggagtattctcttcctactgatagtactcctgctgaccgtcctgtttcgaatgcaggcccagcccccagggtatcggcatgttgctgatggggaggaccacgcttag

SEQ ID NO: 106826 - DNA, 1242 bp, synthetic construct
  misc_feature 1..1242: note = Description of Artificial Sequence: Synthetic coding sequence
  source 1..1242: mol_type = other DNA
atggcaggcaaaagaagcggttggagcagagccgccctgcttcagcttcttctcggcgtgaacctcgtagtgatgcctcctactcgcgctagatcgctgagatttgtgaccctattgtacagacatggagaccgaagccctgtgaaaacctaccccaaagacccctaccaagaggaggagtggccacagggtttcggccaactgaccaaggagggcatgctgcagcggtaccacggctttctaaataccagttaccatcggcaggaagtgtatgtccgctccactgatttcgatcgcactcttatgagcgcggaggccaacctcgctgggctcttccccccaaatggcatgcagagattcaatcccaatatttcctggcagccaattcctgtccatacagtccctattaccgaagatcggctgctgaagtttccactggggccttgccctcggtacgagcagcttcagaacgaaactcgccaaacgccagagtatcagaatgagtcaagccggaacgcccagttcctggacatggtagctaatgaaaccggactgactgatttaacactggaaacggtttggaacgtgtacgacaccctgttttgcgaacagacacacggcctgagactccccccatgggcatcccctcaaaccatgcagaggctctcacgtttgaaggactttagctttagattcttgtttggcatctaccagcaggccgagaaggcaaggcttcagggcggagtcctgctcgcgcagatcaggaagaacctaactcttatggctaccacgtcccagttacctaagctcttggtatacagcgcgcacgacactactttggtggcacttcaaatggccctggacgtgtacaatggcgaacaagccccttacgcgagctgccacatttttgagttgtatcaggaagacagcggcaatttctccgtggagatgtattttcgaaacgaatcagataaagcgccttggcctctcagcctgccaggatgccctcacagatgccccctacaggattttcttcggttgaccgagcctgtggtccctaaagattggcagcaggaatgtcaactcgcctcgggaccggctgacaccgaggtgattgtggccctggctgtgtgtgggtccatcctctttttactgattgtgctcctgctgactgttttatttcgcatgcaagcccaaccgcctggctatcggcacgtggctgacggcgaggaccacgcttag

SEQ ID NO: 106827 - DNA, 978 bp, synthetic construct
  misc_feature 1..978: note = Description of Artificial Sequence: Synthetic coding sequence
  source 1..978: mol_type = other DNA
atggatatgtggactgcactgttaattctgcaagcattactcttgccaagcctggcagatggggctactcccgcgttgcgatttgtggcagttggggactggggtggagttccaaacgctcccttccacaccgcaagagagatggccaatgcaaaagagatcgcccgaacagtccagattctgggcgctgatttcatacttagcttgggcgataacttttacttcactggcgttcaggatatcaatgataagcgcttccaggaaactttcgaggacgtgttcagcgaccgctccctgcgcaaagtcccatggtacgtactggcaggcaaccacgaccatctaggaaacgtgagtgctcagattgcttactccaagatatctaagcgttggaacttcccatcccctttctaccgtctgcatttcaagattcctcaaacgaacgtttccgtggccatttttatgttggacacagtaacgctctgcggaaatagcgatgatttcctgtcccagcagcctgagcggccaagagatgtgaagctggcaaggacccaactctcctggctcaaaaagcagttggccgccgcccgggaggactatgttttagtcgcgggtcattatcctgtgtggtccatcgctgaacacgggcccacacactgtcttgtgaagcagctgcgccccctgctggccacgtacggcgttacggcctacctgtgcgggcatgaccacaacctccagtatcttcaggacgagaatggggtgggctatgtactctccggagccggtaactttatggacccttccaagcggcaccagagaaaggttcctaacggctaccttcggtttcactacggcactgaggattctctgggcggcttcgcttacgttgaaattagctctaaggagatgacagtgacctatatagaggctagcggaaagtccctgttcaaaacacgtctgcctagacgcgcacggccctag

SEQ ID NO: 106828 - DNA, 1239 bp, synthetic construct
  misc_feature 1..1239: note = Description of Artificial Sequence: Synthetic coding sequence
  source 1..1239: mol_type = other DNA
atgggctccccctggaacggcagtgacggcccagagggtgctagagagcccccatggcctgcccttccgccctgtgatgagcgccgatgttctcccttccccctgggcgcattggtgcccgtgacggccgtctgtctgtgtctgtttgtggtcggtgtaagcggcaatgtagttaccgtcatgctgattggcagatacagagacatgcgtaccactactaatctctatttgggttctatggcagtgtctgacctcctgatcttactcggtcttccttttgatctttaccggctctggagatcccgaccttgggtgtttgggcctctcctgtgcagattatccctgtatgtaggtgaaggatgtacatatgccactctattacatatgaccgcactgagcgtggaacgttacctagccatttgtcggcccttaagagctagagtcctcgttacccgaagacgggttcgcgccctgattgccgtcctctgggctgtggccctgctgtctgcagggcccttcctcttcctggtgggcgtcgagcaggaccccggaatatccgtggtgcctggcctcaatggtacggccagaatcgcatcaagtccactcgctagcagccctccactgtggctctccagggcgccccctccttctccgcctagcggccctgagaccgcagaggccgcagctctcttctcccgcgagtgcagaccatctccggcacagctgggtgccctgcgagttatgctctgggtgactaccgcgtacttctttctcccattcctgtgcctatccattttgtacggacttattggacgagagctctggtccagtcggcgccctctgcggggaccagcggcatccgggagagagagaggacatcgccagacagtgcgcgtccttttagttgtggtgcttgcattcataatatgttggcttccatttcacgtgggacgaatcatctacataaataccgaggactccagaatgatgtacttttctcagtatttcaatattgtggccctgcaactgttctacctgagcgccagtatcaatcctatcctgtataacttgatttccaaaaaatatagggctgcggctttcaagctcttattagctaggaaatctcggccgaggggattccataggtccagagataccgcgggtgaagtggccggcgacactgggggagacaccgtgggctataccgagacatcagctaatgtgaagacaatgggctag

SEQ ID NO: 106829 - DNA, 978 bp, synthetic construct
  misc_feature 1..978: note = Description of Artificial Sequence: Synthetic coding sequence
  source 1..978: mol_type = other DNA
atggatatgtggacagccttgctgatcctccaggccctgctgttgccatccctagccgatggggccacccccgctttaagattcgtcgctgttggggattgggggggtgtgccgaacgccccatttcatacggcacgtgagatggctaacgcaaaagagattgcccgaacggttcagatattgggagcagatttcatcctgtccctgggggataacttctactttaccggcgtgcaagatataaacgacaaaagatttcaggagacgtttgaagatgttttctccgatcgtagcttaagaaaagttccttggtatgtgctcgctggcaaccacgatcatttaggaaacgtgagtgcacagattgcatactccaagatctctaagcggtggaactttcccagccctttctacaggctccactttaaaataccacagacaaacgtgtctgttgccatcttcatgctggacactgtcactctttgtggaaattcagacgatttcctgtcgcagcagcccgaacgcccccgagacgtgaaactggcacgcacccaactcagctggttaaagaagcagctcgccgcggctcgcgaggactatgttttagttgctggtcactatccagtctggtctattgcagagcatgggcccacacactgcctcgttaagcaactgagacccctgctggcaacttacggagtcacggcttatctttgtgggcacgatcacaacctccaatatctacaggacgagaatggggtcggatacgttctctctggcgccgggaatttcatggaccccagtaagagacatcagaggaaagtaccaaatggatacctgcgctttcactacgggaccgaggacagcctgggcggcttcgcttacgtagagattagcagtaaagagatgacagtgacatacatcgaggctagcggcaaaagcttgtttaagacccgcctccctaggagggctaggccttag

SEQ ID NO: 106830 - DNA, 978 bp, synthetic construct
  misc_feature 1..978: note = Description of Artificial Sequence: Synthetic coding sequence
  source 1..978: mol_type = other DNA
atggatatgtggacagcccttctgatactacaggcgctactactgccatcgctcgcagatggtgctacacctgcacttagatttgtcgctgtaggcgactggggcggagtgccaaacgcccctttccatacagctagagagatggctaacgcgaaggagattgctaggactgttcaaatcctgggggcagactttatcctgtctctgggggacaacttctactttacaggggtccaggacatcaatgacaagagatttcaagagacttttgaggatgttttttcagatcgatcgctgcgaaaggtgccttggtacgtgctggccgggaaccacgatcatctaggcaacgtgagcgcccaaattgcctactcgaaaatatccaaacgatggaattttccctccccattctatagactgcacttcaaaatcccccagaccaatgtatctgtggctatttttatgctcgacacagttaccctttgtggtaattcagacgacttcctatcacagcaacccgaaagacccagagacgttaaacttgcccgaacacagctgagttggctcaagaagcagctcgccgcagctcgcgaagactacgtgctggttgccgggcattatccagtgtggtcaattgctgagcatgggccgactcactgcctcgtgaagcagctacgccctctgctggctacctacggtgtcaccgcttatctgtgtggtcacgatcacaatctccagtacctccaggacgagaatggcgtggggtatgtgctctctggagcgggcaacttcatggacccatctaaacgccatcagaggaaggtgcctaatggctaccttcggtttcattacggcaccgaggatagtctcgggggcttcgcttatgttgaaatctccagcaaggagatgaccgttacatatattgaggcctcaggaaaatcactctttaaaacccgactgccaagaagagctagaccgtag

SEQ ID NO: 106831 - DNA, 1161 bp, synthetic construct
  misc_feature 1..1161: note = Description of Artificial Sequence: Synthetic coding sequence
  source 1..1161: mol_type = other DNA
atgcgagccgcgccactgctgttagcaagagccgcgagcctctcgcttggtttcctctttctcttgttcttctggctggaccggtcagttctggccaaggaactcaaatttgtcacactggtgtttcgacatggagatcgctcacccattgacacattccccactgatccaatcaaagaaagttcctggccccaaggcttcgggcagttgactcaattgggaatggagcagcactacgaactgggggagtacatccggaagcgctaccggaaattcttgaacgagtcctataaacacgaacaggtgtacatcagatctacagatgtagaccggacattgatgtccgcgatgactaatctggctgccctgtttccccctgaaggtgtgagcatctggaatcctattctcttatggcagcccattcctgtccatactgtgcctctgtccgaggaccaactactgtacctgcccttcagaaactgtccacgttttcaggagctggagagcgagaccttaaaaagcgaagaatttcagaagcgactccatccttataaggactttattgctacacttggaaagctgagcgggctgcatggccaggatcttttcggcatctggtctaaggtgtatgatccactgtactgcgagagcgttcataatttcactctcccctcgtgggcaacagaggatacaatgacgaagcttagagaacttagtgagctgtctctgctctccctctacggtatccacaagcagaaagaaaagtcccgcctgcagggtggtgttctggttaatgagatcctgaatcacatgaagcgagcaacccagattccctcttataagaaattgatcatgtattcagcccatgataccaccgtctcgggactccaaatggctctggatgtatataacggacttttgcccccatacgctagctgccacttgactgagttgtacttcgagaagggcgaatacttcgtggagatgtactacaggaacgagacccagcacgagccttatcctttgatgctccctggatgtagtccgtcgtgtcccctcgagaggtttgcagagctggtcggacccgtaatcccgcaggactggtctaccgagtgcatgactacaaatagccatcaaggaacagaggactcaacggattag

SEQ ID NO: 106832 - DNA, 1257 bp, synthetic construct
  misc_feature 1..1257: note = Description of Artificial Sequence: Synthetic coding sequence
  source 1..1257: mol_type = other DNA
atgcgcgcagctcccctacttcttgctcgcgcagcttccttgtcactagggttcctatttctcctgttcttttggctcgacaggagcgtgcttgccaaagagttaaagttcgtcaccttggtgttcaggcacggcgaccgaagccctattgacacattccccactgaccctataaaagagagttcctggccgcagggctttgggcagctgactcaacttggcatggagcaacactacgagctgggagagtatattaggaagcggtaccgcaaattcctgaacgaatcttataagcacgagcaagtttacatcagaagcaccgacgtcgatcggaccttgatgtccgctatgactaaccttgccgccctgttccctcctgagggcgtgtcaatctggaaccccattcttctgtggcagcctataccagtgcacactgtgccccttagtgaagatcagctcttgtacttgccatttagaaattgccccagattccaggaacttgagtccgagaccttgaaatccgaggagttccaaaagcgattacacccttataaggacttcatcgctacactggggaaactgtctggactgcacgggcaggacctctttggaatttggagcaaggtgtacgatccgctgtattgtgagtccgtgcataatttcacactcccatcatgggctacagaggacaccatgacaaagctgcgggagctatctgaactgagcctgctaagcttgtatggcatccacaaacagaaagagaaatctagactgcagggcggtgttctggtcaacgaaatcctcaaccatatgaagagagcaacccaaattcccagttataaaaaattgatcatgtattctgctcacgacaccacggtgtctggcctacagatggccttggatgtgtacaatggcctcctccctccatatgcatcctgtcacctcaccgaactgtacttcgagaagggagagtatttcgtcgaaatgtactacaggaacgagacacaacacgaaccctatccactgatgctgccaggttgcagcccttcttgccctttggagaggttcgccgaattagtgggccccgttattcctcaggactggagcactgagtgtatgaccacgaatagccaccaagttttgaaggtcatttttgctgtggccttttgtctgatttcagcagtgctcatggttctcttatttattcacatccggcgtggcttgtgttggcaaagagagagttatggtaacatctag

SEQ ID NO: 106833 - DNA, 1281 bp, synthetic construct
  misc_feature 1..1281: note = Description of Artificial Sequence: Synthetic coding sequence
  source 1..1281: mol_type = other DNA
atggcaggactcggcttttgggggcaccccgctggtccgctgttgctcctcctgctgttagtcctgccacctcgggcgcttcccgagggcccactggtgttcgttgcactggtcttccgacacggagaccgggcgcccctcgcctcttatccgatggacccccacaaggaagtagcctccactctttggccgagaggattaggacagctgaccaccgaaggggtacgtcagcagttggagctgggacgcttcctgagatctcgatatgaagccttcctctccccagaatatcgaagagaagaagtctatatacgtagcaccgactttgaccgaacactggagtcagcccaggcaaatctggccgggctttttcctgaggccgccccaggatctccagaggcaaggtggcgtccaatccctgtgcatacagtgcctgtagcagaggacaaactgctgcggtttcccatgaggtcttgcccgagatatcacgagctcttgagagaggccacagaggctgccgagtatcaggaagccctcgaaggatggaccgggttcctctcacgcctggaaaactttaccggcctctcactggtgggcgagcccctgagacgggcctggaaggtgctcgacactctcatgtgtcagcaggctcatggactgcctttacctgcgtgggcttcccctgatgtgctgcggacactggctcagattagcgcgttggacattggagcccatgtgggaccacccagagctgccgagaaagcccagctgactggcggaatactgctgaatgccattctcgccaacttctccagggtgcagagactgggcctaccacttaaaatggtgatgtattcagcccatgattctactctgctggccctgcagggggcactggggctctacgacggacatacaccaccttatgcagcctgtctcggatttgagttcaggaagcatcttgggaatccagctaaggacggtggtaatgtcacagtgtccctcttctaccgcaatgacagtgcccatctgcctctgcctctgtctctgcctggctgtccagctccctgtcctctcggcagattttatcagctgaccgcaccagcaaggcctccagcccacggcgtatcctgtcatggaccttatgaggctgctatcccccctgctccagtagtgccactgctggctggcgctgtcgcagtactggtggcgctgagcttggggctcggtttactggcctggaggccaggctgcctgagagcccttggcggtcctgtttag

SEQ ID NO: 106834 - DNA, 1002 bp, synthetic construct
  misc_feature 1..1002: note = Description of Artificial Sequence: Synthetic coding sequence
  source 1..1002: mol_type = other DNA
atggccgggctggggttctggggccaccccgcaggacctctcctgctgctcctgctgcttgtgctcccacctcgagcactgcctgaaggacccctggtttttgtagccttggtcttccggcatggggatcgcgcacccctagctagctatcccatggaccctcataaagaggttgcttctacactgtggccccgtggtctaggacagctgacaactgaaggcgtccggcagcagctggagcttgggcgattcctcagatcccgatacgaaggctttctcagccgactggaaaacttcactggactctctctggtgggagagcccctgagacgggcctggaaagtccttgatacactgatgtgccagcaggctcacggactccctcttcccgcctgggcatccccagatgtgctacgcacccttgcacagatatccgctctcgacattggagcacatgtcggacccccgcgggcagcagagaaggcccagttgaccggaggcatccttctaaacgccattctggcaaatttctcgcgggtacagaggcttggactgcctctgaaaatggtaatgtactctgctcacgattccaccctgttagccctacagggagcactaggactatatgacggacataccccgccgtatgcagcgtgcctgggattcgaattcaggaaacacctaggcaatcccgcgaaggacggagggaacgtgaccgtgagcttgttctatcgcaacgacagcgcacatcttccactgcccctgtcactgcccggatgtcctgctccatgccccctgggccggttttaccagctgacagcccctgccagaccgcccgcacacggcgtgtcttgtcatggtccgtacgaagcagctattcctcctgcccctgtggttcccctactcgcaggagcagtcgccgttctggttgccctgtctctgggcctgggactgttagcttggcgtcctggatgcctaagggcacttgggggtccagtgtag

SEQ ID NO: 106835 - DNA, 633 bp, synthetic construct
  misc_feature 1..633: note = Description of Artificial Sequence: Synthetic coding sequence
  source 1..633: mol_type = other DNA
atggaaatgggacggcgcatccacctcgaattgcgcaacagaacgccctccgacgtgaaggagctagttttggacaattcacgatcgaatgaaggcaagttggagggtctgaccgatgaatttgaggagcttgaatttctgtcgactattaatgtcgggctgacatctattgccaacctacccaaattgaacaagctgaaaaagctagagctgagtgacaatcgggtctccggtgggctcgaggtgctagctgaaaaatgcccaaacttgacccatctcaacctgtccgggaataagatcaaagacctgtcgaccatagagcctttgaagaaattggaaaaccttaagtcactggatctttttaattgcgaagtcaccaacttgaatgattaccgcgaaaatgtgttcaagctgctgccccagctcacttacctcgacgggtacgatcgggatgataaagaggcacctgattcagatgccgaaggctacgttgaggggcttgacgatgaggaagaggacgaagacgaggaggaatatgatgacgaggagggctacaatgacggagaggtggatgacgaagaagacaagaagaagaagaagaaaaagaaaaagaaaaaaaagaagaagaaatag

SEQ ID NO: 106836 - DNA, 750 bp, synthetic construct
  misc_feature 1..750: note = Description of Artificial Sequence: Synthetic coding sequence
  source 1..750: mol_type = other DNA
atggaaatgggaagaagaatccacctcgagcttcgaaatcggacacctagtgacgtcaaagagctggtactggacaatagcagaagtaatgagggtaaactggaggggctgacagatgagtttgaggagttagaatttctaagtaccatcaatgtgggtttaacttcgattgctaatctgcctaaactcaacaagttgaagaaattagaattgagcgataatagggtctcaggtggattagaggttctggccgaaaagtgtcccaacctcactcacctgaatctcagcggaaacaagatcaaagatctgagtacaatagagccacttaaaaagctggagaacctcaaatccctggatttgttcaattgcgaggtaactaacctgaacgattacagagagaatgtctttaagcttctgccccaactgacctacctcgatggctatgaccgggacgacaaggaggccccagattccgacgcagaaggatatgtggagggcctcgacgacgaagaggaagatgaggatgaagaagagtacgatgaagatgcccaggtggtggaggatgaggaagatgaagacgaggaagaagagggcgaagaggaggacgtctctggtgaggaggaggaagatgaagaggggtacaacgatggagaggtggacgacgaggaggacgaggaagagttgggggaagaggagcgaggccagaagcgaaagcgagagcctgaagatgaaggagaggacgacgactag

SEQ ID NO: 106837 - DNA, 396 bp, synthetic construct
  misc_feature 1..396: note = Description of Artificial Sequence: Synthetic coding sequence
  source 1..396: mol_type = other DNA
atggagatgggtaagtggatccatctggagcttaggaaccggacccctagcgacgttaaggagctcttccttgacaacagccagagcaacgagggtaaactcgagggcctcaccgatgaatttgaggagttggagctcctcaacaccatcaatattggcctgacttccatagccaatctgccaaagctgaacaaacttaaaaaactggaactgagcagcaacagagcctcagtcggactggaagtgctagcagagaaatgccctaatcttattcacctgaacctctccgggaacaagatcaaggacctcagtacaatcgagccactgaagaaactggaaaacctggaatcccttgatctctttacctgtgaagttacaaatcttaacaattactag

SEQ ID NO: 106838 - DNA, 807 bp, synthetic construct
  misc_feature 1..807: note = Description of Artificial Sequence: Synthetic coding sequence
  source 1..807: mol_type = other DNA
atggaaatgaagaaaaagatcaatttggagctgcggaatcgtagtcccgaggaagtgaccgaactggtgttggacaattgcctctgcgtcaatggcgagatcgagggtctgaacgacacattcaaagagctcgaatttctgtctatggcgaatgttgaactaagctctttagccaggcttccctcactgaacaagctccgtaaactcgagttgagcgataacattatatccggaggcctggaggttctcgcggagaaatgtccaaatttgacttacttgaatctgagcggtaataagatcaaggatctgtctactgtggaggcactccaaaaccttaaaaacctaaagagtttggatctcttcaactgcgagataactaaccttgaggattacagagaatctatttttgaactgctgcagcagataacatacctggatggttttgatcaagaggataacgaagcccctgactccgaggaagaggacgatgaggacggggatgaggatgacgaggaggaggaagaaaatgaagccgggcccccggagggttatgaagaggaagaggaagaggaggaagaagaggatgaagacgaagacgaggacgaagacgaagcaggtagcgagctcggcgagggagaagaggaagtgggcctctcctacctgatgaaggaggagatccaagatgaggaagatgatgacgattatgtggaagagggagaagaggaagaagaggaagaggaagggggtctgagaggagagaagcggaagagagacgccgaggacgatggggaagaggaagacgactag

SEQ ID NO: 106839 - DNA, 411 bp, synthetic construct
  misc_feature 1..411: note = Description of Artificial Sequence: Synthetic coding sequence
  source 1..411: mol_type = other DNA
atggaaatgaaaaagaaaatcaatctagagttacggaaccgctctcccgaggaagaggataacgaggccccagatagcgaggaggaggatgacgaggacggggacgaggacgacgaggaggaagaggaaaacgaagcgggccccccagaaggttacgaagaagaggaggaggaggaagaagaggaggatgaagacgaggatgaagatgaggacgaagccggctcggagctgggtgagggcgaggaggaggttggacttagttaccttatgaaagaggagatccaagatgaagaagatgacgacgattacgtggaggaaggcgaggaggaggaagaagaggaggaaggtggtcttcgtggagaaaaaagaaaacgtgacgcggaagatgatggtgaggaggaggatgattag

SEQ ID NO: 106840 - DNA, 663 bp, synthetic construct
  misc_feature 1..663: note = Description of Artificial Sequence: Synthetic coding sequence
  source 1..663: mol_type = other DNA
atggctaacgtggaactgagcagtttagccaggctgccttcgttaaacaagttgaggaagctggagctatctgacaatattatttctggaggtctggaagtacttgccgaaaaatgtccgaacctcacttatctcaatttgtctggtaataagataaaagacctgtcaacggtagaggccttgcagaatctgaagaacctgaagtccctagacctcttcaattgcgagattactaaccttgaagattatcgtgaatctatattcgaactactgcagcagatcacatatttagatggattcgaccaggaagataacgaggcaccggattccgaggaggaggatgatgaagatggtgacgaggatgacgaagaagaagaagagaacgaggccggacctccagagggatacgaggaggaagaagaggaggaagaggaggaagatgaggatgaagacgaagacgaagacgaagcagggagcgagctgggagagggtgaggaggaggttggcctctcgtacctgatgaaggaagaaatccaggacgaagaagacgatgacgactacgtagaggaaggagaggaggaggaagaagaggaggaaggcggcctgaggggtgaaaagagaaaacgggacgctgaggatgacggagaagaggaggatgactag

SEQ ID NO: 106841 - DNA, 684 bp, synthetic construct
  misc_feature 1..684: note = Description of Artificial Sequence: Synthetic coding sequence
  source 1..684: mol_type = other DNA
atggaaatgaagaagaaaatcaacctcgagctcagaaatcgttcacctgaggaggtgacagaactagtactggacaactgcctgtgcgttaatggcgaaattgagggccttaacgatactttcaaagagctggagttcctaagcatggcgaacgtggagttgtcaagcctggccagactcccgtcccttaacaagttaaggaagcaaaaccttaagaaccttaagtcgctggatctgtttaactgcgagatcaccaacttagaggactacagggaaagcatcttcgagctgctgcagcaaattacgtatcttgatggtttcgatcaggaggacaatgaggcaccagatagcgaggaagaagatgatgaagatggggatgaggatgacgaagaagaagaagagaatgaagcaggacctcccgaaggttacgaggaagaggaggaagaggaggaagaggaagatgaagacgaggatgaagatgaggacgaagccggttctgaactgggcgagggcgaagaggaagtggggctttcctacctcatgaaggaagagatccaagatgaagaggacgacgacgactatgtggaagagggggaagaagaagaagaagaagaagaggggggtctccgtggcgaaaagagaaagcgcgatgctgaggatgacggtgaggaggaggatgactag

SEQ ID NO: 106842 - DNA, 2076 bp, synthetic construct
  misc_feature 1..2076: note = Description of Artificial Sequence: Synthetic coding sequence
  source 1..2076: mol_type = other DNA
atggacgggtgcaaaaaggagctgcctagactgcaggagccagaagaggatgaggactgttatattctgaacgttcaatcttcatccgatgatacaagcgggagctccgtggcccggcgagcacccaagaggcaggcaagctgcattctgaacgtgcagtcgcgcagtggggacacctctggatccagtgtggcacgaagagcacccaaacggcaggccagttcggtggttgtgattgacagcgatagcgatgaagaatgtcatacgcatgaggaaaagaaagctaagctgctcgaaatcaactccgatgacgagagtcctgagtgttgccacgtgaaaccagctattcaagagcctcccatcgtcataagtgatgatgataatgacgatgacaatggaaacgacctggaggtgcctgacgataactccgacgattcggaagcacctgatgataattcagatgattctgaagctcctgacgataacagtgacgattccgaagcaccagacgacaacagcgacgactctgaggcacccgacgacaactctgatgactctgatgtccccgatgacaacagcgacgactcatcggatgacaattcggacgactcctctgatgacaatagcgatgattcagacgtgcctgatgacaaatccgacgactctgatgtgcccgatgactcctctgatgattcggatgtgccggatgatagtagtgacgatagcgaagccccagatgattcatctgacgattctgaggcacccgacgacagctcagatgacagtgaggctccagatgactccagcgacgactctgaggctccagatgatagctccgacgatagcgaagcctctgacgatagcagtgatgacagcgaggcgagcgatgactccagtgacgatagtgaagcccccgacgataagtccgacgattctgatgttccagaggacaagtctgacgatagtgatgtccccgacgataattcagacgacctggaggttcctgttcccgctgaggacctctgtaatgaggggcaaatcgcctcagatgaagaagagctggtggaggcagccgcagcagtgtctcagcatgactcatctgacgacgcaggggagcaagatttgggggagaacttatcgaagccaccttccgaccccgaggccaacccagaggtaagtgaaaggaagctgcccaccgaagaagaaccagcaccagtggtggagcaatctggcaaacgcaagagcaagacaaagacaattgtggaacccccacgtaagcggcagacgaaaacaaagaacattgtggaaccacctcggaagagacagacaaagactaagaatatcgtagagcccctgaggaaacgtaaagcgaaaaccaagaacgtgtcagtgaccccaggccacaagaaaagggggcctagcaaaaaaaaaccaggcgcagctaaggtggaaaagcgaaagacaaggactcccaaatgtaaagttcctggatgtttcctccaggatcttgagaagagcaagaagtacagcggcaagaacttgaagcgtaacaaggacgaattggttcagcgtatctacgacctgtttaaccgtagcgtgtgtgacaaaaagttgcccgaaaaactacgtattggatggaacaacaaaatggttaagacagccgggctttgcagcactggggaaatgtggtaccctaagtggcggaggttcgccaagatacagattgggctgaaggtatgtgactccgcggacaggataagggacacactgatccatgaaatgtgtcatgctgcatcttggctcatcgacggtatccacgatagccatggcgacgcttggaagtactacgcccggaagagcaatagaattcaccccgagctaccccgcgtcactcgatgtcacaactataagattaactacaaggttcactatgagtgcacaggttgcaagacccgaattggctgctacaccaaatccctcgatacaagccggtttatctgcgcaaaatgtaaaggcagcctggtaatggtaccccttacacagaaggatggaacccgtatcgtcccacacgtgtag

SEQ ID NO: 106843 - DNA, 2076 bp, synthetic construct
  misc_feature 1..2076: note = Description of Artificial Sequence: Synthetic coding sequence
  source 1..2076: mol_type = other DNA
atggatgggtgcaaaaaggagcttccgaggcttcaggaaccagaggaagatgaggactgctatatcttgaatgtgcaatcttctagcgatgacacgtctggctcctctgtggccaggagggcccctaaaaggcaggccagctgtatcctcaacgtgcaatcgagaagtggagatacaagcgggtctagcgtggcacgtagagcacctaagaggcaagcctcatcagtggtggtaattgactccgactctgacgaggaatgtcatacacacgaggaaaaaaaggctaaactgctggagataaacagcgatgacgagagcccagagtgctgtcacgtgaaacctgctatccaggagccgcccatcgtgatttctgatgacgacaatgatgatgacaacggcaatgacttagaggtgcctgatgacaatagcgacgacagcgaagcccccgatgataacagtgatgatagcgaagctcctgacgataatagtgacgacagtgaagcacctgatgacaactcagacgattctgaggccccagatgataacagcgacgattccgatgtgccagatgacaactctgacgactcctctgatgacaactccgatgatagcagcgatgacaattccgacgactcagatgtccctgacgacaagagcgacgactctgatgtccccgatgacagcagcgatgatagcgacgtgcctgatgactcttctgacgattctgaggcgccagatgattcctctgacgacagcgaagcccctgatgattccagcgacgattcggaagccccagacgactccagtgatgattcagaagctccggatgacagtagcgacgacagcgaggcgtcagacgactcctcagatgactcagaagccagcgacgactcctccgacgattctgaggctcctgacgataagtctgacgactcagatgtccccgaagataagagcgatgactctgatgtgcccgatgacaattctgacgatttggaggtccccgttcctgccgaagacctttgtaatgagggtcagattgcttccgatgaagaggagctggtcgaagctgctgctgccgtgtctcagcacgactcctccgatgatgctggagagcaagatctcggcgaaaacttatccaagccaccgagtgatccagaggctaaccctgaagtctcagagaggaaactgcccacagaggaggagcctgcccctgtggtggagcagagtggtaaacgaaagagtaaaactaaaacaattgttgaaccgcctcgcaagcgccagacgaagactaagaacatcgtggaacccccacggaagcggcaaacaaagactaagaatatcgtggaaccactgcgaaaaagaaaggccaaaacgaaaaacgtgtccgtcactccaggtcataaaaaacgaggacccagtaagaaaaagcctggcgccgctaaagtggagaagaggaaaacgcgcaccccgaagtgtaaggtgccaggatgctttcttcaggaccttgaaaagagcaagaaatacagcggaaaaaaccttaaacggaataaggacgaactggtccagcgaatttacgaccttttcaatcgttcagtgtgtgataaaaaactgcccgaaaagcttaggattggatggaacaataaaatggtcaaaaccgccgggctctgttccacaggcgaaatgtggtaccccaagtggcgccgcttcgccaagatccagatcggactcaaggtttgcgactcagcagacagaattcgagataccctcatccacgagatgtgccacgcggcaagttggttgatagatggcatccatgattcccatggtgacgcctggaagtattacgcccgcaaatctaaccgaatccatcctgaacttcccagagtcacccgttgccacaactacaaaatcaactataaagtccattacgaatgtacagggtgtaagacacgtatcggttgctatacaaaaagcctggacacttcccgctttatatgcgccaaatgcaaaggaagcctggtgatggtgcccctaacacagaaggacggcactagaattgtcccacacgtttag

SEQ ID NO: 106844 - DNA, 540 bp, synthetic construct
  misc_feature 1..540: note = Description of Artificial Sequence: Synthetic coding sequence
  source 1..540: mol_type = other DNA
atggtgcaggcctggtacatggacgacgctcctggagatccccgccagccacaccgccccgaccctgggcggcccgtggggctcgagcaattgcggagactgggggtcctctattggaagctggacgcagacaaatacgagaacgaccccgagttggagaaaatccgcagggagcgcaattactcctggatggacatcatcactatttgtaaggacaaattaccaaactacgaggagaaaataaaaatgttctacgaagagcatttacacctggacgacgagattaggtacatcctggacgggagtgggtactttgacgtgagagacaaagaagatcagtggatcagaatcttcatggagaagggcgacatggtgactctgcctgccgggatctaccatcgattcacggttgacgaaaagaattacacaaaggcaatgcgcctcttcgtgggagagcccgtgtggacagcctacaaccggccagccgatcactttgaagcccgcgggcagtacgtaaagttcctggcccagactgcttag

SEQ ID NO: 106845 - DNA, 2670 bp, synthetic construct
  misc_feature 1..2670: note = Description of Artificial Sequence: Synthetic coding sequence
  source 1..2670: mol_type = other DNA
atgtccaacccatttgcgcatctagccgagcccctggaccccgtccaacctggtaagaagttttttaacctgaacaaactggaggattccaggtatgggcgactgccattctcaattagggttttgcttgaagccgctatcaggaattgtgatgagtttctggtgaagaaacaagacatcgagaacatacttcactggaacgtgacacaacacaaaaacatcgaggtaccatttaagccagcacgggtcatcctgcaagacttcaccggggtgcccgccgtggtagatttcgctgccatgcgggatgctgtaaagaaactcggtggcgacccagaaaaaatcaacccagtttgtcctgcggaccttgtcatcgaccattcaatccaggtggacttcaaccgccgcgcggattctttacaaaaaaaccaggacttagaatttgagaggaaccgcgagaggtttgaatttctgaaatggggaagccaagcattccacaatatgcggattatcccccctggatccggcatcatccatcaggtgaaccttgagtacctagcgcgcgtggtcttcgatcaggacggctactattaccccgatagcctggtgggaacagattcccacaccacaatgatcgatgggctgggtatccttggctggggcgtgggcggaatcgaggctgaagctgtcatgctgggacagcccataagcatggtgttgccgcaggtgattggctatcggctgatgggcaaaccccatccactggtgacatctaccgacattgtgctaacaattaccaagcacctcaggcaagtcggagtggtcggcaagttcgttgaattcttcgggcccggtgtcgcgcagctgtctatcgcggacagagccaccatagccaacatgtgtccagaatatggagcaactgcagctttttttccagtggatgaggtgtcgatcacctacctcgtgcaaaccgggcgcgacgaagaaaagctgaaatacatcaaaaagtatctgcaggccgtgggcatgttcagagatttcaatgacccctcccaggatccagacttcactcaggtggtagagctggacttaaagaccgtggttccatgctgcagtggtcctaagcgaccccaggacaaagtggcagtgagtgatatgaagaaggatttcgagtcatgcctgggcgccaaacaggggttcaagggcttccaggtggctcccgagcaccataacgaccataaaacgtttatatacgacaacactgaatttacgctcgcccatggctcagtggttatcgctgccatcaccagttgcaccaatacctcaaacccaagtgttatgctcggggcaggcctgcttgcaaagaaggctgtcgatgccggtctcaatgtgatgccatacatcaagacctcactcagccccggatctggtgtcgtgacctattatctgcaggagtctggtgttatgccctacctctcccagctgggcttcgatgtggtggggtatggctgcatgacttgtattggtaacagcggccccctgcctgagccagtggtcgaggcgattacccagggagatctcgttgctgttggagtattgagtggcaacaggaatttcgaaggcagagtccatcctaacactagagcgaactacctggcctctccgcctcttgtcatcgcttacgcaatcgcaggtaccatcagaattgactttgagaaggaaccactgggcgttaacgctaaaggtcagcaggtgtttcttaaggatatatggcccaccagagacgaaatccaggctgtcgagagacagtatgtaatcccagggatgtttaaagaagtttatcagaaaatcgaaaccgtcaatgaatcttggaatgcattggcgactccttcagataagctgtttttttggaactctaaatccacctatatcaaatctcccccctttttcgagaatcttacccttgatctgcagccacctaaatctatagtagacgcctacgtgctgttgaatctgggcgactcagttactactgaccacatatcacctgctgggaacatagcccgaaactcccctgcagctagatatctcacaaaccgcggcctgaccccccgcgagtttaactcctacggttcccgtcgaggcaacgacgccgttatggcaagagggacctttgcgaacatcaggcttctcaaccggtttctgaacaagcaagctccccagacgattcacctgccctcaggagagattctggacgtgttcgatgctgctgagcggtatcagcaagcagggcttccacttatagtcctggccggcaaggagtatggcgcaggctcgagtcgggactgggcggctaaagggccatttcttctcggaattaaggccgtgctggctgaaagttacgaaagaattcaccgcagcaatctcgtgggcatgggagtcatccccttagagtatctgcccggagagaatgctgacgctcttgggctgaccggacaggaacgctacactattatcatcccggaaaatctaaaaccacagatgaaggtgcaagtgaagctagacactgggaaaaccttccaggcagtcatgcgttttgatactgacgtcgagctcacatactttctgaacggcgggatactcaattatatgattcgcaaaatggcgaaatag

SEQ ID NO: 106846 - DNA, 1305 bp, synthetic construct
  misc_feature 1..1305: note = Description of Artificial Sequence: Synthetic coding sequence
  source 1..1305: mol_type = other DNA
atgtccaatccctttgcacacctcgctgaaccactggatcccgtccaacctgggaaaaagtttttcaacctgaacaaattggaggacagtcgctacggccggctgcccttctcgatcagggtactgctggaagcggccattcggaattgtgatgaatttcttgtgaagaagcaagatattgagaatatcttgcactggaacgtcactcagcacaaaaatatcgaggtgcccttcaagccggctcgggtgatcctgcaggacttcacgggcgttccagcagtggtagactttgcagccatgagagacgcagtgaaaaaacttggcggggaccccgagaaaattaatcccgtttgtcccgcagatctcgtgatcgaccactcaatacaagttgatttcaacagacgggcagattcattgcagaaaaaccaggatctcgaatttgaacgcaatcgggagaggttcgagttcctgaagtggggaagccaggctttccataatatgcgtattatcccacctggcagcggcataattcatcaagtgaatcttgagtatctggcacgtgttgtttttgaccaggatggatattactatccagattcgctcgtgggcactgacagccataccacgatgatcgacgggttggggattctgggctggggcgtcggcggaatcgaagcagaagctgtcatgctgggtcaacccatttcaatggtgctcccacaagtgattggttacaggttgatgggcaagcctcaccctcttgtgacctccacagacatcgtgctgaccatcaccaagcacctgcgacaagtgggcgtggtcggaaagttcgtagaattttttgggcccggcgtcgctcagctttctatcgctgatagggccactatcgctaacatgtgtcctgaatacggcgcaaccgcggcatttttccctgtcgacgaggtctccataacctacctcgtacagactgggagggatgaagagaaactgaagtacataaagaagtaccttcaagccgttggcatgtttcgggactttaatgatccatcacaggatcctgattttacgcaagtggtggaactagacctgaagactgtagttccgtgttgtagcggtcctaagaggccccaagataaagtggctgtcagcgatatgaaaaaggatttcgagtcttgcctgggcgcaaagcaagggttcaagggatttcaagtagctcctgagcatcataacgaccataagactttcatttacgacaatacagaatttactctcgctcacggttcggtcgtaatcgccgctttgtag

SEQ ID NO: 106847 - DNA, 2670 bp, synthetic construct
  misc_feature 1..2670: note = Description of Artificial Sequence: Synthetic coding sequence
  source 1..2670: mol_type = other DNA
atgtctaacccatttgctcatcttgctgaacccctggacccagttcagccaggcaagaaatttttcaatctaaacaaactggaagattcccgatacggcaggcttccctttagtatcagggtgttactagaggccgcaattcggaactgcgatgagttcctggtcaagaagcaggatatagagaacatcctccactggaatgtaacccagcacaagaatattgaggtcccattcaagcccgccagggtcatactgcaagattttacaggcgttccagctgtcgtggattttgccgcaatgagagatgcggtcaagaaactgggtggcgaccctgagaagattaatcctgtgtgtcctgcagaccttgtgatagatcacagtatccaggtggattttaatcggagagccgactctctccagaagaaccaggacctcgagtttgagcgcaatagggagagatttgaattcctgaaatggggaagccaggcctttcacaacatgcggatcatccctccaggtagcgggatcattcatcaagtaaacctggagtacctggcacgcgtggtgtttgatcaggatggctactattaccctgatagtctcgtcggtactgattcccacactactatgatcgatgggttagggattttgggctggggcgttggaggcatcgaagcagaggccgttatgctcgggcagcctataagcatggttctcccacaagtgatcggatatcgcctgatgggtaaacctcatccgctggtgacctcgacggatatagtgctcacaatcaccaaacatctccgccaggttggtgtggtcggtaagtttgtggagtttttcggcccgggagtcgcccagctctcaattgctgacagagctaccatcgcgaatatgtgccctgagtatggagcaaccgctgcttttttccccgtggatgaggtttcaattacctacctggtgcagactggtcgggatgaggagaagcttaaatacattaagaagtatttacaggctgtgggcatgtttcgggatttcaatgaccccagccaggatccggatttcacgcaggtcgtggagctggacctcaaaactgtggtaccgtgttgcagtggaccaaaacgcccgcaggataaagtcgctgtcagtgacatgaagaaagacttcgaatcgtgtcttggggccaagcaaggcttcaagggtttccaggtggcccctgaacaccataatgaccataagacttttatttatgacaataccgaattcacgctggcgcatggctcagttgtaatcgcagcgattaccagctgcacaaatacttctaatcccagcgtgatgctgggagcgggattactcgctaagaaagctgtggacgccgggctgaatgtgatgccatatattaagacatccctgtcaccgggaagcggtgtggttacatattacctccaagagagtggagtgatgccatacttgtctcagctcggattcgatgtcgtaggctatggctgcatgacctgtatcggaaatagcggcccccttcctgaacctgtcgtggaagccatcacacagggcgaccttgtcgctgttggagtgctgtcgggtaataggaatttcgagggacgagtgcaccctaacacgcgcgcgaactacttagccagccctccactcgttatcgcatacgctattgctggcaccatcaggattgattttgaaaaggagccactaggggtcaacgcgaaaggtcaacaggttttcctgaaagacatctggccaaccagggacgagatccaggctgtggagcgacaatatgttattcctggcatgttcaaggaggtgtaccagaaaattgagaccgtcaacgaaagctggaatgccctggccaccccgtctgacaagctcttcttctggaacagcaaaagcacttacatcaagagcccccccttttttgaaaacttgaccctcgacctacagcctcccaagtctattgtcgacgcctacgttctgctaaacctcggcgactcagttacaaccgatcacatctctcccgctgggaacattgcccgaaacagccccgcagctaggtatctgaccaatcggggactcactccacgtgagttcaactcttacgggtccagaagggggaacgatgcggtcatggctcgcggcaccttcgctaatattcggctgttgaacaggtttttgaataaacaggccccacagaccatccaccttccttccggggaaattctggatgtttttgatgccgccgaacgataccagcaggctgggcttcctctcatcgttctcgctggaaaagaatacggggcagggagttcacgggattgggcggccaagggcccttttctcctggggatcaaagcagttctggcagagtcatatgaacgcatccaccggagcaacctcgtcggaatgggcgtcatacctttagagtatctgcccggcgagaacgccgatgcactggggctcactggacaggaaaggtacacaattatcatccctgagaatcttaagcctcaaatgaaagttcaagtgaagctggatacaggaaaaaccttccaagccgtgatgaggtttgacactgatgtagaactgacctacttcctcaatggcggtatcctgaattacatgattcggaagatggccaaatag

SEQ ID NO: 106848 - DNA, 2346 bp, synthetic construct
  misc_feature 1..2346: note = Description of Artificial Sequence: Synthetic coding sequence
  source 1..2346: mol_type = other DNA
cagttagagcctaggtctgctcgcgaaagagtgccccttttaggatctggatccccggtagctggtgcccctccatgtagtcggcggaatacatggccctccgttataatgtccaacccatttgcacacctcgcagaacctctggacccagtccagcctggaaagaaattcttcaatctgaacaaattggaagacagtcggtacggcaggcttcctttctctattcgggtgctgttggaggccgctatccgaaactgtgatgagttccttgtgaaaaagcaggacatcgagaatatattgcattggaacgttactcagcacaagaacattgaagtgccttttaagcctgctcgggtgatcctccaggacttcaccggtgtgcccgcagtggtcgactttgctgccatgagggacgccgttaaaaagctgggcggggaccccgagaaaatcaatccggtgtgccctgctgacttggtcattgatcacagcatacaagtggactttaatcggcgcgccgattcactgcagaagaatcaggacctcgagtttgagcgcaacagggaaaggttcgagtttctcaagtggggaagtcaagcgttccacaacatgcggatcatacctcctgggagtggaataattcatcaggtgaatctggaatatctagcaagagttgtctttgaccaggacgggtactattaccctgattctctggtgggcactgatagccatacgacaatgattgatggccttggaattctgggctggggcgtgggtggaattgaagctgaggctgtgatgctggggcagccaattagtatggtgctgcctcaggttattggatatcggctcatggggaaacctcatcctctggtaacgtccaccgatattgtgctcaccatcactaagcatctgcggcaagtgggagtggtggggaagtttgtggagttcttcgggcctggggttgcccaactgagtatagccgatcgtgcaacaatagccaacatgtgtcccgaatacggtgcgacagccgccttcttccctgtggacgaagtgtccatcacttacctggtacagacaggacgagatgaagagaagctcaagtacatcaagaaatacctgcaggctgttggtatgttccgcgactttaacgacccttctcaggatccggattttacacaggtagtggagctggacctgaagactgtggttccttgctgtagcgggccgaaaaggcctcaagacaaggtggccgtctcagatatgaagaaagactttgaatcctgccttggtgccaagcagggctttaagggatttcaggtggctccggaacaccacaacgaccacaagacctttatctatgataatacagaatttacactcgcccatggaagcgtagtgatagccgccattacatcttgcactaataccagcaatccctctgtgatgcttggcgctggattgcttgccaagaaagctgtggacgccgggttgaacgtgatgccctacatcaagactagtctgtctcccggcagcggggtggtgacctattacctgcaggaaagcggcgttatgccgtaccttagccagctgggctttgacgtcgtaggatacgggtgcatgacatgcatcgggaactctggcccactgccagaaccagtcgtggaagctatcacacagggtgacctggttgcagttggggtcctctctggcaataggaatttcgaaggacgcgtacaccctaacaccagggccaactatctcgcctctcctcccctggtaattgcctacgcaattgctgggacaattaggatcgactttgagaaagaaccactgggcgtcaacgccaaggggcagcaagtattcctgaaggatatttggcccacaagggacgagattcaggctgtggagcgccagtacgtgatccctggcatgttcaaagaagtctaccagaagatcgagacagtcaatgagtcgtggaatgccttagctacaccttccgataaattattcttttggaactcaaaatctacatatatcaaatccccccctttcttcgagaatctgacacttgacctgcagccacccaagtccatcgtggacgcttatgttttacttaacctgggagacagtgtcacaaccgaccatatctcccctgctgggaacatcgcacgtaacagtcccgctgctaggtatttaaccaacagaggatttgagaggcaactgacccaggagaacacagacttgtgtcttagcccacctctcttgacttctctcagctctccccttaaactgtggggccagctattctgtcacggcgagcagtgcctgggggacctggaaaagtag

SEQ ID NO: 106849 - DNA, 2373 bp, synthetic construct
  misc_feature 1..2373: note = Description of Artificial Sequence: Synthetic coding sequence
  source 1..2373: mol_type = other DNA
atgagggatgccgtcaagaagcttggaggagatcccgaaaagatcaatccagtgtgcccggccgatctagtgatcgaccacagtatccaggtcgattttaacaggcgcgctgattctctccagaagaaccaggacctggaatttgaacggaatagggagaggtttgaatttctaaaatggggtagtcaggcatttcataatatgaggataattcctcccggtagcgggattattcaccaagttaatttagaatatctggcacgggtcgtgtttgatcaagacggatattactaccctgactcactagtgggaacggacagccacacgacaatgatagacggcctaggcattctgggatggggtgtgggcgggattgaggctgaagccgtaatgctgggccagccaattagcatggtcctgccacaggtgatcgggtaccgtctgatgggaaagcctcatcccctggtaacatccacggacatcgtgttaacaatcaccaagcacttacgtcaggtgggggtcgtgggtaagttcgttgagttttttggaccgggagttgcacagttatcaatcgcagaccgcgcgaccatcgccaacatgtgtcccgagtatggcgcaacagctgcttttttcccagtggacgaggtgagcattacatacttagtgcagaccggacgggacgaagaaaagttaaagtatattaagaagtacttgcaagcagttggtatgttccgagacttcaacgaccctagtcaggaccccgactttactcaggtagtggagctcgacttgaaaacggtggtaccttgctgttccggcccaaaacgaccgcaagataaggtcgccgtgagcgacatgaaaaaagacttcgagagctgtctgggagctaagcagggctttaaagggttccaggtcgcaccagagcatcataacgatcataagacttttatatacgataacaccgagttcaccttggcacacgggtcagtcgtgatcgccgcaatcacgtcctgcaccaacacaagtaacccttccgtgatgttgggcgcgggactactggctaaaaaagctgtggatgccggactcaatgtcatgccttatattaaaacttcattgtcccccggttccggggttgttacttactacctgcaagaatcgggagttatgccctacctcagccagctggggttcgacgtggttggatacgggtgtatgacctgtatcggtaatagcggccctctgccagagcctgtggtcgaagccattacacaaggggatttggttgccgtcggtgtgctgtccggaaatcggaatttcgaggggagagtccaccccaatactagagccaattacctcgcctcccctcccctggtaatcgcatacgccatcgcaggcacaatcaggatcgattttgaaaaagaaccactgggcgtgaatgctaaaggccagcaggtgttcttaaaagatatctggcccacccgggatgagatacaggctgtggaacggcaatacgtcattcccggcatgtttaaagaagtttaccagaagatcgaaacagttaatgaaagttggaatgctctcgccacacctagcgataaactgttcttctggaactccaaatccacttatattaagagcccgcccttttttgaaaatctgactctggatctgcaaccccccaagtctattgtagatgcctacgtgttgctgaacctcggggactccgtcaccaccgaccacattagcccagccgggaacatcgctcgcaactcccccgctgcccggtaccttacgaatcgggggctgaccccaagagagttcaactcctacggctcacggagggggaatgatgctgtgatggcaaggggaaccttcgccaatattcggctgcttaataggtttctcaataaacaggcccctcagacaatccatctgcccagcggcgaaattttagacgtgtttgacgccgcagaacggtaccagcaggctgggctcccacttattgtcttggcaggaaaggaatacggtgctggcagttccagagactgggcagcaaagggcccatttctcttgggaatcaaggccgtcctggcggagagctacgagcgcattcacagatccaatcttgtggggatgggcgtcatcccactcgaataccttcctggggagaacgccgacgctttggggctgactggccaggaacgttacaccattatcattccagagaacctgaagccacagatgaaggtgcaggtgaagctggacaccggtaagacctttcaggcagtgatgagattcgacaccgatgtcgagctgacctactttctgaatggaggcattctcaactatatgattaggaagatggccaagtag

SEQ ID NO: 106850 - DNA, 333 bp, synthetic construct
  misc_feature 1..333: note = Description of Artificial Sequence: Synthetic coding sequence
  source 1..333: mol_type = other DNA
atggcaaagcaccaccctgatctgatcttttgcagaaagcaggccggcgtggccatcggtaggctctgtgagaagtgtgacgggaagtgcgtcatctgtgactcctacgtgagaccatgcactctggtgagaatctgcgacgagtgcaattatggatcataccagggacgttgtgtgatttgcggcggccccggagtgagcgatgcatactattgtaaggaatgtaccatccaggagaaagaccgggacggatgccccaaaattgtcaatcttggctcttcaaagacggaccttttttacgaaaggaaaaagtatgggttcaagaagaggtag

SEQ ID NO: 106851 - DNA, 2418 bp, synthetic construct
  misc_feature 1..2418: note = Description of Artificial Sequence: Synthetic coding sequence
  source 1..2418: mol_type = other DNA
atggctccttatagtctgctggtgacacgtctgcagaaggctctgggggtccgacagtatcatgtggcctctgtcttgtgtcagagagcaaaagtcgcaatgagccactttgagcctaacgagtacatacattacgacctcctcgagaagaatattaacatcgtgcgaaaacgattaaaccggcccttgacactaagtgaaaagatcgtgtacggccatcttgatgacccggccagtcaggaaatcgagaggggcaaaagttacctgcggctgcgcccagaccgcgtcgcaatgcaggacgcaactgcccaaatggcgatgttacagtttatttcgagtggtttaagtaaagtggctgtcccaagcacaatccactgtgatcatctgatcgaggctcaggtaggaggcgagaaggatctaagacgggccaaggacattaatcaagaggtttacaattttctggctaccgctggggcgaagtatggcgtcggtttctggaagccaggaagtgggatcattcaccaaattattctggaaaactatgcataccccggggtccttttgatagggacagattctcatacccctaatggcggcggtttaggaggcatctgcatcggtgtcggcggcgccgatgcggtggacgtgatggcggggattccttgggaactgaagtgcccaaaagtaataggggtgaagttgaccggttcactgtctggctggtcctcaccaaaggatgtcatccttaaggtagcaggaattcttaccgtaaagggggggaccggggctatcgtggagtatcacggcccaggggtcgacagcatatcatgcaccggggaagaggggggacaggctacgtggccattaccctgcgccggtcccgatgggtcccctgtcggcagtagatcggggatggcaaccatctgtaacatgggagctgaaattggagctaccacttccgtgttcccttacaaccaccgcatgaagaaatatctgagtaaaacggggcgagaggacatcgctaacttggctgatgagttcaaggaccatctggtgcccgacccaggatgtcattacgaccaactaattgaaatcaatctgagcgaactgaagcctcatatcaacggtcctttcacacccgatcttgcacaccccgttgctgaagtcgggaaagtcgccgagaaggaagggtggccattggatatccgggttggactgatcggttcttgcacaaactcgagttacgaagacatgggccggagcgctgctgtggccaaacaggcactggcacacggcctcaagtgtaagagccagttcactatcactcccggcagtgaacaaatcagagccaccatagagagagatgggtatgctcaaattctccgcgatctgggcggtatcgttctggcgaacgcatgcggcccatgtattggccagtgggatcggaaagatattaagaaaggggaaaagaacactattgttacttcttacaatcgcaacttcaccgggaggaatgacgccaatccggagacacacgcttttgtcacaagtcccgaaatagtgactgctctggccatcgccggcacactgaagttcaaccccgaaactgactaccttacaggtaccgacggaaagaaatttcgactggaagctccggacgctgatgagctgcctaaaggcgaatttgatccaggacaggatacctaccagcaccctcctaaagactcgtcgggccagcatgttgacgttagccctacctcacagcgactgcaactcctggaaccttttgacaagtgggacggcaaggatttagaggacctacaaattcttataaaggttaaaggtaaatgtacaactgatcatattagcgccgccggcccatggttgaagtttcgcggacatctcgacaacattagtaataaccttctgatcggagcaataaatatcgaaaacggcaaagccaatagcgttagaaacgccgtcactcaggaatttggccccgtgcccgatacagcccggtattacaagaaacacggaatacgctgggtggtcataggcgatgagaattatggtgagggcagcagcagggagcacgctgctctggaaccccgccacttaggagggagagcaatcattacaaaaagcttcgccagaattcatgagactaacctgaagaagcagggcctgcttccactgaccttcgcagatccagcagattataacaagatccatccagtggataagctgaccattcagggtctgaaagacttcactcctgggaaacctttaaagtgcattattaagcacccaaacggcacgcaagaaacaatcctgcttaaccacacctttaacgagacccagattgaatggttccgcgcaggatccgcgctgaatcggatgaaggagttacagcaatag

SEQ ID NO: 106852 - DNA, 1506 bp, synthetic construct
  misc_feature 1..1506: note = Description of Artificial Sequence: Synthetic coding sequence
  source 1..1506: mol_type = other DNA
atggccactatttgtaacatgggggcagaaatcggtgcaactacatctgtttttccatataatcataggatgaaaaaatatctgtcaaagacaggccgtgaagatatcgccaacctggcagatgagtttaaggaccatctggtacctgaccccggctgccactacgatcagttaattgaaataaatctgtctgagttaaagccccacattaatgggcctttcacccccgacctggcccacccagtcgcggaggtaggaaaggtggccgagaaggaaggttggcctcttgacattagggtgggcctgatcggaagttgtactaatagctcatacgaagacatgggtcgcagcgcggcagtggccaaacaggctctggctcacggactgaagtgcaagtcccagtttacaatcacccctggcagcgaacagatcagagccactatcgaaagggatggatatgcacagattctgcgggatctggggggaatagtcctggctaatgcctgcggcccgtgcatcggtcagtgggaccggaaggacatcaagaagggcgagaagaatacaattgtcacttcttacaatcggaattttacgggccggaacgatgctaatcctgagacccacgctttcgttacaagccccgaaatagtcactgccttggccatagcgggaaccctcaaattcaacccagaaacagactatctgacgggtacagacgggaagaaattccgcctggaggcacccgacgctgatgagctgccaaaaggggagttcgaccccggacaagatacttaccaacacccccccaaggacagcagtggacaacatgtcgacgtgtcaccaacgtcccagcggcttcagttgctggagccttttgacaaatgggacggaaaggacctggaggatctgcagattctgatcaaagtgaaagggaagtgcaccaccgatcacatctccgctgccggaccatggttgaagttccggggtcacctcgacaacatttcgaacaacctgctgatcggggcaatcaatattgagaacggcaaggccaattcagtgaggaacgcagttacccaggaattcggccccgtcccagataccgctcgatactataaaaagcacgggatcagatgggtcgtgataggtgatgagaactacggggaggggtcgtcaagagaacacgctgccctggaaccacgacacttagggggccgggctatcatcactaagtcctttgctcgcatccacgagactaaccttaaaaaacaaggtttacttcctctgacgttcgctgatcccgcagactacaacaagatccacccagtcgataagctgacaattcagggtctgaaggattttaccccgggcaaacctctgaagtgtattatcaagcacccaaacggcacccaggagaccattcttctgaaccacaccttcaacgagacacagattgagtggtttcgagctggctccgcccttaaccgcatgaaggagctgcagcagtag

SEQ ID NO: 106853 - DNA, 2286 bp, synthetic construct
  misc_feature 1..2286: note = Description of Artificial Sequence: Synthetic coding sequence
  source 1..2286: mol_type = other DNA
atggcaccgtattccctgctggtgaccagattgcagaaggctctcggcgtgcggcagtatcacgtcgcttccgtcctctgtcagagggccaaagtggctatgtcccacttcgagcccaatgaatatatccactacgacctgctggagaagaatatcaacattgttaggaaacgcctcaaccggcctttgacactctctgagaagattgtttatggccacctggacgacccagcatcacaggaaattgagcgtgggaaaagctatcttagattaaggccagaccgggtggcgatggtcgccgtgccctccacaattcattgtgatcatcttatcgaggcccaggtgggcggggagaaggatttaagacgcgcaaaagatataaatcaggaagtgtataacttcctggccacagccggcgccaaatatggcgtaggcttttggaaaccaggaagcggaatcatacaccagatcatattagagaactatgcctatccaggggtcttactgatcggcaccgattcacacacgcctaacgggggtggactcggggggatatgcatcggcgtgggcggtgcagatgccgtcgacgtaatggccggaatcccgtgggagctcaaatgccccaaggtgattggcgtgaagctgaccggctctctatctggatggtcctccccaaaggacgttatactgaaagtggccggaatcctcaccgtcaagggcggcacgggcgcaatagtggaatatcatggcccaggcgttgattcaatttcctgtacaggcatggctacaatttgtaatatgggcgcggagattggagccacaaccagcgtgttcccatacaaccacagaatgaagaagtacctgagtaagaccggtcgcgaggatatcgccaatctggccgacgagtttaaggaccatctggtgccggatccaggctgccactacgaccagctcattgagatcaatctgagcgaactgaagcctcacatcaacggcccatttacaccagacctggcacaccccgtggcagaggtgggcaaagtcgcagagaaggagggctggccattggacatccgcgtgggcctcataggctcatgtactaatagcagctacgaggacatgggacgcagtgctgctgtggcaaaacaagccctcgcccatggtctgaaatgtaaaagccagtttacgatcacacccgggtcagaacagattagagccactatagaacgcgacggctatgcccaaattctcagggatttaggggggatcgttcttgccaatgcctgtggtccctgcataggtcagtgggaccgcaaggacattaagaaaggcgagaagaacacgattgtgacctcatacaaccgaaactttacaggtcgcaacgacgctaaccccgagactcacgcatttgtgacctctccagaaattgtgacagccctggctatagctggtacactgaaatttaatcctgagactgactatttgacaggcacagacggcaagaagttccgtcttgaggctccagatgccgacgagctgcctaagggcgagtttgatcccggtcaggacacttaccagcaccctcctaaggactcttctggccagcatgtcgatgtgtcacctacttcccagcgtctccaacttcttgaacccttcgacaaatgggacggtaaggacctggaagatctgcagattcttatcaaggtgaagggtaagtgtacaactgatcatattagcgctgccggcccctggcttaaattccggggccacctcgataatatctccaataatctgcttatcggcgccatcaacatcgagaacggtaaagccaatagcgttagaaatgcggtaacgcaagaatttggcccagtcccagacactgcccggtattataaaaaacatgggattcgctgggtggtcatcggcgacgagaattacggagaaggctcctcacgggagcacgcagctctcgagccacgccatctcggtggccgagccattatcaccaagtctttcgctaggatacacgaaacgaacctgaagaagcagggacttctccctctgaccttcgcagacccggccgattacaacaaaattcatcccgtcgataagctcacaattcaagggctgaaagacttcacgcctggtaagccattgaaatgtatcatcaagcatccgaacgggacccaagagacaatactgttgaaccacacatttaatgagactcagatagagtggtttagagctgggagcgccctgaatcgcatgaaagagctgcagcagtag

SEQ ID NO: 106854 - DNA, 756 bp, synthetic construct
  misc_feature 1..756: note = Description of Artificial Sequence: Synthetic coding sequence
  source 1..756: mol_type = other DNA
atggagttaagcgccataggagaacaggtgtttgccgtcgagtctatcaggaaaaagcgtgtcagaaaaggtaaagtggagtatcttgtcaagtggaagggctggcctccaaagtactcaacatgggagccggaggagcacatattagatccccgcctcgtgatggcctacgaagaaaaagaagaaagggacagggcctccggctacaggaagcgaggacctaaacctaaaagactcctcctccagcgcctgtacagtatggacctgaggagcagtcacaaggctaaggggaaagagaaattatgttttagcctgacgtgcccccttggttccggatccccagagggggtggtcaaagcaggggcacccgagcttgtggataaaggccctctggtccccacactgccgttcccgctgcggaagcctcgaaaggctcataaatatttgagactgtctagaaagaaattccccccacggggccctaatctggagtcccattctcacagaagagaacttttcctgcaggagccacccgcacctgacgttttacaagcagctggtgaatgggagcccgctgctcagccacccgaagaagaggccgatgcagatctcgcagagggccctccgccttggactcctgccctgcctagctccgaagtaactgtaacggacattactgccaactccataacagtaactttccgagaggcccaggcagcagaaggcttcttccgggacaggtcagggaagttctag

SEQ ID NO: 106855 - DNA, 633 bp, synthetic construct
  misc_feature 1..633: note = Description of Artificial Sequence: Synthetic coding sequence
  source 1..633: mol_type = other DNA
atgaaccgcttcctgttgttgatgagcctatatctcctgggctcggcaagaggcacctcctcccaaccaaatgaactgtcaggttctattgatcatcaaacgagcgtccagcagctcccaggagagccagccgccacagagcacgcagagggcgagcataccgtgggggagcagcctagtggcgagcagcctagcggtgaacatttgtcaggtgagcagcctctgagcgagctggaatccggagaacagccatctgatgaacagccaagcggcgagcacgggtcaggagagcaacccagcggcgaacaggccagtggagaacagcccagcggtgaacatgcctctggtgaacaggcgagcggcgcccccatctcctcaacttccacaggtaccatcctgaactgttatacttgtgcctacatgaacgaccaaggaaaatgcctgaggggagagggaacttgcatcacccagaacagccagcagtgcatgctgaagaagattttcgagggtggaaaactccaattcatggtgcagggttgcgaaaatatgtgtccctccatgaatctattcagtcatgggactcgtatgcagatcatctgctgtcgtaatcagtcgttttgcaacaaaatctag

SEQ ID NO: 106856 - DNA, 741 bp, synthetic construct
  misc_feature 1..741: note = Description of Artificial Sequence: Synthetic coding sequence
  source 1..741: mol_type = other DNA
atgaatcggtttctcctgttgatgtccctgtacctgctcggaagcgctagaggcactagctcccagcctaatgaactgagcggaagtattgaccatcagactagcgtgcagcagctgcctggagagtttttttctctcgagaatccttccgatgccgaggctctctacgagacttcttcgggcctcaacaccctttctgaacacggaagctcagagcatgggagttccaagcacacagtggctgaacacaccagcggcgagcatgccgaaagcgaacatgccagtggagagcctgccgctaccgagcatgctgagggcgaacacaccgtgggcgagcaaccttccggcgagcagccaagtggagaacatttaagcggcgagcagcccctgtctgagctggagtctggagagcaaccttctgacgagcagccatctggtgagcatggcagcggggagcaaccatcaggcgaacaggcgtctggtgagcaaccctcaggcactatcctcaactgctacacatgcgcatacatgaacgatcagggcaaatgtctgagaggcgaggggacgtgtatcacgcagaactcccagcagtgtatgctgaaaaaaattttcgaaggcgggaaacttcaatttatggtgcaggggtgcgagaacatgtgtccctccatgaatttgttttcccacggcacgaggatgcaaatcatttgctgcaggaaccagagtttctgtaataaaatctag

SEQ ID NO: 106857 - DNA, 468 bp, synthetic construct
  misc_feature 1..468: note = Description of Artificial Sequence: Synthetic coding sequence
  source 1..468: mol_type = other DNA
atgaacagattcttgctgcttatgagtctctatttgctgggatcggcaagggggacctcctcccagcccaatgaactgtctggaagtatagaccaccagacctctgtacagcaactgccgggagagcagcccagtggagagcagccctccggggaacatctgagcggagagcaacctctgtctgaactggagtctggggagcaacccagtgatgagcagccgtctggtgaacacggcagcggagaacagccatctggtgaacaggcatcaggggagcagccatccggagaacatgcttcgggcgagcaggcttctggcgcaccaattagttctacctcaacaggcggcaaacttcagttcatggtgcaggggtgcgagaacatgtgcccgagcatgaacctcttctcacatggaaccagaatgcagatcatttgttgcaggaaccagagtttctgtaacaagatctag

SEQ ID NO: 106858 - DNA, 498 bp, synthetic construct
  misc_feature 1..498: note = Description of Artificial Sequence: Synthetic coding sequence
  source 1..498: mol_type = other DNA
atgaacagatttctgctgctgatgtccctgtacctgctcggcagtgctaggggtacttcctcacagcccaacgagttgtccggttcaatcgatcatcagacctccgtgcagcagcttcccggggaaccagccgccacagagcacgcggaaggagagcacaccgtgggggagcaaccttccggcgaacagccatcgggagagcacgcctccggtgagcaagcttcaggtgctcccatatccagcacgagcacaggaacgatcctgaactgttacacttgcgcttacatgaatgaccaggggaagtgtctgcggggtgaagggacttgtataacccaaaattcccagcaatgcatgctcaagaagatatttgaaggagggaaactacaattcatggttcagggctgcgaaaatatgtgtccctcgatgaacctattttcccatggcaccaggatgcagatcatatgctgcaggaaccagtcgttttgtaacaaaatttag

SEQ ID NO: 106859 - DNA, 246 bp, synthetic construct
  misc_feature 1..246: note = Description of Artificial Sequence: Synthetic coding sequence
  source 1..246: mol_type = other DNA
atgaacagatttctcctgctcatgagtctttatcttttggggagcgccagaggtactagtagtcagccaaatgagctctctggttctattgatcaccagacctccgtgcaacagctccctggtggtaagctgcagttcatggtccaaggctgcgagaacatgtgccctagtatgaacttgttcagccatgggacccggatgcagattatctgttgtcgaaaccagtcattctgtaacaaaatatag

SEQ ID NO: 106860 - DNA, 366 bp, synthetic construct
  misc_feature 1..366: note = Description of Artificial Sequence: Synthetic coding sequence
  source 1..366: mol_type = other DNA
atgaacagatttctcctgttgatgtctttgtacctgctaggatccgcaagggggactagcagccaaccaaacgagctgagtggtagcattgatcatcagacgtctgtccagcagttacccggcaccatcctgaattgctatacatgcgcctacatgaacgaccaggggaaatgcctgcgaggagagggcacatgtatcacgcaaaacagtcagcagtgcatgctgaaaaaaatttttgagggtggcaagctacagttcatggtgcagggatgcgagaacatgtgcccttccatgaacctgttttcccacgggaccaggatgcaaattatctgttgccggaaccagtctttctgtaataagatttag

SEQ ID NO: 106861 - DNA, 588 bp, synthetic construct
  misc_feature 1..588: note = Description of Artificial Sequence: Synthetic coding sequence
  source 1..588: mol_type = other DNA
atgaacaggttcctccttctcatgagcctgtacctgctcggaagcgcaaggggcacttcatcgcagcctaatgagctcagtggatcaattgaccatcagacatccgtccagcagcttccaggtgagcagccctctggagagcagccgagtggcgaacatctctcaggggaacagcctctgtccgaattggagtctggcgagcaaccctccgacgagcaaccatctggtgagcacggttccggcgagcagccaagcggagaacaggcttctggggagcagccgagtggagaacatgcctctggggaacaggcctctggagctcctatatcctctacctctacgggcactatcctgaactgctatacgtgtgcatacatgaacgaccagggaaagtgcttgcgcggcgaaggtacttgcatcacacagaacagccagcagtgtatgctgaagaagatttttgaaggagggaagttacagtttatggtccaaggatgtgaaaacatgtgcccatctatgaatctgtttagtcatggcaccagaatgcagattatctgctgtcgaaaccagtctttctgtaataaaatctag

SEQ ID NO: 106862 - DNA, 741 bp, synthetic construct
  misc_feature 1..741: note = Description of Artificial Sequence: Synthetic coding sequence
  source 1..741: mol_type = other DNA
atgaaccgattcctgctgttaatgagcttatatctgttggggtctgctagaggaacttcctcccagcctaatgagcttagcggtagtatagaccaccaaacatctgtccagcagctgccgggcgagttcttttctttggaaaatcctagcgatgccgaggcgttgtatgagacttccagcggacttaataccctatccgaacatgggtcctctgaacacgggtcatcaaaacacacagtggccgagcatacctccggagagcatgctgagtctgagcacgcttctggagaacccgccgccaccgaacatgcggagggggagcataccgttggagagcaaccctctggggagcagccttctggggagcatttgtcgggtgaacaacccttaagtgagctggagagtggagagcagcccagcgacgagcagccatcaggtgaacacggatcaggggagcagccttccggtgaacaagcctctggggaacaaccatccggaaccattttgaattgttatacatgtgcctacatgaatgatcagggaaagtgtttacgtggagaggggacatgtattacgcagaacagtcagcagtgcatgttaaagaagatctttgaaggcgggaagctccagttcatggtacaagggtgcgagaacatgtgcccatccatgaatcttttcagccatgggacccggatgcagatcatatgttgccggaatcaatcattctgtaataaaatttag

SEQ ID NO: 106863 - DNA, 513 bp, synthetic construct
  misc_feature 1..513: note = Description of Artificial Sequence: Synthetic coding sequence
  source 1..513: mol_type = other DNA
atgaacaggtttctcttgttaatgtcattatacctgctgggctccgccagagggacgagctcccaacctaatgaattgagtggtagtattgaccatcaaacatccgtgcagcaactgccaggggagcaaccgtctgatgaacaaccctccggcgaacacggtagcggtgagcagccatctggggaacaggccagtggcgaacagccatctggagaacacgcctccggcgagcaggctagtggggcacccatttcgagcacaagcactgggacaattctcaattgttatacctgtgcttatatgaacgatcaaggaaaatgcctgcgaggagaggggacttgcataacgcagaattcacagcagtgcatgttgaaaaagatcttcgagggaggaaaattgcagtttatggtgcagggatgcgagaacatgtgcccgagtatgaacctcttcagccacgggaccaggatgcagattatttgttgcagaaaccagtccttttgtaacaagatatag

SEQ ID NO: 106864 - DNA, 531 bp, synthetic construct
  misc_feature 1..531: note = Description of Artificial Sequence: Synthetic coding sequence
  source 1..531: mol_type = other DNA
atgaatcgttttttactgcttatgtcactgtatctgctgggttccgctcggggcacttcgtcacagccaaacgagttgtccggctcgatagaccaccaaaccagcgttcagcagcttcccggagaacaaccatccggcgagcagccctccggagaacacctttccggagaacagcccctcagtgaactggaaagcggggagcagccatcagacgagcagcctagcggtgaacacggctccggtgagcagcccagcggagagcaggcttcaggtgagcagccgtctggcacaattctgaattgttacacatgcgcctacatgaatgaccaagggaaatgccttcgtggcgagggaacatgcatcactcaaaattcgcagcagtgtatgctgaaaaagatctttgaaggcggaaagctgcaattcatggtgcaggggtgtgagaacatgtgtcccagtatgaatttgttttcacatggcacacgaatgcagatcatttgctgtaggaaccaatcattttgcaacaagatttag

SEQ ID NO: 106865 - DNA, 588 bp, synthetic construct
  misc_feature 1..588: note = Description of Artificial Sequence: Synthetic coding sequence
  source 1..588: mol_type = other DNA
atgaaccggtttctgctgttgatgtcactgtacctgctaggcagtgcccggggcacctcaagtcagccaaacgaattgagcgggtccattgatcatcagacttccgtgcagcagctccctggggagcagccatcaggcgagcagccaagtggcgaacatttaagtggcgaacaacccctctccgagctagaatcgggcgagcagcccagcgatgaacaaccatccggcgaacatggctccggcgaacagcccagcggcgagcaggcttcgggtgaacagccctccggagagcatgcatccggcgagcaggcgtctggggcccccatctctagcacttctactggcactatcctaaattgttatacctgtgcctatatgaacgaccagggtaagtgcttgaggggggaaggcacctgtattacacagaactctcagcagtgcatgctcaagaagattttcgaaggcggcaaactccagttcatggttcagggatgcgaaaatatgtgtccgtccatgaatttattttcccatggcaccagaatgcagattatatgctgtagaaaccagtcattttgtaataagatctag

SEQ ID NO: 106866 - DNA, 633 bp, synthetic construct
  misc_feature 1..633: note = Description of Artificial Sequence: Synthetic coding sequence
  source 1..633: mol_type = other DNA
atgaaccgctttctgctgctcatgtccttgtaccttctgggatccgcaagggggacttcgagtcaaccaaacgagctgtccgggagtatcgaccatcaaacgagcgttcaacagctgccaggagaaccggcggccaccgagcacgccgagggcgagcacaccgtcggcgaacagccatctggagaacaaccatctggagagcatttgtccggggaacaacctttgagcgaactggagtcaggagaacagcccagtgacgagcaaccgagcggagaacatgggagtggggagcaaccatcaggcgaacaggcatccggggaacagccctcaggcgaacacgcctcaggggagcaggcatccggagccccaatttcttctaccagtaccggcaccatcctcaattgctatacctgcgcttacatgaatgaccaaggaaagtgtctacggggtgagggaacctgtatcactcagaatagccaacagtgtatgctgaagaagatcttcgagggcggaaaacttcaatttatggtacagggttgtgaaaacatgtgtccgtcaatgaatctgttttcccatggtacacggatgcagatcatttgttgccgcaaccaaagcttttgcaataaaatctag

SEQ ID NO: 106867 - DNA, 798 bp, synthetic construct
  misc_feature 1..798: note = Description of Artificial Sequence: Synthetic coding sequence
  source 1..798: mol_type = other DNA
atgaatcgttttctgctgctcatgagcctatacttgttaggaagtgcccgcgggactagctcccagcctaatgaactgagcggcagtatagatcaccagacgtctgtacagcagctgccgggagaattcttttctctcgaaaacccctcagatgcagaagcgctttacgaaaccagcagcgggttaaatacgctgtcagagcatggcagttctgagcacggaagtagcaaacacaccgtggcggaacacacttccggcgaacacgctgagtctgagcacgcatccggcgagccggcggctacagaacatgccgagggcgaacacaccgtcggggaacaaccatcaggcgagcagccctccggggagcatctgtctggagagcaacccctgtccgagttggagtctggagagcaaccatctgacgagcagccttcgggcgagcacggctccggtgaacaaccttccggggaacaggcctctggggagcaacccagtggcgagcacgcctctggagaacaggcctcaggggcccccatcagctccacatccacagggaccatattgaattgctatacctgtgcctacatgaatgaccaaggtaagtgcttgagaggtgagggcacctgtatcacccagaactcacagcagtgcatgcttaagaaaattttcgagggggggaagctgcagtttatggtacagggctgcgaaaacatgtgtccaagcatgaacttgttttcacatggcaccaggatgcagattatttgttgtcggaaccagtccttctgtaacaagatttag

SEQ ID NO: 106868 - DNA, 1722 bp, synthetic construct
  misc_feature 1..1722: note = Description of Artificial Sequence: Synthetic coding sequence
  source 1..1722: mol_type = other DNA
atgtctgccgttagccagccccaggcagccccttctcctctcgaaaaaagtccatctactgcgatcctctgtaatacgtgtggcaacgtgtgtaagggcgaggtcctccgcgtacaggacaaatacttccacataaaatgttttgtgtgtaaagcctgcggatgcgatttggcagagggcggcttttttgtgaggcaaggtgagtacatctgcactctggactaccagcggttgtatgggacacgctgtttctcctgcgatcagttcatagaaggcgaggtggtgagcgcactcggcaaaacctaccaccctgactgtttcgtgtgcgcagtgtgccggctacctttcccccccggggaccgcgtgacctttaacgggaaagagtgcatgtgccaaaaatgctccctgccagttagtgtgggttctagcgcacacttgagccaaggacttcggtcctgtggtggctgcggcactgaaattaagaatgggcaagcccttgtggcacttgacaagcattggcatttgggctgttttaaatgcaagagctgtggcaaactcctgaatgcagagtacatctcaaaggatggacttccttactgcgaggcagattatcacgcaaagttcgggattagatgtgattcgtgcgagaagtatatcacaggccgggtgctcgaggccggcgaaaagcactaccatcccagctgtgcgttgtgtgtcaggtgcggacagatgttcgcagagggggaagaaatgtacctacagggctcctcgatctggcatcctgcatgccgtcaagccgcccggactgaagatagaaataaagagacccgaacatcctccgagagtataattagtgtgcctgcctcctctacttctggtagtccctcgagagtgatatacgccaagctgggaggcgagatattagactaccgggatctggctgcgctgccaaaatcaaaggcaatttacgatatcgacagacccgatatgatcagttattccccttatatctcgcatagcgccggagaccgacagtcctatggggagggcgaccaagacgaccgctcttataaacagtgtcgcactagcagcccctcttcgaccggatctgtttcactgggaagatacacacccaccagtcgctcaccgcaacactatagccgtcccggcagcgaatccggacggtctacgcctagcttgtcagtgctgtccgatagcaaacccccaccgagcacgtaccagcaggcccctcgccactttcatgttcccgacacaggcgttaaggataatatatatagaaagccccccatatatcggcaacacgccgctcggcggtcagacggtgaggatggcagccttgaccaagataataggaagcagaagagcagctggctcatgcttaagggcgacgcagatactcgtacaaacagtcctgatctagacacccaatctctgagccatagttcagggacagatcgcgaccctctccagaggatggccggagacagctttcactcccgcgagaagatctatccttatgattcactgatcgttaccaatcgcatcagggttaagctgccgaaggatgtagatcgcacaaggctggagagacacctctcacccgaggaattccaggaagtgtttggtatgagcattgaggagttcgacagattggctctgtggaagcgaaacgatctaaaaaaaaaagcgctgttgttctag

SEQ ID NO: 106869 - DNA, 1041 bp, synthetic construct
  misc_feature 1..1041: note = Description of Artificial Sequence: Synthetic coding sequence
  source 1..1041: mol_type = other DNA
atgttcgctgagggtgaggagatgtatttgcaggggtcaagtatatggcatccagcctgcaggcaggccgccagaacagaagaccgtaacaaagaaactcgcaccagttccgagtccatcatcagtgtgccagctagtagcactagcggctcgccttcccgagtgatatacgccaagctaggcggggaaatcctagactacagggacctggccgcccttcctaaatctaaggcaatttacgacattgaccggcccgatatgatttcttattcaccctacattagccattcggccggagacagacagtcctacggagagtccccacagctcctgagcccaacaccaaccgaaggagatcaggatgatagatcctataagcagtgccgcacctcatctccttcttctaccggcagcgtgtctctaggtaggtatacaccgacttctcgctctccacagcattattctaggcccgataccggggtgaaggacaacatttaccgcaaaccccccatttacagacaacacgccgccagaagatccgatggagaggacggtagccttgaccaagacaaccgtaaacagaaatcatcatggttaatgctgaagggtgatgccgatacacgcaccaactcccccgaccttgatacacagtcgctttctcactcatctggcaccgacagagatcccttgcagcggatggctggcgattcgttccacagtcgtttcccttactctaaatctgacccactgcccggtcacggaaagaatggtctagatcagcggaacgcgaatctggccccgtgtggggcggacccagatgccagttggggaatgcgcgagtataagatatacccatatgactcccttattgttaccaacaggattcgcgtaaagctacctaaagacgtggataggactagactagagcggcacctgtccccagaggagttccaggaggtcttcggaatgtccatagaggaatttgaccgcctggcactgtggaagaggaacgacctgaaaaagaaggctctgttgttctag

SEQ ID NO: 106870 - DNA, 1836 bp, synthetic construct
  misc_feature 1..1836: note = Description of Artificial Sequence: Synthetic coding sequence
  source 1..1836: mol_type = other DNA
atgtctgcggtgagtcagccacaggcagccccttctccgttggagaagagcccttcgactgcaattctctgcaacacatgcggcaacgtatgtaagggggaggtgctgagggtgcaggacaaatattttcacataaagtgttttgtttgcaaggcctgcggctgtgacttagcagaaggggggttcttcgtcagacaaggtgaatatatttgcaccctcgattaccagcggctgtatggtacgcggtgcttctcctgtgaccagtttatcgagggagaagtggtcagcgccttgggcaaaacttaccatccagattgttttgtttgtgcggtttgccgactgccattcccacctggtgaccgtgtgacatttaacggaaaagaatgtatgtgtcagaagtgttcactgccagttagcgtaggttcatcagcccatctgtctcaaggcttgcgctcttgtggcggctgtggaactgagatcaagaatggacaggcactggtcgctctcgataagcactggcacctgggttgttttaaatgtaaatcctgtggtaagctgctgaacgccgaatacattagtaaggacggcttgccctattgcgaagcagactaccacgcaaagttcggcatacggtgtgattcctgcgaaaagtacatcactgggcgtgtcctcgaggctggcgagaagcattatcaccctagttgtgccttgtgtgtacggtgcgggcaaatgttcgctgagggcgaggaaatgtatctgcaaggtagctcgatctggcatcccgcctgtagacaggctgccaggacggaggaccgcaacaaagagacccggaccagcagcgagtccattatctcagtgccggcatcatctacgtccggctcgccgtccagagtgatatacgcaaagctcggcggcgaaattcttgactacagggatctcgccgctttgcccaaatccaaggccatttacgatatcgatcgccccgatatgatttcttacagcccctatatctcccatagtgctggcgaccgacaatcctacggggagggcgaccaggacgatcgttcatacaaacaatgtagaactagcagtccatctagtacagggagcgtgagtcttgggagatatacaccaacaagcaggtctccacaacattactccaggcccggctctgaaagcggtcgctctaccccttcattgtccgttttaagcgatagtaaacccccgccatcgacttatcagcaggccccccgtcattttcacgtccccgacactggagtgaaggacaacatttatcggaagcctcccatctaccggcagcacgcagctcgaagaagcgatggggaggacggaagtctggaccaggacaacaggaaaaagtccagttggctgatgctaaagggagacgccgataccaggacgaacagcccagaccttgatactcaatcactttcacactcatccggcacggacagagaccctctgcagcgaatggctggcgactcgttccatagccgattcccttactctaaatcagaccctctacctgggcacggaaaaaacggtctagaccaacgaaacgccaatttggccccatgtggcgcagatcctgatgcgtcctgggggatgagagagtacaagatatacccctacgattccttgatcgtgactaacagaatcagagtcaagctacccaaagacgtggatcggaccagacttgaaaggcatctttctccggaggagtttcaggaagtattcggcatgagcatagaggagtttgaccgcctggccttatggaaacggaacgatctcaaaaaaaaagcgctgctcttttag

SEQ ID NO: 106871 - DNA, 1719 bp, synthetic construct
  misc_feature 1..1719: note = Description of Artificial Sequence: Synthetic coding sequence
  source 1..1719: mol_type = other DNA
atgtcagccgtgagtcagccacaggccgctccatctcctcttgaaaaaagcccgtccactgcgattttatgcaacacatgcggaaacgtgtgcaagggtgaagtgcttagggtccaggataagtactttcacattaagtgttttgtgtgcaaagcttgtggctgtgatctggccgagggaggattttttgtcaggcaaggggaatacatatgcacactggactatcagaggctgtatggcactaggtgcttctcttgcgatcagtttatcgaaggcgaagtggtcagtgccctggggaagacatatcatccagactgtttcgtttgcgccgtgtgcaggttgcccttccctcctggcgatcgcgttacttttaacgggaaagaatgcatgtgtcaaaaatgcagtttgcctgtgtcagtcggatccagcgctcacctatcccagggactgagaagctgtgggggttgtggaaccgagattaaaaatgggcaggctcttgttgcacttgacaaacactggcatttaggctgcttcaagtgtaagagctgtggtaaacttttgaacgccgagtatatctcaaaggatggcctgccatactgtgaagcggactaccatgcgaagttcggtattaggtgcgactcgtgtgagaagtacatcaccggccgggtcctcgaggctggggaaaagcactatcatccctcttgcgctctctgcgttcgctgcggccagatgttcgcagagggggaagaaatgtatctacagggtagcagcatttggcaccctgcatgtcgacaagcagcccggaccgaggaccgaaataaggaaacacgtactagctccgaatcgataatctctgtcccagcaagttctacgagcggctccccctcccgagtgatttacgccaaactcggaggcgaaattctggattacagagacctggccgccctgcccaaaagcaaggctatctacgacattgatagacctgacatgatttcttatagtccgtatatatcccattccgcaggcgaccgacaaagttatggcgagggtgatcaagacgatcggtcatacaaacagtgccggactagttcgccatcatctactggaagcgtttccctgggcagatatactccaaccagtcgttcaccacagcactactcacgacctggctccgagtctgggagatccacaccctctctctccgtgctgtccgacagtaagccgccaccttctacttaccagcaagcgcctcgacatttccacgtgcctgacactggcgttaaggataacatttatcggaagcctcccatatatcggcagcacgctgccagacgttccgacggggaggatggctccctcgaccaggataaccgcaaaaaaagttcatggttgatgttaaaaggagatgctgatactagaactaacagccctgatctcgatacccagagcctttcccactcatccgggaccgaccgtgacccactgcagcggatggcaggggattccttccacagtcaatataaaatctatccctatgactctctcatcgtgaccaacagaatacgggtgaagttgccgaaggacgtcgataggaccagactggagagacacttgtccccggaagagtttcaagaggtcttcggcatgagtatagaagaattcgaccgcctagccctgtggaaacgaaatgacctcaagaagaaggcattgctattctag

SEQ ID NO: 106872 - DNA, 1596 bp, synthetic construct
  misc_feature 1..1596: note = Description of Artificial Sequence: Synthetic coding sequence
  source 1..1596: mol_type = other DNA
atgagtgctgttagccagcctcaggccgctccctctcccctggagaaatccccaagcacagccatcctgtgcaatacatgcgggaacgtgtgtaaaggggaagtgctgcgcgtgcaggataagtactttcatataaagtgcttcgtctgtaaggcctgtggctgtgatctagccgagggaggcttctttgtgaggcaaggggaatatatttgtactctcgactaccaacgtctgtatggcaccagatgttttagctgtgaccagttcatagagggagaagtggtgtcagcattgggtaagacgtaccaccccgactgcttcgtctgcgctgtgtgtaggctgcccttcccacccggagatagagtcacctttaatgggaaagagtgtatgtgccaaaaatgtagcctgcctgtgtctgttggctcatcggcccacctgagccagggtctacgctcatgcggaggctgtggcacagaaatcaagaacggccaggccctggttgccttagataaacattggcacctgggatgtttcaagtgtaagtcctgcgggaagttactcaacgcggagtatatctctaaggacggcctgccgtactgtgaagctgattaccacgccaaattcggtataagatgtgactcttgtgagaaatacattacaggaagggtgctagaagccggagagaagcactatcacccaagttgtgccctatgtgtgagatgtggtcaaatgtttgcagaaggggaggagatgtacctgcaggggtcatctatctggcacccagcatgcagacaggcggctcgcactgaggatagaaataaggagacccggacttcaagcgagtcgataattagcgtcccagcatcaagtacgtccggctcaccctctagggtgatctacgccaagctcggaggggaaatcttggactatagggacctggctgcccttccaaaaagcaaggccatttacgacattgaccgccccgatatgatttcgtattcaccgtatattagccattcagccggcgacagacaatcctacggcgagtccccccagctcttgagcccaacccccacagagggggaccaggacgatcgcagttacaagcagtgccggaccagcagcccaagctccaccggctctgtgtcccttggccggtatacccctacttcacggagtccacaacattactctcgtcccgcggccagacgatccgatggtgaggacgggagccttgaccaagacaacagaaagaaatcttcctggctgatgcttaagggggacgcagatacaaggaccaattctcctgacttagacacacagagcctatcccacagttcaggtacagacagagacccacttcagaggatggcaggagacagctttcactctcagtacaagatttatccttacgacagcctgattgtgacaaaccgtattcgggtgaagctgcctaaagacgtggatcgaacacggcttgaacgacacctgagcccagaagagtttcaggaggtatttggtatgtcgattgaggaattcgaccgattagccctgtggaaacgcaacgatctcaagaaaaaggcccttttgttttag

SEQ ID NO: 106873 - DNA, 1935 bp, synthetic construct
  misc_feature 1..1935: note = Description of Artificial Sequence: Synthetic coding sequence
  source 1..1935: mol_type = other DNA
atgtccgccgtttcccagccccaggcagctccatcccccctcgagaaatccccaagtactgctatcctgtgcaatacttgtgggaacgtctgtaaaggggaggtgttacgcgttcaagataagtactttcacatcaaatgctttgtgtgcaaagcctgcgggtgtgacctagccgagggaggcttctttgtccgccagggtgaatacatttgtacactggactaccagagactgtatgggactcgatgtttcagctgcgatcagttcattgaaggggaagtggtttctgcactcgggaaaacttaccacccagactgttttgtctgtgctgtttgtcggctgcctttcccaccgggagacagagtaacattcaatggtaaggagtgcatgtgccagaaatgtagtctacccgtgtccgtaggcagctcagctcatctatcccagggcctcaggtcctgcggaggatgtggaactgaaattaaaaatggtcaggccctggtagccctcgataagcattggcatctggggtgcttcaagtgcaaatcctgcggcaagctcttgaatgccgaatatatttcgaaggatggactgccctattgcgaggccgattaccacgccaagttcggaattcggtgtgattcttgtgagaagtacattacaggaagagtcctcgaggctggagaaaagcactatcatccaagttgtgcactgtgcgtcagatgcgggcaaatgttcgctgaaggggaggaaatgtatctgcagggttcctcgatatggcatccagcctgtaggcaggctgccaggactgaggatcggaacaaagagaccagaacgagtagtgaaagcatcatctctgtgccggcaagcagtacttcaggcagcccctcacgagtgatctacgctaagttgggaggcgaaatcttagattacagagacctcgctgcactacctaagagcaaggctatctatgatatagatcgccccgatatgatttcttactccccgtacatctcccacagcgctggtgaccgccagagttatggagagggcgaccaagatgaccgcagctataagcagtgcaggacttcttctccctctagcaccggcagtgtgtccctcgggcgctataccccaaccagcagaagcccccagcattattcaaggcctgctggaacagtcagcgtaggaacctcgtcatgtttgtccctttctcagcacccttcccccacaagcgtgttccgacatcattacatcccatattttaggggttccgagtcgggaagatcaacaccttcactcagcgtgttgagtgattctaagccacccccacccccaacatctcgccatctggctacacatgtccccgatacaggcgtgaaagacaacatttataggaagccgcccatctatcgtcagcacgcagcccgcaggagtgacggagaagacggctccctggaccaggacaatcggaagcagaagagtagctggctgatgctgaagggcgatgccgacacccgaactaattctcccgacctggacacacagtcattgtcccatagttcagggacagacagggatcctctacagagaatggcgggggactcctttcatagcaggttcccctacagcaagtctgatcccctgcccgggcatggaaaaaatggactcgaccagcggaatgcaaacttggccccctgcggtgcagatccggacgcttcttgggggatgcgggagtataagatttatccttacgattcacttatagtcacaaaccggattcgggtaaaactgcctaaagatgtggatcggactaggttggagcggcacttaagcccagaggaatttcaggaagtgtttgggatgtccatcgaagagtttgaccgcttggccttgtggaagaggaatgaccttaaaaagaaggctctgctgttctag

SEQ ID NO: 106874 - DNA, 1566 bp, synthetic construct
  misc_feature 1..1566: note = Description of Artificial Sequence: Synthetic coding sequence
  source 1..1566: mol_type = other DNA
atgtccgccgtctctcagccacaggccgcgccctccccactagagaagagtcctagcaccgcgatactgtgtaatacctgcggtaatgtctgcaaaggcgaggtattgcgtgtgcaggacaagtacttccacatcaaatgcttcgtctgcaaagcctgtggttgtgatctggctgaggggggattcttcgtccgccagggcgaatacatctgtaccctcgactaccagagactctacgggacacggtgcttcagctgcgatcagttcatagagggcgaagtcgtctccgctttaggcaagacttaccaccctgactgcttcgtgtgcgccgtgtgtcgactgcctttccccccaggcgatcgggtgacgtttaacggcaaagagtgcatgtgccagaagtgctcactcccagtctctgtagggagctctgcacatctttcacagggcctgcgcagctgtgggggttgtggtacagaaatcaagaacgggcaggccctcgtggctcttgacaagcattggcacctaggctgttttaagtgtaaaagctgcgggaaactcctcaatgctgaatatatttccaaagacggtttgccttattgcgaggctgactatcatgctaagttcggtatacggtgtgactcctgcgagaagtacataactgggagagttcttgaggcaggtgagaagcactatcatccgagctgcgccctgtgcgtgaggtgcggccaaatgtttgccgaaggggaggaaatgtatcttcagggcagctcaatctggcatccggcctgccgtcaggcggctcgaactgaggacagaaataaagaaactcgcacttcctctgagagtatcatttcggtgcctgcgtcttcgacttctggatctccatcccgggtaatctatgctaagttaggaggcgagatcctcgactatcgggatctggccgcgctacccaaatccaaggccatttacgatatcgacaggcctgatatgatctcctattccccatatatctctcactcagccggcgaccgtcagagctacggcgaaggagaccaggacgaccgatcctataagcagtgccgcacctctagccccagttctaccggctctgtttctttaggtagatataccccaacaagccgaagtccacagcactattcacgccccgcagcaaggcgttctgacggagaggacgggtccctagaccaggataacagaaagcaaaagtcttcttggctcatgcttaagggagacgccgacaccaggaccaatagtccggacctggacacccagtccctcagtcacagcagcgggactgaccgggacccgcttcagcgcatggcaggggacagctttcacagccaatacaagatctacccatacgactctctgatcgtcacaaatcgtatccgcgtgaaattgcctaaggatgtcgaccgaaccagactggagaggcatctctcacctgaggagtttcaggaagtattcggaatgagcatcgaagagttcgatcggctggcgctgtggaaaagaaatgacctgaaaaaaaaagccctgctgttctag

SEQ ID NO: 106875 - DNA, 1413 bp, synthetic construct
  misc_feature 1..1413: note = Description of Artificial Sequence: Synthetic coding sequence
  source 1..1413: mol_type = other DNA
atgagcgctgtgtctcagccccaggccgctccgagcccacttgaaaagagccctagcacagccatactgtgcaacacttgcggcaatgtttgcaagggcgaggtactgcgggtgcaggataagtacttccacataaaatgttttgtttgtaaagcatgtgggtgcgatctcgcggaggggggtttttttgtgcggcaaggcgaatacatctgtaccttggactaccagcggctctacggaaccaggtgctttagttgtgatcagttcatcgagggggaggtagtctcagcactggggaagacttatcatcccgactgttttgtgtgtgccgtgtgcaggctcccattccccccaggtgaccgggtcacatttaacgggaaggagtgtatgtgtcagaaatgttccctgcccgtgtccgtgggaagctctgctcacctgtctcagggacttaggtcatgcggggggtgcggcactgagataaaaaacggccaagcactcgtggccctggataaacattggcatcttggatgcttcaaatgtaaatcctgcgggaagctgctgaacgctgagtacattagtaaggacggtttgccttactgcgaggccgactatcatgcaaaatttggcattaggtgcgacagctgcgaaaagtatatcacaggaagggttctggaggccggggagaagcactatcatccaagttgtgccttgtgtgtgcgctgcggacagatgttcgctgaaggagaggaaatgtaccttcaaggcagttcaatctggcaccctgcgtgtagacaggccgccagaacagaagaccgcaataaagagaccagaacgtcctcagaaagtatcatttccgttcccgcaagctctacttcgggcagcccttctagagtgatctacgcgaaattaggtggagagatcctggactaccgagacctagcggctctcccgaagtcgaaggcaatttatgacattgaccgacctgatatgatctcgtacagtccttacatctctcacagcgcaggcgaccgtcaatcatacggagaatccccccagcttttgagccctacacccaccgagggggaccaagacgaccgaagttataaacagtgtaggacctcctcaccttcaagtactggctcagtgagcctgggccggtacacccctacaagccgttcccctcaacattactcccgcccagcagcgagacgcagtgacggcgaagacgggagcctggaccaggataatagaaagcagaagagtagctggctaatgcttaagggtgacgctgacacaagaaccaacagccctgatctggatacccagtctttgtcccacagttccgggacagaccgagaccccctgcagcgcatggctggagatagcttccactcccgtgaatggttcttctag

SEQ ID NO: 106876 - DNA, 1938 bp, synthetic construct
  misc_feature 1..1938: note = Description of Artificial Sequence: Synthetic coding sequence
  source 1..1938: mol_type = other DNA
atgtccgccgtgtcccagccccaggctgcgccttcaccgttagaaaagagccccagtacggcaattctgtgcaatacctgcggaaatgtgtgtaagggggaagtcctgcgagttcaagataaatacttccacatcaagtgcttcgtgtgtaaggcatgcggctgtgacttagctgagggcggattcttcgtcaggcagggggaatatatatgtacacttgattaccagaggctctatggtactcggtgcttctcttgtgaccaattcatcgagggggaagtagtctccgcgctgggcaagacctaccaccccgactgctttgtgtgcgccgtttgtcggctgccattccctcctggcgatagggtgacgtttaatggaaaggagtgcatgtgccaaaagtgcagtttgccagtcagcgttggctcttccgcccacctctctcaaggactgcgaagctgtggcgggtgcggtactgaaatcaaaaacggccaggcactggtggcattggacaaacactggcacctgggctgtttcaaatgcaagtcatgtggtaaattactcaacgcggagtacataagcaaggatggtctgccatactgtgaggcagactatcatgcaaagttcggcatcaggtgcgactcctgcgaaaaatacattacagggagagtgctggaagcaggcgagaaacactaccacccgtcctgcgctctgtgcgtccgctgtggacagatgtttgcagagggtgaggagatgtacctccagggatcaagcatctggcaccctgcctgcaggcaggcagccaggaccgaggatcgcaataaggagacaagaacctcttcggaatccatcatttctgttccagcaagctcaacgtctgggtcaccttcccgcgtgatatatgctaaactgggaggcgagatcctcgattatagagatctggcggctctccccaagagcaaagccatatacgatatcgataggccggacatgattagctattccccttatatttcccactcagcgggggacagacagtcttatggtgagggtgaccaggatgatcgatcttataaacagtgcagaacgtccagtccatcttccactgggtctgtctctttaggccgctataccccaaccagcaggtctccgcagcattactcccggccggctgggaccgtaagtgtcggcacaagcagttgtcttagcctcagccagcacccttctccgacctctgtgtttagacaccattacataccctatttccggggatctgagtccggccgctctaccccatccctctctgttttatcggatagcaagccaccccccagtacttaccagcaggccccgcgacattttcacgtccctgataccggagtaaaagacaacatctaccgcaaacctccgatatatcgccagcatgcagcgagacgatctgatggcgaggacggcagccttgatcaagacaataggaagcagaagtcttcatggctgatgctgaagggcgatgctgacactcgaacaaattcccccgacctggacactcaatctctgtctcacagttccggtacagatagggatcctctccaacggatggccggcgattcatttcactcccgatttccttactccaaaagcgacccacttcccggacacggaaagaacggtctggaccagcgaaacgcgaatctggctccctgcggcgctgatcctgacgcgtcatggggcatgcgggagtacaagatttatccctacgatagcctgattgtgactaatagaatccgggtgaagcttcctaaagatgtcgaccgaactaggctggaacgccacctgtcgccagaagagttccaggaggtgtttggaatgtctatcgaggagttcgacaggctcgcgctgtggaaacgtaatgacctcaaaaaaaaggctctcctcttttag

SEQ ID NO: 106877 - DNA, 1680 bp, synthetic construct
  misc_feature 1..1680: note = Description of Artificial Sequence: Synthetic coding sequence
  source 1..1680: mol_type = other DNA
atgtcggccgtgtcacagccacaggccgccccaagtcctttagaaaagagtccatccactgcaattctgtgcaatacttgtggcaatgtttgcaaaggagaggtgcttagggtgcaggacaagtacttccacattaagtgttttgtgtgcaaggcctgtggttgtgacctggccgaaggaggttttttcgtccgtcagggcgagtatatctgcacactcgattaccagaggttatacggtactagatgcttctcctgcgatcagtttatagaaggcgaggtggtgagcgcactaggcaagacatatcatcccgattgcttcgtgtgcgctgtctgcaggctgccatttccacctggggatcgagttacttttaacggaaaagaatgcatgtgccagaagtgctctctcccagtctcggtcggaagttcagcccatctgtctcagggcctcaggtcatgcggcggttgcggcaccgagataaaaaatgggcaagcactagtggccctcgataaacattggcatctcggctgttttaagtgtaagtcgtgtggaaaattattgaacgccgaatacatatcaaaggatggcctgccctactgcgaggctgattaccacgctaaattcggaatccgatgcgatagttgcgaaaaatatattacaggccgtgtgctcgaggcgggagagaaacattaccatccgtcctgcgccctgtgcgtgaggtgtggccaaatgttcgctgagggagaagaaatgtacctgcagggatcaagtatctggcaccctgcctgcaggcaggcagcccgaactgaggatcgaaataaggaaacgagaacctcctctgagtctatcatcagtgttccagcctccagtaccagcgggagcccttcccgtgtcatctatgcaaaactgggaggcgaaatactggactaccgagatctcgctgctttacccaagtccaaagccatctatgatattgatagaccagatatgatatcttactccccgtatataagccattcggccggtgaccggcagtcctatggggaaggcgaccaggatgacagatcatacaaacagtgtagaacttcatctccttccagtaccggttccgtcagcctggggcggtatacccctacctcaagaagcccacaacattactcaaggcccgccgccagacggtcggatggtgaggatggcagtctggatcaggataatcgcaagaagagctcctggctcatgctgaagggcgacgcagacactagaacaaacagtcccgatctcgacactcagtcactctctcatagcagtggaacagatcgagaccccctccaacgcatggccggcgattcctttcactccagatttccctactcaaagagtgaccctctccccggccacgggaagaatggacttgaccaacgaaatgcaaacctggcaccttgcggagcagacccggatgcctcatggggcatgagagaatacaaaatatatccatacgattctctaatcgtcaccaatcggatccgcgtcaagctccctaaggacgttgacaggacaaggctagagagacatctgtcccccgaagaattccaagaagtgttcggcatgagcatagaagagttcgatagactggccctatggaaaagaaacgacctcaagaaaaaggccctgctgttctag

SEQ ID NO: 106878 - DNA, 1041 bp, synthetic construct
  misc_feature 1..1041: note = Description of Artificial Sequence: Synthetic coding sequence
  source 1..1041: mol_type = other DNA
atgttcgctgagggcgaggagatgtacctgcagggaagctcgatttggcacccagcatgcagacaggcagcgagaactgaggacagaaacaaggagactcggacctcttcggaatccattatcagcgtaccggcgagctccacatcaggcagccccagccgggttatctatgccaaactagggggtgaaatattagattatagggatctagcggctcttccaaaatccaaagccatttacgatatcgatcggccggacatgatatcgtactcaccctacatctcacactcagctggcgaccggcagagttacggggagtcacctcaattactttcccctacccctaccgaaggagatcaagacgatcggtcctacaagcagtgcaggacctcatccccgtctagtaccggatcagtcagcctgggccgatacactcccacctctaggtcaccacagcattacagccgtccagacactggtgttaaagacaatatatacaggaagccaccaatctatcgccaacacgccgctcgccgtagtgatggcgaagacgggtccctggatcaggacaacaggaagcaaaagtcctcatggctgatgttaaagggcgacgcagacacgcgaaccaacagtcccgatctcgatacacagtccctgtcccattcttccggcacggaccgggatcctttgcagcgcatggctggagatagcttccacagtcgattcccttatagcaaatctgacccgttaccgggccatggaaagaacgggttggaccaaagaaacgccaatctcgccccttgtggcgcggacccagatgcctcttggggaatgagagagtataaaatctacccatatgacagcctgattgttaccaaccggattcgtgttaagttacccaaggacgtcgataggacacgattagagcggcacctatctcctgaggagtttcaggaggtgttcggtatgtcaattgaggagttcgatagactggccctttggaaacggaacgacctgaaaaaaaaggccttgctgttttag

SEQ ID NO: 106879 - DNA, 1716 bp, synthetic construct
  misc_feature 1..1716: note = Description of Artificial Sequence: Synthetic coding sequence
  source 1..1716: mol_type = other DNA
atgtccgcagtgtctcagccgcaggcggctcccagtccactggaaaagtccccgtctacagctatcctgtgtaacacctgcggcaatgtatgtaaaggcgaagtccttagggtgcaggacaagtattttcatatcaagtgttttgtatgtaaggcttgtgggtgcgacttagctgaaggcggttttttcgtgagacagggggaatacatctgtactctcgactatcagcggctgtatggtacaagatgcttttcttgtgaccagttcatcgaaggcgaagtggtgtctgcactgggcaagacctaccaccctgactgtttcgtgtgcgcggtgtgcaggttgccttttccccctggagaccgggtcactttcaatgggaaggaatgcatgtgtcagaaatgtagtctgcccgtgagcgtcggtagctctgctcatctgagtcagggtctgcgcagctgtggaggctgtggcaccgagattaagaatggacaggcactcgttgccctcgataaacactggcatctgggctgcttcaagtgcaaatcttgtgggaagctcctgaacgcagagtatatcagcaaggatggactgccgtactgcgaagcagactaccacgcaaagtttgggatccggtgcgactcatgtgagaaatatattacagggagggtgcttgaggccggcgagaaacactatcaccccagttgcgccttgtgcgttagatgcggacagatgttcgctgagggcgaagagatgtacttacaggggtctagcatatggcatcccgcctgtcgccaggccgctcggaccgaagatcgcaataaggaaacccgcacttcctcagaatccataatatcggtacctgccagtagcacctccggctcgcctagccgcgttatctatgccaaactaggtggtgagattcttgactatagagacctggctgcactccccaagtctaaagctatatatgatatcgataggcccgacatgatctcctactcgccgtatattagtcactctgccggggaccggcagagctacggcgaaggcgaccaagatgaccggtcctataaacagtgcaggactagtagcccatccagtaccgggtcagtgtccctcggccgttacacacctacaagccgtagtccccagcattatagccggccgggctctgagtctggtcggagcaccccttccctttctgtgctatcggactcaaaacctcctccatctacatatcagcaggctcctcgtcactttcacgtgcccgataccggtgtgaaggacaacatctaccggaagcctcccatctaccgtcaacacgctgcccgcaggtctgatggcgaggacggtagtctcgaccaagataatcgaaaaaagagctcgtggttaatgctcaagggagacgctgacacaagaacaaacagcccggacctggacactcagtcactgtcccactcgtcaggaaccgaccgggatcctttacagcggatggccggcgactcttttcatagccagcagatctatccatacgactcattaatcgtaacaaacaggattcgggtcaaactacccaaggacgtagaccgcaccagattggaaaggcatctaagtcctgaggaattccaggaagtttttgggatgagcatagaagagttcgatcgcctggccttatggaagcgtaatgacctgaaaaagaaagctctgctgttctag

SEQ ID NO: 106880 - DNA, 1596 bp, synthetic construct
  misc_feature 1..1596: note = Description of Artificial Sequence: Synthetic coding sequence
  source 1..1596: mol_type = other DNA
atgtcagctgtgagtcagcctcaggcagccccatctccactggagaaatctccgtccactgcaatcctgtgcaacacctgtggcaatgtgtgtaaaggagaggttcttagggttcaggacaaatatttccatattaaatgtttcgtctgtaaggcctgtggatgcgacctagctgaggggggcttttttgtccggcaaggagaatacatctgtacccttgattatcaacggctgtacgggacccgctgcttcagctgtgaccagttcatcgagggagaggtcgtgagtgctttgggtaagacttatcaccctgactgctttgtgtgcgctgtctgtaggttgccctttccgccaggtgacagagtcacctttaacggcaaggagtgtatgtgccagaaatgcagcctgcccgtttcagttgggagctctgcacatctgtcccaggggctccgcagttgcggggggtgtggcacggaaataaaaaatgggcaggctttagtggcactggataagcactggcacctggggtgcttcaaatgcaaatcgtgtggaaagctgctcaatgccgagtacatctctaaggacggattaccctactgtgaggccgactaccacgcaaagtttggaatcagatgcgactcttgtgaaaagtacatcacgggacgcgtgctagaagccggggaaaagcactatcatccgagttgtgctctctgtgtgcgatgtgggcagatgtttgccgagggcgaagaaatgtaccttcaaggctccagtatttggcaccctgcttgtaggcaggcggcccgaactgaagacaggaacaaggaaacacggacttcctccgaaagtatcatcagcgttcccgcctctagtacctccggctccccgagcagggtcatctacgcgaaactcggcggggaaattctcgactacagagatctggccgccttacctaagagcaaggccatctacgatattgacaggccagatatgatctcttattcaccatacatatcccattctgccggagacagacagagctacggcgagagtccccaactcctttccccaacacctactgaaggtgatcaggacgataggtcctataaacagtgccgcacctcatctccatctagtacaggatccgttagcctcggcaggtatacccccactagtaggagtcctcagcattattccagacccgcagcccggcgttcagacggcgaagacggctccctcgaccaagataaccgcaaaaaaagttcctggcttatgctgaagggcgacgctgacacccgcacaaatagcccggacctggacacacagagcttatcccactccagtggcacggatagggatcccctccagcgtatggctggagattcattccactcacgtgaacagatttacccatatgattctttgatagttactaatagaatacgcgtcaagctgccaaaggacgtggatcgcacacggcttgagcgccatttgtcacccgaggaattccaggaggtgtttggcatgagtattgaggagttcgacagactggcgttgtggaagaggaatgatctgaagaagaaggccctccttttttag

SEQ ID NO: 106881 - DNA, 2193 bp, synthetic construct
  misc_feature 1..2193: note = Description of Artificial Sequence: Synthetic coding sequence
  source 1..2193: mol_type = other DNA
atggaagagctgatagtggagttgagactttttctggagctgctcgaccatgagtatctcaccagcaccgtgagagagaagaaagcggttataacgaacatactcctccgcatccagtcctctaagggcttcgatgtgaaagatcatgcacaaaagcaagaaaccgccaattcactccctgcacccccacagatgcctctgccagagatcccccagccatggttaccaccagacagtggacccccgcctctgcctacctcttctctgccagaagggtactacgaagaggccgtgccactctctcccgggaaagctcctgagtacatcacctctaactatgatagcgacgccatgagcagctcgtatgaaagctatgacgaagaggaggaggacgggaagggtaagaagacaagacatcagtggccatcagaggaagccagcatggacctggtcaaggatgccaagatttgtgcttttctcctccgcaaaaaacgatttggccagtggactaaactcctatgtgtgatcaaggacacgaaactgctttgctataagtcctccaaggatcagcagcctcagatggagctcccactacaaggatgcaacattacctacatccccaaagacagcaaaaaaaaaaaacatgaattaaagatcacacaacaagggacagatcctctggtgttggcggttcagagtaaggagcaagccgagcagtggctgaaggtcatcaaggaggcttatagtggatgtagcggaccggtggatagtgagtgcccccctcctcctagcagccccgtacacaaagcggagcttgagaaaaagctctcgagcgagcgcccaagtagtgatggcgagggagtggtggagaatggaattaccacatgtaacgggaaggagcaagtaaaacggaaaaaatcgagcaaatctgaggctaaaggcaccgtatcaaaggtgaccggtaagaaaatcacaaagatcatttcgctgggcaaaaaaaagcctagcacagacgaacagaccagcagcgccgaggaggatgtccctacctgcgggtacctgaatgtgctatccaattctaggtggagggaaaggtggtgcagggtgaaggataataagttgatttttcacaaggatcggactgaccttaaaactcacatcgtttccattccattgcgcggttgtgaagtgatcccaggactggattctaaacacccactgacctttcgactgttgaggaacggtcaggaggtggctgttttagaagcaagctcctccgaggacatgggacgatggattggcatcctgctcgccgaaaccggctcttcgactgacccagaggctctgcactatgactacattgatgtggagatgtctgcctctgtcattcagactgctaaacagacattttgcttcatgaaccgccgcgttatctcagcgaacccttacctcggtggcacaagtaacgggtacgcccatccaagtggcaccgcgcttcactatgacgacgtgccctgtattaacggtagtctaaagggaaagaaaccaccagtagctagcaacggagttaccggcaaaggcaagaccctgtcttctcagcccaagaaagctgatccggccgcagttgtaaagaggaccgggagcaatgctgcacagtataaatacggcaaaaaccgggtggaggcagacgctaagagactgcaaacaaaagaagaggagctccttaagcggaaggaagccctgcggaacagactcgctcagctgaggaaggagcggaaggacctgagggcagctatagaggtgaatgcaggccgcaagccgcaggccatactggaggagaagctcaagcagcttgaagaagagtgtagacagaaggaggctgaaagagtgtctttggagctggagctgactgaagtcaaggaatctctaaaaaaagcactcgctggaggggtgaccctgggactggctatagagcccaagagtggaacttccagtcctcaaagccctgtattccggcataggaccctcgagaactctcctatctctagctgcgatacatcagatactgaaggcccagtgcctgtgaatagcgccgcagtcctgaagaaaagccaagctgcccctgggtctagcccatgcagaggccacgttcttagaaaggctaaggagtgggagctgaagaacgggacatag

SEQ ID NO: 106882 - DNA, 2193 bp, synthetic construct
  misc_feature 1..2193: note = Description of Artificial Sequence: Synthetic coding sequence
  source 1..2193: mol_type = other DNA
atggaagagttgattgttgagctgcgcctgttcttagagctgctcgatcacgaatatcttacaagcaccgtgcgagagaaaaaggctgttatcactaacattctcctaagaattcagtcgtccaaagggtttgacgtgaaggaccacgcccaaaagcaagagaccgctaactccctccctgccccaccccaaatgcctctgccagagatacctcaaccctggctgcccccggatagcggcccacccccgctgccgactagctcactgccagagggctattacgaagaagctgtccctctgtctcccggcaaagcccctgagtacatcacgtccaactatgatagtgacgccatgtctagctcgtacgagagttacgacgaggaggaggaggatggcaaaggcaaaaagacccgacaccagtggccttccgaggaggcgtcaatggatctcgtgaaagacgccaaaatctgtgcttttctccttcggaagaagaggttcggtcaatggacgaagctgctatgtgtgatcaaggataccaaacttttatgttataagtcttctaaggaccaacagcctcagatggaactgccattgcaaggctgtaacattacttatattccaaaagactccaagaagaagaaacacgaactcaaaataacacaacagggcactgaccccctggtgctggcagttcagtccaaggagcaggctgagcagtggctaaaggttattaaggaagcctattctggttgtagcggccccgtcgatagcgaatgccctccccctccttcatccccagtacataaggctgagctcgaaaagaagctgagcagcgaaaggccaagctccgatggtgagggcgtagttgagaacggcataaccacgtgcaacggcaaggaacaggtgaaacgaaaaaagtcaagtaagagtgaagccaaagggacagtctccaaggtgaccggaaagaagatcaccaagatcattagcctcggaaagaagaaacctagtactgacgaacagacctctagtgccgaagaagatgttcccacctgtgggtacttaaacgtgctgtccaatagcaggtggcgggagaggtggtgcagagtcaaagataacaagttaatatttcacaaggaccggactgacctaaaaacacacatagtgtctatccccctgcggggatgcgaggtgatccccggcctggacagcaagcaccccctgacctttagactgcttcggaatggacaagaagtggcagtgttggaggcgtcaagctccgaggacatgggtcgctggatcggcattctgctggccgagacgggcagtagcactgatcctgaagctctgcactatgattacatcgacgtagaaatgtctgctagcgtcatccagacagccaaacagacattttgttttatgaacagaagggttatctcagcaaacccctatctgggaggaacaagtaatgggtacgctcaccctagtggtactgcactgcattatgacgacgtcccgtgtattaatggttccttgaaggggaaaaaaccacccgtggcctccaatggcgtgaccggtaaaggaaagacactatctagtcagcctaaaaaggcggaccccgcagctgtggttaagcgaaccggctccaatgctgctcaatacaaatatggtaaaaatcgcgttgaagcggacgctaagcgactccaaaccaaggaagaggagctgcttaagagaaaggaggccctgcggaataggttggcgcagctgagaaaggagagaaaagacctcagagccgccatcgaagtgaacgccggcaggaagccacaagctatcctggaggagaaactaaaacagttagaagaggaatgcaggcagaaagaggccgagcgagtcagcctagagctagaactaacagaagtcaaagagtccctgaagaaggccctcgcaggcggagtcaccttgggtctagctatcgaacctaaaagcggcactagctctccacagtctcctgtgtttcggcacaggacactcgaaaacagccctatttcgagttgtgatactagtgacacagaaggcccagtcccagtaaattccgcagcggttctcaaaaaatcccaggctgctcctggcagcagcccatgtaggggacacgtgctccggaaagccaaggagtgggaactcaagaacggcacatag

SEQ ID NO: 106883 - DNA, 2445 bp, synthetic construct
  misc_feature 1..2445: note = Description of Artificial Sequence: Synthetic coding sequence
  source 1..2445: mol_type = other DNA
atggaagagttgatcgtggaactgagactgtttttggaattgttagatcacgaatacctgacttccacagtgagggaaaagaaggccgtgattacgaatatactcctcagaatccagtcttccaaagggttcgacgtgaaggatcacgcccagaagcaggagacagctaactctctgcctgcccctccacagatgccgctgcctgaaatcccgcagccctggttgcccccagacagtggcccacctccccttcctaccagcagcctgcctgaaggatactacgaggaagctgtgccactttcgcccggcaaggccccggagtatattacatcgaattatgactccgatgcgatgagtagttcatatgagagttatgacgaagaagaggaagatggaaagggtaaaaagactcggcaccagtggccctccgaggaagcgagtatggacctcgttaaagatgccaagatttgcgcatttcttttacggaagaaaagattcggccagtggacaaaactgctatgcgttattaaagacactaaactgctctgctacaagagctctaaagaccagcaaccgcagatggaactgcccttgcagggctgtaacatcacgtatatccctaaagatagtaaaaagaagaaacacgagctgaagatcactcagcagggaaccgacccacttgtgctcgctgtgcaatccaaggaacaggccgaacagtggttgaaagtcattaaagaggcatacagcggttgtagcgggcccgtggatagcgaatgcccacccccaccttcatcgcctgttcacaaagcagagttagaaaaaaaactgtctagtgagaggccctccagtgacggagagggagtggtcgaaaatggcattactacatgcaacggtaaggaacaggtgaaacggaaaaaatcttccaagtcagaggcgaaagggaccgtcagcaaagttaccggcaagaaaatcacaaagataatttctcttggaaagaaaaaacccagcactgatgagcagaccagtagcgcagaggaagacgtgcctacctgtggttacctaaatgtattgtctaactccaggtggcgtgagcgatggtgccgcgttaaggataataaactgatttttcataaggatcggactgacctcaagacccacattgtgtctatcccccttagaggctgcgaagtcattcctggactggactccaagcatcccctgacattcaggctgctgaggaacggccaagaggtggcggtgctagaagccagtagcagtgaggacatgggccgttggatcggcattctgcttgccgagaccgggtcatctaccgaccctgaggcactgcattacgactacatcgatgtggagatgtcggcttccgttattcagaccgctaagcaaaccttctgtttcatgaataggagagtaatatccgcaaatccctatctcggagggacctcaaacgggtacgctcacccatctggaacagctctgcactacgatgacgtaccatgcatcaacggcagttgggagcccgaagacggattcccagcttcatgtagccgaggcctcggtgaggaggttctctatgacaatgctggattatacgacaatctccctcctcctcacattttcgcccgctatagtccggccgatcgcaaggcgtcccggctttcagcagacaagctgtcttctaatcattataagtacccggcgtcagcccaatcagtcactaatacctcctccgtcggaagagcctccttaggcttaaactctcagctgaagggaaaaaagcctcctgtcgcatcgaacggggtgacaggaaaaggtaaaacactaagctctcagcctaagaaagcagatccggctgcagtcgtaaagcggactggatccaatgcggcacaatataagtatgggaagaatcgagtagaggccgatgccaagcggctgcagacaaaagaagaagagctccttaagaggaaggaggctttgcggaaccgtctggcacagctccgtaaggagcgcaaagacctacgtgcagcaatcgaggttaacgccgggcgcaagcctcaggcgatcttggaggagaagctgaaacagcttgaagaagagtgtcggcagaaggaggccgagcgcgtgagtctggagctggagctgactgaggtcaaagagagtttgaagaaagccctggcaggtggagttacactagggcttgcaatcgaacctaagtctggtacctcgtcaccccagtcgccagtgtttaggcatcgaacgcttgaaaacagccctatatctagttgtgacactagtgatacggagggcccagtccccgttaattccgccgcagttctcaaaaaatctcaagccgcgcccggctccagcccttgtcggggccatgtgctgcgaaaagctaaagagtgggagctgaaaaacggcacatag

SEQ ID NO: 106884 - DNA, 2307 bp, synthetic construct
  misc_feature 1..2307: note = Description of Artificial Sequence: Synthetic coding sequence
  source 1..2307: mol_type = other DNA
atggatcgaggacaggtgctggaacaactattaccagagctcaccgggctgctctctctactcgatcatgagtatctttccgacaccacgctggagaagaagatggctgttgccagtattctgcagagcctccaaccactgccagccaaagaagtgagttatctgtatgtgaacaccgccgatctccactctggacctagcttcgtcgagtccctctttgaagaattcgattgcgacttgagcgacttgcgggacatgccagaggacgatggagagccatcgaaaggagccagtccggagttggccaagtcacctagattgcgaaatgctgctgatctgccacctccccttccaaataaacccccgcccgaggattattacgaggaagcactgcccctgggccccggaaaatcacctgagtacatttccagccacaatggatgcagcccctcccactccattgtcgatggctactacgaggacgcagactcttcataccctgctaccagggtaaacggcgaactgaagagcagctacaatgattccgatgccatgtcctcatcttacgagagttatgatgaagaagaagaagaaggtaagtcgcctcagccccggcatcagtggccatcagaggaggcaagcatgcacttggttcgtgagtgtaggatctgcgctttcctgctccggaagaagcgcttcgggcagtgggcaaaacagctaactgttatccgggaggaccagctgctttgctacaaaagctccaaggatcggcagcctcacttgagactggcattggacacctgcagtatcatatacgttccaaaggatagtagacacaaaagacacgaactgcgtttcacacagggagctaccgaggtgctagttctcgccctgcagtcaagagaacaggcggaggagtggctgaaagtgattagagaggtgagtaaacccgtcgggggcgcagaaggggtcgaagtccccagatctcccgttctgctttgcaagttagacttggacaagcggctgagtcaggaaaagcagacctctgactccgatagtgtcggggtgggggataactgcagcaccttagggaggagggagacttgtgatcatggaaagggtaagaagagcagtctcgctgagcttaaggggagtatgtcaagagcggcggggcgtaaaatcacccgcatcatcggtttctccaaaaagaagaccttggctgatgaccttcagaccagctcaaccgaggaggaagttccatgttgtggctatctgaatgtgcttgtgaaccagggctggaaggagcgctggtgccgtctaaagtgtaataccctgtatttccataaggaccatatggacttacgaacccatgttaatgcaatcgctctacaaggttgcgaggtggcccctggctttgggccacggcatccattcgcctttcggatccttaggaaccggcaggaagttgccattttggaggcttcttgttccgaggacatggggagatggcttgggctactgctagtggagatggggtcccgcgttactcccgaggccctgcactatgactacgtggacgtagagactcttacgtctatcgtgagcgctggacggaactctttcctatacgctcgctcatgccagaatcagtggcccgagcctcgcgtctatgatgatgtcccctacgagaaaatgcaggatgaggaaccagaaagacctactggcgctcaggtgaaaagacatgccagcagctgcagcgaaaaaagccaccgcgtcgaccctcaagtcaaggtgaagagacacgcttcaagtgctaaccaatacaaatatggcaaaaatagagctgaggaggacgcgagacgctacctggttgagaaggagaaacttgaaaaggagaaggaaactattcggacagagctcattgcactgagacaggaaaagagggaattgaaggaggcaatcagatcttcccctggtgccaagctgaaggccctagaggaggcagtggctaccctggaggcacagtgtcgggcaaaagaagagaggagaatcgatctggagctcaaactggttgccgtgaaggagcgactgcaacagtccttggccggcggacctgcgctaggcttgagcgtttcctcaaagccaaagagcggagagactgccaacaaaccacaaaacagtgtcccagagcaaccactgccagtgaactgtgtgtccgagctgcgcaagagaagtccatcaatcgttgctagcaatcagggcagagtgttacagaaagccaaagagtgggagatgaagaagacatag

SEQ ID NO: 106885 - DNA, 2178 bp, synthetic construct
  misc_feature 1..2178: note = Description of Artificial Sequence: Synthetic coding sequence
  source 1..2178: mol_type = other DNA
atggatcggggccaggtattggaacaactgctacccgaactgacagggctgttaagtttgcttgatcatgagtatctgtccgatacaactttggaaaagaagatggcagttgcatcgattctacagtccttacaaccactgcccgctaaagaagtcagctacctctatgtaaacactgcggatctacatagtggtcctagctttgtggaatcgttgttcgaggaatttgactgcgatttgtcagatctgcgggacatgcctgaagacgacggcgaaccatccaaaggggctagtccggaacttgctaagtcccctcggctgagaaatgccgccgacctcccacctccactccctaacaaacccccacctgaggactattacgaagaagcgttacctttaggcccgggcaaatcacccgagtacatcagcagccataatggttgctccccctctcactcaatagtcgatgggtattatgaggatgccgacagcagctatcctgccactcgagtaaatggtgaactcaaatcctcctacaacgactctgacgcaatgtccagctcatacgagtcttatgacgaagaagaagaagaaggtaagagcccccaaccccgtcaccagtggccttccgaggaggcctccatgcacctcgtgcgtgagtgcagaatatgcgccttcctgctgcgaaaaaagagatttggacaatgggcaaagcagttaaccgtaatcagggaggatcagctactttgctacaagtcatctaaagaccggcagcctcacctccggttggcgctcgacacatgttcgatcatttatgtccccaaagatagtaggcacaaacgacacgaactcaggtttacccagggtgccaccgaggttttggtcctggccttacaatcacgtgagcaggcagaagagtggctcaaagtgatcagggaagtgagcaaaccggtcggcggagctgaaggcgtggaggtccctcgttcaccagtgctgctctgcaaactggatctggataaaagattgagtcaggagaaacaaacctcggattcagactctgtgggtgtcggagataactgcagcactctgggtaggcgggagacctgcgatcacggaaaaggcaaaaagagctcactggccgaactgaaaggctctatgtctcgggctgctgggcggaagatcacaagaattatcggcttctcgaaaaagaagacccttgctgacgatctgcagactagctccaccgaggaagaagtgccatgctgcggctacctcaacgtacttgtcaaccaaggatggaaggaacggtggtgtagactgaaatgcaatacactttatttccataaggatcacatggatctgagaacccacgttaatgctattgctctgcagggctgcgaggtcgcccccggatttggcccacggcatccctttgctttcaggatcctgcgaaataggcaggaagtggccatcttggaggcctcgtgtagcgaggacatggggcgctggctgggccttctgttggtggagatggggtcccgcgtgacccctgaagccttacactacgactacgtggatgtggagaccctgacctccatcgtgtctgctggacgcaattctttcctatatgccagatcatgccagaatcagtggcctgaaccacgcgtgtacgatgacgttccttacgagaagatgcaggatgaggagccggaacgacccacgggagcgcaagtcaaacgtcacgcctctagctgttccgagaagtcacatcgtgtcgacccccaggtgaaggtaaaaagacatgccagcagtgccaatcagtacaagtatggaaagaacagagcagaggaagacgccagaaggtacctggtagaaaaggaaaagcttgaaaaggaaaaagagacaatcagaaccgaactcattgcccttcgccaagagaaacgcgagctcaaggaagccattcgaagctctccgggggcaaaattgaaagctctggaggaggccgtcgccacgctggaagcacagtgccgcgctaaagaggaacggcgcatagatcttgagctgaaacttgtggcggtgaaggagagactgcagcaatccctagccggcggtcctgcattgggtctgagtgtttccagcaagcctaaaagcggtgagtgggagatgaagaagacctag

SEQ ID NO: 106886 - DNA, 2457 bp, synthetic construct
  misc_feature 1..2457: note = Description of Artificial Sequence: Synthetic coding sequence
  source 1..2457: mol_type = other DNA
atggagagatataaggcactggagcagttgctcacggaactggacgactttctgaagattctcgaccaggagaacctttcttctacggccctcgtgaaaaagtcctgcctggccgagctgttacgcctctatacaaaaagttcaagctccgacgaggaatatatttacatgaacaaggttaccattaacaagcagcagaacgcggagtctcaggggaaagctcctgaagaacaggggctgctacccaacggggagccgtcgcagcattcctccgctccacagaaatcgctcccagacctcccccccccaaagatgatcccggagcggaagcaactggctattcctaagaccgagtcacccgaggggtactacgaggaggccgagccatacgatacgtcactcaatgaggatggagaggcagtgtcctcctcttacgagtcttatgacgaggaggacgggtcaaaaggaaaatccgctccttatcaatggccatcccccgaggcaggtattgaattaatgcgggacgcacgaatttgcgcttttctgtggagaaagaaatggcttgggcaatgggccaagcagttgtgtgtgatcaaggataacaggcttctgtgctacaaatcaagtaaggatcatagccctcagctggatgtaaatctgttaggctcttcagtgattcataaggaaaaacaggttcgcaagaaagagcacaagctgaagatcacgcccatgaatgctgatgtgatcgtcttgggcctgcaaagcaaagaccaggccgagcaatggttaagggtgatccaggaggtgtccggcctcccatccgagggtgctagtgagggaaaccagtatacccctgatgcacaacgttttaactgccagaaaccagacattgccgagaagtacttgtctgcctcagaatatgggtctagtgtggacggccacccggaggtgccggagaccaaggatgtaaaaaaaaagtgttcagccggactcaaattatcgaatctgatgaacttaggtagaaagaaaagcaccagcttggagcctgtggaaagatcactcgaaacgtctagttacttgaatgtcctcgtcaacagccaatggaaaagccgctggtgtagtgtgagagacaatcatttgcatttctaccaagatcgaaatagaagtaaagtggcccaacagcccctgtccctggtggggtgtgaggtagttccggacccttcccccgatcatttgtattcgtttaggatcctgcataagggggaagaactggccaaactggaggcgaaaagttccgaagagatgggccattggttggggttacttctgtccgagagcggtagcaagaccgacccggaggaattcacgtacgactatgtggatgccgaccgagtaagctgcatcgtctcggccgctaagaactcgctgctccttatgcagagaaaattttcggaacccaacacatatattgacggcctgcctagccaggatcgccaggaagagctgtatgacgacgtagatctctccgaactgaccgctgcagtagaaccaaccgaggaggcaacaccagtggccgatgacccgaatgagagggagtctgaccgagtctatctggatttgactcccgtcaagtcattcctgcacggcccaagttctgcccaggcccaagcaagcagcccaactctgtcgtgcctggacaatgcaacagaagcattgccagctgactctggccccggacccaccccagacgagccatgcatcaagtgtccagagaatcttggtgagcagcagctggaaagtctggagcctgaggatccatctctgaggataacaacagtcaagatacagacagaacaacagcgaatcagttttcctccatcctgtccggatgcagtcgtagctacacctccaggcgcaagcccacccgtgaaagatcggctgcgagttacctcagccgagattaagctgggcaagaaccgaacagaggccgaggtcaagcgatacacagaggagaaggagcggctggagaagaagaaagaggagatcagaggtcatcttgcccagctccggaaagaaaaacgggaacttaaagagacccttctgaaatgcaccgacaaggaagtgctggccagcctggagcagaagttaaaggaaattgatgaggagtgcaggggcgaagagtcacgcagggtggatctcgagctgtccatcatggaggtgaaggataatttgaaaaaagcagaggcggggcctgtgaccctgggtacgaccgtggacaccacccatctggaaaacgtaagtcccaggcccaaagccgtgacgcctgccagtgctccagactgtacgcctgtcaattcggctactactctgaaaaaccgcccgctgtctgtggttgtgacagggaagggtacagttttgcagaaggcgaaggagtgggaaaagaagggtgcgtcttag

SEQ ID NO: 106887 - DNA, 2445 bp, synthetic construct
  misc_feature 1..2445: note = Description of Artificial Sequence: Synthetic coding sequence
  source 1..2445: mol_type = other DNA
atggagaggtacaaagccctggaacagttgttaacggagctggacgacttcctcaagatcctggaccaggaaaacttaagttcaacagccctggtaaaaaaaagttgccttgccgaactgctccggctttacaccaaaagtagctctagcgatgaggagtacatttacatgaacaaagtgactattaacaaacagcaaaacgctgaatcgcaggggaaagctccagaggaacagggactcctgccaaatggtgagcccagtcagcacagtagcgcccctcagaagagtttgcctgatctaccaccccccaaaatgattcccgagaggaaacaactggctattccaaagacagaaagccccgagggatactatgaggaagccgaaccatatgatacctccctcaacgaggacggagaagctgtgtcatcctcctacgagtcatacgatgaggaggatggcagcaaaggcaaatccgccccttaccagtggccatcacctgaagctgggatcgagcttatgagagacgctcggatctgcgcctttctgtggagaaaaaaatggctcggccagtgggctaagcagctatgcgtaatcaaggataatagactattatgttataaaagcagcaaagaccacagcccgcaattagacgtgaacctattggggagttctgtgattcacaaggaaaagcaggtgcgcaaaaaggagcacaaacttaagataacacccatgaatgccgatgttatcgttctcggcctccaatcaaaagatcaagcagaacagtggctgcgagttatccaggaggtctctgggctgccatctgagggagcatctgagggaaaccagtacacacctgacgcacagcggttcaattgccagaagcccgacattgcagagaagtacctgtccgcatccgagtatggttcctccgtggacggacatcccgaggtacccgagactaaagacgtgaagaaaaaatgctctgcagggttaaaactgtcaaacttgatgaatctcggccggaagaagtctaccagcctggagcctgtcgagcgatccctcgaaacgtcgtcatatctgaatgtcctggttaatagtcagtggaaatcgaggtggtgctctgttagggacaaccatctccacttctatcaggaccgcaacaggtctaaggtggcacagcagcccctatccctggtggggtgtgaggtggttccggatccctctcccgaccatctgtactcttttaggatcttacacaagggtgaggaactggctaagctggaggctaagtcatcagaagagatgggacattggctgggtcttttactgagcgagagcggcagtaagaccgatcctgaagaatttacctacgactacgtcgatgccgacagagtttcttgcattgtgtctgcagccaaaaacagtctccttctgatgcagcgaaaattctcggagcccaatacatatatagacggccttccttctcaggatagacaggaggaattgtacgatgatgtggatctatctgagctcactgcggctgtggaacccacagaagaggccactcccgtggcggatgaccctaacgagcgggagagcgacagagtctatctcgatctgacacccgttaagtctttcctgcacggtccctcatcagctcaggctcaggcctcctctccaacactgtcttgtctggacaacgccacagaggcactccccgctgatagcggccccgggcccacgcccgacgaaccatgcattaagtgtcccgagaacctaggtgaacagcagctcgaatctcttgagccagaggacccgagtctgcgcattacaaccgtcaagatacagaccgaacaacaaagaatcagcttcccaccatcgtgtccggacgccgtcgttgccactccccccggtgcaagccctccagttaaagatagactaagagttactagcgcagaaattaagctaggaaaaaaccgcactgaggcagaagtcaagaggtatactgaggaaaaagaacggctcgagaagaaaaaggaggagattcgagggcacttggcacagctgcgaaaggagaagagagaactgaaagagaccctgctgaagtgcactgataaagaggttctggcctccctggaacagaaactgaaggagattgacgaagagtgccgcggagaagagagcagacgcgtggacctcgagttaagtatcatggaggtgaaagataacttgaaaaaagctgaggctgggccagttacacttggcactaccgtggacactacccacctggagaacccaaaggctgtgacaccagcctcagcgcccgattgtacgccagttaattcggccacgaccctgaaaaacaggccgctctcggtggtggtgacaggaaaaggtaccgttctgcagaaagccaaggagtgggagaaaaaaggagcaagctag

SEQ ID NO: 106888 - DNA, 2526 bp, synthetic construct
  misc_feature 1..2526: note = Description of Artificial Sequence: Synthetic coding sequence
  source 1..2526: mol_type = other DNA
cagcgtgttcgggctctggaacagcttctcactgagttggatgacttccttaagattctcgaccaggagaacctgtccagcacagcattagtcaaaaaatcctgtctggctgagctactaaggctgtacactaaatcgtcctcgtctgacgaggagtacatctacatgaacaaagtgactattaacaagcagcagaacgcggaaagtcagggaaaagcccctgaggaacaggggttgctacctaacggtgagccttcccagcattcatccgccccacagaagagcttgccagacttgccaccacccaaaatgatccccgagagaaagcagttagcgatccccaagacagaatctcctgaaggctactatgaggaggccgaaccatatgatacatccttgaatggacatagcgggggatttctccctaccggggtgccccggtgggtgcaagtccctgagggtgtcatttacgcgaccataactttggaggatggtgaggctgtttcaagcagttacgagtcttatgacgaagaggacggctcgaaaggaaagtctgcgccctatcaatggccgtccccggaggctggaatagaactgatgcgagatgctaggatctgcgcttttctttggagaaagaagtggctgggccagtgggccaagcagctctgcgtgattaaagacaataggcttctatgctataaatcaagcaaagatcacagtccacagctcgacgtgaatctgctaggctcgagcgtcatccataaagaaaaacaggttcgaaagaaggagcacaaattgaaaataacgcccatgaacgccgacgtgatcgtactcggcttacagtccaaagaccaggcagagcagtggctgcgtgtcatccaggaagtaagcgggctcccctcagagggtgcaagtgagggcaatcagtataccccagacgcccagaggtttaattgccagaaaccagacatcgccgaaaagtacctgtccgcaagcgaatatggcagcagcgtggatgggcatcctgaagttcccgaaactaaggacgtcaaaaagaagtgtagtgcagggctcaagctgagtaatttgatgaacttaggccggaaaaagtctacttcccttgaacctgtggagaggagtcttgagaccagcagctacctgaacgtgcttgtcaattcacagtggaaaagccgttggtgcagcgtgcgcgacaaccacctccacttttatcaggacagaaatcggtccaaagtcgcacagcagcccctgtctctggttggttgtgaagtcgtgcctgatccctcccctgatcacctgtatagttttcgcatccttcacaagggcgaggaactggctaaactggaggctaaaagctctgaagagatgggtcactggctcggcctgttgctgagtgagtctgggagtaaaacagacccagaagagtttacctatgactacgtggacgcagatcgggtttcctgtatagtgtccgccgcaaaaaattccctgctgctgatgcaaaggaagttttcggagcccaacacctatatcgatgggctccccagtcaggaccgacaagaagaactgtacgatgatgtggatctgtccgagctgactgccgccgtggaaccaaccgaggaggccacgccagtcgcggatgatccaaacgaaagagagagcgaccgcgtttacttagacctgacccctgtcaagagtttcctccacgggcccagttctgcacaggcccaagcctcctctccgacactgtcgtgcctggacaacgccaccgaggcactgccagcagacagcggccccggccccacccccgatgagccctgtatcaagtgccctgaaaacttgggggagcaacagctggagtccctagagcccgaggaccccagtttgcgcataacaacagtgaagattcagacggagcagcagcggatatctttccccccctcctgtcccgacgcggttgtggccacccctcccggagcctccccgcctgtgaaagatcgcctgagggtgacttcagccgagataaaactggggaaaaaccgtaccgaggccgaagtgaaaagatacacagaagaaaaagagcgattagaaaaaaaaaaagaagaaattcgcggacatctcgcgcagctgagaaaggagaaaagggagctaaaggagaccctgctcaaatgtacagataaagaggtactggcatccctggagcagaagctcaaggaaattgacgaggaatgtcggggcgaggagtcgcggcgcgtggacctcgaactgtcgatcatggaggtgaaggacaatcttaagaaagctgaggccggcccagtgacattaggcactactgttgacactacacaccttgagaaccccaaggctgtaacccccgcatccgcccctgactgtacacccgtgaactccgccaccaccctgaagaatcgccctttgtctgtagtggttacgggaaagggcaccgtgctccagaaagcaaaagagtgggaaaaaaaaggcgcgtcatag

SEQ ID NO: 106889 - DNA, 939 bp, synthetic construct
  misc_feature 1..939: note = Description of Artificial Sequence: Synthetic coding sequence
  source 1..939: mol_type = other DNA
atggagaggtacaaagcccaggggtgttgttgtcttgtggtacagaggaggattcgccaggtctccgcatccttggaacagctgctgactgaactggatgattttctaaaaattcttgaccaagaaaatctgtccagtaccgctctagttaagaagtcgtgccttgcggagctgctcagattgtacaccaaatcctctagtagcgacgaggagtacatttacatgaacaaagtgacgattaacaaacagcagaatgctgagtctcaggggaaggcccctgaggagcagggccttttgcctaacggagagccctctcagcatagctcagccccacagaagtccctccctgacttgcccccacccaaaatgatcccggagcggaaacagttggccatcccaaaaaccgagagtccggagggatattacgaggaggctgagccttatgatacatccttaaacgaggatggagaggcggtgtcaagcagctacgagtcttatgatgaagaagacgggagtaaagggaaatctgccccgtatcagtggccatctcctgaggctggaattgagctcatgcgcgatgccagaatttgtgcattcctatggaggaagaagtggctgggccaatgggctaagcagctgtgtgtgatcaaggataacaggctgttgtgctacaagagtagtaaagatcattcaccgcagcttgacgtcaatttgcttggatcttccgttatacataaggagaagcaagtgcggaagaaggaacacaaactcaagatcacacccatgaacgccgatgtcatcgtgctggggctgcaaagtaaggaccaagccgaacaatggctacgggttatccaggaggtgagtgggctgccttctgagggggccagtgagggaaaccagtacactccagatgcccagaggttcaactgtcagaaatag

SEQ ID NO: 106890 - DNA, 939 bp, synthetic construct
  misc_feature 1..939: note = Description of Artificial Sequence: Synthetic coding sequence
  source 1..939: mol_type = other DNA
atggagcggtacaaggcccagggatgctgttgcctggtcgtccagcggagaatccggcaggtatctgcctccttggaacagctgctcacagagctcgacgattttctgaaaattttggatcaggagaatttatcttccaccgccctggtgaagaaaagctgtctcgctgaactgctgagactctatactaaatctagctccagcgatgaggagtacatctatatgaacaaggtcactatcaataagcagcagaacgcggagagccagggaaaggctccagaggagcagggcctccttccaaatggcgaacccagtcagcactcatctgcaccgcagaagagtcttcctgatttgcctcctcctaaaatgatacctgaacggaagcagctcgcaattcccaagaccgagagccccgaaggatattacgaggaggcagagccctacgacacatctctgaatgaggatggggaggccgtgagcagctcgtacgaatcctacgatgaggaggatgggtctaagggcaaaagtgcgccctaccagtggccttcacctgaagccggcattgaacttatgagagatgctcggatctgtgccttcctttggcggaaaaagtggctaggacagtgggccaaacagctgtgcgttattaaggataaccggctgctttgttataagagtagtaaagatcactctccgcagctggacgtcaatttactgggttccagcgttatacacaaagagaaacaggtgcggaagaaagaacacaagctgaaaatcacccctatgaatgccgacgtgatcgttctggggctccagagcaaagaccaggccgaacaatggctgagagtcatacaggaggtgagcgggctcccgagtgaaggtgcctctgaggggaaccaatacaccccagacgcccagcggtttaattgccagaaatag

SEQ ID NO: 106891 - DNA, 2616 bp, synthetic construct
  misc_feature 1..2616: note = Description of Artificial Sequence: Synthetic coding sequence
  source 1..2616: mol_type = other DNA
atggagagatacaaagccctggagcagttgctgacagagttggacgacttcttgaagatcctggaccaagaaaatttgtcctcgaccgcactagtgaagaaaagttgcttggctgagcttctgagactctatacaaagtcctcatcctcagatgaagaatacatctatatgaataaagtgaccattaataagcagcagaatgcggagtcgcaaggaaaggccccggaagagcagggccttcttccgaatggtgagccatcacaacattcctccgctccccagaaatcacttccagacctgcccccacccaagatgcgtatcctgacgctggggcagatttcaggagctcagtctttttctcctgacgggacgcacctgacagggacagagttcttggggggctggtcctggcgcccatctcaaattcgtctgatgagcccaggcacccactggggcgatctcaccgcaaccgagatacctgagaggaagcagctggccatccccaagactgagtctccagaagggtactacgaagaagcagagccttacgacacgagcctgaatgaggatggagaagcggtgtcaagcagttacgaaagttatgacgaggaagatgggtctaaaggcaaatcggctccttatcagtggccatcccctgaggccggtatcgaactgatgcgggatgctcggatctgcgcgttcctctggagaaaaaaatggctaggacaatgggccaaacagctctgcgtaatcaaggataacagactgctttgttataagtcatctaaagaccactctccacagcttgatgttaaccttttggggagttccgtgattcataaagagaagcaggtgcgcaaaaaggagcacaagcttaagattactccgatgaacgccgacgtcatcgtgctagggctgcagtccaaggatcaggccgaacagtggttaagggtgattcaggaggtatctggactgccttccgagggggccagcgagggcaatcaatatacgcccgacgctcagcgcttcaattgccagaagcccgatattgccgagaaatacttgtccgccagcgagtacggctcctcagttgacggccatcctgaggtgcctgaaacaaaagatgttaagaagaagtgctccgctgggctgaaactgagcaacctgatgaacctcggccggaagaagtcaaccagcttggaaccagtcgaacgcagcttagagacaagctcctacttgaatgtactcgttaactcccaatggaagtcccgatggtgctcggtgcgtgacaatcatttgcacttttaccaggacagaaaccgtagcaaggtggctcagcagcccctttctctagtaggctgtgaagtagtccctgatccatctcccgatcacctatactcttttagaatattgcacaagggcgaagagctcgccaagctggaagcaaagtcctcagaagagatgggtcattggcttgggctcttgctctcggaatcaggatccaagaccgatcccgaagaatttacgtatgactacgttgatgcagacagggttagctgcattgtgtctgctgccaagaactctctgttgctcatgcaacgaaagtttagcgaacctaacacatacatcgacggtctcccctcacaagaccgccaggaagaactatacgacgacgtggatctctccgagctgactgctgctgtggaacctactgaagaggctacccccgtggctgacgaccctaacgaacgggagagcgatagggtttacctggatttgacgcccgtcaagtctttcctgcacggtccttcctccgcccaggctcaggcaagtagccctactttatcctgcctagacaatgctactgaggcgcttcccgcagactcaggaccgggaccaactcctgacgagccgtgcatcaaatgcccagaaaacctcggggaacagcagctagagtcacttgagcccgaagatcccagtctccggataaccaccgtgaagatccaaaccgagcagcagcggatctctttcccaccgtcttgcccagatgctgtcgtagccacacctcccggagcttctcctcccgtgaaggatcgtctcagggtcacttccgccgaaattaagctcggaaagaaccgcaccgaggccgaagtgaagcggtacacagaagaaaaggagaggcttgaaaaaaagaaagaggagattaggggccacctggcccagttaagaaaggagaaaagagaactgaaggagaccctgctaaaatgcaccgataaggaagtactcgctagcctggagcaaaaactgaaagagattgacgaggaatgccgaggcgaggagtctagacgagtcgatcttgaactaagcatcatggaagttaaagacaatcttaaaaaggccgaagcaggtcccgtgactctcggcaccaccgtcgataccacccaccttgaaaacgttagccccagaccgaaggctgtgacaccagcaagtgccccggattgcacaccagttaattcagcgacgacccttaaaaacaggccattatctgtggtggtcactggcaaagggacggtgttacagaaagccaaagagtgggaaaagaagggagcaagttag

SEQ ID NO: 106892 - DNA, 1002 bp, synthetic construct
  misc_feature 1..1002: note = Description of Artificial Sequence: Synthetic coding sequence
  source 1..1002: mol_type = other DNA
atgtgtgaggaagaaacgaccgccctggtgtgtgacaatggctctggtctgtgcaaggcaggctttgcgggagatgatgctcctcgggcggtctttcctagtatcgtgggccgcccgcgacaccagatctggcatcattccttctacaacgaattgagagtcgcccctgaggaacaccccacattattgaccgaggctcctctgaatccaaaggccaaccgcgaaaagatgacccagataatgtttgagacttttaatgtccccgctatgtatgttgctatccaggcagtcctttccttatatgcaagcggacgcacaacgggtatagtcctcgatagcggcgatggcgtgactcacaacgtgccgatctatgagggatacgcgctgccacatgctatcatgcggctcgatctcgcggggcgggatcttaccgattatctgatgaaaatcttgacagagagagggtactccttcgtgacaacagccgaacgcgagattgtgcgcgacatcaaagaaaagttgtgctacgttgcgctggactttgaaaatgagatggcgacagcagcgtcctcctccagtctggagaaaagctatgagttgccagacggccaggtgatcactatcgggaatgagcgttttcgctgtcctgagacactgtttcagccctcgtttataggtatggagtccgcgggaatccacgaaacaacatataacagcatcatgaaatgtgacattgacataagaaaagatttgtacgccaataatgtactgagcggtggaactacaatgtatccgggtatcgccgaccggatgcagaaggaaattacagctctagccccaagcacaatgaagataaaaataatcgcccctccagagaggaaatattcagtctggattgggggctctatcctggcctccctttctacgttccagcaaatgtggatttccaaacccgaatacgacgaagcaggtccatctatagtacacagaaagtgcttctag

SEQ ID NO: 106893 - DNA, 1113 bp, synthetic construct
  misc_feature 1..1113: note = Description of Artificial Sequence: Synthetic coding sequence
  source 1..1113: mol_type = other DNA
atgtctcttcaccaattcctcctggagccaatcacttgccacgcctggaatagggaccgtacgcagatcgcactttctcccaacaatcacgaggtgcatatttacaaaaaaaacggcagtcagtgggtaaaagcccatgagctcaaggaacacaacggacatataacaggcattgactgggcgcctaagagtgatagaattgtgacatgcggagcggaccgcaacgcgtacgtgtggagccaaaaggacggtgtgtggaaacctactctggttatactccggataaacagagcggccacatttgttaaatggtcccctctcgaaaacaaattcgctgtgggcagtggcgcccgactgatctctgtctgctacttcgaaagtgagaatgattggtgggtgtcaaagcacattaaaaagcctatccgctcaactgtcctcagtctggattggcacccaaacaatgttctgcttgctgccggctcatgcgatttcaaatgcagggttttcagtgcttacattaaggaggtagatgagaagcctgcttccacgccttggggcagcaagatgccattcgggcagctcatgtcggagttcggcggaagcggtactgggggatgggtgcacggggtgagcttcagcgcttctggaagccggcttgcttgggtgagccacgatagtaccgtatcagtcgccgatgcctccaagagtgtgcaggtcagcacactcaaaacggagtttctgccgctcttaagcgttagctttgtgagcgagaacagtgtagtcgccgccggacacgactgctgtcctatgttattcaactacgatgataggggttgtttgactttcgtctccaagttggatattcccaaacagtccatccagcgtaatatgtcagctatggagcgatttagaaacatggacaagcgggccaccacagaggacaggaacactgctttagagactctgcaccagaatagcatcacccaagtgtctatctacgaggtcgataaacaggattgcaggaaattctgcacgacgggtattgacggggctatgaccatatgggactttaaaactctggaatctagcattcagggactccggatcatgtag

SEQ ID NO: 106894 - DNA, 1038 bp, synthetic construct
  misc_feature 1..1038: note = Description of Artificial Sequence: Synthetic coding sequence
  source 1..1038: mol_type = other DNA
atgcacgagaggtttattcactgcttctgcattgactgggcccctaagagcgatagaatagtcacttgcggtgccgaccgcaatgcatacgtgtggtcccaaaaagatggagtgtggaaaccgactctggtcatcttgcgaatcaaccgagccgccactttcgtcaagtggagccccctcgagaacaaatttgcagtcggaagcggcgctcgcctgatctcagtgtgctattttgagtctgaaaacgactggtgggtgagtaaacacatcaaaaagcccatccgatccaccgttctctctctggactggcaccccaacaatgtcttacttgcagcaggctcatgtgattttaagtgtagggtttttagcgcatatataaaagaagtagatgagaagcccgcctccactccctggggctccaagatgcccttcggtcagctcatgtctgaattcggagggagcgggacggggggctgggtccacggcgtgtccttcagcgccagcgggtcacgactcgcatgggtgtctcacgacagcacggtttctgttgctgacgcatcgaagtctgtgcaggtctccacactcaagactgaatttctcccgctcttgtcagtgtccttcgtcagcgaaaactcggtggtggcagctggccatgactgctgccctatgctgtttaactacgatgataggggatgccttaccttcgttagtaagctggatatccccaaacagagtatccaacggaatatgtccgccatggagcgttttagaaacatggataaacgagctactaccgaagatagaaacaccgctctcgaaactctccaccaaaactctatcactcaggtgtcgatttatgaggtcgacaagcaggactgccgcaaattctgcactaccggcatcgatggcgccatgaccatttgggattttaaagaaccttcaaggcacggactgccccagctccctggtggggcacatcagctgcctaggttagagcagggccctcaccctgattgtcacctccctcagcagccttag

SEQ ID NO: 106895 - DNA, 1119 bp, synthetic construct
  misc_feature 1..1119: note = Description of Artificial Sequence: Synthetic coding sequence
  source 1..1119: mol_type = other DNA
atggcttaccattcattcctagtggagccaataagctgccacgcctggaacaaagatagaacacagatcgctatatgccctaacaaccacgaagttcatatttatgaaaagagtggcgccaaatggacaaaagtgcatgagctgaaggaacacaatggacaggtgactggtattgattgggcgcccgaatctaacaggattgtcacttgcggaactgatagaaacgcctatgtttggactttaaagggcagaacatggaagcccacactcgtgattctcaggattaaccgggctgccagatgcgttagatgggcacctaatgagaataaatttgccgtggggagcggaagccgggtgatttctatttgttatttcgagcaggagaacgactggtgggtgtgtaagcatataaagaagccaatccggtcaactgttctcagcctcgattggcacccaaacaatgtactcctggccgccggttcctgtgattttaaatgtagaatattctcagcatacattaaagaggtcgaagagcgcccggcccctaccccctgggggagcaagatgccctttggcgaactgatgttcgagagctcaagctcctgtgggtgggtgcacggcgtgtgtttctcagcctccggctctcgagtcgcctgggtgagccacgacagcactgtgtgtcttgcagacgccgataaaaaaatggccgtcgccactttagcctctgaaacgttgccccttttagctctgacatttatcaccgacaatagtctggtggcagcaggacatgattgcttccctgtgttgtttacttacgatgcggccgctggcatgctgtcattcggaggaagactggatgtccccaagcaaagcagccagcgaggactgactgcccgcgaaaggttccagaacctagacaagaaggcctccagtgagggcgggactgctgccggtgctggcctggactcattgcacaaaaactctgtatcccagatttcggtgctcagcggaggtaaggctaagtgctcccaattctgtaccaccggcatggatggaggaatgtccatttgggatgtgaagagcctggaatccgctctgaaagaccttaagattaagtag

SEQ ID NO: 106896 - DNA, 309 bp, synthetic construct
  misc_feature 1..309: note = Description of Artificial Sequence: Synthetic coding sequence
  source 1..309: mol_type = other DNA
atggcataccacagttttctcgtggaacccattagctgtcacgcgtggaacaaagatcgtacccaaatcgccatttgtcctaacaaccacgaggttcacatttatgagaaatcgggagctaagtggaccaaagtgcacgagttgaaagaacacaacgggcaagtgacagggatcgactgggcccccgagtctaaccgcatcgtgacctgtggcaccgatcggaatgcctacgtgtggacactcaaggggcggacctggaaaccgactcttgtcatattgcgcatcaatcgggccgcacgatgcgtctag

SEQ ID NO: 106897 - DNA, 393 bp, synthetic construct
  misc_feature 1..393: note = Description of Artificial Sequence: Synthetic coding sequence
  source 1..393: mol_type = other DNA
atggcatatcactcttttctggtcgagcccatttcttgtcacgcctggaataaagatcgtacacagatcgccatctgtcctaataaccatgaggtgcacatctatgagaagtccggagccaaatggacaaaagtgcacgaattgaaggaacacaatgggcaggtgacaggtatcgattgggccccagagagcaaccgaatagtcacgtgtgggaccgatcggaacgcttacgtctggaccctcaaaggcaggacctggaagccaacactggtgattctgagaattaatagagcagcccgatgtgtgcgatgggctccaaatgagaataaattcgcagtgggcagtgggagtcgagttatctccatttgctacttcgaacaggagaatgattag

SEQ ID NO: 106898 - DNA, 252 bp, synthetic construct
  misc_feature 1..252: note = Description of Artificial Sequence: Synthetic coding sequence
  source 1..252: mol_type = other DNA
atggcctaccactccttcctggtggagcctatttcatgtcacgcctggaataaggacagaacacagatcgctatctgtcccaataaccatgaggtgcatatttatgagaaatcaggcgccaagtggacaaaagtccacgaactgaaggagcacaacggacaggtaacaggcatagactgggcgccagaaagcaaccggatcgtgacttgtgggaccgatcggaatgcctatgtatggacactgaaggggtag

SEQ ID NO: 106899 - DNA, 402 bp, synthetic construct
  misc_feature 1..402: note = Description of Artificial Sequence: Synthetic coding sequence
  source 1..402: mol_type = other DNA
atggcatatcactctttcctggtcgaacccatcagttgtcatgcctggaataaagatcgaactcagattgccatatgtcctaataaccacgaagtccatatctacgagaaatctggggccaaatggacgaaggtacatgagctgaaggaacataacggccaagtgacgggcatcgactgggcccctgagagcaaccggatcgtcacatgtggcactgaccgaaacgcttatgtttggacattgaagggacgcacatggaagcccacattagtgattctaagaatcaaccgggctgcccgctgcgtgcggtgggcccccaatgagaacaagttcgccgtgggaagcggtagccgagtgattagtatatgttattttgagcaggaaaacgactggtgggtatag

SEQ ID NO: 106900 - DNA, 66 bp, synthetic construct
  misc_feature 1..66: note = Description of Artificial Sequence: Synthetic coding sequence
  source 1..66: mol_type = other DNA
atggcttatcactcatttctcgtggagcccattagttgccatgcctggaacaaggacagaacatag

SEQ ID NO: 106901 - DNA, 402 bp, synthetic construct
  misc_feature 1..402: note = Description of Artificial Sequence: Synthetic coding sequence
  source 1..402: mol_type = other DNA
atggcttaccacagctttctggtggagcctatttcatgccacgcatggaacaaagatcggacccagattgctatttgtcccaacaaccatgaggtacacatctacgaaaaatcaggggcaaaatggaccaaggtgcacgagctaaaagaacacaacgggcaagtgacaggtatcgattgggctcctgagagcaacaggattgtcacatgtgggaccgatagaaacgcttatgtttggactctaaaaggacggacctggaaaccgacgttagttatcctaagaataaatcgagccgccaggtgtgtgaggtgggcaccaaacgagaacaagttcgctgtcggctcaggcagccgcgttatttccatttgctacttcgagcaggagaacgattggtgggtctag

SEQ ID NO: 106902 - DNA, 327 bp, synthetic construct
  misc_feature 1..327: note = Description of Artificial Sequence: Synthetic coding sequence
  source 1..327: mol_type = other DNA
atggcctatcatagttttctggtcgagcccatctcttgccacgcctggaacaaggatcgcactcagatagcaatctgccctaataatcatgaggtccatatttacgagaagtcaggagccaaatggaccaaggtgcacgaactcaaagagcacaacgggcaagtcacaggaatagactgggcaccagagagcaataggatcgtgacttgcggcacagatcggaatgcttatgtatggacgctgaagggtcggacttggaaaccgacactggtgatcctgcggatcaacagggccgcacggtgtgtgaggtgggcacctaatgagtag

SEQ ID NO: 106903 - DNA, 1119 bp, synthetic construct
  misc_feature 1..1119: note = Description of Artificial Sequence: Synthetic coding sequence
  source 1..1119: mol_type = other DNA
atggcctaccattccttcctcgtggaacccataagttgtcatgcttggaataaagatcgcacccagattgccatttgccctaacaaccatgaagtacatatttatgaaaaatcaggcgcaaagtggactaaggttcacgagctgaaagaacataatggccaggtgacaggcattgattgggctcccgagtctaacagaatcgtcacatgcggaacagatagaaacgcttatgtgtggacgctgaaaggaaggacttggaagccaaccttagtgattctccgtattaacagggctgctcggtgcgtacggtgggcccctaatgagaacaaattcgcggtaggcagtggctcccgcgtgatcagtatatgctacttcgagcaggaaaatgattggtgggtgtgtaagcacattaagaagcctatcaggtccaccgtcctcagcctggattggcacccaaataatgtcctcctagccgccggttcctgtgactttaagtgccgaattttctctgcatacatcaaagaagtggaggaaaggcctgcacctacgccttggggctccaaaatgcctttcggggaactgatgttcgaatcctctagctcttgcgggtgggtgcacggcgtgtgcttctcggctagcggctctcgggttgcctgggtgtcacacgattctactgtttgcctggccgacgccgacaagaagatggccgtcgctaccctggcaagcgaaactctccccctcctcgcgttaacattcataaccgataattcgctggtcgccgccggacacgactgttttcccgtgctgtttacatacgatgctgcagccggaatgctctcatttggaggacgactggatgtgcctaagcagagttcccagcgcggactgaccgccagggagcggtttcaaaacctggacaagaaggcttcctccgagggaggaactgccgcaggagccggcttagacagtctccacaagaactccgtttctcagatatctgttctgtccggcgggaaagctaaatgctctcagttctgtacaaccgggatggatggaggaatgtcaatctgggacgtgaaatccctggagagcgcgctcaaggatctgaagattaagtag

SEQ ID NO: 106904 - DNA, 387 bp, synthetic construct
  misc_feature 1..387: note = Description of Artificial Sequence: Synthetic coding sequence
  source 1..387: mol_type = other DNA
atggcctatcactcatttcttgtggagccgatctcctgccatgcttggaataaagatcggacccagattgccatttgtccaaataatcacgaggtgcacatatacgagaaatcaggagcaaagtggacgaaggtccacgaactgaaggagcacaacggccaagtgaccgggatcgactgggcccctgaaagtaacagaatcgttacttgtgggacagatcgaaacgcctatgtctggactctaaagggcagaacttggaaacccactttagtgattctcagaattaaccgagccgcccgctgtgtgcggtgggcccctaacgaaaacaagttcgccgttggctccgggagtagagtcatttctatttgctacttcgaacaggagtag

SEQ ID NO: 106905 - DNA, 402 bp, synthetic construct
  misc_feature 1..402: note = Description of Artificial Sequence: Synthetic coding sequence
  source 1..402: mol_type = other DNA
atggcttaccactcttttcttgtagagccaatatcatgtcatgcctggaataaggatagaacacagattgcaatttgcccaaataatcatgaggtgcacatttatgaaaagagcggggccaagtggactaaggtgcacgaacttaaagagcataacggacaagtcactggcattgattgggcaccagaaagcaatagaattgttacctgcggaacggataggaacgcttatgtttggactctgaagggccgaacgtggaagcccaccttagtcatcctgagaattaatagggcagccaggtgtgtgaggtgggctcctaacgaaaataaattcgccgtggggtcaggaagtcgtgtcatctcgatctgttacttcgagcaagaaaacgattggtgggtgtag

SEQ ID NO: 106906 - DNA, 903 bp, synthetic construct
  misc_feature 1..903: note = Description of Artificial Sequence: Synthetic coding sequence
  source 1..903: mol_type = other DNA
atgatattactcgaagtgaacaacagaatcatcgaggagactctcgcactgaagttcgagaatgccgccgcgggaaataaaccagaggctgtggaagtcaccttcgccgactttgacggggtgttgtatcatatctcgaatcctaacggggacaagactaaggtgatggtgtctattagccttaagttctacaaagaactccaggcccacggggccgatgagttattgaagcgggtctatggaagttttctagtgaaccctgagagtgggtataatgtcagtttgctctatgatttggagaatctcccagcaagcaaggactccatcgtgcaccaggccggcatgcttaaaagaaattgcttcgcctccgtgttcgaaaagtactttcagttccaggaggagggcaaagaaggagaaaaccgcgccgttattcactatagagatgacgaaaccatgtatgtcgagagcaagaaggatagggtgacagtggtgttttcaactgtcttcaaagacgatgatgacgtcgttattggcaaggtctttatgcaggagtttaaagagggcagaagggcctcccatacggctccccaagtcctgttctcccatcgcgagccacctctggagcttaaagataccgacgctgctgtaggagataatatcggctatattacatttgtgctctttccgcggcacacaaatgcctcagcgcgcgataacacaataaacctcattcacactttccgggactatctgcattatcacattaagtgttccaaggcctacatccatacacgtatgcgcgcaaagacatctgactttctcaaggttttaaacagggcaagaccagatgccgagaaaaaggaaatgaaaacaatcaccggcaagaccttctccagccgttag

SEQ ID NO: 106907 - DNA, 903 bp, synthetic construct
  misc_feature 1..903: note = Description of Artificial Sequence: Synthetic coding sequence
  source 1..903: mol_type = other DNA
atgatactcttggaagtaaacaatcgaattatcgaggagacactggcgctaaaattcgaaaacgccgccgctgggaataagcccgaagcagtggaggtcacattcgcggattttgatggagttctttaccatatcagtaaccctaatggagataagacgaaagtaatggtgagcatttcgttgaagttttataaagagctgcaggcgcacggcgccgacgagctgttaaaaagagtgtatggctctttcttggtgaaccctgagagcggctataatgtctccctgctgtacgatctagagaatctgcccgcatcaaaagatagcatcgtgcaccaggcgggcatgcttaagagaaattgtttcgcgtctgtgttcgaaaagtatttccagtttcaagaggaaggcaaagaaggcgagaaccgggcagttattcactatagggatgatgagacgatgtacgttgaatccaagaaggatcgcgtgaccgtggtttttagcactgtgtttaaagacgatgatgatgtggtgatcggcaaagtcttcatgcaggaatttaaggagggaaggagagcatcccacacagccccccaggtgctgttctctcaccgggagcctcccttagagctgaaggataccgacgccgcagtgggagataacatcggctacattacctttgtgctgttcccgagacataccaacgctagcgcccgggacaatactatcaacttaattcataccttcagggactacctccattatcatatcaaatgcagtaaggcttatattcacacccgaatgagggctaaaacgtccgactttctcaaggtcctgaatagggcccggccagatgccgaaaaaaaagagatgaagactatcactggcaagaccttctccagtagatag

SEQ ID NO: 106908 - DNA, 273 bp, synthetic construct
  misc_feature 1..273: note = Description of Artificial Sequence: Synthetic coding sequence
  source 1..273: mol_type = other DNA
atgatcttactagaagtgaacaatcgtattatcgaggagacattggcgctcaagtttgaaaacgccgccgcaggaaataagcctgaggccgtcgaagtgacatttgccgacttcgacggcgtgctgtatcacatcagtaacccaaatggtgacaaaactaaagtcatggtgagcatttcccttaagttctacaaagagctccaggcacatggggcagacgagctgctgaagcgcgtttatggctcattcctggtgaacccggagtccggatag

SEQ ID NO: 106909 - DNA, 864 bp, synthetic construct
  misc_feature 1..864: note = Description of Artificial Sequence: Synthetic coding sequence
  source 1..864: mol_type = other DNA
atgtgtgatgaggacgaaaccaccgctctagtttgcgataacggctcaggcctggtgaaggccggcttcgctggggatgatgcaccgagagcggtgttcccctccatcgtcgggcgaccaagacatcaaggcgtcatggttggcatgggacaaaaagactcctacgttggggacgaggcacagagcaagagaggtatactcaccctgaagtatcctattgaacacgggattattactaactgggatgatatggaaaagatctggcaccacaccttctacaatgagctccgtgtcgccccagaggaacaccccaccttgcttaccgaggcccccctcaatccaaaggcaaatcgcgaaatcgtacgggacataaaagagaagttatgctacgtggccctagactttgagaatgagatggctaccgctgcctcttccagttcattagagaaaagctacgagctaccggacggccaggtgataacgataggaaacgagaggttcaggtgccccgaaactctctttcaacctagctttatcggaatggagtctgctgggattcacgaaactacctataacagcatcatgaagtgcgacatcgacattcgtaaagacctctacgcgaacaacgtcatgtctggggggacaacaatgtatcctggaatagccgatagaatgcagaaggagatcacagccctggcccccagcactatgaaaatcaagataatcgccccacctgaacgaaagtactccgtctggattggaggctccattttggccagcttgtcaactttccaacagatgtggatcacgaagcaggaatatgacgaggctggccctagtatagttcaccggaagtgtttttag

SEQ ID NO: 106910 - DNA, 765 bp, synthetic construct
  misc_feature 1..765: note = Description of Artificial Sequence: Synthetic coding sequence
  source 1..765: mol_type = other DNA
atgtgcgacgaggatgagaccactgccctggtgtgcgacaacgggtctggactcgtgaaggccggctttgcaggcgatgatgcgccccgagctgtgttcccttctatcgtgggaagacctcggcaccagggtgtgatggtgggcatgggccagaaggactcttacgttggggatgaagcacaatccaaaagagggattctgactctgaagtacccgattgaacacggtatcattaccaattgggacgatatggagaaaatctggcatcataccttctacaatgagctcagagtggcacctgaggaacaccctactctcctgacagaggctcctctaaacccaaaagcaaatagggaaaagatgacacagataatgtttgaaaccttcaacgtgccagctatgtatgttgccattcaagcagttctgagcttgtacgcttccggccgtaccacagggattgtgctggacagcggagatggtatcatgaagtgtgacattgatatccgtaaagacctctacgcgaacaatgtaatgtctggggggactactatgtatccggggattgctgaccgaatgcagaaagagatcactgctctggctcctagtactatgaagattaaaatcatcgcgccaccagaacggaagtatagtgtgtggatcggcggatcaattctggcttccttgagcacatttcagcagatgtggataacaaaacaggagtacgatgaggctggcccatctatcgtccatcgcaaatgtttctag

SEQ ID NO: 106911 - DNA, 1029 bp, synthetic construct
  misc_feature 1..1029: note = Description of Artificial Sequence: Synthetic coding sequence
  source 1..1029: mol_type = other DNA
atgtgcgacgaggatgaaaccacagctcttgtatgcgataacggatctgggctcgtcaaggccggatttgcgggcgatgacgctcctcgagcagtgtttccatccattgttggaaggcccaggcaccagggcgtgatggtggggatgggtcagaaggattcttatgtcggagatgaggcccaaagcaagcgggggatcctgaccttgaaatatcccatcgagcatgggatcatcacgaaggcaaacagagaaaaaatgactcaaatcatgttcgaaacctttaacgtccctgcgatgtacgtggctatccaggccgtgctgtctctctatgccagcggacgtactactggaatagtgctcgacagcggagatggggtgacacacaacgtgcctatctatgagggctatgctctgccacatgccatcatgagacttgatttggcgggtcgggacctgacagactatttgatgaaaattttgacagaacgaggttattcgttcgtgacgacagctgagcgagagatagtccgagatattaaggagaaactttgctatgtcgcgctggacttcgagaatgaaatggcaacagccgcttctagttcatccctggaaaaatcctacgagctaccggatggacaagtcatcactattggaaacgaacggttccgatgcccggaaaccctgtttcagcctagcttcataggcatggagagcgccgggatccacgagacaacctacaattctattatgaagtgcgacatcgacatacggaaagatctttatgccaataatgtgatgagcggtgggacaacgatgtacccgggcatcgcagatcgtatgcaaaaggaaattactgcgctggcgcctagtactatgaaaattaagattatcgcgcccccagaaagaaagtacagcgtctggatcggcggctcaattcttgctagcttatcaacgttccagcagatgtggatcacaaaacaagagtatgacgaagcagggcccagcatcgtccatcggaaatgcttttag

SEQ ID NO: 106912 - DNA, 870 bp, synthetic construct
  misc_feature 1..870: note = Description of Artificial Sequence: Synthetic coding sequence
  source 1..870: mol_type = other DNA
atgtgcgatgaagacgagacgaccgccctggtgtgcgacaacggctctggtctcgtgaaggccggctttgcgggcgacgatgcccccagagccgtgtttccgtcaattgtgggaaggccgcggcatcaaggggtcatggtggggatgggacagaaggacagttacgtgggcgatgaggcccaatccaaacggggaatattgactttgaagtaccccatcgaacacggcataattactaactgggacgatatggaaaagatttggcaccacaccttctacaatgagctccgcgtagctccggaggaacatcccactctgcttacagaggctcctctgaatccaaaggccaatcctgaacgtgaaatagtgcgagatataaaggaaaaactgtgttatgtggctctggattttgagaacgagatggcgaccgcagcatcatcctcttcccttgagaaatcttacgaactgccagatggccaggttatcacaatcggcaatgaacgtttccggtgtcccgaaacgctctttcaaccatccttcataggcatggaaagcgcgggtatccacgagacaacctacaacagcatcatgaagtgcgatattgatatccgaaaggacttgtatgcaaacaacgtgatgtctggtggcactaccatgtatcccggcatcgcggatcggatgcaaaaagagatcaccgctctcgcgccatctaccatgaagatcaagattattgccccccctgaacgcaagtattctgtttggattggggggtccatcctggccagcctttccacatttcaacagatgtggatcacgaagcaggaatatgatgaagccggtccaagtatcgttcaccggaagtgcttctag

SEQ ID NO: 106913 - DNA, 1134 bp, synthetic construct
  misc_feature 1..1134: note = Description of Artificial Sequence: Synthetic coding sequence
  source 1..1134: mol_type = other DNA
atgtgtgacgaagatgagaccactgccctggtgtgtgacaatggtagcgggctggtgaaagccggattcgctggtgatgacgcccctcgcgccgtgttccccagtatagtgggtagaccacgccaccagggcgtaatggtcggcatgggccagaaggatagctacgtgggcgatgaggctcaaagcaagaggggaattctgactctgaaataccctattgaacatggtatcataacgaactgggatgatatggagaaaatctggcaccacacattttataatgagctgcgcgtcgcacctgaagagcatcccaccctgcttacagaagcgccactaaatcccaaggcgaaccgggaaaaaatgactcaaatcatgtttgaaactttcaacgtccctgccatgtacgtggcgatacaggccgtgctctccctctacgcaagcggccgaaccaccggaatcgttctggatagtggggacggcgtgacccataatgtgccgatttatgagggatacgctttacctcatgcaatcatgagactggacttggcagggagagacctgactgactacctcatgaaaatcctcactgaacgaggttattccttcgtgaccacagccgagcgggagatagtgcgggacatcaaggagaagttatgttacgtcgctttagactttgagaacgaaatggccaccgcagcttcttctagctccctggagaagtcgtacgaactgcctgatggccaggtcattacaatagggaacgagagattccgctgtccggaaaccttattccagccttcctttattggtatggagagtgcaggtatccacgaaacaacatataattccattatgaaatgtgacatcgatatccgcaaagatctgtacgcgaataatgtgatgtccggcgggacgacgatgtatccagggattgcagaccgaatgcaaaaggagattactgcactcgcccctagtacgatgaagatcaaaattatcgcacctcctgagaggaagtacagcgtttggatcggcggcagcatcctggcatctctgtctacgttccaacaaatgtggattaccaaacaggaatacgacgaggccggaccttctatagtgcaccggaaatgtttttag

SEQ ID NO: 106914 - DNA, 1146 bp, synthetic construct
  misc_feature 1..1146: note = Description of Artificial Sequence: Synthetic coding sequence
  source 1..1146: mol_type = other DNA
atggctccaggcgagaaagaaagcggggaaggcccagcaaagtccgcacttcgcaagataagaaccgctacgctggtgattagtctcgctcggggttggcaacagtgggcaaacgagaactctattaggcaggcacaggagcccactgggtggctccctgggggcacccaagactccccacaagctccaaaacctattacaccccctacatcccaccagaaggctcagtccgcgcccaagagtccacctcgcctccctgaagggcatggtgacgggcaatcatcagagaaggctccagaagtgtctcacattaagaaaaaggaagtatccaaaactgttgtgtcaaagacctacgaaagaggaggagacgtctctcacctctctcacagatacgaaagggacgccggggtgctcgagcccggccagcccgaaaatgacattgatagaatcctccattcccatggaagccctactcgtcgtagaaaatgtgcgaacctggtcagcgagctgactaaaggttggcgcgtgatggaacaggaagaacccacctggcgatccgatagcgtggatacggaagatagtggctatggtggcgaggcagaagagagaccagagcaggatggcgtgcaggtagcggtggtgcggatcaagcggcctctgccgagtcaagttaacagatttaccgagaaacttaattgcaaggcccaacagaagtactctccggtgggcaacctcaagggacggtggcaacaatgggctgatgaacacatccagtctcagaaacttaatcccttctctgaggaattcgactatgagcttgccatgagcaccagactgcataagggagatgaaggttacggaagacccaaggaaggtacaaagactgctgaacgtgccaaacgggcagaggagcacatttatcgagaaatgatggatatgtgctttattatttgtaccatggctcgccataggcgagatggcaaaattcaggtgaccttcggtgacttgttcgatagatacgtccgtatatccgataaggtcgttggcattttaatgagagccaggaaacatggcctcgttgattttgaaggcgaaatgctctggcaggggcgcgacgaccacgtggtgattacactactcaagtag

SEQ ID NO: 106915 - DNA, 2685 bp, synthetic construct
  misc_feature 1..2685: note = Description of Artificial Sequence: Synthetic coding sequence
  source 1..2685: mol_type = other DNA
atgaaccagatagaacccggtgttcagtataattacgtgtacgatgaggacgagtacatgattcaggaagaggaatgggacagagatcttctgctggatcccgcgtgggagaaacagcagcgcaagacctttaccgcttggtgcaacagccatctgaggaaggccggaacacaaatagagaacatcgaagaagatttccgcaacggcctgaaactgatgttgttgttggaggtcatcagcggcgagaggttgcctaagccagaccgcgggaagatgcgttttcacaagattgctaacgttaacaaagcccttgattacattgccagcaagggggtgaaactggtgagtatcggggctgaagaaattgtggacggcaacgtaaagatgacactcgggatgatctggacgatcatcctgcggtttgctattcaggatatcagtgtagaagaaacatcagccaaagagggccttttgctatggtgtcagcgaaaaaccgccccatacagaaacgtaaatatccagaattttcatacatcgtggaaggatggcctggggctgtgcgccctgattcatcgacacaggcccgatctgatcgactactctaaactaaacaaagatgacccaatagggaatattaatcttgccatggagatcgcagaaaaacacttagatatccctaagatgctcgatgccgaggacatcgtgaatactcccaaaccagatgagcgcgctattatgacctacgtgagttgtttctaccatgcgtttgccggagcagaacaggccgagaccgcggctaacagaatctgcaaagtacttgctgtgaaccaagagaatgagaggctgatggaggagtacgaacgattggcttctgagctgctggagtggattagaaggacaattccttggcttgaaaaccggacaccagagaagaccatgcaggctatgcagaagaagctggaagacttcagggactatagaagaaagcataaaccccccaaagtgcaggagaagtgccagttagagatcaattttaacactctgcagaccaagctccgaatcagtaacagacccgcctttatgcctagcgagggaaagatggtgtcagacatagcgggagcgtggcagcgcctggagcaggctgaaaagggatatgaggaatggctactgaatgagatacgcaggctcgaacgcttggaacacctggctgaaaagtttagacagaaagcgtcaacccacgaaacctgggcctatggcaaagaacaaatcctgctacagaaggactacgaatctgccagtctgaccgaagtgcgcgccctgctgagaaagcatgaggcttttgagagcgatctggctgctcaccaggaccgagtagaacaaatcgctgctattgctcaggagttaaacgagctcgattaccatgacgcagttaacgtcaatgatcgctgccaaaagatatgcgatcagtgggaccgattaggcaccctgacacaaaagcggcgcgaagcactggagcgcatggagaagctgctcgaaacaatagatcagctccaccttgaattcgccaagagagctgcgcccttcaacaactggatggagggtgcaatggaggatttgcaggatatgtttatagtgcacagcatcgaggaaatacagagcctaattactgcacacgagcagttcaaggctacactcccggaggccgacggtgagcgccagtctatcatggcaattcagaacgaggtcgaaaaggtgatccagtcctacaatatacgcatttcctcatccaatccctacagtaccgtgaccatggatgagcttcgaaccaagtgggataaagtcaagcagctggtgcctatccgggatcagtccctgcaagaggagctggcgcggcagcatgcgaatgagcggctccgcaggcaattcgccgcgcaggcgaacgcgatcggcccttggattcagaataaaatggaggagattgcaagatcaagcatccagatcactggagcgctcgaggaccagatgaaccagctgaagcagtatgagcacaacatcataaactataagaacaacatcgataaacttgagggcgaccaccagctgattcaggaagcgctggtcttcgataataagcatactaattataccatggaacatatacgtgtgggctgggagctactcctcaccactatcgccagaacaataaatgaagtcgaaacacagatcctgacacgggatgcaaagggaattacccaggaacagatgaacgagttcagggcctcatttaatcactttgatagacgaaaaaatgggttaatggaccatgaggatttcagggcatgtttaatttccatgggctacgatcttggagaagctgaattcgctagaattatgactcttgtggaccccaacggccaaggaacagttacgtttcagagctttattgattttatgacccgcgagacagctgacacagacacggctgagcaggtgatagcaagcttccgaatcttggcctctgacaagccttatattttggccgaagaactgagacgagagctcccacccgatcaggcccaatactgcattaagcggatgcctgcctactctgggcctgggagtgtgccaggggccctggactacgccgctttttccagcgctctgtacggagagagcgacctatag

SEQ ID NO: 106916 - DNA, 2685 bp, synthetic construct
  misc_feature 1..2685: note = Description of Artificial Sequence: Synthetic coding sequence
  source 1..2685: mol_type = other DNA
atgaatcagatagaacccggggtccagtacaactacgtgtacgacgaggatgaatatatgatacaggaagaagagtgggaccgcgacctcctgctggaccccgcctgggaaaaacaacagcggaaaacctttacagcctggtgcaactcgcacctacggaaagctggtacccagatcgagaatatcgaagaggatttccggaacgggttgaaattgatgctacttctggaagtgatatctggcgagaggctgccaaagcccgacaggggtaaaatgcggttccataagattgccaacgtaaataaagctctcgactatatagcctctaagggggtgaaattggtctccatcggcgcggaagagattgtggacggtaacgtgaaaatgaccctcgggatgatatggacaattatcctgagatttgccattcaggatatctcagtggaggaaacgtctgcaaaggaaggcctgctgttatggtgccaaagaaagaccgctccctaccgcaacgttaatatccagaattttcatacctcttggaaggacggtctggggctctgcgccttgattcatagacaccgtcctgatttgatcgactactcgaagctgaacaaggacgaccctatcggcaacatcaatttagccatggaaattgcagaaaagcacctcgatatcccaaagatgctggatgccgaggacctcgtgtataccgcgagaccggacgagagggctatcatgacttatgtgagttgttactaccacgctttcgccggggcccagaaggcagagaccgctgctaacagaatctgtaaagttctcgccgtgaatcaggaaaatgaacggttgatggaagaatacgaaagactggccagcgagttgctggagtggatccgaagaaccattccttggctggagaacaggacccctgaaaagactatgcaggctatgcagaaaaagctggaggatttcagggattaccggcggaagcataaacctccaaaggtgcaggagaagtgccagctagagattaatttcaacacgctgcagacaaaactgagaatctccaaccgccctgcattcatgccctcggaaggcaagatggtgtccgatatagcaggtgcctggcaaagactggaacaggccgagaaaggatatgaggagtggctgctgaacgagatccgaaggctcgagcgattggaacatttggcggagaagtttagacaaaaggcgagtacgcatgagacctgggcctacgggaaggaacagatactgcttcagaaggactacgagtcagctagcttgacagaagttcgtgcgcttctgagaaagcatgaggcatttgagtctgatttggccgcccaccaggaccgggttgaacagattgctgctattgcccaggagttgaacgaactggattatcacgacgctgtgaatgtaaatgacaggtgtcagaagatatgcgaccagtgggataggctcgggaccctaacccagaagcggcgcgaggccctggagagaatggaaaagttgctagagactattgaccagctccacctggaatttgcaaaaagggcagctccttttaataactggatggaaggcgccatggaagacctccaggatatgttcattgtgcactccattgaggagatccagtctctgattactgcccacgaacagtttaaagccacgttgccagaggctgacggcgaacggcagagcataatggctattcaaaatgaggttgaaaaggtaatacaatcatacaacatccgcatatccagctcaaacccctattctactgtgacaatggatgagttgcgcactaagtgggataaagtgaagcagctggtgcctatcagagatcagagcctgcaggaggagttagccaggcaacatgccaatgaaagactcagacgacagttcgcagcgcaggctaatgccatcggtccttggatacaaaacaagatggaggaaatcgcacgcagttccatacagattacgggcgctctcgaagatcaaatgaatcagctgaagcagtatgagcacaatattatcaactacaaaaacaatattgacaagctggaaggtgatcatcagttaatccaggaagcattggtgtttgacaacaaacataccaattatacaatggagcacatacgtgttgggtgggagctgctcctgaccactattgccagaaccataaacgaggtggagacccaaatattaacaagagacgcaaagggcattacacaagaacagatgaatgaattccgcgcttcttttaatcattttgatagacggaaaaatggactgatggaccacgaagactttcgggcttgtctaatctccatgggatacgatctcggcgaagctgagtttgcgaggatcatgaccttggttgatccaaacggacaggggaccgtgacatttcaatccttcatcgactttatgacaagggaaacagctgacacggatacggcagagcaggtcattgcttcctttaggatactagcctcagacaagccatacattctggcggaagaacttcggagagagctgcctcctgaccaagcccagtactgcattaaaaggatgcccgcatatagcggtccaggctccgtgcccggggccctggactacgctgcgttctcgtcggcgttatatggcgagtcagatctgtag

SEQ ID NO: 106917 - DNA, 1992 bp, synthetic construct
  misc_feature 1..1992: note = Description of Artificial Sequence: Synthetic coding sequence
  source 1..1992: mol_type = other DNA
agcaccctgtctagcgtggaaggaccaccggagtccagtacttgcagctatcaagagatgcgacgctcatctgtgaatagcagcgccatggctgagactgccgccaaccgcatttgcaaggtgctggcagtgaaccaggaaaatgagagactgatggaagagtatgaaaggctggctagcgagctgctggagtggatacggcgcaccatcccgtggctagagaataggactccggaaaaaactatgcaggcaatgcaaaagaaactcgaagatttcagggattacagaagaaagcataaaccaccaaaggttcaagaaaagtgtcagctggagatcaactttaatacgctgcagacaaaactccgtatctccaatcgtcctgctttcatgccctcagaagggaaaatggtatccgatattgcaggggcctggcaacgtctggagcaagctgagaaaggttatgaggagtggttactgaatgagatccgccggctggaacgcctcgagcatctggccgagaagttcaggcagaaagcatctacccacgaaacatgggcttacgggaaagagcagattctgctacagaaggactatgagtctgcctccctgactgaagttcgggcgttactgagaaaacatgaagcctttgagtccgatctagcagcccaccaggaccgggtggagcagattgctgcaatagcccaagaactgaacgagctagactatcacgatgcagttaacgtgaacgaccggtgccaaaagatctgcgatcagtgggatcgcctaggcaccctgacacagaagcgccgtgaggccctggagagaatggagaaactgttggaaactatagaccagctccatttagagtttgcaaagcgggccgcaccgttcaacaattggatggaaggtgccatggaagaccttcaggatatgttcatcgtacactccatcgaagagattcagtctctcattacagctcacgagcagttcaaggccactctgcccgaagccgacggggagaggcagagtatcatggccattcaaaacgaggtcgagaaagtgatccagtcttacaacattcgcattagctccagcaatccatacagcactgttactatggatgagctgagaacaaaatgggataaggtcaaacagctggtacccatccgcgatcaatctctgcaggaggagcttgcccgtcagcatgcaaatgagagactcagacgacagtttgctgcacaagccaacgctatcggcccctggatccagaacaaaatggaggaaatcgcaaggagctctatccaaattaccggagcactggaagaccaaatgaaccagctaaagcagtacgagcacaatataatcaactataagaacaatatagacaaattagaaggggatcaccagctcatccaggaagctctggtcttcgacaataaacacactaactacaccatggaacacatcagagtggggtgggaacttctcctcacgaccattgctcggaccatcaacgaggttgagacccagattctcacacgcgatgcaaaggggattacccaagagcagatgaacgagtttcgagcttcattcaaccatttcgaccgccgcaaaaatggtctgatggatcacgaagattttcgtgcctgtctgatttcaatgggatacgacctcggcgaggctgaatttgcccggatcatgacactcgttgatccaaacggccagggcacggtcacatttcaatctttcattgattttatgaccagggaaacagcagacacagatacagcagagcaagtgattgcaagctttcgtattctagcctctgacaagccctacatactggctgaagagctcaggcgggagttgcctccagaccaggctcagtactgcataaaaagaatgcccgcctattcgggccccggaagtgtgcccggagctctcgattacgctgcctttagctctgctctttacggcgaatctgacttgtag

SEQ ID NO: 106918 - DNA, 1167 bp, synthetic construct
  misc_feature 1..1167: note = Description of Artificial Sequence: Synthetic coding sequence
  source 1..1167: mol_type = other DNA
atggaaaagctgctggagactatcgatcagctccatttagagttcgctaagcgggcagcccctttcaacaattggatggaaggggcaatggaggatttgcaggacatgtttatcgttcactctattgaagaaatccagtcattgataacagctcacgagcaattcaaggcaacattacccgaggctgacggtgaacggcaaagcattatggcaatccagaatgaagttgagaaggttatacagtcttacaacattcggataagctctagtaacccctacagcacagtgaccatggatgaactcaggaccaaatgggacaaggtgaagcagctggttcctatcagagatcaatccctgcaggaggagttagcccgccagcatgcaaacgagcgcctccggcggcagttcgcagcccaggcgaatgcaataggcccctggattcaaaacaaaatggaggaaatcgcacggagtagtatacaaataacgggagcactggaggaccaaatgaaccaactcaaacaatatgagcacaacatcatcaactataaaaataacattgataaattggaaggcgatcatcagctgatccaggaggctttggtgtttgacaacaagcacacgaattatacgatggagcacattagggtgggctgggagctgctattgaccactatcgcgagaacaatcaacgaggtggagacccagattcttacacgtgatgcgaagggtattacacaggagcagatgaatgaattccgggcttcctttaatcattttgatcggcggaaaaatggtctaatggaccacgaggattttcgcgcttgcctgatctctatgggatatgacctaggcgaagctgaatttgctcggatcatgacactggtcgaccccaacggacagggaaccgtgaccttccagagctttatagattttatgactagagagaccgctgatacggacacagcggaacaggttatcgcgtctttccgtatcctcgcgtctgataaaccatacattctggccgaggaattgaggcgcgagctgcccccggaccaggcccagtactgtatcaagcgcatgcccgcatactccgggcccggctcagttcccggcgcccttgattacgccgcctttagttcagcactctatggggaaagtgatctgtag

SEQ ID NO: 106919 - DNA, 1131 bp, synthetic construct
  misc_feature 1..1131: note = Description of Artificial Sequence: Synthetic coding sequence
  source 1..1131: mol_type = other DNA
atgtttaatcctcacgccttagacgtgcctgctgtgatctttgataacggatctgggctgtgtaaagccggtctttctggggagatcggtcctcgacacgtgatctccagtgtgcttggtcattgcaagttcaacgttcccctggcgaggttgaatcaaaagtatttcgtcggacaggaagcattgtacaaatacgaggcactacatcttcactacccaatagaaagaggcctagtgaccggttgggacgatatggagaagctgtggaaacatcttttcgagcgcgaactgggggtcaagccctcccagcagccggtgctcatgaccgagccctctctgaacccgcgcgagattagagagaagctggctgagatgatgtttgagacattcagtgtgccgggcttctacctctcaaaccacgcggttgctgctctgtatgcttcagcgtgcgtaaccggactcgtggtggactccggggacggcgtgacatgcaccgttcccatctttgaaggttattcgctccctcacgctgttacaaaactctgcatggcagggcgcgacatcacggaacacttaaccagactactgttcgcatctggatttaattttccttgcattttgaataaagcggttgtcaacaatataaaggagaagctgtgttatatcgccctggaaccggaaaaagagttacggaagtcgaggggggaagtacttggcgcctacagactgcccgatggccacgtcattcatttcggagacgagctgtaccaagtgcctgaggtgctgttcgctccagaccaacttggaatccactcacctgggctgtctaagatggtgtcatcctccatcatgaagtgcgacaccgacattcagaacaagttgtatgcagacatcgtgctgtctggaggcaccaccctcttaccaggtctggaggagcgcctaatgaaagaggtcgagcagctcgccagcaaggggacaccaattaaaataacagccagccccgacaggtgctttagtgcttggatcggagcctccattatgacatctatgagtagtttcaaacagatgtgggttacgtcagccgacttcaaggagtacggaacatcagtcgtacagagaagatgtttttag

SEQ ID NO: 106920 - DNA, 1134 bp, synthetic construct
  misc_feature 1..1134: note = Description of Artificial Sequence: Synthetic coding sequence
  source 1..1134: mol_type = other DNA
atgttcaaccctcacgctctagattccccggcagtcatctttgacaacggatccggcttttgtaaggctgggctctctggggagtttggcccgcgccacatggttagctcaatagtaggacacttaaagtttcaagcaccatctgctgaagccaaccagaagaaatacttcgtgggcgaggaggcactttataaacaggaggcccttcagctgcattcccctttcgaacgcggacttattaccgggtgggatgacgtggagcggttatggaagcacctgtttgagtgggaactcggagtgaaacctagcgatcagcctctcctcgccaccgaaccttccctcaatcccagggagaatcgagaaaaaatggctgaagtgatgtttgagaacttcggcgtgcccgcgttctacctatcagatcaagctgtccttgccctgtatgctagtgcctgcgtgacagggctggtcgttgatagcggagatgcagtaacatgcacagttccaatctttgaagggtattcactcccacacgcagttacaaaactgcacgtcgctgggcgcgacatcactgagctgctcatgcagctcctgcttgcatccggtcacacttttccgtgtcagctcgacaagggcctggttgatgacattaaaaagaagctgtgttacgttgcactggaaccggagaaggagttatcaaggcgcccagaggaggtcctgcgcgagtataagctgccagacggtaacatcattagcctgggtgatcccttgcaccaggcccctgaagccctgttcgtaccacaacagctaggatcccagagccccggcctttctaatatggtgtctagctcaattaccaagtgcgatacagatattcagaagattttgttcggggaaatagtcctgtccggcggcaccacgttattccacgggctcgatgataggctgctcaaggaactggagcagttggcctcaaaagatacacccattaaaataaccgctccaccggatcggtggtttagtacttggattggagcttccatagtgacgtccctttcctctttcaagcaaatgtgggttacagccgctgatttcaaagagttcggcactagcgtggtgcagcggcggtgtttctag

SEQ ID NO: 106921 - DNA, 987 bp, synthetic construct
  misc_feature 1..987: note = Description of Artificial Sequence: Synthetic coding sequence
  source 1..987: mol_type = other DNA
atgtttaatccccacgctctggattctcctgctgtgatcttcgataatgggagcggattctgtaaggctggcctgagcggcgagtttgggcctcggcacatggtcagttccatcgtgggtcaccttaagtttcaagctccctccgcagaggcgaatcaaaagaagtattttgtgggcgaagaggcattgtacaaacaagaggctcttcaattacactcacccttcgagagagggttgattacaggttgggatgatgttgagcgtttgtggaaacacctgtttgagtgggagctcggcgtgaagccctcagatcaacctctgctggcgactgagccttctctcaatccaagggagaaccgcgagaagatggccgaggttatgttcgagaacttcggcgtgcccgctttctatcttagcgatcaagcggtgctggcattatacgcctctgcctgtgtgactggtcttgtggtagacagcggtgatgccgtcacctgcaccgtccccatcttcgaagggtattcccttccccatgctgttactaagttgcacgtagctggccgcgacattacggagctgttgatgcagcttctccttgcatcagggcacacatttccgtgtcagctcgataaaggattggtcgacgatattaaaaaaaagctgtgttacgtggcgctggaaccagagaaggagttgagtagacggcctgaagaggtcctgagggaatacaagctacccgatgggaatatcataagtttaggggaccccttgcaccaggctccagaggcattgtttgtgccccagcagttgggctctcagagtccagggctctcaaatatggtcagctcttcaattactaagtgtgatacagacattcagaagatcctcttcggtgaaattgtgctcagtggaggcactactctttttcatgggctggacgatcggctgctccatctggattggtccctgcacagacacctgtcggaatag

SEQ ID NO: 106922 - DNA, 1752 bp, synthetic construct
  misc_feature 1..1752: note = Description of Artificial Sequence: Synthetic coding sequence
  source 1..1752: mol_type = other DNA
atggaatctaagggcgcctcctcctgtaggctgctgttttgcctcttgataagtgccactgtattccgccctggtttggggtggtacactgtgaactcggcctacggtgacactattatcatcccctgtcgacttgacgtgcctcaaaatctgatgttcggtaaatggaaatacgagaagccagacgggtcccccgtctttatcgctttccggagctcaacaaaaaagagtgttcagtatgacgacgtgcctgagtataaagatagactcaatctgagcgagaattacacgctctcaatttccaatgccaggatctccgacgagaaaagattcgtctgtatgctcgttactgaagacaacgtttttgaggcaccaaccatcgtgaaggtcttcaaacagccttcaaaaccagaaatcgtgtcgaaagctttgtttctggaaacagagcagctgaagaagctgggggactgcatttcagaagactcgtatcctgatggcaatataacgtggtaccgcaatgggaaagtgcttcatccactggagggagcagtcgtgatcatcttcaaaaaggagatggatcctgttactcagttgtacacaatgacgtccacgctcgagtacaaaaccaccaaagccgacattcagatgccattcacctgtagtgttacttactacggtcccagcggtcaaaaaactatccacagcgagcaagcagtgttcgacatctactaccccaccgaacaagtgaccattcaggtactcccgcccaagaacgccatcaaagaaggcgataacattactttaaagtgcttgggcaatggcaatcctcctcctgaggagttcctgttctacctaccaggtcagcccgaaggcattcgttcttctaacacctacactctgacagatgtgcgcagaaatgcaactggagactataaatgctccctgatcgataagaaaagtatgatagctagcacagcgatcaccgttcactacctggatttgagcctcaacccttctggagaggtcacccgccaaattggggatgccctgccagtttcgtgtacaatctccgcgtccaggaatgccacagtagtttggatgaaagacaatatacggctgagatcgtccccttcattttcctccctgcactaccaagacgctgggaactacgtgtgtgagacagccctgcaggaggtcgagggtctcaaaaagcgtgagtcactgaccctgatcgtagaaggcaagccgcagatcaagatgaccaagaaaacagacccctcgggcctcagtaaaacaattatctgtcatgttgaaggttttcctaagccagccatccagtggacgatcaccggctccgggtctgtgataaaccaaacagaggaaagtccatatattaatgggagatattactctaagataatcattagcccagaggagaatgtgaccttgacatgcaccgccgaaaaccagctagaacggacggtgaattcacttaacgtatcagctatctcaattcctgaacacgacgaggctgacgagatctcggacgagaatagagaaaaagtgaacgatcaggctaaactcatcgtcgggattgtcgttggtttgcttctggccgccctcgtggcgggcgtggtatattggctctacatgaagaaatccaaaactgcctctaaacatgtaaacaaagacctgggtaacatggaagagaacaaaaagctggaggagaataatcataagacagaggcatag

SEQ ID NO: 106923 - DNA, 918 bp, synthetic construct
  misc_feature 1..918: note = Description of Artificial Sequence: Synthetic coding sequence
  source 1..918: mol_type = other DNA
atggatccggtgacccagctctataccatgacctccacactggaatacaaaaccactaaggctgatattcaaatgccattcacatgctcggtaacatactacgggccatcgggtcagaaaaccatacatagtgagcaggcagtgttcgacatctattacctggaccttagcttaaacccctcaggggaagtaacaaggcaaatcggagatgcactgcccgtctcttgtacaatctcagcgtccagaaatgccactgtcgtgtggatgaaagacaacatccgactccgatcaagtcccagcttctcttcactgcactaccaggacgccgggaattatgtgtgcgagacagccttgcaagaggttgagggtctgaagaagcgcgaatcactgacactcatagtggagggaaaaccccagatcaaaatgactaaaaagaccgacccatcagggctcagcaagaccataatctgccatgtggagggcttccccaagcccgccatccagtggaccataactggttcggggtcagtgattaaccagacggaggagtctccctacatcaatggccgctactattctaagatcatcatcagtccagaggagaatgtgaccctgacatgtacggcagagaaccaacttgaacggaccgtcaatagcctcaacgtgagcgccatcagcatccccgagcacgacgaggccgacgaaatttctgacgagaatagagagaaggttaacgaccaagcaaagctgattgtcgggatcgtcgttggccttctgctggccgcactagtggcaggcgtggtgtattggttgtatatgaagaaatccaagactgcgtccaagcatgtgaacaaggacctgggaaatatggaggaaaacaagaagttggaggagaataatcataagacagaggcttag

SEQ ID NO: 106924 - DNA, 1035 bp, synthetic construct
  misc_feature 1..1035: note = Description of Artificial Sequence: Synthetic coding sequence
  source 1..1035: mol_type = other DNA
tgacttggagattgtatcagtgaggattcttatccggacggaaatatcacctggtacaggaatgggaaagtcctccatcctctcgagggtgcagtcgtgattatatttaagaaagaaatggaccccgtgacgcagctctacactatgacatccactctcgagtataagacgacgaaagctgacatccaaatgccctttacatgcagcgttacctattatggaccgagcggacagaaaaccattcattctgaacaggccgtcttcgatatttattatctagacctgagcctaaacccaagcggagaggtcactcggcagattggcgatgcgctaccggttagctgcaccatctccgcttcaaggaatgccacggtggtgtggatgaaggacaatatccggcttaggagtagtcctagtttcagttcccttcactatcaggacgcaggcaactatgtctgtgagactgctctgcaagaggtggaaggtctgaagaagagagagtctctaaccctgatcgtcgaaggcaagccccagatcaagatgacaaagaaaaccgatccctctggcctatcgaagactatcatatgccacgttgagggtttcccaaagcccgccatacaatggacaatcacagggtcggggtctgttatcaaccagacagaagaatctccgtatatcaacggccgctactactccaaaattataattagccccgaggaaaacgtgactctgacatgcacagcggagaatcagctcgaaaggacagttaatagtctgaatgtgagtgcgatcagcataccagagcatgatgaagccgacgaaatttcagacgaaaatcgcgagaaagtgaacgaccaggcaaaactgatcgtgggaatagtcgttgggctgctactggccgctctcgtcgccggcgtggtgtattggctgtacatgaagaagagcaagacagctagcaagcatgtcaataaggacttgggtaacatggaagagaataagaaactagaagaaaataatcacaagaccgaagcatag

SEQ ID NO: 106925 - DNA, 1713 bp, synthetic construct
  misc_feature 1..1713: note = Description of Artificial Sequence: Synthetic coding sequence
  source 1..1713: mol_type = other DNA
atggaaagcaagggagcgagcagctgcagactcttgttttgcctcctgatatcagcgacggtattcaggcccggactgggatggtacaccgttaactcagcgtatggcgatacaatcatcataccctgcaggctggatgtgccccagaatttgatgtttgggaagtggaaatacgagaaacctgatgggagccctgtatttatcgcttttaggagcagtacaaaaaaatccgttcagtacgatgatgtacccgagtataaggatcgtctgaacctgagtgagaattacacactgtccatcagcaatgctaggatatccgatgagaaacgattcgtctgcatgcttgtgacagaagataacgtgttcgaagcccctaccatcgtgaaggtattcaagcagccatctaagccggaaatagtgagcaaggcccttttcttggaaaccgagcagctgaaaaagctgggagattgtatatctgaagatagctatcctgacggaaatattacttggtaccgcaacggcaaagtccttcacccgctagaaggggccgtggttattatctttaaaaaggagatggacccagtaacccagctttataccatgacatcgaccctcgagtacaagaccactaaggcggacatccaaatgccatttacatgttccgtgacttactacggtccaagtgggcaaaaaacaattcacagcgagcaagcggtgtttgatatctattaccccactgagcaagtgacgattcaagtacttcctcccaagaacgctattaaggaaggcgataacattacgcttaagtgcctgggaaacggcaacccgcctcccgaagagtttcttttttatcttccaggacaacctgaagggattcggtctagtaacacgtataccctcaccgacgttcgccgaaacgccaccggcgattataaatgtagccttattgacaaaaagtcaatgattgctagcactgctattactgttcattacttggatctctcattgaatcccagcggagaggttacgcgccagatcggagacgccctgccagttagctgtacaatttccgcctcacgaaacgcaacagtggtctggatgaaagacaacatcaggctgcgaagcagcccaagcttctcttccctgcattatcaagacgccggcaattatgtctgcgaaacagccctccaggaggtcgaggggctgaagaagagagaaagtctgaccctgatcgtcgagggaaaaccccaaataaaaatgactaagaagaccgacccaagtggcctctctaaaactatcatatgtcatgtggaagggttccctaaacctgccattcaatggacaataactggatccggcagtgttatcaatcagacagaggagtcgccatacataaatggtagatactactcaaagattatcatcagtccagaggaaaacgtaaccctcacttgcacagctgagaaccagctagaaagaaccgtcaacagccttaacgtctcagcaaacgaaaaccgcgagaaagtgaacgaccaggctaaactgattgtgggcattgttgtcggactgctccttgccgccctcgtggcaggcgtggtgtattggctctatatgaaaaagtcaaaaaccgcttcaaaacatgtgaataaggatcttggaaatatggaggaaaataagaaacttgaggaaaacaatcataagacagaggcctag

SEQ ID NO: 106926 - DNA, 1074 bp, synthetic construct
  misc_feature 1..1074: note = Description of Artificial Sequence: Synthetic coding sequence
  source 1..1074: mol_type = other DNA
atggaagtgctgcgcccacagcttatcagaattgacggtcgtaattatcgcaaaaaccccgttcaggaacagacataccagcacgaagaagacgaagaggatttttaccagggtagtatggaatgcgccgacgagccatgcgatgcctatgaggttgagcaaaccccccaaggcttccgtagtaccctccgcgctcctagtctcttatacaaacacatagtagggaaacggggggataccaggaaaaagatcgagatggagaccaagacatccatctctattccaaaaccgggccaggacggtgaaattgtgataacaggtcagcacaggaatggcgttatctccgccagaacacgcattgacgtgctgctggacacattccggcggaagcagccctttacacatttccttgcattttttcttaacgaggtggaggttcaggagggctttctgagattccaggaggaagtcctcgcaaaatgttccatggaccacggggtggactccagtatattccagaacccgaagaaattacacctaaccattgggatgctggttttactctcggaggaggaaattcaacagacctgtgaaatgctgcagcagtgcaaagaggaatttatcaacgacatctccggagggaagcccttggaagtggagatggctggaatagaatatatgaacgatgatccaggcatggtcgacgtcctttacgccaaggtgcatatgaaagatggcagcaataggctgcaggaactagtagatcgtgtcctcgaacgctttcaggcatctggcctcatagttaaggagtggaacagcgtgaagctccacgcaacagtcatgaatacactgttccgaaaggatcccaatgccgaagggcggtacaatctgtacaccgctgaagggaaatatatcttcaaggaacgtgagagctttgacggacgaaacatcctgaaactctttgagaatttctacttcggaagcctgaagcttaattctattcatatatcacaaagatttacagtggattctttcggaaattacgcatcctgcggccagatagacttctcatag

SEQ ID NO: 106927 - DNA, 1074 bp, synthetic construct
  misc_feature 1..1074: note = Description of Artificial Sequence: Synthetic coding sequence
  source 1..1074: mol_type = other DNA
atggaggtcttacggcctcagttgatccgtattgatgggagaaactatcggaagaatccagttcaggagcagacctaccaacacgaggaggatgaggaggacttttatcagggctcgatggaatgcgcagatgagccctgcgacgcgtacgaagttgaacaaacaccacaaggcttccgctccacactgagggccccttccttgctgtacaagcatatagtgggcaaaagaggagatacccggaaaaagattgaaatggaaactaaaacaagtataagtataccaaagcctggccaggatggagaaatcgtaatcactggacagcatagaaacggcgtaatttcagcaagaactcgtatcgatgtcctgttggacacgttcaggaggaaacagcccttcactcattttctagccttcttcctcaacgaagtcgaggtgcaagagggcttcctgcgatttcaggaagaggtactcgcaaaatgtagcatggaccacggcgttgacagcagcatttttcagaatccaaagaagctgcatctgaccattggtatgctggtcctgctatccgaggaggaaatacagcagacctgcgagatgctacagcaatgcaaagaagagtttatcaacgatatctctgggggcaagcccctagaggtggagatggccggaattgaatacatgaatgatgatcctgggatggtggatgttctctatgcgaaagtgcacatgaaggacggatccaaccgtctgcaggagctcgtggatcgtgtgctggaacggttccaggcaagtgggcttatcgttaaggagtggaatagtgttaagcttcacgccaccgtgatgaacaccttgtttcggaaagaccccaacgctgaaggccgatacaacctgtacaccgccgaggggaaatacatcttcaaagaacgggaatcttttgatggacgtaacatattgaagctatttgagaacttttattttggatccctgaagctaaactcaatccatatatcccagagattcactgtagatagctttggcaattatgcctcctgcggccagattgatttctcctag

SEQ ID NO: 106928 - DNA, 1203 bp, synthetic construct
  misc_feature 1..1203: note = Description of Artificial Sequence: Synthetic coding sequence
  source 1..1203: mol_type = other DNA
atggaggtgctgagaccacagttgatacgtatcgatggtcgaaactacaggaaaaatccagttcaggagcagacctatcagcatgaggaggatgaggaggacttttaccaagggagcatggaatgcgccgacgagccctgtgacgcctacgaggtcgaacagaccccccagggcttccgatccaccctgcgagccccatcacttctgtacaacttgatccatttgaacacttcaaatgattgtggattccaaaagataactttggactgtcagaacatctacacctggaagagcagacatatcgtgggcaaacgaggggatacccgaaagaagattgagatggaaactaagacctccattagtattcctaaacccggacaagatggcgaaatagttatcaccgggcagcaccgtaatggcgtgatatcagctaggacaagaattgacgtgcttctggatacgttcagaaggaaacagccatttactcattttctggccttttttctgaacgaggtcgaggtgcaggaggggttcttacgcttccaggaggaagtgctcgccaagtgctcaatggaccacggagtggattcctccatttttcagaatccaaagaaattgcatctgacaattggcatgctggtcctgctgagcgaggaagaaatacaacagacttgtgaaatgttacaacagtgtaaggaagaatttattaacgatataagcggggggaagcccttggaagtcgagatggccggcattgagtacatgaacgatgatcctgggatggtagacgtcctttacgcaaaagtgcatatgaaggatggtagtaacagattgcaggaacttgtcgatagagttctcgagcgctttcaagccagtggacttattgtgaaagagtggaatagtgttaaactccacgctacagtgatgaacaccttattccggaaagatccaaacgcagaaggccgctacaacctttatacagccgagggtaagtacatattcaaggaaagggaatcattcgacgggaggaacatcctgaagtcattcgctctcctccctcgcctcgaatataacgatgccatctcagctcattgcaatttatgcctccccggttcctccgatagtccagccagcgcatcgcaagtagcaggcattacgggggtctcagacgcttactcccagtcgctgcccgggaaatcgtag

SEQ ID NO: 106929 - DNA, 1074 bp, synthetic construct
  misc_feature 1..1074: note = Description of Artificial Sequence: Synthetic coding sequence
  source 1..1074: mol_type = other DNA
atggaagttctccgcccccagctaatcagaatagacggacgaaattatcgaaaaaatccggttcaagagcagacttatcagcatgaagaggacgaggaagacttctaccaaggctcaatggagtgtgccgacgagccctgtgacgcctacgaagtggagcaaaccccacaggggtttcggtctacattgcgcgccccatcgttgctctacaaacatatcgtgggaaagcgcggggacacacgtaagaagatcgagatggaaacaaagacatccatcagcatccccaaacccgggcaggacggtgagatcgtaatcaccggacagcaccgtaacggagtgatttccgctcgaactagaatcgacgtcctgctggatacgttccgccggaaacagccctttacccattttctcgcctttttcctgaatgaggtagaggttcaggaaggctttctgcgctttcaagaggaggtgttggctaaatgtagcatggaccatggcgtcgactcctcaatcttccaaaacccaaaaaagctgcatcttacaatcggaatgctggttctcctgtccgaggaagagatccaacagacctgtgagatgttgcagcagtgtaaggaggagttcatcaatgacatttctggcgggaagcctctggaggtggagatggccggcatagagtacatgaacgacgacccaggtatggttgatgtgctatatgctaaagtgcacatgaaagacggctcaaatcgactgcaggagctggtggatagggtgcttgagaggttccaggctagtgggttgatcgttaaagagtggaactccgtcaaactgcacgctaccgtgatgaatacactttttcggaaggaccccaacgctgaggggagatataacctgtatactgccgaaggaaagtacatcttcaaggagcgggaaagcttcgacgggcggaacatcctgaaacttttcgaaaacttctatttcggtagtctaaagttgaactcaattcacatcagtcagagatttaccgtggattcattcggtaactacgcgtcttgcgggcagattgattttagctag

SEQ ID NO: 106930 - DNA, 1203 bp, synthetic construct
  misc_feature 1..1203: note = Description of Artificial Sequence: Synthetic coding sequence
  source 1..1203: mol_type = other DNA
atggaggtgttacggccacaactcatccggattgatgggaggaattaccgaaaaaacccggttcaggagcagacatatcagcatgaggaagacgaggaggacttctatcaggggtcgatggagtgcgccgacgagccctgtgacgcttacgaagtggaacaaaccccacagggctttcgtagtactttacgcgctccctcgttgctctataacctcatccatctgaacactagcaatgactgcggctttcagaaaatcactcttgactgtcaaaacatctatacatggaagagtcgacatatagtgggaaaaaggggcgatacccgtaagaagattgagatggagactaagacttcgatttctataccaaagcctggccaggacggggagatcgtgatcactgggcaacatcggaacggcgttatctccgccaggactaggatcgatgtgctgctcgacacattccgtcgtaaacagccctttacacattttctggccttcttcttgaatgaggttgaggttcaggaagggtttttacggtttcaggaggaagtgttggccaagtgcagtatggatcatggggtggacagctctatctttcaaaaccccaaaaagctgcacctgaccatcggcatgctggtgctgctaagcgaggaagagatccaacagacctgcgagatgctgcagcaatgtaaggaggagtttattaatgatatttctggtggtaagccgctagaggtcgaaatggccggtatagaatacatgaacgacgaccccgggatggtagacgtgctgtacgccaaggtgcacatgaaagatggctctaacaggctacaggaactcgttgatcgtgtgcttgaacgtttccaggctagtggcctgatcgtaaaagagtggaactcagtgaagctgcacgccaccgtgatgaatactctttttaggaaggaccctaacgccgagggcagatataatctttacacggccgaaggaaaatacatctttaaggaacgcgagagctttgatggtagaaacattcttaaatcattcgcactattgccaagactggagtataatgacgccatctctgcacactgcaatctgtgcttgcccggcagtagcgactcccctgcctcagcatcgcaggtggctggcattaccggtgtgagtgacgcatatagtcagtctctccccggtaagagctag

SEQ ID NO: 106931 - DNA, 1074 bp, synthetic construct
  misc_feature 1..1074: note = Description of Artificial Sequence: Synthetic coding sequence
  source 1..1074: mol_type = other DNA
atggaggtgctccgccctcagctgatacgaatcgatgggcggaattataggaagaaccctgtgcaagaacagacgtatcaacacgaagaggacgaagaagacttctaccaagggagtatggaatgcgccgacgagccctgcgacgcctacgaggtcgaacagactccacagggcttcagatccaccttgagagctccttcgcttctctataagcatattgtagggaagagaggcgataccagaaaaaaaatcgagatggagactaaaacctccatcagtattcccaagccgggccaggatggggagatcgtgataactggacagcaccgtaatggggtgatctcagctcggactagaattgatgtgctcctggatacctttcgccggaagcagcctttcactcatttcttggccttctttctcaatgaggtcgaggtgcaggagggatttctgaggtttcaggaggaagtactcgccaagtgctcaatggaccacggcgtggactcatccatttttcagaatcctaagaagctccacttaactataggcatgctagttctcctctctgaagaagagatccaacagacatgcgagatgcttcaacagtgtaaggaagaatttatcaatgatattagcgggggcaagccgctggaagtcgagatggctggaatcgagtatatgaatgacgatcccggcatggtcgacgtgctttacgccaaagtccatatgaaagacgggagtaacagactccaggagctcgttgaccgggttctcgaaagatttcaggccagcggcctcatagttaaggagtggaatagcgtaaaactgcacgctactgtgatgaacaccttgtttaggaaggatccgaatgccgagggccgatacaacctgtacacagctgaggggaagtatatcttcaaggagcgggaatcttttgacggccgaaatattttgaaactgtttgagaacttctacttcggcagcctgaagctaaactccatccatatcagtcagcgttttacagtcgatagttttggaaactatgccagctgtgggcaaatcgatttttcttag

SEQ ID NO: 106932 - DNA, 879 bp, synthetic construct
  misc_feature 1..879: note = Description of Artificial Sequence: Synthetic coding sequence
  source 1..879: mol_type = other DNA
tgatacaaacacattgtgggaaaaaggggagatacccgcaagaaaattgaaatggagaccaagacaagtattagtatacctaagcccggccaggacggggaaattgtcataacaggacagcatcgcaacggcgtgattagtgcgcgcacccgcatcgacgtcctgctggataccttcaggcgcaaacaaccattcacccactttctcgcttttttcctgaatgaggtggaagtgcaggaaggttttctccggtttcaagaggaggtgctagccaaatgttccatggaccacggggttgattcatcgatcttccagaatcccaagaagctgcaccttaccattggtatgctggtgctcctgagcgaagaggagattcaacagacttgcgagatgctgcaacagtgcaaggaggagttcataaatgacataagcggaggaaagcccctggaagttgaaatggctgggattgagtatatgaacgacgatccaggcatggttgatgtgttgtacgccaaagttcatatgaaggatggttctaatagactacaggaactagtcgatcgcgttcttgaacgttttcaggcgagcgggctgattgtcaaagaatggaatagtgtcaaactccatgctaccgtaatgaacacgctgttcagaaaggaccctaatgcagaaggaagatataacctctatacagctgaaggaaagtatatattcaaagagcgtgagtcattcgacggcaggaacattctgaagtcatttgcgctgctgcctaggctggaatacaacgacgccatttcagcccactgtaatctgtgtctgccgggaagctcagactcacctgctagtgcatcccaggttgctggtataacagttgtgtag

SEQ ID NO: 106933 - DNA, 828 bp, synthetic construct
  misc_feature 1..828: note = Description of Artificial Sequence: Synthetic coding sequence
  source 1..828: mol_type = other DNA
atggaaacaaaaacgtccatatctattccaaaaccaggccaggacggggagattgtgataactggccagcaccggaacggagtgattagcgctcgtacacggatcgatgtcttattggacacttttagacgcaagcagccttttacccactttttggccttctttctcaacgaggttgaagttcaggaaggattcctgcgtttccaagaggaggtgctggctaagtgtagtatggatcacggggtggactcctctatatttcagaatcctaaaaaattacatctgacaattggcatgttggttttactctcagaagaggagatacagcagacgtgtgagatgttacagcagtgcaaggaggagtttattaacgacatctcaggcggaaagcccctcgaggtggagatggccggtatcgaatacatgaacgacgatcccggcatggtggatgtgctgtacgccaaggtccacatgaaagatggatccaacagactacaggagttggtcgatcgcgtgctcgagcggttccaggcctcagggctgattgttaaagagtggaatagcgtgaagctgcacgccaccgttatgaacaccctgtttcgcaaagaccctaatgctgagggaaggtataacctgtacactgcggaggggaagtatatctttaaagagagagagtcatttgatggccgcaatatactcaaatcatttgcgttattgcctcgactcgaatacaatgacgccattagcgcccattgcaacctctgtttgcctggatcatctgatagccccgccagcgcatcacaagtagctggcatcaccgtggtatag

SEQ ID NO: 106934 - DNA, 372 bp, synthetic construct
  misc_feature 1..372: note = Description of Artificial Sequence: Synthetic coding sequence
  source 1..372: mol_type = other DNA
atggaggttctccggccccagctgatccgcattgatggccggaattatcggaagaatccagtgcaggagcagacgtaccagcacgaagaagatgaggaagatttctaccagggctcaatggagtgcgccgacgagccctgtgatgcttatgaggtggaacaaactccacagggattccgaagtaccttaagagcgccctccctcctttacaagcacatagtgggtaagcgtggggacacaaggaaaaagatcgagatggaaaccaaaacttctatttctattccaaagcctggtcaagatggtgaaatcgttatcacgggccagcacaggaacggagttatctccgctcggactcggattgatgtgctttag

SEQ ID NO: 106935 - DNA, 312 bp, synthetic construct
  misc_feature 1..312: note = Description of Artificial Sequence: Synthetic coding sequence
  source 1..312: mol_type = other DNA
atggaagtgctgaggcctcagttgatacggatcgacggtcgcaattaccggaaaaatcctgtgcaggagcaaacctatcagcatgaggaggacgaggaagacttctaccagggatccatggagtgtgcagatgagccttgtgacgcctatgaggtagagcagacccctcaaggattccggagtacactaagagctcccagcctcctgtacaaacatatcgtagggaagcggggagacaccagaaaaaagattgagatggagacaaagacttcaatctcaatcccaaagcccggacaggacggcgagatttag

SEQ ID NO: 106936 - DNA, 459 bp, synthetic construct
  misc_feature 1..459: note = Description of Artificial Sequence: Synthetic coding sequence
  source 1..459: mol_type = other DNA
atggaggtgctccggccccagctgatcaggattgacgggcgtaattaccgcaagaaccctgtccaggaacagacgtaccagcacgaggaggatgaagaggacttttatcaagggagtatggaatgtgccgatgagccgtgtgatgcgtatgaagtggagcagactccacaaggcttccggagcaccttacgagctccaagcctcctgtacaaacatatcgtcggtaagcgcggtgacacacggaagaaaatcgaaatggagactaagacgtcaatcagcatccctaagcccgggcaagacggcgagatagtaatcaccgggcagcaccggaacggcgtgatctcagcccgaactcgcattgatgtcctgctcgatacctttcgccgaaaacagcccttcacacactttctagctttcttcctgaatgaggttgaggttcaggagggattcttgcgctag

SEQ ID NO: 106937 - DNA, 171 bp, synthetic construct
  misc_feature 1..171: note = Description of Artificial Sequence: Synthetic coding sequence
  source 1..171: mol_type = other DNA
atggaggtgctccgcccgcagctcatccgtatcgatgggagaaattaccgaaaaaaccccgtacaggagcagacttaccagcacgaagaggacgaggaggatttttaccaaggcagcatggagtgtgcagacgagccttgtgatgcctatgaagtagaacagacaccgtag

SEQ ID NO: 106938 - DNA, 1140 bp, synthetic construct
  misc_feature 1..1140: note = Description of Artificial Sequence: Synthetic coding sequence
  source 1..1140: mol_type = other DNA
atgatgaagtatccagggacctggccctgtcagggtatcattgggatcagtttcggcgagtctgtaatggaagttctgaggcctcaactgattcgcattgatggcaggaactatcgaaaaaaccctgtccaggagcagacatatcaacatgaggaggacgaagaggacttttaccagggatccatggagtgtgccgacgaaccatgtgatgcatacgaagtggagcagacgccccagggatttcgatcgacgctcagggcaccttctctgctgtacaagcacattgtggggaagcgaggggacactcgaaaaaaaatcgaaatggaaacgaagacatccatatccattcccaaacctggccaggacggagagattgtgatcactggacagcacagaaacggagtgatctccgcacgcacgcggatcgacgtgcttcttgacactttccggcgtaaacagccattcactcactttctcgccttctttctgaacgaagtggaggttcaagagggtttcctgagattccaggaggaggtgttagcaaagtgctcaatggatcacggcgtggattcttccatatttcagaacccaaagaagttacacctgacaatcggaatgttagttctgctctctgaagaggaaatacaacagacctgcgaaatgctccaacaatgtaaagaggaatttatcaacgatatctcgggtggcaagcctctggaggtagaaatggcaggcattgagtatatgaacgacgaccccgggatggttgatgtgttgtatgccaaagtgcatatgaaggacggcagtaatagactgcaggagctggttgatcgagtgctcgaacgttttcaggcaagtggtctcattgtcaaggagtggaattcagttaaactgcacgcaaccgtcatgaatacacttttcagaaaggacccaaacgccgagggcaggtacaatctttacaccgctgaaggaaaatacatctttaaggagagagagtcattcgatggtaggaacatcttgaagctcttcgagaatttctatttcgggagcctgaaactgaactcaatacatatctcccagcgctttacggtggacagttttggaaattacgcgagttgtggccagatcgactttagctag

SEQ ID NO: 106939 - DNA, 2274 bp, synthetic construct
  misc_feature 1..2274: note = Description of Artificial Sequence: Synthetic coding sequence
  source 1..2274: mol_type = other DNA
atgcccgccctacccctggaccagttgcagatcacccacaaggatccaaagactggcaaacttcggacttctcctgccttgcaccccgaacagaaagccgaccgctacttcgtactgtataagcccccacctaaggataatatcccagcactcgtggaagagtacttggaacgtgcaactttcgtggccaatgatttggactggttgctggccttgccacacgataaattctggtgccaagtgatcttcgatgagacgctgcagaaatgcctggacagctacttgcggtacgtgcctcgaaaattcgatgaaggggttgcatctgctccagaagtggtggacatgcaaaaacgcttgcaccgatcagttttcctgacctttcttcgtatgtcaactcataaggagtctaaggaccatttcatctcacccagtgcgttcggagagattctctataataatttcctgttcgacattcccaagatcctggatctctgcgtcctgtttggtaagggtaatagtccactactgcagaagatgataggcaacatttttacccaacagcccagttactatagcgacttggacgaaactttacccacgattcttcaggtgttttctaacatcttgcagcactgcggcctacagggtgacggcgctaatacgacaccacagaagcttgaagagcgcggccgactgaccccaagtgatatgccactccttgagctgaaggatattgtgctgtacctttgcgatacctgcactacgctttgggctttccttgatatcttcccactggcgtgccagacatttcagaagcatgatttctgttatcggctggctagtttttacgaggccgctatccccgagatggagtccgcgataaaaaagagacgccttgaagactctaaacttcttggagacttgtggcagagattgagccactctcgcaagaaacttatggaaatctttcacattatactgaatcagatttgtcttctccctatactggaatcctcatgcgacaacatccagggctttatagaggaattcttacagatctttagcagcctgctacaggagaaacgttttctaagggattatgacgccctgtttcccgtggctgaggacatttctctcttgcaacaggcctcaagtgtactggatgagacccggactgcatatattttacaagcagttgaatctgcttgggagggagtggataggaggaaagctacagatgcgaaggatccaagcgtgatagaagaaccgaatggcgagccaaacggagtgaccgtgactgccgaggctgtgtcccaggccagttctcatcctgagaattctgaggaggaagaatgcatgggcgctgccgctgctgtgggccctgccatgtgtggtgtagagttggactccctcatcagtcaagtgaaggacctccttccagatcttggggaggggttcatattggcttgcctagagtattatcactacgacccggaacaggtgattaataacatcctcgaggaacggctggcacctaccctgtcccagctcgacaggaatctggatagagagatgaaaccagatcccactccactgctgacctctagacacaacgtgttccaaaatgatgagttcgacgtttttagcagggattccgtggacctgtctagagtgcataaggggaagagcacgcggaaagaggagaatacgaggtctctgttgaacgacaaaagggccgttgcagctcagcgccaacgttatgagcagtattccgttgtcgtcgaggaagtccccctgcaaccgggtgagtcacttccatatcacagtgtgtattacgaagacgagtatgatgacacttacgacggcaatcaggtgggggctaatgacgccgacagcgacgatgagctgatctcccggaggcccttcaccataccccaggtgcttaggactaaagtgcccagagaggggcaagaagaagatgatgatgatgaagaagatgacgcagacgaggaagctcctaagccagatcattttgtgcaggatccggccgtgctgagagagaaagccgaagcgagacgaatggcattcctggcaaagaagggctacaggcacgacagctctacagctgttgccggctcgcctcggggccatggccaaagtcgggaaaccacacaggagaggcgcaaaaaggaagccaataaagcaactagagctaatcacaaccgtcgaaccatggccgatagaaagcggtctaaggggatgataccatcttag

SEQ ID NO: 106940 - DNA, 2274 bp, synthetic construct
  misc_feature 1..2274: note = Description of Artificial Sequence: Synthetic coding sequence
  source 1..2274: mol_type = other DNA
atgccggctctcccactcgaccaattgcagatcactcacaaggatcctaagactggaaagttaaggaccagccccgctctgcatcctgagcagaaagctgatcgctactttgtgttgtacaaacccccgccaaaagacaatattcccgctctcgtggaagagtacctggaacgggcaacgttcgtggctaacgatctggactggctccttgctctaccccacgacaaattttggtgccaagtgatattcgatgagactcttcagaagtgcctcgacagctatctccgttacgtcccacgcaaattcgatgaaggcgtcgcatcagcccctgaggtggtcgacatgcaaaagcgcttgcataggtctgtcttcctcacgttcttacgcatgtcaacgcacaaggagagcaaggatcattttatctctccctctgcctttggggagatcttatacaataactttttattcgacattcctaaaatactcgacttgtgtgtgctgttcggcaaaggcaatagcccgctgctccaaaagatgattgggaatatattcactcagcaaccgtcctactactccgatctggacgagactcttcccactattctgcaggtcttttccaatattctacagcattgcggcttgcagggcgacggcgcaaataccaccccccagaaactcgaggaaagagggaggctaaccccatcagacatgccattacttgagctgaaagatattgtgttgtatctgtgtgacacatgtaccacactgtgggccttcttggatatttttcctctggcatgtcagacttttcagaagcatgacttctgctacagattggccagcttctacgaagcggccattccagaaatggaaagcgccatcaaaaaacgccgtctggaagacagtaaattacttggggacctctggcaaaggctaagtcactccaggaaaaagttgatggaaattttccacattatcttaaatcagatttgtctactccccattctggagagtagctgcgataacattcagggctttatcgaggagttcttgcagatcttttcttccctccttcaggagaaacgattcctgcgcgactacgatgctttgtttcctgtggccgaagatatttccctgttgcaacaggccagctccgtcctcgacgaaacacgcacggcctatatcctacaggccgtggagtccgcgtgggaaggcgtcgaccgccgcaaggcaaccgacgctaaggacccttcggttatcgaagagccgaacggcgaaccgaacggcgtcactgtgacagctgaagccgtgtcacaggccagctctcacccagaaaacagtgaggaagaggagtgtatgggcgccgccgccgcggtgggcccagccatgtgtggggtggaactcgacagtctgatcagtcaggtcaaagacctcctaccagacttgggcgagggattcatcctggcatgccttgagtattaccattacgatccagaacaggtaatcaacaacattctggaggagagattggcacctacgctctcccagcttgataggaacctggaccgagagatgaagcctgaccctacgcccttgttaacatctaggcataatgtattccagaatgacgaatttgacgtgttttcccgcgattcagtcgacctgtcacgggtgcataagggaaagagcaccagaaaagaggagaatactaggtccttgctcaacgataagcgagccgttgctgcccagagacagaggtatgagcagtatagcgtcgttgtagaagaggttcctctgcaacccggcgaatccctgccataccacagcgtttactacgaagacgagtacgacgacacttatgacggtaatcaggtgggcgcaaacgatgcagattccgatgatgagctgatttctaggaggccattcacgatcccccaggtccttcgcacgaaagtcccaagagagggccaggaggaagacgacgatgatgaggaggacgacgccgacgaggaggctccaaagcccgatcactttgtccaagacccagctgtactccgtgaaaaagcagaggctcgaagaatggccttcctcgctaagaaggggtaccgtcatgattcaagcacagcggtagccgggagccctagaggccacgggcaaagccgtgagacaacacaggagcgacgaaaaaaggaggctaataaagccacaagggccaaccataatcggcgcaccatggctgaccgtaagcgctcgaaggggatgatcccatcgtag

SEQ ID NO: 106941 - DNA, 723 bp, synthetic construct
  misc_feature 1..723: note = Description of Artificial Sequence: Synthetic coding sequence
  source 1..723: mol_type = other DNA
atgccggcacttccactggatcagctccagattacacacaaggatcctaaaaccggcaaactcaggacgagtcctgctctgcaccctgagcaaaaagcagatcggtattttgttttgtataaacctcccccaaaagataacatacctgcgcttgttgaagaatacctcgagagagcaacattcgtggccaatgatcttgactggctactagcgttaccccacgacaagttttggtgtcaggtgatatttgatgagaccctccagaaatgtcttgatagctacctaagatacgtgccccgaaaattcgatgaaggagtcgcctccgctcccgaggtggtggatatgcaaaaacgcctgcatagatcagtgttcttgacattcctgcgcatgagcacccataaagaaagtaaagatcattttatctccccgtctgcgttcggagagattctgtacaataattttctgttcgatattcctaagattctggacctgtgcgtactgtttggcaagggcaactcccctttactccagaagatgatagggaacatctttacccagcagccgtcgtattactccgatttggatgaaaccttacccaccatcctccaggtctttagcaacattttgcagcattgtggcctgcaaggcgatggcgccaatacaacaccgcagaaattggaggagcggggacgtctaaccccaagtgatatgccgctactctag

SEQ ID NO: 106942 - DNA, 2046 bp, synthetic construct
  misc_feature 1..2046: note = Description of Artificial Sequence: Synthetic coding sequence
  source 1..2046: mol_type = other DNA
atgcccgcccttcccctggatcagctgcagattacccacaaggatcccaagactgggaaactacggacctcacccgccctcgtcatcttcgacgagaccttgcagaagtgcctggattcttaccttaggtacgtccctcgcaagttcgacgagggcgtggcttctgccccagaagtcgtggacatgcagaagcgcctgcaccgctcagtttttctgacatttctgagaatgtctacacataaagagtctaaaatattggatctctgcgtgctgtttggcaaaggtaatagtccattattgcaaaaaatgatcgggaacatcttcacccagcagccctcgtactatagcgacctcgacgaaacactgcccacaatcctccaggtctttagtaacattcttcaacattgtgggttgcagggggatggcgctaatacaaccccccagaaactcgaggaacgtggtcgtctgactccatccgatatgcccctcttggagttgaaagacatcgtcctgtacctttgcgacacatgtaccacactgtgggccttcctggacatctttcccctggcctgccagacctttcaaaaacatgatttctgctatcgcctggcatccttctacgaggctgcgatccccgagatggaatcagccataaagaaaagaaggctcgaggactctaagctgcttggggatctgtggcaacgtctgtcacattcacggaaaaaactcatggagattttccacattatactgaaccagatctgtctgctgcctatccttgaatctagttgcgataatatacaaggtttcatagaggaattcttgcaaattttttcttccttactccaagaaaagaggtttctgcgcgattatgatgcactctttccagtggctgaggatatctctctgctccaacaggcaagctccgttcttgatgaaacccggaccgcatacatactccaagccgtggagagtgcctgggagggtgtggaccggaggaaggctaccgatgctaaggatcccagcgtcatcgaagaacccaacggcgagcccaatggcgtaactgttactgcggaagcagtgagtcaagcctcaagtcacccagaaaactctgaagaggaggagtgcatgggtgccgccgcggccgtgggaccagctatgtgtggcgtggagttggattccttaattagccaagtgaaggatctccttcccgacctcggtgagggtttcatcctcgcatgtctggagtactaccactacgacccagagcaggttattaataacattctggaggaacgattggccccaactctgtctcagctcgataggaacctggacagagaaatgaaacccgacccaaccccactgttaacgtctaggcacaacgtgtttcagaatgacgagtttgatgtgttctccagagattccgtggacctgtcccgcgtgcataaaggcaagtccactcggaaggaggaaaatacaagaagcctattgaatgataaacgggccgtagctgcccagagacagcggtatgaacaatacagcgtggtagtcgaagaagtgcccttgcagccaggcgagagcttgccttatcatagcgtgtactatgaggatgaatatgatgacacatacgatggcaaccaagttggagctaatgatgcggactcagatgatgaactgatttccagaaggccatttaccatccctcaggtgctcagaactaaggtcccccgcgaagggcaggaagaagacgatgacgacgaggaggacgacgcggatgaggaagctcctaagcctgatcactttgtgcaggatcctgcagtgctgcgtgagaaagccgaggcgcggcgaatggctttcttagccaagaaggggtatagacacgattcgtcgacggccgttgcaggctcccccaggggacatggtcagtcccgggagaccacacaggagcgaaggaaaaaagaagccaataaggccactagggccaatcataaccgtaggacgatggccgatcgaaagcgcagcaaaggtatgattcccagctag

SEQ ID NO: 106943 - DNA, 531 bp, synthetic construct
  misc_feature 1..531: note = Description of Artificial Sequence: Synthetic coding sequence
  source 1..531: mol_type = other DNA
atggctctgccgcggctgacaggagcactgcggagcttctcgaatgttacaaagcaagacaactataacgaggaagttgctgaccttaagatcaagaggtccaagcttcacgaacaggtcctcgatctggggttgacctggaagaaaatcattaagttcctgaacgaaaagctggagaaatccaagatgcagagcatcaatgaggaccttaaagacatcctacatgctgctaagcaaattgtgggcacagacaacgggagggaggctatcgagtcgggcgctgcattcctgttcatgacgttccatctgaaagactcagtcggccacaaggagaccaaggccattaagcagatgttcggacctttcccctcttcttctgctaccgcagcctgtaacgctacaaataggattatttcacactttagccaagacgacctgaccgcgctcgtgcagatgaccgaaaaagaacacggagacagggtgttttttgggaaaaatctagctttctcgttcgatatgcatgatctgtag

SEQ ID NO: 106944 - DNA, 336 bp, synthetic construct
  misc_feature 1..336: note = Description of Artificial Sequence: Synthetic coding sequence
  source 1..336: mol_type = other DNA
atggccctgcccagactgaccggagcactcagatcattctctaatgtgaccaagcaggataactacaatgaggaggtcgcggacctgaaaattaagagaagtaagctgcacgagcaggtgctggatctcggcctaacatggaagaaaattattaagttcttaaacgagaagttggagaaatctaaaatgcaatccataaacgaagatcttaaggatattttgcacgcagccaagcaaatcgaagtgaactgccccttccagaaacgtcgactggatggaaaagaagaggacgaaaagatgtctagggcctccgatcggttcagagggctgcgttag

SEQ ID NO: 106945 - DNA, 6609 bp, synthetic construct
  misc_feature 1..6609: note = Description of Artificial Sequence: Synthetic coding sequence
  source 1..6609: mol_type = other DNA
atggcccttcccagactgacaggagctctcaggtcctttagcaatgtcaccaagcaggacaactataacgaggaggtggccgacctgaaaatcaagcgaagtaagctccacgagcaggtgttggatctaggtctgacttggaaaaaaatcatcaagttcttaaacgagaagctggaaaagagtaagatgcagtctattaacgaggacttgaaagatatcctgcacgctgccaaacagattgtgggaactgataacggtcgtgaggcaatagaatccggagccgcttttttgtttatgactttccacctcaaagatagtgtgggtcacaaggagacaaaagctatcaaacaaatgtttggtccttttcccagcagcagcgcaactgccgcttgcaatgcgacgaataggattattagccatttctctcaagatgacttaacagccctagtgcagatgacagagaaggagcatggagatagagtattcttcgggaaaaacctcgcattcagcttcgacatgcatgatctggaccattttgatgaactaccaatcaatggcgaaacgcagaagacgatcagcttagattataagaagttcctgaacgagcatcttcaagaagcttgtacgccagaactgaaaccagtggaaaagacaaatggttcctttctgtggtgcgaagtggaaaagtacctgaactcaactttgaaggaaatgaccgaagtgccccgtgtcgaggatctctgctgtacactgtatgacatgctggcatcaattaaatctggagatgagctgcaagatgagctgtttgagctcctgggtcccgagggcctggagctgattgagaaacttctgcagaacaggatcaccatcgtcgataggttccttaacagctccaacgaccatcgctttcaggctctgcaagacaattgcaaaaaaatcctgggcgaaaacgcgaagcctaattatggatgccaagtcactatccagtccgagcaggaaaagcagttgatgaagcagtaccggcgcgaggaaaagcgaatagctaggcgcgagaaaaaagccggagaggacctggaggtcagcgagggtctgatgtgtttcgatccgaaggaactaaggatccagagggagcaggctctactgaatgcccggtcagttccaatcctctcacgccaaagagacgctgacgtggagaaaattcattatccccacgtttatgattcgcaagcagaggccatgaagacttctgcctttatcgccggcgccaaaatgattttacccgaggggattcaacgagaaaacaacaagctctatgaggaagtacggattccatacagcgaaccgatgccactgtctttcgaagagaagcctgtgtatatccaggacctcgacgagatcgggcagcttgcttttaaaggcatgaagcgcctgaaccgtattcagagcatcgtgttcgagacagcttataacaccaatgagaatatgcttatctgcgcccctaccggtgcaggcaagacgaacattgccatgctcacggtactccacgaaataaggcaacatttccagcagggggttataaagaagaatgagttcaaaattgtttatgtggccccaatgaaagctctggcggcagagatgactgattattttagccgaaggctcgaaccattgggcattatcgtcaaagagctcacaggagacatgcagttatctaaaagtgaaatattgaggacgcaaatgctagtaacgacccccgagaaatgggatgttgttacgagaaaatccgtcggagatgttgcactgagtcagattgtgcgcctactcatcctggatgaagtgcacctgcttcatgaggatagagggcccgtactcgagagtatcgttgctagaacgctgcgtcaagtggaaagtacccagagtatgatcaggatcctgggcctgtcagcaacactacccaactacctagacgtagcgacatttctacatgtaaacccgtacatcgggctgttctttttcgacgggaggttcagacccgtacctttggggcagacgtttctcggcataaagtgtgctaataagatgcagcagctcaacaatatggatgaggtgtgttacgagaacgtgctcaaacaggtgaaggcgggccaccaagtgatggtattcgtccatgcccgaaatgcaaccgtgagaactgccatgtccttgattgaaagggcaaaaaattgcggacacatacctttcttttttcccacccagggccatgactatgtcctggcggaaaagcaagtccagcgatcccgcaataagcaggtccgtgagcttttccccgacggattttctattcaccacgccggcatgttgagacaagaccgtaatctcgtggagaatctgttttctaacggccatattaaagttctggtgtgtacagctactcttgcctggggcgttaacctgcctgcacatgccgtgataatcaagggcacacaaatctacgccgcaaagagagggagcttcgtagatctgggtatattagatgtgatgcaaatatttggacgtgccggacggccacaattcgacaaattcggtgagggcatcatcataactacccatgacaaactttcccactacctaactcttcttacccagcgtaatccaattgagagtcagtttcttgaaagcctggccgacaacctgaacgccgaaatcgcccttggcacagtgactaacgttgaagaggctgtgaagtggattagctatacatacttatatgtgagaatgcgagctaatcctctagcatatgggatcagccataaggcctaccaaatcgatccaacacttagaaagcatcgtgagcagctggtaatcgaggtcgggaggaaattagacaaggcccagatgattagattcgaggagcgcactggatatttctcgtcaacagacctcgggaggaccgcctcacactactacattaagtacaacactattgagactttcaacgagctcttcgatgcccataagaccgagggggatattttcgccattgtgagtaaggccgaagaatttgaccaaatcaaggtcagggaagaggaaatcgaggaactcgatactctccttagcaatttctgtgaactgtctactccaggtggcgtcgagaattcttatggaaagatcaatattctgcttcagacttacatctcacgcggggaaatggattccttcagccttatctccgattccgcctacgtagcccagaacgctgcacgcatcgtccgcgctctgttcgaaatcgctctgagaaaaagatggcccactatgacttatagactgctgaacctgtctaaggtgattgataagcgactgtggggctgggcatctcccctcaggcagttttctattctgcctcctcacatactgaccagactggaggagaaaaagctgactgtggataagctcaaagacatgcgcaaagacgaaattggacatattctgcatcacgttaatatcggactaaaagtgaaacaatgtgtccaccaaattccgtcggtgatgatggaggcatccattcagcccattaccaggacagtgctgcgggtcacgttgtcaatctacgccgactttacatggaatgaccaggttcatggaaccgtgggggaaccctggtggatttgggtcgaggaccccaccaacgatcacatctatcatagtgaatattttctggccctcaagaagcaggtgattagtaaggaagctcagctccttgtcttcactataccaatctttgaacccctgccgtctcagtactatattagggccgtgtccgacagatggctgggcgcggaggcggtatgtataattaatttccagcatcttatactaccggagcgacacccaccccacactgaattattggatctccaaccactgcccatcactgcgctgggctgtaaagcatacgaagcactttacaatttttcgcacttcaacccagtgcagactcagattttccacaccctctaccacaccgactgtaacgtgctgcttggggcgcccacgggctcaggaaaaacggtggctgctgagcttgctatttttagggtattcaacaagtatcctactagtaaagctgtttacatcgctcccctgaaagccctagtgagggaacggatggatgactggaaggtgcgcatagaggagaaattagggaagaaagtcattgaattaacgggagacgtgacgcccgatatgaagtcaatcgcaaaagcggatctcatcgtaaccactcctgagaaatgggacggtgtgtcaaggtcttggcagaaccgaaactatgtgcagcaggtgacaattctgatcatagacgaaatacatctgcttggggaggagcgcggtccagtgctggaagtcattgtgtcccgcacgaactttatctccagccacacggaaaagccggtgcgcattgtcggcctcagcaccgccctcgccaatgcccgggatctggcagactggctaaacattaaacagatgggcctgttcaactttcgaccctctgttagaccagtaccgctggaagtgcacatccaggggttccccggtcaacactattgccccagaatggcctccatgaataagcctgccttccaagccattagatctcacagccctgccaagcccgtgctgatctttgttagttccagacggcagacaaggctgaccgctctcgaactgatagccttcctggctacggaggaggaccctaagcagtggctcaatatggatgagagagaaatggagaatatcatcgctaccgtcagggattccaatttgaagttgacattagcgtttggaattgggatgcaccacgccggtctacacgaacgtgatcgaaagaccgtcgaggaattgttcgtgaattgcaaggtccaagtcctgattgccacctctacactagcttggggtgttaactttcccgcccacctcgtaattatcaagggtaccgagtattacgacggcaaaactaggcgatacgtggacttccctattactgacgtcttgcagatgatgggccgcgcgggccggccccaattcgacgatcaaggcaaggccgtgatcttggtgcacgacataaagaaggatttttacaagaaattcctctacgagccatttcccgtcgagtcaagcctcctcggggtgttgtctgaccacctgaatgcggagatcgctggagggactatcacttccaagcaggatgctttggactacattacgtggacatattttttccggaggctgatcatgaatcccagctactacaatctcggcgatgtctcgcatgattcggtaaacaagttcctctcccacctgattgaaaaaagcctcatagagcttgagttatcatattgcatcgagattggagaagataaccggagtatcgaaccgttgacatacggccggatcgctagttactactacctgaaacaccaaacggtgaagatgtttaaagacagactgaagcctgagtgcagcacagaggaactgctgtcaattctgtcggatgctgaggagtacaccgacctcccagtgagacataacgaagaccatatgaacagcgagctggccaaatgcctgccaattgaatccaatcctcactcattcgactcgccacacactaaggcccacctgctgctccaagcccacctttcccgagcgatgctaccttgtcctgattatgacaccgatacaaagacagtgcttgaccaggctctgcgcgtgtgccaggccatgttagatgtggctgctaatcagggttggctggtcaccgttctgaatatcacaaacctgatccagatggtcatacaaggcaggtggcttaaggactcttccctcctgactctaccaaacatcgagaaccaccacctccatctcttcaagaagtggaagccgatcatgaaaggcccccacgcgcgaggcagaacttctattgagtccctgcctgagttgatccatgcctgcgggggcaaagatcacgttttctctagcatggttgaaagtgagcttcacgccgcgaaaaccaagcaagcctggaatttcctctcacatcttcctgtcattaatgtggggatctcggtaaagggctcatgggacgacctggtagaaggacataatgaactttctgtttcgactctgaccgctgacaaacgcgatgacaacaagtggatcaaactgcatgccgatcaggagtatgttctacaagtaagtctccaacgggtacactttggttttcacaagggtaagccagaatcgtgtgcagtgacacccaggtttccgaaaagcaaggacgagggctggttcctgatcttaggggaagtggataaaagggagctcatagcccttaagcgtgtcggctatattagaaatcatcacgtcgcgagtctcagtttctacactccggaaattccaggacgttatatatatacgctgtatttcatgtccgattgctatctgggcctggaccagcaatatgatatatacctgaatgtgacgcaggccagcctgagcgcccaggtgaatactaaagtgagcgactccctgacggatttggctctgaaatag

SEQ ID NO: 106946 - DNA, 816 bp, synthetic construct
  misc_feature 1..816: note = Description of Artificial Sequence: Synthetic coding sequence
  source 1..816: mol_type = other DNA
atggaagattcccataaatccaccacatccgagactgccccacagccaggttctgctgttcagggcgcacacatatcccatatcgcccagcaggtctcaagtctgtccgaatctgaggagtctcaggattcttccgacagtatcgggtcatcacagaaggctcacggtatcctagctagacgtccaagctaccgcaagatcctgaaggatctgtcgagtgaggacaccagaggccgcaagggcgatggcgaaaactctggggttagtgcagccgtgactagtatgagtgttcccacccctatttaccagactagctcaggccagtacatcgccatcgctcccaatggtgcactgcagctggcatcccccggcacagacggcgtccaaggccttcagactttaaccatgacaaattccggatcaacccagcaggggaccactatccttcagtacgctcagaccagcgacggacagcagatcctggttcccagcaaccaggtggttgtccaaacggcgtcaggagacatgcagacttatcagattagaaccactccttctgcaactagtcttccacagacagtcgtgatgacatcacctgtcacactaaccagtcaaaccacaaagacagatgatccgcagcttaaacgggagattaggttgatgaaaaatagggaggcagctagggagtgtagacgcaaaaagaaagagtatgtaaaatgtctggagaacagggtcgctgtgttagaaaaccagaataaaacactgatagaggagctcaagactctgaaagacctatacagtaataagagcgtgtag

SEQ ID NO: 106947 - DNA, 411 bp, synthetic construct
  misc_feature 1..411: note = Description of Artificial Sequence: Synthetic coding sequence
  source 1..411: mol_type = other DNA
atgactaactctggaagcacccagcagggaaccacaatcctgcagtacgcacaaacctccgacggccagcagatcctggtgccttccaatcaggtggtggtgcagaccgccagcggggacatgcagacctatcagattcgtactactccaagcgcgacaagtttgccgcagaccgtggttatgacgagtccagtcactttaacttcccagacaactaaaactgacgacccccagctgaaaagagagatccgtctgatgaaaaaccgggaggctgcacgggagtgcagacggaaaaaaaaggagtacgtaaaatgccttgagaatcgtgtggcagtacttgagaatcaaaataagacactgatcgaagagctgaaaactttaaaggacctttatagtaataagagtgtatag

SEQ ID NO: 106948 - DNA, 603 bp, synthetic construct
  misc_feature 1..603: note = Description of Artificial Sequence: Synthetic coding sequence
  source 1..603: mol_type = other DNA
atggaggattcccataaatccactacctcagaaacagctccacagcctggatcggctgtgcagggggcacatatctcccacattgcacagcaggtaagcagtctcagtgaaagtgaagaaagccaggacagcagcgatagcatagggtcttcccaaaaagcacacggcatactggcccggcggccgtcatatcgtaagattctgaaagaccttagttccgaggataccagggggcggaagggcgacggcgaaaattcgggcgtttccgctgctgtaacttccatgtctgtgcccacgcctatctatcagacaagtagtggacagtatattgccattgcaccgaacggagccctacaactggcctccccgggcaccgacggagtgcagggccttcagaccttgacaatgacaaactcaggcagcacccagcagggaacaactatactgcaatacgcccaaacaagcgatggtcagcagatcctggtgccatccaatcaggttgtggtgcagacagcctccggggacatgcagacctaccaaattaggactacaccatctgcaacttcacttcctcagaccgtggtgatgacctctcccgtctag

SEQ ID NO: 106949 - DNA, 513 bp, synthetic construct
  misc_feature 1..513: note = Description of Artificial Sequence: Synthetic coding sequence
  source 1..513: mol_type = other DNA
atggaagattcccacaagagtacgacctcggagaccgcccctcagcctggctccgcagtgcagggagctcatatctcacatattgcacaacaggtttctagcctcagcgagagtgaagaatctcaggacagctcagattcaattgggagttctcagaaggcacacgggattttggccaggcgccccagctaccgcaaaattctgaaggacctcagctctgaggataccagaggccgcaaaggggacggcgagaattcaggagtctccgccgccgtgacatcgatgtcagtgcctactcccatttatcagacttcttccggtcaatacatagctatcgccccaaatggcgcgctgcaattagcttctcccggtacggacggagtccagggcttacagactctgacaatgactaattccggatcaacacaacagggcacgaccatactgcagtacgctcagacaagtgacggtcaacagattctagtgccttccaaccaggtcgtggtccagtag

SEQ ID NO: 106950 - DNA, 321 bp, synthetic construct
  misc_feature 1..321: note = Description of Artificial Sequence: Synthetic coding sequence
  source 1..321: mol_type = other DNA
atgatgctccagcatcccggacaggtgtccgcatccgaagaggagcttcgtttcgcaatccagaataaacatctgtgtcataggatgtcaagtgctttggagtccgtgacggtgtcagacaggccgctcggcgtcagcataaccaaagctgaggtagcaccagaagaggatgaacggaaaaagcggaggcgcgaacggaataaaattgcagctgccaagtgccgaaacaagaaaaaggagaaaacagagtgtctgcagaagctgcctagaccattctgggttcagaaaacctgcatttgggccgtggacagctgcaagtag

SEQ ID NO: 106951 - DNA, 546 bp, synthetic construct
  misc_feature 1..546: note = Description of Artificial Sequence: Synthetic coding sequence
  source 1..546: mol_type = other DNA
atgatgctacagcaccctggccaggtgtcggcctcagaagtgagcgcctcagccatcgtcccttgcctgagtccaccaggctctctggtgtttgaagacttcgctaatctcacaccctttgtgaaggaagagctgagatttgcaattcagaacaaacacctgtgtcacaggatgtcttccgccctcgagtccgtgaccgtgagtgatcgtccgctaggcgtttctatcaccaaggccgaggtggccccagaagaggacgaacggaagaagaggagaagagaacggaacaagatcgccgccgcgaagtgccgaaataaaaagaaggaaaaaacagaatgcctccagaaagaatcagaaaaactggagtccgttaatgcagagctgaaggcacagattgaagagctgaagaatgagaagcagcaccttatctacatgctgaaccttcataggccgacatgcattgtgagggcacagaacggtaggactccagaggatgaaagaaatctcttcatccagcagattaaggaaggtacactgcagagttag

SEQ ID NO: 106952 - DNA, 528 bp, synthetic construct
  misc_feature 1..528: note = Description of Artificial Sequence: Synthetic coding sequence
  source 1..528: mol_type = other DNA
atgatgttacaacacccagggcaagtatcggcttctgaggtctctgcttcagcgatagtgccctgcctgtcaccacctggttcactcgtgtttgaggattttgccaacttgacaccctttgtgaaggaggagttacgtttcgccatccagaataaacatctgtgtcacagaatgagttctgccttggagtctgtgactgtgtcagaccgccctcttggggtgtcaataacgaaagcagaagttgcacctgaggaggatgagcggaagaaacgaagacgggaacgaaacaaaattgcggctgctaaatgtcggaacaaaaaaaaggagaagacagagtgcctccaaaaagaatcagagaaactcgagtctgttaatgctgagctgaaggcacaaatcgaggagctcaagaatgaaaaacagcatctgatctatatgttaaaccttcaccggcccacgtgcattgtccgcgcccaaaacggacggaccccggaggatgagcgcaatttgttcatccagcaaataaagtag

SEQ ID NO: 106953 - DNA, 408 bp, synthetic construct
  misc_feature 1..408: note = Description of Artificial Sequence: Synthetic coding sequence
  source 1..408: mol_type = other DNA
atgatgctccagcaccccgggcaggtgagtgccagcgaggtttctgctagtgccattgtgccttgtttgtccccaccagggtcccttgtgttcgaggacttcgctaatctaactccttttgtgaaagaggaacttcggtttgctatccagaacaagcacttgtgtcaccgcatgtcatcagcgttggagtccgtgaccgtgtccgaccgacccctgggtgttagtatcacgaaggccgaggtggccccagaagaagacgagcggaagaagagaaggcgcgagagaaataaaatcgccgccgcgaagtgccgaaataagaaaaaggagaagaccgagtgcttgcagaaactaccccgccccttttgggtgcaaaagacatgtatttgggcagtcgattcttgcaagtag

SEQ ID NO: 106954 - DNA, 375 bp, synthetic construct
  misc_feature 1..375: note = Description of Artificial Sequence: Synthetic coding sequence
  source 1..375: mol_type = other DNA
atgagctctgcactggagagtgtcacagtgtctgacagaccgctgggcgtcagtattaccaaagccgaggtcgcacccgaagaagacgagcggaagaagcgaaggcgcgagaggaataagatagcagctgccaagtgccggaacaaaaagaaagagaagactgagtgtctgcaaaaggaaagtgaaaagctggaaagcgtgaatgctgagttgaaggctcaaatcgaggagctgaaaaatgaaaagcagcaccttatttacatgctcaatctgcatcggcctacctgcatagtgcgagcacagaatggacgtacgcccgaggatgaacgcaacctcttcattcaacagattaaggaagggaccttacagtcctag

SEQ ID NO: 106955 - DNA, 546 bp, synthetic construct
  misc_feature 1..546: note = Description of Artificial Sequence: Synthetic coding sequence
  source 1..546: mol_type = other DNA
atgatgctgcagcaccccggccaggtttccgcctcagaagtgagtgccagcgcaattgtcccctgcctcagtccgcccggaagcctggtcttcgaggacttcgcaaatctaaccccgttcgtcaaagaagaactcagattcgctattcagaataagcatctgtgtcatagaatgtctagtgccttggagtccgtgacagtgtccgatcgacccctcggagtttcgattactaaggccgaagtggctcccgaggaggatgagcgcaagaagcgcaggcgggagcgaaataagatcgctgctgcaaaatgccgcaacaaaaagaaggagaagacagaatgcctgcagaaggaaagcgagaaactagagtccgtgaatgccgaacttaaagctcagatcgaggagctgaaaaacgaaaagcaacacctgatctacatgctgaatcttcaccggcccacgtgcatcgttcgcgcacagaatggacgtacacccgaagacgagcgtaatctctttatccagcaaatcaaggagggaacgctgcaatcgtag

SEQ ID NO: 106956 - DNA, 408 bp, synthetic construct
  misc_feature 1..408: note = Description of Artificial Sequence: Synthetic coding sequence
  source 1..408: mol_type = other DNA
atgatgctccagcaccctggacaggtgagcgccagcgaagtgtctgcctcagctattgttccatgtcttagccctcccggttccctcgttttcgaggatttcgccaacctgactccgtttgtaaaggaggaactgcgttttgccatccagaacaaacatctgtgccatcgcatgagtagcgccctggagagcgtgacagtctcggaccgcccgttgggcgtcagcatcacgaaagcggaagtagcccctgaggaagacgagcgcaaaaagcggagacgcgagcgaaataagatcgctgctgctaagtgtaggaacaagaaaaaagaaaagaccgagtgccttcagaagttgccccgcccattctgggtgcagaagacatgtatatgggccgtggactcttgcaagtag

SEQ ID NO: 106957 - DNA, 1056 bp, synthetic construct
  misc_feature 1..1056: note = Description of Artificial Sequence: Synthetic coding sequence
  source 1..1056: mol_type = other DNA
atgaccgaaatgtcctttctcagtagcgaagtgctcgtcggggacctaatgtctccatttgatcagtcagggctaggggccgaggaatcactaggtcttcttgatgactacctggaagtggccaagcattttaagcctcatggcttttcctctgacaaagccaaagctggttcctcagagtggctggcagtggatggccttgtgagcccctcaaataatagtaaggaggacgcctttagtggaaccgattggatgctggagaaaatggacttaaaggaatttgatttggacgccctgctcggtatcgatgacctggagactatgccggatgatcttctgaccacccttgatgatacatgtgacctttttgcacccttggtacaggagacaaataagcaaccaccgcagacagttaaccctatcggccaccttcccgagtctctcacaaaaccagatcaggtcgctccatttacctttctacagccgctccccctgagcccaggagtactgtcttctacaccggatcactccttctcattagaactcgggtcagaggtggatattacagaaggggatagaaagcccgattacactgcatacgtggccatgatcccacagtgcattaaagaggaagacaccccctctgataacgattctggtatatgtatgtcccccgagagctacctgggcagcccgcagcactccccaagtacacgaggcagccccaatcgcagcttgccgtcacccggcgtcctttgtggatctgcaagaccaaagccatatgacccccctggagagaaaatggttgcagctaaagtgaaaggggaaaagctggataagaaactcaaaaagatggagcagaataaaacagccgccacgcggtatcgccaaaaaaaacgcgccgaacaagaagccctgaccggcgagtgcaaggaactggagaagaaaaatgaggcgttaaaggagcgtgccgattctctggccaaagaaatccagtacctgaaagatcttatcgaagaggtgagaaaggcacgagggaaaaagagggtcccttag

SEQ ID NO: 106958 - DNA, 1056 bp, synthetic construct
  misc_feature 1..1056: note = Description of Artificial Sequence: Synthetic coding sequence
  source 1..1056: mol_type = other DNA
atgaccgagatgagcttcttgtcaagcgaggtgttggtcggcgatctaatgtccccatttgaccagtcagggctgggggctgaagagtcactcggcctcctggacgactatctcgaagtggccaagcacttcaagccacacggtttcagctcggacaaggccaaggctgggtctagcgagtggctggccgtggatggcctcgtttcccctagcaataacagcaaagaggatgcgttcagcggaacagattggatgttggagaagatggatcttaaggaattcgatctggatgcactgctgggaattgacgatctggagacaatgcctgatgacctactcacaactctggacgacacatgcgatcttttcgcacctctcgtccaggagactaataaacaacccccacagactgttaatcctatcggtcatttgccggaaagcctgaccaagcccgaccaggtagcgccgtttaccttcctgcagccgctacccctctccccgggggtgctgtcttcaacccctgatcacagcttctccctcgaactgggctctgaggtggacatcactgaaggggacaggaagcccgactataccgcctatgtggctatgatcccccaatgcatcaaagaagaggacactccttccgacaacgactccggtatctgtatgtcccctgaatcttacctgggctctcctcagcacagtccttctacccgtggttctcctaacagatctctgccatcccccggcgtgctgtgtgggtctgcaagaccgaagccttatgatccgccaggtgagaagatggtggctgccaaagttaagggcgaaaaactggacaaaaaattaaaaaagatggagcagaataaaacggccgcgacacgctaccgccagaagaaaagggctgaacaggaggctctgactggtgaatgtaaggagttagaaaagaagaatgaggctttaaaggagagggctgactccttggctaaggagatccagtacttgaaagatctgatcgaagaagtgcgcaaagcacgggggaaaaaaagagtgccttag

SEQ ID NO: 106959 - DNA, 1056 bp, synthetic construct
  misc_feature 1..1056: note = Description of Artificial Sequence: Synthetic coding sequence
  source 1..1056: mol_type = other DNA
atgacagagatgtctttcttatcttctgaggtgctagtgggcgatcttatgagcccatttgaccaaagtggactgggcgcagaagaaagtttaggattgttggacgactacctggaggttgctaagcacttcaaaccacacgggttcagctcagacaaggcaaaagccggctcctcagaatggcttgcagtcgacggtttagtgagtccgagcaacaactcgaaggaagacgccttttcaggcaccgattggatgttggaaaagatggaccttaaggaattcgacctcgacgcccttcttggtattgacgacttagaaactatgcccgatgatcttctcaccacgctggacgacacttgtgatctctttgcccccctggttcaggagactaataagcagcccccccagactgtaaatcccatcgggcacctgcctgagtctttgaccaaacccgaccaggttgcccccttcacattccttcagccactccccctgagcccgggggttctgagctccacaccggaccactcttttagcctcgagctggggtccgaggtagatatcaccgagggcgatcgcaagcctgactacaccgcttacgtggctatgatccctcagtgtattaaggaagaggacactccttctgataatgacagcggtatatgtatgtctcctgaaagttatctcggcagtccgcaacactcccctagcacgcgcggaagccctaatcgatctctgcctagtcctggggtcttatgtggatcggcccgccccaaaccatacgaccccccaggcgagaaaatggttgccgcgaaagtgaagggcgagaaactggataagaagctgaaaaagatggagcagaacaaaactgcggcaacccgttacaggcagaagaagcgggccgagcaggaggccttaaccggcgaatgtaaggagctcgaaaaaaaaaacgaagcactgaaagaacgggcagactcacttgccaaagagatccagtatctaaaagatcttattgaagaggtcagaaaagcacgaggaaagaaacgggtaccatag

SEQ ID NO: 106960 - DNA, 849 bp, synthetic construct
  misc_feature 1..849: note = Description of Artificial Sequence: Synthetic coding sequence
  source 1..849: mol_type = other DNA
atgagcctactcgctacactgggactagagctggatcgggccctcctgcccgctagcggcttgggatggcttgtggattatggtaaacttccccctgctcccgcccctttggccccctatgaagtgctagggggggctttagaggggggcctgcccgttgggggcgagccgctcgcgggggatggcttcagtgactggatgacagaacgagtagatttcacggcactcttgccactggagccaccccttccccctggcaccctcccacagccttcacccacaccccctgatctggaagcaatggcttcgctcctcaagaaagaattggagcaaatggaggacttcttcctggatgctccccctctcccgccccccagccctccacccctgcctcctcctccactccctccggcaccatccctcccgcttagcctgccctcatttgatttgcctcaacctcctgtcttagatactctggacctgttggccatttattgtaggaacgaggcagggcaggaagaggtgggcatgcccccattacctcccccacaacaacctcctcccccgtccccaccccagcccagccggctggcaccctatccacaccctgctacgaccaggggtgataggaaacagaaaaaacgtgatcagaataaaagcgccgccttgcggtatcggcaacggaaaagggccgaaggggaggccctcgagggggaatgccagggcctggaggcccgcaatagggagcttaaggaaagggctgaatccgtggaaagggaaattcagtacgttaaagacctcttaatcgaagtttataaagcccgctctcagcgaacaagatcttgctag

SEQ ID NO: 106961 - DNA, 2013 bp, synthetic construct
  misc_feature 1..2013: note = Description of Artificial Sequence: Synthetic coding sequence
  source 1..2013: mol_type = other DNA
atgggagagcccgctggcgtcgccgggactatggaaagtcccttttcacccggactttttcaccgactggacgaggactgggactccgcactgtttgctgaattaggctactttaccgacacagacgagctgcagctcgaggcggctaacgaaacctatgagaataactttgacaatctcgactttgacctggacttgatgccttgggagtcagatatttgggacataaacaatcagatttgcactgtcaaagatattaaggcagaaccccagccgctgtctcccgcctcgtcctcatactccgtctcttccccccgtagcgtggattcatactcaagtacccagcacgtgcccgaagaattagacttaagttcctccagccaaatgtctcctctgagcctgtacggagagaacagtaatagccttagctctgccgagcctctgaaggaggacaagccggtaactggacctaggaacaagaccgagaacggattaacccccaagaagaaaattcaagttaatagtaagccttctattcaacccaaacctcttctgctgccggccgctcccaagacccagactaactcttctgtcccggccaagaccattattattcagactgtgcccactttgatgccattagccaaacagcagccaataatttctttgcaaccagctccgacaaagggacagaccgtgctactcagccagccaacagtcgttcaattacaggcccccggggtgctgccctctgctcagcctgtactggcagtcgcaggtggggtgactcagttgccaaatcacgtcgtgaacgtggtgcccgcaccaagcgccaattcccctgtcaacgggaaactaagtgttacgaaacctgtgctgcaatccacaatgagaaacgtggggtctgacattgccgtcctgagaaggcaacagaggatgatcaagaaccgggagagcgcttgccagtcaagaaaaaagaagaaagagtacatgttagggttagaagcccgcctaaaggctgccctaagcgagaacgaacagctcaaaaaggagaatggaacactcaaacgccaattggacgaggtcgtgtcggagaatcagagactcaaagtacctagtcccaagcgcagggtggtgtgtgtaatgatcgtactggctttcatcatcctcaattacggaccaatgtccatgttggaacaggatagtaggcgcatgaatccaagcgtgagccccgccaatcagaggcggcatttgttaggattcagcgccaaggaggctcaggacacgagcgacgggattatccagaagaatagttaccgctacgatcattcagtgagtaatgataaagctctcatggtgctgaccgaggaacccctactgtacatccccccacctccctgtcaaccactgattaatactacagagtctctgcgcctgaaccacgaactcaggggttgggtacaccggcacgaggtcgagcgaaccaaatctaggcggatgacaaataaccaacagaagactaggattctgcaaggtgccctcgagcagggatccaactcccagctgatggctgtgcaatataccgagaccacctcaagtatttcaaggaatagtggtagtgaattgcaggtatattacgcctctcctagatcctatcaggacttttttgaggccattaggagaagaggtgatacgttttatgttgtcagctttagaagggatcacctgctgctccctgcaacgactcacaacaagaccactcggccaaagatgagcattgtgctacccgcaatcaatattaacgaaaatgttattaatggtcaggattacgaggtgatgatgcagattgattgtcaggttatggatactagaattctgcatataaagagcagcagcgtgccaccatatctgcgcgaccaacagcggaaccagacgaatacgttttttggctctccacccgccgctactgaggcaactcacgtggtgtctacgatccctgagtccctccagtag

SEQ ID NO: 106962 - DNA, 2112 bp, synthetic construct
  misc_feature 1..2112: note = Description of Artificial Sequence: Synthetic coding sequence
  source 1..2112: mol_type = other DNA
atggccgaactaatgctactcagcgagatcgctgaccctacccgtttttttacagataacttactgtcaccagaagactggggattacagaactcaacgctatactccggcctcgacgaggtagcggaagagcaaactcagctgtttcgctgtcctgaacaggacgtgcctttcgatggctcatcactggatgtaggcatggatgtcagcccatctgaacccccctgggagttactgccaatttttccagacctacaggtcaagagcgagccttcgtcgccgtgctcatcttctagtttatcttccgaaagcagccggctatcaacagagccatccagcgaggcgttaggcgtaggggaggttctgcacgtgaaaaccgagagtctggctcctcccctctgtctcttgggcgatgaccctaccagtagttttgaaactgttcagattaatgtaatccctacaagtgatgacagcagtgatgtgcagaccaaaattgagcccgtcagcccttgctctagtgtcaatagcgaagcatcgctgctctcggctgattcctcgtcccaggcctttattggggaggaggtccttgaagttaagacagaatcactgtcacccagcgggtgtctgctttgggacgtgccggctccaagcttaggagcagtgcaaatttccatgggtccctccctggacggctcaagcggcaaggccctgcctactcgcaagccaccactccagcctaagcccgttgtgctcactaccgtaccaatgccaagtcgggcagttccaccaagcacaacggtgctgcttcaaagtttggtgcagccaccccctgttagtccagtcgtactgattcagggggctatccgggtgcagccagagggacctgcgccctccctgcctaggcccgagcgcaagtccattgtgcctgcccctatgcccgggaacagctgtccgcctgaggttgatgcgaagcttctcaagaggcagcagcggatgattaagaatcgcgagtcagcatgccagtctcggagaaagaagaaggaatatctgcagggcttagaagctcggctccaggccgtgctcgcagataaccagcagctgcgcagggagaatgccgccctgcgccgccgacttgaggctttactggcagagaacagcgaactcaaactggggagcggcaataggaaggtagtgtgtatcatggtattcctgctctttatcgcgtttaactttgggccagtcagcatctcagagcccccatctgctcctatcagcccgcgaatgaacaaaggcgagccacagcctcgccgacatcttctgggattttcagagcaagagccagtacagggggtcgagccactccaaggcagctcacagggaccgaaggagcctcaacctagtcccacagaccaaccatctttctctaatcttacagcgtttccaggcggggccaaggagctccttctgagagatctcgatcagctcttcctgtcaagcgactgtaggcatttcaataggactgagtcgttacggctagcagacgagctttcaggctgggtccagagacaccaaagaggaagacgtaagatacctcagagagcccaggaaagacagaagtctcagcctagaaaaaaatctcccccagtaaaggccgttcccattcagcccccggggcctccagagagagactccgtcgggcagctgcagctgtacaggcaccctgatcgtagtcagcctgcctttctcgatgcaattgataggcgagaagacaccttctatgtcgtcagcttcaggagggaccatctgcttctgccagctatctcacataataagacctccaggcctaagatgtctctcgtgatgcccgctatggcgcctaatgagacactttctggcagaggggcacccggagactacgaggagatgatgcaaatcgaatgtgaggttatggacactagagtgatacatattaaaacttccactgtcccacctagcctgcgcaaacagcccagtcctacccccggaaatgcgacaggcggacctcttcccgttagcgcagcctcccaggcccaccaggcaagtcaccagccattatacctgaaccacccttag

SEQ ID NO: 106963 - DNA, 669 bp, synthetic construct
  misc_feature 1..669: note = Description of Artificial Sequence: Synthetic coding sequence
  source 1..669: mol_type = other DNA
atggcggaactcatgctgctgtctgaaattgctgaccccacccgcttttttaccgacaatctcctctcacccgaagattggggacttcaaaactctacgctgtattctggattggatgaggtggcagaagaacagacccagctctttagatgtccagagcaggacgtgccattcgacggatcctcgctcgatgtgggcatggatgtgtcaccaaccgaccaaccctcatttagtaacctgacagctttcccaggaggagctaaggaactgttgctgagggatttagaccaactgtttctaagcagcgactgcagacactttaatagaacagagagccttcgattagccgatgaattgtcgggttgggttcagcggcaccaacggggacgcagaaaaattccgcagcgcgcccaggaacgccaaaagtcccagccacgcaagaagagtcctcccgtgaaggctgtgcccattcagccgcctgggcctccagagcgtgactcagtcggccaactgcagctatatagacaccctgaccgttcacaaccagccttcctcgacgccatcgatcgtcgcgaggatactttctacgtggtgagcttcaggagaaccacatgttgttcccagccgagcgctactacaaggcccccaggaccacggtgcccctggtag

SEQ ID NO: 106964 - DNA, 2103 bp, synthetic construct
  misc_feature 1..2103: note = Description of Artificial Sequence: Synthetic coding sequence
  source 1..2103: mol_type = other DNA
atggccgaactgatgctcctcagtgagattgccgatcccacacggttcttcaccgataatttgctgtcccctgaagactgggactctaccctgtactctggacttgatgaagttgccgaggaacagacccagctgtttaggtgcccagagcaggatgtgccctttgacgggtccagtttagatgtagggatggatgtcagtccatcagaaccaccttgggagctgcttcctatattccctgatctccaggtgaaaagtgaaccatcgtcgccatgctctagctcttctctgagcagtgagtcatcccggctttctactgagccttcttccgaagcattgggcgtcggtgaagtgttgcacgtaaagaccgaaagcctggcaccccctctctgcctgctcggagacgatccaacctccagcttcgaaactgtgcagattaatgtcatccctacttccgacgattctagtgatgttcaaactaagattgaacctgtgtccccctgtagctccgtaaactccgaggcgtccctattgtcagccgattcgtctagtcaagcttttatcggcgaggaggtgttagaggtgaaaactgaaagtctgtccccgtcaggctgcctcctctgggacgtgcctgcccctagtttaggggccgtacagatctctatgggtcctagtttagacggaagctccggcaaggccctgcccactagaaaacccccactgcagccaaaacctgtcgttctcaccactgtcccaatgcccagccgggccgttccaccctctacaactgtcctgctccagtcactcgttcagccacctcccgtttcccccgtggttctgatccaaggggcgatcagggtacagccggaaggtcctgccccatctcttccaagacctgaacgcaagtcaatagtgcctgcccccatgccaggcaactcctgtccgcctgaggtagatgccaagctgctgaagcggcagcagaggatgataaagaatagagagagcgcttgccagtcccgccgtaagaagaaagagtacttacaggggctggaggcacgtttgcaggccgtgttggccgataatcagcagctgcgccgagagaatgcggcactcagacggcgactagaggctctgttggcagagaactctgaattgaaactaggtagcggcaacaggaaggttgtatgtattatggtgtttctgctattcatagcattcaatttcggtcccgtcagcatcagtgagccgccttctgcccctatctccccgagaatgaataagggtgagcctcaaccaaggcggcatctgttgggattctccgaacaagaaccagtgcagggagtggaacccttgcaaggatcaagccaaggccctaaggagccccagccgagtcctactgaccagccatctttttcgaacctgacagccttccctggaggcgccaaggagctgctgcttcgggatctcgaccagttgtttctcagttcagactgccggcactttaaccggacggaatccctgaggctcgccgatgaactttctggctgggtacagcggcatcagcgtgggcggaggaaaataccccagagagcacaggagaggcaaaaaagccagcctaggaagaagtcaccccctgtgaaggctgttcctatacagcctcccggcccccccgagcgtgatagcgtcgggcagttgcagctgtacagacatccagatagatctcagccggccttcctggacgccatagaccgcagagaggacacattttatgtggtgagtttcaggcgcgaccacctgctgttgccggctatctctcataataagacttcaagacccaaaatgagcctggttatgccagccatggcccctaacgaaacgctgagtggacggggagcccccggggattacgaggaaatgatgcaaatcgagtgtgaggtgatggacacccgcgtgattcacatcaaaacctccacagtgccacccagtctgaggaagcaaccaagccccacccccggaaatgctacaggcgggcctctccccgtttccgcagcaagccaggctcatcaggcctcccaccagccactgtatctgaaccacccatag

SEQ ID NO: 106965 - DNA, 2112 bp, synthetic construct
  misc_feature 1..2112: note = Description of Artificial Sequence: Synthetic coding sequence
  source 1..2112: mol_type = other DNA
atggccgagctcatgctactttctgagatagccgaccccacccggttttttacagataatctgcttagcccggaggactggggcctgcagaattcaacgctctattctgggctggatgaagtagccgaagagcagacacaattgtttagatgcccagaacaagacgtcccattcgatgggtccagtctcgatgtgggcatggatgtgagcccaagcgagcccccttgggaactgctgccgatttttcccgacctgcaggttaagagcgagccatcatcaccctgctcttccagttccctatcatcggagtccagccggttgtctaccgagccttcgtccgaggctctcggcgtgggcgaggtcttgcacgtgaaaacagagtcactggcccctcctctgtgtctcttaggtgacgacccgacaagctcgttcgagacagtccagataaatgttatccctacatccgatgattcatcggatgtgcaaacaaagatcgagccggtgagcccatgttctagtgtgaacagcgaagcttcgctgttatcagccgacagttccagccaggctttcataggcgaggaagtattagaagtaaagacggaatcactgagcccctctgggtgtctcctgtgggatgtcccagctccttcactaggcgctgtacagattagcatgggtcccagcctggatggatcctctggaaaggcccttcccaccaggaaaccccccctccaaccgaaacccgtggtactaactacggtgcctatgccatcacgggccgtccctccttctactacagtcctgctgcagtctctggtgcagccaccgcccgtttctccagtcgtcctgatacaaggagccatcagagtacaacccgagggccctgcgcctagcttaccgaggccggagaggaaatcaattgtccccgcacctatgcccggtaacagctgtccgcctgaagttgatgcgaaattgctcaagcgtcagcagaggatgataaagaaccgggagtctgcctgtcagtcccgcaggaagaaaaaggagtatctgcagggcctcgaggcacggttgcaagccgtccttgctgacaatcagcagttgcgcagggaaaatgcggctctgagaaggcgactggaagccctattggctgagaattcggagttgaagctcggcagcgggaataggaaggtggtctgtattatggtatttctgctcttcattgctttcaattttggccctgtaagcattagcgagcctccctctgctcccataagccctcgcatgaacaaaggcgaaccacagccccgtcgccatcttctcggattctcagaacaggagcccgtccagggagttgagccactgcagggatcctcccagggcccaaaggagccccagccctccccaactgaccaaccttcattctcaaacctcaccgcgttccctgggggagctaaggagctgcttctcagagacttggatcagctcttcctttcgagcgactgcaggcattttaatagaaccgagtcactaaggttagccgacgagctgagcggttgggtacagagacatcaacgcgggaggcggaaaataccacagagggctcaggagagacaaaagagccaacctcgcaaaaaaagcccccccgttaaggccgtaccaatccagccaccggggccccctgagcgcgactccgtggggcagctgcaactataccggcaccctgaccgtagccaacctgcattcctcgacgccatcgacagacgggaggacactttttacgtggttagcttccggagagatcacttgctcctacctgccatttctcataacaagacatctaggcccaaaatgtctctggtgatgcccgccatggctccaaatgaaactttgagcggcagaggcgctccaggcgactatgaagaaatgatgcagattgagtgtgaggtaatggacacccgggtcattcacatcaaaacatccacagttcctccctccttacggaagcagccctctccgacccctggcaatgctactggaggacccctgcctgtctccgccgcctctcaagcgcatcaagcctctcatcagccgctctacctgaaccatccatag

SEQ ID NO: 106966 - DNA, 2103 bp, synthetic construct
  misc_feature 1..2103: note = Description of Artificial Sequence: Synthetic coding sequence
  source 1..2103: mol_type = other DNA
atggcggagcttatgctgttgtcagaaatagctgatcctacccggttcttcacggataatcttctgtctccggaggactgggatagcacgctgtactcaggtcttgacgaggtggctgaggagcagacccagttgtttaggtgccctgagcaggatgtgccctttgacgggtccagtttggatgtgggaatggacgtttctccatccgaaccaccgtgggagctcctgcctattttccctgatctccaggtcaagagcgagccttctagcccatgctcctcaagttccctgtcgtcagagtccagtcgactgtccacagagccttcctccgaggccctgggtgttggggaggttctccacgtcaaaacggaaagtttggcacccccactgtgccttctgggtgacgatcccacatcatctttcgaaaccgttcagattaacgttatccccacctcggacgatagttcagatgtccaaacaaaaatcgagcctgtttcaccatgttcctctgtaaacagtgaagcgtccctgctttcagccgactctagctctcaggctttcatcggcgaggaggtcttggaggtgaaaactgagagcctttcaccatccggttgtctgctctgggatgtacctgctccaagtctgggagcagtccagatttccatggggccgagtttggacggctcctcaggaaaggctctgcccactcgcaagcccccactccagcctaaaccagtagtgctgaccacagtcccaatgccgtcccgcgcagtgccgccatccaccaccgtacttttacagtcccttgtgcagccaccaccggtctccccagtggtcctgatccagggcgcaatccgtgtacagcccgagggtcccgccccctctctgccccggcccgagcggaagagcatcgtccctgcccctatgcctggcaactcttgccccccggaggtggacgccaagttacttaagagacagcagaggatgatcaaaaatcgggaatccgcgtgccagtctagacggaagaagaaagagtatttgcagggtcttgaggcccggcttcaggccgtacttgctgacaaccagcaacttaggcgggagaacgctgcgctgaggcgcaggctcgaggcgctgcttgccgaaaactctgagctcaagctaggctcaggtaatcggaaagttgtgtgtatcatggtttttcttctgttcattgcttttaactttggacccgtgagtataagcgagcctccaagtgcacccatttctcctcggatgaacaagggtgaaccccaaccacgccgccaccttttaggcttctccgagcaggaacctgtgcaaggcgtggaacctctccagggtagttcccaggggccgaaagaaccccagccctccccaacggaccagcccagctttagcaacctgactgcctttcccgggggtgccaaagaattacttctcagagacctggaccagctttttcttagctccgactgccggcattttaaccggacggaatctctgcggctcgcagatgagctgtcaggttgggtccaacggcatcagcgaggaagaaggaaaatcccccagagagcccaggagcggcaaaaatctcagccccggaaaaagtcccctccagtgaaggcggtgccaatccaaccccctggaccgcctgaaagagattcagtcggccagctgcagctgtaccgccatcctgatcgctctcagccagctttcctggatgccatagaccgtagagaagataccttttatgtagtgagcttccgtcgggaccaccttctcctgccagccatttcccacaacaagactagccgaccaaagatgtctctcgtgatgcctgcaatggcacccaacgaaaccctcagcggtcggggggctccaggtgattacgaagagatgatgcaaattgagtgtgaggtgatggataccagggttatccatatcaaaaccagcactgttccaccgagtcttagaaagcaaccatcacccacgcccggcaatgccaccggcggtccgctgcctgtctccgccgcaagccaggcacaccaggctagccatcagccgctgtacttaaatcacccatag

SEQ ID NO: 106967 - DNA, 429 bp, synthetic construct
  misc_feature 1..429: note = Description of Artificial Sequence: Synthetic coding sequence
  source 1..429: mol_type = other DNA
tgacaaccttcacctacagaccagccatcgtttagcaaccttaccgcttttcccgggggtgctaaagagctgcttctccgggacttggaccagttattcctgtcttccgactgtcggcattttaaccggactgagagcctgaggctagctgacgaattgagcggctgggtgcagcgccatcagcgcggcagacggaagattcctcagagggctcaggagagacaaagcctggacacctcaccttcacgttcactctcccacggaaggagccacctgcaattgaggcagagccccagcaacccactggacccccaaaagggtatcctctgggccagctgtaactacatcgctacgcagactgtgagaagtcagcacagctggatgcagcttaccgacggaaagacccacttcatgctgtcactgtcttag

SEQ ID NO: 106968 - DNA, 429 bp, synthetic construct
  misc_feature 1..429: note = Description of Artificial Sequence: Synthetic coding sequence
  source 1..429: mol_type = other DNA
tgacaaccatctcccacagaccaaccgtctttctcaaatctgacggccttcccagggggcgcaaaagagctcttgctgagggacctagaccagctgtttctgtcatcagactgtcgccacttcaaccggaccgagtctctccgcctggctgatgaattgtccgggtgggtccaacgacatcagcgcgggagaagaaagatccctcaaagagcacaggagcggcagagtctggacacaagccccagcagatccttgtctcacggccgctcccatctgcagttaagacagtctccgtctaatccgctggacccccagaaaggcattttgtgggcctcctgcaactacatcgccactcagactgtacgcagtcaacactcatggatgcaactgactgatggtaagacccactttatgttatcgctctcatag

SEQ ID NO: 106969 - DNA, 2112 bp, synthetic construct
  misc_feature 1..2112: note = Description of Artificial Sequence: Synthetic coding sequence
  source 1..2112: mol_type = other DNA
atggccgagctgatgctcttatcagaaatagctgatcctacacgatttttcaccgataatctgctctcgcccgaggactggggactccagaattcaacactgtatagtggattggacgaggttgctgaagaacagactcagttatttcgctgtcctgagcaggatgtcccttttgacggatcttcacttgacgttgggatggacgtgagtcctagcgagcctccttgggaactgctgccgatcttccctgaccttcaggtgaaatctgaaccctcatccccatgctccagctcctccctctcatctgagtccagtagattgagcactgagccgagtagcgaggccctcggtgttggcgaagtgttacatgtgaagaccgagtctctcgcgcctcctctgtgcttgcttggtgatgatcccactagcagttttgagaccgttcaaattaatgtgattcctacatcagatgattcatccgacgttcagacgaagattgaaccagtgtcaccttgttcctcagttaatagcgaagcatccttacttagtgccgactcgagttcacaggcctttatcggggaagaagtcctcgaggtgaaaacagagtccctgtcaccttcaggctgcctcctttgggatgttccggcgcccagcctgggggcagttcagatctctatgggaccaagtctcgatggatcttctgggaaagccctccctacgagaaagcccccactccagccgaaacccgtagtgttgactactgtgcctatgcccagtcgggcagtgccaccctcaacaacggtactcctacagtcactagttcagcctcctccagtgagcccagtcgtactcattcagggggctattcgtgtgcaacctgaaggcccggccccatcactgccacgcccagagaggaagagcatcgtaccggcaccaatgccaggcaactcttgtccgccagaagtagatgcaaaactgttgaagcggcaacagcggatgattaagaatcgcgaatccgcttgtcaatcaagacggaagaaaaaagagtatctccagggactcgaagctcggctgcaggcagtgctggccgacaaccagcagttgcggagggagaatgccgccctcagaaggcggctcgaggctctgctcgccgagaacagcgaactgaaactgggatccggcaatcggaaagttgtatgtatcatggtgtttttactctttattgctttcaactttggaccggtctcaatcagtgagcctccaagtgccccgattagtccaaggatgaataagggggagccacagccacggagacacctgctgggatttagtgagcaagagccagtgcagggagtggagccactacagggtagttcccaagggccgaaagaaccccaaccaagcccaaccgaccagccctcctttagtaacctgacagcttttccgggcggcgccaaagaactcctgttaagagacctcgaccaactgtttctgtccagcgattgtcgccacttcaacagaacagaatcactgcgcttagcagatgagttgagcgggtgggttcagcgacaccagcgcggacggcgcaaaataccacagcgggctcaggagcgccagaagagccagcctcgaaaaaagagtccacctgtgaaggccgtcccgattcagcctccggggccacccgaacgggatagcgttggccagcttcagctgtacaggcatcctgacagatcccagcccgcgttcctcgatgccatcgacaggagggaggatacattttacgtcgtgtcttttcggcgtgatcacctcctgctgccagctattagccacaataaaacttctcgccccaagatgtctctagtgatgcccgccatggctcctaacgagacactgtccggaaggggcgctcctggcgactacgaggagatgatgcagattgagtgtgaagtaatggacacaagagtgattcacattaagacatctactgtgccacctagtctgaggaagcagcccagccctactcccggaaatgccacaggcggacccctaccagtgagcgccgcatcccaagcccatcaggcgtcccatcagcctctgtacctcaatcacccttag

SEQ ID NO: 106970 - DNA, 2112 bp, synthetic construct
  misc_feature 1..2112: note = Description of Artificial Sequence: Synthetic coding sequence
  source 1..2112: mol_type = other DNA
atggccgagcttatgctcctgtctgaaattgccgatccgactcgtttcttcaccgacaacctgctctcaccagaggattgggggctgcagaactccactctgtattccgggctggatgaggttgccgaggaacagacacaacttttcaggtgcccagagcaggatgtgcctttcgacggctcttccttagatgtaggaatggatgtgagtccctccgagccaccttgggagctgcttcccatctttcccgatctgcaagtgaagagcgaacccagttcaccgtgcagctcctcttctctctcctccgagtcctccagactgtctacggaacctagcagtgaagccctgggcgtgggggaggttctccatgtgaagaccgaatctcttgctcctcccctgtgtctgctgggggacgatcccacctcctcctttgagaccgtacaaattaatgtcattcccacctcggatgattcatccgacgtgcagactaaaatcgaacccgtttctccttgttcctctgtcaactcagaggcgagtcttctgtcagccgacagcagcagtcaggcgttcataggggaagaggtgctggaagtaaagaccgagtcactcagtccttcaggctgcttgctgtgggacgtgcctgcaccatcccttggagccgtgcaaatctccatgggtccctccctcgatgggtcatcgggaaaagcattgccgacaagaaaaccgcccctgcaacccaagcccgtggtattgaccactgttcctatgccgagcagggcagtacccccgtccacgaccgtgttgctgcaatccttagtacagcctccgcccgttagcccggtggtgcttatccagggagccattagagttcagccagagggaccagctcctagcctccccaggcccgaacgcaaatcaatcgtgcccgctccgatgccaggaaactcctgcccccccgaagtggatgccaaactactaaaaaggcaacagcggatgattaaaaacagggagagtgcctgccagtccaggcgcaaaaaaaaagagtacctccagggattggaagctaggctgcaagccgtgcttgctgataaccagcagctgcgtcgcgagaacgcggcactgagacgacgcctcgaagctttactggctgaaaattctgagttgaaacttggctctggtaacagaaaggtcgtgtgcattatggtttttctcctcttcatagcctttaatttcgggcccgtctccatctccgaaccaccatcagctccgattagccccagaatgaataagggggagcctcagccaaggcgacacctgctaggattttctgagcaggagccagtgcagggcgtggaaccgttgcaagggagctcgcaaggtcctaaggaaccccaaccctctcccacagatcagccctcgttttcgaacctcacagctttccctggtggagctaaggagctattactgcgtgaccttgatcagctgtttctgtccagcgactgtcgccattttaataggaccgagagtcttcggctggctgatgaattgagcggctgggttcaaaggcatcagcgcggcaggcggaagatacctcagcgggcccaggagcgtcaaaaatcacagccacggaaaaagtctccgcccgtgaaagcagtgcccatccaacccccaggccctcccgagcgggactccgtgggtcagctgcagctctaccggcatcctgacaggtctcagccagcttttctcgacgccattgatcgacgggaagatacattctacgtcgtttccttcagaagggatcaccttctactcccagccatcagccacaacaaaacatctaggccaaaaatgagtcttgtcatgcccgcgatggccccaaacgaaaccttgagtggaagaggcgcaccgggggactacgaggagatgatgcagatcgagtgcgaagtcatggataccagagtgattcacatcaagacatcaactgtgcccccaagtttgaggaaacagccttctcctacccccggtaacgctactggcggcccactccccgtgagcgctgcatcccaggctcatcaagcctcacatcagccactttatctgaaccacccatag

SEQ ID NO: 106971 - DNA, 2103 bp, synthetic construct
  misc_feature 1..2103: note = Description of Artificial Sequence: Synthetic coding sequence
  source 1..2103: mol_type = other DNA
atggccgaactgatgctcctttctgaaattgctgatccaaccagatttttcaccgacaatcttctgagcccagaggactgggattccaccttatactctgggcttgatgaggttgcagaagaacagactcagctgtttcgatgtcccgaacaggatgtgcctttcgacgggtcatcactcgatgtaggtatggatgtgagtccatcggagccgccgtgggagctcctccctatcttccctgacctgcaggtgaaaagtgaaccgagtagcccttgttcctccagcagcctcagttccgagtcatcacggctgtctacagagccaagtagcgaggccctcggagttggcgaggttttgcacgtgaaaacggaaagcctggcacccccactttgtctactcggagatgaccctaccagttccttcgaaactgtacaaattaatgtgatcccaacaagtgacgactccagcgatgtacagaccaagatcgaacccgtgtccccatgtagcagtgttaactctgaggcgtccctgttatctgccgactcatcaagtcaggccttcattggcgaagaggtgctggaagtgaagacagaatcactttcaccaagcgggtgcctcctgtgggatgtgcccgcgccaagcctgggggccgtccagatctccatggggcccagccttgacggatcctcaggtaaagccctgccgactcggaaacctccattgcagcctaagcctgttgttctgaccactgttccgatgccgtctagagcggttcccccgagcactaccgtccttctgcaatctttagttcagccgccaccagtgtcccctgtggtcctaatccagggtgcaataagggttcagccagaggggcctgcccccagcctgcctcgccccgaaagaaaaagcatcgtccctgctccgatgcccgggaattcctgtcctcccgaggtggacgctaaactgctgaaacgccagcaaagaatgatcaaaaaccgggagtccgcctgccagagcagacggaagaaaaaagaatacctgcagggcttagaggcacgcctccaagccgtgctggccgacaatcaacagctgcgtagggagaatgcagccctgcgcaggcgattggaggccctgttagccgagaatagcgaattaaagctcggaagtgggaatcgtaaggtcgtatgcataatggtcttcctactctttatcgcgttcaatttcgggcctgtgagcataagcgagcctccttctgcccccatttctccacgcatgaataagggcgaaccccagccccgtcgacacctgctggggttctccgagcaggagcccgtccaaggggtcgagcccctacaaggctcctcccaaggtccaaaggaaccacagcctagccccacagaccagcctagtttctctaatctgacagcttttccaggtggcgcaaaggaactgctcctacgggatctggatcagcttttcttatcaagcgactgccgccatttcaaccgcaccgagagcctgcgactggccgacgagcttagtggctgggtccagagacaccagagaggccgccgtaagatcccccaacgtgcccaagaacgccagaagagtcaaccccgcaagaagtctcctcctgtgaaagcagttccgattcagcctcccggaccaccagaacgagattcagttgggcagcttcagctgtaccggcacccagacagatcccagccagcattcctcgatgcaattgatcgccgcgaagacaccttttatgtcgtatcattcagacgggaccacctgctgctgcctgccatctctcataacaagaccagcaggcccaagatgtcccttgtcatgcccgcaatggcccccaacgaaaccttgagcgggcgcggcgctccaggcgactatgaggagatgatgcagattgagtgcgaggtaatggatacccgggtgatccacatcaaaacaagtactgtgccaccatccttaaggaaacagcctagcccaacaccaggcaacgctaccggcggcccccttccagtgagtgcagcgtcacaggcccatcaggccagtcatcagcctctctacctgaaccatccttag

SEQ ID NO: 106972 - DNA, 429 bp, synthetic construct
  misc_feature 1..429: note = Description of Artificial Sequence: Synthetic coding sequence
  source 1..429: mol_type = other DNA
tgacagccaagcccaaccgaccagccatccttcagcaacttaaccgcctttcccggaggcgcaaaggagctgcttctgagagacttggaccagctgtttcttagctccgactgccgccattttaatagaacggagtccctgagacttgccgacgagctgagcggctgggttcagaggcatcagcgcgggcgcagaaaaatccctcagagggcccaggaaagacaaagcctggatacttctccatctaggtctctgagccatgggaggtctcacttacagctgcggcaaagtccatccaacccactggacccacaaaagggtatcctctgggcttcctgtaattatatcgctacccaaactgtcagatcacagcatagctggatgcaacttacagacggaaaaactcactttatgttgagtctgagctag

SEQ ID NO: 106973 - DNA, 2103 bp, synthetic construct
  misc_feature 1..2103: note = Description of Artificial Sequence: Synthetic coding sequence
  source 1..2103: mol_type = other DNA
atggccgaactgatgttgctctctgagatcgctgacccaacaaggtttttcacagataacctgctaagccctgaagattgggattctacgctctatagtggtctcgatgaagttgctgaggagcagactcagcttttccgatgtcctgaacaggacgtgcctttcgacggatcttcactggacgtaggcatggatgtctcaccttcagagcctccatgggagttgctgcctattttcccagacctgcaagtgaagtccgagccgtcctctccgtgtagctcatcatccctgagctccgaatcctcacgcttaagtactgaaccaagcagtgaagccctgggagtgggggaagtgcttcacgtgaagacggaatcactcgctccacccctttgcctgctcggtgatgaccctacatcatcgttcgagaccgtacaaattaatgtgattcctactagcgacgacagctctgatgtgcagacgaagatcgaacccgtgtcgccatgctccagtgtgaattctgaggcaagtctcttaagcgcagatagcagtagccaagcgttcatcggagaggaggtactggaggtaaagaccgaaagcctctctccatccggatgccttctgtgggacgtccccgccccgtccctcggtgccgtccagattagtatggggccctcactcgacgggagcagcggcaaggcactccctacacgtaagccccctctgcagcctaagcctgtggtgcttacaaccgtcccaatgccttctcgagccgtcccaccaagcaccacggttctgctgcagtccctggtgcagccaccaccagttagccccgtggttttgattcagggagcaattcgggtacagcccgaaggccccgcccctagtctcccacgccctgagaggaaaagcattgttcctgcacccatgcccgggaacagctgtcctcccgaagtggacgccaagttactgaaacgccaacagagaatgatcaagaatcgggagagcgcctgccagagccgtcgcaaaaagaaagagtacctgcagggactggaggctagactgcaggctgtgcttgcagataatcagcagctccgaagggaaaacgccgccctgcgcaggaggttagaggccctccttgccgaaaatagtgagctcaagttaggctcgggcaataggaaggttgtctgtatcatggtattcctgctctttatagcctttaacttcggtccagtgagtatctctgaacccccttctgctcctatcagtcctcgcatgaacaaaggcgagcctcagcctcggcgtcacctactgggcttctccgaacaagaaccggtgcagggcgttgagccactgcagggatcttcgcaggggcccaaggaaccccagccctcccctactgaccagcctagcttcagcaatctgaccgctttccctggaggagcaaaagagcttttactaagggatcttgatcagcttttcttgagctcagactgtcggcacttcaacaggacagagagcttacgtcttgcagatgagttgtccggctgggtccagaggcatcagcgtggtaggcggaaaatcccacagcgggcccaggagagacagaagtcccaaccccggaaaaaatctcctcctgtgaaggcggttccaatccaaccccccggacctccagagagagactccgttggacagcttcagctgtaccgccaccctgatcgctcccagcctgccttcctggacgccattgataggagagaagatacattctatgttgttagctttagaagggaccatttgctcctgcccgcaattagtcataataaaacgagccggccaaagatgtccctggtgatgcccgccatggccccaaatgagacactatcagggcgaggagcgccaggggactatgaagaaatgatgcagatagagtgcgaggttatggatactcgtgtcattcacatcaagacgagcacagtgccccctagcctgcgtaaacagcctagcccaacgcctgggaacgctacaggcggacctttgcccgtctcggccgcttctcaggcccaccaggcatctcatcaaccattgtatctgaatcatccctag

SEQ ID NO: 106974 - DNA, 429 bp, synthetic construct
  misc_feature 1..429: note = Description of Artificial Sequence: Synthetic coding sequence
  source 1..429: mol_type = other DNA
tgacagccgtcacccactgaccaacccagcttctcaaatcttacagcctttcctggaggggcaaaagagctcttactccgcgaccttgaccagctgtttctcagctccgactgccgacacttcaaccgcaccgagtccctgcggctggcagatgaattatccggctgggtgcagcggcaccagcgcggccggagaaagatacctcaacgcgcacaagagcggcagtctctggacacctcaccttcgagatccctgtctcacggtaggtcacatctgcagcttcgacagtcccctagcaacccactggacccacaaaaggggatactgtgggctagctgtaattacattgctactcagaccgtcaggagccagcacagctggatgcagctaactgatggaaagacgcattttatgctgtcactcagctag

SEQ ID NO: 106975 - DNA, 669 bp, synthetic construct
  misc_feature 1..669: note = Description of Artificial Sequence: Synthetic coding sequence
  source 1..669: mol_type = other DNA
atggccgaattgatgttgctgagcgagatcgcagacccaacccggtttttcactgataatcttttatcacctgaagattggggcttgcagaatagtactttgtactcgggcttagatgaggttgctgaggaacaaacacagctgttcagatgccccgaacaggacgtgcccttcgacggatcaagcttggatgtaggtatggatgtgtcaccgaccgatcagccctctttcagcaacctgacggcgttcccaggaggcgccaaggagctgcttctgcgggacttagaccagctctttctatcaagcgattgtcgccactttaaccggacagagtccttacggctggcagatgagctcagtggctgggtgcagcgtcatcaacggggaagacgtaaaattccacagagggctcaggagcgtcagaaaagtcagccccgtaaaaagtctccacccgttaaagccgtgccaatccagccacctggacccccggagcgcgactctgtgggccaactgcagttatatcgccatcctgataggtctcagccagcgtttctggacgccatcgacaggagggaagacaccttttacgtagtaagcttccggcgcactacatgttgttcccaaccatctgccacaacgaggcccccaggtccacggtgcccctggtag

SEQ ID NO: 106976 - DNA, 669 bp, synthetic construct
  misc_feature 1..669: note = Description of Artificial Sequence: Synthetic coding sequence
  source 1..669: mol_type = other DNA
atggctgaactgatgttgttgtcagagatcgctgatccaacaaggttcttcacagataatcttctctcccccgaagactggggtctacagaactccactctgtattccggactggacgaggtcgcagaggagcagactcagctttttcgctgtccggaacaggacgtcccattcgatgggtcctccttggacgttggcatggatgtcagccctactgatcaaccctccttttccaacctgacagccttccccggaggagctaaggaactgttactcagggatctcgaccaactgtttttgagtagcgactgtaggcactttaatcgcacagagtccctgagattagccgacgagctgtccggatgggtgcaaaggcaccagagaggcaggcggaagattcctcaacgggcccaggagaggcagaaatctcaacctcgcaagaaatccccccctgtgaaggctgtgcccatacagcctcccggcccacctgagcgcgacagcgtcggacagctgcagctgtaccgccaccctgaccgatctcagccagctttccttgacgctatcgatcggagggaggacactttctatgttgtgagctttagacgaactacgtgttgctcacagccttcagccacaactcgtcctcctggacctcgctgtccatggtag

SEQ ID NO: 106977 - DNA, 669 bp, synthetic construct
  misc_feature 1..669: note = Description of Artificial Sequence: Synthetic coding sequence
  source 1..669: mol_type = other DNA
atggccgaactcatgctgctctcagaaattgcagaccctacacggttcttcacggacaacttactgtcgcctgaagactggggcctgcagaatagcactttgtactccggactcgacgaagtggctgaagagcagacacaactgttcaggtgtcccgagcaagacgtcccctttgatggctctagtttagacgttggtatggacgtgtcaccgactgatcagcccagtttttctaacctcaccgccttccctgggggtgctaaggagctcctgcttcgggatctagaccaactgtttcttagcagcgactgccgccattttaatagaactgagagcctacggctggctgacgagctgagcggctgggtacagaggcaccagcggggacggcgcaagatcccccagagagctcaggaaagacagaagtctcaaccccgcaaaaagtcccccccagtcaaggcggtacctatccagccaccaggaccgcccgagagagattccgtgggccagctgcagctgtatcgccatccagataggtcccagccggcctttctggacgcaatagataggcgcgaggatacgttctatgtggtgtccttccgacgcactacatgttgctcccaaccaagcgccaccacccgcccccctggaccacgttgcccttggtag

SEQ ID NO: 106978 - DNA, 924 bp, synthetic construct
  misc_feature 1..924: note = Description of Artificial Sequence: Synthetic coding sequence
  source 1..924: mol_type = other DNA
atgggggatgaccgcccttttgtttgtaacgcccctggctgtggccaaaggttcacaaatgaagaccatctggctgtgcacaagcacaaacatgaaatgaccctgaaatttggccccgccagaacagattctgtcattattgcagaccagacccccacaccgaccaggttcctcaagaattgcgaggaagtcggactgtttaatgagctggcatctagcttcgaacatgagtttaagaaagccgcggatgaggacgaaaaaaaagcagccgcagggccgctggatatgagccttccttcgacccctgacatcaagattaaggaggaggagcccgtagaagtggatagttcacctcccgattcgccggccagtagcccctgctcccccccactgaaggagaagtcgcccgcccagcccaccccctccacggggggacgcaggaggcggaccgtagatgaggacccagatgagaggcgccagaggttcctagagcggaatcgtgcggctgcatctaggtgtcgacaaaagaggaaactttgggtgtcttcattggaaaaaaaggccgaggagctcacctcccaaaacatccaactgtctaacgaagtgaccctcctgagaaacgaggtggcacagcttaagcagctactactagcgcataaggactgtcccgtaacagccttgcaaaaaaagactcaggggtatctggagagtcccaaggaatccagcgaaccaacaggcagcccagcccccgtcatccagcattcctctgcaacggccccgagcaacggactttctgtgcgaagtgccgccgaagcagtggccacctcagtcctgacccaaatggcctcgcagcgcaccgaactgagcatgccaatccagtcacacgtaattatgactccccagtcgcaatccgcgggaagatag

SEQ ID NO: 106979 - DNA, 1485 bp, synthetic construct
  misc_feature 1..1485: note = Description of Artificial Sequence: Synthetic coding sequence
  source 1..1485: mol_type = other DNA
atgggcgatgatcgaccgttcgtgtgcaacgccccagggtgtgggcagaggtttaccaacgaagaccatctcgcagtgcacaagcataaacacgaaatgaccctgaagtttggcccagccaggaccgattcggttatcattgcagatcagacaccaacgcccactcgattcctgaagaactgcgaggaagttggcctcttcaacgagctggcaagcagctttgagcatgagtttaagaaggccgcggatgaagacgagaaaaaagcacgaagtcggactgtcgcaaaaaaactggtggccgctgccgggccccttgacatgtctttgccctcaaccccagacatcaaaatcaaggaggaagaacccgtggaagtcgattcctcacctcccgatagcccagcatcgtcaccctgctctccacccttgaaggaaaaggaggtcacccctaaaccagttcttatttccacacccacgcccacgatagtgcggccaggctcgctcccccttcaccttgggtatgaccccctccaccctacccttcccagccctacctccgtgattacccaggctcctccctccaacagacagatggggtctcctacaggaagcctccccctggtgatgcacctggctaacggccagacaatgcccgtgctgcctgggccaccagttcagatgccctccgtcatctcactcgcaaggcctgtatcaatggtgccgaatatacccggaatccctggccccccagtcaatagctctggcagcatctctccttcgggccacccaatcccctccgaagccaagatgaggctgaaagcaacgctgactcaccaggtgtcatctatcaatggtgggtgcgggatggttgtcggcactgccagtactatggtaacagcacgaccagagcagagccaaatccttatccagcaccccgacgccccatcccccgcccaaccccaggtgtctcctgcccaacccaccccaagcaccggcgggcggaggaggcgcaccgtggacgaggatcctgatgaaagacgtcagcgattccttgagaggaatcgtgctgctgccagcaggtgtcgacaaaaacgcaaactctgggtctcaagcctcgaaaagaaggcagaggaactgaccagtcagaatatccagctgagcaacgaagtcactctccttcgcaacgaagtagcccagcttaagcagctcctcctcgcacacaaggattgcccggtgaccgctctccaaaaaaaaacccagggttatttggaaagtcccaaagaaagcagtgaacctaccggcagtccagctcctgtaattcagcacagtagtgcaactgccccctcgaacggcttatcggttaggtccgccgccgaggcagtcgctacttctgttctcactcagatggcctctcagcgcactgaactcagcatgcccattcaaagccacgtgatcatgaccccccagtcacagtcggccgggcggtag

SEQ ID NO: 106980 - DNA, 1389 bp, synthetic construct
  misc_feature 1..1389: note = Description of Artificial Sequence: Synthetic coding sequence
  source 1..1389: mol_type = other DNA
atgggtgacgatcggcccttcgtgtgtaatgcccctggctgtggccaaagatttactaatgaggaccatctcgccgtgcacaagcataagcatgaaatgacactcaagtttggccctgcgaggacagactcggtgattatcgcagatcagactcctacgcccaccaggttcctcaaaaattgcgaagaggtggggctgttcaatgagctcgcttcgagctttgaacacgaatttaagaaggccgcggacgaagacgagaaaaaggctgcagcaggtccactggatatgtctttgccctcaacccccgatataaaaattaaggaggaggagcctgtcgaagaagttacacccaagcctgtgctgatcagtactcctacacccactattgtgcgccccggttcactgccattgcatctcggatatgatcctctgcatcccacactcccctctcccacatccgtcatcacgcaggcgcccccctccaataggcagatggggtcccccaccggaagtctgcctctggttatgcatttggcaaacggccagaccatgcctgtcctcccaggcccccctgtgcaaatgccctccgtcatatctctggccaggccagttagtatggtccctaatatccctggcatcccagggcctccagtgaatagctccggaagtattagtccaagtggacatcctatacctagcgaagctaagatgagactcaaggccacgctgactcaccaggtgtcaagtatcaatgggggatgcgggatggtcgtaggcacggcttctactatggtgaccgctagacccgagcagagtcagatcctgatacagcatccagacgctccaagcccagctcagccccaggtgagccctgcccagcccacccccagcaccggggggaggcgccgccgaaccgtcgacgaggatcccgacgaacgaagacagaggtttctcgagcgcaacagggcagccgctagcagatgtcgccagaagcgaaaattgtgggtatccagtttggagaagaaagccgaggagttgacttctcaaaacatccaactctcaaacgaagtcaccctcctgcgcaacgaggtcgcccagttaaagcagctattgctcgctcacaaagactgtccggtaactgcattgcagaagaaaactcagggatacctggagtctccaaaggaatcgtcagagcccaccggatcaccagcacctgtgattcagcattctagtgcaacggcaccttcaaatggcctcagcgtgcgctccgcagctgaggcagtcgcaacgtcagtgctaacacagatggccagccagcgcacagagttgtctatgccaatacagtcccatgtcataatgacaccacagtcacaaagtgccggaagatag

SEQ ID NO: 106981 - DNA, 1452 bp, synthetic construct
  misc_feature 1..1452: note = Description of Artificial Sequence: Synthetic coding sequence
  source 1..1452: mol_type = other DNA
atgggggacgacaggccgttcgtttgtaacgcgcccgggtgcggccagagattcactaatgaggatcatctggctgtccacaaacacaagcacgagatgacactaaaattcggccccgcaagaaccgacagcgtgatcatcgcagaccagacacccacgccaacccggttcctcaaaaactgcgaggaagtcggccttttcaatgaacttgcctccagtttcgaacatgagttcaaaaaagccgcagacgaggatgaaaaaaaagctgctgccgggcccctggacatgtctctcccttctacccccgatattaaaatcaaagaggaagagccggtcgaggtggactcatcccctcctgactcaccagcctcatctccatgcagccctcccctaaaagaaaaagaagtgactcctaagcccgtgttgatatcgacccccactccaacgatcgtaaggccaggcagtcttccccttcatctcggttatgatcctctgcacccaactttgccatcccctacctctgtgattacccaggcacccccctcaaaccgccagatgggaagtcctacaggctctcttccacttgtcatgcatctcgcaaacggacaaaccatgccagtcctgcccggtccacctgttcaaatgccctccgtaattagcctcgctcgtcctgtgtctatggtgcccaatattcctggaattccagggccccctgtgaacagcagcgggtccatttcaccaagcgggcaccctatccctagtgaggccaaaatgcgactgaaggctacactgacccaccaggtgtcatccattaatggggggtgcggtatggtcgtcggcaccgcctccacaatggtaaccgcccgccccgaacaatcccagatattgattcagcacccggatgcgcctagtcccgctcagccccaggtctcccccgcccaaccgaccccaagtaccgggggccggaggaggaggacagtggacgaagacccagacgagagacgccagcgcttcctggagcgaaacagggctgctgcgtccagatgccgacagaaacggaaactgtgggtcagctcactggagaagaaggcggaggaactgacctcacagaatatccagctttctaatgaggttactctgcttcgaaatgaagtggcccagttgaaacagctactgcttgcacacaaggattgccccgtaactgccctgcaaaagaaaacacagggttacttggagtcaccaaaggaatcttctgaacctactggatccccagcccccgtaatacaacatagctctgcaactgccccgtcgaacggccttagtgtgcgcagtgcagctgaggctgtcgcaacttcagtgcttactcagatggccagtcagcgaaccgagttgagcatgcccatccaatcccacgttatcatgaccccccagtcacaatcagccgggaggtag

SEQ ID NO: 106982 - DNA, 1452 bp, synthetic construct
  misc_feature 1..1452: note = Description of Artificial Sequence: Synthetic coding sequence
  source 1..1452: mol_type = other DNA
atgggcgatgacagaccattcgtgtgcaacgctccagggtgtgggcagcgattcaccaatgaggaccatctcgccgtacacaagcataagcacgagatgaccctgaaatttggtcccgccagaaccgacagcgtgataatcgctgaccagacacccacccccactagatttttaaaaaattgcgaggaagtcggtttgttcaacgagctggcctccagcttcgagcacgaattcaagaaggctgctgatgaggatgaaaaaaaggcagctgctggtccgctggatatgtccctgccatccacacctgacattaagataaaggaggaggaaccagttgaagtggatagtagtccacctgacagccctgcctccagtccttgctctccgccactgaaagagaaagaagtgacccccaagccggtgctgatttccactcctacgcccacaatcgtacgtccaggttcactgccacttcacctagggtatgaccctctgcacccgacactccctagtcctaccagcgtcatcactcaggcacccccctctaatcggcagatgggatccccaaccgggtctcttcccctggtgatgcatctagccaatggtcagacaatgccagtcttaccaggcccccctgtgcagatgccatcagtgatcagcctggctcgaccggttagtatggttcccaatattcctggtattccgggtccgcccgtaaactcatccggatcaatctcccccagtggtcacccaatcccttctgaagccaagatgcgcctgaaagctacactgacccatcaagtctcgtctattaacggcggctgtggtatggtggtcggaaccgcctccaccatggtgacagcacgaccagagcagtcccagatcctgatacagcatccagacgccccgagcccagcacagccccaggtctctccggcccagcccacccctagcactggtgggaggcgtaggcggaccgtggatgaagatccagacgaaaggaggcaacgctttctggagaggaatcgcgctgcagcgagcagatgtcggcaaaagcggaaactatgggtttcatctctggaaaaaaaagcagaagagcttacttcccagaacatccagctctctaatgaagtaacactccttcgcaacgaagtagctcagcttaagcagttattattggcacacaaggattgccccgtgaccgctctgcaaaaaaagacccaaggctatttagaatccccaaaagaaagcagtgagcctaccggctcaccagcgccggtaatacaacattccagcgccactgctcccagtaacggactgagtgtccggtccgccgcagaagctgtagccactagtgtcctaacccagatggctagtcagaggaccgagctgagcatgcccatccagtcccacgtgattatgactccccagtcccagtcagccgggcggtag

SEQ ID NO: 106983 - DNA, 1485 bp, synthetic construct
  misc_feature 1..1485: note = Description of Artificial Sequence: Synthetic coding sequence
  source 1..1485: mol_type = other DNA
atgggggatgacaggcccttcgtctgcaacgccccaggctgtggtcagagattcactaatgaggatcacctcgcagtgcacaagcacaagcatgagatgacactcaaattcggtccagctcgtaccgatagtgtgattattgctgaccagacccccacacctactaggttccttaagaactgcgaagaagttggcctcttcaacgagcttgcctcatcttttgagcatgagttcaagaaagcagccgacgaagacgagaagaaggcgcgatctaggactgtggctaagaaactggtcgccgcagcaggaccactggatatgtccctgccgtctacacctgatattaaaatcaaagaggaagagcccgtcgaagtggattctagcccacccgactctcccgcatcatccccttgctctcccccattaaaggagaaggaagttactcccaagccagttctgatcagcacaccaacacctactatcgtgcgacccggatccctgcccctgcatctgggctacgaccctctccacccaaccctgccgtcaccaacctcagtcatcacgcaagcccctccaagcaatagacaaatgggttcccctaccggctctttgcctctggtgatgcatctcgccaacggacaaaccatgccagtgcttcctgggccccctgttcaaatgccttccgtgatctctcttgctcgtcccgtgtctatggtccctaacataccaggcatccccggtcctcccgtgaatagttctggctccatctctccatccgggcatccgattccatcagaggcgaaaatgaggctcaaggccacccttacacaccaggtttcctctataaacggcggttgtgggatggtcgtcgggaccgccagtactatggtgacagcccggcccgagcaatctcagatattaatccagcatccggatgcacctagccccgcccaaccccaagtcagtcctgctcagcccacaccttccacaggtgggaggcgccgccgcaccgtggacgaggatccagacgaaagaagacagcggttcctggagcggaacagggcggctgcaagtcgctgtagacagaagaggaagctgtgggtgtccagcctggaaaaaaaggccgaggagctaaccagtcaaaacattcagttatcaaatgaagtaacactgctaaggaacgaagtcgcccagctgaagcagctgctgctggcccacaaggactgtcccgtgacagctctgcagaagaagacgcaaggttacctcgaaagcccaaaggagtcttctgaacctacaggctcgccagctcctgtgattcagcactccagtgccacggctccttccaatggtctgtccgtgcggtccgcggccgaagcagtagccacctccgtgttgacgcagatggccagtcagcgaaccgaattgagcatgccaatccagagccacgtgatcatgacaccccaaagccaatccgcagggcgctag

SEQ ID NO: 106984 - DNA, 354 bp, synthetic construct
  misc_feature 1..354: note = Description of Artificial Sequence: Synthetic coding sequence
  source 1..354: mol_type = other DNA
atgggggacgacaggccctttgtatgtaacgctcctggctgcggacagagatttaccaacgaagaccatctagccgtgcacaagcacaagcatgaaatgacactgaaatttggcccggcacggaccgactcagtgatcatcgctgaccagaccccaaccccaactagatttctgaagaactgtgaggaagtgggcctcttcaacgagttggcgtcttcattcgaacatgaatttaagaaagcagctgacgaggatgaaaaaaaggctcgcagtcgcactgttgccaaaaagttagtagtttttcggcctaggctgttcttgctctgcttcggcataatcttcctcattggctag

SEQ ID NO: 106985 - DNA, 354 bp, synthetic construct
  misc_feature 1..354: note = Description of Artificial Sequence: Synthetic coding sequence
  source 1..354: mol_type = other DNA
atgggtgacgatcgaccttttgtgtgcaatgctcccggatgcggtcagcggttcactaatgaggatcacttagccgtgcacaaacataaacacgagatgacactcaagttcggacccgcccgtaccgactcagtgattattgctgaccaaacccccactccgactaggtttttaaaaaactgtgaggaagtcggattgttcaatgaattagccagttctttcgagcacgagttcaaaaaggcggccgatgaggacgagaagaaggctcgctcccggactgtagctaagaagctggtcgtgttccggccgcggctcttcttactctgcttcggcatcatttttctgatcggctag

SEQ ID NO: 106986 - DNA, 3813 bp, synthetic construct
  misc_feature 1..3813: note = Description of Artificial Sequence: Synthetic coding sequence
  source 1..3813: mol_type = other DNA
atggatagcctagaagaacctcagaaaaaagtgttcaaggcgagaaaaaccatgcgagtatcagaccggcagcagcttgaggccgtctataaggtcaaggaagaacttttgaagacagatgttaagctgttgaatgggaaccatgaaaacggagacttagatccaacctccccactcgaaaacatggattatatcaaggataaagaggaggtaaacgggatcgaagaaatctgtttcgatcccgaagggtccaaggccgagtggaaagaaaccccatgcattctgtctgtgaatgtcaaaaacaaacaggacgacgaccttaattgcgagccgttatcgcctcacaacataaccccggagccagtgtcgaaattgcctgctgaaccagtctccggggatcccgcacccggagatttggacgcgggcgatccagcttctggtgtgctggcttctggggacagcacctccggcgatccaactagtagcgagccaagttccagcgacgctgcctccggggacgcaacgtccggggacgctcccagcggggatgtcagccccggagacgccacaagcggagatgctacagctgacgatttatcctcaggtgatcctacctcctccgatccaattccgggagaacccgtgcccgtcgagcctatttccggggactgtgcggctgacgatattgcttcttctgaaattacatcagtcgatctggcttccggtgcccccgcatcgaccgaccctgcttcggatgacttagcttcaggcgatctgagctcgagcgagctcgcttccgacgatcttgccactggcgaattagccagcgatgagctgactagtgaatccacgttcgatagaacatttgaaccaaagtccgtgcctgtttgtgaaccagtgcctgagatcgataatattgagccttcctcaaacaaagacgacgacttcttagaaaagaatggagccgacgagaagctcgagcagattcaaagtaaggacagcctggatgagaaaaataaggccgacaacaatattgatgccaacgaggaaactctcgagaccgacgacacaactatctgctcagacagacccccagagaatgaaaagaaggtcgaggaggatattataaccgagcttgccttaggcgaggatgcaatctcctcctctatggagatcgatcagggcgagaaaaacgaggacgagacatctgccgacctagtggaaaccatcaacgagaacgtaattgaagacaacaagtccgagaacatcctggagaacaccgactccatggagaccgacgagatcattccgatcctggaaaagctcgctccctccgaggacgagctcacctgtttttccaaaacgtcgttgctcccaatcgatgaaacgaaccccgatctggaggagaagatggagtcatcgtttggatccccgtctaaacaggagtcaagcgagagtcttcccaaggaggctttcttggtgctttcagatgaagaggacatatcaggagagaaagatgaaagcgaagtgatcagccagaacgagacttgttccccggccgaagtggaatctaacgaaaaggacaataagccagaggaggaggaacaggttattcacgaggacgacgaaaggccctccgagaaaaacgagttctcacgcagaaaaagatccaagtccgaagacatggacaacgtgcagtcaaagagaaggcggtatatggaagaggagtatgaagccgagttccaggtgaagatcactgcgaagggcgatattaatcagaagctccaaaaagtcattcaatggctgctggaagaaaaactctgtgcactccaatgtgcagtgttcgacaagaccctggccgaactgaaaactagagtcgagaaaatcgagtgtaataagaggcacaaaactgtgttgactgagttgcaagctaagatcgcacgtttgaccaagcgcttcgaagccgccaaggaggacctgaagaagaggcatgagcacccacccaacccaccagtgtccccgggaaagaccgtaaacgacgtcaattcaaataataacatgtcttaccggaacgcaggcactgtgagacaaatgcttgagagtaaacgaaacgtcagcgagtcagctcccccaagctttcaaaccccagtgaatacagtctcttctaccaacctggttactcccccagctgtagtgtcaagtcaaccaaagctgcaaactcctgtcacctctggctctctcaccgctaccagtgtgctgccagctccaaataccgctaccgtcgtggccacaacccaggttccatcgggaaaccctcagccgacgattagcctgcaacctctgccagttatcctgcacgttccggtcgccgtttcgagccagcctcaactcctccagagccaccccgggactcttgtcacaaaccagccaagcggcaatgtggaattcatttctgtgcagtctccccctaccgtttccggacttacaaaaaatcccgtcagtttaccgtcactgcccaaccctaccaagccgaacaatgttccatccgtgccaagcccaagcatccagcgaaatcccacagcatccgcagcgccattggggactaccttagccgtgcaagccgtccccaccgcccacagcatcgtgcaggctacgagaactagtttgcccaccgtgggaccttcaggactgtactctccctccaccaatcgagggccaattcagatgaaaatccctattagtgctttcagcaccagctccgccgccgaacagaacagcaataccactccacggatcgagaaccagacaaataagacgatcgacgctagcgtcagcaagaaagccgctgattccacttcgcagtgcgggaaagcaactggatccgactcctctggagtgatcgaccttactatggacgatgaggaatctggggcttcacaggatcctaaaaagctgaatcatacgcctgtgtccacgatgagttctagtcaacccgttagtcggccacttcagcccatccagccagctccacccctgcaaccctcaggagttccaacaagcggtcccagtcagactactatccacctgttgccaactgctcctaccactgttaacgtgacccacagaccggtgacacaggttacgactaggctaccagtgccccgtgccccagcaaaccaccaagttgtatacacaacactgccagcaccccccgcgcaggctccactgcggggaaccgttatgcaggcccccgccgtccgacaggtgaatccccagaacagcgtgacagtccgcgtgcctcagactacgacatatgtggtgaacaatggactcactctcggaagcaccggccctcaactcaccgtgcaccacagacctccacaagtacacacagaacccccccgccccgtgcatcccgcgcctttgcctgaggcgccccagccccaacgcctgcccccagaggctgcctctacctcactcccgcaaaagccacacctcaagttagctcgggtccagtcccagaacgggatagtgttgtcgtggagtgtcttggaggttgatcgttcttgcgccaccgttgattcttatcacctatatgcgtaccatgaagaaccctcagccacagtgccatcccagtggaaaaaaatcggagaggtgaaagctctaccactccccatggcatgtactcttactcagttcgtcagtggttcaaaatactactttgcagtcagggccaaggatatttatggccgctttgggccattttgtgacccccagtctactgacgtcatctcgagcacccagagttcatag

SEQ ID NO: 106987 - DNA, 1548 bp, synthetic construct
  misc_feature 1..1548: note = Description of Artificial Sequence: Synthetic coding sequence
  source 1..1548: mol_type = other DNA
atggacagtctcgaggaaccccagaaaaaggtgtttaaggctagaaagacaatgcgggtttcagatcgacagcaactcgaggccgtgtacaaggtaaaggaagagctcctgaaaacagacgttaagttgctcaacggcaatcatgaaaacggggatttagaccccacctcaccactggagaacatggactacatcaaggacaaagaggaggtgaacggaatagaagagatctgtttcgatcctgaggggtccaaagctgaatggaaagagacaccttgcattctgtccgttaacgtaaagaacaagcaggacgacgatctgaattgcgagcctctgtcgccacacaacatcactcctgagccagtatctaagctaccagcggaaccagtgagcggagatcccgctccaggggatctagacgctggcgaccctgcaagtggagtgctcgcttctggcgatagcacatccggggatcccacctcaagcgaaccctcttcctcagacgcagcgtcaggtgacgctaccagtggagatgcaccctcaggcgacgtgagtccgggagacgcgacttcaggcgatgctacagcagatgacctctcctccggcgatcctacgtctagcgatcctatccctggagaaccggttccagtcgagccgatctccggagactgcgccgccgacgatattgctagcagcgagattaccagcgtggacctggcaagtggcgctccagccagtaccgaccctgcgtctgacgacctagctagtggggatctgtcttcttccgaactcgcttccgatgatctggccacaggcgagctggcctctgacgaattaacgtcggaatctacgttcgataggacctttgaaccaaaatccgttcccgtgtgcgaaccagtcccggagatcgataacattgaaccatcctccaataaggatgacgacttcctggagaagaatggcgctgatgagaaactggagcaaattcagtctaaggattctctggatgaaaaaaacaaagccgataataatattgatgcaaacgaagaaacactggagactgacgatacaaccatttgctctgaccgccctcctgagaatgagaaaaaagtcgaggaggatatcataactgaactcgcgctaggcgaagatgctatcagctctagcatggagatagaccagggagaaaagaatgaagatgaaacctccgctgatcttgttgagacaattaacgagaatgttattgaggataacaaatccgagaatattctcgagaacaccgatagcatggagaccgacgaaatcataccaattttggagaaacttgcacctagcgaagatgaactcacctgtttttccaaaaccagcctgctccctatagacgagactaatccggacttagaggagaaaatggagtcctcctttgggagcccatctaagcaggagtccagcgagtctcttccgaaggaggcctttctggtcctgtcggacgaggaggacataagcggcgagaaggacgagagcgaggttatttctcagaatgagtag

SEQ ID NO: 106988 - DNA, 378 bp, synthetic construct
  misc_feature 1..378: note = Description of Artificial Sequence: Synthetic coding sequence
  source 1..378: mol_type = other DNA
atggacagccttgaagaaccgcagaagaaggtgtttaaagcccgaaagactatgagagtgagtgaccggcagcaactagaggccgtatacaaggtgaaggaagaacttctaaagactgacgtcaagctgttgaacgggaatcacgaaaacggagacctcgaccccacctcccccctggagaacatggactatattaaggataaagaagaagtgaatggaatcgaggaaatctgcttcgaccccgaggggtcaaaagccgagtggaaggagacaccctgcattctgtccgtgaacgtcaagaacaagcaggacgatgatctaaattgcgagccactgagccctcacaacattacgccagaaccagtgtccaagttgtag

SEQ ID NO: 106989 - DNA, 459 bp, synthetic construct
  misc_feature 1..459: note = Description of Artificial Sequence: Synthetic coding sequence
  source 1..459: mol_type = other DNA
atggatagcttggaagagccacagaaaaaggttttcaaggctagaaagaccatgcgggtatcagaccggcaacagctcgaggctgtgtataaagtaaaagaggaactgttaaagaccgatgtgaagctgctgaacggcaaccatgagaatggtgacctggaccctacttcaccactggaaaacatggactatatcaaagacaaggaagaagttaatggaatcgaagagatctgtttcgaccctgagggtagcaaagctgagtggaaggagaccccatgtattttatcggtcaacgtgaagaacaaacaggacgatgatctgaattgtgagccacttagccctcacaatatcacacccgagcccgtgtcaaagcttcctgcagaacccgtctcaggagatcctgcaccaggggacctggatgctggagaccccgcctccggagtgctagcatcaggttag

SEQ ID NO: 106990 - DNA, 312 bp, synthetic construct
  misc_feature 1..312: note = Description of Artificial Sequence: Synthetic coding sequence
  source 1..312: mol_type = other DNA
atggactccctcgaggagccacagaagaaggtgtttaaagcacgaaagaccatgcgggtatccgacagacagcaactggaggcagtgtacaaagtaaaagaggagctgctgaagactgatgtgaaattgctgaacgggaatcacgagaatggtgacctggatccgacttcacccttggagaatatggactacatcaaagacaaggaggaagttaatggcattgaggagatctgcttcgaccctgaagggtcaaaagcagaatggaaggagaccccctgcattctgagcgtgaacgtgaagaacaagcaatag

SEQ ID NO: 106991 - DNA, 270 bp, synthetic construct
  misc_feature 1..270: note = Description of Artificial Sequence: Synthetic coding sequence
  source 1..270: mol_type = other DNA
atggatagcttagaagagccacagaagaaagtgtttaaggcaaggaagaccatgcgcgtgagtgataggcagcagctggaggcggtttacaaggtgaaggaggagctcttaaaaactgacgtgaagctcctgaacgggaatcacgagaacggagacttggaccctacttccccactcgaaaacatggactatatcaaagacaaagaagaggtgaatggcatagaagaaatatgtttcgacccggaggggagcaaagccgagtggaaatag

SEQ ID NO: 106992 - DNA, 534 bp, synthetic construct
  misc_feature 1..534: note = Description of Artificial Sequence: Synthetic coding sequence
  source 1..534: mol_type = other DNA
atggatagtttagaggaaccacagaagaaggtgtttaaggccaggaagaccatgcgggtgtcggaccgtcagcagctggaagctgtgtacaaggtcaaagaagaactccttaaaaccgatgtgaagctgcttaacggcaatcacgaaaatggcgatttggatcctacatctcccctcgaaaacatggactacattaaagacaaggaggaagtaaacgggattgaggaaatttgctttgaccctgagggttccaaagcggagtggaaagaaacaccttgtatactcagcgtaaacgtcaagaataaacaagatgacgaccttaattgtgaacccctttcaccccataacatcacacctgagccagtgtccaaacttccagctgaacccgtttctggggaccccgcgcctggtgatttagacgccggggatccggcctccggcgtcctggcctctggggacagcaccagtggagatccaacgtccagcgagccgtcttcctcagacgccgctagtggagatgcaacctcaggatag

SEQ ID NO: 106993 - DNA, 3813 bp, synthetic construct
  misc_feature 1..3813: note = Description of Artificial Sequence: Synthetic coding sequence
  source 1..3813: mol_type = other DNA
atggacagcctggaagagccacagaagaaagtgtttaaggcaagaaaaaccatgcgggtgtctgatagacaacagttagaggcagtgtacaaggtgaaggaggagcttttaaaaaccgacgtcaaacttctgaatgggaatcatgagaatggcgatctggatcctacgagccccctagaaaacatggattatattaaggataaggaggaggtgaatggtatcgaggagatctgcttcgatccggaaggatccaaggccgagtggaaggaaaccccttgcattctgagtgtaaacgtcaagaacaagcaggatgacgatctgaattgtgaacccttgtctcctcataatatcacacccgaacctgtcagcaagctgcccgcggagccagtcagtggagacccagcaccgggggatctggatgcgggtgaccctgcatccggcgtgctggcctccggagatagtacatcgggtgatccaactagctccgagccctcatcctcggacgctgcatccggcgatgcaacgtcgggagatgcccccagcggagatgttagtccaggggacgccacgtctggtgatgcgaccgctgacgacttgtcgagcggagacccaacctcctctgaccctatccccggagagcccgtgcctgtggaacccatttcaggggactgcgccgccgacgacatcgcttcatccgaaatcacgtcagtggatttggcctcgggtgcccccgcgtccaccgatcctgcctccgatgatttagccagcggggacctcagctctagcgagctggcctccgacgatctcgcaacaggggaactggcatctgatgagctaactagtgaatctacatttgatagaacctttgagcccaaaagtgtcccagtctgtgagccggtccctgagatcgacaacattgaaccctcctccaacaaggatgatgactttctcgagaaaaacggtgctgatgaaaagctggaacagattcaaagcaaggattccctcgatgagaaaaacaaggcggataacaatattgatgcaaacgaggagacgctggagaccgacgacactaccatctgttcagatcggccacccgagaacgagaaaaaggtagaggaggacattattactgagttggcactgggggaggatgccatcagctccagcatggaaatcgatcagggcgagaaaaatgaagatgaaacctccgcggacttggtagaaacaataaacgagaatgtgatcgaagacaataagtcagagaatattcttgagaataccgactctatggagaccgatgaaatcattcccatactcgaaaaattggctccaagcgaagatgagctgacttgttttagcaagacgtccctgctccccattgacgagactaaccctgacctggaagagaagatggagtcctcctttggctctccaagcaaacaagaatccagcgagtctcttcctaaggaagctttcttggtactcagtgacgaggaggatatctcaggggagaaagatgagtccgaagtcattagccagaatgagacatgctcccctgccgaagtggaatctaatgaaaaagataataaacccgaggaggaggaacaagttatccacgaggatgacgaacggccaagtgagaaaaatgagttttccaggaggaaacgcagtaagtccgaagacatggacaacgtacagagcaaacgccgtagatatatggaggaagaatatgaagcagaattccaggtgaaaattacggcaaagggagatattaatcagaagcttcaaaaagttattcagtggttgctggaagagaagctgtgcgccctccagtgcgcagtgttcgataaaacgctggccgagttaaagacacgcgttgagaagatagagtgtaacaagcgccacaaaacggttctgacagaactccaagcaaagattgctcggctcaccaagaggttcgaggccgctaaggaggatctgaaaaagagacatgagcaccctccgaacccaccggtctctccgggtaaaaccgtgaatgatgttaactcgaacaacaatatgagctaccgaaatgctggaaccgtgcggcagatgttggagagcaaacgcaacgtgtcagagtctgccccaccttctttccagacgccagtcaacacagtatcaagcactaacctcgtgacaccccccgccgtagtctcttcccagcccaagctgcagacccctgtgactagtgggagcctaactgctaccagcgtgcttcccgctccaaacacggctactgtggtcgccaccacacaggtgccctctggcaacccacagcccaccatttccctacagccccttccagtcattctgcatgtaccagtggcagtgtcaagtcaaccacaacttctgcaaagccaccccggtacactcgtcactaaccagccatctggaaacgtggaatttatcagtgtccaatctccccccacagtgtccgggctgacaaaaaaccctgtcagtctgccctcactgcctaacccaacaaaaccaaataatgtgccgtccgtcccatcgccgtccattcagcgcaatcctacggccagcgccgcgcccctgggaactacactggccgtacaggctgtaccaaccgctcattccattgtccaggccacaaggacatccctcccaaccgtgggcccttccggactatactcaccttctacaaacagaggtccgatccagatgaagatcccgatctcagccttctctaccagttcagccgcagaacagaacagtaacactacccctcggattgaaaaccagaccaacaagacgatcgatgcatctgttagcaaaaaggcagccgattcaaccagccaatgtggtaaagccactggctccgattccagcggagtgatcgacttgacgatggacgacgaggagagcggggcatcacaggaccctaagaaacttaaccataccccagtgtcaacaatgtctagctctcaacccgtaagtcggcccctgcaaccaatccagcccgctccaccactacagccgtctggtgtgccaactagtgggccgtctcaaacaacaatccatctgctgcctaccgcgcctactaccgttaatgttacccaccgtcccgtgacccaagtcacgacacgattgccggtgccaagagcccccgccaatcaccaggtggtttacacgaccctaccggctccgcctgcacaagcccccctccgcggtacagtcatgcaggccccggctgtcagacaagtaaacccccagaattcggtcacagtgcgggtccctcagaccaccacatatgtggttaataacggactcacattgggcagtaccgggccacagcttacagtgcaccaccgtccaccacaggtgcataccgaaccacctagacccgtgcacccagctcccctgccagaggcccctcagccacagcgcctgccccccgaggctgcatccacttcactacctcagaagccacacctgaagctcgcccgtgtacagagccaaaatgggatcgttctgagctggtccgtgctggaggttgacagaagttgtgccaccgtagattcgtaccatttgtacgcctatcatgaggagccctccgccaccgttcccagtcaatggaaaaaaatcggggaggtcaaggcactgcctttgccaatggcctgcactttaacccagttcgtcagtgggtccaaatactactttgcagtccgggcaaaagatatctatggcaggttcggcccattctgtgacccccaatcgacagacgtaatctctagtactcagtcttcgtag

SEQ ID NO: 106994 - DNA, 510 bp, synthetic construct
  misc_feature 1..510: note = Description of Artificial Sequence: Synthetic coding sequence
  source 1..510: mol_type = other DNA
atggattcattagaggaaccccagaagaaagtctttaaagccaggaagaccatgagggtcagcgacagacagcagctcgaggcggtttataaggtcaaggaggaacttttgaaaaccgatgttaagctcctgaatgggaaccacgagaacggggatttagacccgactagccccttagaaaatatggattacatcaaagacaaggaggaagtgaatggaatcgaggaaatctgcttcgatcccgagggctccaaggccgaatggaaagagacaccatgcatcctctctgtcaacgttaagaacaagcaggatgacgatctgaactgcgagccactaagcccccacaatattacacccgaacctgtatccaagctgccagccgagccggtaagcggggaccctgcccctggggatctggatgctggcgatccagccagcggggtgctggcaagcggcgatagtacctcgggggatcccacttctagcgaacctagcagtagcgatgcttag

SEQ ID NO: 106995 - DNA, 99 bp, synthetic construct
  misc_feature 1..99: note = Description of Artificial Sequence: Synthetic coding sequence
  source 1..99: mol_type = other DNA
atggacagtctcgaggaacctcaaaagaaggtcttcaaagccaggaagacaatgagggtcagcgaccgccagcaactggaggcagtctataaggtgtag

SEQ ID NO: 106996 - DNA, 399 bp, synthetic construct
  misc_feature 1..399: note = Description of Artificial Sequence: Synthetic coding sequence
  source 1..399: mol_type = other DNA
atggactctttggaggagccccagaagaaggtgtttaaggcgcgaaagacaatgagggtgtccgaccggcagcaactggaggccgtgtacaaagtgaaggaggagcttctcaagacagacgttaagctgttaaacggcaaccacgaaaacggcgatctagacccaacctcccctttggagaatatggactatattaaagataaagaggaggtgaacggaattgaagagatatgctttgatcctgaggggagcaaagccgaatggaaagagacaccttgcatcctgagcgtcaatgtgaaaaacaaacaagatgacgatcttaactgcgagcccctgtcgccgcacaatattactccagaaccagtgagcaaactgcccgccgaaccagtcagcggctag

SEQ ID NO: 106997 - DNA, 531 bp, synthetic construct
  misc_feature 1..531: note = Description of Artificial Sequence: Synthetic coding sequence
  source 1..531: mol_type = other DNA
atggatagccttgaggagccccagaagaaggtgttcaaggctcgaaagacaatgcgcgtatccgatcggcaacagcttgaagctgtctacaaagtaaaggaggagcttctgaaaaccgatgttaagctgctcaacggcaaccacgaaaatggggacctggaccccaccagccctctggagaatatggactatattaaggacaaagaggaggtcaacgggatagaagagatctgctttgatcctgagggatccaaggccgagtggaaggagacaccgtgtattttatctgtgaacgtgaaaaacaaacaagacgacgatcttaattgtgaacctctttctcctcataatattaccccagaacccgtgtctaaacttccagcggaaccggtttcaggagatcccgcccccggcgatttagatgctggagaccctgcttctggggtgcttgcttcaggagactctaccagcggggatccaacctcctctgagccatcttcttctgatgctgcctcaggcgacgctacaagttag

SEQ ID NO: 106998 - DNA, 180 bp, synthetic construct
  misc_feature 1..180: note = Description of Artificial Sequence: Synthetic coding sequence
  source 1..180: mol_type = other DNA
atggattcattagaagagccccagaagaaagtcttcaaggctcggaagaccatgagggtttccgacaggcagcagcttgaggcagtatataaggttaaagaagagttgctgaaaactgatgttaagctgcttaatggaaatcacgagaacggagatttggatcccacttcgcccctctag

SEQ ID NO: 106999 - DNA, 3318 bp, synthetic construct
  misc_feature 1..3318: note = Description of Artificial Sequence: Synthetic coding sequence
  source 1..3318: mol_type = other DNA
atggatagcttggaggagccacagaaaaaggtcttcaaggccaggaagactatgcgggtcagcgatcggcaacagttggaagccgtgtacaaggtgaaggaagagttgctgaagaccgacgttaagttgctgaacggaaaccatgaaaacggagacctagaccccacctcacctctggagaacatggattacatcaaagataaagaagaagtgaacggaatcgaggagatctgctttgatcctgagggcagcaaggccgaatggaaagaaactccctgcatcctatctgttaatgttaaaaacaaacaggacgacgacctgaattgtgaacccctgtccccacacaatatcacacctgagcccgtctctaagctgccagccgaacctgtgtcgggagaccctgctcccggggacctcgacgccggcgacccagcatctggagtcctggcgagtggtgacagcacctctggcgacccgacttccagcgagccttccagcagtgatgcagcaagcggagacgctacctctggcgacgccccaagtggggacgtatcgcccggcgatgccacatcaggggatgctactgccgatgacctgagctctggagaccccacttctagtgaccctatcccaggggaaccagtgccagtagagccaattagtggggattgcgcagccgatgacattgcatcttctgagatcacttcagtagacttagcttccggggcacctgcatcaaccgatccagcaagtgacgatctggcgtccggtgatctgtcatcatcagaactggcatcagatgatctggccacgggggagcttgcctccgatgagctaaccagcgagagcaccttcgatagaacgttcgagccgaaatccgttcccgtgtgtgaacccgtacctgaaatcgacaacatagagccatcgtcgaacaaagacgatgatttcctcgaaaaaaatggcgcagatgaaaaactggagcagatccagtctaaagattccctggacgagaagaataaagccgataataacatagacgccaatgaggaaacgctggaaactgatgacaccaccatttgttcagataggcctccagagaatgagaagaaggttgaggaggacatcatcacggaactggccttgggagaagatgccatcagtagctccatggaaatcgatcagggggagaaaaacgaggatgagacaagcgctgatctggtagagactatcaacgagaatgttatcgaggacaacaagtctgagaatatcctggaaaacactgacagtatggaaactgacgagatcatcccaattttagaaaaactcgcaccctccgaggacgagctaacatgtttctccaaaacctctttactgcctatcgatgagaccaatccagacctagaggaaaagatggaaagtagctttggatcaccatctaagcaggagtcttccgagtccctccctaaggaggctttcctggtcctgagcgacgaagaagacatctccggagagaaggatgaaagtgaggtgattagccagaatgaaacatgctctccggaggtcgaatccaacgaaaaagataataagccagaagaggaagagcaggtgattcatgaggacgatgaacggccttcggaaaagaacgagtttagccgtaggaaacgctctaaatctgaagatatggacaatgtgcaatccaagaggagacgttacatggaggaggagtatgaggccgagttccaagtcaagattactgcaaaaggcgatataaatcagaaattacaaaaagtgatccaatggctgctcgaggaaaaactttgcgctcttcagtgtgccgtgttcgataagacactggcagaactcaagacacgggtggagaagatcgagtgcaacaagaggcacaagaccgttcttaccgagttacaggctaagattgctagactaacaaagcgttttgaggctgccaaagaagatttaaagaaaaggcacgaacaccctccgaatccacccgttagtccaggcaagactgtgaacgacgtcaactctaacaataacatgtcctacaggaacgccggtaccgtgaggcaaatgctggagtctaaaagaaatgtgagtgaatccgcccctccttccttccaaacccccgtgaataccgtcagctcaacaaacttggttaccccccccgcggtggtcagcagtcagcctaagcttcagactccagtgacctcgggctccctgactgctacctcagttctgccagcacccaatacagccacagtagtcgccactactcaagtgccgtcgggcaatcctcagcccaccatttctctgcaacccttacccgttatcctgcacgtgcccgtcgctgtcagcagccagcctcaactgctgcagtcacaccctgggaccctcgtgaccaatcagccatcaggaaatgtggagttcatttctgtgcagagtccccctaccgtctcagggctgacaaagaaccctgtgtccctgccatctctgccgaacccgaccaagcctaataacgtaccctccgtgccgagcccatccattcagcggaaccccacggcatccgccgccccactgggcacaacactggcagtgcaggcagtgccgacagcccactccatagtgcaggctacacggacgagcttgcccaccgtagggccgtccgggctgtattcacccagcacgaaccggggccctatccagatgaagatccctatttccgccttcagtacttccagcgctgccgaacaaaatagcaacactaccccgcgaatagagaatcagaccaacaagaccatcgatgcctcggtatccaagaaggctgcggacagcacctctcagtgtggtaaggctaccggaagcgacagtagtggggtgatcgacctgaccatggacgatgaggagtctggcgcgtcccaagacccaaaaaagctgaaccacactcctgtgagtaccatgagttcatcccagccagtttcgagacccctgcaaccgatccagccagcacctcctctgcagccatcaggcgtgcccacttccggtccttcacagacgactatccacctccttcccactgcccccactacggttaatgtgactcatcggcctgtgacccaggtgacaactcggctccccgtacctcgggctcctgctaaccaccaggtggtgtatacgaccctacctgctcctccagcccaagccccactcaggggaactgtcatgcaagccccagcagtgcgccaggttaaccctcagaatagcaagcggttcttcttgtacatggctccacggtatatgtag

SEQ ID NO: 107000 - DNA, 3837 bp, synthetic construct
  misc_feature 1..3837: note = Description of Artificial Sequence: Synthetic coding sequence
  source 1..3837: mol_type = other DNA
atgcatcaggaccagagattcaggatggacagcttagaagagccgcagaagaaagtttttaaggccagaaaaactatgagggtatctgaccgacagcagctggaagctgtgtacaaagttaaggaggaactgcttaaaactgacgtcaagttgctgaacggaaaccacgagaacggagatctcgatcccacctctccactcgagaacatggattatatcaaggataaagaagaggtgaatggtatcgaagagatttgtttcgatcctgagggctcaaaagcggagtggaaagagacaccatgcattctttcagtgaacgtgaagaacaagcaggatgacgacctaaattgcgagcccctgagtccacataacattactccggaacccgtatctaagctccccgctgagcccgtgtcaggagatcctgcaccaggagatctagatgctggagatcccgcttccggagtcctggcttctggtgatagcacctcaggcgatccgaccagctccgaaccgtcaagctctgatgcagcttcaggtgatgccacgtccggggatgcgccttcgggagatgttagccccggggacgctaccagcggcgacgccaccgcagatgatttgtcatctggcgatcctacatcctctgatcccattccaggggaacccgtgcccgtcgagccaatctcaggggattgtgccgcagacgatatcgccagttccgagattacatcagtcgacctcgccagtggggcgcctgcctccacagaccctgcctctgatgacctcgcctccggcgatttaagctcctcggagctggccagtgatgacctggcaacaggcgagttagcatccgatgagctcaccagcgaaagtaccttcgatagaacattcgaaccaaagtctgtgcctgtttgcgagccggtgcctgagatcgataatatagagcctagttctaacaaggatgacgatttcttggaaaagaatggcgcggacgagaaactggagcagattcaatccaaggattccctcgacgagaaaaataaggccgacaacaatattgatgctaacgaggagactttggagaccgatgatacgacaatttgctccgatcggcctcctgagaatgaaaagaaggtggaagaggacattattactgagttagcccttggcgaagacgccataagctcctccatggaaattgaccagggagaaaaaaatgaggacgagacctctgccgacttagtggaaacaattaacgagaacgtaatcgaggacaataagagcgagaacatcctggagaacactgacagcatggagacagacgaaattataccaatcctggaaaaacttgcaccatccgaagatgagttgacatgtttttctaaaaccagtcttctgcctattgacgaaacaaatccagatctggaggagaaaatggagtcatcctttggtagcccatcgaagcaggaaagctcagagagcctacctaaggaggctttcctggtgttgtcagatgaggaggacatctcaggcgaaaaggatgaaagtgaggtgatatctcagaacgagacctgctcccctgctgaagttgaatccaacgagaaagacaataagcccgaagaggaggagcaagtcatccatgaagacgatgagcggcctagcgaaaaaaatgagttttcacgaagaaaacgctctaaaagtgaggacatggacaacgttcaaagcaaaagacgccggtacatggaggaagagtatgaagcggaatttcaggtcaagataactgctaagggcgatattaatcaaaagctgcaaaaagtgatacagtggcttctggaagaaaagctgtgcgcccttcagtgtgctgtctttgataagaccctggccgagttgaagacccgcgtggaaaagattgaatgtaacaagaggcacaagacagtgctgaccgagctgcaggcaaaaattgcccgcttgacaaagagatttgaggcggccaaagaagaccttaagaaacgccacgaacatccaccaaacccaccggttagtcccgggaagaccgtgaacgacgtgaacagtaacaacaatatgtcttaccgcaatgccgggacggtccgccaaatgcttgagtctaaacgtaatgtgagtgaatcagcccctccctctttccagacgcccgtgaataccgtctcgtccaccaaccttgtaacaccccccgcagttgtgagctcccaaccaaagctgcagaccccagtgacaagtggctccctcacagcgacgtccgtgctccccgcacccaacacggccacggtagtagcaacaactcaggtccccagtggaaatcctcagccaacaataagtctccagccgctgcccgtgatcctccatgttccggtagcggtctcaagccagccccagctgctgcagagccacccagggactctggtaacaaatcagccttctgggaacgtggagttcatctccgtgcaatcaccacctactgtgtcagggctgactaagaaccctgtgagcctcccgagtttgccgaacccaacgaagccaaacaacgtgccgagcgttcccagcccctccattcagcgcaaccctactgcatccgcagccccgctgggaacaactctggcagtgcaggcagtgccaaccgctcactccatcgtacaagccaccagaacaagcctcccgaccgtgggacccagtgggctttatagtccctccactaatagaggccccatccagatgaagattccaatcagtgcattcagtacttccagtgccgcggagcagaattcaaacacaacgccaaggattgaaaaccagacgaataagaccatcgatgcttctgtaagcaagaaggcggctgattcaacatcccagtgtggcaaggccacgggcagcgactcttccggtgtcatagacttaaccatggacgatgaggagagtggcgcctctcaggatcccaagaagttaaatcacaccccggtgtccaccatgtcctcttcccagccagtctcacggcctcttcagccaatacagcctgccccaccgttgcaaccgagcggcgtgcctacatccggaccatcccaaacaactattcatctccttcctactgccccgactaccgtaaacgtgacgcaccggcctgtcacccaggtgactacccggcttccagtaccgcgtgcccccgccaaccaccaagtcgtgtatacaaccctgccagctcctcctgcacaggcgcctctgcgggggactgttatgcaggccccagccgtcagacaggtgaatccgcagaattcagtcacagtcagagttccccagacaaccacctacgttgtcaataacggacttacattggggagcaccggcccccagcttactgtgcatcacagacctccacaggtccacaccgaacctccccgccctgtccatcccgcaccgctgccggaagccccccaaccgcagagactccctcctgaggctgcctctacttccctcccccagaagccccacctcaaattggctcgtgtgcagagccaaaatgggattgtgctgtcttggtcagtgctcgaggttgataggtcctgtgccaccgttgactcctatcacctctacgcttatcacgaagagccgtcagcaacggtaccttctcagtggaaaaagattggggaagtcaaagcactaccgctccccatggcgtgtacactgactcagtttgtctctggcagcaagtactacttcgctgtgagggcaaaggatatctatgggaggttcggccctttttgtgaccctcagtccaccgacgtgatttctagcacacagtccagttag

SEQ ID NO: 107001 - DNA, 510 bp, synthetic construct
  misc_feature 1..510: note = Description of Artificial Sequence: Synthetic coding sequence
  source 1..510: mol_type = other DNA
atggacagtctcgaagagccccaaaagaaggtgtttaaggcgaggaaaactatgagagtctccgatcgccagcagcttgaggcggtctacaaagtgaaggaggaactactcaagacagatgtcaagttgctcaacggcaatcacgagaatggtgacctggaccccaccagcccgctcgaaaatatggactacattaaggataaagaagaggtgaatggcatcgaagaaatttgcttcgatcctgaaggaagcaaagcagagtggaaggaaaccccatgtatcctcagcgtgaacgtcaaaaataaacaggacgatgacctcaattgtgaacctctttccccccataatatcacccccgaacctgtatcaaaactgccggccgaacctgtgtccggcgaccccgcccctggcgatcttgatgcaggggatccagcttcgggagtgctggctagcggggattcaactagcggtgatccgacctccagcgaaccctcttcttccgacgcttag

SEQ ID NO: 107002 - DNA, 1632 bp, synthetic construct
  misc_feature 1..1632: note = Description of Artificial Sequence: Synthetic coding sequence
  source 1..1632: mol_type = other DNA
atggcaagtccggatcggtccaagcgaaagatcttgaaggccaaaaaaactatgcccctatcctgccggaaacaggttgaaatgctcaacaagtcccggaatgtcgaggcccttaaaacagccatcggctccaacgtccccagcggcaaccagtctttctcgccatctgtaataacccgcactacggaaattactaagtgctctccctccgaaaacggagccagctcactggacagcaataaaaatagcatctccgagaaatctaaagtattcagtcagaattgtattaaaccagtagaggagatcgtgcattcggaaacaaaactggagcaagtagtgtgcagctaccaaaagccttccaggaccacagaaagtccctccagggtgtttacagaagaagcgaaggactcactcaatactagcgaaaatgacagcgagcaccagacaaacgtcacacgctctttatttgaacacgagggtgcctgtagcctcaagagttcttgttgccctccctccgtcttgtcaggcgtagtgcagatgccggaatccaccgtcaccagcacggtgggcgacaagaaaaccgatcaaatggtgttccatctggagactaattccaactcggaatcccatgacaagcggcagtctgacaatatattgtgttctgaggatagtgggtttgtgcctgttgagaagaccccgaacctggtgaacagcgtgacctccaataactgcgccgatgacattcttaagacggatgaatgctcccgaacctccatttccaactgcgagagtgctgactctacatggcagtctagtctggataccaacaacaacagtcattatcagaaaaagcgaatgttttcagagaatgaagaaaacgtgaaaagaatgaagacttcggagcagataaatgagaatatctgcgtgtcgctggagcgccagacagccttcttggagcaggtaagacatctgatccagcaggaaatctattccattaattacgagctgtttgacaagaagctaaaggagctcaatcagcggataggcaaaaccgagtgccgtaacaaacacgagggtatcgctgacaaactcctcgcaaaaatagccaagctccaacgacggattaagacagtcttactgtttcagagaaactgccttaaacctaacatgctcagcagcaatggggcctccaaggtggccaatagcgaggccatgatcctggataagaatcttgaatctgtcaacagccctatcgaaaaaagttcagtaaattacgagccgtctaatcccagcgagaaagggtccaagaagatcaatctgagcagtgaccagaataagtctgtcagcgaatctaataatgatgacgttatgctgattagcgtcgagagcccaaacttaaccactcctataacctccaatccaacagacacaagaaagatcacctctggaaacagcagcaattcccctaatgcagaggtcatgaaagtgcagtaccccccttggtcgcacattcgcaaactgctgcaaacacagaggaagcagccgcattggcacaagatgcagtctagattcctgtcaccactgagtacctgccacctctctcagaaccaccaacaccactatctgaactag

SEQ ID NO: 107003 - DNA, 2049 bp, synthetic construct
  misc_feature 1..2049: note = Description of Artificial Sequence: Synthetic coding sequence
  source 1..2049: mol_type = other DNA
atggcatcccccgacagaagtaaaaggaagatcctcaaggcgaaaaaaaccatgccactgagttgcagaaagcaggtagagatgttaaataagtcccgaaatgtggaggcactaaaaactgccattggcagcaatgtacccagcggaaaccaatcattttcgcctagcgtgatcacgagaactacagagattacaaagtgtagcccctctgagaacggggccagtagtctggattccaacaaaaattcaatttccgagaaatccaaagtattcagccagaattgtataaagccggttgaggagatcgtgcacagtgagaccaagttagagcaggtcgtttgtagctatcagaaacctagtcgtaccactgagtctccaagtcgcgtattcaccgaggaagccaaagactccctgaatacttctgagaacgactccgaacatcaaactaatgtgacccgctccctgttcgagcatgaaggcgcctgcagcctgaaatcaagctgctgtcccccgtctgtcctgtctggggttgtgcagatgccagagagcaccgtaaccagcaccgtgggcgataaaaaaactgatcagatggtctttcatcttgagaccaactcaaatagtgagagccatgataaacgacaaagcgacaacattctgtgttccgaggactccggatttgtgcctgttgagaaaacacctaacttagtcaactctgtaacctccaacaactgcgcagacgacattttgaaaactgacgaatgcagcagaacctccattagcaattgcgagagcgcagactctacatggcaatcttctctggatactaacaacaattctcactatcaaaaaaagaggatgttctcggagaacgaggaaaacgttaaaagaatgaagaccagcgagcaaattaacgagaacatctgtgtgtctctcgagcggcaaacagcttttcttgagcaggtcaggcacctgatccagcaggagatatacagtataaactacgagttattcgataagaaactcaaggagctgaatcaacgtattggtaagaccgaatgccgcaataagcacgaaggaatcgcagacaaactactggctaaaatagcgaagctccaacgccggatcaaaaccgtgcttctgttccagagaaactgtctgaagcccaatatgctcagttctaacggtgcaagtaaagtcgccaacagtgaagccatgatacttgataagaacctggagtctgtaaattcccctattgaaaagtccagtgtgaactacgaaccatcaaatccctcggagaaagggtctaaaaagattaatctttcgtcagatcagaacaaaagcgtgtctgaatccaacaacgacgacgtgatgctgatatcggtggagagccctaacctcactacccccattacttccaaccctaccgacactcgtaagattactagtggtaattcctccaacagccccaacgcggaggtaatggctgttcagaagaaactggacagtattatcgacctgaccaaggagggactgtctaactgtaatacggaaagccccgtatctcctctggagtcacattcaaaggctgcgtcaaattcaaaggaaacaactcctctggcccagaatgcagtccaggtgccagagtcatttgagcacctgcctccgttgccggagccaccagctccactacccgaactggtggataaaaccagagatacattgccaccacagaagcccgagctgaaagtcaagcgagtcttccgaccaaacggaatcgctttgacgtggaatatcaccaaaattaaccccaagtgcgcaccagtggagtcttaccatctgttcctgtgccacgagaatagcaataacaaactgatctggaagaagattggcgaaataaaggccctgcctctaccgatggcttgcacacttagccagtttcttgcatccaaccggtactacttcacagtgcagtccaaggacatcttcggaaggtatggccccttttgcgacatcaaatcaattccaggctttagtgagaatttgacatag

SEQ ID NO: 107004 - DNA, 1632 bp, synthetic construct
  misc_feature 1..1632: note = Description of Artificial Sequence: Synthetic coding sequence
  source 1..1632: mol_type = other DNA
atggcttctccagaccgttcgaagaggaagatcctcaaggccaaaaaaacgatgcctttgtcttgccgtaagcaagtggaaatgctgaataagtctagaaacgtggaagctctgaagaccgccatcggcagtaatgtccctagcggcaatcaatctttttcaccttctgtgattaccagaaccacagaaattaccaagtgctccccctccgaaaatggcgcttcctctcttgattctaataagaactccatttctgagaagagtaaggttttcagccaaaactgtatcaaacctgtcgaagagatcgtgcatagcgaaactaaattggagcaggtcgtgtgttcttatcagaagccttctagaactaccgagagtccctctcgtgtgttcacagaggaagccaaagatagcttgaacacctccgagaatgattctgaacaccagactaacgtgaccaggtctctgttcgagcacgaaggggcctgttccctaaagtcgtcatgttgtcccccctctgtgctctccggggtggtacagatgcctgagtctacggtgaccagtacggtgggggataaaaagaccgatcagatggtgttccacctggaaacaaattcgaactccgaaagccacgacaagcgacagtcggataacatcctgtgttccgaagacagtgggtttgttccagtcgagaagacccctaacctcgtaaatagcgttacctccaacaattgcgctgatgacatcctgaagaccgacgagtgttcccgaacgagcatctcaaattgcgagtcagccgatagcacgtggcagagttccctggacactaataacaactcccactatcagaaaaaaagaatgttttccgaaaatgaggaaaatgttaagaggatgaagaccagcgagcagattaatgaaaacatctgcgtgtcactagaacgacagaccgccttcctggagcaggtgagacatctgatccaacaggagatttactcaattaactacgaactgtttgataagaagctgaaggagttgaatcaacgcataggtaaaactgagtgtaggaataagcacgaggggatcgctgataaactgctggctaaaatcgctaaactgcagcggcgcatcaagaccgtgcttctgttccagcgaaattgcctaaagcccaacatgctctcatccaatggtgcttcaaaggttgccaatagcgaggctatgattcttgacaaaaacttggaatctgttaattcccctattgagaaatcatctgtgaactacgaaccatctaaccccagcgaaaaaggttccaagaagattaatctatcatcagaccaaaataaaagcgtaagtgaatccaataatgatgacgttatgctgatctccgttgagtcccctaacctgaccacacctataacctccaaccccacagatacccggaagattacgagcggcaactcgagcaatagtcccaatgcagaggtgatgaaggtgcagtacccaccttggtcccatattcggaagctgctgcagacccagaggaagcaaccccattggcacaagatgcagagcagattcctcagcccgctatctacctgccaccttagccaaaatcatcagcaccattatttgaattag

SEQ ID NO: 107005 - DNA, 2049 bp, synthetic construct
  misc_feature 1..2049: note = Description of Artificial Sequence: Synthetic coding sequence
  source 1..2049: mol_type = other DNA
atggcgtcgcccgacaggtccaagagaaaaatcttgaaggccaagaaaaccatgccactgtcctgccgaaaacaagtggaaatgctgaacaagtccaggaatgttgaggcgctgaagacagctatcggctctaatgttccatccggaaatcagtccttttctccctcggtgattacacggaccaccgagattactaaatgtagtccttccgagaatggcgcttccagccttgacagcaacaaaaactcgataagtgaaaaatctaaagttttctcgcagaattgtatcaaacctgtggaagaaatcgttcactccgagaccaagctggagcaggtggtgtgctcataccagaaaccctcgcgcacgacagaaagccctagccgcgtttttaccgaagaagctaaggacagtctgaatacaagcgaaaacgactctgagcaccagaccaatgtgacccgctccctgttcgagcatgaaggcgcctgttcactcaagtcttcttgttgccctccttctgttctctctggagtagtccagatgcctgagtctaccgtgactagtactgtgggtgacaagaagaccgatcaaatggtgttccacctcgaaacaaactctaactcggagtcccatgacaaaaggcagagcgacaacatcctctgtagtgaagattctggcttcgtcccagtcgagaagaccccgaatcttgtgaactccgtcacctccaataactgtgcggacgacattctcaagacagacgagtgctccaggacgtccatatcgaactgcgaatccgcggatagcacttggcagagctccttagacacaaacaataactcccactaccagaagaaaagaatgttttcagagaacgaagaaaacgtgaagagaatgaaaaccagcgagcagatcaacgagaacatctgtgtttcgctagagcgtcagaccgcattcctcgagcaggtgcgccacctcattcaacaggagatatattccatcaactacgagctgttcgataaaaagctgaaagagttaaatcagcggattggcaaaactgaatgtcggaataaacacgaggggattgcagataagctgctagccaagatcgccaagctgcagaggcgcataaaaacggttctccttttccagagaaattgcctcaagcccaacatgttgtctagcaacggagcttctaaggttgccaactccgaagcaatgatactggataagaatctggagtccgttaattcacctattgagaagtcaagcgtgaattacgagccctcgaacccctccgagaagggatctaaaaagatcaatctgagcagcgaccagaacaagtctgtatctgagtccaataatgatgatgttatgttaattagcgtggagagccccaacttaaccactcctataacctccaacccgactgatacacggaaaataaccagcggaaatagcagtaattcccccaacgccgaagtgatggctgtccagaagaaactcgacagcatcattgatttgaccaaggagggactcagcaattgcaacacagaaagccccgtgagtcccttggaatcccattcaaaggccgcttctaactctaaggaaactaccccccttgcccaaaacgcagtacaggtacctgaaagtttcgagcacctgcctcccctacccgaaccccccgctcccttacccgaactggtggacaaaactcgggatacccttcccccccaaaagcccgagctcaaagtcaaaagggtgtttcgacctaatggcatagctttgacctggaacattacgaagatcaatcccaagtgtgcccctgtggaatcctaccatctcttcctctgtcatgaaaatagtaataacaaactcatctggaagaagataggcgaaatcaaagccctgcccctgcccatggcttgcactctctctcagtttctggcatctaaccgctactacttcacagtgcagtccaaggacattttcgggagatacggcccgttttgtgacatcaaatcaatccctggcttttcggagaatctaacctag

SEQ ID NO: 107006 - DNA, 1278 bp, synthetic construct
  misc_feature 1..1278: note = Description of Artificial Sequence: Synthetic coding sequence
  source 1..1278: mol_type = other DNA
atggcctcccctgaccggagtaaaaggaagattcttaaagcaaagaaaaccatgcctctgtcttgcagaaaacaggtggagatgctcaacaagagtagaaacgtggaggctctgaagaccgctatcgggtccaacgttcccagcggaaaccagagctttagccctagcgtgatcacccggacgaccgaaatcactaaatgctccccatctgagaatggcgccagtagtctcgacagcaacaagaactccatcagcgaaaaatccaaggtgttttcacaaaactgtataaaaccagtggaagaaatagtacattccgaaacaaaattggaacaggtggtctgttcttatcaaaagccgagcagaacaaccgagagccccagtagagtgttcacggaggaggccaaggactcacttaatactagcgaaaacgattccgaacaccagactaacgttactcggtctctgtttgagcacgaaggcgcctgctctttaaaaagcagctgttgccccccatcagtgctcagcggcgtggtacagatgcccgagtctactgtgacctccaccgtgggcgacaagaaaaccgatcagatggtatttcacctggagacaaatagcaattccgagtcccacgataaacggcaatctgacaacatcctctgcagcgaggattccgggtttgtgccggtagaaaaaactcccaacctggtgaatagcgttactagtaacaattgcgccgatgacatcctgaaaacagatgaatgtagccgtacatcaattagcaattgtgagtctgcagactcgacctggcagtcctcactggacacaaataataacagtcactaccagaaaaaacgcatgttttccgagaatgaagagaatgtaaagcgtatgaagacatctgagcagataaatgaaaacatctgtgtttccttagagcgccagaccgcctttctggaacaggtacgacacctgatccagcaagagatctacagcattaattacgaactgtttgacaagaagctcaaagaactaaatcagcgcataggtaaaacggagtgcagaaacaaacacgaggggattgccgacaagctcctcgccaagatcgctaaactccagcgaaggatcaaaactgttctactgttccagaggaactgtctgaaacccaatatgcttagctcaaacggcgcctctaagattccagagaaactccatcaggagatcttggccattctgcccatgttgaaattatggctctaccgccgtaacttgatcctctag

SEQ ID NO: 107007 - DNA, 681 bp, synthetic construct
  misc_feature 1..681: note = Description of Artificial Sequence: Synthetic coding sequence
  source 1..681: mol_type = other DNA
atgctgattagcgttgagagcccgaatctgactactccaattacctcaaacccgaccgatacccggaaaataacctccggcaacagttccaactctcccaacgctgaagtgatggctgttcagaagaaacttgactccatcatcgacttgaccaaagaaggactgtcaaactgcaacaccgagagtccggtgtctccattggaaagccattcaaaggccgcgtccaactctaaagaaacaacaccgttagcccagaatgccgtgcaagtgccagagagcttcgagcatctgccgcctctgccggagcctccagctcccttgcctgaactggtggacaaaacccgggacacgctcccaccgcagaagcccgagctcaaagtgaagagagtcttcagacctaatggaatagctttgacatggaatatcactaaaattaaccctaaatgcgcgccagttgaaagttaccacctgtttctatgtcatgaaaattcaaacaacaagctcatttggaaaaaaatcggcgaaatcaaggccttgcctcttcctatggcctgtactctctctcagttcctggcgtcaaatagatactacttcactgtgcagtcaaaagatatctttggcaggtacgggccattttgtgacattaagtctattcccggctttagtgagaacttgacatag

SEQ ID NO: 107008 - DNA, 714 bp, synthetic construct
  misc_feature 1..714: note = Description of Artificial Sequence: Synthetic coding sequence
  source 1..714: mol_type = other DNA
atgacatccgagatcacatatgcagaagtccgtttcaaaaacgagttcaagagtagcggaattaacaccgctagcagtgctgctagcaaggaacgaaccgcccctcataaatccaacacagggttccctaagctcttgtgcgctagtcttctcatcttcttcctgctgctggccattagtttcttcatagcattcgtaatcttctttcagaagtattcccagctgttggaaaagaagactacaaaggaattggtccatactacccttgaatgcgtgaaaaaaaatatgccagtagaagagactgcatggagctgctgccccaaaaattggaagtcattcagcagtaactgctatttcatctcaaccgagtctgccagttggcaggactccgagaaagattgcgcacgaatggaagcacacttgctcgtgatcaacacccaggaagaacaggactttatcttccaaaacctccaggaagagagtgcttactttgttggattaagcgatcccgaggggcagaggcactggcaatgggtggaccagaccccctacaacgagagtagtactttctggcacccgcgggagcctagtgaccctaacgagagatgcgtggtcctgaattttcggaagagtcccaagcgatgggggtggaacgatgtgaactgcttgggtcctcagcgatccgtttgtgagatgatgaagatccacctttag

SEQ ID NO: 107009 - DNA, 2469 bp, synthetic construct
  misc_feature 1..2469: note = Description of Artificial Sequence: Synthetic coding sequence
  source 1..2469: mol_type = other DNA
atggaagaagaggaggaagccatcggactgctggataaggtcctggaggacgaagatgtttttttactcgaggaatgcgagctcggtacaccaacaagccctggaagtggcagtccgtttttagtggccgttaaagtggaagccggaaaaggcctggagatgaggaaactagttctttccgggtttctggctagcgaggagatctacattaaccagcttgaggcgttgctgctgcccatgaaacctctgaaagccactgccacgacttctcagccggtcctgactatccagcaaatcgaaacgattttttataagatacaagatatctacgaaatccacaaggagttctacgacaacctgtgtccaaaagtgcagcagtgggactcccaggtaaccatgggtcatctgttccagaagctggcctcccagttgggcgtctacaaagcatttgtcgataactacaaagtcgcccttgagacagccgagaagtgcagtcagtcgaataaccaatttcagaagatctccgaagagctgaaagtgaaaggccctaaagatagtaaagatagccatactagcgttactatggaggccttactgtataagccaattgacagagttacacgcagtaccttggtgctccacgatctgctcaaacacacaccagttgaccatcctgattatcccctactgcaggacgccctgcgtatttcccaaaatttcctcagtagcatcaacgaggatatcgatccacgtcggacagcagtcaccaccccgaagggcgaaacccggcagttggtgaaggacgggtttctggtcgaggtgagtgaatcgtccaggaagctgcgccacgtcttcctgtttaccgatgtccttctctgtgcaaaactgaagaaaacctctgctggaaaacaccaacagtatgattgcaagtggtacattccactagctgatctggtgtttcccagccccgaggagagcgaagccagccctcaggtgcaccccttccccgaccatgaactcgaggatatgaaaatgaagatttctgctctgaaatcggagattcagaaggagaaggcgaataaggggcagagcagggccattgaacggctgaagaagaagatgtttgagaatgaatttctactcctcctaaacagcccaacgataccctttaggatccacaataggaatgggaagtcatacttgtttcttttatcttctgactacgagagatctgagtggagggaggctatccagaagttgcagaaaaaggatctgcaggcctttgtgctcagctcggtggagcttcaggtccttaccggttcctgttttaagctgcgaacagttcataatattccagtcacatcaaacaaggatgatgatgaaagccccgggctctacggcttcctgcacgtgattgttcactctgccaagggttttaagcagtccgctaatttatactgcaccctggaggtcgatagctttgggtactttgtctctaaagccaaaactagagttttcagggacactgccgagcctaaatgggacgaagaattcgagattgagttagagggttcccagagtctgcggattttgtgctatgagaaatgctatgataagacgaaggtgaataaagacaataacgagatcgtggataagatcatgggcaaaggccagattcagctggaccctcagactgtggagacaaagaattggcatacagacgttatagagatgaatggcataaaagtggaattcagcatgaagttcacctccagggatatgagcctgaagaggaccccaagtaagaaacagacaggcgtgttcggcgtgaaaatatccgttgtcactaagcgggagagaagtaaagttccatacatagtgagacagtgtgtagaagaagtggagaagagggggattgaggaggtcgggatttacaggatcagcggagtggccactgacatccaggctctcaaggccgtgttcgatgctaacaacaaggatatactgctcatgctttcagatatggatatcaatgcaatcgccggcactcttaagttgtacttcagagaactaccagagcccctgctaaccgatcgactgtatcctgcgttcatggagggaatcgccctgtcggaccccgcagccaaagagaactgcatgatgcaccttcttcggagcctaccagacccgaatctgatcacctttctgtttctgctggagcatttgaagagagtcgccgagaaagagcccatcaacaagatgagccttcacaacctggccaccgtgttcggtcccactctactgcgcccctcagaagtggagtcgaaggcccatctcacctccgcagccgacatctggtcgcatgacgttatggcgcaggtgcaggtcctgctatattatctgcagcatccccctataagttttgcagagctcaaaagaaacactttatacttcagtacagacgtttag

SEQ ID NO: 107010 - DNA, 2580 bp, synthetic construct
  misc_feature 1..2580: note = Description of Artificial Sequence: Synthetic coding sequence
  source 1..2580: mol_type = other DNA
atggaacctctctctcacaggggccttcccaggctgagctggattgacacgctctacagcaactttagctacggcacagacgagtacgatggagaagggaacgaggaacagaaagggccacctgaaggatcagagacaatgccatacattgacgaaagccccacaatgtcccctcagctcagtgcccggtctcagggggggggggatggggtcagtcccacaccgccagagggactggccccgggtgtggaggccggtaagggactcgagatgcgcaaacttgtactgtcaggcttcctagcttccgaggagatttacattaatcagctggaggcgttgctgctccccatgaagcctttaaaggctaccgccacaacttctcaaccagttcttactattcagcagatcgagaccatcttctataagatccaggatatctatgagatccacaaggagttctatgacaacctgtgcccaaaggttcagcagtgggactcacaggtgactatgggccacctctttcaaaaacttgctagtcagctgggggtgtataaggcctttgtggacaattacaaggtcgccctggaaacagctgagaaatgtagccagtcaaataatcagtttcagaaaatttctgaagagctgaaggtaaaaggccctaaggattctaaagactctcatactagcgtgaccatggaagctttgctgtataagcccatagatagggtgacccggtccacccttgtcttgcatgatctgcttaagcataccccggtggatcacccggattaccccctactgcaggatgcgcttcggatcagtcagaatttcctttccagcattaacgaagacatagaccctagacgtaccgccgtaactacgcctaagggggagacccgtcagctcgttaaggacggatttctggtcgaagtgagcgagagctcacgaaagctcaggcacgtcttcttattcacagacgtgttactgtgtgccaagctgaagaaaacatcagccggcaaacatcaacaatatgattgcaaatggtacataccccttgcagacctggtctttccctcacccgaggagagcgaagcaagtccgcaagtccacccgttccctgaccatgagctcgaggacatgaagatgaaaattagcgccctgaagagcgaaatccaaaaagagaaggctaacaaaggtcaaagtcgtgccattgagcggctgaagaagaagatgttcgagaacgaattcttgctgctcctcaacagcccaacgatccccttccgtatccacaacagaaatggcaagagctacctgttcctgcttagctccgactacgagcggtcagagtggcgcgaagctatccaaaaattacagaagaaggatctccaggcattcgtgttgtcatcagttgaattgcaggtgctgactgggtcttgttttaaactaaggaccgtacacaatatacctgttactagcaacaaggatgacgacgaaagtcctggactgtacgggtttctgcatgtgattgtgcatagcgctaagggctttaagcagtccgcgaacctgtattgtacgctggaagtggattcctttggatatttcgtgtcaaaggctaagactcgggtttttcgcgatacagccgaaccaaagtgggatgaagagtttgagatcgagctcgagggtagccagagtcttaggatcctctgctacgagaaatgctatgataaaactaaagtaaataaggataataatgagattgtcgacaagattatggggaagggccagatacaactggacccccagacagtagagaccaaaaattggcacactgacgttatcgagatgaatggaattaaggtggaatttagcatgaaattcacaagccgggacatgtcattaaaaaggactcctagtaagaagcagaccggggtgtttggggtcaaaatctccgtcgttacaaagagagaacggtccaaggttccctatatcgtgaggcagtgtgtggaagaggtcgaaaagcgagggattgaggaagtaggtatttatagaatctctggggttgctaccgacatccaagcgttaaaggccgtctttgatgccaataataaagatatattactgatgttatctgatatggatatcaacgctatcgccggaacattaaagttatatttcagggagctgccagagccactcttgaccgataggttatatcctgcctttatggaaggcatcgccttgtctgacccggctgcaaaagaaaattgcatgatgcatttactgcggtctctgccagatcccaatctcatcacattcctattcctcctggaacacctgaagcgagtggctgaaaaagaacctattaacaagatgtccctgcataatctagccactgtcttcggacctactctgctccggccttctgaagtggagagcaaggctcaccttacaagcgccgctgatatctggagccacgatgttatggcgcaggtgcaggtcctcctttactacttacagcacccaccaataagcttcgccgagctgaaacgcaacaccctgtacttcagcacagacgtgtag

SEQ ID NO: 107011 - DNA, 1092 bp, synthetic construct
  misc_feature 1..1092: note = Description of Artificial Sequence: Synthetic coding sequence
  source 1..1092: mol_type = other DNA
atgaagcctcttaaggccaccgccaccacaagccaaccagttctgacgatacaacagatagagacaatcttctacaagatccaagacatctacgagatccataaagagttttatgataacctgtgcccaaaggtccagcaatgggatagccaagttactatggggcacctcttccagaaactggccagccagctgggcgtatacaaggcctttgtcgacaactacaaggtcgccctcgagacggccgaaaagtgcagtcagtctaacaatcagtttcagaaaatctccgaggagcttaaggttaaaggcccaaaagactcaaaggatagccatacttctgtgactatggaggcccttctgtacaagcccatcgacagagttacgagatctacactggtcctccatgatctgctgaaacacacacctgtggatcacccagattacccactacttcaggatgcactgaggatctcccaaaattttctcagctccatcaacgaggatatcgatccacgcaggacagccgtgacaacgcccaagggcgagacccgccagcttgtaaaggacgggttcctggttgaggtcagcgaaagtagccgaaaactgagacatgtgtttcttttcactgacgtgctgctttgcgcaaaactcaagaagacctccgccgggaagcaccaacaatacgactgcaagtggtatattccccttgctgacttggtgttcccaagcccagaggagagcgaagctagtccacaagttcatccattcccagaccacgaactggaagatatgaagatgaagatcagcgccctgaagtccgagattcagaaagaagaagtggagaaacgcgggatagaggaggtgggaatttaccgcatctccggtgtggccacagacatccaagccttgaaggccgtgttcgacgcaaataataaagatattttgctgatgctctcagacatggatatcaacgccatcgctggcaccctgaaactttactttcgcgaattacccgagcctttgttaacggatcgacttagtccatgcccaacaccaactagttcaccaagctcatcttgctggaacacttag

SEQ ID NO: 107012 - DNA, 1926 bp, synthetic construct
  misc_feature 1..1926: note = Description of Artificial Sequence: Synthetic coding sequence
  source 1..1926: mol_type = other DNA
atggagatcctcctgatcatcagattctgctgcaactgtacatatgcattactgtacaaacccatagatagagttacaagaagcacactggtgctgcatgaccttctaaaacacacacccgtggaccaccccgactatccactgcttcaagatgctctccgcataagccaaaactttctgtcttcgattaatgaagatattgatccacgccgcacagccgtaacaacccccaaaggtgaaacccgacagctggtgaaggacgggttcttggtggaagtcagtgaaagcagcagaaaattgagacacgtattcctgttcacagatgtgctgctatgcgctaagctgaagaaaacctctgctggcaaacatcagcagtatgactgtaagtggtatatcccattggctgatctcgtctttcccagtcccgaggaaagtgaggcttcacctcaggtccacccgttcccagatcacgaactagaggatatgaaaatgaagatatcagcactgaaatccgaaatccagaaagagaaagctaacaagggacagtcacgtgccatagagcgtctgaaaaaaaagatgtttgagaatgaatttctcctgctgctcaatagcccgacaattccgttcaggattcacaatcgcaacgggaagagctacctgtttctgctctctagcgattacgaacgatcagagtggcgggaggcaattcagaagcttcagaagaaagacctccaagctttcgtgttgtcctccgttgagctccaggtcctcacaggtagctgctttaaactgaggactgtccacaacatccccgtgacttccaataaagacgacgatgagagtccaggcttatacgggtttctgcatgtgatcgtccactccgcaaaggggttcaagcagtccgctaacttgtactgcactctggaagtggatagctttggctactttgtgtccaaggcaaagaccagagtctttagagacactgcggaacctaaatgggacgaggaatttgagattgaactcgagggatcgcaatctctgagaattctttgctatgagaaatgttatgacaaaacaaaggttaataaggataacaacgaaatcgtagataaaatcatggggaaggggcagattcagctggaccctcagaccgtggagacgaaaaactggcacacagacgtgattgagatgaacgggatcaaggtcgagttttcaatgaaattcacatccagagatatgtccttaaaaagaactccgtccaagaagcagaccggggtttttggtgtaaagatctctgtagtgaccaaaagggaacgttctaaagtgccatacatcgtgaggcagtgtgtggaggaagtggagaaacgaggtatagaggaggtcggcatctataggatatcaggggtggcaaccgacatacaggccctcaaggcagtgtttgacgcaaacaacaaggatattctgctgatgctgtccgatatggacattaacgctatcgcaggcactttgaagctctactttcgggaactgcccgagcctcttttgactgatcggctgtatcctgccttcatggagggcattgccctgtctgatcccgccgctaaagagaattgtatgatgcacttactgaggtccctcccggacccaaatctaattacctttctcttcttgctggagcatctaaaacgcgtggcagaaaaagagccaattaataaaatgagcctccacaaccttgctacagtttttggcccgactttgctacgaccgtctgaagtcgaaagcaaagcgcatctgactagcgctgccgatatctggtcacacgacgtgatggctcaggtgcaggtcctgctgtactatttacaacacccgcctatttcctttgctgaactaaaacgcaatactctctacttttctactgacgtgtag

SEQ ID NO: 107013 - DNA, 933 bp, synthetic construct
  misc_feature 1..933: note = Description of Artificial Sequence: Synthetic coding sequence
  source 1..933: mol_type = other DNA
atgaccgatgtactgccgcaaccagactgtagtcctaaggctggaagagagcccctggctcttgaggaatctggctctaagcgcccccccaataccggggcacggctatgggggcgagtccggaataagctcctccgaaacaagctcgatccccagactgttgagacaaagaattggcatactgacgtgatcgaaatgaacgggatcaaggtggaattctctatgaaattcacctcccgcgatatgagcctgaaacggacaccttccaagaaacagactggcgtgttcggcgttaagatttccgtggtgaccaagcgagaacgatctaaagtgccgtacattgtaagacaatgcgtagaggaagtagagaagcgtggcatagaggaggtcggaatctatcggattagcggcgtagcaacagacattcaggctctgaaagctgtatttgatgctaataacaaagatatcttgcttatgctttctgacatggatataaacgcaatcgccggcaccctcaagctgtatttcagggaacttccagaacccctgcttacagataggctgtaccccgcattcatggaaggcattgctctgtccgacccagccgcaaaagaaaactgcatgatgcatctcctgaggtccctcccagacccgaatttgatcacattcctgtttctcctggagcatttgaaaagagtggccgagaaggaacctattaataagatgtccctgcataatcttgctaccgtcttcgggccaacacttctgaggccctccgaggtcgagtctaaagctcacctcacatctgctgcagacatctggtcccacgatgtgatggcacaggtccaggtgctcctctactaccttcagcatccgccaatttcatttgcggagctgaaacggaataccctgtacttttccaccgacgtctag

SEQ ID NO: 107014 - DNA, 2442 bp, synthetic construct
  misc_feature 1..2442: note = Description of Artificial Sequence: Synthetic coding sequence
  source 1..2442: mol_type = other DNA
atgccgtacatcgacgaaagcccgaccatgtccccccagctgagtgcgagatcacaaggcggcggtgacggagtctcccctacacctcctgagggtctggcacctggcgttgaggctggaaagggactggaaatgagaaagctggtgctaagcgggttcctcgcttccgaggagatatacattaaccagctggaggctctgctccttcctatgaaaccattgaaggctactgcgacaactagtcagcccgtgctgacaattcaacaaatcgaaacaatcttctacaaaattcaggatatttatgaaatccacaaggaattctacgataacctgtgccctaaggtccagcagtgggacagccaagtgactatgggtcacctttttcagaagcttgcatcccagctgggagtgtataaagccttcgtggataattataaggtggcactggaaaccgccgagaaatgtagtcagtctaacaaccagttccagaaaatctccgaggaactgaaggtcaaaggcccaaaagatagcaaggattcacatacgagtgtaaccatggaggcacttctgtataaaccgatcgatagggttacaagatccaccctcgtcctgcatgatttgctgaagcacacccctgtggaccatcccgactacccactgctccaagacgccctgagaattagtcagaatttcttgagctcaataaacgaggacatagatcctcgccgcaccgctgtgaccactcccaaaggagaaaccagacagctcgttaaggacggttttctggtggaggtcagtgaatcatcccgtaagctacggcatgtgtttctcttcaccgacgtgctactgtgtgcgaagctaaagaagacctccgccgggaagcatcaacagtatgattgtaagtggtatatccccctggcagacctagtctttccttcccccgaggagagcgaagcttcgccccaggtgcatccctttcccgaccatgaactcgaagatatgaagatgaagatctcagcgctgaagtctgagatccagaaagaaaaagcaaacaaaggccagagccgggccatcgaaagactgaagaagaagatgttcgagaatgaatttctcctgctacttaactctccgacaattccattcaggatccataatcgtaatggaaaatcttacctgttcctgctctcttccgattacgagcgctctgagtggcgggaggccattcagaaactacagaagaaggaccttcaggcctttgtgctctcctcggtggagctccaagtcctgacaggatcttgttttaaactgcgcacagtgcacaacattcctgtaaccagcaacaaagacgatgatgagtctcctggcctctacggctttctacatgtcattgtccacagcgcaaaggggtttaaacagtcggctaacctgtactgcacactcgaggtagattctttcggctatttcgtgtctaaggcgaagacccgagtcttccgcgataccgcagaacccaaatgggatgaggagtttgagatcgagcttgagggttctcaatccctgcgcattctttgttatgaaaaatgctatgacaagactaaggtgaacaaggacaataatgaaatagtggacaagatcatgggcaagggacagatacagcttgacccccagacagtggagactaagaactggcataccgacgtcatagaaatgaacgggatcaaggtggaattttccatgaagttcaccagtagggacatgagcctgaaacggactcccagtaaaaaacagactggcgtttttggggtgaagataagcgtggttacgaagcgggagaggagtaaagtcccatacatagtgagacagtgcgtcgaggaagtggagaagagggggatcgaggaggtcggaatatatagaattagtggcgtagctacagacatacaggccctgaaggccgtgtttgatgcgaataacaaggatattctcttgatgctgagtgacatggatattaatgccattgccggcacactgaagctgtattttcgagaactacccgaaccattattaacggaccgattgtaccctgcctttatggaaggaattgccctgagcgacccagcagctaaagagaactgcatgatgcatctcttgcgttctcttccggatcctaacctgatcacattcctgttccttctcgaacatctgaaacgagttgctgagaaagaaccaatcaataaaatgtcacttcataacctggccaccgtctttggacctactcttcttaggccgagcgaggtggaatcaaaagcccacttgacttccgcggctgatatctggtcacacgatgtcatggctcaggtccaggtactgctttattatctgcaacatcctccgatctcctttgccgagctgaagcgaaacacactctacttcagcactgatgtgtag

SEQ ID NO: 107015 - DNA, 1332 bp, synthetic construct
  misc_feature 1..1332: note = Description of Artificial Sequence: Synthetic coding sequence
  source 1..1332: mol_type = other DNA
atgttgacaaatggtaaggagcaggtgattaagtcatgcgtctcattgcctgagcttaatgcccaggtgttttgccatagcagcaacaacgtcactaaaacagagtgttgcttcacagacttctgcaataacatcacattgcatctgcccaccgccagccccaatgcccccaagctcggccctatggagctggctatcattataactgtgccagtatgtttgttgtccatcgcagctatgctgactgtgtgggcatgccaagggcgccagtgctcttacaggaaaaagaagcgccccaacgtggaggagccattgtccgaatgtaacctcgtcaatgccggtaaaaccctgaaagatctcatttatgatgtgaccgcctctggtagtggatctggtctccccctcctggtccagcggacaattgctcggacaattgttctccaagagatagtcgggaaaggaagattcggggaagtctggcacggccggtggtgcggagaagacgtggctgtcaagatcttcagttctcgcgatgagcggtcttggttccgcgaggctgagatctaccaaactgtcatgctgagacacgagaacatactgggctttatcgcggcggataataaagacaacgggacttggacgcagttgtggcttgtcagcgaataccatgagcagggctctctttacgactacctaaacaggaatatcgttacagtcgctggcatgatcaaacttgcactcagtatcgcgagcggcctggcacacctgcacatggagattgtgggtacccagggaaaacctgccatcgctcacagagacatcaagtcaaagaatatcctggtcaaaaagtgtgaaacatgcgcaatcgcagatctcggcctggccgtgaaacacgacagcattcttaacactattgacattcctcagaatcccaaagtcggaacaaaaaggtacatggcccccgagatgctggatgataccatgaatgtgaacatattcgagagttttaagagggctgatatctattcggtgggcctggtgtactgggagatagcccgcagatgctcggtaggaggtatcgtggaagagtatcagctgccttactatgatatggtcccgtccgatccttcgatcgaggaaatgcgcaaggttgtgtgtgaccaaaagtttagaccttccatccctaaccagtggcaatcatgcgaagcactgcgagtaatgggacgtattatgcgggaatgctggtatgctaacggggcagctaggctcactgcgctccgaatcaagaagactattagtcagctgtgtgtgaaggaggactgcaaagcttag

SEQ ID NO: 107016 - DNA, 1512 bp, synthetic construct
  misc_feature 1..1512: note = Description of Artificial Sequence: Synthetic coding sequence
  source 1..1512: mol_type = other DNA
atgactttaggttcccctaggaagggtctgctcatgctcctgatggctctggtgacccagggcgaccccgttaagccttcacgaggtccactggtgacatgtacgtgcgaatcgcctcattgcaaggggccaacctgtcgtggggcatggtgcaccgttgttctggtgcgcgaggaaggccggcatccacaggaacacaggggatgcggcaatctgcaccgcgagctatgccggggtagaccaaccgagtttgtgaaccactactgttgtgactctcacctctgtaatcataatgtgagtttggtcctagaggccacacaaccaccatccgaacaacccggcacagatggccagcttgccctcatcctgggacctgtgttggccctgctggctctggtagctctgggagtgctgggcctgtggcacgtacggcggagacaggagaaacagagagggcttcactcagagctgggggagtcttcgctgatactgaaagccagcgaacagggtgatagtatgctaggggatttgcttgatagcgattgtacaacagggtccggatccggcctgcctttcctagtgcagaggaccgtggctagacaggtggcactggtggagtgcgtggggaagggcagatacggagaggtgtggcgtgggctgtggcacggggagtccgtggcggtcaagattttctcatcgagagacgaacagtcatggttccgggaaaccgagatctataataccgtcctgctccgccacgataatatattgggtttcatcgcaagcgacatgacgtcccgcaattctagcactcaattgtggctgattacccattaccacgaacacggatctttgtacgattttctccagcgacagacactcgaaccacatctagctctgagacttgctgtgtcagcggcatgcgggttggcccacctccacgtggaaatttttggcacacagggaaagcccgccatagcacaccgcgactttaaatcacgcaatgtcctcgtgaaatccaatctgcagtgctgcatcgcagacctcggactcgcggtgatgcactcacagggcagcgactaccttgacatcggaaataaccccagagtgggaacaaaacggtatatggctcctgaggtgctggacgaacagattcggacggattgcttcgagtcttataagtggactgacatctgggctttcggtctcgtcctgtgggagatcgcacgccggacaattgttaatggcatcgttgaggactaccggccacccttctatgacgtcgttcccaatgatcctagcttcgaggatatgaaaaaggtggtgtgtgtggatcagcaaaccccaacgattcccaatagactcgccgcagaccccgtgctgtcggggctggcacagatgatgcgggagtgctggtatcctaatccttcggctcggctgacagctctgcgaattaagaagactctacagaaaatttccaattcaccggaaaaacccaaagttatccagtag

SEQ ID NO: 107017 - DNA, 1512 bp, synthetic construct
  misc_feature 1..1512: note = Description of Artificial Sequence: Synthetic coding sequence
  source 1..1512: mol_type = other DNA
atgacgctgggttccccaagaaagggactcctcatgctcctgatggccctggtgacgcagggagatcccgtgaagcccagtcgggggccattggttacctgtacttgcgagtctccccactgcaaagggccaacgtgcagaggcgcttggtgtactgtggtccttgtacgcgaagagggccgacacccccaggagcataggggatgtggaaacctgcaccgcgagttatgtcgcggccgaccaacggaatttgtgaaccattattgttgtgacagtcatctctgtaaccacaacgtgagccttgtgttagaggccacgcagcctcccagcgagcagcctggtacagacgggcagctggctctgatactgggcccagttctggcgctgttagctttggtggcactgggggtcctggggctctggcacgttcgtagaagacaggagaaacagaggggactgcacagcgagctgggggaaagctcattaattctgaaggcgtctgaacaaggcgactccatgttaggagatctgctggattctgactgcacgactggctctggatcagggttaccctttctggtacagaggactgtagctcgccaggtcgcacttgtcgagtgtgtgggaaaaggccggtatggcgaggtatggcgggggctgtggcatggcgagtccgttgccgttaagatatttagctcacgggatgaacaaagttggttccgcgaaactgaaatttataataccgtcctactgcggcacgacaacatactggggttcattgctagtgatatgaccagcagaaattcctcgacccaactgtggctaatcacccattaccacgaacacggttccctttacgacttcctgcagcgccagactctggaaccccatcttgcactcagactggcggtgtccgcagcctgcggactagcccacctccatgtggaaatattcgggactcagggaaagcccgccatcgcccatcgagatttcaagtcacggaacgtgctcgtcaaatccaatttacagtgctgtattgcggatctgggtctggccgtgatgcatagccaggggtccgactacttggacatagggaacaacccacgcgtagggacaaagcggtacatggctcctgaagtgctggacgagcagattcgcacagattgtttcgagtcctacaagtggacggacatctgggcattcggcttggtgttatgggaaattgcacgaagaactatcgttaatggtattgtcgaggattatcgaccaccattttatgatgttgtcccgaatgatccttcctttgaggatatgaagaaagtcgtgtgcgtggatcagcaaacaccaacgattcctaacagactggccgctgatccagtcctatccgggctggctcaaatgatgcgggaatgctggtatcccaatcctagcgcacgactgaccgcccttcgaatcaaaaaaaccctgcaaaagatttccaacagccctgaaaagccgaaggtgatccagtag

SEQ ID NO: 107018 - DNA, 990 bp, synthetic construct
  misc_feature 1..990: note = Description of Artificial Sequence: Synthetic coding sequence
  source 1..990: mol_type = other DNA
atggcattgacaccacccttgctgctgctcagcgcggggacaatgacactgggcagtcctaggaaaggtctgctgatgctgctaatggccctggtgactcaggggaagggccgatacggcgaggtgtggcggggactgtggcacggagagtctgtcgcggtgaagattttttcctctagggacgaacagtcttggttccgcgagactgagatctacaatactgtcctgctcaggcatgataacatcctgggatttattgcctccgacatgacgagccggaacagctccactcagctctggctcataacccactatcacgaacacggtagtctgtatgattttctccagcggcagacactagaacctcacctggcactccggctggcagtgtccgctgcatgcggcctcgcacatttacatgtcgagattttcggaacccagggtaagccagcaatcgctcatcgagacttcaagtcccggaacgtgctagtgaagtcaaacttacagtgctgtatagccgatttaggcttggctgtcatgcatagccagggttctgattatctggatatcggtaacaaccccagagttggaacaaaacggtatatggcccctgaggtcttagacgaacagattagaactgactgcttcgagtcatacaagtggactgatatttgggccttcgggcttgtcttatgggaaatcgcaaggagaaccatcgttaatggcattgtggaagattaccgacctcccttctacgacgtggtacctaacgacccttcattcgaagacatgaagaaggtcgtgtgcgttgatcagcaaaccccaaccatcccaaataggctcgcagccgaccctgtcctgagcggactcgcccagatgatgcgcgagtgctggtatcccaaccctagtgcgagactgaccgctctaagaattaagaaaaccttgcaaaagataagtaacagccccgagaagcccaaggtgattcaatag

SEQ ID NO: 107019 - DNA, 480 bp, synthetic construct
  misc_feature 1..480: note = Description of Artificial Sequence: Synthetic coding sequence
  source 1..480: mol_type = other DNA
atggctctaactcctccgttactcctgttgagcgcagggacaatgacactgggaagtccacgaaagggcctgcttatgctgctgatggccctggttactcagggggatcccgtcaaaccatccagaggcccccttgtaacttgcacgtgtgagtccccccattgcaaggggccaacatgcagaggcgcctggtgtactgttgtgctcgttcgcgaagagggccggcacccccaagagcatagagggtgcggaaatctccatcgtgagttatgcagaggccggcccactgaattcgtgaaccactattgttgcgattctcatctgtgcaaccacaatgtctctctggtcctggagggtaaaggccgttatggtgaggtttggagaggtctgtggcatggcgagtcggtggcggtaaaaattttcagctcaagagacgagcagtcttggtttagagaaacggaaatatataatacagtttag

SEQ ID NO: 107020 - DNA, 1554 bp, synthetic construct
  misc_feature 1..1554: note = Description of Artificial Sequence: Synthetic coding sequence
  source 1..1554: mol_type = other DNA
atggcacttacaccccccctcctcctcctttccgccggcacaatgacgctcggaagcccacgaaaaggtctactgatgctacttatggcactcgtgacgcagggtgaccccgtcaaacctagccgcggcccactggtcacgtgtacatgtgaaagtccacactgcaaaggcccgacctgcagaggcgcttggtgcactgttgttctcgtcagagaggaaggaaggcatccgcaggagcatcggggctgcggtaacctccacagagagctgtgtaggggacgccccacagaattcgttaaccactactgttgcgactctcacctctgtaaccacaacgttagccttgtcctcgaggcaacccagcctccctccgagcagcctggcactgatggccagctggctctcatcttagggcccgtgctggctctgcttgcccttgtcgcactgggagtgctgggcttatggcacgtgaggcgcaggcaggaaaagcaaagaggcctccacagcgagctcggtgaatctagtctgattctgaaggcatccgagcagggggactccatgctaggcgacctgttggatagtgactgtacaacgggttcaggcagcgggctgccatttctggtgcaacgcaccgtcgcacgccaggtggcccttgtcgaatgcgttggcaaagggcgatatggcgaagtttggcggggcttatggcatggcgagtccgtggccgtgaagattttctcctcacgcgatgaacagagttggtttcgtgaaacggagatttacaatacagtccttctgagacacgataatattctcgggtttatagctagcgacatgacttcacgcaacagctctacacagttgtggttgattactcactaccatgagcacggaagtttgtacgactttctgcagcggcagactttggagcctcatcttgccctgcggctggccgtgtccgcagcatgcggactggcacacctgcacgttgaaatcttcggaacgcaaggtaagccggccattgcacaccgcgatttcaagtccaggaacgttttggtgaagtccaacctacaatgctgcatcgctgacctgggcctggctgtgatgcactcacagggctcagattacttagatatcgggaacaaccctcgggtggggactaaacgctatatggcacccgaagtcctggacgagcagatccggaccgattgtttcgaatcttacaaatggaccgatatttgggcattcggactcgtgctgtgggaaattgctaggcgcacgatagtgaacggcatagtcgaagattatcggccccccttttacgacgttgtcccgaacgatccgagcttcgaggacatgaaaaaagttgtatgcgtggaccaacagaccccaaccattccaaaccggctggccgccgacccagttctgagcgggctcgcacaaatgatgagagaatgctggtaccctaacccgtcagctagactgaccgcgctgagaataaagaagacattgcagaaaatctctaatagcccggagaaacccaaagtcattcaatag

SEQ ID NO: 107021 - DNA, 1530 bp, synthetic construct
  misc_feature 1..1530: note = Description of Artificial Sequence: Synthetic coding sequence
  source 1..1530: mol_type = other DNA
atggtcgatggagtgatgatccttcccgtgctgatcatgatcgcactcccatctccctcaatggaggatgaaaagcccaaggtcaaccctaagttgtacatgtgcgtctgcgagggtctgtcctgcgggaatgaggatcactgcgagggccagcagtgtttctctagtctctcaatcaatgacgggttccatgtgtaccaaaagggctgctttcaggtgtatgaacaaggcaaaatgacttgtaaaactccgcccagccctgggcaggctgtagaatgttgtcaaggagattggtgtaatcggaacatcaccgcccagctgcctaccaagggcaagtctttccctggcacccagaattttcatctcgaagtaggcctgatcattctgagcgtcgtgttcgccgtttgccttttggcctgcctattaggcgtcgccctccggaaatttaaaagacggaatcaggagaggttgaatccaagagatgttgaatacggcacgatcgagggactcataacaaccaatgtgggggatagcacgctggccgatctcctcgatcactcatgcacctctggatccggaagcgggttgccgttcctcgtgcagaggaccgtggctcgacagatcactctattggaatgtgtgggaaaaggcagatatggtgaagtctggcggggttcttggcagggagaaaacgtcgcagtgaaaatcttttcttctcgtgacgagaagtcttggtttagagagacagaactgtataacacggtcatgctccggcacgaaaacatcttgggttttattgccagtgacatgacttcgagacattcatcgacccaactgtggctgatcacacactaccatgaaatggggagcctgtacgattacttacagctcactacacttgataccgtgagctgtttacgaattgtcctgagtatcgcttccggactagctcacttgcacatcgagatcttcggaacccaggggaaaccagcgatcgctcacagagacctgaagtctaaaaatatcttggttaaaaagaatggacagtgttgcattgccgacctgggcctcgccgtcatgcatagtcaatccactaatcagttagacgttgggaataacccaagggtcggcaccaagcgatacatggcgcctgaagtgctggatgagactatacaggtcgattgctttgattcatacaagcgggtagatatttgggcattcggtctcgtgctgtgggaggtcgccagacggatggtctcgaatggcatcgttgaagactataagccaccgttctatgatgtggtcccgaacgacccgtctttcgaggacatgagaaaggtcgtctgtgtggaccagcagcggcccaatatccccaaccgctggttttctgatcccaccctgactagccttgcaaaactgatgaaagaatgttggtatcaaaatccaagtgccaggctcaccgcattgaggattaagaagactctgactaaaattgataattccctggataagctgaagacagattgctag

SEQ ID NO: 107022 - DNA, 1530 bp, synthetic construct
  misc_feature 1..1530: note = Description of Artificial Sequence: Synthetic coding sequence
  source 1..1530: mol_type = other DNA
atggtggacggagtcatgattttaccggtcctgataatgatcgcactacccagtccttcaatggaggatgagaagccaaaggtcaatcctaagctctatatgtgcgtgtgcgaaggattatcctgtggcaatgaagaccattgtgagggtcagcagtgcttttcgtcgctgtccattaatgacgggttccacgtgtaccagaaggggtgctttcaggtttatgagcaggggaagatgacttgtaaaacaccaccgagccctgggcaggccgtggagtgctgccaaggtgactggtgtaatcggaatatcacagcacaactgccaacaaagggcaagagctttccggggacacagaattttcacctggaagtgggactcattatactgtccgtggtgttcgcggtgtgtctattggcttgcctgctcggggtcgctctcagaaagttcaaacgtcgcaatcaggaaagactgaacccgcgggacgtcgaatatggaaccatagagggcctgattacgacaaatgttggtgattctaccctcgctgacttgttggaccatagctgcacctccggatctggatctggcttgccattccttgtccagcggacagtcgcccgacagatcacgctcctggagtgtgtaggcaaaggccggtatggcgaggtgtggcgcgggtcctggcagggcgagaacgttgctgtgaaaatattcagtagtagagacgagaagagctggttcagggagacggaactgtataatactgttatgctgcgacatgagaacatcttgggttttatcgccagtgacatgaccagtcggcactcttcgacccagctgtggctgatcacccactatcatgagatgggttcattgtatgattacctgcagctaacaactttggatacagtgtcctgcttaaggatagtcctgagtatcgcatcaggtctggcacacttacacattgaaattttcggtacccagggtaaacccgctatagcacaccgcgatttgaaaagcaaaaacattctggtgaagaaaaacggccaatgttgcatagcagacctgggtctggcggtcatgcatagccaatccacaaaccagctggacgtgggcaataatccccgtgttggaaccaaacgctacatggcccccgaagtcttagacgagacgattcaggttgactgcttcgacagttacaaacgtgtagacatatgggcattcgggctcgtgctttgggaagttgcaagacggatggtgtccaacggaatcgtggaagactacaagccccccttctatgacgtggtcccgaatgatccatccttcgaggacatgagaaaggtcgtttgcgtcgatcagcagcgccctaacatcccgaatcgctggttttctgaccccaccttgacgtccctggctaagctgatgaaggagtgttggtatcagaatccttcagcccgtttgacagcccttagaattaagaagaccctgaccaaaatcgacaattccctggataaactcaaaacggactgctag

SEQ ID NO: 107023 - DNA, 1530 bp, synthetic construct
  misc_feature 1..1530: note = Description of Artificial Sequence: Synthetic coding sequence
  source 1..1530: mol_type = other DNA
atggtggacggagttatgatcttaccggtactgataatgatcgccttgccatcacctagtatggaagacgaaaaacccaaggtgaaccctaagctatatatgtgcgtgtgcgagggactgagctgtgggaatgaggatcactgcgagggacaacagtgcttttctagtctgagcatcaacgatggcttccatgtctatcagaagggatgttttcaggtatacgagcaagggaaaatgacctgtaaaacccccccctccccaggtcaggccgtggaatgctgtcagggcgattggtgcaaccgcaacattacagcccagctgccaacgaagggtaaatccttcccaggtacccagaattttcatttggaggtcggcctcataatactatcagttgtgttcgccgtgtgcctcttagcctgcctgcttggcgtagccctgcggaagtttaaacggcgcaaccaggagcgactgaatccccgcgacgtggaatatggcaccatcgaaggactgattaccacaaatgtgggggattccaccctggcggatcttctggatcatagttgtacctccggaagtgggtctggactaccatttttggtccagcggacagtcgccagacaaatcaccttgctcgagtgtgtcgggaagggccgatatggcgaggtttggcggggcagttggcagggggagaatgttgctgtcaagatcttctcatctagagacgagaaatcgtggttcagggagactgagctctataacacagtgatgcttagacacgagaatatcctcggatttattgcttcagatatgacctcaagacactcctctacccagctgtggcttattacccactaccatgaaatggggtcgctttacgattacctgcagttaacgacactggacacagtgtcatgtctgaggattgttctcagtatcgccagcggacttgctcatttacacatcgagatttttggcacccaagggaagcctgctatcgcccaccgtgatctgaaatctaagaatatccttgtgaagaaaaatggccagtgttgtattgccgatttaggcctcgctgtcatgcatagccaaagcacgaatcaacttgacgtaggtaataacccgagggtgggaactaaaaggtacatggccccagaagtattggatgagacaatacaggtagattgcttcgatagttataaaagggtcgacatttgggcttttggactagtcctgtgggaggtggcccgacgcatggtaagtaatgggatagtagaagattataagccacccttttacgacgtagtgcctaacgacccctctttcgaggacatgcggaaagtggtgtgcgtggaccaacagcgaccgaatatccctaatagatggttttcggaccccactctgacctccctggccaaactgatgaaagaatgctggtatcaaaacccctcagcaagacttactgcactgcggatcaagaagacccttaccaagatcgacaattctctggacaaattgaaaactgattgctag

SEQ ID NO: 107024 - DNA, 264 bp, synthetic construct
  misc_feature 1..264: note = Description of Artificial Sequence: Synthetic coding sequence
  source 1..264: mol_type = other DNA
atggtcgatggcgtgatgattcttccagtgcttatcatgatcgctctgcctagtcctagcatggaagacgaaaagccaaaggtgaacccaaagttgtacatgtgtgtgtgcgagggcctgtcttgcggaaatgaggatcactgtgaaggtcagcagtgcttttcaagcctcagcattaacgacggcttccatgtgtaccaaaaaggttgtttccaagtgtatgaacagggcaaaatgacatgcaagacaccccccagcccctag

SEQ ID NO: 107025 - DNA, 66 bp, synthetic construct
  misc_feature 1..66: note = Description of Artificial Sequence: Synthetic coding sequence
  source 1..66: mol_type = other DNA
atggttgatggggttatgatactcccagtcctaattatgatcgctctgccaagtcccagcatgtag

SEQ ID NO: 107026 - DNA, 216 bp, synthetic construct
  misc_feature 1..216: note = Description of Artificial Sequence: Synthetic coding sequence
  source 1..216: mol_type = other DNA
atggtggatggagtgatgattttgcccgttctcattatgatcgctttgccgtctccttctatggaagacgaaaaaccaaaggtgaaccccaagctgtatatgtgcgtgtgcgaaggtctgtcctgtggcaacgaagatcactgtgaaggtcagcagtgtttttccagtctgtccataaacgacggcttccatgtgtaccagaagggctgcttctag

SEQ ID NO: 107027 - DNA, 1530 bp, synthetic construct
  misc_feature 1..1530: note = Description of Artificial Sequence: Synthetic coding sequence
  source 1..1530: mol_type = other DNA
atggtggacggcgtaatgattctccccgtgttaataatgatcgccttaccctctcctagtatggaggacgagaagcctaaggtgaacccgaagttatacatgtgtgtgtgcgagggattgtcatgtggcaacgaggatcattgcgaaggtcagcagtgcttcagttcgctttcaatcaacgacggttttcatgtgtaccaaaaaggttgcttccaagtatatgaacaggggaagatgacctgcaaaacaccaccatcccctggacaggctgtggagtgctgtcagggggactggtgtaatcgtaacatcactgcccagctaccaacgaaaggaaagtcttttcccggaacccagaatttccaccttgaagtaggcttaattattttgagtgttgtgttcgccgtgtgtctgctggcctgcttacttggcgtggcacttcggaaatttaaacgaagaaaccaggaacgcctgaatccaagagatgtggagtacggaacaatcgagggcttaatcaccaccaacgtgggcgactcaaccctggcagatctgctcgaccactcctgcacttctgggagtggaagcggcctgcctttcctcgtacagcgaacagttgccagacaaatcaccctcctggaatgcgtgggcaagggaaggtacggcgaggtttggaggggttcctggcagggcgagaatgtggccgttaagattttttcctctagagacgagaaatcctggttcagggagaccgaactctacaacaccgtgatgctgcggcatgaaaatatactgggcttcatcgccagcgatatgacttccaggcatagcagcacacaactatggctgatcacccactatcatgagatgggatcactgtatgactacctccagctgactacccttgacactgtcagttgtctgcggatcgtcctgtctatcgcctcaggacttgcccaccttcacattgagatattcggtacacaaggtaagcctgctattgcacatcgggatctgaaaagtaagaacatattagtgaaaaagaatggccagtgttgtatcgctgacctggggttggccgtcatgcactcacagtctacgaatcagctggatgtgggcaacaatccacgcgtggggacaaagcgctatatggcccctgaagtcctcgacgaaactattcaggtggattgttttgacagctataagcgtgtcgacatttgggcctttggcctggtcctttgggaggtcgctaggcggatggtttcaaacggcatcgtggaggattacaaacctcccttctacgatgtcgtgcccaacgacccatccttcgaagacatgcggaaagtggtgtgtgtggaccagcaacgtccgaatatacccaatcgttggttcagtgaccccactctaaccagcctggctaaactcatgaaggaatgctggtaccaaaatccatcagcgagactcacagcactgagaatcaagaaaacccttacgaaaattgacaattccttggacaagctgaagaccgactgttag

SEQ ID NO: 107028 - DNA, 264 bp, synthetic construct
  misc_feature 1..264: note = Description of Artificial Sequence: Synthetic coding sequence
  source 1..264: mol_type = other DNA
atggttgatggcgttatgatcctaccagtgctcataatgatcgctcttccatcaccatccatggaggacgaaaagcccaaggttaatccaaaactctacatgtgtgtctgtgagggtctgtcatgtggtaatgaggatcattgcgaagggcagcagtgcttttcttccctctctatcaatgatggcttccacgtgtatcagaagggatgcttccaggtgtacgagcagggaaaaatgacatgcaagacccccccctcaccttag

SEQ ID NO: 107029 - DNA, 222 bp, synthetic construct
  misc_feature 1..222: note = Description of Artificial Sequence: Synthetic coding sequence
  source 1..222: mol_type = other DNA
atggtcgatggggtgatgattcttcctgtccttatcatgatcgccctgccatctcccagcatggaggatgaaaagcccaaggtcaacccaaaactttatatgtgcgtgtgtgagggactatcctgtgggaacgaagaccactgcgaaggccagcaatgcttctcctctttgagcattaacgacggcttccacgtgtaccagaaaggctgcttccaggtttag

SEQ ID NO: 107030 - DNA, 1518 bp, synthetic construct
  misc_feature 1..1518: note = Description of Artificial Sequence: Synthetic coding sequence
  source 1..1518: mol_type = other DNA
atggccgagagcgcaggcgcatctagctttttcccactggttgtgctactgctggccggatcagggggctctgggccccggggagtgcaggctctgctgtgtgcctgcacaagctgcctccaggccaattatacatgcgagacagatggcgcctgcatggtttcgatatttaacctcgatggcatggagcaccatgtacggacctgcattccaaaggtggagctagtccctgcaggtaagcctttttattgtctgtcctccgaagacttaaggaatacccactgttgttacactgattattgtaatcggatcgacctgagagtgcccagcggccatcttaaggaacccgagcatccaagtatgtggggtccagtggagctggttggcataatagccggtcctgtgttccttctgttcctcattataatcattgtctttctggtgatcaattaccaccaacgggtgtaccacaatagacagcgtttggacatggaggacccaagttgcgagatgtgcctgtccaaagacaaaacgctgcaggacttggtgtacgacctgagtaccagcgggtccggatcaggtctgccactattcgtacagcggactgttgcacgaacaatagttctgcaggagatcatcggtaaaggccggttcggagaggtgtggagaggaagatggagaggtggtgatgttgccgtaaaaattttttcctcacgggaagagagatcctggtttcgcgaggccgaaatctatcagacagtgatgctgcgacacgaaaacattctcggcttcattgctgccgacaataaggacaacggcacctggactcaactctggctggtctccgattaccatgaacacggcagcctattcgattatttaaacaggtacaccgtgaccattgaagggatgatcaaactggcactgtccgctgccagcggcttagcacatttgcacatggaaattgtcggcacccagggcaaacccggcattgcccacagggacttaaaatctaaaaacatcttagtgaaaaagaatgggatgtgtgctatagccgatctgggcctggctgtgagacatgacgcggtaacagacacaatagacattgcgcccaatcagagagtcggcaccaagcgttacatggctcccgaggttctggatgaaactatcaatatgaaacactttgactccttcaagtgtgccgacatatatgctctgggactcgtatactgggaaatcgccagacgctgtaactctggaggcgtccatgaggagtaccagctgccatactacgacctggtgcctagtgatccatccattgaagagatgaggaaggtcgtgtgcgaccagaagctccgaccaaacatccctaattggtggcagtcctacgaggcacttagagtcatgggcaagatgatgcgggagtgttggtacgccaatggggctgcaaggctgactgcccttcgcattaagaaaacactttcacagctcagtgtgcaggaggatgtgaaaatctag

SEQ ID NO: 107031 - DNA, 1464 bp, synthetic construct
  misc_feature 1..1464: note = Description of Artificial Sequence: Synthetic coding sequence
  source 1..1464: mol_type = other DNA
atggcagaatccgccggggcttcttccttttttcccctcgttgtgcttttactggccggatctgggggttcgggccctaggggagttcaagccttattgtgtgcctgtacatcttgcctccaggctaactacacctgtgaaactgatggggcgtgcatggtttcgatatttaacttagatggaatggagcaccacgtaagaacctgtatccctaaggtggagcttgtgcccgccggcaaacccttctactgtctcagcagtgaggacctgcgcaacacgcattgctgctacactgactattgcaatcggatcgatttgcgcgtcccttcgggacaccttaaagagcctgagcatccttcgatgtggggccctgtcgaactggtgggcataattgccgggcctgttttcttgctgtttctgatcatcattatcgttttccttgtgattaattaccaccagcgggtctatcataataggcagaggcttgacatggaggatccctcttgtgaaatgtgcctgtcaaaagataagacactgcaggacctagtgtacgatttgagtactagcggatcagggagcggattgcctctatttgtacagaggacggtcgcgcggacaatcgtgctgcaagaaatcataggcaagggcaggtttggggaggtgtggagagggcgctggcgcggcggcgatgttgccgttaaaatcttcagctccagagaggagagatcctggtttcgggaagcggagatataccagacagttatgctgaggcatgaaaacatactgggctttatcgcagccgacaataaagataatgggacctggacgcaactttggctggtcagcgactatcatgagcatgggtcattatttgattatctcaataggtacaccgtgactatcgagggaatgattaaactggcactatccgcagcctcagggcttgctcatcttcacatggagatcgtgggtacacaaggtaagcccgggatcgcccatcgtgacctcaagtccaaaaacattttagttaaaaaaaacggcatgtgcgcaatcgccgaccttggtcttgcggtgaggcacgacgcagtgacagatactattgatattgcccccaaccagcgtgtgggcaccaaaaggtatatggctcccgaggtgctagatgaaactatcaacatgaaacacttcgacagctttaaatgcgccgacatttatgcactgggtctcgtgtattgggaaatcgccagaagatgcaactccggaggcacattcctcttctgtctatgttcttatctgcccttccaggatgctggcagccctaaggccgtgctactgccgcccttcttcctgcagcccgttgggtgcttgcttccagagcctgagtcgtccttcaaggtcgctattaagggggtcgaagttgccgtgctgcgggtcagactgtttttcagagatcagttcgttgaatag

SEQ ID NO: 107032 - DNA, 1431 bp, synthetic construct
  misc_feature 1..1431: note = Description of Artificial Sequence: Synthetic coding sequence
  source 1..1431: mol_type = other DNA
atggctgaatccgcaggcgcctcaagcttctttccactagttgtattgttactggctgggtccggtggatctgggcccaggggggttcaggccctcttatgcgcttgtactagctgtctgcaggcgaattacacgtgcgaaactgacggagcctgtatggtcagcatctttaatttggacggaatggaacaccatgtgagaacatgcatccccaaagtggagctcgttcctgccggcaagccattttattgtttgtctagtgaggacttgaggaatacacattgctgttatacagattactgtaacaggatagatctacgagtccctagcgggcacctgaaagagcctgagcatccctcaatgtggggtcccgtagagcttgtcgggatcatcgcaggtccagttttccttctgttcctgattatcatcatagtgttcctggtcatcaactatcaccagcgcgtctatcacaaccggcaacggttggacatggaagatccatcctgcgagatgtgcctctcaaaggataagaccctccaggatctggtgtatgatctgagtacctcgggttccggtagtggtctgcccttgtttgttcagagaacagtcgcaaggacgattgtgcttcaggagataatcggaaaaggcagatttggagaggtgtggagggggaggtggcggggcggtgacgttgcggttaaaatttttagctccagagaggagaggtcctggttccgcgaagctgagatataccaaacagtaatgttgaggcacgaaaacatattgggatttatcgccgcagataacaaagacaatggaacgtggacacaactatggctggtctctgattatcatgaacacggttcactgtttgactacctaaatcgctacactgtgacaatcgagggaatgattaaactggcgctgagcgcagccagcggtctggcccatctccacatggaaatcgtgggtactcaggggaaaccaggaattgcgcaccgggacctgaagtccaagaatatcctggtaaaaaagaacggcatgtgcgcaatagcagatctgggcctggccgttcgccatgatgccgtgactgacacaattgatattgcccccaaccagcgtgtgggcacgaagcgctatatggcccccgaagtcctggatgagactatcaatatgaagcactttgatagctttaagtgcgctgatatttacgccttaggcctggtgtattgggagatcgcccgcagatgtaattccggtggcgtgcacgaggaatatcagctgccatactatgatttggtgcctagtgatcccagcatcgaagagatgaggaaggtggtgtgcgatcaaaaactaagaccgaatatacccaactggtggcagtcctatgaagtccggagctggcccccagctgcctttccaagcgcctag

SEQ ID NO: 107033 - DNA, 1641 bp, synthetic construct
  misc_feature 1..1641: note = Description of Artificial Sequence: Synthetic coding sequence
  source 1..1641: mol_type = other DNA
atggccgagagcgccggcgcaagttcattcttccccctggtggtactccttttagcgggcagtggcggctcaggccctaggggtgtgcaggcactgttatgtgcctgtacaagctgcctgcaagccaactatacctgcgaaacggacggtgcctgtatggtcagcattttcaaccttgatggcatggagcatcacgtgaggacatgcatacctaaggtagagctggtccccgccggcaaaccattttactgcctgagtagcgaggatcttcgcaatacccattgctgctacacagactactgcaacaggatagacctgagagtgccaagcggacacctaaaagaacctgaacatccatccatgtggggacctgtggagctggtgggaatcatcgctggcccagtatttctcctttttctgattatcatcatcgttttcttggtgattaactaccatcagcgcgtgtaccataaccggcagcggctggatatggaagatccgtcttgcgagatgtgcctgtctaaagataagactctgcaagatctcgtatacgatctgtcgaccagcgggtccggtagcggactgccactatttgttcagcgcaccgtggctaggacaatagtcctgcaggaaattattggaaagggaagattcggcgaagtctggagaggtcgctggcgtggcggagatgtagcagttaaaatattctcctctagagaggagcgtagttggtttagggaagctgagatttaccaaactgtgatgctgcgccacgagaacattttggggttcatcgcagccgataacaaggctgactgctcatttttaaccctcccctgggaggtagtcatggtctcggctgcccccaagctgaggtccttacggcttcagtacaagggcgggcgtggccgcgctcggtttttattcccactgaataatggaacttggactcagctgtggcttgtcagcgattatcacgagcacggctctttgttcgattacttgaacaggtacacagtaactatcgaaggaatgatcaagctggccctctccgccgcatctgggctggcccacctgcatatggagattgtcggcacacaaggaaagcctggcatcgcccatagggatctgaagagcaagaatatccttgtgaaaaagaatgggatgtgcgccattgctgatctaggattagccgtgaggcacgacgccgtgacagacacgatcgacatcgcccctaatcagcgcgtggggactaagcgttacatggctcctgaagtgctcgatgagaccatcaacatgaagcactttgactctttcaaatgcgcagatatctatgccctgggattggtttactgggagatcgcacggcgatgcaatagtggaggcgttcacgaggagtaccagctgccatactacgatttggttccttctgatccttctattgaagagatgaggaaagtagtgtgcgatcagaaattgaggcctaacattcccaactggtggcagtcctacgaggctctaagggtgatgggcaagatgatgcgagaatgttggtacgcaaacggcgctgcgcggcttaccgcactgaggattaagaagaccctgagccagctgtccgtacaggaagacgtgaagatttag

SEQ ID NO: 107034 - DNA, 1362 bp, synthetic construct
  misc_feature 1..1362: note = Description of Artificial Sequence: Synthetic coding sequence
  source 1..1362: mol_type = other DNA
atggtgtcgatttttaatttagatggtatggaacaccacgttaggacctgcattcctaaagtggagttagtccctgcaggcaagccattctactgcctgagttcggaggacctgcggaacacacactgttgctatacagactattgtaacaggatcgaccttcgcgtgccttccggacacctgaaagaacctgagcacccgtctatgtggggccccgtagaactggtggggattatagcagggccagtcttcctcctattcctgatcataataatagtcttcctcgtgataaactatcaccagcgcgtttaccacaacaggcagaggttggatatggaggaccctagctgcgagatgtgcctgtccaaagacaagactctacaagatttagtctacgacctgtccacatctggttcaggttctggtcttccactcttcgtccaaagaaccgtggcccgtacaattgtgctccaggagattatcggaaaggggcgctttggcgaagtgtggcgcggtcggtggagaggcggcgacgtggccgttaaaatcttctcatctcgggaggaacgttcgtggtttcgcgaggccgagatctaccagacagtgatgcttcgacatgagaacattctgggattcatcgccgctgacaataaggataacggtacctggactcagctgtggttagtaagtgattaccacgagcacggcagcctttttgattacctcaaccgatatactgtcactattgagggcatgatcaagctcgcactgtccgccgcttccgggcttgcccacctccatatggaaattgttggaacacagggaaaaccgggcatcgcccaccgtgatctgaaatcaaagaatatcctggtgaagaaaaatggtatgtgtgcgatcgcagacctaggcctggctgtccgacacgatgccgtcacagatactatcgacatcgctcctaatcagcgtgtgggaacaaaacggtacatggccccggaggtcctcgacgagaccatcaacatgaagcactttgacagttttaaatgtgccgacatctatgctctagggctcgtgtactgggaaattgctagaaggtgcaacagcggcggcgtgcacgaagaataccagctcccttattatgatctcgtcccaagcgacccttctattgaagaaatgcgcaaagtggtgtgcgaccaaaaactccgcccaaatattccaaactggtggcagtcttatgaagccctcagagtgatgggcaagatgatgcgcgagtgctggtatgccaatggggcggccagattgaccgcgcttaggatcaaaaaaaccttgagccagctgtccgttcaggaggacgtaaaaatctag

SEQ ID NO: 107035 - DNA, 1482 bp, synthetic construct
  misc_feature 1..1482: note = Description of Artificial Sequence: Synthetic coding sequence
  source 1..1482: mol_type = other DNA
atgactagggccctatgtagtgctctgagacaggcgctgctcctgctggccgcagcagccgagctgtctccagggctcaaatgtgtgtgcctcctatgcgatagttcaaacttcacgtgtcagacagaaggcgcatgctgggccagcgtcatgctcactaacggtaaggaacaggtaattaagtcgtgcgtgtcacttcccgaacttaatgctcaggtgttttgtcactcttcaaacaacgtgaccaagaccgagtgttgttttaccgatttctgtaacaacataactctgcatctgcctactgcgtccccaaatgcgcccaaactcggacccatggaactcgccattattatcaccgtgcctgtgtgtctcctatccatcgcagccatgctgacagtctgggcatgtcagggaaggcagtgctcctataggaagaaaaaaagacccaacgtggaggagccactgtcggagtgtaacttggttaacgcaggtaaaacactgaaagatctcatttacgatgtgacggcttctggcagtggctccgggcttcccctgctagtgcagcgcacaatcgcccgaactatcgtccttcaggagatcgtcgggaaaggtcgttttggagaagtctggcacgggcgctggtgtggcgaagacgtcgctgtcaagatcttctcttctagagacgagcggagctggtttagagaagctgagatctatcagacggtcatgctacgacacgagaatatcctgggatttatcgcagcggataataaggacaatgggacctggacccagctgtggctagtgagcgagtatcacgagcagggatcactctacgattatctgaatcgcaacatcgtgacagtggctggcatgataaaattggccttaagcattgcatctggactggcgcacctgcacatggagattgtggggacccaggggaagcccgctatcgcccaccgggatattaagtccaaaaatattctcgtcaaaaaatgcgaaacctgcgcaatagcagacttaggcctagctgtaaaacacgacagtatcttaaatacaatcgatatacctcagaacccaaaggtgggaaccaagaggtacatggcacctgagatgttggacgacacaatgaatgtgaacatttttgagagttttaagcgagccgatatttactccgtaggactagtatactgggaaatcgcgcgtcggtgctctgttgggggtatagttgaggagtatcagttgccgtactacgacatggtcccaagtgacccatctatcgaggagatgcgaaaggttgtttgtgaccaaaagttcagaccttctatccctaatcagtggcagtcttgcgaggctctgcgcgtcatgggcaggatcatgcgtgaatgctggtatgcaaatggagctgccaggttgactgcactgaggatcaagaaaacgataagccagctgtgtgtcaaggaggattgcaaagcctag

SEQ ID NO: 107036 - DNA, 1242 bp, synthetic construct
  misc_feature 1..1242: note = Description of Artificial Sequence: Synthetic coding sequence
  source 1..1242: mol_type = other DNA
atgaccagagccctgtgcagtgcgctgcgacaagcccttctactactcgccgctgcagctgaactgtcaccgggcctgaaatgtgtctgcctgttgtgtgactcctccaattttacatgtcagacggagggcgcctgctgggcatctgttatgctgaccaacggcaaggaacaggtgataaagtcttgcgtgtcacttcccgagctgaacgcccaggtattctgccactctagcaataatgtaacaaaaactgagtgctgttttacagacttctgcaataatatcactttgcacctgccgaccggattaccattactggtgcaacgcactatcgctaggaccatcgtattacaggagatcgtgggtaagggcaggtttggagaagtatggcatggtcgctggtgtggcgaggacgttgccgtaaagatctttagtagcagagacgagcgtagctggtttcgggaggcagagatctatcaaactgtcatgctgcggcatgagaacatattaggctttattgcagctgataataaggacaacgggacttggactcagctttggctcgtgtctgaatatcatgagcagggttcattatatgactacttgaaccgaaacatagtgacagtcgcaggtatgatcaaactcgcgctgagcattgcgagcgggctggctcacctacatatggaaatcgtgggcacccaagggaaaccagcaattgcccaccgcgatattaagagcaaaaacatactggttaagaagtgcgaaacttgtgctatcgccgacttgggccttgccgttaagcatgactcgatactgaacacgatcgatattcctcaaaacccaaaggtcgggactaagaggtatatggctccagagatgcttgacgacacaatgaacgtgaatatattcgaatcctttaagcgggccgatatctattctgtgggtcttgtatactgggaaatcgcacggagatgcagtgtagggggcatcgtcgaggagtaccaactcccttattatgacatggtaccctcagatccctctatcgaggaaatgcgtaaagttgtttgcgaccagaagttccggccttccatcccaaatcagtggcagtcatgtgaggctctccgggttatgggccgtatcatgcgcgaatgctggtatgcaaatggggctgcgcggctgaccgccttgaggatcaagaaaaccatttcccaactgtgtgttaaggaagattgcaaggcttag

SEQ ID NO: 107037 - DNA, 1011 bp, synthetic construct
  misc_feature 1..1011: note = Description of Artificial Sequence: Synthetic coding sequence
  source 1..1011: mol_type = other DNA
atgacccgtgccttgtgttctgccctgcgtcaggcactgctactcctggcagcagcagcagagctgagcccaggtcttaagtgtgtgtgcctcctgtgtgattcttcaaactttacatgtcagaccgaaggagcctgttgggcttccgtcatgctgaccaacggtaaagaacaggtaattaagagctgcgtgtctctcccagagctcaacgcccaggtgttttgccattccagcaacaacgtgactaaaacagagtgctgcttcaccgacttctgcaacaacatcacactccaccttcctactgataatggcacttggacacaattatggctagtgtcagagtatcacgagcaggggagcctctatgactacctcaaccgcaatatcgttacggtggccggaatgatcaaacttgcactgtctatcgcttctggtctcgcccatctgcatatggaaattgtgggcactcagggaaagcccgctatagcgcatcgcgatatcaagtccaagaacatcttggtaaaaaagtgcgaaacgtgcgctatagccgatctgggcctcgccgttaagcatgacagtatcctcaatacaatcgatatccctcagaacccaaaggtagggactaagcggtacatggcgccggaaatgctggatgacaccatgaatgtgaacatttttgagagctttaagcgagccgacatttactctgtgggccttgtatattgggagatcgctcgtagatgctcagtcggcgggatcgtcgaggaatatcagctcccctattatgacatggtccccagtgaccctagcatcgaagagatgaggaaggtcgtttgtgatcagaaatttcgtccaagcatccccaaccaatggcagtcatgtgaggctctgagagtaatgggacggataatgcgcgaatgctggtacgccaacggcgcagcccggttaaccgccctcaggatcaaaaaaaccatttcccagctgtgtgtcaaggaggactgcaaagcctag

SEQ ID NO: 107038 - DNA, 1542 bp, synthetic construct
  misc_feature 1..1542: note = Description of Artificial Sequence: Synthetic coding sequence
  source 1..1542: mol_type = other DNA
atgggggccgcagctaagctggcctttgcggtgttcctgatcagctgcagctctggagccatactgggcagaagtgagacacaggagtgcctgttcttcaacgccaactgggagaaagaccggaccaaccagacaggcgttgaaccttgctacggtgataaagataaacggcggcactgttttgcaacctggaagaatattagcggtagcattgaaatcgttaagcagggatgctggcttgacgacatcaactgctatgatcgcacagattgtgttgaaaaaaaagactctcctgaagtatacttctgctgctgcgagggcaatatgtgcaacgaaaagttcagttatttccccgagatggaggtgacccagcctacaagtaatccagttacaccaaagccaccctactataatatccttttgtattcactggtgcctctaatgttaatcgcaggtatcgtgatttgcgctttttgggtgtatagacatcacaagatggcctatccccctgtgcttgtgccaacccaggatcccgggccccctcctccttccccactcctcggacttaagcctcttcagctgctggaagtcaaggcccgtggaaggttcgggtgtgtatggaaggctcagctattgaacgaatacgtcgccgttaaaatctttcccattcaagataagcaaagctggcaaaatgagtatgaggtttatagcctccccgggatgaagcacgagaacatcctccaattcataggtgcggaaaaaaggggcacttctgtggatgtggacctgtggctgatcactgcttttcacgagaagggctcgcttagcgattttttgaaggctaacgtggtctcatggaatgagctgtgccatatcgctgagaccatggcgagaggactggcctacctccatgaagatatccccggcctgaaagacggacataaacccgctatctctcacagggatattaaaagcaaaaatgtattgctgaagaataatctcacagcatgtatcgccgacttcggcttagctttaaaatttgaggctggtaagtccgctggggatactcatgggcaggtgggcaccaggcggtacatggccccagaggtgttggaaggagccattaatttccagcgggatgctttcctgagaatagacatgtatgcaatgggacttgtactgtgggaactggccagccggtgcacagccgccgacggacctgttgatgagtacatgctgccttttgaagaagagatcggacagcaccccagcttggaagatatgcaagaagtggtggtgcacaagaaaaaaaggcccgtgttacgggattactggcagaagcatgcggggatggcaatgctttgcgaaactatcgaggaatgttgggaccatgacgccgaagccaggctgtccgctggctgtgtgggcgagcgaatcacacagatgcaacgacttactaacatcataacaacagaggacatcgttacagtcgtgaccatggtcaccaacgtggacttcccacccaaggagtcgtccctgtag

SEQ ID NO: 107039 - DNA, 1542 bp, synthetic construct
  misc_feature 1..1542: note = Description of Artificial Sequence: Synthetic coding sequence
  source 1..1542: mol_type = other DNA
atgggagctgcggccaaactggctttcgccgtgtttttaatttcttgttcgtctggagccattctcgggagatcagagacacaggaatgcctgttctttaatgcgaattgggagaaagacaggaccaaccaaacgggagtggagccgtgctatggcgataaggataagcggcgccactgtttcgcgacatggaagaatattagtggctcaatcgaaatcgtgaaacagggatgttggctggatgacatcaattgctacgatagaacagactgtgttgagaaaaaggattcaccggaggtatatttctgctgttgtgagggcaatatgtgcaacgagaagttttcttatttccctgaaatggaagtgactcagccaacctctaatcctgtcacccccaagccgccctactacaacatccttctttacagtttggttccgttgatgctgatagcaggaatcgtcatttgtgccttctgggtgtaccgacaccacaaaatggcgtatcctcctgtactggtcccaactcaggatcctggccctccacccccatccccgctcctcggcctaaagccgctccagttgctcgaggtgaaggcgcgcggaaggttcggctgtgtctggaaagcccaactgctgaatgagtacgtggccgtgaaaatcttccccattcaagataagcagagctggcagaacgagtacgaagtgtattctttaccgggcatgaaacacgaaaacattctgcagttcattggagccgaaaagagaggaacctccgtggacgtggacctttggctcattacagcctttcacgagaagggcagcctgagcgatttcctgaaggccaatgtggtcagctggaacgaactgtgccatatcgccgagaccatggctcgcggcctcgcatacctgcatgaggatataccaggcctgaaagacgggcacaagcctgccatatcccatcgcgatatcaagagcaagaatgtactcttaaaaaataatttaactgcgtgtattgccgactttggtctggcccttaaattcgaggccgggaagtccgcgggcgacacccatggccaggtcggaaccagacgatacatggcacccgaagtgctggaaggcgctatcaattttcagagggacgcattcttgcgtattgatatgtacgctatgggcctggtgctgtgggaactggctagccgctgcacagcagccgatggccctgttgacgagtacatgctcccgtttgaagaggagatcggtcagcatccatccctcgaggacatgcaggaggtggtggtacacaaaaaaaagcgccccgtccttagagactattggcagaagcatgcagggatggcaatgctctgcgagacgatcgaagagtgctgggaccacgacgcggaggcccgcctgtccgcaggatgtgtgggtgagcggatcacccagatgcagagactgaccaatattattaccacagaggatatcgtcaccgtggtcaccatggtaacgaatgttgatttccctcctaaagagtcatctctgtag

SEQ ID NO: 107040 - DNA, 1218 bp, synthetic construct
  misc_feature 1..1218: note = Description of Artificial Sequence: Synthetic coding sequence
  source 1..1218: mol_type = other DNA
atgtgcaacgagaagtttagctactttcccgaaatggaggtgacccagcctacctcaaatcctgtcacgccaaagcccccctattataatatactcctgtactcgctcgtgcctctaatgctcattgcgggtatcgtcatctgcgctttttgggtgtaccgccaccataaaatggcgtacccccccgttctggtccccacccaggatcccggtcctccccctcctagcccgctgctgggcctgaagccgctgcaacttctcgaggtcaaggcccgcggccggtttggttgtgtgtggaaggctcagttgcttaacgaatatgtggctgtcaagatcttccccatccaggataaacaatcttggcagaatgaatacgaggtttattcgttgcccggaatgaagcacgaaaacattctccagttcattggggctgagaagcggggcacaagtgttgacgttgacttgtggcttattactgcctttcatgagaaagggtcccttagtgatttcttgaaggcaaacgtcgtctcttggaacgaactctgccacatcgcggagactatggctaggggacttgcgtatctgcatgaggatatacctgggttaaaagacggacataagcctgctatcagccaccgtgacatcaagtccaagaacgtgttactaaagaataacctgacggcctgcatagctgacttcgggttagcccttaagtttgaagctggcaagtcagcaggagacacccacgggcaggtgggcacccgccgctatatggcccctgaggtgctagaaggcgctatcaatttccagagagacgctttcttacgcattgacatgtacgccatgggcttagtgttatgggagcttgccagtaggtgcaccgcagccgatggtcccgtcgatgagtatatgttaccatttgaagaggagatcggccagcaccctagcctcgaggatatgcaagaagtggtggtccacaaaaagaaacggcccgtactgcgggattattggcagaagcacgccggaatggccatgctgtgtgagactatagaggagtgctgggaccatgacgctgaggcgcggctctccgcgggatgcgtgggagagagaatcacccagatgcagcgcctgacaaacatcattaccacagaagatatcgtcaccgttgttacaatggtgaccaatgtagacttcccccctaaggagtcgagtctctag

SEQ ID NO: 107041 - DNA, 1539 bp, synthetic construct
  misc_feature 1..1539: note = Description of Artificial Sequence: Synthetic coding sequence
  source 1..1539: mol_type = other DNA
atgacagctccttgggtggccctggctctgctctggggctctctatgcgccggtagcgggaggggcgaggcagagactagagaatgcatatactataatgcaaattgggagttagagcggaccaaccagtcaggtctggagcgttgcgaaggtgagcaagataagcgtctccattgttacgcttcctggagaaacagttctggcacaatcgagctggtcaaaaagggatgctggcttgacgactttaattgctacgaccgtcaagaatgtgtcgcaacagaagaaaatccacaggtctacttttgttgttgtgaggggaatttctgcaacgaacgttttactcatctcccggaggccggcggccccgaagtgacctatgagcctccaccaacagcgcccactttactgactgtgctggcgtacagcctactccctattgggggcctgagcctgattgtcctgctcgccttctggatgtaccggcatcgcaagcctccctatgggcatgtggatattcacgaagacccaggacccccacctccgagccctctagtgggcctgaaacctctgcaactgctcgaaatcaaggcacgtggtcgtttcggctgtgtgtggaaagctcagctgatgaacgactttgtagcggtgaagatctttccgttacaggataagcagtcctggcagtcagagagggagattttcagcacgccagggatgaagcatgaaaacttgttgcagttcatcgcagccgaaaaacgaggaagtaaccttgaagtcgagttatggttaattaccgcattccacgacaaaggctcgctgactgactacctcaaaggaaatattattacctggaacgaactttgccacgtggcagagactatgtctcgcgggctcagttatttacacgaagacgtgccctggtgtagaggcgaaggtcacaaaccctcgattgcacacagggactttaagtccaaaaatgtgctcctgaaatccgacttaacagccgtgctcgccgactttggactggctgtgaggttcgagcccgggaaacccccgggagatactcatgggcaggtggggacacggcgatatatggcaccggaagttctcgagggtgccatcaactttcagagagatgccttcctgaggattgatatgtatgctatgggcttggtgctctgggaactggtgtctaggtgtaaagctgctgacggacccgtggatgaatacatgctgcctttcgaagaggagataggccagcacccctcactggaggaacttcaggaagtagtggttcataagaagatgcggcctaccatcaaagaccactggctcaaacaccctggcctcgctcaattgtgcgttaccattgaggagtgttgggaccacgatgcagaagcaagactctcagccggatgcgtagaggagcgtgtttccctcatcaggcgaagtgtgaatggcaccacaagcgactgcttagtgtctctggttacttcagtcaccaatgtggatttgccgcctaaagaatcgtccatttag

SEQ ID NO: 107042 - DNA, 1191 bp, synthetic construct
  misc_feature 1..1191: note = Description of Artificial Sequence: Synthetic coding sequence
  source 1..1191: mol_type = other DNA
atggagctagaccaccggacttcaggaggcctgcatgcctatccgggcccacggggtggccaggttgcgaaacccaatgtgattctgcagatcggtaagtgccgggctgagatgctggagcacgtacgtcgtacccatagacatctcctggctgaggtctccaagcaagtggaaagagagctaaagggccttcatcggtctgtggggaaactcgaatctaacctggacggctatgtgcctacctctgactcacagcgatggaagaagtccattaaggcatgcctttgccgctgccaggaaactatcgctaacctggaaagatgggtaaaacgggagatgcacgtctggcgcgaagtgttttatcggctggagcggtgggctgacaggctagagtccactggggggaaatacccagtgggaagtgagtccgcaagacatactgtttctgtgggggtgggtggcccagagtcctactgtcacgaagcagatggttatgattacaccgtatcaccttacgccataaccccgccacctgccgctggagaactaccaggccaagaaccggccgaggcacaacagtatcaaccttgggttcccggggaggacgggcaaccttcgcccggcgttgacacgcagatattcgaagatcctagagagtttttgagtcaccttgaagagtatctgaggcaagtcggaggcagcgaagagtattggctgtcacagatacagaaccatatgaacggtcccgctaaaaagtggtgggaattcaaacagggctctgtgaagaattgggtggagttcaaaaaagagtttttgcaatactccgagggaactctatctagagaagcgattcagcgagagctggatttgccgcaaaagcagggggagccgttggaccagtttctttggcgcaagagagacttgtaccagaccctgtacgtagatgcagacgaggaggaaatcattcagtacgtcgtagggaccttgcaacccaagctgaagcggttcctgaggcacccgctgcccaagaccctggagcagcttattcaacgggggatggaggtgcaggacgatctggaacaagcggctgagcccgccggaccccatcttcctgtggaagacgaggccgaaaccctcactcctgcacccaactctgaatcagttgcttccgaccgaacccaaccagagtag

SEQ ID NO: 107043 - DNA, 1587 bp, synthetic construct
  misc_feature 1..1587: note = Description of Artificial Sequence: Synthetic coding sequence
  source 1..1587: mol_type = other DNA
atggccgcagtgctcaacgcagagcggttggaggtctcagtagatggcctaactctatccccggaccccgaagagagaccaggtgccgagggagctcccctccttccaccccccctgccacctcccagcccacctggatcaggccgcggcccaggagcaagcggagaacagccggaaccgggcgaggctgcagccgggggagccgccgaagaggcgcgccggctcgaacaaaggtggggcttcggccttgaggagctctatgggctggccctgcgttttttcaaggaaaaggacggcaaagcattccatcccacttatgaggagaaactgaagcttgtggccttgcacaagcaggtgctcatggggccatataacccagacacttgcccagaggtgggcttctttgatgttctaggaaacgatagacgtcgggagtgggcagccctcgggaacatgagtaaagaagacgccatggtcgaatttgtgaaacttcttaatcgctgttgccacctcttttctacctacgtggcctcacataagatcgaaaaggaggaacaggaaaagaaacgcaaagaggaagaagagaggagaaggcgagaggaggaagaacgggaacggttgcagaaggaagaggaaaagagacggcgggaagaggaggagaggctaagaagagaggaggaggaacggcgacggatagaggaggagagactgagactcgaacagcagaaacagcagattatggccgccctgaattcacagactgctgttcagttccagcagtacgcagcccagcaatatcccggaaattacgaacagcaacaaattctgataagacagctgcaggaacagcattaccagcaatacatgcagcagttatatcaggtgcaattggcacagcagcaggctgctctgcagaagcaacaggaggtggtcgtggccggctcttccctgcccacgtcttctaaggtgaacgcgaccgtgccatccaacatgatgagcgtgaatggacaggccaaaacccatacagacagctctgagaaagaactggagcccgaagcagccgaggaggccctggagaacgggcccaaagagagcctacctgtcatcgctgcacccagcatgtggacacgcccccaaatcaaagatttcaaagagaagatccagcaagatgcagactctgtgattaccgtggggcggggcgaggtggttacggttcgagttcccacgcatgaagaaggcagctatctcttttgggagttcgccaccgataactatgacataggttttggagtctactttgagtggaccgatagcccgaatacagccgtctccgtacatgtgtccgagagtagcgatgatgacgaagaagaggaggagaacatcgggtgcgaggagaaggcaaaaaaaaatgccaataaaccgctgttagacgaaatagtgcctgtttaccgccgggattgtcacgaggaggtgtacgccggatctcaccagtacccgggcagaggagtgtacctacttaagtttgataactcttattcactctggcgctccaaatctgtatactatagagtttactacactcggtag

SEQ ID NO: 107044 - DNA, 2343 bp, synthetic construct
  misc_feature 1..2343: note = Description of Artificial Sequence: Synthetic coding sequence
  source 1..2343: mol_type = other DNA
atgaagcccggggccactggcgagtcagatcttgcggaggtgttacctcagcataaatttgactctaagtctcttgaggcatacttgaatcagcacctgtccggatttggagctgagagagaggccactttgaccattgcacagtatcgagcagggaagtccaaccctactttttacctgcagaagggttttcagacttacgtgctgcggaagaagcccccaggatctctcctgcctaaggcccaccaaatcgacagagaattcaaggtccagaaggctttgtttagcatcggattccctgtgccgaagcccatcctgtactgctcggatacttccgtgatagggacagagttttacgttatggagcacgtccaaggtaggattttcagagacctcacaatccccggtctctctccagcagagcggagcgctatctatgtggcaactgtagaaaccctcgctcaactgcgcagccttaatatccaatcattacagctggagggatatgggattggcgccggttactgtaaaagacaagtgtctacttggactaagcagtaccaagcggctgctcatcaggatattccggcaatgcagcagcttagtgaatggctgatgaaaaacttgccagataacgataatgaagagaacctgatccacggcgatttccgcctcgacaatatcgtctttcaccccaaggagtgtcgtgtgatcgctgttttagactgggaactcagcacgatcgggcaccctcttagcgatcttgctcacttttctctgttctacttctggccccggacagttccgatgatcaaccaaggttcttattcagaaaacagcggtattcccagtatggaagaactaatcagcatctattgccggtgtcgtgggattaatagtatacttccaaactggaacttcttcctggcccttagctactttaagatggccggtatcgcacagggcgtctactccagatacttacttggaaacaacagctccgaggactcgtttctgttcgccaatatagttcagcccctggccgagacaggcctgcaactctctaagcgcaccttttctaccgtgctcccccagattgacactactggtcagcttttcgttcagaccagaaagggccaggaggtgctcatcaaggtgaaacactttatgaaacagcatatattgcctgctgagaaggaagtgacagagttctacgtgcagaatgagaacagcgtagataaatggggcaagcctctcgtcatagacaagctcaaagaaatggcaaaagttgagggactctggaaccttttcctccccgccgtaagtggattaagtcatgtggactacgctctgatcgccgaggaaaccggcaaatgcttcttcgcccctgatgtttttaactgccaggcaccagacactggtaacatggaggtactgcatttgtacggttccgaggaacaaaaaaaacaatggctggaacctttgctccagggcaatattacttcttgcttttgtatgactgagcctgacgtggccagcagcgacgctacgaacattgagtgctcaattcagagagacgaagatagttacgtgataaacggtaaaaagtggtggtcctcaggagctggcaaccctaaatgcaagatcgctattgtattgggcaggacccaaaataccagtctgagccggcacaagcagcactctatgattcttgtcccaatgaatacaccgggcgtgaaaatcatccgccctctgagcgtgtttggctataccgacaatttccacgggggccactttgagatacacttcaaccaggtcagggtgcccgccacaaacctgatccttggtgagggcagggggttcgagatttctcagggaagactgggtcctggccgcattcatcattgcatgagaaccgtgggcctggccgaacgggctctacagattatgtgcgagcgggctacacagcgcatcgctttcaagaagaagctgtacgcgcacgaagtggtcgctcattggattgccgaatcacggatcgcaatcgagaaaattcgcctcctcacattgaaggcagcgcactccatggacacgctggggtcagccggagcaaaaaaagaaatcgctatgattaaggtcgccgccccgcgggccgtctccaagatcgttgattgggcgattcaggtctgtggcggggccggggtaagccaggattatcctctggctaacatgtatgccattacccgagttctgcgactcgccgacggaccagatgaggttcatctttcagcaatcgcaacaatggaactacgggaccaggctaagcgactcaccgccaagatttag

SEQ ID NO: 107045 - DNA, 2031 bp, synthetic construct
  misc_feature 1..2031: note = Description of Artificial Sequence: Synthetic coding sequence
  source 1..2031: mol_type = other DNA
atgaagcctggtgctacaggggagagtgacctggctgaggttctgccccagcacaaattcgactccaagagtcttgaggcgtatctgaaccagcacctatctggattcggggcagagagagaggccacgctcaccatcgcacagtacagggcaggaaagagcaatcccacattttatctgcaaaaggggtttcagacatatgtcttgaggaagaaacccccaggcagcctcctgccaaaagcccatcaaatagaccgtgagttcaaggtccagaaagccctgtttagcatcggcttccccgttcctaagccgatattgtactgcagcgacacctctgtcatcggaacagagttttacgtgatggaacacgtgcaggggcgcatttttagggatttgacgatcccaggtctgagtcccgctgaaagatccgccatttatgtggccactgtcgaaacccttgctcaattgaggtcactgaacatacagagcctgcagctggaaggatacgggatcggcgctggctactgtaaacgtcaggtgagtacctggactaaacagtatcaggcagcggctcatcaggatatcccggctatgcagcagttgtccgagtggcttatgaaaaacctgcccgacaacgataatgaagaaaacctgatacacggcgactttaggctggataacatcgtgtttcatcctaaagagtgtagagtaattgcagttctggattgggaattaagcaccatcggccaccccctgagtgacttagcgcactttagcctgttttacttctggcccaggaccgtgcccatgatcaaccaaggttcatactccgaaaactctggcatcccctctatggaagaattgatctccatttattgccgctgccgaggtattaacagcattttgccaaactggaacttcttcctggccctctcttacttcaagatggctggcatagcacaaggtgtctatagccgttatttgctgggcaacaattccagtgaagactccttcctgtttgccaacattgttcagcctctggcagagacaggccttcaattgtccaaaagaaccttcagcaccgtattgccgcaaatcgacacaacaggccagctctttgtgcagacaaggaaaggtcaagaagtgcttattaaggttaagcacttcatgaaacaacacatccttcccgcagagaaggaggtcaccgagttttacgttcagaacgagaatagtgtggataagtgggggaaaccactggtgatagacaaacttaaggagatggccaaggttgaaggcctgtggaacctgttcctgcccgcagtttcaggcttatcgcacgtagactacgcacttatcgctgaagaaacaggcaagtgttttttcgccccagacgtgttcaactgtcaagcccctgacaccggaaacatggaggtgctgcacctctacggatccgaggaacagaaaaaacagtggttggaacctctgctgcagggaaatatcacttcttgcttctgtatgaccgaacctgatgtagcctcctcggacgcgaccaacattgagtgttctattcaacgggacgaggactcttacgtgattaacggcaaaaaatggtggtcgagtggcgccggaaatccaaagtgcaaaatcgctatcgtacttggcagaacccagaacactagtctgagccgtgaagtcgttgcccattggatcgctgagagtaggattgcaattgagaagattcgcctgctaactttaaaagcagcgcattcgatggacaccctcgggagcgccggggccaagaaagagatcgccatgatcaaggtggccgccccacgtgctgtctccaaaatagtagactgggcaatccaggtgtgcggaggcgctggggtgagccaggactacccactggccaacatgtatgctatcactagagtcctgaggttagctgatggccccgatgaggtacatctgtctgccatcgctacgatggagcttagagatcaggccaaacggttgaccgccaagatttag

SEQ ID NO: 107046 - DNA, 918 bp, synthetic construct
  misc_feature 1..918: note = Description of Artificial Sequence: Synthetic coding sequence
  source 1..918: mol_type = other DNA
atggaggtgctacacctctacggtagtgaagagcagaaaaagcagtggctggagccgcttctccaaggcaacataacgtcgtgtttttgcatgaccgaacccgatgtcgcatcatccgacgccacgaatatcgaatgtagcatccagcgggatgaagatagctatgtcatcaatggcaaaaagtggtggagctctggcgccggtaaccccaaatgcaaaatcgcgattgtcctcgggagaactcagaatacctctctgtccagacacaagcagcactctatgatactggttcccatgaatactcctggggtaaagattatcagacctttaagcgtctttggatatacagacaattttcatggtggtcatttcgaaatccattttaatcaagtaagagtgccggccacgaatctcatactgggcgagggccgcggctttgagattagtcaggggcgcctggggcccggccgcatccaccactgcatgcgtactgtgggcctggcagaacgggcccttcaaataatgtgtgaacgggccacccagcgcatcgcctttaagaaaaagctttacgctcacgaagtagtcgcccactggattgctgaaagtaggattgccatcgagaagattaggctactgactctcaaggcggcacactccatggataccctgggctcagctggtgcaaagaaggaaatagctatgataaaagtggccgccccccgggctgttagcaaaatcgtggattgggccattcaggtgtgtggtggggctggtgtgtctcaagattatccactagccaacatgtacgccatcacacgtgtactgaggcttgccgacggaccggatgaagttcatctaagcgccatcgccacgatggaacttagagatcaggctaaacgcctcactgccaagatatag

SEQ ID NO: 107047 - DNA, 1248 bp, synthetic construct
  misc_feature 1..1248: note = Description of Artificial Sequence: Synthetic coding sequence
  source 1..1248: mol_type = other DNA
atgctttggtctgggtgtcgaagattcggagccagacttggttgtctgcccggtggcctgcgggtgctagtgcagaccggtcaccgaagcctgacatcctgtattgatccatctatgggtttgaatgaggaacagaaagaatttcagaaggtcgcatttgacttcgccgcccgcgagatggctccgaatatggctgaatgggatcaaaaggaactcttccccgttgatgtgatgcgcaaggccgcgcagctgggcttcggcggggtctacatccaaacagacgtcggaggatccggtctgtctcgcctcgacacttctgtaatattcgaagcgctcgcaacagggtgtacatcaactacggcctacatctcaatccataacatgtgcgcatggatgattgatagctttggcaatgaggagcaaaggcacaagttctgccccccgctttgcacaatggaaaagttcgccagctattgtctgacagaacctggctcaggaagtgatgctgctagtctgcttactagcgctaaaaagcagggggaccactacattttgaacgggtcaaaagcctttatttcgggggcaggggagtcagatatttatgtcgtgatgtgtagaaccggcggtcctggtcctaagggtatctcatgcattgtcgtcgagaaaggaacccctggactgtccttcggaaagaaagaaaagaaggtagggtggaactcccagcccacgcgcgctgtcatttttgaagattgtgccgtgcctgtcgctaatagaatcggatctgagggccaggggtttttgattgccgtgaggggtttgaatgggggacgcattaatattgcttcatgttcactgggtgccgcccatgcatctgtgatcctcactagagaccacctgaatgttagaaagcagtttggagaaccgctggcctctaaccagtatctccaatttaccctggccgatatggccacacggctggtagcagctcggctcatggttcgtaatgccgccgtggcgctgcaagaggagcggaaggatgccgtggccttatgcagtatggcaaagctgttcgccacagacgaatgttttgcgatttgtaatcaggctctgcagatgcatggcggctatggctacctcaaagattatgccgtacagcagtacgtacgcgattcccgagtacatcaaatcctggaagggagtaacgaggtcatgcggattctgatttcccgaagtctcctgcaggaatag

SEQ ID NO: 107048 - DNA, 1074 bp, synthetic construct
  misc_feature 1..1074: note = Description of Artificial Sequence: Synthetic coding sequence
  source 1..1074: mol_type = other DNA
atgagaaaggcggcacagttggggtttggaggtgtctacattcaaacagacgtgggggggagtggcttatcgaggcttgacactagcgttatattcgaagcccttgcaactggctgtacatcaaccaccgcctacataagtatccacaatatgtgtgcctggatgattgattcctttggcaatgaggagcagagacataaattctgcccacctctatgcaccatggaaaaattcgcctcatattgcttgacagaacctggctcaggttccgatgccgcttcgcttttgacctcggccaagaagcagggggatcactatattctgaacggctccaaggcctttatctcaggcgcaggagaatcagatatctacgtggtcatgtgcagaaccggaggacccggtccaaagggaatttcatgtatagtcgtggaaaagggtacgcccggtcttagcttcgggaagaaagagaaaaaagtcggttggaactctcagccgacccgcgccgtcatatttgaagactgcgccgtgccagtggccaacaggataggatctgaaggacagggatttttaatcgctgtgcggggtctcaatggaggtaggatcaacatcgcatcctgctctctcggggcggcgcacgcatcagtaatcctgactagggatcatcttaacgttagaaagcaatttggggagccactggcctctaaccaatacttgcagtttactctggctgacatggccacgagattggtcgcagctagattaatggtgaggaatgccgccgtcgctttgcaagaggaaaggaaagacgccgttgctctgtgtagtatggcgaaattgttcgcaacagacgagtgctttgccatttgcaaccaggccctgcagatgcatggagggtatggctacttgaaggattatgcggtgcagcagtacgttcgcgattctagagtccatcaaattctggaggagttgttctggcaagggcccggtgtccagtcccgctcgttcgtccctttcggaggccctcagatcgctctgctgctcccgttctcttccggtgacctcagggaaggatag

SEQ ID NO: 107049 - DNA, 819 bp, synthetic construct
  misc_feature 1..819: note = Description of Artificial Sequence: Synthetic coding sequence
  source 1..819: mol_type = other DNA
atgggccttaatgaggagcagaaagagttccagaaggtagcctttgacttcgccgcccgggaaatggcgcctaatatggctgagtgggaccaaaaagagttgttccctgtggatgttatgcggaaggcggctcagttaggatttgggggtgtgtacatccagaccgacgtcggcggcagcggcctgtcacgtctcgatacgtcagttatctttgaggccttagcaaccggatgcacctcaactactgcatacatctcaattcataacatgtgtgcctggatgattgattcctttggcaacgaggaacagcggcataaattttgccctcctctttgtaccatggaaaagtttgccagctactgtcttacagagcccggcagtggttccgatgcagcctccctgctgacttcagcaaaaaaacagggcgaccattacattctcaatggctcaaaagcctttatttcaggggcaggggagtccgatatatacgtcgtgatgtgcagaacgggtggtcccggccccaagggaatttcttgtatcgtagtggaaaaagggacacccggtctgagcttcgggaagaaagaaaagaaggttgggtggaattcccagcctacccgagcagtcatttttgaggattgtgccgttccagtagcaaatcggatcggctcagagggccagggatttttgatcgctgtccggggcttgaatggcggcagaatcaacatcgctagctgcagcctcggctgtccccgcctgtgccacccacaccctcgccctccccagtgtcctgaggccgtatggcgtgcttctggacagtag

SEQ ID NO: 107050 - DNA, 681 bp, synthetic construct
  misc_feature 1..681: note = Description of Artificial Sequence: Synthetic coding sequence
  source 1..681: mol_type = other DNA
atgaagagcagaaagaactttaagaaatggcccctgactctcctgcctgagcggtggctgcagatatggcaatcgggcacacgaagcatgtgtgcctggatgatcgacagctttggaaacgaagagcaaaggcacaagttttgccctcccctatgcacgatggaaaagtttgcatcgtactgtctcaccgaaccaggatccggatccgatgcggcatcactcctcaccagcgccaagaagcagggtgaccactatatcttgaacggctctaaagcctttatttctggggcaggagagtctgacatttacgtggtgatgtgccgcacaggaggcccaggccccaagggaattagctgtattgttgttgagaaaggcactccgggacttagcttcgggaagaaagagaaaaaggtgggctggaatagtcagccaacacgagctgtaatcttcgaggattgtgccgtcccagtggctaacagaattgggagcgagggtcaaggttttctgattgcagtacgtggcctgaacggagggcgcattaatattgctagttgttcccttggcgctgcccacgcctctgtgatcctgaccagggaccatctgaatgtgcgtaagcagtttggagaaccactcgccagcaaccagaagaaacaggaaacgctgaaactgtggatcacttag

SEQ ID NO: 107051 - DNA, 1866 bp, synthetic construct
  misc_feature 1..1866: note = Description of Artificial Sequence: Synthetic coding sequence
  source 1..1866: mol_type = other DNA
atgtctggatgtgggctgttcctgagaaccactgctgctgctcgagcctgtcgggggctagtggtaagcactgccaatagacgcctattgagaaccagccccccagtaagggccttcgccaaggaactgttccttggtaaaataaaaaagaaagaagtctttcccttcccagaagtgtcccaggatgaattgaacgaaatcaaccagtttttaggaccagtcgagaagttcttcactgaagaagtcgatagccggaaaattgaccaggagggtaagatcccagacgagacactggagaagctgaagagcttgggcttattcggtctgcaggtgcccgaggagtacggcgggctgggattttcaaacaccatgtactcccggctgggtgagatcatcagtatggatggctccatcactgtcacgctggccgcccatcaggcaataggcctgaagggcattatcctggcggggaccgaggagcagaaggccaagtacctgcctaagctcgccagtggggagcatatagcagcattctgcttgacagagcccgcctcaggctccgacgcagcctccattaggagtcgagccactctttccgaagataaaaagcactatatcctcaatggaagcaaggtgtggataacaaacggggggttggcgaacattttcactgttttcgctaagactgaagtggtggattccgacggatccgttaaggacaaaataactgcattcatagttgaaagggatttcgggggtgtgaccaatggcaaaccagaggataagctaggaattcgaggatcaaatacttgtgaagtccactttgagaacacgaagattcctgtggaaaacatactgggggaagttggcgacggctttaaggtcgcaatgaacatcctgaactctgggaggttcagcatgggcagtgtagtggccgggttactgaaacggttaattgaaatgacagctgagtatgcatgcacacgaaagcagtttaataaacgcctgtcagaatttggacttatccaggagaaatttgccctgatggcccaaaaagcttatgtgatggaaagtatgacctatctgacggcggggatgctggaccagcccggcttcccagattgctctatagaagcagccatggtgaaagtgttctcaagcgaagctgcctggcagtgcgtgtccgaggctctccagatcttaggcggcctgggatacacaagagattacccctatgagcgcattctgagggacacacggatcctcctcatttttgaaggcactaacgaaatactgaggatgtacatagctcttacaggactgcagcatgcgggcaggatactcaccactcgcatccacgagcttaaacaggctaaggtgtccactgtgatggacaccgtgggccgacggttgcgcgactccctcgggaggactgtggaccttgggttgacggggaaccacggcgtcgtccacccctctctggcggactccgctaataaatttgaagagaacacttactgctttgggcgcacagtagaaacattgcttttgcgattcggcaagacaatcatggaagaacagctcgtccttaagagagttgccaacatcctgattaacctttacgggatgaccgccgtgctttctagagccagtcgctccataagaatcggcctgagaaaccacgaccatgaagtcctgctagctaatactttctgcgtggaggcctacctgcagaatttgtttagcttatcacagctagacaagtacgctcccgaaaatctggatgagcagataaagaaggtctctcagcagattctggagaagcgggcatatatatgcgctcaccctctggacaggacctgctag

SEQ ID NO: 107052 - DNA, 1467 bp, synthetic construct
  misc_feature 1..1467: note = Description of Artificial Sequence: Synthetic coding sequence
  source 1..1467: mol_type = other DNA
atggatggctctatcaccgtcaccctcgcagcgcatcaggcaattggactgaaggggataattttggccggtaccgaggagcagaaagccaagtatctccctaaattagccagcggcgaacacatcgccgccttttgtctgacggagcccgcaagcgggtcggatgctgcttccattcgaagtagagccacactgtcagaggacaagaagcactatatactgaacggcagcaaggtgtggattacaaacggcgggctggctaatatctttaccgtcttcgccaagaccgaggtcgtggattctgacggatccgtcaaggacaagatcacagcatttattgttgagagggacttcgggggcgtgaccaacggaaagcctgaggacaaactgggcatcagaggtagtaacacctgcgaggtgcacttcgagaacaccaagatccccgtggagaatatccttggggaagtgggcgatggattcaaggtcgccatgaatattctcaactctggacgcttctcaatggggtccgtcgtcgcagggctactcaagcgcctgatcgagatgacagccgaatatgcctgtacacgaaagcagttcaacaaacgtctgtccgaattcggccttatccaggagaagtttgccctgatggcacagaaggcttatgtaatggagtcaatgacctatcttaccgccggcatgttggatcaaccgggcttcccagattgcagcattgaagcagccatggtgaaagtgttctcttccgaggccgcttggcagtgtgtttccgaggccctgcagattctaggaggcttgggctacaccagggattacccttacgagagaattctgcgagatacacggatcctcctcatttttgagggtaccaacgagattctgcgcatgtatattgccttaactgggctgcagcatgctggaaggatactgacaacccgaatccacgagctcaagcaagcgaaagtgagtacagttatggacacagtagggcggcggctgcgggattctctgggtagaactgtcgatcttggcctcactgggaatcatggcgttgtccatccttcattagccgacagcgctaataaattcgaggagaatacttattgcttcgggcgtacagttgagacactcctgctgcgcttcggcaagacaattatggaagagcagctagtccttaagcgtgtggctaacatactgatcaatctgtacggaatgaccgcagtactcagccgcgcctcccgcagtattcgtattggcttacgaaatcatgaccacgaggtgttgctggccaataccttctgtgtcgaggcatatctgcagaatttgtttagcctgtcccaattggacaaatatgccccggaaaacctcgatgagcagatcaagaaagtgtcccagcagatcttggagaagcgcgcttatatctgcgcccatccactggacagaacttgttag

SEQ ID NO: 107053 - DNA, 507 bp, synthetic construct
  misc_feature 1..507: note = Description of Artificial Sequence: Synthetic coding sequence
  source 1..507: mol_type = other DNA
atggaggagcagctggttctcaaaggtggacagcatccacaccaacccgtctggcatgacggtcgtgccgtggctggccagcctcttcatcctcattgggcaccacagccacgacctcgggggagtctcggccagcatctccttagaggtagcctgttggcagagagtctgcagcccttaagtgctggacaggtatgtagtaggaagccacgtagcagactcagaaaatgtcctagtaggagtctgaggtcagagcctattagcgtaccaacactctggaccggtcacgctgaacgagggcagtgtcctctgctcccacccgctccaacgcacggcccactgttggatgactgttatagcttttttaggcggctgggcctgtcccaggtgaagccttttgtacctaggctacacttaaagggttgtagactagcctgggagagcctcttccaagtgctgacatgccggcagtgcagcctcacaggcccaagccagctgctcaattag

SEQ ID NO: 107054 - DNA, 1239 bp, synthetic construct
  misc_feature 1..1239: note = Description of Artificial Sequence: Synthetic coding sequence
  source 1..1239: mol_type = other DNA
atggctgccgcgctactggccagggcctcagggcccgcccggcgcgctctttgcccaagagcctggcgtcagttgcacacaatttatcagagtgttgaactacccgagacacatcagatgttgttgcaaacatgtagggactttgctgaaaaagagttgtttcctatagccgcccaagtggacaaagagcatctgttcccggccgcccaagtgaaaaagatgggcggtctgggattgctggcaatggacgtcccggaagagctgggcggcgccggactcgactaccttgcctatgccattgccatggaggagatctctcgggggtgcgcttccactggcgttatcatgtctgtgaataatagcttgtacctcggtccaatattgaagttcggatccaaagagcagaagcaggcttgggtgacaccattcacctccggagataagattggctgcttcgcactgtctgagccagggaacggatccgatgccggcgctgcaagcaccaccgcacgcgctgagggagactcttgggttttgaacggtaccaaggcatggattaccaatgcctgggaagccagcgccgccgttgtgttcgcatcaactgatcgcgccctgcagaataaaggaatctctgccttcctggtgccgatgcctacccccggattgacacttggcaagaaagaggataagcttggaatcaggggcagctcaacagccaacctgatatttgaagattgcaggatcccaaaggattcaatcctgggagaaccaggaatgggcttcaagattgcaatgcagactctcgatatgggacggatcgggatcgcctctcaagctctcggaatcgcgcagactgcactggattgcgccgtcaattacgctgagaaccgaatggccttcggagcaccgttaaccaaattacaagtgatacagtttaaactcgcggatatggccttggccctcgagagtgctaggctcctaacatggcgggctgcaatgctgaaggacaacaagaagccatttattaaggaggccgcgatggcaaagctggccgcgtctgaggccgcaaccgctattagccaccaggctattcagatcttaggaggaatgggttacgtcacggagatgccagcggagcgacattatcgggacgctcggatcactgagatatatgagggtactagtgagattcagagactggtaatcgccggacatcttcttaggtcctatagatcatag

SEQ ID NO: 107055 - DNA, 1365 bp, synthetic construct
  misc_feature 1..1365: note = Description of Artificial Sequence: Synthetic coding sequence
  source 1..1365: mol_type = other DNA
atggctgcggggttcgggagatgttgtcgcgtgctgcgcagcatttcccgttttcactggcgaagccaacacacaaaagccaatcggcaacgggagcccgggctgggcttctcctttgagttcactgagcagcaaaaagagtttcaagccacagcacggaaattcgctcgggaggagataatcccagtggctgccgaatatgacaaaactggagaatatcccgtgccactaatcaggagagcttgggagttgggtctgatgaacacacacatccctgaaaactgcgactatagcgtgtgtcccctgctggaagcatgcacactgtacctcgacgctttcttccttttacttaccggatccaacctgaatttgcatctgaacctgggcggcttaggtttgggtacatttgatgcctgcctgatctccgaggaactagcctatggctgtaccggtgttcagacagccattgaggggaactcactggggcagatgcccattattatagccggaaatgaccagcaaaagaaaaagtatttggggcgtatgactgaagagccgctgatgtgcgcctactgtgtaacagaacctggcgccggctcagatgttgctggaattaagacgaaagcagagaagaaaggtgatgagtatataattaacggtcaaaaaatgtggattacaaacggcggcaaggctaattggtactttctcttggccaggtcagatcccgacccgaaagccccggcgaacaaggccttcaccgggtttatcgtggaagctgatacgcccgggatacagattggacggaaagagctgaatatgggacagagatgtagtgacacaagaggaatagtgtttgaggacgtaaaggtccccaaagagaatgtgctgataggagatggggcgggcttcaaggtggcgatgggggcctttgacaagactcgccctgtagttgcagcaggagctgtgggactggctcagcgggcgctcgacgaggccacgaaatacgcactcgagcggaaaacatttggcaaactgctggtggaacaccaggccattagctttatgctggcggagatggctatgaaagtggagctcgcaaggatgagttaccagcgagctgcatgggaggtggactctgggagacgcaacacctactacgcgagcattgccaaggcctttgccggcgatatcgccaatcaactggccactgatgctgtgcaaattctggggggaaacggatttaataccgagtacccggtggagaaactgatgcgcgacgctaagatttatcaaatctatgaaggcacatcccaaatacagcggctaatagtagcaagagagcacatcgataaatataaaaactag

SEQ ID NO: 107056 - DNA, 1266 bp, synthetic construct
  misc_feature 1..1266: note = Description of Artificial Sequence: Synthetic coding sequence
  source 1..1266: mol_type = other DNA
atggctgccgggtttggacggtgttgtagggttttacgctcaataagccgtttccactggcgctcccagcacaccaaagcaaatagacagcgtgagcccggtttgggcttcagctttgagtttactgagcaacaaaaggaattccaagcaacagcccggaaattcgcccgggaggaaatcatccccgtggcagcagaatatgacaaaaccggagagtaccctgtgcccctgattcggagagcttgggaattaggcttgatgaacacccacatccccgagaattgcggagggctcggactcggtactttcgatgcatgtctcatatctgaggagctcgcatatgggtgcacaggagttcaaactgcaattgaaggaaattccctgggccagatgccgattatcatcgccggtaacgatcaacagaagaagaaatacttggggcggatgacagaggaacccctgatgtgcgcatattgtgtaaccgaaccgggagcggggtctgacgttgccgggatcaagactaaggctgaaaagaaaggcgatgagtatattataaacggtcaaaagatgtggattacaaatggaggcaaggcaaactggtactttctcttggcccgtagcgatcccgatcctaaagccccagcaaataaagcatttactggctttatcgtggaagccgacaccccaggcatacaaatcgggcggaaggagctaaatatgggccagcgttgttcggatacacggggcatagtgttcgaggatgtgaaggtccctaaggaaaacgtgctgatcggcgacggtgcaggcttcaaggtggccatgggcgccttcgataagacgaggccagtggtggcagctggagcagtgggtctcgctcagcgggcactagatgaagctaccaaatacgccctggaacgaaaaactttcggcaagcttctggtcgagcaccaggccatttcatttatgctggccgagatggcaatgaaggttgagctggcccgtatgtcctaccagcgggccgcctgggaagtcgattccgggaggaggaatacttattacgcatcaattgcaaaagcatttgctggagatattgctaaccagttggcgacagatgccgtccagattcttggggggaacgggttcaacacagagtaccctgtggaaaagctgatgagagatgccaagatctatcagatatacgagggtacctcacagatccagaggttgattgtggccagggagcacatcgacaagtacaagaattag

SEQ ID NO: 107057 - DNA, 1278 bp, synthetic construct
  misc_feature 1..1278: note = Description of Artificial Sequence: Synthetic coding sequence
  source 1..1278: mol_type = other DNA
atggctgccgggttcggccgctgttgtcggtgctctcttcaggtgctgcggtccatcagtaggtttcactggcgctcccagcatacaaaagctaacaggcagagagaacctggcttgggctttagttttgaattcaccgaacagcagaaggaatttcaggccactgctagaaagtttgcacgcgaagaaatcatccccgtcgccgctgagtacgacaagaccggggaatatcccgtccctcttatccggcgcgcgtgggaactgggtctcatgaacacccacatccccgagaattgtggaggcctgggacttggcacatttgacgcttgtctcatcagtgaagagttggcatacggctgtaccggcgtgcaaactgcaatcgaaggaaacagtctcggccagatgcccatcataattgccggcaacgatcaacagaaaaagaaatacctgggacgtatgacagaagagcccctgatgtgtgcctactgcgtgaccgagccaggagccggaagtgacgtggcaggaatcaaaactaaagctgagaaaaagggggatgaatatattattaacggacagaagatgtggatcactaacggtggaaaggcgaattggtacttcctgttagctagaagtgatcccgaccccaaggccccagctaataaagctttcaccggctttatcgtcgaggcagacacgcctggaatccaaattggcaggaaggaacttaatatggggcagaggtgtagcgatacaaggggaattgtattcgaagacgtgaaggtacctaaagaaaatgtgcttattggagatggcgctggattcaaggtcgctatgggcgctttcgataaaacacggcctgtggtggctgccggagccgtgggactggctcagcgagctctggatgaggctaccaagtacgcgctggagcgtaagaccttcgggaagcttctggttgagcatcaggccatatccttcatgttagccgaaatggccatgaaggtagagctggctagaatgtcttaccagcgcgctgcctgggaagtcgactcaggcaggaggaacacgtactatgcttccatagcaaaggcctttgctggagacattgccaatcagttggcaaccgacgcagtacaaattctgggaggcaatggctttaacacggaatacccggtggaaaagcttatgagggacgccaagatttatcagatttacgaggggacaagccagatccagaggttgattgtggcaagggagcatattgacaagtataagaattag

SEQ ID NO: 107058 - DNA, 1158 bp, synthetic construct
  misc_feature 1..1158: note = Description of Artificial Sequence: Synthetic coding sequence
  source 1..1158: mol_type = other DNA
atgctgcaagaattcaccgagcagcagaaggagttccaagctacagcgcggaagttcgcccgggaggaaattatccctgtggccgcagaatacgacaaaactggcgagtaccccgtccccctgattaggcgcgcatgggagctgggactgatgaacacacacattccagagaactgtggaggcttaggcctggggacctttgacgcctgtcttattagcgaagaactggcgtatggctgtaccggagttcagactgccatcgaaggaaatagcctaggccagatgcccattatcatagcaggaaacgaccaacaaaaaaaaaagtatctgggtcggatgacggaggagccccttatgtgtgcttattgtgtcaccgagcccggggcagggagtgacgtggccggcattaagaccaaggcggagaaaaaaggtgacgagtacatcattaacggccagaagatgtggatcaccaatggggggaaagcaaattggtacttcctattagctcggtctgatcctgatcctaaggcgcccgctaacaaggcattcaccggcttcattgtcgaggccgacacacccggcattcaaatcggccgtaaggaactcaatatgggccaacggtgtagcgacacaaggggtattgtgtttgaggatgtgaaagttcccaaggagaacgttctgatcggagacggcgcggggttcaaagtcgccatgggggccttcgataagacacgtcctgtggttgccgccggggctgtgggcctggctcagagggctttggacgaggcgacgaagtatgcgctagagagaaagactttcgggaagctgctggtcgagcatcaagcaatttccttcatgcttgctgagatggccatgaaggtggagctcgctcgcatgtcctatcagagggccgcttgggaagttgacagcggccggcggaacacttattatgcaagcatcgcaaaagcctttgcaggggacattgctaatcaactggccaccgacgccgtgcagatcttaggtgggaacggtttcaacacagagtaccctgttgagaagctgatgcgggacgcgaaaatttaccagatctatgaaggcacctctcaaatccagcgcctgatagtcgccagagaacacatcgacaaatataagaattag

SEQ ID NO: 107059 - DNA, 699 bp, synthetic construct
  misc_feature 1..699: note = Description of Artificial Sequence: Synthetic coding sequence
  source 1..699: mol_type = other DNA
atgtggattacaaatggtggcaaggcaaattggtactttttactggcacggtctgacccagacccaaaagcccctgccaacaaagcttttaccggcttcatcgtggaagccgataccccaggtatccaaattggaaggaaggagcttaacatggggcaacgctgtagtgacactagaggcatcgtatttgaggatgtcaaggtcccaaaggagaatgtgctcattggggacggtgctggattcaaggtagctatgggcgctttcgataaaacccgtcccgtggttgccgccggcgccgtcggcttggcacagcgcgcactggatgaagctactaaatatgctctggagagaaagacctttgggaagcttttagtggagcaccaagccattagctttatgctcgccgaaatggcaatgaaggtggaattggcccgaatgtcttaccagagggccgcatgggaagttgacagtggtagaagaaacacctattacgcatccattgctaaggcgttcgcaggggacatcgccaatcagctggccaccgatgccgtgcagatactgggcggcaacggtttcaatacagagtacccagtggaaaagttaatgagagacgcaaaaatctatcagatctacgagggaacctcgcagatccagcggttaatcgtggccagggaacatatcgacaaatacaaaaactag

SEQ ID NO: 107060 - DNA, 1446 bp, synthetic construct
  misc_feature 1..1446: note = Description of Artificial Sequence: Synthetic coding sequence
  source 1..1446: mol_type = other DNA
atggatggggcagtaatggagggtcctttgttccttcaaagccaacgctttgggacaaagcggtggcgtaagacatgggctgtgctgtacccagcctccccccacggagtggcacgccttgaattcttcgaccataaaggaagctcaagcgggggtggtcgcgggagctctcgaaggttagattgcaaggtcataaggcttgcagaatgtgtttccgttgccccagttacggtggaaaccccgcctgaacctggagctaccgcatttcggcttgacacagcccagagaagtcatctcctggccgccgatgctccatccagcgctgcctgggtgcagaccttgtgtagaaacgctttccctaaaggcagttggacactcgcccccacagataatcctcccaaactttctgccctggagatgctcgaaaactctctctattcccctacatgggagggttcccagttctgggtgactgtgcagcgcacagaagcagcagagcgctgtggcctgcatggctcctatgttctgcgggttgaggccgagcgcctgacccttcttacggtcggcgcccagtcccagatacttgagccactgctgtcttggccatatactcttttgaggaggtatgggcgcgataaggtgatgtttagcttcgaagcagggagacgatgtcccagcggacctggaacattcacattccagacagcacaaggaaatgacattttccaggcggtagagacggccatccaccgccagaaagcccaggggaaagcagggcagggtcatgacgtcctgcgggcggactctcacgagggcgaagtagcagaagggaagctacctagtccccctggaccccaggaacttctggacagtccacccgccttgtacgcagagcccctagatagtttgaggattgcaccatgtccgtcccaggattccctctatagcgatccactggattctacctccgctcaagcaggcgagggcgtgcagcggaaaaagcctctgtactgggatctgtatgaacatgctcagcagcaactactgaaggcaaaactaacagatcccaaggaggaccccatctacgatgagcctgagggactggctcccgtgccacctcagggcctgtatgatctgccccgcgagcctaaggacgcgtggtggtgtcaggcccgagttaaggaagagggatacgaattgccttataatccagcaactgacgactatgcagtcccaccgccccgcagcactaaaccgctactcgccccgaaacctcagggccctgcctttcctgaaccaggaacagccacagggagcggaattaaatcacacaattccgcgttgtattctcaggtccagaaatcgggggcaagcgggagctgggattgtggcttatcccgggtcggcaccgacaaaacaggggtcaagagcgaaggctccacttag

SEQ ID NO: 107061 - DNA, 1299 bp, synthetic construct
  misc_feature 1..1299: note = Description of Artificial Sequence: Synthetic coding sequence
  source 1..1299: mol_type = other DNA
atggaggggcttgctgtgcgtcttctgaggggtagtcgtctgctccggcggaacttcctgacatgcctgagttcctggaagatccctccacacgtatccaagagctcacagtctgaggccttgctcaatatcacaaataatgggatccatttcgccccactccaaaccttcaccgatgaggaaatgatgataaagtcctcggtgaaaaagttcgctcaggagcaaattgctccactggtgtctactatggacgaaaattcaaagatggagaaatcggttatacaggggcttttccaacaggggttgatgggaatcgaagtggacccggaatacggggggaccggagcgtcctttcttagcaccgtgcttgtgatagaggagctcgctaaagtggatgccagtgttgccgtcttctgcgaaatccagaatactttgattaatacccttatcagaaaacatggaaccgaagagcagaaggctacttacctgccccaacttaccaccgagaaagtgggaagtttctgtctgtctgaagcaggcgctggatctgacagcttcgcactgaaaacacgggcggataaagagggcgattattacgtattgaacggatcaaagatgtggatttcctccgctgagcacgccggtctcttcttggtgatggctaacgtggaccccaccattggatacaaaggcatcacctcattcctggttgaccgggacacaccgggactccacatcggtaaacctgagaacaagttgggtctgagagcctcaagcacgtgccctctcacttttgagaatgtcaaagtgccggaagccaatattctcggtcaaataggccatggttacaaatacgctattggttcccttaatgaaggtcggatcgggatcgcagctcaaatgctgggactggcccaaggttgcttcgactatacaatcccttacatcaaggagaggattcagtttggcaaacggctctttgacttccaaggtctccaacatcaggtcgcacacgtggcgactcagttagaggccgcacgcctccttacgtacaacgccgccagactactcgaggcgggcaaacccttcataaaggaggcctcaatggctaagtattacgcttccgaaatcgcaggacagacgactagtaaatgtattgagtggatgggtggcgtgggttacactaaggactaccccgtggaaaagtactttcgcgacgctaaaattgggaccatctatgagggagcctccaatatacagctcaataccatcgctaaacacatcgacgctgaatactag

SEQ ID NO: 107062 - DNA, 993 bp, synthetic construct
  misc_feature 1..993: note = Description of Artificial Sequence: Synthetic coding sequence
  source 1..993: mol_type = other DNA
atgggcattgaagtggaccctgaatacggaggaactggcgccagtttcctctctaccgtgctcgtgatcgaagagctggccaaggttgacgccagtgtggctgtattctgtgaaattcagaataccctcatcaataccctgatcagaaagcacggtaccgaggaacagaaagcaacgtacttgccacaacttaccaccgaaaaggtgggatcattctgtctatccgaagcgggggccgggtcggattccttcgcactcaagacccgtgcggataaggagggcgactactacgtactgaacgggtctaagatgtggatttctagcgctgagcacgcaggcctgtttttggtgatggccaatgtggaccctactattgggtataaagggatcacctcattcctggtcgacagagacaccccagggctgcacattggcaagcccgagaataagctgggccttcgcgcctcttcgacttgccccctcacttttgagaatgtcaaagtgccagaagcaaatatcttaggacagattggacacggctacaagtacgccattggctctttgaatgaagggaggattggcattgcagcgcaaatgctaggcctagcccagggatgttttgattacaccattccttatatcaaagaacgaatccagtttggcaagaggctgtttgatttccaaggactccagcatcaagttgctcatgtggctacacagttggaagcagcacggctgttaacctacaacgccgccaggctccttgaggcaggaaagcctttcattaaggaggcctccatggcaaaatattatgcctctgagatcgccgggcagacaaccagcaaatgcattgagtggatgggaggagtcgggtataccaaggattaccccgtggagaagtatttcagggatgctaaaatcggtaccatctatgagggcgcctccaatatccagttgaatactattgctaaacacatagatgccgagtactag

SEQ ID NO: 107063 - DNA, 1968 bp, synthetic construct
  misc_feature 1..1968: note = Description of Artificial Sequence: Synthetic coding sequence
  source 1..1968: mol_type = other DNA
atgcaggcagcccgcatggcggcgagcctgggccgccagcttcttcgcctgggcggcggatcttctcgcctgacggccctgctcggccaacctaggccaggtcccgctcgacggccttacgcgggaggagccgcgcagctggctctcgacaagtcggactctcacccaagcgatgccctcacacgcaagaagcctgctaaggctgaatccaaaagcttcgctgttggaatgttcaaagggcagttgactaccgaccaggtcttcccatatccttctgtcttgaacgaggagcagacacagtttctgaaggagttggtcgagccggtctccaggtttttcgaagaagtgaacgatcctgctaagaacgacgcactggagatggtggaggaaactacctggcaggggctgaaggaactgggagcctttggactccaggtgccgtctgagttagggggggtgggcctgtgtaatactcaatatgcccgcttagtggagatcgtgggaatgcacgacctcggagtagggatcacattgggagcacaccagtcaattggcttcaaaggcattctcctgtttgggacgaaggcccaaaaagagaagtacctacccaagctggcaagcggggagacagtagcagccttttgcctcactgaacccagcagcggctcggacgccgcgagcattcgaacaagcgcagtgccaagtccgtgtgggaagtattatacactaaatggctctaaactttggatctccaacggaggcttggccgacattttcaccgtgttcgcgaagactccagttaccgaccccgctaccggggctgttaaagaaaagataacagcatttgtcgtcgagcggggcttcggcggtataacccacggtccgccagaaaagaagatgggcatcaaggcaagcaacactgccgaggttttttttgacggcgttcgagtgccttccgaaaacgtacttggtgaggtggggagcgggttcaaggtagccatgcacatcctcaataacggacgtttcgggatggccgctgctctcgcggggactatgagaggtatcatcgccaaggctgtggaccacgctaccaatagaacccagtttggagagaagatccataactttggcctgatccaggaaaagctggcaagaatggtgatgctccaatacgtgactgaaagtatggcctatatggtctccgccaacatggaccaaggggccactgactttcaaattgaggctgccatttcaaagatcttcggttccgaggccgcttggaaagtgaccgacgagtgtatacagatcatgggtggcatgggcttcatgaaggaacctggggtggagcgcgtgctccgggacctgaggattttccgaatatttgagggcacaaatgacatcctacggcttttcgtggcactgcagggatgcatggacaaggggaaggagctgtcaggccttggctccgcacttaaaaacccgttcggcaacgctggattgctcctaggcgaagccggtaagcagttgaggcgaagagcgggacttgggtctggactgtcactctctggattagtgcaccctgagttgagtcgttcaggggagctggctgtccgagccttggagcagtttgccaccgtggtggaggcaaaactcatcaagcataaaaagggaattgtcaacgaacagtttctcctccagcgcttggctgacggcgccattgacctgtacgccatggtagtcgtgctctcacgagcatcccgcagcttgagcgaggggcacccaacggcccagcacgaaaagatgttgtgcgatacctggtgcatcgaagctgccgccagaatccgagaagggatggctgcgctgcaatccgatccctggcagcaagagctctatagaaatttcaaatctatctcgaaagctttagtggagagagggggcgtggtcacaagcaatccccttggcttctag

SEQ ID NO: 107064 - DNA, 1902 bp, synthetic construct
  misc_feature 1..1902: note = Description of Artificial Sequence: Synthetic coding sequence
  source 1..1902: mol_type = other DNA
atgcaggctgctcgtatggccgcatcactgggccggcagcttctccgccttgggggcggcagctctcggctaaccgcgctgttgggccagccccgtccaggtcctgcgcggagaccgtatgcaggtggtgcagcacaggagagcaagagtttcgctgtcgggatgtttaagggtcaactgacgaccgatcaggtcttcccctatccgtcagtgttaaatgaggagcagacccagtttttgaaggagctggtggaaccggtgagtcggttctttgaggaagtgaatgacccagccaagaacgacgcgctggaaatggtcgaggaaaccacttggcaagggttgaaggagctgggagcatttggcctgcaggtgccaagcgaactaggtggagttggactgtgtaatactcagtacgcccggttggtggaaattgtgggtatgcatgatctcggggtcgggatcaccctgggggcccaccaatcaatcggctttaagggaatccttctgttcgggaccaaggctcagaaggagaagtacctccctaagctcgccagcggcgaaacggtcgctgccttctgtcttacggagcctagctccggctctgatgccgccagtatcagaacaagcgcagtgccatctccttgcgggaaatattataccctgaatggaagtaaattgtggatttctaacgggggtctggccgacattttcacagtctttgcaaaaactccggtgactgaccccgcgaccggcgctgttaaggagaaaataactgcgtttgttgtagagagagggtttggcggaatcactcacggtcctcctgaaaaaaagatggggattaaagcttccaatacagccgaagtgttctttgatggtgtccgagtccccagtgagaacgtgctcggcgaagtgggctctggatttaaagtggctatgcatatacttaacaatggcagattcgggatggcagccgccctggccggcaccatgcgagggatcatcgccaaggctgtggaccacgccacgaacaggacacaatttggtgaaaaaatacataacttcggcctcattcaagaaaagttggcgcgcatggtgatgcttcaatacgtgactgaaagcatggcctatatggtgtccgctaacatggatcagggagcaaccgacttccaaatcgaagcagctattagcaagatctttgggtccgaggccgcatggaaggtcacagatgagtgtatccagatcatggggggtatgggtttcatgaaagaaccaggagtcgagagggtgctgagggatctgcgcattttcagaatattcgaaggtactaatgacattcttcgcctctttgtcgctttacaagggtgcatggataaggggaaggagctgtccgggttgggatctgccctcaagaacccattcggaaatgctggcctgctcctgggagaggccggaaagcagctacgtcgccgtgctggtcttggatcaggtctgtcactcagtggtctggtacacccagagctgtcccgaagtggcgaattagcggtgcgcgctctggaacagttcgctacagtggttgaggccaaactgatcaagcacaaaaaggggattgtcaacgaacagttcctcctgcagaggctggctgacggtgctattgacctttatgccatggtggtcgtgttgtcacgggcttcccgatctttgtccgaaggccacccaacagcccaacatgaaaagatgttgtgtgatacttggtgcatcgaggctgcagccaggatccgggaaggcatggcagccttgcagtccgacccttggcagcaggagctctatcgtaatttcaaatccatctctaaagccctcgtggaaagaggtggggtggttacatctaaccccctggggttttag

SEQ ID NO: 107065 - DNA, 2106 bp, synthetic construct
  misc_feature 1..2106: note = Description of Artificial Sequence: Synthetic coding sequence
  source 1..2106: mol_type = other DNA
atgcccaggggcccccagccaagcgcagccagatgtaccgttgatgacgaatccggcctgggagcccccggcagggggagagcaggtagacagtcctgggtgcgcgctagggctagcggcgcccggcgcgactccgagatgcaagcggcacgcatggctgcgtccttggggaggcagctcctgaggctcggtggcgggagctcccgcctcacagccctgctgggacaacccagacctggccccgcccgtcgtccttacgcgggaggggcggcccagcttgctctggacaaatcagactcacatccgtctgacgctttaacaagaaaaaaacctgctaaggcagaatcaaagtcttttgctgtcgggatgttcaaaggccaattgacaactgaccaagtcttcccttacccatccgtgctgaatgaggagcaaactcagttcctaaaggagctggtggagcctgtttcacgtttctttgaggaagtgaacgatccagccaaaaatgatgcgctcgagatggtggaggagactacctggcaggggctgaaagagctaggagcttttggattacaggtaccgtcagagttgggaggcgtcggactttgcaatacccagtacgcaaggctggtggaaattgtggggatgcacgatcttggagtcggtatcaccctaggggcccatcagagcatcggcttcaaaggtattttgctctttgggactaaagctcagaaagaaaagtatcttcctaagttagcttctggcgagacagtggcggccttttgcctgacagagccctcttccggttctgacgcagcatctatccgaacaagcgccgtgccttccccttgtggaaaatattacactttaaatggatccaagctatggatttcgaacggaggtctggctgacatttttaccgtgttcgcaaagaccccagtgacagatccagccactggggccgtcaaagaaaaaatcacggccttcgtggtggagcgggggtttggaggcatcacccatggcccgcctgagaaaaagatgggaattaaggcgagcaatacagcagaggttttctttgatggcgtgcgcgtgcccagcgaaaacgtgttgggagaagttggatctggattcaaggtggctatgcatattcttaataatggacgattcggaatggctgctgctctagccggtacaatgaggggaatcatcgcgaaggctgtcgaccacgctactaatcggacacagttcggcgaaaagatacacaactttggtctgatccaggagaaactggcacgcatggtgatgctgcaatacgtgaccgaaagtatggcctacatggtgagcgctaatatggaccagggcgccaccgattttcaaattgaggctgccatctccaaaattttcggaagcgaggccgcctggaaggttactgacgagtgtatccagatcatgggcggcatggggttcatgaaagaacctggcgttgaaagggtgctgagggatctccgcatcttccgaatttttgaaggcactaatgacatactccggctgttcgtcgcacttcaagggtgtatggacaagggaaaggaactcagcggactcggctctgccctcaaaaacccttttggcaacgccggccttcttctgggagaggcggggaagcagctgaggagacgcgccggactcggcagcgggttgagtttgtccggtctggtgcaccctgaactttctcggtccggagagttagcggtgagagcccttgaacagtttgcaaccgtggtcgaagctaagctaatcaagcataagaagggtatcgtgaacgagcagttcttactgcagagattggcagacggagcaattgatctgtacgccatggtggtcgtgctgtcgagggcatcacgatcccttagtgagggacacccgaccgcccagcatgagaaaatgctttgcgatacatggtgcattgaggcggctgctaggattcgggagggtatggcggcgttgcagagtgatccttggcagcaggagttataccggaactttaagagcattagcaaagcgctcgtcgaacgagggggagtggttaccagcaatccccttggtttttag

SEQ ID NO: 107066 - DNA, 2106 bp, synthetic construct
  misc_feature 1..2106: note = Description of Artificial Sequence: Synthetic coding sequence
  source 1..2106: mol_type = other DNA
atgcctcgcggtcctcagccgagcgctgctaggtgcaccgttgacgatgagtcaggactgggcgcgccagggaggggccgggccgggaggcagtcatgggttagggccagggcgtctggagctcgccgagacagtgagatgcaggctgcacgtatggccgccagtctggggaggcagctgctcagattagggggcgggtctagcaggctaactgctttacttgggcagccacgaccaggaccagccaggcggccatacgcgggaggggccgctcagctggccctggataagagtgacagtcacccctccgatgctctgacccgaaagaagcccgccaaagcagagtccaagagttttgcagtgggtatgttcaaaggccagttaacaacagatcaggtttttccttacccatccgtgcttaatgaggaacagactcagtttctaaaggaactggtggagcccgtctcacgcttctttgaggaggtaaatgatcccgccaagaatgacgctctggaaatggtagaggagacaacctggcagggactgaaggagttgggcgcattcggtctccaggtccctagcgaacttggcggggtcgggctgtgcaatactcaatacgctagactggtggaaatcgtgggaatgcatgatttgggtgtcgggattactctgggagcacatcagtccataggtttcaagggcatccttctgttcgggacgaaagctcaaaaagagaagtatctgcccaagctggcgagcggagaaactgtggctgccttctgtctcacggagcccagctccggtagtgatgccgcatctattagaacgagtgctgttccatctccatgcggaaagtattacacactgaatggaagtaaactttggatctcgaatggcggcctcgcagacatcttcactgtttttgccaagacaccagttacggatccggctaccggagcagtcaaggaaaagatcaccgccttcgtcgtcgagcgcgggttcgggggcattacccatggtcctccagagaagaaaatggggattaaggccagtaacacagccgaggtgttctttgacggtgttcgggtgcccagtgagaatgttctcggcgaggtaggttccggctttaaggtagcaatgcatatcctcaacaacggcaggttcggaatggcagcagctctagcgggtactatgcgcggcatcattgccaaagccgtcgatcacgctactaaccgcacgcagtttggcgagaagattcataattttggtctgatccaggagaaactagcgagaatggtaatgcttcagtacgtcaccgagtcgatggcctatatggtcagtgctaacatggatcaaggagcgactgactttcaaatcgaagcggccattagcaaaattttcggttcagaggcggcctggaaggtgaccgatgaatgcattcagattatgggaggcatgggattcatgaaagaacccggagtggagagagtcctgagagatctcagaatattccggatctttgaaggcactaatgatatcttgcggctgtttgtggctctacagggttgtatggataagggcaaggaactctccggcttgggaagcgctctaaaaaacccattcggcaatgcaggtttgctgctcggcgaagccggtaagcaactgcgccgccgcgcaggattagggagcggcctgagcctgtccggactcgtgcacccagagctctcccgcagcggggagctggccgtgagggccctagagcaatttgctacggtagtcgaggcaaaattgatcaagcataaaaaaggcatcgtcaacgaacagtttcttctgcaaaggctggcggacggagccattgatctctatgctatggtcgtagtgctctccagggcttcccgctctctatcagagggccatcctactgcccagcatgagaagatgctctgcgacacttggtgcatcgaagccgccgcccgcatccgtgaaggcatggccgccctacagtcagacccctggcagcaggaactgtacagaaattttaaaagcatctcaaaagcgctcgtggagagaggcggtgtggtgacttcaaatcctctgggtttctag

SEQ ID NO: 107067 - DNA, 2037 bp, synthetic construct
  misc_feature 1..2037: note = Description of Artificial Sequence: Synthetic coding sequence
  source 1..2037: mol_type = other DNA
atgttggggggtcttgccgcggccgctgggacccgcataatgggaaaagagatagaagccgaagcacaaaggcccctgcgacaaacatggcggccaggccagccccctgccatgaccgctaagaccatgtcctctagactgactgctctcctcggtcagcctcgtcccggccccgcacgcaggccctacgctggcggagcagctcaactggctctcgacaagtccgactctcacccgtctgatgccctgactcggaaaaaacctgccaaagctgagagcaagagttttgccgtcgggatgttcaagggtcagctgacaactgatcaagtgtttccataccccagcgtcttgaatgaggagcaaacccaattcctgaaagaactggtggaacccgtgtctcggttctttgaggaagtaaatgaccccgccaagaatgacgcactggagatggtcgaggaaaccacttggcaagggctgaaggaactcggagccttcgggctccaggtgcctagcgaactgggcggcgtggggctctgtaatactcaatacgcgcgattggtggaaattgtcggtatgcacgatttaggggtaggcatcaccctgggagcacaccaaagtattgggttcaaagggatcctgctgttcggcactaaggcgcaaaaggagaaatacctccccaaactagcaagtggggagacagtggccgccttttgtcttacagagccatctagcggaagtgacgccgctagcatcaggacatccgcagttccatccccttgtggcaagtattacaccctgaatgggagtaaactgtggatttctaatggaggcctggctgatatcttcaccgtgttcgctaagacacctgtcactgatcctgccaccggcgctgtcaaagagaaaatcacagcattcgtggtggaaaggggttttggcggcattacccatggcccccccgagaagaaaatgggaatcaaggcaagcaataccgcagaagttttctttgatggtgtcagggttccatccgaaaatgtgctgggcgaggtgggctccggctttaaggtggccatgcatatcctgaataacggccggttcgggatggccgcagctttagcagggacaatgcgggggatcattgcaaaagccgtagaccacgctactaacagaacacagttcggtgaaaagatccacaactttggcctgattcaggagaaactggcccggatggttatgctgcagtatgtcaccgagtcaatggcctacatggtgtcagcaaacatggaccagggcgctaccgacttccagatcgaggccgctattagcaaaatcttcggaagtgaagcggcctggaaagtcacagacgaatgcattcagattatgggaggtatgggctttatgaaggagcccggagtggaacgcgtgttaagagacctgcgaatcttccgtatcttcgaggggaccaacgatatcctgcgcctgttcgtggccttgcaaggatgcatggacaagggcaaagagctgtcgggactgggcagtgcgctgaagaaccccttcgggaacgcggggctgctactcggcgaggccggaaaacagcttcgcagacgtgccggcctcggcagcgggctgagtttatcaggcctggtgcacccggagctgagccgctcaggtgaattggcagtgcgagctctggagcagtttgcaacggtcgtcgaggccaagctcatcaaacacaaaaaagggattgtgaatgaacaattcctactccagcgactggctgatggcgctatcgatctctatgctatggtggttgttctttccagagcttccagatccttgtccgaggggcaccccaccgcccagcacgagaaaatgttgtgtgacacttggtgtatcgaagccgctgcccgtattcgagagggtatggccgcgctgcagtctgacccctggcaacaagaactgtatcgaaactttaaaagcatctccaaggccttggtagagcggggaggcgtagtcacatcaaacccgttgggcttttag

SEQ ID NO: 107068 - DNA, 1983 bp, synthetic construct
  misc_feature 1..1983: note = Description of Artificial Sequence: Synthetic coding sequence
  source 1..1983: mol_type = other DNA
atgaaccctgacctacggcgtgaacgggactcagcttcttttaaccccgagttgctcacgcacatccttgatgggagcccggagaagacaaggcgcaggcgcgaaattgagaacatgattctgaacgatccagacttccaacatgaagacctgaacttcctcacccgatcccagcgctatgaagtcgcggtgcggaagagcgcaatcatggtcaagaagatgagggaatttggaatcgctgacccagacgagattatgtggttcaagaattttgtgcaccggggcaggccagagccgctcgatctgcaccttggcatgtttctgccaacactgctccaccaggctaccgccgagcaacaagaacgattcttcatgcccgcttggaatttagaaattataggaacatacgcccagactgagatgggccacggcacccaccttcggggcctggaaaccactgcaacatacgacccagagacccaggagtttattttaaatagccctaccgtaacaagcatcaagtggtggccaggaggtttgggaaagacaagcaatcacgccatcgtgttggcccagctgattactaaggggaagtgctacggacttcacgcattcatcgtgcctattagggagatcggtacccacaagccgctgcccggaataaccgtcggggatatcgggcccaagtttggatatgacgagattgataacggttacctcaagatggacaaccaccgcatcccaagagagaacatgctgatgaagtacgctcaagtgaagccggatggtacttacgttaaacctctgagtaataaactcacgtacgggaccatggtgtttgtgcggtcctttttggtgggtgaggctgcacgagccctaagcaaggcctgcacgatagcaattaggtactccgcagttaggcaccagagcgaaatcaaacccggggagcctgaacctcagatactggacttccaaacacagcagtacaagctttttcctttactcgcaacagcgtacgcattccagtttgtgggagcctacatgaaggagacataccaccgcatcaatgagggaatcggacagggagacctcagtgaactacccgagctccacgctttgactgctgggctgaaggcattcacttcctggaccgcaaacacgggcatcgaggcgtgtcgaatggcttgcggaggtcatggttacagccactgcagcgggctgcctaatatatatgttaattttactcctagctgtaccttcgagggtgaaaacacagtcatgatgttacagacggctcggttccttatgaaatcttatgaccaggtgcatagcgggaaactggtgtgtgggatggtgtcctatctaaatgatctcccttctcagaggatacagcctcagcaggtggcagtgtggcctacaatggtggatattaattctccagaatcactgacagaagcttataagcttcgcgcagccagactagttgaaatcgccgccaaaaatctccagaaagaagtcatccacaggaagtctaaggaggtggcttggaacctgacatcagtggacctggtaagagcttcagaggcccactgccactacgtggtggtcaaacttttcagcgagaagctattgaaaatccaggacaaggcaatccaggcggttctgcggagcctctgtctgctctactccctgtacggcatctcacagaacgccggggactttctgcaaggttcaattatgacggagccccagatcacacaggttaaccagcgagtcaaagaactccttacactcatccgcagcgatgccgtagctttggttgatgctttcgactttcaggatgtgacattaggtagcgtcttagggcggtacgatggcaacgtctacgaaaatttgttcgaatgggccaaaaactccccactaaacaaggccgaagtccatgagtcttacaagcacctcaagtctctccagtcaaagttgtag

SEQ ID NO: 107069 - DNA, 1983 bp, synthetic construct
  misc_feature 1..1983: note = Description of Artificial Sequence: Synthetic coding sequence
  source 1..1983: mol_type = other DNA
atgaacccggatcttcgccgggagagggatagcgcctccttcaatcccgagttactcacacatatcctggacgggtccccagagaagaccaggcgccggagagagatcgagaacatgatcctgaatgacccagattttcagcatgaggacctcaactttctgactcggagccagcgttatgaggtcgctgtcaggaagtcagccattatggtgaagaagatgcgggaatttggcatcgcagatcccgacgagatcatgtggtttaaaaaactccacctagtgaactttgtggagccagtggggcttaactactctatgttcatccccacactgctcaatcaggggactactgcacagaaagagaagtggctcttgtcctccaaaggactgcagatcatcggcacctacgcacagaccgaaatgggacatgggacacaccttaggggtctagaaactacagctacttacgatcccgagacccaggaattcatcctcaacagccctacagtgacatccattaaatggtggcctgggggcctgggtaagacatcaaaccacgctattgttctcgctcaactcatcaccaaaggcaagtgttatggtctacacgcctttattgttcccattagggaaatagggacccataaacccctgccaggcatcaccgttggcgacatcggtcccaagttcggatacgatgagatcgataatgggtacctaaaaatggataatcaccgcatccctagagagaacatgttgatgaagtatgcccaagtgaaacccgatggcacttatgtcaaaccattgtcaaacaagttgacttatggcaccatggtgttcgtaagatcattcctggtaggagaagccgcaagggccctgagtaaagcctgcactattgctattcgctacagcgccgtcaggcaccagtctgagattaaacccggggagcccgagccacagattctggatttccaaacccagcagtacaagctcttcccccttctggccacagcatacgccttccagtttgtgggggcttacatgaaggaaacttaccacagaatcaacgagggtataggccaaggtgatctgtcagaactgccagagctgcacgctttaaccgcgggcctgaaggccttcacgtcttggaccgccaataccggcattgaggcatgtcgcatggcctgtggaggacacgggtacagccattgctcagggcttcctaacatctacgttaatttcacacccagttgtacttttgagggggagaacacagtgatgatgctccagacggctcgcttcctcatgaagagttatgaccaagtgcattcaggaaagctggtttgtggtatggtgagttacttgaatgatctgcccagccagagaatccagccgcagcaagttgctgtgtggcccacaatggtggacattaactctccagagagcttaaccgaggcctataagctgagagcagccaggctggtcgagatcgccgcaaaaaatttacagaaggaggtcatccacaggaaatctaaagaagtcgcctggaatttgacatcagtggacttagtccgggcttctgaagctcactgtcattatgtggtggtcaaattgttttccgaaaaacttctcaagatccaagacaaggctattcaggccgtgcttagatctctatgtctgctgtactctctgtacggaataagccagaacgccggtgattttcttcaagggtccatcatgacagagccccagattacccaggtcaaccagagggttaaagagctgctgactttgattcgctcagacgcagtggccttggtggatgctttcgattttcaggacgttactctcggcagtgttttaggaagatacgacggcaacgtttacgaaaacctgtttgaatgggccaagaattctcctctgaacaaagccgaagttcacgagtcttacaaacacctgaagtcactgcagagtaagctctag

SEQ ID NO: 107070 - DNA, 1869 bp, synthetic construct
  misc_feature 1..1869: note = Description of Artificial Sequence: Synthetic coding sequence
  source 1..1869: mol_type = other DNA
atgatcctgaacgatcctgattttcaacacgaggatttgaattttctaacacgttcacagcgctatgaagttgctgttaggaagtcagcaatcatggtcaagaagatgcgggaattcggaatcgcagatcccgacgagatcatgtggtttaagaatttcgtgcaccgtggcagacccgaacctctggacttacacctgggaatgtttttgcccaccctcctgcatcaggctaccgctgaacagcaagagaggttttttatgcctgcctggaatctggagatcataggaacttacgcccagacggaaatgggtcacggtacccacctgcgaggtctagagaccaccgctacatatgacccagagacacaggaattcattctgaacagtcccactgtgacatcaattaaatggtggcctgggggactgggaaaaacatctaaccatgcaattgtgcttgcccagctcataactaaggggaaatgttatggcctgcatgctttcattgtccctatcagagaaatcgggacccataaacccctaccaggaatcactgtgggcgatataggaccaaaattcggatacgacgagatcgacaacggataccttaagatggacaatcacagaattcctagggagaatatgctcatgaagtacgcgcaagttaagccggacgggacctatgtgaaacctctgagtaacaaactgacttacggaaccatggtctttgtccgatccttcctggtaggagaggccgcccgcgccctgagcaaggcttgcacaatcgcaatccggtactccgcagttcggcatcagtctgaaattaagccaggagagcctgaaccacagatcctcgattttcaaacacagcaatacaagttgtttccccttctggccacagcatacgcattccagttcgtgggggcctacatgaaagagacatatcacagaattaacgaaggaatcgggcagggggatttgagcgaactgccggagttgcacgccctgacagccggcctaaaagcctttacatcgtggacagctaatactggcatcgaggcttgccgcatggcctgcggaggacatggttattctcactgctccgggctgcccaacatctacgttaacttcacccccagctgcactttcgaaggagagaacaccgtgatgatgctgcaaacagcgcggtttctgatgaaaagttacgatcaggtgcactctggcaaactggtgtgcggaatggtcagctacctgaatgatctacccagtcaacgaatacagccccaacaggtggccgtgtggcctactatggtcgacatcaattctcccgagtcattaactgaggcatacaaactgcgcgctgcccgactcgtggaaatagctgctaagaatctacagaaggaggttatccataggaagtccaaagaagttgcctggaacctaacttctgtggacctggtgcgggctagcgaggcacactgtcattatgtcgtggtgaaactcttctcggaaaaactgctcaagattcaggacaaagccatccaggctgtactgaggtctctctgcctcctctactctctgtatggcatcagtcagaatgccggcgacttcctgcaagggtcaattatgacagagcctcagatcacacaggtgaaccagagagttaaggagctcctcacattgatcagaagtgacgctgtcgccctggtggacgcctttgattttcaggacgttaccctcggatctgtcctagggaggtacgacggcaatgtatatgagaatctgtttgagtgggctaaaaactcccctctgaacaaggccgaggtacatgagagttacaagcacttgaaaagccttcaatcaaagctgtag

SEQ ID NO: 107071 - DNA, 1779 bp, synthetic construct
  misc_feature 1..1779: note = Description of Artificial Sequence: Synthetic coding sequence
  source 1..1779: mol_type = other DNA
atggccgctttcattcagagaaccccggataattggcacctcaggccagacggtaatggccctagatttgtgcataggggcagacctgagcctttggatctgcatttagggatgtttctgcccacactgctgcaccaggcgactgccgagcagcaagagcggtttttcatgcccgcttggaacctcgaaatcattgggacctatgcccagactgagatgggacacggaacacacctaagaggcctcgagacaacagctacttacgatccggaaacccaggagttcatcttgaacagtcctactgttacctctattaaatggtggccgggagggcttgggaagacatccaaccacgccatcgtgttggcacagttgattacaaaggggaaatgctatggcctgcatgctttcatagtaccaatccgggaaattggcacccacaaacccctgccgggtattaccgtgggtgatattggtcctaaatttgggtacgatgagattgataacggctacctgaagatggataaccatcggatccccagggagaatatgctgatgaaatacgcacaggtaaaacctgatggcacttacgtgaagccactatccaacaagttgacatatggcacaatggtctttgtgaggtcttttttggtgggtgaggctgctagagcgctgtccaaggcttgtactatagctattcgatattcagccgtgcgccaccagagcgaaattaagccgggagagccagagccacagatcctggactttcagacacaacagtacaaactcttccccctgttggcgacagcctacgccttccagttcgttggcgcctacatgaaggaaacctaccaccgtattaatgaagggatcggtcagggagatctgagcgaactgccagagcttcacgccctgacggccggtctcaaggcctttacctcctggacagccaataccggcattgaggcgtgtcgaatggcctgcggcggccatggctactcccactgctcaggtttacctaatatctacgttaactttacgccatcctgtacctttgagggggagaacactgtcatgatgctgcagacagccaggtttctgatgaagtcttacgatcaggtgcacagtggcaaactggtgtgcggtatggtgtcttaccttaacgatttgccatcgcaacgtattcagccccagcaggtcgccgtatggccaacaatggtcgacattaactcccctgagagcctaacagaggcttacaaacttcgtgctgcccggctagtcgagatcgccgctaagaatctccagaaggaggtcattcaccgcaagagtaaggaagtggcatggaatctgacctctgtggacctggtgcgggcctccgaagcacattgtcactatgtagtggtaaaactattctccgagaagctactcaagatacaggacaaggcaattcaggccgtgctccgctcgctctgcctcctctacagtctatatggaatctcgcaaaatgctggagatttccttcaggggtcaatcatgactgagccacaaataactcaagtaaatcagcgcgtcaaagagctgctgaccctcattcggtctgatgccgtcgccctcgtggacgcttttgacttccaggacgttacgctggggagcgtgctggggaggtatgacggaaatgtgtatgagaacttgttcgaatgggccaagaacagccctctgaataaggctgaagtacacgaatcttataagcacctgaagagcctacaatccaagctgtag

SEQ ID NO: 107072 - DNA, 1983 bp, synthetic construct
  misc_feature 1..1983: note = Description of Artificial Sequence: Synthetic coding sequence
  source 1..1983: mol_type = other DNA
atgaaccctgatcttcgtagggagagggacagcgcatcattcaatccagaactactcacacacattcttgacgggtcaccagagaaaacaagaagacgccgagaaatcgagaatatgattctgaacgatcctgacttccaacacgaggacctgaattttttgactaggagtcagagatatgaagtggctgtgcgaaaaagcgccattatggtgaagaaaatgcgcgagttcggaatcgctgaccccgatgagatcatgtggtttaagaattttgtacataggggcagacccgaacccctcgatctgcacctcggaatgttcctgccgactctgctgcaccaggctaccgcggaacagcaggagagattttttatgccggcatggaatctggaaattatcggaacctatgctcagaccgagatggggcacggaacacacctgaggggactggagacaaccgcaacatatgatcccgaaacgcaggagttcatcctcaattccccgacagttaccagcattaagtggtggcctggcggccttggaaagacaagcaatcacgccatagtactcgcccaattgattaccaagggaaaatgttacggcctgcacgcctttatcgtacccatccgagaaatcggcacacacaaacctctccccggcatcaccgtaggcgatatcggcccgaagttcggctatgatgagattgataatggatacctaaagatggacaaccacaggattccgcgagaaaacatgctcatgaaatacgctcaggtgaagcccgacggcacttatgtcaaacccctaagcaataagctgacctatggcacaatggtgttcgtgcgaagtttcctcgtgggcgaggcagccagagccctcagtaaggcatgcaccatcgctatcagatacagtgctgtccggcatcagtcagagatcaagcccggggagcctgagccacagattctggacttccaaactcagcagtacaagctgttcccactgttggccacagcatacgccttccagttcgtgggtgcctatatgaaggagacctatcacagaattaatgaggggattggtcagggcgaccttagcgagctgcctgagctccatgctttgactgctggcttgaaagcttttacatcatggaccgccaatacgggaatcgaggcatgtagaatggcatgcggtggacatgggtactcccactgtagcggcttgccaaacatctatgttaactttactccatcgtgtactttcgaaggggagaacacagtgatgatgctccagaccgcgcgctttctcatgaagagctacgatcaggttcacagtggaaaactggtatgtggcatggtatcctatcttaacgatttgccatcccaacggatccagccacagcaggtcgccgtgtggccaactatggtggacattaactcacctgagagtcttactgaagcctacaaactacgcgccgcaaggctcgtggaaattgccgctaaaaatttgcagaaggaggtgatccacagaaaaagcaaagaggtcgcttggaatctgacaagtgtggacctggtgagagcgtctgaggctcactgccactacgttgtcgttaagcttttctctgaaaagctcctcaagattcaggacaaagcaatacaggccgtattgcgttctctctgtctgctttactcactttacgggatcagtcagaacgcgggggacttccttcagggttcaatcatgacagaaccacagatcacccaggttaaccagcgcgtcaaggagttgcttacccttatcagatctgacgccgttgctcttgtcgacgccttcgactttcaggacgttaccttagggagtgtgctgggccgttacgatgggaacgtatatgagaatttattcgagtgggcgaagaatagccctctcaacaaggcggaggtgcacgaatcttacaagcacctcaaaagcttacagagcaaactttag

SEQ ID NO: 107073 - DNA, 2046 bp, synthetic construct
  misc_feature 1..2046: note = Description of Artificial Sequence: Synthetic coding sequence
  source 1..2046: mol_type = other DNA
atgggctcgccggtccaccgcgtgagcctgggggacacatggtcccgccagatgcatcccgatattgagtccgaaaggtatatgcagtcctttgacgtcgagcgcctgaccaacatcctggatgggggtgcacagaatacagctttaaggcgtaaagtggaaagtatcatacactcttatcctgagttttcctgcaaggacaactacttcatgacgcagaacgaacgttacaaggcggccatgcgaagagcatttcacataaggctcattgcacggcggctgggatggctcgaggatgggcgggagctagggtatgcgtaccgtgctctgtctggagacgtggcgctgaacatccacagagtcttcgtccgtgcacttcggagcctgggatccgaggaacagatcgctaaatgggaccctctatgcaaaaacatccagattattgcaacttacgctcagactgaactgggccatggcacttatctgcagggcttggagacagaggcaacatatgacgctgccacacaggagtttgtcatccatagccccaccctcaccgcgactaagtggtggcccggtgacctcggccgaagtgcaactcacgcccttgtccaggctcagctgatatgctctggcgctcggagaggcatgcatgctttcatcgtaccaattcggagcctgcaggaccacacccctctgcccggcatcattattggggatataggtcctaaaatggatttcgaccagaccgataatgggttcttgcagttaaatcacgttcgcgtccctagggaaaacatgttgagcaggttcgcccaggtgctgcctgatggtacttatgtgaaactcggtacggcccagtcgaactatctccctatggtggtcgttagggtggagcttctatcaggcgaaatcctcccgattcttcaaaaggcctgcgtaattgccatgcgatacagcgtgatccggcgccagagtcgactgcggccctcagaccctgaagctaaggtgttagactatcagactcagcaacaaaagctatttccccagcttgccatctcatacgccttccatttcctcgcagtatctcttctggagttttttcagcactcttatacggcaatattaaatcaggatttttcctttcttccagaactacatgcattgtctaccggcatgaaagctatgatgagcgagttttgtacccagggcgccgaaatgtgccgtagggcctgtggagggcatggatattctaagctgtcaggcctcccgtccctggtcacaaaactaagcgcatcttgtacttacgagggcgagaacaccgtcctttacctgcaggtcgcgagattcttggtcaagagctatttacagacccagatgagtccagggtctacgccgcaacgcagcctatctccgtccgtcgcatatctgaccgcgcctgaccttgccaggtgccccgcgcagcgcgcagctgatttcctgtgcccagaactttacactaccgcatgggcgcatgtggcagtgcgcctgatcaaggactccgttcagcatcttcagactctgacccagtcaggcgcagatcagcatgaagcatggaaccaaacaacagttatccatctccaggccgctaaggtacactgttactacgtaacggtcaagggtttcacggaagcactggagaagctggagaacgagcccgcaatccaacaggtccttaagcgactctgcgatttacacgctatccatgggatcctgacgaactcaggagatttcctgcatgacgcctttttatccggagctcaggtggacatggctcgtactgcctatctggatctgctcagactcatcagaaaggacgcaatcctgctcacagatgctttcgactttacggaccagtgtctcaatagcgccttgggttgttatgatggcaatgtttatgaacgcttgttccagtgggcccagaaatcgcctactaacactcaggagaatcctgcttatgaggagtacatccgaccacttctgcagtcctggagatcaaagttatag

SEQ ID NO: 107074 - DNA, 516 bp, synthetic construct
  misc_feature 1..516: note = Description of Artificial Sequence: Synthetic coding sequence
  source 1..516: mol_type = other DNA
atgggatcccctgtccacagagtgtccctcggcgacacctggtctcgccagatgcacccggacatagagagcgaacgatatatgcaatcattcgatgttgagcgcctgacaaacatcttggatggcggtgcgcagaacaccgctttgaggcgcaaggtggagtctatcattcattcataccccgagttcagttgtaaggacaattattttatgacacaaaacgagcgatataaggctgctatgcgcagagcttttcacatccggctgattgctcggcgcctagggtggctagaggatggcagagagcttgggtacgcttatcgggctcttagcggggatgtggctcttaatatccatagagtctttgttcgtgcgttgcggtctctagggtccgaagaacagatagcaaagtgggaccccctatgcaagaacatccagatcattgctacatacgcccagacagagttaggacacgggacctacctgcaaggcctggaaacagaggccacctactag

SEQ ID NO: 107075 - DNA, 2103 bp, synthetic construct
  misc_feature 1..2103: note = Description of Artificial Sequence: Synthetic coding sequence
  source 1..2103: mol_type = other DNA
atggcttcaactgttgaaggcggtgatactgcactacttcctgaatttccaaggggacccctggacgcctatcgtgccagagcaagttttagctggaaggaactggcattgtttacagaaggggagggcatgctccgtttcaagaaaaccatcttttccgctcttgagaacgatcccctatttgcccgctccccaggggctgacctgtccctcgagaaatatcgcgagctaaattttcttagatgcaaaagaatcttcgaatacgatttccttagtgtggaggacatgtttaagtcaccactcaaggtgccggccctgatccagtgcttgggtatgtacgactctagcttagctgccaaatacttgctccactctttggtatttggttcagccgtatattccagcggctccgagagacacctgacctatatccagaaaatttttcgcatggaaattttcgggtgcttcgcccttacggagctttcccatggctctaacacgaaggcgatcaggacaaccgcgcactacgatccagccacggaggagtttataatacactcacctgacttcgaggccgccaagttctgggttggcaatatggggaaaaccgcgacacatgccgttgtgttcgcaaagctgtgcgtgcctggtgaccaatgccacggactccatccgtttattgttcaaataagggacccaaaaactctgctgcccatgcctggtgtaatggtcggcgatattggcaaaaagctgggtcagaatggcctggataatggcttcgcaatgtttcataaggtacgtgtgccgcgccagagcctgctcaatcgcatgggcgacgtcactccggaaggaacttacgtcagcccgttcaaggatgtacgccagcgtttcggcgcaagtctcggctccttgtcatccggccgcgtctctatcgtctctcttgctattttaaatctcaaattagcggttgcaatcgctctccggtttagcgctacaaggcggcagtttggtcctacggaagaggaagagatccccgtgctggagtatcctatgcaacagtggcggcttctgccttacctggcggcagtttacgccctggaccacttttctaagagtttgttcctagatctcgtcgagcttcagaggggactggccagtggcgatagaagcgcccggcaggctgagctagggcgggagatccacgctctagcatcagcctcaaaacccctcgcatcttggacaacacaacagggcatccaggagtgtcgggaagcatgtggcggccacggatacttggcaatgaaccggctaggggtgctgcgcgacgataatgaccccaattgcacctacgagggggataacaacatactgctgcaacaaacttcaaattatcttctcggattgctcgctcaccaagtgcacgacggagcttgtttccgaagcccgctcaaaagcgttgattttcttgatgcttacccgggcatacttgaccagaaattcgaggtcagctcagtcgctgactgcctggatagtgccgtcgctctcgccgcctataagtggctggtctgctacttactgagagaaacttatcagaagttaaatcaggagaaacgctccggatcctctgatttcgaggctagaaataagtgtcaggtgagtcacggaaggcccctggctctagcattcgtggaactgactgtcgtccagcggttccatgaacacgttcatcagccctcggtgcccccctccctacgggcggtactcggccgcctgagcgctctgtatgccctctggtcattgtcccgacatgccgccttactctaccgcggaggctacttctctggtgagcaggcaggcgaggtcctggagtctgcagtgctggccctgtgtagtcagttgaaagacgatgctgtcgcgctggtcgacgtcatcgcaccccctgatttcgtcctggacagtccaatcggacgtgccgacggagagctgtacaaaaacctgtggggagctgtgttacaggagtcgaaagtgctggagcgcgcgtcctggtggccagaattcagcgttaacaagccggttatcggcagtctcaagtccaagctgtag

SEQ ID NO: 107076 - DNA, 1875 bp, synthetic construct
  misc_feature 1..1875: note = Description of Artificial Sequence: Synthetic coding sequence
  source 1..1875: mol_type = other DNA
atggcctctactgtcgagggcggtgacaccgccctccttcctgagttccctcgaggccccctagacgcataccgggccagagccagcttttcctggaaagaactggccctgttcaccgaaggagagggaatgctgcgattcaagaaaacaatctttagtgcacttgagaacgaccccctcttcgcacgcagccctggggccgacctttcactggagaagtatcgggagctgaacttcctccgctgcaaacggatcttcgaatatgactttctgtctgttgaggacatgtttaagtcaccactgaaggtaccagctcttatccaatgtttgggcatgtacgactcttccctggctgcgaaatacctcctgcacagcctggtgtttggctccgcggtatattcctccggaagtgaacgccacctcacatatatccagaaaatttttaggatggagattttcggatgctttgccctgacggagttgtctcatggatccaacacaaaggctattcgtacgaccgcacattatgaccccgccacagaggaattcatcatacatagcccagacttcgaggctgcgaaattctgggttggtaacatgggaaaaacagctacccacgccgtggtgttcgccaagctctgtgtaccaggcgaccagtgtcacggtctacacccgttcatcgtgcagatccgggatcctaagaccctccttcctatgccaggggttatggttggagatatcggcaagaagctaggacagaacgggttagacaatgggttcgctatgtttcacaaggtgagagtgcccaggcagtctctgctgaataggatgggtgacgtcacgcccgaggggacctacgtttcaccttttaaggatgtccggcagaggtttggagcatctctcggaagtttatcctcaggtcgagtgtccattgtctccctggccatcctgaatttgaagctcgcagtcgccatagctctgcgcttctcagcaaccagaagacagttcggccctacagaggaggaagaaatccctgtgctggagtatcctatgcagcagtggcggctcctaccatatctcgccgctgtctacgcactagatcacttcagtaagagtttattcctggatctcgtggaactgcagcgtggtctggcttctggagatcggtccgccaggcaggccgagctcggtcgggagatccacgccctggcaagcgctagcaaacctctggcctcgtggaccactcagcagggcatccaggagtgccgggaagcttgcgggggacacggctatttggcgatgaaccgtctcggggtccttcgcgacgataacgaccctaattgtacctatgagggagataataatatcctgttgcagcagacaagcaattaccttttggggcttctggctcatcaagtgcacgatggtgcctgcttcaggtcccccttgaagtctgtggacttcttggacgcctaccccggaatactggaccagaaattcgaggtgagctccgttgcagactgtctagattccgcggtcgccctggccgcgtacaagtggctcgtgtgctacttgttgagggaaacctatcagaaattaaaccaggagaagaggtccgggtcctcggactttgaagcccggaataaatgccaggtgtcgcacggacggccgctcgccctcgcattcgtggagcttaccgtagtgcaacgatttcatgagcacgttcatcagccctctgtgccaccttcactacgggcggtgctgggtaggctgtcagccctctacgctctatggtccctgagcagacacgccgcgctcctatatcgggccgaaagacgctgttcctgtcccggcagacgggacaggtcatcttag

SEQ ID NO: 107077 - DNA, 2103 bp, synthetic construct
  misc_feature 1..2103: note = Description of Artificial Sequence: Synthetic coding sequence
  source 1..2103: mol_type = other DNA
atggccagcactgtagaaggcggggatacggcactgctgccggagttccccagaggccctttggacgcctatcgcgccagggcttctttctcttggaaagagctggccctgttcacggagggtgaggggatgctgagatttaagaaaaccatttttagcgctctcgagaatgacccccttttcgcaagaagccccggcgcagacctgtcactagagaagtatagagagctaaactttctgaggtgcaagcgcatttttgaatacgacttcctgagtgtcgaggacatgttcaagagcccgctcaaggtgcccgcactgatccagtgtctaggaatgtacgattcaagtttggcggcaaagtacctgctgcattcactggttttcggtagtgctgtatattcttctggaagcgagaggcacctgacgtatatccagaagatatttcgcatggagatcttcggttgtttcgctctcacagagttatcccacggctcaaacactaaggctattaggacaaccgcgcactatgatcccgccaccgaagagttcatcatccatagtcctgactttgaggctgcgaagttttgggtagggaatatgggtaagactgccactcatgcagtggtgttcgccaagctctgtgtgcccggggatcagtgccatggtctccaccccttcatcgtccagatcagagatccaaaaacgcttctccctatgcccggggtaatggtgggtgacatcggtaagaagctcggtcagaacggactcgataacggatttgcgatgtttcataaagtacgagtacctcggcaatccttgcttaacagaatgggcgacgtcactcctgaggggacatatgtgtctccatttaaagacgtccggcagcgatttggggccagtttagggtccctgtcttccggacgggtctctatcgtgtcccttgctattctgaacctgaagctggcagtggctatagcgttgagattttctgccactcgccggcagtttgggcccactgaggaagaggaaatcccggttctggagtatcccatgcagcaatggcgactgctgccttatttggcagcggtgtacgctctcgaccatttttcaaagtcattgttcttggatctggtcgagttacagcggggcctggcctccggggaccgatctgccaggcaggccgaattaggtagagaaatccacgctttggcttcagcgtccaagcccctggcaagctggacaacccaacagggaattcaggagtgcagggaggcatgtgggggtcatggctacctagcaatgaaccgtctgggggttctaagagacgacaacgaccctaactgcacatatgaaggcgataacaacattttactgcaacaaacatcaaactacctgctgggtctcctagcacaccaggtgcatgacggcgcctgctttaggagccccctgaagagcgtagatttcttagacgcttatcctgggattcttgaccagaagtttgaggtcagctcagtcgccgactgtctagattctgcagtggcccttgccgcctataagtggctcgtgtgttacttgttgcgcgagacttatcaaaagctgaaccaggagaaaagatccgggagctccgacttcgaagcccgaaacaaatgccaggtgtcccatggacgccctctggcactagcttttgtggaactgactgtcgtgcagcgcttccacgaacatgtgcatcagccaagtgtccccccatctctgagggctgtgctggggagattatctgctctgtacgccctctggtcccttagcaggcatgccgcactgttgtaccggggaggttacttcagtggagaacaggcaggagaagtactggagtctgcagtgctggccctttgtagtcaactcaaggatgacgcggttgctttggttgacgtcattgcccccccagattttgtattggacagcccaattggaagggcggatggggagctgtacaaaaacctgtggggtgcagttctccaggaaagtaaggtcctagagcgggcttcatggtggcctgaattttctgtgaacaagcctgtgatcggctcgctcaaatccaaactttag

SEQ ID NO: 107078 - DNA, 2175 bp, synthetic construct
  misc_feature 1..2175: note = Description of Artificial Sequence: Synthetic coding sequence
  source 1..2175: mol_type = other DNA
atgccacggaattctggtgccgggtacgggtgtccccatggggacccctctatgctcgactccagggagacaccgcaggagtcacgtcaggacatgatcgtgcggacgacccaagagaaattaaaaacatccagtctcaccgatagacagccactcagtaaagagagtctgaaccatgccctcgaactatctgttcctgaaaaggtcaacaacgcacagtgggacgcgcctgaggaagctctgtggacgacaagggccgacggcagggttagactccgcattgaccctagctgcccacagctgccctacaccgttcataggatgttttatgaagcactcgacaagtatggggacctgattgccttggggttcaagaggcaagacaaatgggaacatatctcttatagccagtattacctcctggccagaagagccgcaaaaggcttcttgaagctcggcctcaaacaagcacactccgtggccatcctgggcttcaattcaccagaatggttcttttctgccgttggcaccgttttcgctggtggcatcgtaactggcatatacacgacctcatccccagaagcctgtcaatacattgcatatgactgctgcgccaatgtcatcatggtggacacacagaaacagctggagaagatcttgaaaatttggaaacagctccctcacttgaaagccgtggttatctacaaggaaccaccacctaacaaaatggccaatgtttatacaatggaggagttcatggaactgggcaatgaggtgcccgaggaagctctcgacgccatcatagacacacagcagcctaaccaatgttgtgtgttggtatatacaagcggaacgactgggaatcccaagggagtaatgctgagccaagataacattacatggactgctaggtacggatcccaggcgggcgacatccgccctgccgaagtccaacaagaggttgtcgtgagctacctgccattgtctcatatagctgcccagatctacgacctgtggacaggaatccagtggggagcccaggtatgcttcgcggagccggacgccctaaaaggaagccttgtgaatacccttcgcgaagtggagccaacctctcacatgggagtccctcgagtgtgggagaagatcatggaacgcattcaggaagtggccgcacaatccgggtttatccgacggaaaatgctgttgtgggccatgagcgttacgttagaacagaatttgacgtgtcccggctccgaccttaaaccctttaccaccaggttggcagactacctcgtgcttgctaaggtgagacaggctctggggtttgccaaatgtcagaaaaacttctatggggctgcgcctatgatggccgaaacccagcactttttcctggggctcaacattaggctctacgcgggatacgggttaagtgagacttctggaccacactttatgtcgtctccttataactaccgtctctactccagcgggaagcttgtgccaggatgtcgggtcaaactggtaaatcaagatgcagagggtatcggagaaatctgcctgtggggcagaacaatctttatgggctatctaaacatggaggacaaaacgtgtgaggcgattgacgaagagggatggctgcacacaggtgatgccggcaggcttgacgctgatgggtttctgtacataaccggtcgcttgaaggaactgatcatcacggccggcggagagaatgtgccgccagtgccgatagaggaagcagtcaagatggagctgcccatcatctcaaacgcaatgctgatcggggaccagcgaaaatttctgtccatgcttctgaccctgaagtgcacactggatcctgacacttcggatcagactgacaaccttacagaacaagccatggaattttgccaacgggtgggaagtagagccaccacagtgtcggagattattgaaaagaaggacgaagccgtctatcaggcaatcgaagagggaatccgcagggtgaatatgaatgccgccgccaggccataccacatacagaagtgggctattctcgagcgggatttctcaatatctggaggggagctggggccgaccatgaagctcaagaggcttactgtactggaaaagtacaaaggcattatcgattcattctaccaggaacaaaagatgtag

SEQ ID NO: 107079 - DNA, 1449 bp, synthetic construct
  misc_feature 1..1449: note = Description of Artificial Sequence: Synthetic coding sequence
  source 1..1449: mol_type = other DNA
atggccaatgtgtatactatggaagaattcatggaactcggcaatgaagttccagaggaagccctggatgctatcatcgacactcagcagcctaatcagtgttgcgttttggtttacacgtccgggaccactgggaatcccaaaggggtgatgctctcgcaggataacataacctggacggcccggtatggttcccaggccggagatatcaggccggctgaagtgcagcaagaagttgttgtctcgtatttgccactcagccatattgctgctcaaatctacgacctgtggacaggaatccagtggggggcccaagtttgttttgcagagccagacgccctgaagggttccttagtgaatacgctgagggaggtagagccgacctcacacatgggagttccgcgggtgtgggaaaagatcatggagcggattcaggaggtggcagcacaaagcggtttcatcagaaggaaaatgctgctgtgggcaatgtctgtaaccttggagcaaaacctgacctgcccaggcagcgatcttaaacctttcacaacccgcctcgcagattatctggtgctggccaaagtgcgacaagccttgggatttgccaaatgtcagaaaaacttctatggcgcagctcctatgatggccgagacccagcacttcttcctgggtctcaatatcagactctacgccggttacggcctgtccgagaccagtggaccacatttcatgagcagtccctacaactacaggctgtattcctcagggaagctcgttcctggttgcagagtgaaactggttaaccaagatgctgagggaatcggggagatctgtttatgggggagaacaatctttatgggttaccttaacatggaagataagacgtgtgaggccatcgatgaagagggctggttgcacaccggtgatgccggaagactggatgcagacgggtttctctacattaccgggagactgaaagaactgatcataaccgccggcggagagaacgtacctccggtgcccatcgaagaagctgttaaaatggagctgcctatcataagcaacgccatgctaatcggtgaccaaagaaagtttttgtcaatgctcctgactctgaagtgtacgctggacccagatacaagcgatcagactgataacttgaccgaacaggcgatggagttttgccagagagtgggatctcgtgcaaccactgtgagcgagataatagagaagaaggacgaggcggtatatcaagcaattgaggagggcattcgccgagtgaatatgaatgccgccgcgcgcccgtatcacattcagaagtgggccattctcgagcgggattttagcattagcggcggcgagctggggccaacaatgaagttaaagaggctcactgtcctggaaaagtacaagggcatcatcgacagcttctatcaggagcagaaaatgtag

SEQ ID NO: 107080 - DNA, 2001 bp, synthetic construct
  misc_feature 1..2001: note = Description of Artificial Sequence: Synthetic coding sequence
  source 1..2001: mol_type = other DNA
atgaccggcaccccgaagacgcaggaaggggccaaagatctggaggtggacatgaacaagaccgaagtaactccaagattgtggacgacctgtcgcgatggcgaagtgctcctgagactgagtaagcatggccctggccacgagactcccatgactattcctgagttttttagggagtcagtgaataggtttggcacctatcccgccctcgcgtccaagaacgggaaaaagtgggagatactgaacttcaatcaatactatgaggcatgcaggaaggccgccaaatcacttatcaaactcggactggaacgcttccacggagtcggcattctcggattcaattctgctgagtggttcatcaccgccgtgggtgcaatccttgctggagggctgtgcgtggggatctatgctacaaattcagccgaggtttgccagtatgtcatcacgcacgccaaggttaacattttgctagttgaaaacgaccagcagctgcagaaaatcttgtcaatcccacagagctctctggagcccctgaaggcaatcattcaatatcggctgcccatgaagaagaataacaatctgtatagttgggacgactttatggaactcggacggtcaatccccgatacacaattggagcaggtgatagaatcacaaaaagccaaccagtgtgccgtgctgatctatacatcgggcactacaggcatcccaaagggcgtgatgctgtctcacgacaatatcacctggattgctggtgcagtcacaaaagatttcaagttaaccgataaacatgaaactgtggtcagctatctgcctctgtcacacatagcggcacagatgatggacatatgggtgcctattaaaattggggccttgacatacttcgcccaggctgatgctttgaagggtacactcgtgagcaccttgaaggaggtcaagccaacggtcttcattggtgtgccccaaatctgggaaaaaatccacgagatggtcaagaagaatagcgcgaagagcatgggtcttaaaaaaaaggcttttgtgtgggcaagaaacattggttttaaggtaaactccaaaaaaatgctgggcaaatataacactcctgtcagctaccggatggcaaagacactggtgttttctaaggtgaagacctctttgggcctagatcattgtcatagtttcatctccgggaccgctcctctcaatcaggagactgcggagttcttcctgagtctggacataccgatcggcgagctatacggtctgtcggaatcctctggtcctcacacgatcagcaaccagaataattacaggctactcagctgcggtaagatcttaaccggctgcaagaacatgctcttccaacagaataaggatggtattggcgaaatatgtttgtggggtcgccacatttttatgggctatctggaatcggagacggaaacgactgaagctattgatgatgagggatggttgcatagtggagatttaggccagctagacgggctggggtttctgtacgttaccggacacataaaggaaattctgatcacagccggcggggaaaacgttccacccatcccagtggagaccttggtcaaaaaaaaaatccctattatcagcaacgctatgctggtgggcgataaactgaagttcctgtcaatgctgctgactctcaaatgtgaaatgaaccagatgtcgggggagccattagacaaattgaatttcgaagctataaacttctgtcgcggcctgggatcacaagcctcaaccgtgaccgagattgtcaagcaacaggatcctctggtatataaagcgattcagcagggcataaatgcagttaaccaggaggctatgaataacgcacagaggatcgaaaagtgggtgatcctcgaaaaggacttctctatttacggaggggagcttggacccatgatgaagctcaagcggcattttgtggcacagaaatataagaagcagattgaccatatgtatcactag

SEQ ID NO: 107081 - DNA, 1848 bp, synthetic construct
  misc_feature 1..1848: note = Description of Artificial Sequence: Synthetic coding sequence
  source 1..1848: mol_type = other DNA
atggccgtgtatgtgggtatgctccgtctcggtcgcctgtgtgcaggatcatcaggcgtgctgggagcccgggcagccctgagccggtcttggcaggaggcccgcttgcaaggagtccgctttctctctagcagagaagtggatagaatggtgtctactccgattggcggcttatcctacgtccagggttgcacaaagaagcacctaaattccaagaccgttggtcaatgcctggagaccactgcacaaagagtaccagagcgggaagcgttggtggtgctccacgaggatgtccggctgaccttcgctcaactcaaagaggaggttgacaaggctgcatcaggactgctttctatcggtctgtgcaagggagaccgcctgggcatgtggggacctaactcctacgcttgggtgctgatgcagttagccactgcacaggccggaattatccttgtatcagttaacccagcctaccaggccatggaacttgaatatgtgctgaagaaagtgggctgcaaggctctggtgttccctaaacagttcaaaactcaacagtattacaatgttttaaaacaaatctgcccggaggtggagaatgcgcagcccggcgctctgaagtcacagcgactgcccgacctgaccactgttatcagtgtcgacgcacctctacccggcacactccttctcgatgaggtcgtggccgccggctcaacgcggcagcacctggatcagctccaatacaatcaacaatttttgtcttgtcatgatccaatcaatattcagttcactagcgggaccaccggtagtccaaaaggagccactttgagccactacaatatcgtcaacaattcaaacatcctgggtgaacggcttaagctccacgaaaagactccagaacagttgcggatgattctacctaatccactgtatcattgcctggggagtgtcgctggaactatgatgtgccttatgtacggtgctacattaattcttgctagtccaatattcaatggcaagaaagcactagaggccatttcaagggaacggggcacattcctgtatggaacaccaaccatgtttgtcgacatcctcaatcagcctgacttctcttcttatgacattagcactatgtgtggcggcgtgatcgccggaagccccgcccctcccgaactgataagggccatcatcaacaaaatcaatatgaaagatttagtggtggcgtacggcaccactgaaaattccccagtgaccttcgcgcattttccggaagataccgtggagcagaaagcagagtctgtgggccggataatgcctcataccgaagccagaattatgaatatggaagctggaaccctcgccaagctcaatacccctggtgaactctgtatcaggggctactgcgtcatgttaggttattggggcgaacctcaaaaaacagaggaggccgtggaccaggataagtggtactggacaggggatgtggccactatgaatgagcaaggattttgcaagatcgtgggcaggagcaaggatatgatcatcaggggcggcgagaatatatatccagctgaattggaagatttttttcatacacacccaaaagtgcaggaagtccaggtggtgggcgtcaaagatgacagaatgggggaagaaatctgtgcctgtatcaggctgaaggacggggaggaaaccacggtggaagaaatcaaagcattctgcaagggtaaaatctctcactttaaaattcccaagtacatcgttttcgtcacaaactaccctctgaccatctccggaaagatccaaaagttcaaattaagggaacaaatggagagacacctcaacctgtag

SEQ ID NO: 107082 - DNA, 1923 bp, synthetic construct
  misc_feature 1..1923: note = Description of Artificial Sequence: Synthetic coding sequence
  source 1..1923: mol_type = other DNA
atggctgtgtatgttggcatgctccgactgggcaggctgtgcgctggcagctccggcgtgctgggcgctcgggcagcgctttcccggtcatggcaggaggctcgcttgcagggcgtcaggttcctgagcgccaggggaggcatggaagctggccgccagcgtatctccgtcccgtcaagttttacagcaagcgccgctgcacactctcgcgaagttgacagaatggtgtcaacccccatcggagggctgagttacgtccaggggtgtacaaaaaagcacctgaattcaaaaaccgtaggacagtgcctggaaaccacagcacagcgagtccctgaacgcgaggcacttgtcgtcctgcatgaggacgtgcgcctgacattcgcacaactcaaggaagaggtggataaagctgcatccggacttctgagcatagggctgtgcaagggggacagattaggaatgtggggccctaactcttatgcatgggtcctaatgcaactggcaacagcacaagcaggcatcatcctggtttctgttaatcctgcgtatcaagccatggaactcgagtatgtccttaaaaaagtggggtgcaaggccctggtgtttcccaagcagttcaagactcaacaatattataacgtgttgaaacagatctgtccagaggtcgaaaatgcgcagccaggcgctctgaaatctcagcgattacccgacctgacaactgtgattagtgtggacgcacccctgcctggaaccctcttgctggatgaggtggtggcggccggttccacaagacagcatctcgatcagctacagtacaaccagcagtttttatcgtgccatgatcccatcaacattcaatttacttctggcacgaccggctctcctaagggagccaccctaagtcattacaacatagttaacaactcaaatatcttaggggagcgacttaagttgcacgagaaaacaccagaacagctgcgcatgattctccctaatcccctctaccattgcttggggtccgtagccggaacaatgatgtgcctgatgtatggagcaacgctgatactggccagccccatatttaacggaaagaaggccctggaggcaatctcacgggagagaggtacgtttctgtacggcacgccgaccatgtttgtcgatattcttaatcaacccgacttcagcagctatgacatttctaccatgtgcggtggcgtaatcgccggcagtccggcaccaccagaattgatacgggctatcataaacaagattaacatgaaagacctggtggtggcatacggcacaactgaaaattctcctgtaacttttgcacacttccccgaggatacggtggagcaaaaggctgagtcagtgggccggattatgcctcatacagaagcccgaattatgaatatggaggctggtaccttggctaagctgaatacacccggggaattatgtatcagaggctattgcgttatgctaggctattggggcgagccgcagaagaccgaagaagcagtggaccaggacaagtggtattggacaggcgatgttgcaactatgaacgaacaggggttttgcaaaatagtgggtcgctctaaggacatgataattaggggtggtgaaaatatatatcccgctgagctcgaggacttcttccacactcatccaaaggttcaggaagtccaggtcgtaggagtgaaagacgataggatgggcgaagagatatgtgcatgcatcagacttaaggacggcgaggagaccacggttgaggagatcaaggctttctgtaaaggcaagatctctcacttcaaaatccctaagtatatcgtgtttgtgactaactatcccttaacaatttcagggaagatacagaaattcaaactgagagagcagatggagcggcacctgaacctttag

SEQ ID NO: 107083 - DNA, 1809 bp, synthetic construct
  misc_feature 1..1809: note = Description of Artificial Sequence: Synthetic coding sequence
  source 1..1809: mol_type = other DNA
atggcagtctacgtcggcatgttgaggttgggacgactttgtgccggaagctccggcgtcctgggcgcccgtgccgctctctctcgcagttggcaggaagctagactgcagggggtgcgctttctgagcagccgagaggtcgatcgcatggtgtcaacacccattggaggcctgtcatacgtacaaggctgtaccaaaaagcatctgaattccaagacagtcggtcaatgtctcgagacaacagcacagcgggtcccagagagagaagccctggtggtgctgcacgaagacgtgcgtcttacattcgcccaactcaaagaggaagtcgacaaagccgccagcgggttattgtccatcggcctgtgtaagggggacaggcttggaatgtgggggccgaactcctatgcatgggtgctgatgcaactggcaacagcccaggccatggagcttgaatacgtactgaagaaggttggttgtaaagctctggttttccccaagcaattcaagactcagcaatactataatgtcctgaagcagatctgtcccgaggtggagaatgcacagcccggtgctctgaagtcccaacgcctcccggatctcaccactgtgatttcagtagacgcacccttgcctggcactctcctattggacgaagtggtggccgccggcagcacgcggcagcatctggatcaactgcagtataaccagcagttcctaagctgccatgacccaatcaacattcagttcaccagtggtaccacaggaagtcccaagggcgctacattgtctcactataacatagtgaacaattcaaatattctcggcgaacgcctgaaattgcatgaaaaaacacccgagcagctgagaatgattctgcccaatcccctgtaccactgccttgggtctgtcgcagggacgatgatgtgtctgatgtacggcgcaacactgattttagcctctcccatattcaatggcaaaaaggctctggaggctataagtagggagagaggcacattcctgtatgggacacctactatgttcgttgatattctcaatcagcctgactttagtagttacgacattagcaccatgtgtggcggtgttatcgccggaagtccagctcctccggaattgataagagcgatcataaacaaaattaacatgaaagacctggtcgtggcgtatgggaccacagaaaactcccctgtgacattcgctcactttcccgaagacacagtggagcaaaaagccgaatcagtgggtagaataatgccacatactgaggccagaatcatgaatatggaggccggcaccctcgctaaactgaacacccctggagagctgtgcatcagaggttactgcgtcatgcttggatactggggtgaacctcagaaaaccgaagaggcagttgatcaggacaaatggtattggactggagatgtagctaccatgaatgagcaggggttctgtaaaattgtggggaggtctaaagacatgatcatacgcggaggcgaaaatatttacccggctgaactggaagatttcttccatacacaccctaaagtgcaggaggttcaggtggttggcgtgaaggacgataggatgggcgaggaaatttgtgcttgtatcaggttaaaagatggcgaggagacgaccgtcgaggagattaaggctttctgtaaaggcaagatcagtcattttaaaattcccaaatacatcgtctttgtcactaactaccccctaaccatttccggaaaaattcagaaattcaagctgagggaacagatggaacgtcatttgaacctctag

SEQ ID NO: 107084 - DNA, 1719 bp, synthetic construct
  misc_feature 1..1719: note = Description of Artificial Sequence: Synthetic coding sequence
  source 1..1719: mol_type = other DNA
atggccgtgtacgtcggcatgctgcggctggggcggctgtgcgccgggtcatcgggggtgctgggggcccgagcagccctgtccaggtcctggcaggaagctcgtctgcaaggtgtacgattcctgtcatctcgggaggtggaccggatggtttcgacccccatcggtggactgtcatatgtccaggggtgtactaagaaacacctgaattctaaaaccgtgggccagtgcctggagaccacagcccagcgcgtccccgaaagagaagcattggtcgttcttcatgaggacgttagacttaccttcgcacagctcaaagaagaagtcagcgtgaaccccgcgtatcaggcgatggaactggagtatgttctgaagaaggtgggatgcaaagctctcgtcttcccaaagcagtttaagacacagcagtattataatgtgttgaagcagatctgccctgaagtggagaacgcccagccaggcgccctgaagagccagcggctgccggatctcaccaccgtcatctcagtcgacgcacccttgcccgggacactgcttctggatgaagtcgtcgcagccggcagcacaagacagcatctggatcagctgcagtacaaccagcagtttttgagctgtcacgatccaattaatatccagttcacctccggcactactggctctcccaagggagctaccctaagccactacaacattgtcaacaattcaaacatcctgggggagaggttgaagcttcacgagaaaacgcccgagcagttaaggatgatccttcccaatcccctttaccattgcctgggcagtgtggctggtactatgatgtgtctcatgtacggtgctacattgattttggccagccccatttttaatggaaagaaggcccttgaggcaattagccgtgaaaggggtacatttctctatggcactccaaccatgtttgtggacatactgaaccaacccgatttctctagttatgatatttctaccatgtgcggcggggtgattgcaggaagcccggccccaccggaattgattcgagcaatcattaacaaaattaatatgaaagacctggttgtcgcctacggcacaacagaaaactcacctgtgactttcgctcatttccctgaggatacagtagagcaaaaagctgaaagcgtgggccgtatcatgccccataccgaggctaggatcatgaacatggaggccggtacacttgcaaaactaaatacccctggcgagctctgcatacggggttattgtgtgatgctgggatattggggggaaccccagaaaactgaggaggccgtcgaccaggacaagtggtattggaccggggacgttgcaacgatgaacgaacagggcttttgcaaaatcgttggtcggagcaaagacatgataatacgcggtggcgagaatatctaccctgcggagctggaagatttttttcatacacaccctaaagttcaagaggtgcaggtcgtgggcgttaaggatgaccggatgggggaagagatatgcgcttgtattagactaaaggacggggaagaaaccaccgtggaagagataaaggcattttgtaaaggtaaaatctcacattttaagattcctaaatacattgtgttcgtgactaactacccccttacgatatccggaaaaatccagaagttcaagttgcgagagcagatggagagacatctgaatctgtag

SEQ ID NO: 107085 - DNA, 1368 bp, synthetic construct
  misc_feature 1..1368: note = Description of Artificial Sequence: Synthetic coding sequence
  source 1..1368: mol_type = other DNA
atggagctggaatacgtcctgaaaaaggtcgggtgcaaagcgctcgttttccctaagcagttcaagacgcagcagtactacaacgtgctcaagcagatttgtcccgaggtggaaaatgcccagcccggggcactcaaatcccagagactcccagacctcacgacagtgatcagcgttgatgcaccactgccaggcacattacttctagatgaagtggttgcagcaggatctactcggcagcatctggatcagctgcagtacaatcagcagtttctgtcttgtcacgatccaatcaacattcagttcacgtccggcactactgggtctcctaaaggggcaacacttagtcactacaatattgtgaataactcaaatattctcggggagaggctgaagctgcatgaaaagacaccggagcaactccgcatgatactgcccaatcccctttatcactgccttggcagtgtggcgggtacaatgatgtgtttgatgtatggggctactctaattcttgcttcccctattttcaacgggaagaaagcgctggaagcaattagcagggaaaggggcacttttctgtatggcacacctactatgtttgttgacatcctcaatcaacccgacttctcaagctacgacatttccaccatgtgtgggggcgtcatcgcaggaagcccggcaccccccgaactaatacgcgctataattaataagatcaatatgaaggacctggttgtagcatatggcaccacggaaaactccccggttacctttgcacacttccctgaggataccgtggagcaaaaggcagaatctgtgggccggatcatgccacatacagaggccaggattatgaatatggaagcagggacccttgcaaaactgaatacaccgggggagctctgtatccgaggctactgtgtgatgctgggctactggggggagccacagaaaaccgaggaggcggttgaccaggataagtggtactggaccggggacgtcgccacaatgaatgagcaaggtttttgcaaaattgtgggtagatcgaaggatatgattatacgcgggggcgaaaatatttatcccgcagagctggaagattttttccatacacaccctaaagtacaggaggttcaggtggtgggcgtcaaagacgatcgtatgggcgaagaaatttgtgcatgcatccgcctgaaggatggcgaagaaactactgtggaggaaattaaagctttttgcaaagggaaaatctcccactttaagattcccaagtacattgtttttgtcaccaactaccctctaactatttcaggcaagatccaaaagttcaaactccgagaacagatggaacggcatctgaatctttag

SEQ ID NO: 107086 - DNA, 1731 bp, synthetic construct
  misc_feature 1..1731: note = Description of Artificial Sequence: Synthetic coding sequence
  source 1..1731: mol_type = other DNA
atgctgccacacgtcgtgctcaccttccggcgactgggctgcgctctggctagctgtagactggccccagctcgacatagaggcagcggtctcctgcatacagcccctgttgccaggagcgaccggtccgctccagtgttcacgcgcgcactggcattcggagacagaatcgcgcttgtcgatcagcacggcaggcacacctatcgagagctctactctagaagcctacggctctctcaggagatatgcaggctttgcggttgtgtgggaggggatcttcgcgaggaaagagtgtcgtttttgtgtgccaatgatgcttcatacgttgtggcacagtgggccagttggatgagcggcggtgtggccgttcccttatatcggaagcaccctgctgcgcagctcgaatacgtaatctgcgattcgcagtccagcgtagtactcgccagtcaggagtacctggaactgctcagccccgtcgtgcggaagctgggtgtgcctcttctgcccctgaccccagccatttacacaggagccgtcgaggagcccgccgaagtccccgtaccagagcagggctggagaaacaaaggagccatgatcatctacacctccggtaccaccgggcgtcctaaaggggtgctctcaactcaccagaacatcagagccgtggtgaccggtctagtgcacaagtgggcctggactaaagacgatgtcattctgcacgtgctgcccctgcaccacgttcacggggtggtaaacgccctcctatgcccgctttgggtgggagccacatgcgtgatgatgcctgagttttcccctcagcaagtttgggagaagttcctcagctctgaaactcccaggatcaacgtgttcatggccgtcccaactatctacacaaaactcatggaatattacgacaggcacttcactcagccccacgcgcaggatttcctcagggccgtatgtgaggaaaagatccggctgatggtgtctggctcggcagcactgcccctgccggtgttggaaaagtggaagaatatcacgggccacacgctgctggagaggtacggtatgacagaaatcgggatggcattgtcggggccgctgactactgctgtacgcctgcccggctccgtgggcactcctctgccaggcgtgcaagtccgcatcgtcagtgaaaaccctcagcgtgaagcctgtagctatactatccacgcggagggcgacgagcgtggaaccaaggtgacacctggattcgaggaaaaagaaggagagctgctagtccgaggtccatccgtttttagagaatactggaataagccagaagaaaccaagtctgcatttactttggacggctggtttaaaaccggcgatacagtggtctttaaagacggccaatattggattcggggacgaacttccgtggacatcattaagactggaggatacaaggtgagtgctctcgaggtggaatggcacctattggcacatccctctatcactgatgtggcagttattggtgtacctgatatgacgtggggccagcgcgtgaccgctgtggtaacacttagagaaggccattccctttctcacagggaacttaaagagtgggcacggaacgtcctggcgccatatgccgtgccatccgagctggtgctggtggaggagattccaagaaaccagatgggaaaaatcgacaaaaaggccctgattcggcacttccacccctcttag

SEQ ID NO: 107087 - DNA, 1731 bp, synthetic construct
  misc_feature 1..1731: note = Description of Artificial Sequence: Synthetic coding sequence
  source 1..1731: mol_type = other DNA
atgctcccccacgtggttctcacctttcggagactcgggtgcgcgctcgccagttgccgcctggccccagcccgccacagaggatccggcttgctgcacaccgcccccgtagccagatctgaccgttctgcgccagtcttcactcgtgcactggctttcggcgatcggattgcattggtggatcagcatggccgccatacatatcgagagttatattcacggtctctacggttgagtcaggagatctgtcgcctctgcggctgcgtgggcggagacctcagagaggagagagtatcgttcctgtgcgcaaatgacgcttcctatgtcgtggcccagtgggctagctggatgtcaggcggagtggcagtacctttataccgcaaacaccccgccgcgcaactcgagtatgtaatatgtgactcccagagctctgtggttctagctagtcaagaatacttggagttactgtcaccagtagtgagaaaattaggggtcccactcctccccctcaccccagcaatttacaccggagcagtggaagaaccagcggaggttcccgtgcccgagcaggggtggaggaataagggggccatgatcatttatacttccggcactacggggcggcccaaaggcgttctaagcactcatcagaacatcagggccgtagtcaccggcttagttcataagtgggcctggactaaagacgatgtcattctccacgtcctacccctgcatcatgtgcatggcgtggtaaacgccttgctatgccctctgtgggtgggagcaacctgtgtgatgatgcccgaatttagcccacagcaagtatgggagaaattccttagctcagagacccccaggatcaatgtttttatggcagtgccaaccatttacacaaaacttatggagtactacgaccgtcatttcacccaaccccacgcgcaggacttcttgcgtgcagtgtgtgaagaaaagattagattgatggtgtctggaagcgccgccttgccactgcccgtgctcgaaaagtggaagaacatcaccgggcacacactgctggaacggtatggcatgaccgaaatcggcatggccctttctggcccgctcactacggccgtacgccttccgggcagcgtgggaacgcctctccccggagtccaggtgaggatcgtgtcagagaacccccaaagagaagcatgttcatataccattcacgcggagggtgacgagaggggaaccaaagtcacacccggcttcgaggagaaggagggagagcttttggttcgaggcccttctgtctttagagagtactggaataaaccggaagagactaagtctgcattcacgctagatggatggtttaagacaggtgacacagtggtgttcaaggacgggcagtactggattaggggccggacatccgtggatattatcaagacaggtgggtacaaagtttcggcactggaagtggagtggcatctgctggctcacccatccatcacagacgtggccgtgatcggggtgcccgatatgacatggggtcagcgcgtgaccgctgtagttactctgagagagggacactctctgtctcatcgcgagttgaaggagtgggctagaaacgtgcttgccccctacgcagtgcctagtgagctggtgttggtggaggaaatcccccgcaatcaaatgggcaaaattgacaaaaaggccctaatcaggcacttccatccatcatag

SEQ ID NO: 107088 - DNA, 714 bp, synthetic construct
  misc_feature 1..714: note = Description of Artificial Sequence: Synthetic coding sequence
  source 1..714: mol_type = other DNA
atgctccctcatgtggtcctgacttttagacggctcggatgtgccctagctagctgcaggttggccccagcccggcaccgtggaagtggactgttgcacactgctccagtcgccagaagcgaccgcagcgctccagttttcacccgagcattggcttttggagaccgcatcgcccttgtggatcaacacggccgacatacctatcgcgagctctactcccgctcactgagactgtcccaagagatttgccggctctgcggctgcgtcgggggagacctgagagaggaacgagtgtcgtttctttgcgccaatgatgcttcctacgtggttgctcaatgggcaagctggatgtccggaggcgtagccgtgcccctgtaccggaagcatcctgcggcccagctcgagtatgtaatttgcgattctcagtcttctgtggtgttagcgagccaggagtatcttgaattgttgagccccgtagttcggaagttgggagtaccactgctgccccttacccccgcaatctacactggagcagttgaagagcctgctgaggtgccagtgccggaacaaggatggcggaataaaggggccatgatcatctatactagcgggacaacaggccgccctaagggagtcctgtcgactcaccagaatattcgcgcagtggttactggcttggtgcacaagtgggcctggacaaaagatgacgtttag

SEQ ID NO: 107089 - DNA, 2097 bp, synthetic construct
  misc_feature 1..2097: note = Description of Artificial Sequence: Synthetic coding sequence
  source 1..2097: mol_type = other DNA
atgcaggcccacgagttatttcggtactttagaatgcctgagctggttgatttcaggcagtacgtgaggactctgcctaccaacaccctgatgggcttcggggcttttgcggcattaacaaccttttggtatgccacccgccctaagcccctgaagcctccctgtgatctgagcatgcagtccgtggaggtggccgggtctggaggtgcaaggcgaagtgcactgctggactctgacgagcctctcgtctacttctacgatgacgtcactacgctttacgaaggcttccagcgcggtatccaagtgtcaaacaacggcccatgcctcggcagtcggaagcctgaccagccttatgaatggttgtcttataagcaggtggctgagctgagtgaatgtatcggcagcgcgctgatccagaaagggtttaagaccgcccccgaccaatttatcggtatttttgctcaaaatagacctgagtgggtcattattgagcaaggctgtttcgcctactctatggtcattgtgccattgtacgataccctggggaatgaagctataacctacatagttaacaaggctgagctctctctcgttttcgtcgataagccagaaaaagctaagctgcttttggagggcgtagagaacaaactcatacccggattgaaaattatcgttgtcatggacgcctatggatccgaactcgttgagcgcggccaacggtgtggggtcgaagtgacgagcatgaaagccatggaggatcttggtagggccaatcggagaaagccgaaaccgcctgctcctgaagacctggcagttatttgttttacctccggaactacgggcaatcctaaaggggccatggttacacatcggaatattgtgtccgactgttccgcgtttgtgaaggccactgagaacaccgtgaatccatgtccggatgacaccctgatttcttttctgcctctggcacatatgttcgaaagagtggtggaatgcgtaatgctctgtcacggagccaaaatcggtttctttcaaggggacatcagacttcttatggacgatctgaaggtgttgcagcccaccgttttcccagtcgtgccacgtcttctgaaccggatgtttgaccgtatctttggccaggcaaacaccacactcaaacgatggctattggatttcgctagcaagaggaaggaagctgaactcaggagtggcattatccggaacaattcactgtgggaccgattgatcttccataaagtgcagagctcccttggcgggagagtccggctcatggtcacaggcgcggcaccggtgtccgctaccgttctgacttttttgagggccgctctcgggtgtcaattctacgaaggttatgggcagaccgagtgcaccgcaggctgctgcctgactatgcccggggactggactgcaggccacgtgggtgctcctatgccatgcaacctgatcaaacttgttgatgttgaagagatgaactacatggccgccgagggggagggggaggtttgcgtaaaagggcccaatgtcttccagggctatctgaaggaccctgcaaagaccgccgaggctctggacaaggatggttggctgcacaccggcgatatcggcaaatggcttcctaacggcactctaaagatcattgatcgcaaaaaacacattttcaagttggcccagggagagtatatcgcccctgagaagattgaaaacatctacatgcgcagcgagcccgtggctcaggtctttgtccatggtgaaagcctacaggcctttctgatcgccatagtcgttcctgacgtcgagacactctgcagttgggcacagaagaggggcttcgaagggtctttcgaagagctgtgtcgaaacaaggatgtcaagaaagccatactcgaagacatggtcaggctgggcaaggactccggccttaagccttttgagcaggtgaagggcattactctgcaccctgagctgttctccatcgataacggtttgctcaccccaacgatgaaggcgaagaggcccgagctgagaaattacttccgcagccaaatcgatgacctctattctactataaaggtgtag

SEQ ID NO: 107090 - DNA, 1584 bp, synthetic construct
  misc_feature 1..1584: note = Description of Artificial Sequence: Synthetic coding sequence
  source 1..1584: mol_type = other DNA
atggttatcgtccctctgtatgataccttaggtaatgaagccatcacctacattgtgaacaaagccgaactctcactggtgttcgtcgacaaaccagagaaagctaagctgttactcgaaggcgtggagaataaactcatacccggcctcaagatcatcgtcgttatggacgcttacggatctgagctggtagaaagaggccagagatgcggcgtcgaagtcacttccatgaaagcgatggaggatctcggacgggccaacaggcgtaagccaaagcctccggcccctgaggatctagcagtcatctgtttcacgtccggtaccactggcaatcctaagggagccatggtgacccataggaatatcgtatcagattgcagtgcatttgtgaaagccaccgaaaacaccgttaatccttgccctgatgataccctcatcagctttctgcccctcgcccacatgttcgagagagtcgtggagtgtgtgatgctgtgccacggggccaagattggattcttccagggtgatatacgactgcttatggacgatctcaaggtgctacagcctacggtgtttcccgtggtgccacgacttctaaatcgaatgttcgaccggatctttggtcaggcaaacacaaccctgaagcgctggttgcttgactttgctagcaaaaggaaggaggctgagcttcggtcaggcattatccgaaacaattccctgtgggatcgccttatctttcacaaggttcagtcatcgttggggggcagagtccgcctcatggtgacaggtgccgcacctgtctctgcgacagtgctgactttcctgcgtgcagccctgggatgtcagttctacgaagggtacgggcagactgagtgtaccgccggatgttgccttactatgccaggcgactggactgccggccacgtgggggccccaatgccatgcaacctgattaagctggtggatgtggaggaaatgaactatatggctgcagaaggcgagggtgaagtgtgcgtaaagggacccaacgtattccagggctatctgaaggaccccgccaagaccgctgaggcacttgacaaggacgggtggctccacaccggcgacatagggaagtggttgccgaatggcaccctgaagatcatcgatcgcaaaaagcatatctttaaattggcccagggagaatatatcgccccggagaagatcgagaatatctatatgaggtccgagccagttgctcaagttttcgtccacggggagagcctacaggctttcctgatcgctatcgtcgtaccggacgtagaaaccctctgctcctgggcccagaaacggggatttgagggttcttttgaggaactttgtaggaacaaggacgtcaaaaaagccatcctcgaggacatggtcaggctgggtaaagattctggactaaaaccattcgagcaggttaaaggcatcaccttgcatcctgaactgtttagtatagacaatggcctactgacgcctactatgaaggccaagagaccagagctgcgaaactactttcgctcgcagattgacgacctttatagcaccatcaaagtatag

SEQ ID NO: 107091 - DNA, 1584 bp, synthetic construct
  misc_feature 1..1584: note = Description of Artificial Sequence: Synthetic coding sequence
  source 1..1584: mol_type = other DNA
atggtcatagtcccattgtatgacactctgggaaacgaggcaattacctacatcgtgaataaagcagagctctcgttggtgttcgtggataaaccagagaaggctaaattgcttctggagggcgtggaaaataagctgattcctggcttgaagattatcgtagtcatggatgcatacgggtctgagcttgtggagcggggccagcgctgtggcgtcgaagtgacatctatgaaagcgatggaagatttaggccgagctaatcgtcgtaaaccaaagccacctgccccggaagatcttgcggttatatgttttacaagcgggaccaccgggaacccaaaaggggctatggtcacccatcggaacatcgtctctgattgtagtgccttcgtgaaggcaactgagaatacggttaacccttgcccagatgatacactcatctcatttttgcccctggcacatatgtttgagcgcgtcgtggaatgtgtgatgttgtgccacggagccaaaattggctttttccagggcgacattcgcctgctgatggatgacctgaaggtactccagcctaccgtgttcccggtggtgccgcggctcctgaatcggatgtttgaccgtatctttggtcaagccaacaccacactgaaaagatggctgctagattttgcctcaaaaaggaaagaagcggaactgcgaagtggtatcatacgtaacaactctctttgggatcggctgatattccacaaagtgcagtcatcactgggtggccgcgtccgtctgatggtgaccggggctgcccctgtgagtgcaacagtcctgacctttttgagagccgccctgggctgtcagttctatgagggctatggacagacggaatgcactgccggctgctgcctgacgatgcctggagactggacagccggccacgtgggggccccaatgccttgcaatctcattaaactagtggacgtagaagaaatgaactacatggccgcagagggagagggtgaagtgtgcgtgaaaggcccaaatgtgtttcaggggtatctgaaagacccagctaaaacagccgaggctcttgacaaagatgggtggcttcacacaggtgatataggaaagtggcttcctaacggcaccctgaaaattatcgaccgtaaaaagcatatttttaaactggctcagggtgagtatattgccccagagaaaattgagaatatctatatgaggtcagaacctgtggcccaggtctttgtgcacggcgagtcactgcaggcatttctgattgctattgtggtcccggatgtcgagacgttgtgttcttgggcccaaaagagaggtttcgagggctctttcgaagaactgtgcagaaacaaagatgtcaagaaggcaatcctcgaggacatggttagattgggtaaggatagtggactgaaacccttcgaacaggttaaagggattaccctgcaccctgagctgttcagcatagacaacggcctgcttacacctacaatgaaagcaaagcgtcctgagctcaggaattattttagaagccagattgatgacctttacagcactattaaagtgtag

SEQ ID NO: 107092 - DNA, 2097 bp, synthetic construct
  misc_feature 1..2097: note = Description of Artificial Sequence: Synthetic coding sequence
  source 1..2097: mol_type = other DNA
atgcaggctcatgagttgtttcgttactttaggatgcctgaacttgtggattttaggcagtatgttcgcaccctgccaaccaacaccctcatgggctttggcgcattcgcagcactcaccacattttggtatgctacaaggccgaagcccctgaaaccaccctgtgatctctctatgcagagtgtcgaggtggccggaagtggaggcgcacgaagatctgcgctgctggacagcgacgagccactggtctacttctacgatgacgtgactactctgtacgaggggtttcagagaggcattcaggtaagcaacaatgggccatgtttaggcagcagaaagcccgaccagccttacgaatggctgtcctacaagcaggtggccgagctgtccgaatgtatcggaagcgccctgattcagaaaggtttcaagacagcccccgaccaattcatcggtatctttgcccaaaatcgcccggagtgggtcattatagaacaaggctgtttcgcctactctatggtgatagtgccactatacgacacattgggaaacgaggcaatcacttacatcgtaaacaaagctgaactttcactggtgtttgtggataagcctgagaaagccaagttgctcctcgaaggcgtggagaacaaacttatccctgggctcaagattatcgtagttatggatgcgtacggtagtgagcttgttgagcgcgggcagcggtgtggtgtggaggtgacatcaatgaaggccatggaggaccttggtcgcgcaaataggagaaaacccaagccccctgccccagaagatctggcagtgatttgtttcacctcagggaccaccgggaaccccaaaggggccatggtaacacaccggaatattgtcagtgattgttccgccttcgtaaaagccacagagaacacagtcaacccttgtcctgacgataccctcattagttttctgccattagcgcacatgttcgagcgtgtcgtggaatgtgtgatgctgtgtcatggcgccaagataggcttcttccagggggacattcgcctgcttatggatgacctgaaggtgcttcagccaacggtgtttcccgtggtgccaagactgttgaaccgaatgttcgacagaatctttggacaagcgaacaccacattgaaacgatggctcttagactttgcatccaaaagaaaggaggctgagctcaggtcaggtatcatacggaataatagcttgtgggaccggctcatatttcacaaggtgcagagcagcctgggtggaagggtcaggctcatggttaccggagcagctccagtgagcgcaacggtcttgacatttctgcgggctgctttggggtgtcagttctacgaaggttacggccagactgaatgtaccgctggttgctgtcttaccatgcctggggattggaccgctggccacgttggagccccaatgccatgcaacctcatcaagctcgttgacgtggaggaaatgaattatatggcagctgagggcgagggcgaagtgtgtgtgaaaggacccaacgtgttccagggttacctgaaggacccagcgaagacagcagaggcgctagacaaggatgggtggttgcacactggcgacattgggaagtggctgccaaatggtacactgaaaatcatcgatcgtaagaaacacatctttaaactggcccaaggcgagtacattgctccagaaaaaatcgaaaatatctatatgagatcagagcccgtggctcaggtgtttgtgcacggagagagcctgcaggcattcctgatcgctatcgtggtgcccgacgttgagactttgtgcagctgggctcagaagagaggctttgaagggtcattcgaggagctgtgtagaaataaagatgtgaagaaggcaatccttgaagacatggtcaggttgggcaaggactctggcctgaagcctttcgagcaggtcaaggggattacactccatcctgagctgttctcaattgacaacgggctcctgactcctaccatgaaggctaagaggccggagttgagaaattactttaggagtcagatagatgatctctattctacaattaaagtgtag

SEQ ID NO: 107093 - DNA, 1995 bp, synthetic construct
  misc_feature 1..1995: note = Description of Artificial Sequence: Synthetic coding sequence
  source 1..1995: mol_type = other DNA
atgcaggcccatgaacttttccgctactttcgcatgccggaattagtggacttcagacaatatgttaggacactccccacaaatactctgatgggattcggggcattcgccgccctgactacattctggtatgcaactagaccgaagccgctgaaaccaccgtgtgacctgagtatgcaatcagtcgaagttgccggctcaggtggggccaggagatctgccctgttggattccgacgaaccccttgtgtatttctatgacgacgtcactacactttacgaaggcttccagaggggtatccaagttagtaacaacggcccatgccttgggagccgcaaacccgatcagccttatgagtggctctcttataagcagtgggtaattattgaacagggttgttttgcctattcaatggttattgtccctctctatgatacactgggaaatgaagccattacctacatcgttaacaaggcagagctgagtcttgtgtttgtcgacaaacccgaaaaagccaaactgctgctcgaaggcgtggaaaataagcttatcccaggactgaagatcattgtcgtgatggacgcctacgggagtgagctggtcgaaaggggccaacggtgcggcgttgaggtgacgtccatgaaggcgatggaagatctgggaagggccaatcggcggaagcccaagccaccggcgccggaggatttggccgtgatctgcttcactagtggaacaacaggcaatccgaaaggcgccatggttacacacaggaacattgtaagtgattgctcagcatttgtgaaggccacagagaacactgttaatccctgtccagacgatactctcatctcattcttgcccctggctcacatgtttgaaagagtcgtggaatgcgtgatgctttgccacggtgcgaaaatagggtttttccagggtgacatcagactgctgatggacgacctgaaagtcctccaaccaacggtatttccagtggtgccccgtctgctcaaccgaatgttcgatcgcattttcggccaggctaacaccacgcttaaacgttggctgctcgattttgcatcgaaacggaaagaggccgagctgagaagcggcatcattcggaacaattccttgtgggatcgccttattttccacaaggtccagtcgtcacttgggggacgcgtgaggctcatggttacaggggcagcccctgtgtcagcgaccgtgttgactttcctcagagctgccctgggctgccaattttacgaggggtacggtcagactgagtgtacagccggctgttgcctgacaatgcccggcgactggacagccggccacgtgggcgcgcccatgccctgtaaccttataaagctggtggacgtggaagagatgaactacatggccgcagagggtgagggagaggtgtgtgttaagggccctaacgttttccagggctaccttaaagatcccgctaagaccgcagaggcactggacaaggacgggtggctgcacactggagatatcggcaaatggctgccaaatggaacgctgaaaatcatcgacaggaagaagcatatttttaagcttgcccagggcgagtacatcgcccccgagaaaatagaaaatatatacatgagaagtgaacccgtcgcccaggtgtttgtgcatggagaaagtctgcaagcattcctgattgcaatcgttgtaccagatgtagagaccctctgttcttgggcccagaaacgaggcttcgagggctcctttgaggagctgtgtcgcaataaagatgtgaaaaaggctatccttgaagatatggtccgccttggaaaggacagcggactaaagccctttgagcaggtgaagggcatcacactgcaccctgaactgttctccattgacaatgggttactcacaccaaccatgaaagccaaaaggccagagctgagaaattacttccgcagccagattgacgatctgtacagtacaattaaagtttag

SEQ ID NO: 107094 - DNA, 2097 bp, synthetic construct
  misc_feature 1..2097: note = Description of Artificial Sequence: Synthetic coding sequence
  source 1..2097: mol_type = other DNA
atgcaagctcatgaattgttccggtacttccggatgccagaattagtggactttcgacagtatgtgagaactcttcccactaacactttaatggggtttggcgctttcgccgcccttactacattttggtacgcaacaaggcccaagcccctcaagcccccttgtgacctctcaatgcagtcagtcgaagtggcaggctccggtggggcccggagaagcgctctcctagattcggacgagccgttggtgtacttctatgatgacgtgacaaccctatatgaaggttttcaacggggcatacaggtgtccaataacggtccttgccttgggtctaggaagccggatcaaccttacgagtggctgtcctacaaacaggtggctgaattaagcgaatgtattggcagcgctctgattcagaaggggttcaagaccgctccagaccagttcatcgggatcttcgctcagaaccgtccagagtgggtgatcattgagcagggttgttttgcttactctatggtgatcgtcccactctatgacactctgggtaacgaggcaatcacatatatcgtcaataaagctgagctttccctagtgttcgtcgataaacccgagaaagctaaacttctgttagaaggagttgagaataaactcatcccaggcctgaaaatcatcgtggttatggacgcctacggtagtgaactcgtcgagcgcggccagcgctgtggtgtggaggtgacgtccatgaaggccatggaggacctagggagagccaaccggaggaaaccaaagcctcccgcacccgaggatcttgctgttatatgttttacatctgggacaaccggtaacccaaaaggagccatggtaacgcaccgtaatatcgtctcagattgctctgccttcgttaaggcaaccgaaaatacagtgaatccttgcccagacgacacactaatctcatttctgccattggcacacatgttcgagcgagttgtcgagtgcgtgatgctatgccacggcgcaaagatcggcttctttcagggtgacatccggctcctcatggatgacctcaaggtgttgcaacctacagtttttcccgtcgttccacgcttacttaatcgaatgtttgatagaattttcggacaggccaataccacactcaagcgatggctcttagactttgcctctaagaggaaggaagctgaacttagaagcggcataattcgtaataacagcctttgggaccgactgattttccacaaggtgcaaagcagcctgggcggaagagtccgcttgatggtcactggtgcagctcccgtgtccgctacggtgttaaccttcctgcgcgctgcattgggatgccagttctacgaaggctacggacagaccgaatgtaccgccggctgctgcttaacgatgcccggcgactggactgccgggcatgttggagctcccatgccgtgcaacttgatcaaacttgtggacgtcgaagaaatgaattacatggctgccgaaggagaaggagaggtctgtgtgaagggcccaaatgtcttccagggatacctgaaagacccagctaaaacagccgaagctctcgataaggacggctggctgcatacaggggacattggtaaatggttacctaacggcactttaaaaatcattgaccggaagaagcacattttcaagcttgcacagggagagtacatcgctcccgaaaaaattgagaatatctatatgagaagtgagcctgtagcccaggtgttcgtgcatggcgagagtctgcaggctttcctgatcgcaatagtggtgccagacgtagagaccctatgctcctgggcacagaaacgcgggtttgagggaagtttcgaagagctttgcaggaataaagacgtcaagaaagcaatcctggaggatatggttcgcttaggaaaggatagcggactgaagccctttgagcaggttaaggggattacactgcatcctgagctgttttctatcgacaacggcctcctaacacctacaatgaaggccaaacgtccagaactaagaaactacttccggtcccagatagacgatttatacagcacgattaaggtatag

SEQ ID NO: 107095 - DNA, 2163 bp, synthetic construct
  misc_feature 1..2163: note = Description of Artificial Sequence: Synthetic coding sequence
  source 1..2163: mol_type = other DNA
atgaacaaccatgtcagctcgaaacccagtactatgaagctcaagcacaccatcaatcctatcctgttgtatttcatccacttccttatttctctgtataccatcctaacctacatacctttttatttctttagcgagagcaggcaagaaaagtctaatcgaatcaaagctaaaccagtgaatagtaagcctgatagcgcctacagatccgtgaactccctggatgggctggcctctgtcctgtacccggggtgcgacactttagacaaagtctttacctacgccaagaacaaatttaagaacaaaagactgctaggaaccagagaggtattaaatgaggaagacgaggtccagcccaatggcaaaattttcaagaaagtgatcctcggacagtataactggctaagctatgaagacgtctttgttcgggcatttaatttcgggaacggcctgcaaatgttagggcaaaagcccaagaccaacatagccattttttgcgaaacacgggcagagtggatgattgccgctcaagcctgtttcatgtacaacttccagctcgtgaccctgtacgctactctcggaggacccgccattgttcacgcgttgaatgagacagaggtcactaatatcattacatccaaagaactcctacaaaccaagctgaaggacatcgtgagtctagtgccacgccttagacacattattaccgtcgatggcaaaccccctacctggtctgagtttcctaaaggaatcatcgtgcatactatggccgccgtagaagccctgggcgccaaagccagcatggaaaatcagccccacagtaagcctctgccctcggacattgcggtgataatgtacacatcaggatctacagggctgccaaagggagtaatgatcagtcattcgaacattattgccgggatcaccggaatggcagagaggattcccgagctgggggaagaggacgtgtacattggctacctccctttggctcatgtcctggagttaagcgctgaactcgtatgcttgtcccacggctgccggattgggtactctagccctcagaccctcgccgaccaatcctctaaaattaaaaagggctccaagggagatacatctatgctgaagccaacgttgatggccgccgtacctgaaatcatggatcggatctacaaaaacgtcatgaacaaagtgtctgaaatgagcagttttcaacggaacctttttattctcgcttacaattacaagatggaacagatctccaagggccgaaacactcctctgtgcgattccttcgtgttcaggaaggtacgctccctcctcggcgggaatatcagactactcctgtgcgggggcgcccctctgtccgcaaccacgcagcgctttatgaatatttgcttctgttgccctgtcgggcaaggatacggtctgacagaaagtgcaggcgcagggactatcagcgaggtttgggactataataccggccgtgtgggcgctccattggtctgttgcgagatcaagctgaagaattgggaggagggagggtatttcaacactgataaaccccacccaaggggtgagattctgatcggcgggcagtctgttacaatggggtactataaaaacgaagcaaagaccaaggccgatttcttcgaggatgagaacggacagaggtggctgtgcacaggcgatatcggagagttcgaacctgacgggtgccttaagataatagacagaaaaaaagatctcgtcaagctgcaagccggcgaatacgtgtccttgggcaaggtagaagcagctttgaaaaacctgcccctggtcgacaacatatgcgcttacgcaaactcttaccacagctatgtgatcggatttgtggtaccaaaccagaaggaattgactgagctcgctcgtaagaaaggactcaagggcacctgggaagaattgtgcaattcctgtgaaatggaaaatgaggtgctgaaggtgctgagcgaagccgccatctcggcatctctggaaaagtttgagattcctgtgaagatccgcctgtcacccgagccttggacccccgagaccggtcttgtgaccgacgcattcaaactaaaaagaaaggagttgaagacacactaccaggccgacatcgagagaatgtatgggaggaagtag

SEQ ID NO: 107096 - DNA, 2163 bp, synthetic construct
  misc_feature 1..2163: note = Description of Artificial Sequence: Synthetic coding sequence
  source 1..2163: mol_type = other DNA
atgaataatcacgtgtcaagtaagcccagtacaatgaagttaaagcataccatcaaccccattttattatactttattcacttcctcatttccctgtacaccattctcacctacatcccattttattttttttccgaatctaggcaggaaaagtccaatcggatcaaggcaaagcctgtcaattcgaagccggacagtgcatataggagcgtaaactccttagacgggctggcatctgttctgtaccctggttgtgatacactggataaggtgtttacatacgcaaaaaacaagttcaagaacaagcggctgctggggacaagggaggtgctgaatgaagaagacgaggtgcagccaaatgggaaaatttttaagaaggtgatacttggccaatacaattggttaagctacgaggacgtgtttgttagggccttcaattttggaaatggactgcagatgctgggtcagaaaccaaagacaaatattgctatcttctgtgagacgagagctgagtggatgatcgcagcccaggcatgtttcatgtataacttccagttggttacactgtacgccacactcgggggccctgccatagtgcacgcactgaatgaaaccgaggtgactaatattataacatctaaagaactccttcagacgaagctgaaagatattgtgagcctggtgcccaggctcaggcacattatcactgtggacgggaagccaccaacgtggagcgagtttcctaagggaatcattgtacacaccatggcggctgtagaggcgttaggggccaaggcctccatggagaaccagccacattccaagcccttgccaagcgacatcgctgtgataatgtacaccagcggctccaccggactgccaaagggcgtcatgatcagccactcaaacatcatcgccggcatcaccggcatggctgagcgcatccccgagctgggcgaagaagatgtctatatcgggtatcttcctctcgcacatgtcctagaactgtcggctgaactggtctgcctgtcccacggctgccgaattggatacagctcaccacagaccctggccgatcagtcctcaaagatcaagaaggggtcaaaaggagacacgtcgatgcttaaacctactttgatggcagccgtgccagagattatggaccggatttataagaacgtgatgaataaggtgtcagagatgagttcgtttcaacgaaatttattcatcctggcatataactacaagatggaacaaataagcaaggggcgcaataccccactgtgtgacagcttcgtcttcaggaaggtaagaagtctgctcgggggcaatatcaggctgctcctgtgcggcggcgctccgctgtccgccactacacaacgcttcatgaatatctgtttttgttgccccgtcggacagggctatggattgacagagagcgctggtgcaggaacaatctccgaagtgtgggactacaataccgggcgagtaggtgccccactggtatgttgcgagatcaagctgaagaactgggaggagggcgggtacttcaacactgataaacctcatcctaggggcgagatcctaataggtggtcagtccgtgacaatgggatactacaagaatgaggcaaaaaccaaggccgattttttcgaagacgagaacggacagcgttggctgtgcaccggcgatattggcgaattcgagcctgacggatgtctgaagattatcgatagaaagaaagacctggttaagttgcaggctggcgaatatgtgtcccttggtaaggtcgaagccgctttgaaaaacctccccctcgtggataacatctgtgcctacgcaaactcctaccacagctacgtgattggcttcgtggtgcctaaccagaaagagcttactgagctggctaggaagaagggcctgaagggcacctgggaggagctgtgtaattcctgcgagatggaaaacgaggtcctgaaggtattaagtgaggccgccattagcgcctccttggagaaattcgagatccctgtaaaaattcgtctttcacctgaaccctggacccctgaaactggactagtcacagatgccttcaaactgaagaggaaggagctaaagacacactatcaggccgatattgagagaatgtacggtaggaaatag

SEQ ID NO: 107097 - DNA, 267 bp, synthetic construct
  misc_feature 1..267: note = Description of Artificial Sequence: Synthetic coding sequence
  source 1..267: mol_type = other DNA
atgaataatcacgtgtcttcgaagccgtctaccatgaagcttaaacatacaattaatcccatactgctgtattttatccactttctcatctccctctacaccatccttacttatattcctttctacttctttagcgaatcacgtcaggagaagtctaacagaatcaaagccaaaccagttaactccaaacccgacagcgcctaccgatccgtgaactcactggatggattagcgagcgtgctgtacccaggttgcgacacactttag

SEQ ID NO: 107098 - DNA, 288 bp, synthetic construct
  misc_feature 1..288: note = Description of Artificial Sequence: Synthetic coding sequence
  source 1..288: mol_type = other DNA
atgaacaatcatgtgtcctctaaaccaagcaccatgaaactgaaacacacaattaatcccatcctgctttacttcatccacttcctcatatcgctgtacacaattctcacttatattcctttctattttttctccgaaagccgacaggagaaatctaatagaatcaaagccaaacctgtaaactctaagccagattccgcatacaggagcgtgaattctctcgacggacttgcctccgttctgtatccgggttgcgatacattggacaaagtgttcacctatgcatag

SEQ ID NO: 107099 - DNA, 2052 bp, synthetic construct
  misc_feature 1..2052: note = Description of Artificial Sequence: Synthetic coding sequence
  source 1..2052: mol_type = other DNA
atgcttttcatcttcaactttttgttctcaccgctgcctacgcccgccctgatttgcatcctgaccttcggagctgcgattttcctttggcttatcacccggccgcaacctgtcctcccactcctggacctgaataaccagagcgtaggcattgagggaggtgcaagaaaaggggtgtctcaaaagaataatgatctgacaagctgttgtttctctgacgcaaagacaatgtatgaggtctttcagcgaggactggccgtgtctgacaacggaccctgtctggggtaccgaaaaccaaaccagccttaccggtggctgagttacaagcaggtctcagatagagcagaatatctgggctcttgcctcctccacaagggatataagtcttctcccgaccagtttgtaggaatttttgctcagaatcggccggagtggatcatctcagaacttgcatgctatacctactctatggttgcagtgcccctgtacgatacactcggaccggaggctatcgtacacatcgtcaataaggcagatatcgcaatggttatctgcgataccccgcagaaggccctggtactaattggtaacgtagaaaagggctttactccctctctgaaggtcatcattctgatggacccttttgatgatgacctgaagcaacgcggagaaaagtccggaatcgaaatcttatccctgtatgacgcggaaaacttaggcaaggaacacttccgaaagcctgtccccccaagtcccgaggacctctctgtcatatgttttacttctggcacaaccggtgatcccaaaggggccatgattacacatcagaatattgtgtcaaacgctgccgcattcttgaagtgcgtggagcatgcttacgagcccaccccagacgacgtggctatcagctacttgcccctcgctcatatgttcgagcggatcgtgcaggcagtggtgtacagctgcggggccagggtggggttttttcagggagacatccggctgctcgcagatgatatgaagacactgaagccaactctgtttcccgcggtcccacgactcctgaatcgtatttatgacaaagtgcaaaatgaggctaaaacaccactgaaaaaattcctactgaagttggcggtctcatcaaagttcaaggagttgcaaaaaggcatcatccgacatgattctttttgggacaagttaatcttcgccaagattcaggacagcttggggggtcgcgtgagggtgattgtgaccggagccgctcctatgagcacaagcgttatgacctttttccgcgccgccatgggatgccaggtctatgaggcctacgggcagacagaatgcaccggggggtgcacctttacactgcccggggactggacatccggccatgtcggagtgcctctggcatgcaactatgttaaactggaagacgtagctgacatgaactatttcactgtgaataatgagggcgaggtatgcatcaagggcaccaacgtgtttaaggggtacctgaaggatccagaaaaaactcaggaggcccttgacagcgatgggtggttgcataccggcgacatcgggaggtggctcccaaacggcactttaaaaatcatagaccgtaagaagaatatctttaagttagcccagggcgagtacattgcgcctgaaaagattgagaacatttacaaccggtctcagcctgtgcttcaaatctttgtacacggcgaatccctgaggtcctcactggtaggggtggtagtgccagatacagacgtgctgccatcttttgctgcaaagctgggggtgaagggctcttttgaggaattgtgtcaaaatcaggtagttagggaggctatcttggaggacctgcagaagatcggcaaggaaagcggccttaagacttttgagcaggtcaaagctatattcctacaccccgaaccatttagtattgaaaatggcctgcttaccccaactctcaaagctaagagaggggaactctcgaagtattttcggacacagattgattctctttacgagcatatccaggactag

SEQ ID NO: 107100 - DNA, 2052 bp, synthetic construct
  misc_feature 1..2052: note = Description of Artificial Sequence: Synthetic coding sequence
  source 1..2052: mol_type = other DNA
atgttgttcattttcaattttctctttagtcctcttcccacgccggcactgatttgtattttaacctttggcgccgcaatatttttgtggttgataacccgtccacagcctgttctgccactcctagacctgaacaatcaatctgtggggatcgaaggcggggctagaaaaggagtctctcaaaagaacaacgacctgacaagttgctgcttttccgatgccaaaactatgtacgaggtcttccagcgggggcttgctgtgtctgataatgggccctgccttgggtaccgcaaaccaaatcagccttatagatggctctcctataaacaggtttccgatcgggctgagtatctcgggagttgcctcttgcacaaaggatataaaagtagcccagatcagttcgtcggaattttcgcccagaatcggccagagtggatcatctctgaactcgcctgctacacatattctatggtggcagtccctctgtacgacacgcttggcccagaagctattgtgcacattgtcaataaggctgacattgccatggtgatttgtgataccccacagaaggccctggtgttaatcggcaacgtggaaaaagggttcacaccctccctcaaagtcatcatcctgatggatccttttgatgatgatttgaaacagagaggagaaaagagtggtattgagatcctcagcctgtacgacgccgagaatttgggcaaggagcattttagaaagcctgtaccccctagccccgaagatctttctgtgatatgttttacatctggtactaccggagacccaaaaggagccatgataactcatcaaaatatagtgagtaatgctgcggcctttctgaagtgtgtagagcacgcctatgagcctactcctgacgatgttgccatctcctacttgccactggcccatatgtttgaacggattgtccaggccgttgtgtatagttgtggcgctcgtgtgggtttttttcagggcgatatacggctgctggctgatgacatgaaaactctgaaaccaactctctttcctgcagtccctaggttgctcaaccgcatatacgataaggtgcaaaacgaagccaaaactcccctaaagaagttcctgctaaaattggcggtctctagtaagtttaaggagctccagaaaggcatcatacgccatgactcattctgggacaagctgatattcgctaagatccaggatagtctgggcggaagggtcagggtcattgttacaggagcggctcccatgagtacttcggtgatgactttcttccgagcagctatgggttgccaggtttacgaggcatatggccagacagaatgcacaggcggatgcacgttcacgctgccaggagattggacttccggacacgtgggggtgccactggcctgcaattatgtgaagctcgaggacgtggctgacatgaattatttcacagtgaataatgagggcgaagtgtgcattaaaggcacgaacgtcttcaaaggatatctgaaggatccagaaaaaacccaagaagctcttgattcggatggatggctgcacactggcgacatcggcagatggcttcccaatgggacgctaaaaatcatcgaccgcaagaagaatattttcaagctcgcccagggggaatacatcgcccctgaaaagattgagaatatctacaacaggtcgcagcccgtcctgcagatcttcgtgcacggcgaaagcctccgttcatctcttgtgggggtggtggttccagatacagatgtattgcctagctttgcggccaaactcggcgtgaagggctctttcgaggagctgtgtcagaaccaggtagtcagagaagcaatactggaggatctgcagaaaatcggcaaggagtcaggattaaaaacttttgaacaagtgaaggccatctttctgcaccccgagccgtttagtatcgagaacgggctcctgaccccgacacttaaagcaaagcggggcgagctgtcaaaatactttcgtacacagatcgattcactgtatgaacatattcaggactag

SEQ ID NO: 107101 - DNA, 2220 bp, synthetic construct
  misc_feature 1..2220: note = Description of Artificial Sequence: Synthetic coding sequence
  source 1..2220: mol_type = other DNA
atggatgcgctgaaaccgccatgtctatggagaaaccatgaacgcggtaaaaaagacagagattcatgtgggcgaaaaaattcggagccaggaagcccacatagcttggaggcccttagggatgccgctcccagccagggccttaatttcctcttactgttcaccaaaatgctgtttatattcaactttttgttctctcctctgcccacccccgcattgatctgtattctgaccttcggagccgccatttttctgtggttgattacacgaccacaacctgtgctccccttgctggacctgaacaatcagtctgtcggaattgaagggggtgccaggaagggggtttctcaaaaaaataacgatctcaccagctgttgtttttccgacgctaaaactatgtacgaagtgtttcagcggggcttggccgtgagtgacaatgggccatgccttgggtaccgcaaacccaaccagccctacagatggttgtcatacaagcaggtctctgaccgcgctgaatacctcggttcgtgtcttttacataaggggtacaagagcagcccagatcaatttgtcggaatctttgctcagaaccggcctgaatggatcatctctgagctagcctgttatacatattccatggtggccgtgcccctctatgatactctcggccccgaggctatcgttcacatcgtgaataaggctgatatcgcaatggtgatctgtgataccccacagaaagcactggtgctgatagggaacgtggaaaaagggttcactccatcactgaaggtcatcatcctgatggatccattcgacgatgatcttaagcagcggggcgagaagtccggaattgagatcctcagcttgtatgacgcagagaatctgggaaaggagcactttcggaaaccagtgcctccctcgccggaggacctgtctgtgatttgctttactagcggcaccaccggtgacccaaagggtgccatgatcacacaccagaacattgtgagtaacgctgcagcctttctcaagtgtgtggaacatgcctacgagccaaccccggacgacgtcgctatttcatatttgcctctggcccatatgttcgagcgaatcgtccaggccgtggtttattcatgtggggcccgggtggggttctttcagggcgacattaggctgcttgctgacgatatgaaaaccctgaaaccgaccttgtttcccgctgtgccccgactcctcaacagaatctacgataaggttcaaaacgaagccaaaactcctctcaaaaagtttctcctgaagctggccgtgtcaagcaaattcaaggagttacagaaaggcatcatcaggcatgattccttttgggataagttaattttcgccaagatccaggattccctgggaggccgagtacgggtgattgtgaccggggccgctccaatgagcacaagtgtgatgactttcttcagagccgccatgggatgccaggtgtacgaggcctacggccagaccgaatgcacagggggttgtactttcaccctgccaggtgactggacgtccggacacgttggcgtgccgctagcctgcaactacgtcaaactggaggatgtagctgacatgaactacttcactgtgaacaacgaaggagaggtttgcatcaagggaaccaacgtattcaaaggataccttaaggatccggagaaaacgcaggaggcgctcgatagcgatggctggctacacaccggcgatattggccgttggctgcccaatggcaccttgaagataatcgaccggaaaaaaaacattttcaaattggcccagggcgagtatatcgcccctgagaagatcgagaacatctataatagatctcagcccgtccttcagatttttgtgcacggcgaatctctgagatctagtcttgtgggggtggtcgtacctgacaccgatgtgctgccttcctttgctgcaaaactgggcgtgaaagggtctttcgaagagttgtgccagaaccaagtggtgcgggaagctatcctggaggaccttcagaaaataggaaaagaatccggcctgaaaacattcgaacaagtgaaggccatctttctacaccctgaaccattcagtattgagaacggcctgttgacacccacgttaaaggcgaagcgcggtgaactctcaaagtacttccgcactcaaatcgattccctatacgagcatatccaggactag

SEQ ID NO: 107102 - DNA, 1398 bp, synthetic construct
  misc_feature 1..1398: note = Description of Artificial Sequence: Synthetic coding sequence
  source 1..1398: mol_type = other DNA
atgctttttcccggtgcctccatcgtgcctgagtgctggttgctggttctgattcagaacttaggaaaggagcatttcagaaaacccgttcccccttcccccgaggatctgagtgtgatttgtttcacctcggggactaccggcgatcccaagggtgcgatgattacgcaccagaacattgtgagcaacgccgcagcatttctcaagtgtgttgaacacgcctatgagcccactccagatgacgtggctattagctatctgccactggcccacatgttcgagaggatcgtgcaggctgttgtatatagttgcggtgcccgtgtgggtttcttccagggagatatccgcctgctcgcagatgatatgaagacacttaaacctacgttgtttcccgctgtcccaagattgctaaaccgaatttatgacaaggtccagaacgaagctaaaactccgctcaagaagttcctgctgaagctcgccgtgtcatctaaattcaaagaattgcagaaaggaatcatcaggcacgactcattctgggacaaactgatcttcgccaaaatccaagatagtctggggggcagagtgcgggtgattgtgacaggtgcagctcccatgagtacgagtgtgatgacctttttcagagcagctatgggatgtcaagtgtatgaggcctacgggcagaccgagtgtactggtggctgtaccttcacgttgcctggcgactggacaagcggccacgtgggagtgcctctggcttgtaattacgttaagttggaggatgtggctgacatgaattacttcaccgtgaacaacgagggagaagtttgtatcaagggtactaatgtgttcaagggctacctgaaggatcccgagaaaactcaggaggcattagactcagacggctggcttcacacaggtgacattggcagatggctcccaaatggtacactgaagataattgatagaaaaaagaacatttttaagctcgcacagggcgaatacattgctcctgaaaagatagaaaacatttacaatagatctcagcctgtcctgcaaatcttcgtccacggcgagagccttcgcagctccctcgtgggtgtagtcgtccctgacacagatgtcttgccgtcatttgctgccaagctcggtgtgaagggaagctttgaggaactgtgtcagaaccaggtggtgagggaagccattcttgaagatctgcagaagataggcaaggaaagcggactcaagacttttgaacaagtaaaggcgatttttctgcacccagagccattttcgattgagaacggcctgctcacacccacactcaaggctaagagaggggaactgtcaaagtacttccgcacccagatcgactccttatatgagcatatccaagattag

SEQ ID NO: 107103 - DNA, 2052 bp, synthetic construct
  misc_feature 1..2052: note = Description of Artificial Sequence: Synthetic coding sequence
  source 1..2052: mol_type = other DNA
atgttgttcatttttaacttcctgttcagtcccctccctacaccagccctcatctgtatcctgacatttggagccgccatttttctgtggctgattaccaggccccaacccgtgcttcccctcctggatctgaataaccagtcagtggggatcgaaggcggcgcaaggaaaggcgtgtctcaaaagaacaacgatctgacctcttgttgtttttccgacgccaagactatgtatgaagtgttccagcgcgggctggccgtatccgacaatggtccctgtttggggtaccgcaaacctaatcagccgtacaggtggctaagttataagcaagttagtgacagggccgaatatttaggctcatgcttgctgcataagggatataagtcgagccctgaccagttcgtaggaatcttcgctcagaaccgccccgaatggattatatccgagctggcctgttatacgtattcaatggtggccgtaccactctacgacaccctggggcctgaggctatagtgcacattgtcaataaagcggacatcgccatggtgatttgcgacaccccacagaaggcgctggtgctgatcgggaatgttgagaaaggtttcacaccgtctctaaaagtgatcatcttgatggacccttttgatgacgatttgaaacagaggggcgagaagtcagggattgaaattctgagtctttacgatgctgagaatcttgggaaggagcacttccggaagcctgtcccacccagccctgaagacctcagtgttatctgcttcacttcaggcactacaggcgacccaaaaggtgcgatgattacccatcagaacatcgtgtccaacgctgcggcctttctaaagtgcgtcgaacacgcatatgaacccaccccagacgacgttgccatttcctatctgccccttgcacatatgttcgagagaatcgttcaggccgtagtgtatagctgcggagctagggtgggatttttccagggcgacattagactgctggcggacgatatgaagacactgaagcccaccctgttccccgcagtgccaagattactcaatcgaatctatgacaaagtgcagaacgaggctaaaactcccctgaagaagttccttctgaagctggccgtgtcttcgaaatttaaagagctgcagaagggaataatccgtcacgattccttttgggacaagcttatatttgctaaaattcaggacagcctagggggccgagtgcgagttatagttacaggggctgcccctatgtctacctctgtgatgacatttttcagagccgccatgggttgccaagtctacgaggcttatggtcagacggaatgtacaggaggttgcactttcacgctgcctggagattggacatccgggcatgtgggtgtgcctctggcctgcaactacgtgaagctggaagatgtcgccgacatgaattactttacggtgaacaacgagggagaggtgtgcatcaaggggaccaacgtttttaagggttacctgaaggatcctgaaaagacgcaggaagctttggatagtgatggttggctccacacaggagacataggcagatggctacccaatggcaccttgaaaatcatagacaggaaaaagaatattttcaagttagctcagggggaatacatagcacctgaaaagatcgaaaacatatataaccggagtcagccagtcctgcagatatttgtacatggagagagtctccgcagttccctggtaggcgtggtcgtcccagataccgatgtgctcccgagtttcgcagccaagcttggagtgaaaggatctttcgaggagctctgccagaaccaagttgtcagagaggccatcctggaggatctgcaaaagatcggcaaagagtccggattaaagacattcgaacaggttaaagccatttttctgcatcccgaacctttcagtatcgagaatgggctgctgacacctactctcaaagccaaacggggggagctttccaaatacttccgtactcagatcgacagcctctatgagcacatccaggattag

SEQ ID NO: 107104 - DNA, 1980 bp, synthetic construct
  misc_feature 1..1980: note = Description of Artificial Sequence: Synthetic coding sequence
  source 1..1980: mol_type = other DNA
atgttattcatttttaattttttgttttctcccctgcccacgcccgcgctgatttgcattctgacattcggggccgctatttttctatggcttattacccggccacagccagtgttaccgctgcttgacctgaataatcaatctgttgggattgaaggcggagctcgcaagggtgtgtcacaaaaaaacaacgatctcacgagttgttgctttagcgacgccaagacaatgtacgaggtcttccagagggggctcgcagtctccgacaatgggccttgcctggggtacagaaaaccaaatcaaccataccggtggctgtcctataaacaggtctcggatagggcagaatacctcgggtcctgcctcctacacaagggatacaagtcgagcccagatcagttcgtggggatcttcgcccagaaccggccagagtggattatctctgagttagcatgctacacgtactccatggtggctgtgccactgtacgatacactagggccagaggcgatcgtgcacatcgtaaataaggccgacatcgctatggtcatttgtgataccccccagaaagcgttagttttgatcggaaatgtcgagaaaggattcacacccagcctgaaggttatcatcctcatggaccccttcgacgacgacctcaagcaaaggggagagaagtcaggaatagaaatactgtccctttacgatgccgaaaatttaggcaaagaacacttccgaaagccagtccccccgagccccgaggacctttccgtgatctgctttacaagcggtacaactggagatccgaaaggcgcgatgatcacacaccaaaatattgttagcaatgccgctgctttcctcaagtgtgtcgaacacgcatacgagccaacccctgatgatgtggccatttcatatcttcccctggcccacatgttcgaacggatagtgcaggccgtggtgtatagttgtggtgctcgtgttggattttttcagggagacattcgactcttggccgacgacatgaagactttaaagcccaccctttttcccgctgtgccaaggttgttaaatcgcatatatgataaggttcagaatgaagcaaaaacgcccctgaaaaagttcctgctgaaactggcagtcagttccaaattcaaagagctccagaagggcattatcagacacgactctttttgggataagcttatcttcgcaaaaatccaggatagtctggggggacgggtcagagtgattgtcaccggcgcagcccctatgtcaaccagtgtcatgaccttcttccgggccgccatggggtgccaggtgtatgaagcctacggccagaccgaatgcaccgggggctgcaccttcacactgccaggtgattggaccagcggtcatgtgggggttcctttggcatgcaattacgtgaagttggaggacgtggccgatatgaactatttcaccgttaacaatgagggcgaagtgtgcattaaaggcaccaacgtcttcaaggggtatctgaaggacccagaaaaaactcaggaggccctagattctgatggttggcttcacacgggggacataggacgctggctccctaatgggacactcaaaataattgaccggaaaaaaaatatcttcaagttagcccaaggcgagtatatagcccctgagaaaatcgaaaacatttacaaccggagtcaaccagttttgcagatattcgtccacggcgagagtcttcgcagttcactcgtgggtgtcgtagtgccagatacagacgtgctcccatcctttgccgctaagctcggtgtcaaaggatcctttgaggaactgtgccagaaccaggtcaaggcaatattcctccatccagagcccttttcaatagaaaacggtttactaacacccaccctgaaggccaagcgaggtgagctcagtaagtacttcaggacacagattgattctttgtatgaacatattcaggactag

SEQ ID NO: 107105 - DNA, 2169 bp, synthetic construct
  misc_feature 1..2169: note = Description of Artificial Sequence: Synthetic coding sequence
  source 1..2169: mol_type = other DNA
atgctgacattcttcctagtgtcaggaggtagtctgtggttatttgtcgaattcgtactgagtctgctggagaaaatgcagacacaagaaatactgcggatactgcgtctccccgaactcggggaccttggacaattcttccgatctcttagtgctacaacactggtcagcatgggtgctctcgctgccatcctggcttactggttcacgcatcgccctaaagcattacagcccccctgcaatttgttgatgcagagtgaagaagtcgaagattctggaggagcaaggaggagcgtgatcgggtcggggccccagttgctcacacactattacgatgatgctcggaccatgtaccaagttttccgtcgcgggctgagcataagcggcaatgggccttgtttggggttcagaaagccaaagcagccatatcaatggctctcgtaccaagaggttgctgacagggcggagttcttggggagtggcctcctgcaacataactgcaaggcctgcaccgatcagttcatcggcgtcttcgcccagaaccgccctgaatggatcatcgttgaactggcttgttacacttatagcatggtcgtggtgcctctttatgatacgcttgggccaggggccattagatacattatcaatacagcggatatttcaaccgtgattgtggacaagcctcaaaaggctgtgctccttctggagcatgtagaacgcaaagaaacaccgggcctcaaattgatcatcctgatggatccattcgaagaggctctgaaggagcgcggtcagaaatgcggcgtggtaattaaatccatgcaggcagtagaggactgcggccaggaaaatcaccaggcgcccgtgcccccgcagcccgatgacttgtctattgtctgctttacctcaggaactaccggcaatccgaagggggcaatgctgacacacgggaacgtagtggccgacttcagtgggtttttgaaggtcaccgagagccagtgggcccccacttgcgcagacgttcatatcagctacctgccattagcccatatgtttgagcgcatggtgcaatcagtagtttactgccatggcggccgcgtcggattcttccaaggggacattagattacttagtgacgacatgaaagccctgtgccctaccatcttccctgttgtcccccgtcttttaaaccgtatgtatgacaagatcttttcacaggccaacacaccactcaagaggtggcttctagaattcgccgctaagagaaaacaagcagaggtcaggtctggtatcatcaggaacgactccatatgggacgaattgtttttcaataaaattcaggcctctctgggtggatgtgtaagaatgatagttacaggtgcagcaccagcctctccaactgtgctaggttttctcagagctgccttggggtgccaggtatatgaaggctatggtcagacagagtgtacggccggctgtactttcactactcccggcgattggacttcagggcatgtcggggcccccctcccttgcaatcatataaagctggttgatgtggaggaactgaactattgggcctgcaagggggagggcgaaatctgtgtcagaggaccgaatgtgttcaaggggtatttgaaggatcccgatagaactaaggaagcgctagacagtgatggctggctccacactggcgacattgggaaatggctacccgccggcactttaaagataattgaccgcaagaaacatatatttaagctggcccagggcgagtatgttgcccccgaaaagatcgagaatatctatatcagaagtcagccggttgcacagatctatgtgcacggagactcactgaaagcttttctggtaggcattgtggttccagatccagaggttatgccctcctgggctcagaagcgcggaatcgaaggcacctacgctgacctctgtacaaacaaggatctgaaaaaggctatccttgaggatatggtgcgcctgggaaaggagtctggactccacagcttcgagcaggttaaagccatccacatccatagtgacatgttcagtgtgcagaacggattgctcactcccacgcttaaggccaaaagacccgaattacgggaatatttcaaaaaacaaatcgaagagctatattccataagcatgtag

SEQ ID NO: 107106 - DNA, 1869 bp, synthetic construct
  misc_feature 1..1869: note = Description of Artificial Sequence: Synthetic coding sequence
  source 1..1869: mol_type = other DNA
atgcagactcaggagatccttaggatcctgcggttgccagagctgggagatctcgggcaattttttagaagtctgtcagcaactacactagattctggaggagcaagaaggagtgtcattggaagcgggccccagctgttgacccactactatgatgatgcccggaccatgtaccaggttttccgacgcgggctgagtatctcaggcaatggcccgtgcctggggttccgcaagcccaagcaaccatatcagtggcttagctatcaggaggtcgccgacagggccgaatttctcggttcaggactcttgcagcataactgcaaggcttgcaccgatcagttcatcggcgtcttcgctcaaaacaggccggaatggatcatcgttgagctggcttgctatacctatagcatggttgttgtgccactgtatgatactctgggccctggcgcaatccggtatattatcaacaccgccgacatcagcactgtgattgttgacaaacctcagaaggccgtgttgctgctcgagcacgtggaaagaaaggagacccctggactcaagctcattatcctcatggatcctttcgaagaggctctgaaggaaaggggacagaagtgcggtgtcgtgatcaagagcatgcaggccgtcgaggactgcggccaagagaaccaccaggctccagtcccaccacagcctgacgacctctccattgtctgtttcacttccggaactaccggcaatccaaagggagctatgcttactcacggcaacgtcgtggcagacttttccggcttcttgaaggtgaccgagggcgacatacggctactgagtgatgacatgaaagccttatgtcctaccatctttcccgtcgtccccagacttctaaaccgcatgtacgacaagatcttttctcaggccaacacacccctcaaaagatggctattggaattcgctgccaaacgcaaacaagccgaggttagatcaggaatcatccggaacgattccatctgggatgagctgtttttcaataaaatccaggcctcattaggaggatgtgttcggatgatcgttactggagcagcaccggcgagtccgacggtgctgggatttctccgggccgcgttggggtgccaggtatacgaggggtacgggcagaccgaatgtacggctggatgtactttcacgacgcccggcgattggacgagtggtcacgtgggggccccgttaccatgcaatcacatcaaactggtggatgtggaagagctgaattactgggcctgtaagggagagggcgaaatatgcgttagaggccccaatgtgttcaagggttatttgaaagatcccgaccgtacaaaggaagccctcgactccgacggctggctacacaccggcgatatagggaaatggttgccagccggaacacttaagataattgatagaaaaaaacacatcttcaaactggctcaaggagagtatgtggccccagagaagatcgagaatatctatattcgtagccagccggtggctcagatctacgtgcatggcgacagcctgaaggcctttctcgtggggatagtagtgccggatccagaggtgatgccctcatgggcccaaaagcgcggcattgagggcacatatgctgatctttgcacaaacaaggacctgaagaaagcaattctcgaggacatggtgaggcttggcaaggaatccggcctccatagctttgagcaagtgaaagctatccacattcattccgacatgttctctgtccaaaacgggttgcttactcctactctgaaagccaagcggccggagctcagggaatatttcaagaagcagatagaagaactttatagtatatccatgtag

SEQ ID NO: 107107 - DNA, 2094 bp, synthetic construct
  misc_feature 1..2094: note = Description of Artificial Sequence: Synthetic coding sequence
  source 1..2094: mol_type = other DNA
atgcagacccaggagatactccggattctacgcctcccagagctgggagacctgggccagtttttcaggtcactgtccgcaacgacccttgtatctatgggcgccctcgccgccattcttgcctattggtttactcaccgccccaaagccctgcagccaccctgcaatctgctgatgcagtccgaagaagtggaggatagtggcggcgcaagaagatcagtaatcggaagcgggcctcagctccttactcactattacgacgacgccaggacaatgtaccaggtctttaggcggggcctatcaataagtggtaatggcccctgcctgggctttcgcaaaccaaagcaaccatatcagtggctatcctaccaggaggtcgccgaccgcgctgaattcctcggcagcgggcttctccagcacaactgcaaggcttgtacagaccagttcattggcgtgttcgctcagaaccgtccagagtggattatcgttgaactcgcctgctatacttactccatggttgtagtcccgctctatgacacattgggaccaggagcaatccgctacatcatcaacaccgctgatatatccaccgtgattgtggataaaccacagaaggccgttctgctgctggaacacgtagagcgcaaggaaacccctggcctgaagttgatcattctaatggatcccttcgaggaggccctgaaggagcgcggacagaagtgcggggtagtaatcaagagtatgcaggcagtggaagattgcggtcaggagaatcatcaggcccccgtccctccacaacccgacgatctttcaatagtttgttttacatccggtacgacgggcaaccccaagggagccatgctaactcatgggaatgtggtcgcagatttctccgggttcctgaaggtcactgaaaaagttatctttccaagacaggatgatgtactcatctcatttctgccattggcccatatgtttgaacgggtcatccagtcagtggtgtactgtcacggggggcgcgttggatttttccagggcgacatcagactgctgtcagacgatatgaaagccctgtgccctacaatcttccccgtggtgccacgcctactaaacaggatgtatgataagatctttagtcaagctaacacacccttgaagcgttggttgcttgaatttgccgcgaagcggaagcaggcagaagtaagaagcggcatcataaggaatgactctatctgggacgagctattcttcaacaaaattcaggcgtccctcggcggatgcgtgcgaatgattgtcaccggggcagctcctgcttcccctactgtgctgggatttctcagagccgccctgggctgtcaagtgtacgagggctacggccaaacagaatgtactgctggttgtaccttcacaaccccgggcgattggaccagcggacatgtgggagcccctctgccgtgcaaccatatcaagttagtcgacgttgaggagttgaactactgggcttgcaagggagagggagagatatgtgtgcgagggccaaatgtgttcaagggctacctgaaggatccagacagaaccaaggaggccctggactcagacgggtggctccacacaggtgatatcgggaaatggctgccagctgggaccctcaagatcatcgatagaaagaagcacatctttaaactagctcagggagaatacgtggcaccagaaaaaatagagaacatatacatccgatctcagcctgtggcccaaatttacgtgcatggagattcactcaaagccttcctcgtgggcatcgtggtgcccgatccggaagtcatgccgtcctgggcacaaaaaaggggaatagaaggcacgtatgctgacctttgcactaataaagatctaaagaaggctatcttagaggatatggttagactgggtaaggaatcaggtctccacagcttcgagcaggtcaaagccatccacattcattccgatatgttttctgttcagaatggtcttcttacgccaacgctaaaagccaaaagacctgaactccgggagtactttaaaaagcagatcgaagaactatatagtatctccatgtag

SEQ ID NO: 107108 - DNA, 2094 bp, synthetic construct
  misc_feature 1..2094: note = Description of Artificial Sequence: Synthetic coding sequence
  source 1..2094: mol_type = other DNA
atgcagacccaggagatcctgcgaatactgagactcccggagctcggtgacttgggccagtttttcagatctctgtctgccacaacattggtctccatgggagccttagcagctatccttgcttactggtttacacaccgaccaaaggccctccagcctccttgtaacctgttgatgcagtcagaagaggtcgaggattccggaggcgcacgcaggtcagtcattgggtcagggccacagctgctgacacactattacgacgatgcgcgcaccatgtatcaggtatttaggcgaggactctccatcagtggaaatggtccctgtctgggcttccgcaaacctaaacaaccctatcagtggctgtcatatcaggaagtcgccgacagggccgagttcctggggtccgggttactgcagcacaattgcaaagcatgtaccgatcagtttatcggtgttttcgcacagaacaggccagaatggattatagtggaactggcctgctacacttacagcatggtggtcgtgcctctatacgatactttaggacctggagccatcaggtatattattaacactgcggatatcagcactgtgattgtggataagccacagaaagccgtgttactcctggagcacgtggagcggaaggagactcctgggctcaagctgataatactaatggatcccttcgaggaggcccttaaggagagaggccaaaaatgtggtgtcgtgattaagagtatgcaagcagtggaggactgtgggcaggagaaccaccaggcgcccgttcctcctcagcccgacgacctgtctatagtctgttttacaagcggaaccacaggaaaccctaaaggagcaatgctgactcacggcaacgttgtcgctgacttttctggatttctgaaggtcaccgaatcacagtgggcaccaacctgtgccgatgtgcatataagctacctgccactcgcacacatgtttgagagaatggtgcagtccgtggtgtattgccacggagggcgcgtgggcttctttcagggcgatattcggcttcttagcgatgacatgaaggctctgtgccctacaatctttcccgtagtccccaggctgctcaaccgaatgtatgacaagatctttagtcaagctaacactcccctgaagaggtggctgctggagtttgccgcaaaaagaaaacaggctgaggtccggtccggaatcatcaggaacgacagtatctgggacgagctctttttcaacaaaatccaggcttctctgggcgggtgtgtacggatgatcgtaaccggggctgccccagcttctcctacagtgctagggttcctgcgggctgccctgggttgtcaggtgtatgagggatacgggcagacagagtgcacagccggttgtacgtttaccacccccggcgattggaccagtgggcatgtgggagctccactgccttgcaatcacataaaactggttgacgtggaggaactcaactattgggcttgcaaaggtgaaggagaaatttgcgtgcgtggcccgaacgtattcaaaggctatctcaaggatccagaccgtacaaaggaggccctggattccgatgggtggctgcacaccggagacatcggcaaatggctgccagccggaactctgaagatcatagaccgaaagaaacatattttcaaacttgcacagggcgagtatgtggcacctgaaaagatcgagaatatctacattagaagccagcctgtggctcaaatctatgtacatggagactcactgaaggccttcctggtgggcattgtcgtgcccgaccccgaagtcatgccctcctgggcgcagaaacggggcattgaggggacatacgcggacctgtgtaccaacaaagatttaaagaaagcgattctggaagacatggtgaggctgggtaaagaatccggcctccatagcttcgagcaggtaaaagctatccacatccactccgatatgttcagtgtacagaatggcttactgacacccaccttgaaagcaaaaagacctgagctgagagaatattttaaaaaacagatagaggagctgtattccatcagcatgtag

SEQ ID NO: 107109 - DNA, 2127 bp, synthetic construct
  misc_feature 1..2127: note = Description of Artificial Sequence: Synthetic coding sequence
  source 1..2127: mol_type = other DNA
atgccagaatttgttttgtcgctccttgaaaaaatgcaaactcaggagattttacggatcctgagactaccagaactgggggacttgggacagttttttcgctcccttagcgccactactttggtgagtatgggcgcactcgccgccatcctggcctactggtttacacacaggcctaaagcgctccagcctccctgtaaccttttgatgcagtctgaggaggtggaggattctgggggggcgcgccgatccgtcattggctcaggcccccagcttctgacccattactatgatgacgctagaacaatgtaccaagtcttccgccgggggctctctatttctggtaacggcccgtgtttaggattccggaaaccgaagcaaccttatcagtggttgtcctatcaggaagtggccgatagagctgagtttctaggctctgggttgctgcagcacaattgtaaagcctgcacagaccaatttatcggtgtcttcgcacagaaccgaccagagtggatcattgtggaactcgcctgctacacctactccatggttgttgtgccactctacgatactctggggcccggggccattcggtatatcatcaacacggcggacatttcaacggtcatcgtggacaagcctcaaaaggcagtattgctactggagcacgtcgagaggaaagaaacacccggccttaaattgatcatactcatggatcctttcgaggaggctctgaaagaaagaggacagaagtgcggcgttgtaattaaaagcatgcaggctgtggaggattgtggtcaggagaaccatcaggcaccagttccacctcagcctgatgacctctctatagtctgtttcactagtgggacaacaggtaacccgaaaggggccatgctaacacatgggaatgttgtggccgacttcagtggctttttaaaagtcacagagaaagtcatttttccaaggcaggacgatgtgctgatatccttccttcctttggctcatatgttcgagcgcgtgatccagagcgtcgtgtactgccacggcggccgcgttggcttctttcagggagacatcagactgttaagcgatgatatgaaagctctatgtccgaccatatttccggtggtccctcggcttctcaaccggatgtacgataagattttctcccaggccaatactcctcttaagaggtggctgctggagttcgccgccaagcgcaaacaagccgaggtaagatccgggattattagaaacgacagcatctgggacgagctatttttcaataagatccaggcctccctgggtggatgcgtgcggatgattgtgacaggtgctgccccagccagccccaccgtattaggctttctgcgcgcggccctgggctgtcaggtgtatgaaggatacggccaaaccgagtgcacagccggttgtacttttactacacccggagactggacgagcgggcatgtgggtgcaccattgccatgcaaccatatcaagctggtggacgttgaagaacttaactattgggcctgtaagggtgagggcgagatttgtgtaagaggaccaaacgtttttaagggatatctcaaagatcctgacaggactaaagaagcattagactctgacggctggctgcatactggcgatatcgggaaatggctgcctgcgggtacgttgaagatcatagaccgtaaaaagcacattttcaaactcgcccagggggagtacgttgccccagagaaaatagaaaatatttatatccggtcccaacctgtcgcacagatttatgtgcacggagacagcctgaaggcctttttagtgggtattgtggtacctgacccagaggttatgcccagttgggctcagaaacgggggatcgagggaacctatgcggatttgtgcaccaacaaagacctcaagaaggccatcctggaagacatggtgcgcctagggaaagaaagcgggctgcactcattcgagcaagtgaaagccatccacatccacagtgacatgttcagtgtgcagaacggattgctgactcccacactcaaggccaagcggccggaactgcgggaatacttcaaaaaacagattgaggaactgtattcaatatccatgtag

SEQ ID NO: 107110 - DNA, 2004 bp, synthetic construct
  misc_feature 1..2004: note = Description of Artificial Sequence: Synthetic coding sequence
  source 1..2004: mol_type = other DNA
atgcagacccaggaaattctacggattctacgccttccagagctcggtgacctcgggcagtttttcagatctctttcggccacgacgctggtatctatgggcgcactcgcggcaattctcgcatattggtttacacaccggccgaaggcactccaacccccttgtaatctgctgatgcagagtgaagaggtagaggacagtggaggtgcacgtcgctccgtgattggatcagggccccagcttttgactcactactacgatgatgctagaacgatgtatcaggtctttcgacgggggctctccatctcgggaaatgggccttgcctcggctttagaaagccaaaacagccgtatcagtggctgagttatcaggaggtcgctgatcgagctgaattcttgggttccggcctgctccagcacaattgcaaagcctgcaccgatcagttcattggtgtcttcgcacagaatcgccctgaatggataatcgtggaactcgcctgctatacatacagcatggtggtggtccctctgtatgatacccttggacccggtgcaatccggtacatcatcaataccgccgacattagcaccgtcattgttgacaaaccccagaaggctgtgctgctgctcgaacatgtggagaggaaggagacccctggcctgaaattgattatactgatggacccattcgaagaggctctgaaggagagggggcaaaagtgcggggttgtcatcaaaagcatgcaggctgtggaggactgcggccaggagaaccaccaggcccccgtgcctcctcaaccagatgacctgtccatcgtgtgcttcacaagtggcaccacgggtaatcccaagggggccatgcttacgcatggaaatgttgtggccgacttctccggatttctcaaagtaacggagtcccaatgggcaccgacgtgcgcggatgtacacattagttacttgccattggcccatatgtttgagagaatggtgcaatctgtggtgtactgtcacggcgggcgcgtggggttcttccagggagatattcgactgctctccgatgacatgaaggccttgtgtcccaccatttttcctgtggtgccccgcctactgaataggatgtacgataaaatattttctcaggcgaataccccattaaagagatggttgctagaattcgctgccaaaaggaaacaggctgaagtcagaagcggcataatccgcaatgacagtatctgggacgaacttttctttaataagatccaggcttctctcggaggctgcgtccgcatgattgtcaccggagctgccccggcttcccctacggtcttaggattcctccgagcggcgctcgggtgtcaggtttacgaggggtacggccaaacagaatgtaccgctggctgtacatttacaacaccaggggactggaccagcggacacgtaggcgcccccttgccttgtaaccacattaaactggtagacgtcgaggagctgaattattgggcatgtaaaggcgagggggagatttgcgtgcggggccctaatgtgtttaagggttatttgaaggatccagacaggacaaaggaggctctggatagcgatggatggctgcatactggtgatatcggtaagtggctgcctgctggcactctgaaaattattgatcgcaaaaagcatatatttaagcttgcccagggcgaatacgtggctccagagaaaattgagaatatctatattaggtctcagcccgttgcccagatctatgtgcatggcgacagcttgaaagcctttcttgtgggaatagtggttcccgatcctgaggtaatgccttcctgggcgcaaaagcgcggcattgaagggacctatgctgatctgtgtacaaacaaggacctaaaaaaggcaattctggaagatatggtccgcctcggaaaggagagtggcctgcactctttcgaacaggatttaccccagtgtttgatccaaatcaaagtgttcagcaagtattag

SEQ ID NO: 107111 - DNA, 2169 bp, synthetic construct
  misc_feature 1..2169: note = Description of Artificial Sequence: Synthetic coding sequence
  source 1..2169: mol_type = other DNA
atgctgacctttttcctggtcagtggtgggagcctgtggcttttcgtagaatttgtcctcagtctgcttgagaaaatgcagactcaggaaatacttcgcattctcagacttcctgagctgggcgacctcggacagttcttccggtccctcagcgctactaccctcgtatccatgggggccctcgccgccatactggcatattggttcacccatagacctaaggcactgcagcccccatgcaatctcctgatgcagagcgaggaggttgaagattcaggaggagcgagaaggtccgttattgggagcggcccccagttgctcacacactactacgatgatgcgagaactatgtaccaggtgtttaggcgagggctgagtattagcggaaatgggccatgtttagggttcagaaaacctaagcagccttatcagtggctctcataccaggaagtcgctgaccgagctgagtttcttgggagtgggttgctccaacataactgcaaggcctgcaccgaccagttcataggcgtattcgctcagaacaggccggaatggatcatagttgagctagcttgttacacctatagcatggtggtggtgccgctgtacgacacgcttggccccggagcaattagatatataatcaatacagcagacatttctacagtcatagtggataaaccccaaaaggccgtgctgctgcttgagcacgtggagcgaaaggagactcccggtttaaaattgatcatcctgatggacccgttcgaggaggcactgaaggagaggggccagaaatgtggagtagtgattaagagtatgcaggcagtcgaggactgcggtcaagagaaccaccaggctccggtaccaccccagcccgatgacctgtccatcgtatgctttacatcagggaccacaggaaaccccaagggagcaatgcttactcatgggaacgttgtcgcagatttcagcgggtttctcaaagttactgaaaaggtgatatttccaaggcaagatgatgtcctcatttcgttcttgccgctggcacacatgtttgagagggtcatccagagtgtagtgtattgtcacgggggacgggtggggtttttccaaggggacatccgactgctgagcgatgatatgaaggccctatgtccaactatctttccagtcgtgccccggctattgaacaggatgtatgacaagatcttcagtcaggcgaacacccctctgaagcgatggttactggagtttgccgccaaaaggaaacaggccgaagtacgcagtggcattatacggaacgattccatctgggacgaactcttctttaacaagattcaggccagcttgggaggttgcgtgcgcatgatcgtcacgggcgcggccccagctagtcctaccgtgctcggtttcctgcgggcagctttgggatgccaggtctatgagggatatggtcaaacggaatgtacagccggatgtaccttcacgacgcccggtgactggacctctggtcatgtaggtgctccacttccgtgcaaccacattaagctggtggatgtggaggaactcaattattgggcgtgcaagggagagggtgaaatttgcgtcagaggaccgaatgtgtttaagggatatttgaaagacccggatcgcacaaaagaggctctggacagcgacggctggctccacacaggcgacatagggaagtggttgcccgcaggcaccttgaagataatcgataggaagaaacatatctttaaactcgcccagggcgaatatgtcgccccagagaaaatcgagaatatctacatcagaagccagcctgtggcccagatctatgtgcatggggacagcttgaaggcctttctggtgggaattgtcgtgccagaccccgaagtgatgccctcgtgggctcagaagcgcggaatcgagggcacatacgcagacctgtgtaccaataaggacttgaaaaaggccatcctggaagacatggtgcggctaggcaaggaatctggcctgcactcattcgaacaggtgaaagcaattcatatccactctgacatgttttctgtccagaacgggcttctcacgcctacattgaaggcgaaacggcccgaactgcgggagtactttaagaaacagattgaagaactgtactcaattagcatgtag

SEQ ID NO: 107112 - DNA, 2139 bp, synthetic construct
  misc_feature 1..2139: note = Description of Artificial Sequence: Synthetic coding sequence
  source 1..2139: mol_type = other DNA
atgcagacccaggagattctgcgaatcctaaggctaccggagctcggggacctggggcaattcttccgatccctgagcgcaactacgctggtttccatgggggctctggccgctattctggcgtactggttcacacaccgtcctaaagcactgcaaccgccttgtaacctgctcatgcagtccgaggaggtggaagactccgggggagctcgccggagcgtcattggctcaggaccccagcttctcacgcattattatgacgacgctcgcaccatgtaccaagtgtttcgccggggcctgtcaattagcggcaacggtccttgcctggggttcaggaaaccaaaacaaccctatcagtggttgagctaccaagaggtcgccgacagagccgagtttctcgggagtggacttctgcagcacaactgtaaagcttgcacagatcaattcatcggcgtatttgcccaaaacaggccagagtggatcatcgtggagttggcctgttatacttattccatggttgtggttccactttatgatacgctcggaccgggcgcgattcggtatataattaataccgggttgtcctgccaggaaggagcttccgcaacggcctccactcaggcagacatcagtaccgtgatcgtagacaaacctcagaaggctgtgttgctgctggagcacgtggaacgaaaggagacccctggattaaagttgatcatccttatggacccattcgaggaagccttaaaagaaagagggcagaagtgcggcgtcgtcatcaagtctatgcaagccgttgaggattgtggacaagaaaaccatcaagcccccgtaccccctcagcctgacgatctgtccatcgtttgtttcaccagcggtactactggcaatcccaagggcgcgatgctaacacacggcaatgtggtggcagatttctctggctttttgaaagtcaccgaaaaggtgatctttccaaggcaggacgatgtgctgataagctttctaccacttgcgcacatgttcgagcgggtgattcagagcgtggtgtactgtcacggtgggcgggtcggattcttccagggggatattaggcttctcagtgatgacatgaaggccctttgcccaaccatctttcccgtggtgccaagacttctcaacaggatgtatgacaaaattttttcccaggcgaataccccgctaaagcgttggctgcttgaattcgctgcgaagcgcaaacaagctgaagtgcggtctggcattataaggaacgattccatatgggacgagctgttcttcaacaagatccaggcctctctcggtgggtgtgtcaggatgatcgtgacaggagccgctccagccagccccacagtgttaggttttctgcgcgctgcgctcggttgccaggtctacgaaggctacggccaaacagaatgtaccgccggatgtacattcaccacaccgggggattggacttctggacatgtaggcgcccctctcccttgcaatcacatcaagttggtggatgtggaggagctgaactattgggcatgcaagggcgagggcgagatctgcgtacgaggtcccaatgtgttcaagggctacttgaaagatccagaccggactaaagaggccctggattcagatgggtggttgcacacaggggacattggaaaatggctgcccgcgggcactctgaaaataattgataggaaaaagcatatattcaaactggcacaaggcgagtacgtcgcaccagaaaaaattgagaatatttacatccggtcccagcctgtggctcagatctacgttcacggcgatagcctgaaagccttcctagtcggcatagtggtgccagatccggaggtcatgccttcttgggctcaaaagaggggtattgaaggtacctacgctgacctgtgcacgaataaggatctcaagaaggcgatcctggaagatatggtgaggctgggaaaggaaagcggtcttcactctttcgagcaagtgaaagccatccatatacactccgacatgttctccgttcaaaacgggctcctgactcccacactcaaagccaagaggcctgagttgcgagagtactttaaaaagcagatcgaggaattgtacagcatcagcatgtag

SEQ ID NO: 107113 - DNA, 2094 bp, synthetic construct
  misc_feature 1..2094: note = Description of Artificial Sequence: Synthetic coding sequence
  source 1..2094: mol_type = other DNA
atgcagacccaagagattctgcggatcctgcggctcccagaactcggggacctaggccagttctttcgctccctcagcgctacaaccctggtcagcatgggggccctggcagcgattctggcttattggtttacgcatcggccaaaggccctgcagcctccctgcaacttgctaatgcagagtgaggaggtggaggactctgggggtgccaggagatcggtcatcggaagtggaccacaacttcttacccattattacgatgacgcccgtactatgtaccaggtgttcaggagagggctgtcaatcagcggaaacggaccttgcctgggcttcaggaagcctaaacagccctaccaatggttaagctaccaggaggtcgcagatagggccgagttcctaggttctggcctgctccagcataattgcaaggcgtgcacagatcagttcatcggggtattcgcccagaatcggcccgagtggattattgttgagctcgcctgctatacctacagtatggtggtggtgcccctgtacgatacactgggaccaggagctattcgatatattatcaatactgcggacataagcacagtgatagtggataagccacagaaggcagtgctgctcttagagcatgtcgaacggaaagagacacctggactgaaactcatcatactgatggatcctttcgaggaagccctcaaagagcggggccagaaatgtggagttgtcattaaaagcatgcaagctgtggaggactgcggtcaggagaatcatcaggctcccgtgcctccccaaccggatgacttgagtattgtatgtttcacctcaggtacaaccggcaatcccaaaggagcaatgctgacacatggaaacgtcgtcgcggactttagcggcttcctcaaggttacagaatcacaatgggctccgacctgtgcagacgttcacattagctatctgcccctggctcatatgtttgaaaggatggtgcaatccgtagtgtattgccacgggggccgcgttgggttcttccagggggacatacgcttgctttctgatgacatgaaggccttatgtcccaccatttttcccgtcgtcccgcgcctgctcaaccgaatgtatgacaagatattttctcaagcaaacacaccgctgaagcgctggctgttggagttcgcagccaagaggaaacaggccgaggtgagaagtgggatcattcggaatgacagcatctgggacgagctgttctttaataagatccaggccagcctgggcggttgcgttcgaatgattgtgacaggcgctgcccctgccagccctacagtgctcgggtttctcagggccgcactcggttgtcaggtgtacgaaggatatggacagaccgagtgtacagccggatgtaccttcacaacccctggcgattggactagcggccacgttggtgcgccgttaccatgcaaccatattaaactagtggacgtggaagagctgaattattgggcctgcaagggcgagggcgaaatttgcgtacggggacccaacgtgttcaagggatatctgaaagaccccgatcgcaccaaggaagcactggactcagacggatggctccacacaggggatataggcaaatggctgcccgctggaaccctgaaaatcattgaccgcaagaaacacatcttcaagcttgctcagggtgagtatgttgccccagaaaagatagagaacatatatattaggagccagcctgtggcacagatttacgttcacggtgactctctgaaggcctttctggtcggcatcgtcgttcccgatcccgaagtgatgccttcctgggcgcagaaacggggcatagaggggacttatgccgacctgtgcactaataaagatctcaagaaggccatattggaggatatggtgcggcttggcaaggagtccggactgcatagctttgaacaggttaaggctatacatatccacagcgatatgttttcagtccagaacggacttttgacacccacactgaaagctaagcggccagagctcagagagtactttaagaaacagatcgaggagttgtatagtatcagtatgtag

SEQ ID NO: 107114 - DNA, 1821 bp, synthetic construct
  misc_feature 1..1821: note = Description of Artificial Sequence: Synthetic coding sequence
  source 1..1821: mol_type = other DNA
atgtaccaagtgtttcgccggggtctgagtatcagcggcaacggcccatgtctcggatttcggaagcctaagcagccctatcaatggctgagctaccaggaggtggccgatagggcagagtttctcggctccggtctgttgcagcataattgcaaggcttgcacagatcagtttatcggagtgttcgcacagaaccggcctgaatggatcatcgtcgagctcgcatgttatacctatagtatggtggtggtgcccctgtatgacacgttgggtccaggagctataaggtatatcattaataccgcagacatctctaccgtcatcgtggataaaccacagaaagcggtgctgcttctggagcatgtggagcggaaggagaccccgggtcttaagctgatcattcttatggacccattcgaggaggccctcaaggagcgggggcagaagtgcggcgttgtgataaaatctatgcaggcagtggaagactgcggacaggagaaccatcaggctccggttccaccgcagccagacgaccttagcattgtgtgttttacatcagggacgaccggtaatcctaagggggccatgctgacacacggcaacgtggtcgctgacttctctggttttttgaaagtgactgagaaggtaatcttcccaaggcaagacgacgtgttgatcagtttcttgccactggcgcatatgttcgagagagtgatccagtccgttgtttactgtcacggtggcagggttggtttctttcagggagatattaggctgttaagtgatgacatgaaggccctctgtcctaccatctttcccgtggtgccccgcctgctgaacagaatgtatgataagatattcagccaggccaataccccattaaaaagatggctcctcgagttcgcggccaagcgcaaacaggctgaagtgcgctctggaatcatccggaatgattccatctgggatgagctgtttttcaataagattcaggcatccctgggtgggtgtgtgcgtatgatcgttactggcgctgcccccgcgtcacctacagtgttagggtttctgcgggcggcacttggatgccaggtgtatgagggatacggccagactgagtgcaccgccggctgcacatttaccactcccggagattggacgtctggccacgtaggtgcccccctcccctgcaaccacataaaactcgtggatgtggaggaactcaattactgggcttgtaaaggtgaaggtgaaatctgcgtaaggggccctaatgtgtttaaaggatatctgaaagatccagatagaacaaaggaggccctcgattcagacggatggctgcacacgggtgacatcggcaaatggctgcccgctggaaccttgaaaatcatcgatagaaagaaacatatcttcaaactggctcagggggagtatgttgcaccggagaagattgagaacatttacatccggtcacagccagtggcccagatatatgtccatggagacagcctgaaagcctttttggttgggattgtcgtgccggatcccgaagtgatgccgagctgggcccagaaaagaggtattgagggaacttatgccgacctctgcacgaataaggacctgaagaaagcaattcttgaagatatggtgagattgggcaaagagagcggccttcacagcttcgaacaggtaaaggcaatccacatacacagtgatatgtttagtgtgcagaatggtctcctcactcctaccctcaaagccaaacgccccgagcttcgcgagtacttcaagaaacagattgaggagttatattctatttcaatgtag

SEQ ID NO: 107115 - DNA, 1386 bp, synthetic construct
  misc_feature 1..1386: note = Description of Artificial Sequence: Synthetic coding sequence
  source 1..1386: mol_type = other DNA
atgtcacgccaggtcgtccgcagtagcaaattccggcacgtgttcggccaacccgcaaaggccgaccagtgctacgaagacgtgagagtgtcccagacaacctgggatagcgggttctgcgccgtcaaccctaaatttgtagccttgatttgtgaggcaagcggtggaggcgctttcctcgtactccccctcggcaagactgggagagtggacaagaacgcccctaccgtgtgtggccatacggctcctgtgctcgacattgcctggtgcccacataatgacaatgtaatcgcatccggatccgaggactgtaccgtgatggtatgggaaatcccagatggcggcctcatgctccccctgagggaaccagtcgtgacacttgaaggtcacaccaagcgcgttggtatcgtcgcatggcacaccaccgcccagaacgtgctgctgtctgcaggctgcgacaatgttatcatggtttgggacgtggggaccggcgccgctatgctgaccttgggtcccgaagtccatccagataccatttattccgtggattggtctagagacggaggcctgatctgtacaagctgtcgggataagagagtgcgcattatcgagccacggaaagggactgttgtagccgagaaggatcgccctcacgaagggacccgcccagtcagagcagtttttgtgtcagagggtaaaatcttgacaaccggattttctaggatgtcagagagacaggtggctctctgggacactaagcatctggaagagcccttgagtcttcaggaactcgacacaagcagtggagtgttactacctttctttgacccagacactaatattgtctacttatgcggaaagggggactcgtctattcggtattttgaaatcacaagcgaagccccatttttgcactacctgagcatgtttagttccaaagaatcccagcgtggcatgggctacatgcccaaacgggggcttgaggtgaacaagtgcgagatcgcccgattttataaactgcatgagaggcgctgcgagccaatcgccatgactgttcccaggaaatcagatctatttcaggaggacttatatccaccaactgccgggccagatccagcacttactgcagaggaatggcttggcggtcgggacgcgggcccactactcatctcccttaaggacggatacgtcccacctaagagtcgcgaactaagggtgaatcgaggattggacacagggagaagacgtgccgctcctgaggcatccggcacacccagctccgacgccgttagtcgattagaagaagaaatgcgcaaactgcaggccactgtgcaagaactgcaaaagcgtctcgacagactcgaggagaccgtgcaggccaaatag

SEQ ID NO: 107116 - DNA, 1734 bp, synthetic construct
  misc_feature 1..1734: note = Description of Artificial Sequence: Synthetic coding sequence
  source 1..1734: mol_type = other DNA
atgcagtggttgatgcgctttaggaccctgtggggaattcataaatcttttcacaatattcacccagcgccatcccagctcaggtgcagatccttaagtgaattcggggctccgagatggaacgattatgaagtgcctgaggaatttaattttgcctcctacgtgttggattactgggcacagaaggagaaggaagggaagcgaggtccgaaccccgcattctggtgggtgaacggacaaggggatgaggtcaaatggtcattccgcgagatgggggacttgactcggagagtcgcaaatgtcttcactcaaacctgtgggctgcaacagggagatcacttggctctgatgctccctagagtgccagagtggtggttggtggccgtggggtgcatgagaacaggaattattttcattcccgccactatcctgctgaaggcaaaagacattctgtaccgtcttcagctgagcaaggcaaaaggcatcgtcactatcgatgcgctggcttccgaggtggactccatcgcctcccaatgcccatctttgaagaccaagcttctcgtatcggaccattctcgggaggggtggctggacttcagaagcttggttaagtccgcttcccctgaacatacctgtgtgaagtctaagacccttgatcctatggttatcttctttacatccggtactacaggctttccaaaaatggccaaacactcccacggattagcactgcagccctcatttccgggatcccgtaagctgcggtcactgaagacaagcgacgtgagctggtgcctgtctgactcagggtggatcgtggcaactatatggacccttgtggagccatggacagctggttgcaccgtttttatccatcatctgcctcagttcgacaccaaggtgattatacagacactgctaaagtacccaataaatcacttttggggcgtctcttcaatttatcgcatgattctccagcaggatttcacttccatccggttcccagcactcgagcattgctatacagggggtgaggtcgtattacctaaggaccaggaggaatggaaacgccgcacagggcttctgctgtatgaaaattacggccagagtgagacgggcctcatctgtgccacgtactggggtatgaagatcaaaccgggcttcatggggaaggctactcctccatatgatgtccaggtgattgacgacaagggcagtatcctgcccccgaatacggaaggtaacatcggaattcggatcaagcccgtgcgtcccgtgtccttgtttatgtgctacgaaggtgaccctgagaaaaccgcaaaggtggagtgcggagacttctataataccggagaccgagggaagatggatgaggagggatacatttgttttcttggcaggtccgatgatattatcaacgcaagtggctacaggattggaccagctgaggtcgagtcagcactggtcgagcatcctgccgtggccgagtccgccgtggtggggagtccagaccctattcgcggggaagttgttaaagcattcatcgtcttgactccacaattcctgtctcatgataaggatcaactcaccaaggaactacaacaacacgtgaaaagcgtcactgcaccctataagtacccacgaaaggtggagtttgtatccgaactgccaaagacaattacgggaaagattgaacggaaagagctgcggaaaaaagaaaccggacagatgtag

SEQ ID NO: 107117 - DNA, 1734 bp, synthetic construct
  misc_feature 1..1734: note = Description of Artificial Sequence: Synthetic coding sequence
  source 1..1734: mol_type = other DNA
atgcagtggctgatgcgattccggaccttgtggggcattcacaaatcatttcataatattcacccggccccctctcagctgcggtgtaggtctttatctgaatttggtgctcctcgctggaacgactatgaggttcccgaagaatttaacttcgcttcatatgtactggactattgggcccagaaagaaaaagaaggcaagcgaggtcccaatcctgctttctggtgggtaaacgggcagggcgacgaggttaagtggagcttccgggaaatgggtgacctcacgcgacgcgtcgcaaacgtctttacccagacgtgcggcctgcagcagggcgatcatcttgcactcatgctccctcgagttcccgagtggtggctcgtggcggtgggctgtatgcgcacagggattatcttcattcccgctaccattctgctgaaggcaaaagatatactgtaccgtctacagttatcaaaggccaaggggatcgtgacgatcgacgctctggcctcagaggtcgattctattgcctctcagtgcccttctttaaaaacaaagctgctcgtgtccgatcattcgagagaaggctggttggattttcgcagcctggtgaagtccgcaagtccagaacatacctgcgtgaaatccaaaacactggatcccatggtgatcttctttacatcaggaacaactgggtttccaaaaatggccaaacacagtcatggactcgcccttcaacccagcttccccgggtctaggaaactgaggagtctgaagacctctgacgtgagttggtgccttagcgactcggggtggattgtggccaccatctggaccctggttgagccttggacggcgggctgcacggtgtttatacaccacttacctcagttcgacaccaaggtgattatccaaacactgctcaagtatcctatcaaccacttttggggagtttcaagtatctaccggatgattctgcagcaggactttactagcatacggttccccgctctcgagcactgctacaccggcggagaggtggtgttgcctaaggaccaggaagagtggaagaggcgaaccggactccttctttatgaaaattacggacaatccgagaccgggttgatttgtgcgacttactgggggatgaaaattaaaccagggttcatgggcaaggcaacccctccatatgatgtgcaggtgatagatgataaggggagcatcctgccaccaaatactgaaggcaacatcggcattcgcattaaacccgtgcgcccagtgagtctgtttatgtgttacgaaggagacccagagaaaacggccaaagtagagtgtggagatttttataacaccggcgaccgcggaaagatggacgaggaggggtatatctgtttccttggacgttccgatgatattattaatgcaagtggatacagaattggtcccgctgaggtggaaagcgccctggtggagcatcccgctgtcgctgagagtgcagtcgtcggtagtccagatcccatcagaggggaagtggtcaaggctttcattgtactgacgccacagttcttaagccacgataaggaccagcttacaaaagagcttcagcagcatgtgaagagcgtgacggccccttataaataccctaggaaggttgagttcgtctccgaactgcctaagacaatcactggaaagattgagcgaaaggagttacgaaaaaaagagaccggccagatgtag

SEQ ID NO: 107118 - DNA, 465 bp, synthetic construct
  misc_feature 1..465: note = Description of Artificial Sequence: Synthetic coding sequence
  source 1..465: mol_type = other DNA
atgcagtggctcatgcgcttccgtaccctatggggcatccataaatcttttcacaatatccaccctgcaccctcacagctccgatgccgctctctgtcagaatttggggccccccgatggaacgattacgaggtgcctgaagaattcaacttcgcatcctatgtgctggattactgggctcagaaagaaaaggaggggaaaagaggaccaaaccctgcgttctggtgggtaaacggtcagggtgacgaagtcaagtggtcctttagggagatgggggatttaacccgtcgagtggcaaatgtgtttacccagacgtgcggtctgcaacaaggtgaccacctggcactgatgctgcctcgcgtccccgagtggtggctagtggccgtgggttgtatgcgcactggtattatatttatccctgccaccatccttctgaaggccaaggatatcctgtacagactgtag

SEQ ID NO: 107119 - DNA, 1533 bp, synthetic construct
  misc_feature 1..1533: note = Description of Artificial Sequence: Synthetic coding sequence
  source 1..1533: mol_type = other DNA
atgaggcctgggctgtcatttctgttagccctgctgtttttcctgggccaggccgcaggggacctcggtgacgtgggtcctccaattccgagtcctggttttagctcctttcctggcgttgactcttcaagctctttcagtagctctagcagatctggcagctcctcttctcgcagcttagggagcgggggtagcgtgtcacagctgtttagcaacttcaccggatccgtggacgatcgaggaacatgccaatgttcagtcagcttgcccgataccacatttccagtggatcgggttgagcggctcgaatttaccgcgcatgtgctttcccagaaattcgagaaggagctgtccaaggtgcgcgagtacgtccagctgattagcgtgtatgaaaaaaaactcctgaatctcactgtgagaatcgacatcatggaaaaagacactatttcttatactgaactggattttgagttaatcaaagtagaggtgaaggagatggagaagctcgtgattcagctcaaagaatcatttggcgggagcagtgagatcgttgaccagctggaggttgaaatccgaaatatgacgctgctggtggagaagctcgagactctcgacaagaacaacgtgctagccattagacgcgagatcgtggcgttaaaaacaaagctaaaagagtgcgaggcctctaaagatcaaaacactcctgtggttcacccgcctcccaccccagggtcctgcggccatggtggtgttgtgaacatttccaagccatccgtggtgcagctgaactggcgcggcttctcttatctgtatggcgcctggggcagggattattcccctcagcaccctaacaaggggctctattgggtggcgcctctgaatactgacggccggctccttgaatattatagactctataacaccctggatgatctcctgttatacatcaacgccagggaactccgcattacatacggacagggctctggcactgctgtgtacaacaacaacatgtacgtcaacatgtacaatacagggaatatcgccagggtgaacctgactaccaacacgatcgctgtgacccaaaccctccccaacgccgcctacaataatcgcttcagttacgctaacgtggcctggcaagatatcgacttcgcagtggatgagaacgggctgtgggtgatttattctaccgaagcttcaacaggcaacatggtaatctccaagctcaacgatacaactctccaggtgctgaatacatggtataccaagcagtacaaaccctctgcatcaaacgcctttatggtctgcggtgtgctgtatgcgacacgtacaatgaatacaaggaccgaggaaattttctattattacgacactaatacaggaaaggagggcaaactggatatcgtcatgcacaaaatgcaggagaaagttcagagtataaactataaccctttcgaccagaagctctacgtgtataacgatggatatctcctgaattatgatctgagcgtgctgcaaaagccgcagtag

SEQ ID NO: 107120 - DNA, 1734 bp, synthetic construct
  misc_feature 1..1734: note = Description of Artificial Sequence: Synthetic coding sequence
  source 1..1734: mol_type = other DNA
atgcattggctgaggaaagtccagggactgtgtacactgtggggcacccaaatgtcctctcgaaccctgtacatcaattctaggcagctggtgtctctgcagtggggccaccaggaagtgcctgcgaagttcaactttgctagcgacgtgttagaccactgggccgacatggagaaagcgggtaaacggctgccatctcccgcactttggtgggtgaacggaaagggcaaggaactcatgtggaactttcgggagctgtctgagaacagccagcaggcggctaacgttctgtcaggcgcctgcggcctccaacgaggagatagggttgccgtcgtgctgccccgggttcctgagtggtggcttgtcattttgggttgcattagagccggacttatatttatgcccggtaccattcaaatgaagtcaacagacatcctttacaggttacagatgtcaaaggcaaaggccatcgtagctggcgatgaagtgatacaggaggtggacacggtggctagcgagtgtccatccctccgcattaagctgctagtctctgaaaaatcttgtgatggttggttaaatttcaagaaactgttgaatgaggctagcaccacacatcattgcgttgaaactggaagccaagaggcctctgctatctacttcacctctggcacctcaggtttaccaaaaatggccgagcacagctactccagtctcggcctgaaagccaaaatggatgccgggtggactggcctgcaggcctccgacatcatgtggacaattagcgacactggctggatcttaaacattctgtgctcattgatggagccatgggctctgggtgcttgcaccttcgtgcacctgctgcctaagttcgaccctttggtgatccttaaaaccctgagctcttatcccatcaaaagtatgatgggagctccaatcgtgtatcgaatgctcctgcagcaggacttatcctcatataaatttccgcatcttcagaattgtgttacagtgggggagtctttgctacctgaaaccctcgaaaactggcgcgcccagaccggcctggacatcagagagtcttatggccaaacagagacgggcttgacgtgtatggtgagtaagaccatgaagattaagccaggatacatgggaacagccgcatcctgttatgacgtgcagattattgatgacaaggggaacgtcctccccccaggaaccgagggggatattggcatccgcgttaagccgattaggccaatcggaatattttctggctatgtcgataaccccgataaaacagctgctaacattaggggagatttctggctactgggggaccggggcatcaaagatgaggacgggtacttccagttcatggggcgggccaacgacattattaattcaagcgggtataggattggcccatcagaggtggagaatgccttgatggagcatcctgccgtagttgagaccgcagtgatctcctcccccgacccagtccgcggggaggttgtgaaggcttttgtggtgctggccagccagtttctctctcacgaccctgaacagctcacaaaggaacttcagcagcacgtcaagtctgtgacagccccctacaaataccctaggaagattgagttcgtgctgaatctgccaaagacagtcacggggaaaattcaacgtgccaagctcagagacaaggagtggaaaatgagcgggaaggcccgggcccagtag

SEQ ID NO: 107121 - DNA, 1497 bp, synthetic construct
  misc_feature 1..1497: note = Description of Artificial Sequence: Synthetic coding sequence
  source 1..1497: mol_type = other DNA
atgtggaactttcgggagttgtctgaaaattcacaacaggcagccaacgtgctgtcgggggcgtgtggcctgcagcgcggagaccgcgtagccgtcgtcctgcctcgcgtccctgagtggtggcttgtaattttgggatgtatccgggcaggactgatcttcatgccagggaccatccagatgaagtccactgacatactgtatagacttcaaatgagtaaggcgaaagcaattgtcgcaggggacgaggtgatccaggaagttgacaccgtagcttccgaatgcccttctctccgcattaaactgctagtctccgagaagtcctgcgacggctggttaaacttcaaaaaactcttgaacgaggccagtactacacaccactgcgtggaaacggggtctcaagaggccagtgctatatatttcacttccggaacctccggtctgcctaagatggctgagcatagctacagcagcctgggtctgaaagcaaagatggatgctggctggacagggttgcaagcttccgacataatgtggactatttccgacacaggttggatcctaaatatcctgtgctctctcatggagccttgggcattaggtgcatgtacattcgtccatttactccccaagtttgatcccttagttattttaaaaaccctctcgtcctatccaataaagtcaatgatgggggcgcccatagtatacagaatgctgctccagcaagatctgtcatcctacaaatttccacacctacagaactgtgtaaccgtcggtgaaagcttgctccctgaaacactggaaaactggcgggctcaaaccggcctggacatcagagaaagctatggacagaccgaaaccggcctcacttgtatggtatcgaaaacaatgaagataaagccgggctatatgggcacagctgcaagctgttatgacgtccagattatcgacgataagggaaacgtcctaccgcctggcacagagggtgacataggaattcgggtgaagccaattcggcctataggtattttctctgggtatgtggataatcccgacaaaactgccgctaatatacgaggcgacttttggctgctaggggatcgcggaatcaaggatgaagatggctactttcagtttatgggcagggccaacgatatcatcaatagctccggttatcgcatcggcccttcagaagtggaaaatgctctgatggaacaccccgctgtcgtggagacagcggtgattagctcacccgacccagtgcgcggagaggtggtcaaagcattcgtcgtcctagcctctcagttcctctcacatgacccggagcaactgacaaaggaactgcagcaacacgtgaaaagcgttacagctccatataaatatcctcggaaaatcgagttcgtgttaaacctgcctaagaccgtgaccggaaaaatccaaagggccaaactcagggataaagagtggaagatgagcggaaaggccagggcccaatag

SEQ ID NO: 107122 - DNA, 627 bp, synthetic construct
  misc_feature 1..627: note = Description of Artificial Sequence: Synthetic coding sequence
  source 1..627: mol_type = other DNA
atgcactggctgaggaaggtgcagggcctttgtacactgtgggggacacaaatgagttcacggactctctacatcaacagtcgccaactcgtcagcctccagtggggacatcaggaagtgccggccaagttcaatttcgctagtgatgtcctcgatcattgggccgacatggaaaaagccggaaaacgtctgccatccccggccttgtggtgggtaaacgggaagggcaaggagcttatgtggaatttccgggagctcagtgagaacagccaacaggcagctaatgttctgtcaggagcgtgtgggcttcagagaggcgaccgggtagcagttgtgcttccacgggtgccggagtggtggctcgttattctcgggtgcatccgagcaggtctgatcttcatgcccgggactattcagatgaaaagcaccgacatcctctacagattgcagatgtccaaggcgaaagcgatagtcgctggagatgaagtcatccaggaagtcgatacagtagcaagcgagtgcccctcacttcggataaagcttttggtgtccgagaagtcctgcgacggatggcttaactttaaaaaactcctgaagtacaaagtaagacatcgggatgttaagtag

SEQ ID NO: 107123 - DNA, 1050 bp, synthetic construct
  misc_feature 1..1050: note = Description of Artificial Sequence: Synthetic coding sequence
  source 1..1050: mol_type = other DNA
atgagacacccacctctaattacagtgtggcgccttgaagccaaaatggatgcagggtggaccgggctacaagcttctgatattatgtggacaatttcagacaccggctggatcctgaatatcttgtgcagcttaatggaaccctgggcactgggcgcctgtaccttcgtccatcttctgccaaaattcgatccccttgttatcctcaagactctgtcctcataccccattaagagtatgatgggcgctcccatcgtatatagaatgctgctgcagcaagacctgtctagttataagtttccccacctgcaaaattgcgttaccgtcggggaaagccttctgcccgagactctggagaactggcgcgctcagacaggcctggatatacgggagtcatacggtcagacagaaacaggtctgacctgcatggtgtctaaaaccatgaagatcaagcccggttatatgggcacagccgctagctgctatgacgttcagattatcgatgacaagggaaacgtgctgcctccaggcacagaaggagacatcggaatccgcgtgaagcccatcaggccaatcggtatcttttccgggtatgtcgacaaccctgacaagacagcagcaaacatcagaggagacttctggctattgggagatcgaggcatcaaggacgaggatggctactttcagttcatgggtcgagctaatgatatcataaacagttccgggtaccgcattggtcctagcgaggtcgagaacgctctcatggaacacccagcggtggtcgagaccgccgtgatttcttctcctgacccagtgcgaggtgaggttgtcaaggcctttgtggtgctggcctcacagttcctgtcgcacgaccctgagcagctcacaaaggagctgcaacagcacgttaagtccgtcaccgctccctataagtacccgcgcaagatagaattcgtcctgaacctaccaaagaccgtgactggaaaaattcagcgggctaaattgcgagacaaggagtggaagatgtccggcaaggcaagagctcagtag

SEQ ID NO: 107124 - DNA, 1734 bp, synthetic construct
  misc_feature 1..1734: note = Description of Artificial Sequence: Synthetic coding sequence
  source 1..1734: mol_type = other DNA
atgcactggctgaggaaggtgcagggcctctgtactctctggggcacacagatgagctcccgaactctgtatatcaacagtcgccagttagtgagcctacagtgggggcatcaggaagtcccagccaagttcaactttgcgagtgatgtcttggaccattgggcagatatggagaaagccggcaagcggctgccatcacccgccctatggtgggtgaacgggaagggcaaagagttgatgtggaatttccgggaattgagcgagaacagtcagcaggcagctaacgtccttagtggagcttgcggcctgcagaggggagatcgcgttgcggttgtgcttcccagggtgcctgaatggtggttagtaatactagggtgcatccgggccggactgatcttcatgccaggtacaattcagatgaaatcaactgacatactttatcgcctccagatgtctaaggccaaggcaatcgtggctggagatgaggtcatccaagaagtggacaccgtcgccagtgagtgtccaagcctcagaattaaactgttagtgagtgaaaaaagctgtgacggctggctgaacttcaaaaaacttctgaatgaggcctcgaccacccaccattgtgtggagaccgggtctcaggaggccagtgcaatctattttacgagcgggacctccggactgcccaaaatggctgaacacagttattcatcactcggcctcaaggctaaaatggacgccggttggacaggactgcaggctagcgacatcatgtggacaatcagtgacaccggttggatcctgaatattctgtgctcccttatggaaccatgggctctgggcgcctgtactttcgtccatctcctgccaaaattcgaccctctggttatcctgaagacccttagcagttacccaatcaagagcatgatgggggcgccaatcgtctacaggatgctgctccaacaggaccttagctcatacaaattcccccatcttcaaaattgcgtgacggtgggggaaagtttactacctgaaaccctagaaaattggcgcgcccagacaggactcgatattagagagagttatgggcagaccgagacaggcctcacctgcatggtgtcaaagaccatgaagattaaaccaggctatatgggcactgctgcaagctgctatgacgtccaaatcattgatgacaaaggaaacgttctaccacccggtaccgagggcgacatcgggattcgtgtgaaaccaatccgccctatcggaatcttttctgggtacgttgataatcctgacaaaaccgcagccaacattaggggcgatttctggctccttggtgatagaggtatcaaggatgaggacgggtactttcagttcatgggaagagctaacgatatcataaacagtagtgggtataggatcgggcctagcgaagttgaaaacgccttgatggagcacccagcagtggtcgagacagccgtcatatctagtccagatcccgtccggggcgaggtggtgaaagccttcgtggttctcgcgagccagtttctgagccatgatcctgagcagctcaccaaagaactgcagcagcacgtcaaatccgtcacagctccctacaaatatccacgcaaaattgagtttgtgctcaatttgccaaaaacggttactggaaagattcagcgggctaagctgcgcgacaaggaatggaaaatgtccggtaaagcccgggcccaatag

SEQ ID NO: 107125 - DNA, 1734 bp, synthetic construct
  misc_feature 1..1734: note = Description of Artificial Sequence: Synthetic coding sequence
  source 1..1734: mol_type = other DNA
atgcattggctgcgcaaggtgcaggggctctgtacactgtggggcacgcagatgagttcccgaactctatacatcaatagtcgccaactggtaagtctccaatggggccaccaagaagtgcctgcaaagtttaacttcgcgagcgacgtgctggatcactgggcagacatggaaaaggcaggcaaacggctaccctcgccagcgctgtggtgggtcaatggaaaaggcaaggagctaatgtggaacttcagagaactatcagagaatagtcaacaggccgctaacatcctgtctggagcgtgcggcctgcagagaggagaccgtgtagctgtaatgctgccgcgggtgccagagtggtggttggtgattcttggatgcattcgggcggggttgatatttatgccgggcactattcaaatgaaatctacggacatcctatatcggttgcagatgagtaaagctaaggcgattgtggccggtgatgaggttatccaggaagtggacactgtggcctcagaatgcccctccttaaggataaagctgctcgtgtctgaaaagtcctgtgacggatggctgaactttaaaaagctgcttaatgaagcatctaccacacatcattgtgtagagaccggaagtcaggaagcctctgcgatttatttcacatctggcacaagcggcctcccaaaaatggctgagcactcgtatagctctttgggcctgaaggcaaagatggacgcgggatggactggtctccaggcttctgatatcatgtggactatcagcgatactggctggattttgaacattctgggaagcctgctcgagtcctggactttgggcgcctgtactttcgtccacttactgcctaagtttgaccccctggtgattttgaaaaccctatcttcttatcccattaagagtatgatgggagccccgatcgtctacagaatgctgctacagcaggacctgtcgtcatacaagtttcctcacctccagaactgccttgccgggggcgagagcctgctgcccgaaacactcgagaactggcgggctcaaacagggctcgacatcagggagttctacggccagacggaaacagggctgacctgtatggttagcaagacaatgaagattaagccagggtatatggggaccgccgcaagttgttacgacgtccaggtcatcgatgacaaagggaacgtcctgccaccgggaacagagggagacatcgggataagggtgaagcccatccggcccatcggtatatttagtggatacgtcgagaaccccgacaaaaccgccgcgaacatcagaggtgatttctggctgctgggggatcgagggatcaaggatgaggacgggtactttcagttcatgggccgggccgatgacatcataaattcgtctgggtacagaatcgggcctagtgaagtggaaaatgcactgatgaagcacccagctgttgtcgagacagctgtcatttcctcccccgacccggtgaggggtgaagtcgtgaaagcctttgttatccttgcttcccagtttctgtcccatgatcccgagcaactgaccaaggaactgcagcaacatgtgaagtccgtcacagctccatacaaataccccaggaaaatcgaatttgtgttaaacctccccaagaccgtgacagggaagatccagaggactaagctgcgtgataaggagtggaaaatgtccgggaaggcaagagcccagtag

SEQ ID NO: 107126 - DNA, 627 bp, synthetic construct
  misc_feature 1..627: note = Description of Artificial Sequence: Synthetic coding sequence
  source 1..627: mol_type = other DNA
atgcactggttgcgaaaggttcaagggttgtgcactctctggggaacccagatgtcttcacgaaccctgtacataaattcccgccagcttgtgtcacttcagtggggccatcaggaagttccagcaaagtttaactttgccagcgatgttcttgatcattgggcagacatggaaaaggccgggaagcggcttccgagtccagcactgtggtgggtaaacgggaaaggcaaagagctcatgtggaattttagagagctttccgaaaactcccagcaggcagccaacatcttgtccggtgcatgcggactgcagcgaggcgatcgggtcgccgtgatgctgccaagggtacctgagtggtggttagtgattctcggctgtattcgcgctggattgatttttatgccaggtacaatccagatgaagagcacagacattctctaccgactccagatgtccaaagccaaagccatagtggccggagacgaggtgatacaggaagtggacacagtggcttctgaatgccctagcttacggatcaaactgcttgtgtccgagaagagctgcgatggatggctgaactttaaaaaacttttgaagtacaaggtaagacaccgcgaggtcaaatag

SEQ ID NO: 107127 - DNA, 1761 bp, synthetic construct
  misc_feature 1..1761: note = Description of Artificial Sequence: Synthetic coding sequence
  source 1..1761: mol_type = other DNA
atgctggcgagggtgacccgtaagatgctcaggcatgctaaatgttttcaacgtctggcaatttttgggtcagtccgtgctctgcacaaggataaccgcaccgctactcctcaaaacttctcaaattacgaatccatgaagcaggactttaagctgggaataccagaatatttcaactttgctaaggatgttctggatcaatggaccgataaggagaaagcaggtaagaaaccgagcaatcctgccttttggtggatcaaccgcaatggggaagagatgcggtggagtttcgaggaacttggaagtctaagcaggaagtttgccaacatactgagtgaggcatgctcactgcaacgaggagaccgggtaattctgattcttcctcgagtccctgagtggtggttagcaaacgttgcctgtttgagaaccggaaccgtgctgatcccaggcacaacccagcttacccagaaagatatcttatatcgactacagtcgtcaaaggcaaactgcattatcactaatgacgtgctggcaccagccgtagatgccgtggctagcaaatgcgaaaatctccattcgaaattaattgtctcagagaattcaagggaggggtggggcaatctcaaggagctaatgaagcatgcatctgactctcacacttgtgtgaaaacaaagcacaatgagattatggctatcttcttcactagtggaacctccggctatccaaagatgacggcccacacccattcctcctttggcctgggcttaagtgttaacggccgattctggcttgacctcacaccatctgatgtgatgtggaacacctccgacacaggttgggccaagtccgcttggtcctctgtattcagtccgtggattcagggtgcatgtgtcttcacccaccacctgccaaggttcgagcctacgtccatcctgcagacactgtcaaagtaccccattaccgtcttctgctcagcccccactgtgtatagaatgctagtgcagaatgacattacttcttataagttcaagtctctgaagcactgcgtctctgcaggggagccaatcactccagacgtgacggagaagtggcgcaataagaccggtttagacatttacgaaggctacggccagaccgagaccgtactaatctgtggtaacttcaagggcatgaagatcaagccaggcagcatgggaaagccctctcctgcttttgacgttaagatcgttgatgtcaatgggaacgtactcccacctggccaggaaggagatattggcatccaggttctacctaacagaccatttggtctgttcacccactacgtggacaacccctcaaagactgcttctaccctgaggggcaacttctacataaccggagaccgtggatatatggataaggacggctacttttggttcgtggccagggctgatgatgtcattcttagctccggttaccgcatcggtccattcgaggtcgaaaatgcgctgaacgagcacccgtctgttgctgagagtgccgtggtgagtagcccagaccccattcggggcgaagttgtcaaggcatttgtagtcctcaaccccgattataaaagccatgatcaggaacagctgataaaagagatccaggagcatgttaagaaaaccaccgctccctacaagtacccccgcaaggtggagttcatacaggaattgcctaagactatttcagggaaaactaagaggaacgagctgcgcaagaaagagtggaagaccatatag

SEQ ID NO: 107128 - DNA, 1317 bp, synthetic construct
  misc_feature 1..1317: note = Description of Artificial Sequence: Synthetic coding sequence
  source 1..1317: mol_type = other DNA
atgttagcccgcgttacccggaaaatgttgcgacacgccaaatgcttccagagactggccatcttcggcagtgtgcgagcccttcacaaggacaatcggactgccacacctcaaaactttagcaattacgagagtatgaaacaggacttcaaactgggaattcccgaatatttcaatttcgcaaaggacgttttggatcagtggaccgacaaagagaaggctggtaaaaagcccagtaacccggctttttggtggattaacaggaacggggaagaaatgcggtggagtttcgaagaactcgggagtctctcccgcaagtttgccaacattttgtccgaagcctgttccttgcagcgcggggatcgagttatccttatccttcctagagtgccggaatggtggctcgccaacgttgcatgtttgcggacaggcacggttctgattccaggaaccacccagctaacccaaaaagatatcctatatcggttgcaatcttctaaggcaaactgtatcatcaccaatgatgtccttgcccccgcagtggacgcagtcgctagtaaatgcgaaaacctccacagtaagctcatcgtctctgagaacagtcgggaaggctggggtaacttgaaggaactgatgaaacatgccagcgattcacatacttgtgtgaaaacaaaacataatgaaatcatggctatttttttcacctcgggaacaagcggctaccctaaaatgaccgctcatacccactccagttttggcctcggcttgtctgtgaacgggcgtttctggttggacctcactccctctgacgtcatgtggaatacctcagataccggctgggcaaagtctgcctggagctccgtgttttctccatggatacagggggcctgcgtatttacccatcacttgccacggttcgagccgacatccattttacaaacgttatcaaagtatcctattactgtgttttgcagcgcccctacggtgtacaggatgctggttcagaatgatatcacctcctataagttcaagtccttaaagcactgcgtgagtgctggtgagccgatcacccccgatgtcacggagaagtggagaaacaagacgggtctcgatatttatgaaggatacggtcaaacggaaaccgtcctaatctgcggaaactttaaagggatgaagattaaacccgggagtatgggcaagccctctcccgcttttgacgtcaaggtgtgcacatctccttcacggcgcatgtttaacaaccctatttgtaccctgccgacttatagactgcccccttacaagttgagtttactgtag

SEQ ID NO: 107129 - DNA, 1737 bp, synthetic construct
  misc_feature 1..1737: note = Description of Artificial Sequence: Synthetic coding sequence
  source 1..1737: mol_type = other DNA
atgaagcaggactttaaacttggtattcctgaatactttaattttgctaaggacgtgcttgaccaatggactgacaaagagaaggctggcaagaagccgtccaaccctgccttttggtggatcaataggaacggcgaagagatgcggtggagctttgaggagctcggctcgttgagccggaaatttgctaatattttgtccgaagcgtgcagcctccagaggggagatcgtgtgattttgattctgccaagagtcccagaatggtggctcgctaatgtcgcttgcctcagaaccggcaccgtgttaattcccggtaccacgcaactcactcaaaaggacattttgtaccggttgcagagctcaaaagccaattgcattatcaccaatgatgtcctagcacctgcggtagacgctgtggcttctaagtgtgaaaacctccactccaagctgattgtttccgaaaactctcgagaaggctggggcaatctgaaagaattaatgaaggtattcctctgtcaccctggttggtccacagtggcgaggtcttggctgacggccacttcaacatccctcgtccaggcaattctttcactcctcagttcatgggattacaggcacgctagcgactcacatacttgtgtaaaaacaaagcacaatgagatcatggctatcttttttactagtggtacaagcggatatcctaagatgacagcgcacacccactcatccttcgggttaggactgtcagtcaatgggcgcttctggctcgatctcaccccatctgacgtcatgtggaacacaagcgatacaggttgggcaaagtcagcctggtccagtgttttttcgccctggattcagggcgcatgcgtgttcacgcaccacctgccacgcttcgagcctacgagtatacttcagacactcagcaaatatcctataaccgtcttctgtagcgcacccacggtctacaggatgctggtgcagaatgatataacatcgtataaatttaagtctttgaagcactgcgtcagtgcaggtgaacccattacccccgacgtcacggagaaatggaggaacaaaactgggctggacatctatgaaggctatggccagactgagactgtgctcatctgtgggaacttcaaaggtatgaagatcaaacccggctccatgggtaagccttctcccgctttcgatgtaaaaatcgttgatgtaaacggcaacgtgttgcctccaggccaggagggagatatcggcatccaagtgttgccgaatcggccattcgggctgttcacccactatgtggataacccatccaaaacggccagcactcttcgcgggaacttctatattacaggggaccgaggctatatggataaagatgggtatttttggtttgttgccagggcagacgatgttatactctcatcagggtatcgtataggtccctttgaagtcgagaacgcactgaacgaacacccaagtgtagctgaatccgctgtggtgagttcccctgatccaatccgtggcgaggtggtgaaagccttcgtggttcttaatcccgactacaaatctcacgatcaggaacagctgataaaggagatccaagaacacgttaagaagactacggcaccctataagtatccccgaaaggtggagtttattcaagagctgcctaagactatctctgggaaaacaaaacgcaatgaactaaggaagaaggaatggaaaaccatatag

SEQ ID NO: 107130 - DNA, 1740 bp, synthetic construct
  misc_feature 1..1740: note = Description of Artificial Sequence: Synthetic coding sequence
  source 1..1740: mol_type = other DNA
atgcgtccctggctgaggcacctcgttctgcaagcacttcgaaactcacgggccttttgtgggtcacacggcaaaccagccccccttcccgtaccacagaagattgtagcaacttgggaggctatcagcttggggcgccagctggtgcccgagtattttaatttcgctcatgacgtgctggatgtgtggagccgtttggaagaggccggacacagaccaccaaaccctgccttctggtgggtgaatgggaccggtgcagagatcaaatggagcttcgaggaattgggaaagcaatcccgcaaagcggccaacgtactcggtggagcctgtggtttgcagccgggcgatcggatgatgctggttttaccacgcttgcctgaatggtggctcgtgagtgtggcctgcatgcgaacaggcacagtcatgatacccggagtcacccagctgactgagaaggatttaaagtataggctccaggctagcagagccaaatctatcatcacttccgattccctggctccaagggtggacgcaatctcagccgagtgcccaagcttgcaaaccaagcttttggtgagcgacagcagtagaccaggctggctaaactttagggaactattgcgggaagccagcactgaacacaattgtatgaggacgaagtcacgggaccctttagctatatacttcacttccggaacaaccggcgccccaaagatggttgagcactcacaatcctcctatggactgggcttcgttgcctcagggcgaagatgggtggcgctcaccgagtctgatattttttggaacacaaccgataccggctgggtgaaggctgcttggaccctgttctcggcttggccaaacggaagctgcatctttgttcacgagcttcctagggtggacgccaaggtgatcttaaatactctgagcaagttcccaatcaccacgctatgctgcgtgcccactattttccgcctcttggtccaggaggacctgacccgctaccagtttcagtccctgcgccactgcctgacaggaggcgaagcccttaatcctgatgtcagagagaagtggaaacatcaaaccggcgtggaactttatgaagggtacggacagagtgagacagtggttatctgtgctaaccctaaggggatgaagattaaatccggctcaatgggcaaggccagtcccccatacgacgttcaaatcgtcgatgacgaggggaatgtgcttcccccaggggaggagggcaacgtggccgtgagaattcgacctacgcggccattctgtttctttaattgttatctcgacaatccagaaaagaccgccgcgagcgaacagggggatttttatatcaccggagatcgagcacggatggataaagacgggtacttttggttcatggggagaaatgatgatgtgatcaactccagctcttataggataggcccagtggaagtcgaatccgcgcttgcggagcacccggctgtgcttgaatctgccgtcgtttcaagcccagacccaatcagaggagaagtggtcaaagccttcattgttttaacaccggcttacagctcccatgaccccgaagcgctcacacgggagctgcaggagcatgtaaaacgcgtgacagcaccttacaaatacccaagaaaggtggcatttgtatccgagctgccaaagaccgtatctgggaagattcaaaggtctaaactccggtctcaagagtggggaaaatag

SEQ ID NO: 107131 - DNA, 2070 bp, synthetic construct
  misc_feature 1..2070: note = Description of Artificial Sequence: Synthetic coding sequence
  source 1..2070: mol_type = other DNA
atggcagcgaggaccttgggtcgaggcgtgggacggctgctcgggtctctgagaggcctgtcgggtcagcctgcccgtccaccttgcggggtgtccgccccccgccgggccgcctcgggcccaagcggctctgctcccgccgtagctgctgcagcggcacagcccggttcatatccagccctttctgcacaggccgccagagaaccggccgccttctggggacccctcgcaagagacaccctggtttgggacaccccttaccacaccgtttgggattgtgatttctctaccggtaaaattgggtggtttttgggtgggcagcttaacgtcagcgtgaattgcttggaccaacacgttcgaaagagcccagaatctgtcgccctgatatgggaaagggacgagcctggcaccgaagtgcggataacttaccgggagctgcttgaaacaacctgcagactggccaataccctgaagcggcatggagtccaccgtggcgaccgagtggctatctatatgccagtttccccactggccgtggccgcgatgctggcctgtgcccgcattggagccgtgcatacagtcatcttcgccgggttcagcgccgagtctctggccggcagaataaacgacgctaaatgtaaagtggtgataacctttaatcaaggcctcagggggggtagggtggtagagttaaagaaaatagtcgatgaggcagtgaaacattgtccaactgttcagcacgtgttggtagctcaccgcaccgataataaagttcatatgggcgatctggatgtccccctcgaacaggaaatggcaaaagaggaccctgtgtgtgcccccgaatcgatgggttctgaagacatgctgttcatgctatacacgtccggatccactggcatgcccaagggcatcgtccatactcaagctggatacctcctgtacgctgccttgactcacaaactggtgttcgaccatcagccaggagatattttcggctgtgtcgccgatattggatggataactggccactcttatgtggtgtacggccctctgtgcaacggcgcaacttctgtgcttttcgagtctactccagtgtatcctaacgctggaagatattgggaaaccgtggagagattgaagattaatcagttctatggcgcgccaacagcagttaggctgctcttaaaatacggagacgcatgggtcaagaagtacgatagaagcagcctcaggacgctcggaagtgttggggagcccatcaattgtgaggcctgggagtggctgcacagggtggtcggagattcccgatgtacgttggtggacacttggtggcaaacagagaccggcggtatctgtattgccccacgtccaagtgaagaaggcgcagagattttgcctgcaatggccatgagaccatttttcggaatcgttccagttctgatggacgagaaaggttccgtggttgaggggagcaacgtgagcggagccctctgtataagccaggcttggccaggaatggcgcgcaccatttacggcgatcatcagcggtttgttgacgcgtacttcaaagcctaccctggttactacttcactggtgacggagcctatcggacagagggcggctattaccagatcaccggccgcatggacgatgtgatcaatatatcgggtcaccgactaggaaccgcagaaatcgaggacgcaattgccgaccacccagctgttccagagtcagccgtcatcggctacccgcatgacatcaaaggcgaggctgctttcgctttcattgtcgtgaaggatagcgccggtgattcggacgttgtggtccaggagctgaaatccatggtggccacaaagattgctaaatacgctgtcccagatgaaatattggtggtaaaacgattacctaaaactcgatcaggaaaagtgatgcgcaggcttctgcgaaagatcataacctctgaggctcaggaacttggagacaccactacactggaagacccctccataatcgccgagatcctatcggtgtaccagaaatgcaaagacaagcaggctgctgccaagtag

SEQ ID NO: 107132 - DNA, 462 bp, synthetic construct
  misc_feature 1..462: note = Description of Artificial Sequence: Synthetic coding sequence
  source 1..462: mol_type = other DNA
atggctgcgcgaacactgggccgcggagtgggcaggttactggggtcactccgggggctatccgggcaacccgcccgtcctccctgtggcgtctccgctccacggagggctgcgagcggtccatctggttctgcaccagctgtggccgcagcagcagcacagcctggaagctatccagcgcttagtgcacaggccgccagagaaccagcggccttctggggtccactggcgagagatacacttgtgtgggacactccatatcatacagtctgggactgcgacttctcaaccggaaaaatcgggtggttcctcgggggccagctaaacgtatctgtgaactgtctggatcaacacgtcagaaagtccccagagtcagttgctttgatctgggagcgggacgaacccggcactgaggtccgaatcacttactccccctggctccaaatgccttgtggcccatag

SEQ ID NO: 107133 - DNA, 1455 bp, synthetic construct
  misc_feature 1..1455: note = Description of Artificial Sequence: Synthetic coding sequence
  source 1..1455: mol_type = other DNA
atggccgcccgaactctggggagaggagtcggccgtctgctgggctctctgcgcggactttctgggcagcccgcacggccgccttgtggagtgagcgccccacgtcgcgcagcttcgggcccaagcggatccgcccctgccgtcgccgccgccgcagcgcagcctggctcttacccggccctgtccgctcaggctgccagagaacctgccgccttttggggaccgctcgcccgcgacacactggtatgggatactccatatcatacagtgtgggactgtgacttcagcacaggcaagattgggtggtttctaggaggccagcttaatgtcagtgtgaattgtctggatcaacacgtgaggaaatctccagaatcagtggctctcatctgggagcgggacgagcctgggacagaagtgagaattacatatagagaattgctcgagactacctgtagactggctaatacactgaaaaggcatggcgtgcatagaggggaccgagttgctatctacatgcccgtcagccctcttgccgtggccgccatgctagcctgcgcccggattggggccgtccacaccgttatctttgctggctttagtgccgaatctctagctgggaggattaatgacgttggcgagcccattaactgtgaagcctgggaatggctgcacagggtggtgggagattcccggtgcacactagtagacacctggtggcagacagagaccggtggtatctgtattgccccgagaccctcagaggagggcgcagaaatcttgcctgcaatggctatgcggccttttttcggcatagttcccgttctaatggatgagaaggggtcagtcgtcgaggggagtaatgtgagtggagccctgtgtatttcccaggcgtggccaggtatggctcggactatttatggtgatcatcaacggttcgtcgacgcatattttaaagcttatcccgggtactactttaccggtgacggcgcctacaggactgaggggggctactaccaaatcactggtcgaatggatgacgttatcaacatctcaggccacagactcggcacagcagagattgaggatgcgattgctgaccaccccgccgtgcccgagtctgccgtaatcggttatccacacgatattaaaggcgaggccgccttcgcgttcatcgtggtcaaagacagcgcaggagattcagacgtggtggtgcaagagttgaagtccatggtcgccaccaagatcgcaaaatatgccgtgccagacgagatcctggtagttaaacgtctgcctaagacgaggagtggaaaggtgatgagacgcctgctgaggaaaatcattacaagtgaagcccaggagctcggcgacactactacgttggaggacccatcaataattgctgaaatcttgagcgtgtatcaaaagtgtaaagacaagcaggctgccgccaagtag

SEQ ID NO: 107134 - DNA, 1728 bp, synthetic construct
  misc_feature 1..1728: note = Description of Artificial Sequence: Synthetic coding sequence
  source 1..1728: mol_type = other DNA
atggccgcgagaaccctgggcaggggcgtggggcggctcctggggtctttacgcggtctgagcgggcagcccgcccgccctccttgcggggtttctgcaccccggagagcggcctcagggccaagcgggtctgccccagccgtcgctgcggcagctgcccaaccagggtcatatccggccctgagtgcccaggctgcgcgcgagcctgccgccttctgggggcccctggcgcgggacacactggtctgggacaccccctaccacactgtgtgggattgtgattttagtaccggaaagataggctggttcctggggggccagctcaatgtgtcagtgaactgcctggatcagcatgtgagaaagagtcccgagagtgtggccctgatctgggagcgggatgagcctggtacagaggtgaggattacctaccgggaattacttgagaccacctgccggctcgcaaacaccctgaaacgccacggagtgcatcggggtgacagggtggcaatatatatgcccgtgtcccctctggcagtagctgccatgctggcctgtgcacgtattggggccgtccacacggtgatcttcgctggatttagtgccgagtctttggccgggagaataaacgatgcaaaatgcaaagtagtcatcaccttcaaccagggcctgcgcgggggcagagtggtagagctgaagaaaatagtggatgaagctgttaaacattgtccaaccgtccaacacgtccttgtggcacaccggaccgataacaaggtgcatatgggagacctggacgtgcccctggagcaggaaatggcaaaggaggaccctgtttgtgcgcctgagagtatgggctcagaggacatgttatttatgctgtataccagcgggtccacagggatgcccaagggcattgtgcacacacaggccgggtatctcttatacgcagcgctgactcataagctggtgttcgaccatcagcctggggacatttttggatgtgttgcagacattggatggattacgggtcactcatatgttgtgtacggaccactgtgcaacggggcaaccagcgtgctctttgagtcaactccagtttatcccaatgccggaagatattgggagactgttgaaaggctgaaaatcaatcagttttacggcgcacctaccgccgtacggctgctgctgaagtatggtgacgcctgggtcaagaaatacgaccgcagtagtcttaggacattgggatcagttggcgagccaattaactgtgaagcatgggagtggctccacagagtcgtaggggatagtcgctgcaccctcgtggacacctggtggcaaaccgaaactggcgggatctgcatcgcgcctcgaccctctgaggagggtgctgaaattttgccagctatggctatgcggcccttttttggcatcgttccagtgctgatggatgaaaaagggtcagtggtggaaggaagcaacgttagcggcgctctatgtattagtcaagcatggcccggcatggcccgaaccatctatggcgaccatcaacgctttgttgatgcttacttcaaagcctacccggggtattactttacaggtgatggcgcctaccggacagagggtgggtattatcagattacagggcgcatggacgatgtcataaatattctgcaaatagttggattctttagggaggccattcgtaacagcggagatctgctggagcactag

SEQ ID NO: 107135 - DNA, 1821 bp, synthetic construct
  misc_feature 1..1821: note = Description of Artificial Sequence: Synthetic coding sequence
  source 1..1821: mol_type = other DNA
atgctaaagaccttcttgtttctggagaaatacttcccttgtattaagtatagttccgcttgtttccctgggacaggcttggacgtctacgatatcaagtttgccgtcctcctccatccacagaccgccctccacttcggccctccccccagcctgatggcttttagctcgctgtgttgtagggaactgttggagaccacatgccgtctagccaatacactcaagcgccacggcgtccacaggggcgaccgcgtggcaatttacatgcccgtgtcgcctcttgctgtggctgcaatgctggcgtgcgcccgcataggagctgtccacactgtaatctttgctggtttttctgccgagtcgctcgccggccggatcaacgacgctaaatgcaaggtagtgatcacttttaatcagggcttgaggggcggacgcgtggtggaacttaagaagattgtcgatgaggccgtgaagcactgtcccaccgtgcagcatgtcttagtggctcaccgaacggacaacaaagttcacatgggtgatctggacgtcccattagagcaggagatggctaaggaagatcctgtatgcgcacccgagtctatgggctccgaagacatgctatttatgctgtacacctctggatctaccggcatgcccaaggggatcgtccatactcaggccggctacctgctgtacgcagccctcactcacaagctagtttttgaccatcaaccgggcgatatctttgggtgcgtcgccgatatcggatggatcaccggccactcctacgtcgtgtatggtcctctgtgtaatggggctacttccgtgctgtttgagtctactcccgtgtaccctaatgctggacgctactgggaaacggtggagcggttaaagattaatcagttttacggagcccctacggctgttcgattgctgttaaaatacggtgatgcatgggtaaaaaagtacgatcggtcctcgctgcgcacactgggatcagtcggcgagccaattaactgcgaagcctgggagtggttacatcgcgttgtgggcgacagccggtgcactctcgtggacacttggtggcaaaccgagacaggcggcatctgtatcgctccaaggcctagcgaggagggcgcagagatactgcccgccatggccatgcggccttttttcggcatcgtgcccgtgctgatggatgagaaaggatctgtggtggaaggatccaacgtgtccggagccctgtgcatcagccaagcatggccaggaatggctcggacaatttacggagaccatcagagatttgtggatgcttattttaaggcgtatcccgggtactactttaccggcgatggcgcgtatcgtacggagggagggtattaccagattaccggccgcatggacgacgtcattaacatttccggccaccggctgggtaccgcagaaatcgaagacgctattgccgatcatcccgctgtgcccgagtcggccgtgatcggctatcctcacgacatcaaaggcgaagccgcttttgcttttatcgtcgtgaaggactctgccggcgatagtgatgtagtcgtgcaggaactgaaaagtatggtggcaactaaaattgctaaatacgcagtgccggacgagatcctggtggtgaagcgtctacctaaaacccggtctggtaaggtgatgcggagactgctgaggaagatcatcacatccgaagcgcaggaactcggcgacactacaaccttagaggatccgtctatcatagccgaaatcctctccgtctaccagaagtgcaaagataagcaggctgctgctaagtag

SEQ ID NO: 107136 - DNA, 1707 bp, synthetic construct
  misc_feature 1..1707: note = Description of Artificial Sequence: Synthetic coding sequence
  source 1..1707: mol_type = other DNA
atgcgtcgtaggaaggagcggcagccttgggaccggtttcatttcctgcactttgctccacacggccgcgagctgctggaaactacctgtagactcgccaacaccctgaagcgccacggcgtgcacaggggcgacagagtagcgatctacatgcctgtgagcccattagctgtggcagctatgttagcttgcgctcggatcggggcagtccacacagtgatctttgccgggttctccgcagagtctctcgcgggccgcattaacgatgccaagtgcaaggtggtgattactttcaatcaaggtttacggggaggaagagttgtggagctcaagaagatcgttgacgaggcagtaaaacattgtcccacagtgcagcatgtccttgtggcacacagaaccgataacaaggtccacatgggcgacctcgatgtccctcttgagcaggagatggccaaggaagacccagtgtgtgctcccgagtcaatgggctctgaagatatgctgtttatgctatataccagcggatccactgggatgccgaagggtattgtgcacacgcaggccggctatctcctgtacgctgccctcacacataaactggtgtttgatcatcagcccggagatatcttcggatgcgtggcagatatcgggtggatcacgggccactcatacgtggtttacggcccattgtgcaatggcgcaacctccgtgttgttcgagtcaacaccggtgtatcctaatgcagggaggtactgggagaccgttgaacggctaaaaatcaaccaattctatggcgccccaacagccgtgagactgcttttaaagtatggcgatgcttgggttaagaaatacgaccgctcctctctgagaacgctgggaagtgtgggagaacctattaactgcgaggcttgggaatggcttcatcgagtggtcggggactctagatgtacattggtggatacttggtggcagacagaaaccggagggatttgtatcgcacccagaccaagcgaggagggcgctgagatcctccctgccatggctatgaggcccttcttcggaatcgtgcctgtactcatggatgaaaaaggctccgtcgtggaggggtccaatgtttccggtgcactctgcatctcccaggcatggcctggaatggccaggaccatctatggggatcatcaacgctttgtcgatgcctatttcaaagcctacccaggttattacttcaccggagacggagcctataggaccgagggtggctactaccaaattaccggcagaatggacgatgttattaacattagtggacatcgcctcgggacggcggagattgaagacgcaattgctgatcatcccgccgtacccgaatcggccgtgattgggtatcctcacgatattaagggcgaagcagcatttgcttttattgtggtgaaggacagcgcgggagactctgatgtggtggttcaggaactgaagagcatggttgccactaaaattgctaagtatgccgtgcctgatgagattctggtcgtcaaaaggttgccgaagactcgctctggaaaagtgatgagacggttgctgcgcaaaatcatcacctctgaagcccaggagcttggggacaccactactctggaagacccatctattatcgcagagatcctgagcgtgtatcagaagtgcaaggacaaacaggcggctgccaaatag

SEQ ID NO: 107137 - DNA, 2145 bp, synthetic construct
  misc_feature 1..2145: note = Description of Artificial Sequence: Synthetic coding sequence
  source 1..2145: mol_type = other DNA
atgggcttgcccgaggaaagagtacgcagtgggagtggaagtagaggacaggaagaggcgggcgctggtgggcgagcacgtagctggtcacccccaccagaagtgagtaggtccgctcacgtgccctctctgcagcggtatagagagttacacagaagaagcgtggaggaacccagggaattttggggggacattgcaaaagaattttattggaagaccccatgtcctggcccctttctgaggtataacttcgacgtgacaaaggggaagatcttcattgagtggatgaaaggagcaacaacaaatatatgctacaatgttctggatagaaatgttcacgagaaaaaactcggagacaaggtggccttttactgggagggcaatgaacctggcgagacgacacaaataacttaccaccaactgttagtccaggtatgccagttttcaaacgtgctcaggaagcaaggtattcagaaaggcgacagagtcgctatctacatgcccatgattcccgagttggttgttgctatgctggcatgcgcgcggatcggtgccctgcactccattgtgttcgctgggttctcaagtgagagtctgtgcgaacgcatcctggactccagctgtagtctgctgatcaccaccgatgccttctacaggggcgagaaactcgtgaacctcaaagagttagcagacgaagcactccagaagtgtcaagagaagggcttcccagtgaggtgctgcattgtcgttaagcacctcggccgcgccgagctgggaatgggtgatagtacaagccagtcaccccctatcaaacggtcctgccccgacgtacagggcaagctcaaggaaaaaagtaagcgggtgcagccccagatctcatggaatcagggtatagacctgtggtggcacgaacttatgcaggaagcaggagatgagtgcgaacctgagtggtgtgatgctgaggaccctctgtttattctgtatacttccggttcaactggaaagccgaagggcgtagtacataccgttggaggatacatgctgtacgtcgccacgacctttaagtacgtgttcgacttccacgcagaggacgtgttttggtgcacagccgacattggctggattactggtcacagctacgtgacttacggcccactcgccaacggcgcaactagcgttcttttcgaggggatccccacataccctgatgtgaaccgattgtggagtatagtagacaaatacaaggttacaaagttctacaccgccccaactgctattcgactcttaatgaaattcggagatgaacccgtgactaaacacagtagagccagcctccaggtgctggggaccgtgggggaacctatcaaccccgaggcgtggctctggtatcaccgggtcgttggcgcacagcggtgccccattgtggatactttctggcagacagagacaggcggccacatgctgacccccttaccaggagcgactcctatgaagcctgggtctgcgaccttcccctttttcggtgtcgcccctgcaattctgaatgaaagcggtgaagaactggagggggaagcagaaggatacttggtcttcaaacagccatggcctgggataatgcgcacagtttacggaaaccacgaacggtttgaaaccacctacttcaaaaagttcccgggctactatgtgacaggcgacgggtgccagagggaccaggacgggtactattggataactggccggattgatgacatgcttaatgtcagtggccacttgctttcgaccgctgaggtcgagagcgctctggttgagcacgaagccgtcgccgaagcagctgtggtgggccacccacaccccgtcaaaggcgagtgtctgtactgctttgtcaccctctgcgacggccacaccttctctcccaaattgacagaggagctcaagaagcagatccgcgagaagattggccctattgctacccctgattatatccaaaatgcaccgggactgccgaaaacccgaagcgggaagatcatgaggcgagtcctgcgcaagatagctcaaaacgaccacgacctaggggacatgagcaccgtcgctgatcctagcgtgatctcgcacctgttttcccatcggtgcctgaccattcagtag

SEQ ID NO: 107138 - DNA, 1956 bp, synthetic construct
  misc_feature 1..1956: note = Description of Artificial Sequence: Synthetic coding sequence
  source 1..1956: mol_type = other DNA
atgatggtgagatgggcactcctctgcgagttctggggcgatattgcaaaggaattttactggaagaccccatgccccggacccttcttgcggtacaatttcgacgttacgaaggggaagatattcatagagtggatgaagggtgcaaccacgaacatctgttataacgtgctcgatcggaatgtgcatgagaaaaaattaggcgataaagtggcgttctactgggagggcaacgagccaggcgagacgacccagatcacctaccatcagttgttggttcaggtctgccagtttagcaatgtcctgcgcaagcaggggattcagaagggcgaccgagtagcgatctatatgcctatgatcccagagttggttgtggctatgcttgcctgcgcccgtatcggcgcgctgcattccatcgtgtttgccgggttttcttctgaatccctctgcgagaggatattggactcaagttgctctctgctgataactacagacgccttttaccgcggggagaaactggtgaacctcaaggaattggccgatgaagccctgcagaaatgccaggagaagggctttccggtgcgctgctgcatcgtcgtgaagcaccttggccgcgccgagctgggcatgggggactccacgagtcagagcccaccgattaaacggtcttgtcccgacgtgcagatttcttggaaccaagggattgatctgtggtggcatgaactgatgcaggaggctggcgacgagtgtgaaccagaatggtgtgatgctgaggatccactgtttatcctgtatacaagcggctccactggcaaacctaaaggtgtcgtccacactgttggagggtatatgctttacgtggccaccactttcaagtatgtctttgatttccatgcggaagacgttttttggtgcactgcagacatcggatggatcaccgggcacagctatgtgacgtacggtccactggcgaatggggccacttctgtacttttcgagggaatacctacctatccagatgtgaatcggctgtggagtatcgtagataaatacaaggtgacgaaattttacactgcccccaccgcgatccgcttgttaatgaaattcggtgacgagccagtaacaaagcatagtagagcaagtctgcaggtgctagggacagtaggagagcccatcaacccagaggcttggctatggtatcacagagtggtgggtgcccaacgctgccctatcgtcgatactttttggcagacagaaaccggaggtcacatgctaacacccctcccaggagccacccccatgaagcctggtagcgcaaccttcccctttttcggggtggcccctgcaatcctgaacgaatcgggggaggagctggagggagaggctgagggatatttagtatttaagcagccgtggccaggaatcatgcgcactgtttatggtaaccacgaacgatttgagaccacgtattttaaaaaattccccggttattacgtgaccggagatggttgtcagcgggaccaggatggctattactggataacagggcgcattgacgatatgctgaacgtatcaggtcatctattgtcaaccgccgaagttgagtccgcattggtcgagcatgaagccgtcgccgaggccgctgtcgtgggccacccacaccctgtgaagggcgagtgcttgtattgctttgtgactctctgcgacgggcacaccttcagtcccaagctcacagaggaactgaagaagcagattagggagaaaattgggcccattgctactcccgattatatacagaacgcacccggacttcccaaaacacgctctgggaagatcatgaggcgcgtgctgaggaagatcgcccagaatgaccacgatcttggggatatgtccaccgtcgcagacccttccgtcattagtcacctgttcagtcaccgctgtctcacaatccaatag

SEQ ID NO: 107139 - DNA, 2106 bp, synthetic construct
  misc_feature 1..2106: note = Description of Artificial Sequence: Synthetic coding sequence
  source 1..2106: mol_type = other DNA
atgggcctccccgaggaacgcgtgagaagtggatctgggagtcgcggtcaggaggaagcgggcgccggcgggagggctagaagctggtccccccctcctgaggtgtctagatctgcacacgttccttccctgcagagatacagggagctgcaccgcaggagtgttgaagagcctagagagttttggggcgacatcgctaaagagttttactggaagactccctgtcccggccccttcctgcgctataattttgacgtaacaaaagggaagatatttattgaatggatgaagggagccacaacaaatatatgctataacgtgcttgataggaatgtgcatgaaaagaaactgggcgataaggtcgccttttactgggaaggcaacgagcctggggaaaccacacagataacttaccaccagctactggtgcaagtttgtcagttttccaatgtgctacgcaaacaaggcatccagaaaggcgacagggtggccatatatatgccgatgatcccagaattggtcgtggccatgttggcatgtgcgagaatcggggcccttcacagtattgtctttgccggtttctccagcgaaagcctctgtgagagaattctggattctagttgcagcctgctcataacgactgatgccttctaccgtggagagaaactggtgaacttgaaggaattggccgatgaggcattgcaaaagtgccaagagaaggggtttcctgtgcgctgctgcattgtcgtgaaacatctgggccgagccgaactgggcatgggggactccacctcccagtcacccccaatcaaaaggagctgccccgatgtacagatctcatggaaccaaggaatcgatctgtggtggcatgagctgatgcaggaggcaggcgatgagtgcgaacctgagtggtgcgatgccgaggaccccctgtttatattgtacacgtctggttctaccggcaagccaaaaggagtggtgcatactgttggtggatacatgctatatgttgctaccaccttcaagtatgtgttcgactttcacgctgaagatgttttctggtgcactgctgacatcggttggatcaccgggcactcgtacgtgacatatggaccccttgcaaacggggcaacaagcgtgctctttgaaggtatccccacctaccctgacgttaaccgcctgtggagcattgttgataaatataaggttactaaattctatacggccccaacagccatccgcttactcatgaagtttggcgacgagcccgtcactaagcactcgcgggcttcccttcaggtactgggcaccgtgggtgagcctatcaacccagaagcatggctctggtaccacagagttgtaggggctcagaggtgccctattgtcgataccttctggcagaccgagacaggagggcatatgctcacccccctccccggggcaacccctatgaaacctggttccgccacattcccctttttcggcgtggctcccgccatccttaatgagagcggtgaagagttggagggggaggcagagggttacttggtcttcaagcaaccttggcctggcattatgagaacagtatacggtaatcatgagcggttcgagacaacctactttaaaaaatttcccggatattacgtaaccggcgacggatgccagcgggaccaggacggttattactggataaccggaaggatcgatgacatgctcaacgtgagcggacatctgttatcaacagcggaagtcgaaagtgctctcgttgagcatgaagcagtggcagaagccgctgttgtgggacatccccatcctgtcaagggggagtgcctctattgttttgtgacgctatgcgacggacataccttttctccgaagctgaccgaagagttgaagaagcagatccgcgagaaaatcggacccattgccactccggattacatccagaatgcgcccggactcccaaaaactagaagtggaaaaattatgcgacgggtcttgcggaaaatcgctcagaatgatcacgatttgggagacatgagtacagtggcagacccatccgtcatcagccaccttttttcccaccgatgtctgaccatccagtag

SEQ ID NO: 107140 - DNA, 2100 bp, synthetic construct
  misc_feature 1..2100: note = Description of Artificial Sequence: Synthetic coding sequence
  source 1..2100: mol_type = other DNA
atgggcctgcccgaggagcgagttagatccgggtcaggctctcgcggacaggaggaagctggcgctggaggcagagcgcgttcatggagcccacctcctgaggtgtcacgatctgctcacgttccgtccctgcagcgctaccgcgagcttcaccgaagatcggtggaggaacccagagagttctggggcgacattgcaaaagagttttactggaaaacaccctgcccaggcccatttttaagatataatttcgatgtgacaaaagggaagattttcattgagtggatgaagggtgcgacaaccaacatctgctacaatgtcttggaccgaaacgtacatgaaaagaagttgggggacaaggtggcattctactgggaaggaaatgaacccggcgagaccacccagattacttaccatcagcttctcgtgcaggtatgccaattcagcaatgtgctaaggaagcaaggaatacagaaaggtgacagagtagcgatttacatgccgatgatacctgagttagtggtggctatgctggcctgtgcgaggattggggctctgcattccattgtctttgcgggtttttccagtgagtctttgtgcgagagaatcctggactcgtcatgcagtctgctgattacaacggacgcattttaccgcggagaaaagctggtgaatttgaaagaattagccgacgaggccctgcaaaagtgccaggagaaagggttccccgtgaggtgctgcatcgtagtcaaacatttaggtcgcgccgagctgggaatgggtgatagtactagccagagccccccaataaaacggtcttgtcctgatgtgcagatttcctggaaccagggaattgatctgtggtggcacgagctgatgcaggaggcaggtgatgaatgtgaacctgaatggtgcgacgccgagcatagtagctcatgtactcccgtggccccacaagctaatccccgcgtgtggttcactcagttaggcgcaacttgttacgtggctactactttcaagtatgtgtttgactttcatgctgaggatgtcttttggtgcaccgcagacatcggatggatcactggacactcatacgtcacttacggacctttagcaaatggcgctacatctgtcctgtttgaaggtatcccaacatacccagatgttaacagattatggtctatcgtggacaagtacaaggtaacgaaattctacaccgcgccaactgccatcagactgttaatgaagttcggcgacgagccggttacgaagcactcccgggcaagccttcaggtcctcgggactgtcggggagccaattaacccagaagcttggctctggtaccatcgagttgtgggtgcgcagcggtgcccaattgtggatactttttggcagacagagacggggggacacatgttaactcccctgcctggggcgactcccatgaagccaggaagtgccacattcccattttttggggtggccccagccattctgaatgagagcggagaggaactagaaggggaagccgagggctatctcgtatttaagcagccttggccagggatcatgcggaccgtgtacgggaatcacgaacgttttgagaccacatattttaaaaaatttccaggctactacgtcactggggatggttgtcagagggaccaggacggctactactggatcaccgggcggatagatgacatgttgaacgtgagcgggcacttgctctccaccgctgaagtcgaatctgctttggtagaacacgaggcagtcgccgaagccgctgtggtaggccacccccaccctgtgaagggtgagtgcctgtattgtttcgtgacgttgtgtgatggtcacaccttctcccctaagcttaccgaagagcttaaaaaacagattcgtgagaaaattggcccgattgcaacccccgactatatccagaatgcccccggtttaccgaagacaagaagtggaaagatcatgcggagggtgctccgaaagatagcccagaacgaccacgatctcggagacatgagtactgtggcagatccttctgtaatatctcatttgtttagccaccggtgcctcaccatccagtag

SEQ ID NO: 107141 - DNA, 1230 bp, synthetic construct
  misc_feature 1..1230: note = Description of Artificial Sequence: Synthetic coding sequence
  source 1..1230: mol_type = other DNA
atgcaagaagctggagacgagtgtgagcccgaatggtgtgatgccgaggatcccctgtttattctgtacacctccggctctacaggcaagcctaaaggcgtggtccacacagtaggcggctacatgctgtatgtcgccaccacgttcaaatacgtctttgatttccacgccgaagatgtgttttggtgcactgccgacatcggctggatcacaggccacagctacgttacatatggcccactggctaatggcgctacatctgtgctgtttgagggtataccgacgtatcctgacgtgaaccggctgtggtccattgtggacaagtacaaagtgacgaagttctacaccgcacccacagctatcagactgcttatgaagtttggtgacgagcccgtgaccaagcacagcagggcctctctgcaggtgctgggtaccgtgggggaacctattaaccctgaggcttggctctggtatcaccgggtcgtaggagctcaaaggtgcccgattgtggacacattctggcagactgagacaggaggtcacatgctgactcccttgcctggcgccacacccatgaagcctggatccgccaccttccccttctttggagtggcccctgctatcctcaacgagtcgggagaggagttggaaggagaggccgaaggttatttggtgttcaaacagccttggcccgggatcatgcggacagtgtacggcaatcatgagaggtttgagactacttacttcaagaagtttcctgggtactacgtgaccggcgatggctgccaacgtgatcaggacggatactactggatcacaggacgaatcgacgacatgctgaacgtcagtgggcatctactgtctactgccgaagtggagtccgccctggtggaacacgaggctgtggcagaagcagccgtggtcggtcacccgcatcccgtgaagggcgaatgcctgtactgtttcgtgactttgtgtgacggtcacacctttagcccaaaactgacagaggaacttaagaaacagatacgagagaaaatcggtcccatagccacgcccgactacatacagaatgcacctggcctcccaaaaacacggtccggcaagattatgcgacgggttctgcggaagattgcacaaaatgatcacgacctcggcgatatgtctaccgtggcagatccatctgttatctctcacctctttagccaccgctgtctgacaatccagtag

SEQ ID NO: 107142 - DNA, 114 bp, synthetic construct
  misc_feature 1..114: note = Description of Artificial Sequence: Synthetic coding sequence
  source 1..114: mol_type = other DNA
atgatggtgcggtgggcccttctttgcggagaatgccggatcctgggacggcactgtcagggaattttgttggaggactctatgccgtggccaattcccagcgtgcagctgtag

SEQ ID NO: 107143 - DNA, 2061 bp, synthetic construct
  misc_feature 1..2061: note = Description of Artificial Sequence: Synthetic coding sequence
  source 1..2061: mol_type = other DNA
atgaagcccagctggttacagtgtcggaaagtaacctccgccgggggcctggggggccctctgccagggagttcacccgccagaggcgccggtgccgctctgcgagcattggtggtcccaggaccccgaggaggcttagggggaagaggttgcagggccctgtcaagcgggtccggctcggaatataaaactcatttcgccgcaagcgtcactgatccagaaagattctgggggaaggcagcagagcagattagctggtacaagccatggacaaagacccttgagaataagcactcaccctcgacacgttggtttgtggagggaatgctgaacatctgctataatgcggtcgacaggcacatcgagaatgggaagggcgacaaaatcgccattatttatgactcaccggtgaccaacaccaaagcaaccttcacctacaaggaagtgctcgagcaggtgtctaaactggccggtgtactggtgaagcatggaatcaagaaaggcgatactgtcgtcatctacatgcccatgatccctcaagcaatgtacactatgttagcttgcgcgcgaattggagctatacattccctgatctttggcgggttcgcctctaaagaactatcaagtagaatcgatcacgttaagccgaaagtcgttgtcacggcctccttcggcatcgaacccggacggcgagttgagtatgtacctctcgtcgaggaagccctcaaaattggccagcacaagcctgacaaaattcttatctataaccgtcctaatatggaagccgtgccactcgcgcctgggcgcgacctggattgggacgaggagatggccaaagcacagtcacacgattgtgttccagtgctctccgagcatcccctgtatattctgtatacctcagggaccacgggcttgcccaagggagttatacggcccaccggaggctacgctgtcatgttgcactggtccatgagctccatatatggccttcagccaggtgaagtgtggtgggctgccagtgacctgggatgggttgtcggccactcatatatttgttatggccccctgctccatggcaataccactgtactgtatgaaggtaagccagttggtacacctgacgcaggcgcttattttcgtgtgctagcggaacacggcgtagccgccctcttcacagcccccaccgcaatccgcgccatcagacagcaggatcctggcgccgccctgggcaaacagtattctctgaccagattcaaaacactcttcgtggccggggagagatgtgatgttgagacactcgagtggtcaaaaaacgtttttcgggtacccgttctcgaccattggtggcagacagaaacgggaagcccaatcacggcttcatgcgtcgggctagggaatagtaaaaccccaccgcctggccaggccggcaagagcgttcccgggtacaatgtcatgatcctagatgataacatgcagaaactgaaagccaggtgcctgggcaacatcgtcgtgaagctgcctttgcctcctggtgccttttcaggactctggaagaatcaagaggctttcaagcacctctatttcgagaagtttcccggatattacgacacaatggatgcgggttatatggacgaggagggctacctgtatgtaatgagtcgcgtggacgacgtgatcaacgtggccggacaccgaatcagcgcaggcgccattgaggaatccattctgagccacggaaccgtagccgattgcgctgtggtcggcaaggaggacccgctgaagggacatgtgcccctggccctttgcgtgctccggaaggatatcaatgccaccgaggagcaggtgctggaggagatcgtgaagcacgtcagacaaaacattggacccgtggccgccttcaggaacgccgtgttcgttaagcagctgccaaagacgcgaagcggtaagatcccgaggagtgcattatcggcgatcgtcaatggaaaaccatataagatcactagtaccatcgaggacccaagcatttttggccacgtcgaagaaatgttgaaacaggcctag

SEQ ID NO: 107144 - DNA, 1107 bp, synthetic construct
  misc_feature 1..1107: note = Description of Artificial Sequence: Synthetic coding sequence
  source 1..1107: mol_type = other DNA
atgctgcactggtccatgtcatcaatttatggactgcagccaggggaggtgtggtgggcagcgtcagacttaggttgggtggtggggcattcatacatctgctacggcccactgcttcacgggaataccacagtgctttacgagggtaaaccagtcggaacccccgacgcgggggcatattttcgagtgctggcggaacatggagtggcggccctttttactgcacctaccgccattcgtgctatccggcagcaggacccgggagccgctctggggaagcagtacagcttaacaagattcaaaacactctttgtggctggtgaacgctgtgacgtcgaaaccctcgaatggagtaagaacgtatttcgggtgcctgtgctggatcactggtggcagacagagactggatcgcctatcaccgcgagctgtgttgggttagggaatagcaaaacccccccaccaggccaagccggaaagagtgtgcctggctacaacgtcatgattctggatgataatatgcagaagcttaaagcaagatgtttaggaaatatcgtagtgaagctgcctctgccccctggcgctttcagcgggttgtggaagaatcaggaggccttcaaacacctgtatttcgagaagttccccggctactacgacactatggatgctggctatatggatgaagaaggttacttgtatgttatgagtagggtggacgatgttattaacgtagcgggccataggatctctgccggtgccatagaagaatccatactgtcgcatgggacagtggctgactgcgccgtggttgggaaggaggaccccctgaaaggtcatgtcccattggcactgtgcgtgctgcgaaaggacattaacgctactgaagagcaggtgctggaggaaatcgtgaagcatgtccgccaaaatataggccctgtggccgcctttagaaacgccgtcttcgtgaagcaattacctaagacccgttcgggaaaaatacctcgaagcgctttgtccgcaattgtaaatggtaaaccctacaagattacatctactatcgaagatcctagtattttcgggcatgttgaagaaatgcttaagcaggcatag

SEQ ID NO: 107145 - DNA, 1266 bp, synthetic construct
  misc_feature 1..1266: note = Description of Artificial Sequence: Synthetic coding sequence
  source 1..1266: mol_type = other DNA
atggcagcaaccctgatacttgagccagctggcaggtgctgctgggatgaaccagtgaggattgccgtacgcggcctggcacctgagcagccagttacactgagagcttccctgagggacgagaaaggggcactgtttcaggcacatgccagataccgggctgatacactcggggagttggatcttgagcgggctcccgcactagggggatctttcgctggtttggaacctatgggtctgctgtgggccctcgagccagagaagcccttggttaggctggtaaagagagacgtccgaactcccctagcagtggaactggaagtcttggatggccacgatcccgatccagggcgcctgctgtgcagggtgaggcacgaacggtactttctgccaccaggcgtaagacgtgaacctgtgcgcgcggggagagtgcgaggaaccctcttcctgccccctgaaccaggcccttttcccggaatcgtggacatgtttgggacagggggcgggctgctagaatatagagccagccttttggctgggaaagggttcgccgttatggcactcgcatattacaactatgaggacttgcctaagaccatggagaccctgcacctcgaatactttgaagaggcggtgaactacctgttatctcaccccgaagtgaaaggtcctggcgtgggcctgctgggtatttcaaaagggggggagttgtgtttgagcatggcctcgttcctgaaggggatcacagccgctgtggtaataaatggatcagtcgcaaacgtgggcggaactctaaggtacaagggagagaccctgccgcccgtgggggtgaacagaaaccggatcaaggtcacgaaggatggatacgctgacattgtagatgtgttaaactccccccttgagggccccgatcaaaagtcttttatacctgtcgaacgagccgaatccaccttcttattcctagtcgggcaggacgatcacaattggaagagtgagttctacgccaacgaggcctgtaagagattgcaggcccacggccgacgcaagcctcaaatcatttgctatcctgagacaggtcattacatcgagcccccttattttcctctgtgtcgcgcatccctccacgcgttggtgggatcccctatcatctggggcggggaacctcgtgctcacgctatggcccaagttgatgcatggaaacagctgcagacattctttcacaaacatctgggcggccatgaaggaactattccatctaaggtgtag

SEQ ID NO: 107146 - DNA, 1785 bp, synthetic construct
  misc_feature 1..1785: note = Description of Artificial Sequence: Synthetic coding sequence
  source 1..1785: mol_type = other DNA
atgatccagaatgttggtaatcacctgcgccgcggcttggcaagcgtgttcagcaatcgcacgagcagaaagagtgcattacgagcaggaaatgattctgcaatggctgacggggaaggatatcgtaatcccaccgaagtccagatgagccagcttgtgttgccttgtcatacaaatcagagaggagagttgtcagttggccagttattgaagtggatagacaccaccgcatgtctctccgccgagagacatgcggggtgtccctgcgtcaccgcctccatggatgacatctacttcgagcatactatatctgtcggccaagtcgtcaacatcaaggcaaaagtgaatcgcgcgtttaattcttccatggaagttgggattcaggtggcttccgaggacctctgtagtgagaaacagtggaatgtctgtaaagccctggctactttcgtcgcaaggcgggaaatcaccaaggttaaactgaagcagatcactccgagaaccgaggaggaaaagatggaacatagcgtggccgcagagaggaggcgtatgcgcctcgtttatgccgatacaatcaaggaccttcttgctaactgtgcaatacagggggatctggagagccgcgactgtagccgtatggttcctgccgaaaaaactagagttgagtcggtcgagctggtcttacccccccacgccaatcaccagggcaatacgtttggcggccaaataatggcttggatggagaacgtggccacaattgccgcatctcgtctatgccgcgcccaccccaccctgaaggctattgaaatgtttcacttccgcgggccttcccaggtgggagaccgcctcgtattgaaagccatcgtgaataatgccttcaagcattccatggaggtaggcgtgtgcgttgaagcttaccggcaggaagccgagacacaccgccggcacattaattctgcctttatgacgtttgtcgtgctggatgccgacgatcagccccagctgcttccgtggatccggcctcagcctggggatggggagcgaaggtatcgcgaagctagcgcccgcaaaaaaataagactggatcggaagtacattgtgtcttgtaaacagaccgaggtgcctctgtcagtaccctgggacccaagcaatcaagtttatctgtcatacaacaatgtttctagcctgaaaatgttagttgctaaagacaattgggtattatcctccgaaatcagccaggtccgactctataccttggaggatgacaaattcctttcatttcacatggagatggtggtacacgttgacgcagcccaggccttcttgttgctttccgatcttcggcaaaggcctgagtgggacaaacattaccggtccgtggaactggtgcagcaggttgatgaagatgatgctatttaccacgttaccagccccgcacttggggggcacacaaaaccgcaggacttcgtgatccttgctagtagaaggaaaccctgtgacaacggggacccttatgtgatcgccctgcgaagcgtgaccctacctacacatagagaaacgccagaatatcgccgcggggagaccctctgtagtggcttctgcctttggcgcgagggcgaccagctcacaaaagtgagctactacaatcaggccaccccaggcgtgctgaattatgtaaccactaatgtcgcaggactgtctagcgagttctacacgacattcaaggcctgtgaacagttcctgttggacaaccggaatgatctggctccatccctccagacactgtag

SEQ ID NO: 107147 - DNA, 1824 bp, synthetic construct
  misc_feature 1..1824: note = Description of Artificial Sequence: Synthetic coding sequence
  source 1..1824: mol_type = other DNA
atgatccaaaatgtgggcaaccacctcaggcgcgggcttgccagcgttttttctaacagaacgtctcgcaaatccgcgctccgagcaggcaatgattccgccatggcagacggggagggctatcgtaacccaacagaggtgcagatgagccagcttgtgctgccatgccacacaaatcagaggggggagctgtccgtggggcagctgttgaaatggattgacaccaccgcctgtctgtccgccgagcgacacgccggatgcccctgcgtgactgcctctatggatgatatctactttgaacacacaattagcgtaggccaggtggtgaatatcaaagcaaaagtcaaccgggccttcaacagctccatggaagttggcattcaagtcgcctcagaggacctatgtagtgagaaacagtggaatgtgtgtaaagctctcgctacctttgtggcacggagagagattactaaggtgaagctcaagcagatcactcccagaaccgaagaagagaagatggaacattctgtggcagccgagcgtcgccgaatgcggctcgtgtacgccgacaccatcaaggacctgctcgccaattgcgcaatccaaggtgacctagagagtagagattgctctcgaatggtgccagccgagaaaacacgggttgaaagcgtagagctcgtgctgcctcctcacgcaaatcatcaaggaaacacatttggcgggcagataatggcctggatggaaaatgtcgcaacgatcgcagccagtagactatgtagggctcatcctacactgaaagcaattgagatgtttcacttccgtggcccttcacaagtaggggacaggctggttctaaaagccatcgttaacaacgcctttaagcacagtatggaagtgggcgtatgtgtcgaggcttatcggcaggaggccgaaacacacagacgacacataaattccgcattcatgactttcgttgtgctggatgctgatgatcagccacagctgctgccttggatcagacctcagcctggagacggcgaaaggcgttaccgagaggcatccgcacgaaagaagattcgcctagacagaaaatatattgtgagttgtaagcagacagaggtgcccctctcggtcccatgggaccccagcaaccaggtttacctgtcctataacaacgtgtcttctttgaagatgcttgttgccaaagacaactgggtgctaagctcggagatatctcaagtgcgtttatacaccttggaagacgacaagtttctctccttccacatggagatggtggtacatgtagatgcggcacaggcatttctcctgctgtctgacctccgacagagacccgagtgggataaacattataggagcgtcgagctggtgcaacaggtggatgaagacgatgcgatttatcacgttacctctcctgccctgggtggtcacaccaagccccaagattttgtgatcctggcttccagacgcaaaccttgtgataatggggacccctatgtgattgccctgcgaagtgtgaccctcccgacccatcgcgaaacccctgaataccgaaggggcgaaaccctgtgctcagggttttgtctttggagggaaggcgatcaactgacgaagtgctgttgggtgcgggtctccttgacagagctggtgtctgcttctggcttttacagttggggcctcgagtctcggtctaagggacgtagatctgacgggtggaacggtaagctggcaggaggccacctgtccaccctcaaggccattccagttgccaaaatcaattctcgattcggctatctgcaggacacatag

SEQ ID NO: 107148 - DNA, 1668 bp, synthetic construct
  misc_feature 1..1668: note = Description of Artificial Sequence: Synthetic coding sequence
  source 1..1668: mol_type = other DNA
atggaaaggcctgcccccggagaggtcgtgatgtcccaggctatccagccggcgcacgccacagccagaggagagttatctgctggccagctgcttaaatggattgatactaccgcctgtttggcggctgaaaaacacgcgggtgtatcttgcgtcaccgcctcagttgatgacatacagttcgaggagactgctcgggttgggcaagtaatcaccatcaaggctaaggtcacacgcgcgttttccaccagcatggaaatcagcatcaaggtcatggttcaggatatgcttacagggatcgaaaagctcgtgtccgtagcctttagcactttcgttgcaaaaccagtcggcaaggagaagattcatctgaaaccagttacccttctcacggagcaggaccatgtagaacacaacctggctgccgagagacggaaagttagattgcagcacgaagatacgtttaataacctaatgaaggagtcttcaaaattcgacgacctcatattcgacgaggaagaaggagcggtgagcactaggggaacaagtgtccagtccatcgagctggtgttgcctcctcacgctaaccatcacgggaatacctttggcggacagatcatggcttggatggagacagtggctacgatcagtgcaagccgtctgtgttgggcccaccctttcctcaagtcagtggacatgttcaaattcaggggaccgtctaccgttggtgaccgactggtcttcactgccatcgtcaataacacattccagacctgtgtggaggtcggagtcagagttgaggctttcgattgtcaggagtgggctgaaggacgcgggcggcatatcaactcagcatttctgatctataatgccgccgatgacaaagagaacctgatcacttttccacgaatccaacccatatcaaaagatgacttccggcggtatcggggcgccatcgctagaaagagaattagattaggacgcaaatatgtcatatctcataaagaggaagttcctctgtgcattcactgggatatctcaaagcaggcctctcttagtgactcgaacgtagaggccttgaaaaaactagctgccaaaaggggctgggaggtgacctcaacagtggaaaaaattaaaatttataccctggaggagcatgacgtcctgagtgtttgggtggagaagcacgtgggttcacccgcccatctggcctataggctgttgtccgacttcaccaagaggcccctgtgggaccctcatttcgtgagctgtgaagtgatcgactgggtatcagaggacgatcagctataccacatcacctgtccaatcctcaacgacgacaagcctaaggacttggttgtgttggtctccaggagaaaaccactgaaagacggaaatacctacaccgtggcagtgaaatctgtgatactgccctcagtcccgccctctccacagtatatccgttccgagatcatctgcgcgggctttctcatccatgcgatagatagtaatagttgcattgtgtcctatttcaatcacatgagcgcttccattctgccatattttgcgggcaatctagggggctggtccaaatctattgaggaaacggccgctagctgcattcagtttctcgagaacccccccgatgacggatttgtatcaacattctag

SEQ ID NO: 107149 - DNA, 1452 bp, synthetic construct
  misc_feature 1..1452: note = Description of Artificial Sequence: Synthetic coding sequence
  source 1..1452: mol_type = other DNA
atgtccaacaagttactctcaccccatccacattcagtggtgcttagaagtgagttcaagatggcttcctcaccggcggtgctgcgtgcttctcggctctatcaatggtctttgaaaagttccgcccagtttctcggcagcccacaactgcgccaagtgggacaaattatcagggttcccgctagaatggctgccacacttatccttgagcctgccggccgatgctgctgggatgagcctgtgagaatcgctgtgaggggactagcccctgagcagcctgttacactaagagcgagcctcagggatgagaaaggcgctttattccaggcccacgcccgataccgggccgacactctgggagagctcgacctggaacgagctcccgcactgggcggcagcttcgctggcctggaacctatgggacttttgtgggcactcgaaccagagaaaccccttgtcagattggtgaagcgcgatgttcgcacaccattagctgtggaactggaagtgctcgacggacacgatccagacccaggcagactattgtgtcagacgcgccatgagcgttacttcttgcctccaggggtgagaagggaaccagtgcgagtggggagagttaggggcactttatttctgcctcccgagcctggcccattccctggaatagtggatatgttcggaactggaggaggcctcctggagtaccgcgcaagtctcttggccgggaaaggcttcgctgtcatggctctggcctactacaattacgaggatttgcccaagaccatggaaaccctacacctggagtatttcgaggaggccatgaactatttgctgagccaccccgaggtgaagggcccaggagtggggctcctcggcatctccaagggtggtgagctatgtctgagcatggccagcttcttaaaggggattacggcggcagtagtcattaatggctcggtggccaacgtgggggggaccctccactataagggcgagactctgccccccgtgggagtgaataggaaccgcatcaaagtcactaaggacggatacgcggatatcgtggatgtgctcaattcccccctggaagggcctgaccaaaaatctttcattccagtagaacgggcagaaagtacgttcctgtttcttgtcggacaggatgatcataactggaaatcggaattttatgccaacgaagcgtgcaagcgtctgcaggcccatgggcgacgcaagccccagataatctgttatcctgaaactggacactacatagaacccccttactttcccctctgtcgcgcgtcattgcatgcgttggtgggatctcctattatttggggtggcgaaccccgagcccacgcaatggcccaagtcgatgcatggaagcaacttcaaactttcttccacaagcatctgggaggacacgagggaacaatacctagcaaggtgtag

SEQ ID NO: 107150 - DNA, 1266 bp, synthetic construct
  misc_feature 1..1266: note = Description of Artificial Sequence: Synthetic coding sequence
  source 1..1266: mol_type = other DNA
atgtccgctaccctgatcctggagccacctggacggtgttgctggaatgagccagtgcggattgcagttcgcggattggcccccgagcagagagtgaccctgcgggccagcctgagagatgagaaaggcgcactttttcgggcccacgctcgatactgtgccgatgcacgtggagaactggatctggagcgcgcacccgctctcggcggatcattcgctggtttggagcccatggggctgttgtgggccctggagccggagaaaccattttggcgtttcctaaaaagggacgtacagatcccgtttgtcgttgagctagaagtgctcgacggtcatgaccctgagccgggcaggctattgtgccaggcccagcacgagagacacttcttgccccctggcgtgcgccgccagtcagtgagggctggtcgcgtgcgggccaccctttttcttcccccaggacctggaccgttccccggaatcatcgatattttcggcatcggcggggggttgctggagtaccgggctagcttactggctggccacggatttgccacccttgcattggcttattacaacttcgaggacctgcctaacaacatggataatatttcactggagtacttcgaggaagcagtgtgctatatgctccagcacccacaggtcaagggcccaggcattggcctactgggcattagcttgggagccgatatctgtctttctatggcatcgtttttaaagaacgtatcagcaactgtgtcaataaatggttcagggatttccggcaatacagcaatcaattacaagcacagcagcataccccccttggggtacgacctacgccgtataaaggtcgccttctccgggctcgtcgatatcgtcgacattagaaacgcgctggtaggggggtacaaaaacccatctatgataccgattgaaaaggcacagggcccaatcttactgatcgtaggtcaggatgatcataattggaggtcagagctgtatgcccaaaccgttagtgaacgtctgcaggctcatgggaaagagaagccccaaattatctgttacccaggcacggggcattatatcgagccaccatatttccctctttgcccggcgtctctgcacagactgcttaataagcacgtaatctggggcggagagccaagagcacacagcaaggctcaggaggacgcctggaaacagatcttggcatttttttgtaaacatctcggcgggactcagaagacagcagtccccaagttatag

SEQ ID NO: 107151 - DNA, 624 bp, synthetic construct
  misc_feature 1..624: note = Description of Artificial Sequence: Synthetic coding sequence
  source 1..624: mol_type = other DNA
atgctacaacatcccaaagtgaaggggccttctatagcgttattgggtttcagcaagggtggggacctgtgcctgtccatggcctcatttctgaaaggaatcacggccacagtcctcataaacgcatgcgttgctaacaccgtggcgccactgcactataaagatatgatcattcctaagctggtggacgatctgggtaaagtcaagattaccaagtctggtttcctcacatttatggacacatggagcaacccattggaggagcacaaccatcagagcctcgtgccgctggagaaggcacaggtccctttcctgttcattgtggggatggacgaccaatcatggaagtcagaattttatgcacagatcgcatccgaaaggctgcaggcccatgggaaggaacgtccccagatcatctgctatcccgagaccggacattgcattgatccaccctacttccctccaagccgtgcttccgttcacgcagtgctcggcgaggccattttttacgggggcgaaccgaaggcgcatagcaaggcacaggtcgatgcctggcagcagatccaaacgttcttccacaaacacctcaatggaaaaaaatccgtgaagcattcaaaaatatag

SEQ ID NO: 107152 - DNA, 507 bp, synthetic construct
  misc_feature 1..507: note = Description of Artificial Sequence: Synthetic coding sequence
  source 1..507: mol_type = other DNA
atgctgcagcatcctaaggtgaagggcccaagtatcgccctgctcggcttcagcaagggcggggatctgtgcctgtctatggcttctttcctcaagggaatcacggccacagtccttatcaatgcctgcgtggccaataccgttgcacccctccattacaaagacatgatcatcccaaaattagtggacgatcttggcaaggttaagatcaccaagagtggctttctcacctttatggatacctggtccaatcctctcgaggaacataatcaccaaagccttgtacctttggaaaaagctcaagttccttttctgttcatagtggggatggatgaccaatcctggaagagcgagttctacgcccagatcgcctctgagcgtcttcaggcccacggaaaagagcgtcctcagatcatatgttacccagagaccggtcattgcatcgatccaccttatttcccaccctcacgggcaagcgtccacgccgtccttggcgaggcaatttag

SEQ ID NO: 107153 - DNA, 1113 bp, synthetic construct
  misc_feature 1..1113: note = Description of Artificial Sequence: Synthetic coding sequence
  source 1..1113: mol_type = other DNA
atggcacggccggggctgatacacagtgcacccgggctgccagacacttgcgctctgctgcaaccaccagccgccagcgccgcggcagccccctccatgagtggacccgatgttgagacgccatctgcaattcagatttgccgcatcatgaggccggatgatgccaatgtggccggcaacgtgcacggggggactattttgaaaatgatcgaggaagccggagccattatttccaccaggcattgtaacagccagaacggggaaaggtgtgtcgcagccttggccagggtcgagcggaccgatttcctcagccccatgtgcatcggagaggtggcgcacgttagcgctgagatcacctacacgtcaaaacactccgtcgaggtccaggtcaacgtgatgtctgagaatatactgactggagccaaaaaactaacaaataaggctacactgtggtacgtgcctctcagtctcaaaaacgtcgataaggttttggaagtgccccctgtggtttacagccgccaggagcaggaggaggaaggtaggaagagatacgaggcccagaagctcgagcgaatggagaccaaatggaggaatggagatatagtacagccagtgttgaaccctgaaccaaatacggtgagctacagccaatcatcattaattcatctcgttgggccatccgattgcacactgcacggtttcgtacacggaggcgtaactatgaagctgatggacgaggtcgccggaatagtcgccgccagacattgcaaaactaacatagtgacagcatccgtggacgccatcaattttcacgacaagatacgcaagggatgcgtcattaccatatccggaagaatgacatttacatcaaataaaagtatggagattgaagttcttgtggacgccgaccccgtcgtggatagctcccaaaagagataccgggcggcttctgcattctttacctacgttagtttgtcacaagaggggaggtccctcccagtgccacagctagttcctgaaaccgaggatgagaagaaacgcttcgaggagggaaaaggacgatatctgcagatgaaggcgaagcgacagggccatgccgagcctcagccttag

SEQ ID NO: 107154 - DNA, 990 bp, synthetic construct
  misc_feature 1..990: note = Description of Artificial Sequence: Synthetic coding sequence
  source 1..990: mol_type = other DNA
atggcgttccagctttcccgtataatgcggcccgacgacgccaatgtcgctgggaacgtacacggcggcactatcttaaaaatgatagaggaagccggggctataatatcaactagacattgcaatagtcagaatggtgagaggtgcgtcgccgctcttgcacgggtggaacgcaccgatttcttgtcgcccatgtgcatcggcgaagtcgcccacgtctctgctgaaattacgtatacctccaagcatagcgtggaagtgcaggtcaatgtcatgagcgaaaatattctcaccggagccaagaagctaacaaataaggctaccttgtggtacgttccactcagcttgaaaaacgtggataaggtgctggaggtcccaccagtcgtttattctcgacaggagcaggaagaggagggaaggaagagatacgaggcccagaaattggaacgtatggaaacgaaatggcgaaacggagatatcgtgcagcccgttctgaatcctgagccgaataccgtctcttatagtcagagctcactcattcacctcgtggggccctccgactgtaccctacacggattcgtacacggcggcgttactatgaagctcatggatgaggtggccggcatcgtggccgcccggcactgcaagactaacatcgtcacagcaagcgtggacgctatcaatttccatgacaaaattagaaaagggtgtgtgattactatctccggaagaatgacctttacaagcaataagagtatggagatcgaagtgctcgtggacgcagatccggtggtcgatagttcccagaaaagatacagagccgcttcagcctttttcacctacgtgtccctctcccaagaggggcggtccctgccggtgcctcagttagttcccgagacagaggatgaaaaaaaaagatttgaggagggcaaaggccgctatttgcaaatgaaagctaagcgacagggccacgccgaaccacagccatag

SEQ ID NO: 107155 - DNA, 1053 bp, synthetic construct
  misc_feature 1..1053: note = Description of Artificial Sequence: Synthetic coding sequence
  source 1..1053: mol_type = other DNA
atgctgctgctgcgtcggtcgctctctttgaatgtcctgcgtaaggaggttgaccgagcttgctttggtgaaaaagctaagcagattatgaggcccgatgatgctaatgtggcaggcaatgttcacggcggaaccatcctcaaaatgatcgaggaggcgggtgccatcatctcgaccagacactgtaattcacagaacggtgagaggtgcgtcgccgccctggccagagtggaacgaaccgactttctgtccccaatgtgtatcggggaagtagcccatgtgagcgccgaaatcacatacacatcaaagcattccgtggaggtgcaggtaaatgttatgtcagaaaatatcttgactggggccaaaaagctaactaacaaggctacactctggtatgttccactcagtctgaagaatgttgataaagtcttagaagtgcctcccgtggtgtactctcgacaagagcaggaagaagagggtaggaagaggtatgaagcacagaaactggaaaggatggaaaccaaatggaggaacggagacattgtacaacctgtcctgaacccagagcccaacactgtgtcttactctcagtcgagcctgatccatctggtcggcccaagtgattgtacattacacggctttgtgcatggtggggtcaccatgaaactgatggacgaagttgcaggcatagtggccgcccgacactgtaaaaccaatatcgtgaccgcttctgtggacgctattaatttccacgataagatccggaaaggctgcgttataaccatatctgggcgcatgacctttactagcaataagtccatggaaattgaggtgctcgtcgacgccgatcccgtggtcgacagtagtcagaagcggtaccgtgccgcgtctgctttctttacctatgtctcattgtcacaggagggcagaagcttacccgttccgcagctggtaccggaaactgaggacgaaaaaaaacggtttgaggaagggaaaggccgatacctgcagatgaaggcgaagcgccaagggcatgcggagccacagccgtag

SEQ ID NO: 107156 - DNA, 1143 bp, synthetic construct
  misc_feature 1..1143: note = Description of Artificial Sequence: Synthetic coding sequence
  source 1..1143: mol_type = other DNA
atgaaactgctggccagagcattgcgcctgtgtgaattcgggcgtcaggcgagctctaggagactagtcgcaggacagggttgcgttggccctcggagaggatgctgcgcgcctgtacaggtggttggtcccagagcggatttgcctccatgcggagcatgcattaccggccgcattatgcgacctgacgatgccaatgtcgcaggaaatgttcatggaggtactatacttaagatgatcgaggaggcaggtgctatcattagcaccagacactgcaactctcagaatggagagagatgcgtggccgcattggctagagtggaacgtactgattttctctccccgatgtgcattggcgaagtggcgcacgtatctgctgagatcacgtacacatctaagcattccgtagaggttcaagtaaatgtgatgagcgagaacatcctgactggagctaaaaaactaacaaataaggcgactctttggtatgtaccactctcgctcaaaaatgtggataaagtattagaggtacctcctgtcgtgtattcccgacaggaacaggaggaggaaggcaggaaaaggtatgaagcccagaagttggaacgcatggagacaaagtggcggaacggcgatatagtccagcctgttctcaatcccgaacccaacactgtgtcttactcccagagtagtctgatccaccttgtcggaccttctgattgtacacttcatggtttcgttcatggaggggttacaatgaaactcatggacgaggttgccgggatcgttgccgcccgacactgtaaaacaaacattgttacggcctccgtcgacgcaatcaactttcacgataagatcaggaaggggtgcgtcataactatctccggccggatgacgttcactagtaacaaatctatggagatagaggtgcttgtggacgccgatcccgttgtggactcttcacagaaaagatatcgtgctgcttccgcattcttcacttacgtctccctgtcacaagagggtaggtctctaccagtcccacagttggtgcctgaaacagaagatgagaagaagagattcgaagaaggaaagggaaggtatcttcagatgaaggccaaaaggcaaggtcacgcagaaccccagccttag

SEQ ID NO: 107157 - DNA, 672 bp, synthetic construct
  misc_feature 1..672: note = Description of Artificial Sequence: Synthetic coding sequence
  source 1..672: mol_type = other DNA
atgctgctgctacgacgatccctttcccttaatgtactgcggaaagaggtggaccgggcatgctttggagagaaggctaaacaaatcatgcgacccgatgacgctaacgttgccggcaacgtgcatgggggaactattctcaaaatgattgaggaagctggggccattatctccaccaggcactgcaacagccagaatggtgaacgatgcgtggccgcactggccagagtagagaggactgacttcctaagtcccatgtgcatcggtgaggttgctcatgtcagtgccgagataacctacacatctaaacacagtgtggaggttcaggtgaacgtgatgtccgaaaacatcctgacaggggcaaagaaactgacgaacaaagccaccctgtggtacgtccccttgtctctcaagaatgtcgataaagtactggaggtacctccagtggtctacagcagacaggaacaggaggaggagggacgcaagaggtacgaggcccagaaactcgagcgcatggagaccaaatggcggaacggcgacatagtgcagcccgtgcttaaccccgagccaaataccgtttcttattcacagagcagtctcatccaccttgtggggcccagcgattgtaccttgcatggatttgtgcatggcgggggggtcgatttccactag

SEQ ID NO: 107158 - DNA, 798 bp, synthetic construct
  misc_feature 1..798: note = Description of Artificial Sequence: Synthetic coding sequence
  source 1..798: mol_type = other DNA
atgtgcattggggaagttgcacatgttagtgccgaaatcacatatactagcaagcatagcgtggaggtccaggttaacgtaatgtcagaaaatattcttacaggagccaaaaagctgactaataaagctaccttgtggtatgtacccctcagccttaaaaacgtcgataaagttctcgaggtgccccccgttgtttattcccgtcaggaacaggaggaggagggtcgcaagaggtatgaagcgcagaagctcgagcggatggagactaagtggcggaatggcgacattgttcagccagtgcttaaccccgagccaaacacagtgagttattctcagtcctctctgattcacctagttgggccttccgattgtaccctgcacggctttgtacatggtggcgtgaccatgaaactgatggatgaagtcgcagggattgtcgccgcacggcattgcaagaccaacatcgttactgcctccgttgatgcaataaatttccatgataaaatccgcaagggatgcgtgattacaatctcgggaagaatgacgttcacctccaacaaatctatggagatagaagttctggtcgatgctgatccagtggtggattcatctcaaaaacgctacagagccgccagcgcattttttacctatgtgagtctctcccaggagggccgatctttgcctgtcccacagttggtaccagaaacagaggatgagaagaaacgattcgaggagggcaaaggccgctatctccagatgaaggccaaaagacaggggcacgcggaaccacagccctag

SEQ ID NO: 107159 - DNA, 1308 bp, synthetic construct
  misc_feature 1..1308: note = Description of Artificial Sequence: Synthetic coding sequence
  source 1..1308: mol_type = other DNA
atggccgcgcccctcgtgctggtgcttgtggtggctgtaacagtgcgcgcggccctcttcaggtcaagtctcgccgagttcatcagtgaaagggtggaggtggtgtcaccactgagttcttggaagagagtggtggagggcctctcccttctcgatttaggtgtatcgccatactccggagctgtgtttcatgaaaccccactaattatctaccttttccactttctaatcgactacgccgagctggtttttatgataactgatgccctgaccgcgatcgccctgtactttgccatccaggacttcaataaggtggtgttcaagaaacagaaactgttgctagagctggaccaatacgcacccgatgtcgctgaactgatccgcactccgatggagatgcggtatatacccttgaaggttgcgttattctatcttctgaatccctatacaatactttcgtgtgtcgcaaagagtacctgcgccatcaataatacgctgatagccttttttattctgactactattaaaggttcggcctttctgtctgctatcttcctggccctggccacataccaatctctttatccgttgacgctgtttgtgcccggactcctgtatctcctgcagcgtcagtatatcccagtcaagatgaagagcaaagccttctggatcttctcatgggagtacgctatgatgtatgtcggcagcttagtggttatcatttgtttgtccttcttcctattatcgagctgggacttcatccccgcagtgtatgggtttatcttgagcgtgcccgacctgacccccaatatagggctgttttggtactttttcgccgagatgttcgagcatttttccctgttctttgtttgcgttttccagatcaacgtcttcttctataccatcccgctggctatcaagctgaaggagcaccccattttcttcatgttcatccaaatcgccgttatcgcaatctttaagtcctatcctacagtcggagatgtcgcgttatatatggctttcttccctgtgtggaaccacctctacaggtttctacgcaacatcttcgtgttgacatgtatcattattgtgtgttctctgctctttcccgtgctctggcatctttggatttacgccgggagcgctaattcaaatttcttctatgccatcaccctcactttcaacgtcggtcagattctattaatcagtgattatttctacgcatttctgcgtagggagtactacttaactcacggcctgtacctgaccgctaaagacggaactgaggccatgctagtcctcaaatag

SEQ ID NO: 107160 - DNA, 342 bp, synthetic construct
  misc_feature 1..342: note = Description of Artificial Sequence: Synthetic coding sequence
  source 1..342: mol_type = other DNA
atgtcaagccctcaggccccagaggatggtcaggggtgtggagaccgaggggatccaccaggcgatctgcgatctgtgctcgtaactaccgtgctgaaccttgagcctctcgacgaggatctgtttcgcggacggcactactgggtccccgccaaacgacttttcggggggcagatcgttggccaagcgctcgttgccgccgcaaaatcagtgagtgaggacgtccatgttcatagtctgcattgttactttgtgcgggccgaacagatgccaagctgcgttttaaggcgctcgcccgccgaaaagagtctctggaccttcactgtgtgcgacttgtactag

SEQ ID NO: 107161 - DNA, 1320 bp, synthetic construct
  misc_feature 1..1320: note = Description of Artificial Sequence: Synthetic coding sequence
  source 1..1320: mol_type = other DNA
atgcggcgggccgcccttcgtctgtgcgccctcggcaagggacagcttacgcccggccggggtctgacccaaggcccacaaaaccccaaaaaacagggcatttttcacatccatgaggtcagggataagttgcgggagattgtgggagcgtcaacaaattggcgcgatcacgttaaggccatggaagagcgtaaattgcttcactcgttcttagccaagtctcaggacggcttgccccctcggcggatgaaggatagctacatagaagtgctccttcccctcgggtcagagcctgagctccgcgagaaatacctgactgtgcagaatacagttcggtttggaaggattctcgaggatttggacagtcttggcgttctgatctgctacatgcacaacaaaatacacagtgctaagatgtcccctctcagcatagtaaccgctttagtggacaaaattgatatgtgcaagaagagcttatccccagaacaggatattaaattttccggacatgtttcatgggtaggcaaaactagtatggaggtgaaaatgcagatgttccagctgcatggtgatgaattttgtccggtactggatgcaacgtttgtgatggtcgcacgggactcagagaacaaaggaccggccttcgtcaatccactgatcccggagtccccagaggaagaagaactcttcagacagggggaattgaacaaaggacgcaggatcgcctttagcagtactagcctactgaagatggcgccaagtgcggaggaacgtacaacgatccatgagatgtttttgagcaccctcgacccgaagaccatcagcttccgcagccgggtcttgccatcgaacgctgtgtggatggagaacagcaagctgaaaagtttggaaatctgtcaccctcaggaacgcaacatcttcaatcgtatatttggcggatttctgatgcggaaggcgtatgagttggcatgggccaccgcctgttcctttggtggttctcgcccttttgtggtggccgtcgacgatattatgttccagaagccggtggaggtgggctccttgctgtttctctcaagtcaagtttgttttacacagaataattatatccaggtaagagtgcacagtgaggttgcttctctgcaggaaaaacagcacaccacgacaaacgtgttccactttaccttcatgagcgagaaggaggtcccgctggtgttccccaagacgtatggagaaagtatgctctaccttgatggccagagacactttaatagtatgagcggtcccgccacattaagaaaagactacctcgttgagccctag

SEQ ID NO: 107162 - DNA, 1140 bp, synthetic construct
  misc_feature 1..1140: note = Description of Artificial Sequence: Synthetic coding sequence
  source 1..1140: mol_type = other DNA
atggaggaaagaaaactgctgcatagcttcctggctaaatcccaggacggccttccgcccaggcgcatgaaagattcctatattgaggttctgctgcctcttgggtctgaacccgagctgcgagagaaatacctgacggtgcagaacaccgtgcggtttggtcgaatcctggaagacttagattccttaggggtgcttatctgttacatgcacaataaaatccactccgccaagatgtcacccctttccatcgtcactgcactggtggataaaattgacatgtgtaaaaagagcctctcccctgagcaagatattaagtttagtggacatgtaagttgggtgggaaagaccagtatggaggtgaagatgcagatgtttcagcttcacggggatgagttctgccccgttctcgacgccacatttgtgatggtggcacgagattcagagaataaaggacctgcctttgtcaaccccctgatccctgaaagcccagaggaggaggaacttttccgacagggggagctgaataagggaaggcgcattgctttctctagtacctccctgttaaagatggccccttccgcggaggagagaaccaccattcacgaaatgttcctctcaaccctggatccaaaaacaatttcttttaggtctcgcgtacttccttccaatgctgtctggatggagaactccaagcttaagtccctagaaatttgccatccccaggaacgcaacatcttcaatcggattttcggtgggttcctgatgaggaaagcctatgaattggcatgggccactgcttgttctttcggagggtcacggccctttgtggtggccgtggacgatatcatgtttcagaagcctgtggaagttggatcacttttgttcctgtcctctcaggtctgttttactcagaataactatatccaggttagggtgcactctgaagtggcttctctgcaagaaaagcaacataccacaaccaatgttttccactttacatttatgagcgagaaagaggtgcccctcgtgtttccaaagacctacggggagagtatgctctatctcgacggccagaggcactttaattctatgagtggcccggcaacgttgcggaaggactacctggtggaaccatag

SEQ ID NO: 107163 - DNA, 1347 bp, synthetic construct
  misc_feature 1..1347: note = Description of Artificial Sequence: Synthetic coding sequence
  source 1..1347: mol_type = other DNA
atgagacgtgccgcgctgcggctctgtgcgctgggcaaaggccagctcacacctgggcgcgggctaacccagggaccacagaatcccaagaaacaggggattttccacattcacgaggcctgtagttcaatacatgtcaaccacgtgagagataagctaagagaaatcgtgggtgccagcactaactggcgggaccacgtgaaagcaatggaagagaggaaactgttgcacagtttcctggcaaaaagccaggacggactgcctcctaggcgcatgaaggattcttatatcgaggtccttctcccactcggaagtgagccagaacttcgggaaaaataccttaccgttcagaatacagtcagattcggtcggatactggaggacttggacagcttgggtgttctcatttgctacatgcacaacaagatccattctgccaaaatgtctcccttgtctatcgttactgcactggtggataagatcgacatgtgtaagaagtccctatcgcccgaacaggatatcaagttcagcggacacgtcagctgggtgggtaagacatccatggaagtaaagatgcaaatgttccagttgcatggagacgaattctgccctgtgttggatgctaccttcgtaatggtagcacgcgacagtgaaaataagggtccagcttttgtgaacccattgatcccagagagccctgaagaagaggagctgtttcggcagggtgagctaaataagggacggcgtatagcgttctcgtctacctcgttgctgaagatggctcccagtgccgaggagagaactaccattcatgagatgttcctgtctacactggatccaaagaccatatctttcagatccagggtgttaccctcaaacgctgtttggatggagaattcaaaactgaaatctctcgaaatatgtcaccctcaggagcgtaacattttcaatcggatttttgggggtttcctcatgcgcaaggcctatgaactcgcctgggctacagcctgctctttcgggggatcacggccttttgtggtcgcagtcgatgatatcatgtttcaaaagccagtggaagtggggtccctcctcttcttaagtagccaggtttgctttacacaaaacaattatatccaggtgcgggtgcacagtgaggtagcgagtctccaggagaaacagcatacaaccactaatgttttccattttactttcatgtcagaaaaagaggtcccacttgtgtttcccaagacgtacggcgagtcaatgttgtacctcgacggtcagagacattttaactccatgtccggtcccgctactctgcggaaggactatctagtagagccatag

SEQ ID NO: 107164 - DNA, 1269 bp, synthetic construct
  misc_feature 1..1269: note = Description of Artificial Sequence: Synthetic coding sequence
  source 1..1269: mol_type = other DNA
atgacggtttttttcaagacactccgcaatcattggaaaaagaccaccgcgggcctgtgcctgctaacctggggaggccattggctatacggcaagcactgtgataacctcctgaggcgtgctgcctgccaagaggctcaagtgttcgggaaccagctgatcccccccaacgcccaagtcaagaaggccaccgtttttctaaacccggccgcttgtaagggcaaggcaagaactttgtttgagaagaatgcagcccccattctgcatttgagcggaatggacgtgaccattgtgaaaacagattatgaaggacaggccaagaaattactggagctgatggagaatacagatgtgattatcgtcgcaggcggtgatgggaccctgcaagaggttgtgacaggagtcctaaggcgcactgatgaggccaccttcagtaagattcccattggtttcatccctctgggggagacgtcaagcctgagccacacactgttcgccgagagcggcaacaaggtgcagcacattaccgacgctactctagcaatcgtcaaaggggaaacagtaccgctggatgtgctgcaaatcaaaggcgaaaaggagcagcctgtgtttgcgatgactgggctccggtgggggtcatttcgcgatgctggcgtgaaagttagtaagtactggtacttaggcccgctgaaaatcaaggcagcccacttcttttccaccctaaaggagtggcctcagacccaccaggccagcatcagctatactggcccaacagagcggcctcctaacgagccagaggagacacctgtgcagcggccttctttgtaccgcaggatcttgcggaggttagcaagttattgggcccagcctcaagacgcattgagtcaggaagtttctcctgaagtatggaaagacgtgcagctgtctacaattgaactgtctatcaccacgcgcaataaccagctggacccaacttctaaagaggacttcctcaatatttgtatcgagcctgatacaatctctaaaggcgactttatcaccattggctctcgaaaggtacgtaacccgaagttgcatgtggaaggcactgaatgcctccaggcttcacagtgtactctactgattcctgagggtgctggaggatcattctcgatagacagtgaggagtacgaagccatgccagtcgaagttaaactgctacctaggaagctgcagtttttctgcgacccccgaaagcgggagcagatgctgacgtctcccacccagtag

SEQ ID NO: 107165 - DNA, 198 bp, synthetic construct
  misc_feature 1..198: note = Description of Artificial Sequence: Synthetic coding sequence
  source 1..198: mol_type = other DNA
atgaccgtattctttaaaacccttagaaaccactggaaaaagaccacagccggcctttgcctgctgacctggggagggcactggctctacggcaagcactgcgacaatctactgcgccgtgctgcctgtcaggaggctcaacactaccaggacgagtcacggtgggaacccactctgtccagaaccccgggaagctag

SEQ ID NO: 107166 - DNA, 198 bp, synthetic construct
  misc_feature 1..198: note = Description of Artificial Sequence: Synthetic coding sequence
  source 1..198: mol_type = other DNA
atgacagtctttttcaagaccctgcgcaaccactggaagaagacaacagctggcctctgcctgcttacatggggcggccactggctatacggcaagcattgtgataacttgctgcgaagagccgcgtgccaggaggcacagcactaccaagacgagagccgttgggaacccaccttgtctagaactccaggaagttag

SEQ ID NO: 107167 - DNA, 735 bp, synthetic construct
  misc_feature 1..735: note = Description of Artificial Sequence: Synthetic coding sequence
  source 1..735: mol_type = other DNA
atgactgtattttttaagacactacgaaaccactggaaaaagacgacagccggcctttgcctccttacttgggggggtcattggctctatgggaaacactgcgacaatcttctgcgacgagccgcctgccaggaagctcaggtgtttggtaatcagctgatcccaccgaatgcccaggttaagaaagctacagtgtttctgaatcccgcagcttgcaaggggacattgttcgagaagaatgccgcccccattctgcacctttctggcatggatgttacaatagtcaagacggattatgaaggccaggccaaaaagttactggaattgatggagaatacagacgttattattgtggccggaggcgacggaaccctgcaggaggtcgtaacaggcgtactgcgcagaacagacgaggctactttttctaaaatacccataggctttattccattaggagaaacttcatcattgagtcacaccctcttcgctgaatccggcaataaagtgcagcatatcactgacgccactctagccatcgtcaagggcgagaccgtgcccctcgacgttctgcagattaaaggagagaaggaacaacccgtttttgccatgacaggtctcagatggggcagcttcagggacgcgggtgtcaaagtaagcaagtactggtatcttggtcctctaaagatcaaggctgcacactttttctcgactcttaagccctttcctaaaagatag

SEQ ID NO: 107168 - DNA, 1728 bp, synthetic construct
  misc_feature 1..1728: note = Description of Artificial Sequence: Synthetic coding sequence
  source 1..1728: mol_type = other DNA
atgcagtccccgtggaagattttgactgtcgctcccttattccttctgttgagtcttcaatcctccgcatccccagctaatgacgatcagagcaggccctcactttctaacgggcacacctgcgtgggatgtgtgctggtggtatcggttatcgagcagctggcccaggtacataacagcacggtgcaggccagcatggagcgattatgctcctatttacctgagaagctctttctaaaaactacatgttacctggtgattgacaaattcgggtctgacattataaaacttctgagcgctgacatgaacgccgatgttgtctgccatacccttgaattttgcaagcagaacaccggtcaacccctctgtcatctgtaccccctgccgaaggagacctggaaattcaccctccaaaaagcccgacaaatcgtgaagaaaagcccaatactgaaatactctagatctggcagcgatatctgctccctgccagtgctggccaagatatgtcagaagatcaaactggccatggagcagagcgtgccttttaaagatgtcgacagcgataaatatagcgtgttccccaccctgcggggatatcactggcgcggcagggattgcaacgatagtgacgagtctgtttaccccgggaggaggccgaataactgggatgtgcaccaggacagtaattgcaacgggatctggggtgtggatccaaaggatggagtcccttacgaaaaaaagttctgcgaaggtagccagcctcggggcattatcctacttggggactctgcgggcgctcacttccacatcagccctgagtggattacggcgagccagatgagtctgaattcatttataaatctacctacagctctgacgaacgaactcgattggcctcagctaagcggagcaaccggttttctcgattccacagtgggcattaaggaaaaatccatctatctgcgcctctggaagcggaatcattgtaaccatagagactaccagaacatttcaaggaatggcgcatcgagtcgaaatctaaagaaatttattgagtcactcagcaggaataaggtgttagactacccagcaatagtgatctatgccatgataggaaacgacgtgtgtagtggcaaatcagacccagtgcccgcaatgactacacccgagaaactgtactcgaatgtgatgcaaactctgaaacatctgaattcacatctccccaatggaagccacgtcattctttatggactccctgatgggacattcttgtgggataacttacataacaggtatcaccccttgggccagttgaataaggacatgacatacgctcagctgtattcttttttgaattgcctccaggtatctccttgccatgggtggatgagctccaataagaccttacggaccttaacctccgaaagggcagagcagctgtctaatacacttaaaaagattgcagcttctgaaaagttcactaattttaatctattctatatggacttcgcctttcatgaaatcatacaagagtggcaaaagaggggtgggcaaccatggcagctgatcgaacccgtcgatggcttccatcccaacgaggttgctctactgttactcgccgaccatttctggaagaaagtgcagctgcagtggccacagatactcggcaaggagaatccgtttaaccctcagataaaacaagtgtttggggatcagggggggcattag

SEQ ID NO: 107169 - DNA, 1632 bp, synthetic construct
  misc_feature 1..1632: note = Description of Artificial Sequence: Synthetic coding sequence
  source 1..1632: mol_type = other DNA
atgcagtctccgtggaaaatccttacagtggcccccctcttcctacttctgtcgttgcaatcatctgccagtcctgcgaatgacgatcagtcccggccaagtctgagcaatggacatacctgcgtggagaagctctttctgaagacaacctgctatttggtgattgataagtttgggtccgacatcattaagctgttgtccgctgatatgaatgctgacgtagtgtgccatacactggagttttgtaagcagaatacaggacagccactgtgtcacctgtatcctcttcccaaggagacctggaaatttaccctccaaaaagctagacaaattgttaaaaagagtccgatcctcaagtactcccggtctggctctgatatctgttcacttcctgtcctggccaagatatgtcagaagatcaagcttgctatggaacagagcgtaccgttcaaagacgtggattctgataagtatagtgtgtttcctactctgcgggggtaccattggcggggacgtgactgtaatgactctgacgagtcggtgtatccaggacgccgaccgaacaactgggatgtgcaccaggactctaactgtaacggtatctggggtgtggaccccaaagatggagttccttatgaaaaaaagttctgcgagggatcacaaccgcgaggtatcattctgctgggcgactcggcgggagctcatttccatatcagccccgaatggatcaccgcctctcagatgagcctaaactcattcataaatctgcccaccgctctcaccaacgaactcgattggcctcagctatctggtgccacagggttcttggatagtaccgtagggatcaaggaaaaaagcatatacttgagactgtggaagcgcaatcactgcaaccaccgcgactatcaaaacatcagccgcaatggtgcttctagccggaaccttaaaaagttcatcgagtcgctgtcaaggaataaagtcttggattaccctgctatagtgatctatgctatgatcgggaacgatgtgtgcagcgggaagtctgaccccgtccctgcaatgacaactccagagaagttgtatagcaacgtaatgcagaccctgaagcacctcaacagccatctgcccaatggaagtcacgttattctttatgggctacctgatggtactttcctgtgggacaatcttcataacagataccaccctttgggccagctcaacaaggacatgacttatgctcagctatacagttttctaaactgcctacaggtcagcccatgtcacgggtggatgagctcgaacaagacactgcggaccctgactagcgaaagagcagagcagctcagtaatacattaaagaagatcgccgcgagcgagaaattcaccaatttcaacttgttctatatggacttcgcttttcatgagatcattcaggaatggcagaagcgtggcggacagccatggcaacttattgagccggtggacggattccacccaaacgaggtggcactactcctgctcgctgaccacttttggaaaaaggtccagctgcaatggcctcagatccttggaaaggagaaccctttcaacccccaaattaagcaggtgttcggtgatcagggcggtcattag

SEQ ID NO: 107170 - DNA, 894 bp, synthetic construct
  misc_feature 1..894: note = Description of Artificial Sequence: Synthetic coding sequence
  source 1..894: mol_type = other DNA
atgaagctgaaaaattcattcatcaacctgcctacagcactgactaacgagcttgactggcctcaactgtcaggagctactggattcttagactcaaccgtgggaattaaggaaaagtccatttacttgcgtctgtggaagcggaaccattgtaaccaccgcgattaccagaatattagtagaaacggggcttcatccaggaatctcaaaaaatttatcgagtcgctctctaggaacaaagtgctggactaccccgcaatcgtcatttacgcgatgatcggaaatgacgtgtgctccggcaaatcagaccccgtgccagcaatgactacccctgaaaaactttattcaaatgtgatgcagactttaaaacacctcaactcccacctgcctaatgggtcacacgtgatactgtacggactgcccgacggtacttttctgtgggacaatctgcataaccgatatcacccgttaggccagctaaacaaggatatgacttacgcacagctatactcctttttgaactgcctacaagtcagcccgtgccatggttggatgtcctctaataagacactacggacacttacctcagagagggcagaacagctctcaaatacactgaagaagatcgcagcatcagagaaattcacgaatttcaatctgttttatatggacttcgccttccacgagattatccaggaatggcaaaagaggggagggcagccatggcaactgatcgagccagtggatgggttccacccgaatgaagttgccctgcttctcttggccgaccacttttggaagaaggtgcaactgcagtggccccaaattttgggcaaggaaaatccgtttaacccccagatcaagcaggtattcggcgaccaaggaggccactag

SEQ ID NO: 107171 - DNA, 2061 bp, synthetic construct
  misc_feature 1..2061: note = Description of Artificial Sequence: Synthetic coding sequence
  source 1..2061: mol_type = other DNA
atgcagagcccgtggaaaattctcactgttgcacccctctttctgctgctgagtctgcagagctccgcgagtcctgccaacgacgaccaatcccgaccctccttaagcaatggacacacatgcgttggttgtgtcctcgttgtatcggtgattgagcaactggcacaggtccataactcaacggtccaggcttctatggaaagattgtgcagctatcttccagaaaaactgtttctaaaaaccacttgctacctggttattgacaagtttggcagcgatattataaaactcctgagcgcagacatgaatgcagacgtggtatgtcatactctcgagttctgcaaacaaaacacaggccagcccctatgccacctgtatccgctccccaaagaaacgtggaaattcactttgcaaaaggccagacaaatcgttaaaaagtccccaattctcaaatactcccgctcaggaagcgacatctgctctctgcctgtgctagccaaaatctgccagaagattaagctcgcaatggaacaatccgtgcccttcaaagacgtagattcagataagtacagtgtgtttcctacactgcggggttatcactggcgcggacgggattgcaatgactcggatgagtccgtttacccaggccgtagacccaataattgggatgtgcaccaagactccaactgcaacgggatttggggtgtcgacccaaaagacggtgtcccctatgaaaagaaattctgtgagggatcccaacctcgcggtatcatactgctgggagatagtgccggagctcacttccatatctctcctgaatggattacggcgagtcagatgagtttgaattctttcatcaatttgccaacagcacttacaaatgagttggactggccacagctgagcggggctaccggcttcctcgattccaccgtagggattaaggaaaagtctatctacctacgcctgtggaagcgcaaccattgtaaccatagggactatcagaacatcagccggaatggcgcaagcagccgaaacctcaagaagtttatcgagtctctgtccaggaataaggtcttagattaccccgccatagtgatatacgcaatgattggtaatgacgtttgcagcggaaagagcgaccctgtgccagctatgacaacaccagagaagctgtactctaacgtgatgcagacactcaaacatcttaattcccatcttcctaatggctcccatgtgattctgtacggcctacctgatggaacctttctctgggacaacctccacaacagatatcaccctttgggccagctcaacaaagacatgacttatgctcagctctacagttttctgaattgtcttcaggtgagcccatgccacgggtggatgtcctcaaacaagacactgaggaccttgaccagtgagcgggctgaacaactatctaataccctgaagaaaatcgccgcaagcgagaagttcacaaattttaatctcttttatatggatttcgccttccacgagataattcaggagtggcaaaagcggggcggtcagccttggcaactgatcgagccagttgatggctttcatcctaacgagaggaaaagcatcctgctgaaggggattctgatgactagccagaccctcgataatcaggagtggacccagcttacctcttggattaaggggaacctgacctgcgacagccgtacgcgggagtggctgtgctgttgttggagaatcatttctggaaaaaggtgctcgagtagtggccccaaatcatgggagcgcagaatcagaagcacacctcggcttaaccgatgtctcgagactaaggccggaacagaaccgttgcgtagcatgcatccatggggcgcccagggtggcaggggcctcggcaagctgatcccgcagctgtggggactgccacgtcatagacccaagggactttttttctcttcaatcttcaagtgcttgtcacttaatgaagagcacatttggacaactgtgcagtgttgcgtgttgcctggatcagtgacgctcccactgttcctgaagtag

SEQ ID NO: 107172 - DNA, 1992 bp, synthetic construct
  misc_feature 1..1992: note = Description of Artificial Sequence: Synthetic coding sequence
  source 1..1992: mol_type = other DNA
atgcagagtccttggaaaatcctgactgtggccccccttttcctgctcctctccctccaatctagtgcctcccccgctaacgatgatcagtccagaccctccctgtccaatgggcatacctgcgtgggctgcgtcctggtcgtgagcgtaattgagcagctggctcaagtgcataactcaaccgtgcaggctagcatggagcggctctgcagttatctccccgaaaagctgttcctcaaaacaacatgctacctcgtcatcgacaagtttgggagtgacatcatcaaattgctgtcggccgacatgaacgctgacgtggtgtgccacaccttggaattctgcaagcaaaatacaggccaaccgctgtgccacctctacccgctccctaaggagacgtggaaatttacactgcagaaggccaggcagatcgtgaaaaaatctccaatccttaaatactcccgcagtgggtccgacatctgttctctgccagtgctggccaagatctgtcaaaaaatcaagctggccatggagcaatccgtgccttttaaagatgtagactccgacaagtatagcgtcttccccacccttagggggtatcactggcgcggcagagactgcaatgattcagacgagagcgtgtatcctggtaggaggccaaataactgggacgtccaccaagattcaaattgtaacggaatctggggcgtcgacccaaaggacggagtgccttacgaaaaaaagttttgtgaaggctcacagccacgtggcatcatattgctgggcgactcggcaggagcccatttccacattagccctgagtggatcactgccagtcaaatgagccttaactcctttattaacttacccacagccctgactaacgaactggactggcctcagctgtctggagcaacgggcttcctcgatagcacagttgggattaaagaaaaaagcatttacctcaggctgtggaagagaaaccactgcaatcatcgggactaccagaacatcagtcggaacggcgcatcatcgcgcaatctgaagaaatttatcgaaagtctcagcagaaataaggtcctggactaccctgccatcgtgatttacgccatgatcggcaatgatgtgtgcagcggaaaatctgatcctgtgcccgccatgaccactcctgagaagctctactcaaatgtgatgcagacactgaaacatttgaactcccacctgcccaacggatcacacgtgattctgtatggactgcccgacgggaccttcctctgggataatttgcataacaggtaccatcccctcggtcaattgaataaagacatgacctacgcacagttgtactcatttctgaattgcctccaggtctctccatgtcacggctggatgtctagtaacaagacactgaggactctcaccagtgaacgagccgaacagctgtctaataccctgaagaaaattgcagccagtgaaaagttcacgaacttcaacctgttttatatggactttgcattccacgagattattcaggagtggcagaaaagaggcgggcagccctggcaactcatcgaaccggttgatggcttccaccccaatgaacggaagagtatcctgctcaaaggaatactgatgacctcccagaccctggataatcaggagtggacccagctgactagctggattaaggggaacctgacgtgcgattcgagaacccgggaatggttatgttgttgttggcgtatcatttccgggaaaaggtgctcctcctccggccctaaatcttgggaaaggcggatccgtagtacaccccggctgaacagatgtttggagacaaaggccggcaccgagcctttgcgcagtatgcacccatggggagctcaggggggaagggggctgggtaagctgatcccccaaccttacggcggatgccacgtcacaggcccaaaggattctagttccgccgccagtctacaaatgagcttttcccagtag

SEQ ID NO: 107173 - DNA, 300 bp, synthetic construct
  misc_feature 1..300: note = Description of Artificial Sequence: Synthetic coding sequence
  source 1..300: mol_type = other DNA
atggctgagggaaacacccttattagcgtagactacgagatctttgggaaggtgcagggtgtcttctttcgtaaacacactcaggctgaagggaagaagctaggtttagtcggctgggtgcaaaacacagatcgaggcacagttcagggacagctgcaggggcccatctcaaaggtcaggcacatgcaggagtggttggaaacaaggggaagcccaaaatcccatattgataaagcaaacttcaacaacgaaaaggtgatactcaagctggactactctgactttcaaattgtgaaatag

SEQ ID NO: 107174 - DNA, 168 bp, synthetic construct
  misc_feature 1..168: note = Description of Artificial Sequence: Synthetic coding sequence
  source 1..168: mol_type = other DNA
atggccgagggtaatactctgatctccgtggactacgagatatttggaaaggtacagggggtgttcttcagaaaacatacccaggagatgacagtggagaaccgcatagctgagacacacagtaagtcctgcgtcccagtgagttttgcaacctcttatgccggctag

SEQ ID NO: 107175 - DNA, 300 bp, synthetic construct
  misc_feature 1..300: note = Description of Artificial Sequence: Synthetic coding sequence
  source 1..300: mol_type = other DNA
atggccgagggcaacaccctcatttccgtggactatgagatattcgggaaggtgcaaggagtgtttttccgcaagcatacgcaggctgaaggaaaaaaattaggcctcgtcgggtgggtgcagaataccgaccgcgggaccgtccagggtcagttgcagggaccgatcagtaaagttcgccacatgcaggaatggcttgagaccagaggctctcccaaatcccatattgataaagcaaacttcaataacgagaaggtgattctgaaactggattatagcgattttcagatcgtaaagtag

SEQ ID NO: 107176 - DNA, 300 bp, synthetic construct
  misc_feature 1..300: note = Description of Artificial Sequence: Synthetic coding sequence
  source 1..300: mol_type = other DNA
atgtctactgctcaaagtctgaaaagcgtcgattatgaagtttttggcagagtgcagggtgtgtgctttaggatgtacactgaagacgaagctagaaaaatcggagtggtggggtgggtgaaaaatactagcaagggcactgtgaccggccaggtgcaggggccagaggataaggtgaactctatgaaaagctggctgagtaaggtcggatccccatcaagtcgcattgataggaccaacttcagcaacgagaagaccattagcaagctggagtactccaacttctctattaggtattag

SEQ ID NO: 107177 - DNA, 294 bp, synthetic construct
  misc_feature 1..294: note = Description of Artificial Sequence: Synthetic coding sequence
  source 1..294: mol_type = other DNA
atgtgccctctgcccttggccgctgcagcagttgcagcccctagagcaccactgaggcttctcaatcgaggtctcgccgcagctatgagcaccgcacagagccttaagtctgtagactatgaggtcttcggccgggtgcagggcgtgtgtttcagaatgtatactgaggatgaagccaggaagatcggagttgtcggttgggttaaaaatacgtcaaagggtactgtgaccgggcaggtgcaaggcccagaggacaaagtgaattcaatgctggaatgtagtggcttgatttag

SEQ ID NO: 107178 - DNA, 2247 bp, synthetic construct
  misc_feature 1..2247: note = Description of Artificial Sequence: Synthetic coding sequence
  source 1..2247: mol_type = other DNA
atggtgttgctgagagtgttaatcctgttgctcagctgggctgcggggatgggcggtcagtacgggaaccccctgaataaatatatccgacactacgaaggtctgtcctataacgtggacagtctgcatcaaaaacaccagcgggcaaagcgcgctgtgtctcacgaagaccagttccttagactagacttccacgctcatggtcgacactttaacctccgcatgaagcgagacactagcctttttagcgacgagtttaaagtggagacctccaataaagttcttgattacgatacttcacacatttatacaggccacatctacggagaggaggggtctttctcgcacggtagcgttatcgacgggcgcttcgagggctttatacagacaagaggtggcaccttttacgtggagcccgcagaacgttacatcaaagatcggacacttcccttccactccgttatctaccatgaggatgatatcaactatccccacaagtatggcccacagggggggtgcgctgatcacagtgtgttcgagaggatgcgcaagtatcagatgactggtgtagaagaagtgactcagattccgcaagaagaacatgccgccaacggacccgagttattgaggaagaaaagaacaacatctgccgaaaagaacacctgtcaactgtacatacagaccgatcatttattcttcaaatactatgggacacgcgaagctgttatcgcacaaatcagttctcatgtgaaagcaatcgacacaatctaccagactactgacttttcaggaattaggaacatctcttttatggttaaacgcattagaatcaatacaactgcagacgaaaaagaccccacaaatcccttccggttccccaacattggggtggagaaattcctggaacttaactcagagcaaaaccacgacgactattgcctcgcgtacgtgtttaccgatcgcgacttcgacgacggcgtgcttggtctggcctgggtaggggccccctctggcagctcagggggaatatgtgagaaatccaaactctactccgatggcaaaaagaaatccctaaacaccggcattattacagtccaaaactacgggagccatgttccccctaaggtcagccacataacattcgcccatgaggtcggccataactttggatctccgcatgatagcgggaccgagtgcacccccggagagtcaaagaatctgggccagaaagagaatggcaactatatcatgtacgctagggctacctcaggagacaaactcaacaacaacaaattctccctctgttctatacgtaacatcagccaggtactggagaaaaagagaaacaattgtttcgtagagagcggtcagcccatctgcgggaacggcatggtagagcagggcgaggagtgtgattgtggatacagtgatcagtgcaaggacgagtgttgctttgacgcaaaccagcccgagggccgaaagtgtaaactgaaacccggtaaacagtgtagtccgtcgcaggggccctgttgcacagcgcagtgtgccttcaagtcgaaatctgagaaatgccgggatgactctgactgtgcaagagagggcatatgtaatggctttactgccctgtgtcccgccagcgatccgaagcctaacttcacagactgtaaccgtcacactcaggtgtgtatcaacgggcagtgcgccggctccatctgcgagaaatacggactagaggagtgcacttgcgctagcagtgatggaaaagacgataaggaactgtgtcacgtctgttgcatgaagaagatggacccatcaacctgcgcgagtacaggttcggttcagtggagtaggcatttcagcggcaggaccattacgttacaaccaggatctccgtgcaacgacttccgtggctactgtgacgtcttcatgcgttgtcgcttggtcgatgcagacggccccctcgcacgcctcaagaaagccattttttcaccggagctatacgagaatatcgctgagtggatcgtggcccattggtgggcagtgctcctgatgggaattgcactgatcatgctgatggccgggttcatcaagatttgttccgttcacaccccatctagcaacccgaagctgcctcctcccaagcctctgcccggcacgctgaagagaaggaggcccccacagccaatccaacagcctcagaggcagcgcccaagagagtcttatcagatgggccacatgagacggtag

SEQ ID NO: 107179 - DNA, 1344 bp, synthetic construct
  misc_feature 1..1344: note = Description of Artificial Sequence: Synthetic coding sequence
  source 1..1344: mol_type = other DNA
atggtactcttacgggtattaatcctgcttctatcttgggccgctgggatgggtgaccgggacttcgatgatggcgtgctcggcctcgcctgggtaggcgctccttccggttctagtggcggcatatgcgaaaaaagcaaactgtacagtgatggcaaaaagaagagccttaacactggcattatcacagtgcaaaactacgggtcccatgttccgcccaaagtgagccacataacattcgcccatgaagtgggccataatttcggttctcctcacgatagcggcacggagtgcacaccaggggaatcaaaaaatttgggacagaaagagaatgggaattacatcatgtacgcaagagcgacaagtggcgacaaactaaacaataacaaattctctctctgttctatcaggaatattagtcaggtcttggagaaaaagcgaaataactgctttgtggagagtgggcagcctatctgcgggaacggcatggtcgagcagggtgaggaatgcgactgcggatacagcgatcaatgcaaggatgagtgttgctttgacgctaatcagccagaaggtcgcaagtgcaagctgaaaccaggcaaacagtgctcgccgagccagggcccgtgctgcactgctcagtgcgctttcaagtctaagtctgagaagtgccgagacgacagtgactgcgcaagggagggaatttgtaacggctttacggccctctgcccagcctccgatcctaagcctaacttcacagattgcaaccggcatacccaggtctgcattaatggacagtgtgcagggagcatctgcgagaagtatggattggaggaatgcacctgtgcatccagcgatggcaaagatgataaagaactgtgccatgtctgttgtatgaaaaaaatggatccttccacatgtgccagtaccggatctgtccagtggagccgtcacttttcgggtagaaccattactctgcagccaggaagtccatgtaatgacttccggggctattgtgacgtgtttatgcgctgccgactagtggacgccgatggcccactggcccgcctaaaaaaggcgatcttttcacctgagctctacgagaacatcgcggagtggatcgttgcccattggtgggccgtgctattgatgggtattgcattaataatgctgatggccggcttcattaaaatctgctctgtgcacactcctagtagcaatccaaaactccctccccccaagccgctccccggaacactgaagagacgaagaccacctcagccgatacagcagccgcaaagacagagaccccgggaatcttatcagatgggtcacatgcgtcgatag

SEQ ID NO: 107180 - DNA, 2310 bp, synthetic construct
  misc_feature 1..2310: note = Description of Artificial Sequence: Synthetic coding sequence
  source 1..2310: mol_type = other DNA
atgaggctcttgcggaggtgggctttcgctgctctcttactgtctttattgccaaccccaggactagggacccaggggcctgccggcgccttgcgatggggcggcctgccacagcttggcggtcccggcgctccagaggtgaccgaaccctctagattagttagggagtcttcgggaggtgaggtgagaaaacagcagctggataccagagtgcggcaggagcccccaggaggcccccctgtgcacttggctcaggtgtcttttgtgatccccgcatttaactcaaatttcacattggatctcgagctcaaccatcacttgctttcaagccaatacgtcgagcgtcatttcagccgcgagggaactactcagcactcaacaggcgcaggagaccactgctactatcagggcaaactgaggggcaatccacattcgtttgccgccctgtccacttgccaaggcctgcatggggtcttcagtgatggcaacctgacctacatcgtagagccgcaggaggttgcgggaccatggggtgcccctcagggccctttgccgcacttgatctaccgcactcctctgctccccgatcccttgggctgcagagagcccggctgcttattcgctgtgcccgctcaatcagcgccgcctaataggccccggctcagaagaaaaagacaagtacgacgcggtcaccctaccgtgcacagcgaaactaaatacgtagagcttattgtgattaatgatcaccagctgttcgaacaaatgaggcaatcggtggtgctgacatcgaacttcgcgaagtcagtggtgaacctggcagacgtgatttacaaggagcagctgaacactcgtatcgtgctggttgccatggaaacatgggctgatggagacaagatccaggttcaagacgatcttctagagacactggcacgactcatggtgtacagaagagaaggcctgccagagccatctgatgcgacccacctgttttcagggaggaccttccagagtactagctccggcgccgcgtatgtcggcggcatttgcagtctgagtcatggcgggggcgtcaatgagtacggtaatatgggagctatggctgtgaccttggcacaaacgctgggccagaatctgggtatgatgtggaacaagcacaggtcaagcgccggagattgtaaatgccctgatatttggcttggttgcatcatggaggacacgggtttctatctgcctcgtaagtttagtcggtgcagtatcgatgagtacaaccaatttctgcaggaaggtggcggttcttgtctatttaataaacccctgaagctactggatccccccgaatgtggaaatggatttgtagaagcaggagaggagtgcgactgtggcagtgtgcaggagtgctcccgcgccggaggtaactgctgtaaaaagtgtacactgacacatgacgccatgtgcagtgacgggctgtgctgccgacgatgcaaatatgaaccaagaggcgtgtcctgtcgcgaggccgtgaacgagtgcgatatcgccgagacatgtacgggcgattcatcccagtgtccccctaatcttcacaagctcgacggctattactgtgaccacgagcaaggacgctgttacggaggaagatgtaagacgagagacagacagtgccaggtgctgtggggccacgctgctgccgaccggttctgttatgaaaagcttaacgttgaagggactgaacgcggttcctgcgggcgcaaaggctcagggtgggtgcagtgcagtaagcaagacgtgctgtgcggcttcctgctctgtgtgaatatctccggcgccccaagactgggggaccttgtgggggatatctccagcgttacattctatcatcagggcaaagagcttgactgtcgggggggccacgtacagctggccgacgggtccgacctgagttacgtggaagatggcacggcttgtggccccaacatgctctgtctggatcacaggtgcttaccagccagtgccttcaactttagcacctgtcccggttcaggcgagagaagaatttgtagccaccatggcgtatgctcaaatgagggaaaatgtatctgccagccagattggaccgggaaagactgcagcatccataaccccctgcccacttcacccccaaccggtgagacagagcgctataaaggcccctctggaacaaacatcattatcggctctatcgccggggccgttctggtggctgcgatcgtcctgggcggcacgggttgggggtttaagaacatccggagaggaaggagtggaggggcctag

SEQ ID NO: 107181 - DNA, 1572 bp, synthetic construct
  misc_feature 1..1572: note = Description of Artificial Sequence: Synthetic coding sequence
  source 1..1572: mol_type = other DNA
tgctggggaagtggccacctgttgtcatcacagtatgtggagcgccatttctcccgggaggggacaacccaacattccacaggggccggggatcactgctattaccaaggtaagctgcgcgggaatccccattctttcgccgccctgagcacctgccagggccttcacggtgtcttctccgatggcaatctgacttacattgtggaaccacaagaggtggccgggccttggggcgccccgcagggcccgctccctcaccttatctacaggacaccacttctgcctgatccattgggatgccgggagcccggctgtctgttcgctgtgcccgcacagagtgctccacccaacaggcctagactgcggcgcaagcgccaagttcggcgtggtcaccctactgtacatagcgaaaccaagtacgttgagctgatcgtcatcaatgatcaccaactgtttgagcagatgcgacagtctgtggttctgacttccaacttcgcaaaatccgtggtgaacctcgccgatgttatatataaggaacagctcaatacaaggatagtgttggtcgctatggaaacctgggctgatggcgacaagatacaggtgcaggacgacctgctggagaccctagccaggctgatggtgtaccggcgggaagggttgcctgaaccctccgacgccacccatctgttcagcggccgcacgtttcagtctaccagctctggggccgcctacgtcggtggtatctgcagtctgagccacggcggcggggtaaacgaatacggtaacatgggtgctatggcggtgacattagcgcagactctggggcaaaacctcggcatgatgtggaataaacatagatctagcgctggggactgtaaatgtccagatatatggttaggttgtatcatggaggatacaggattctatctcccacgcaagttttccagatgttctatcgatgaatataaccagttcctgcaggaaggaggcggaagttgcctgttcaacaaacccctcaaactgttagatccacccgagtgtggaaacgggttcgtggaagcaggggaagaatgtgactgcgggagtgttcaggagtgttcacgggctggtggcaactgctgtaagaaatgtactctcacacacgatgcgatgtgctccgatgggctctgctgccgccgttgtaagtacgagccacgcggcgtgtcatgccgggaagcagtgaacgaatgcgacatagcggagacctgtactggagacagcagccagtgccctccaaacctacataaactggatggctattattgcgatcatgagcagggcaggtgctatggcggacgatgcaagacaagagatcgacagtgccaagtcctatggggccacgctgctgccgacagattctgctacgagaaactgaacgtggagggcaccgaaaggggcagttgcggacggaaaggttctgggtgggtccagtgcagcaaacagccccaacaggggagggccgtgtggctaccgccactgtgccagcacttatggagctcaagcgctagggggcccggcggccgtcatcagtag

SEQ ID NO: 107182 - DNA, 1710 bp, synthetic construct
  misc_feature 1..1710: note = Description of Artificial Sequence: Synthetic coding sequence
  source 1..1710: mol_type = other DNA
atgcaagggaccaggcttcctgtatgctgcgcctgtccagtcggaagcagcaagccggcagaagccgaaaaggaaaaagttcgtagagggcacccgacagtccattctgagactaagtacgttgagctgatcgtgatcaatgatcaccagcttttcgagcagatgcgccagtccgtcgtacttaccagcaactttgccaagtccgtggtgaacttggccgacgtcatatacaaggaacagttgaacactcgtatcgtcctcgtggctatggagacttgggccgacggagacaagatccaggtgcaggacgacttactggagacgctcgcacgcctgatggtctataggagggaggggctaccagagccctccgatgcaacacacttattttcgggacgcacgttccagtctacaagttctggcgccgcctacgttggcggcatctgctcattgagccacggaggtggcgtaaacgagtacgggaatatgggggccatggccgttactttggcacagactctgggccagaatctgggtatgatgtggaataagcatcggagtagtgcaggggactgtaaatgtcctgacatctggctgggctgtatcatggaggacactggattctacctccctaggaaattttcccgttgttccatagacgagtacaaccagttcctccaggagggtggcggctcttgccttttcaacaagcctctgaaactcctcgatccacccgagtgcggcaatgggttcgttgaagctggcgaagagtgcgactgcggctcggtccaggagtgctcacgtgctgggggcaactgttgcaaaaagtgcactttaacgcatgatgctatgtgcagtgatggcctctgctgcagacgatgcaaatacgagccgaggggggtatcttgtcgggaagctgtaaacgagtgcgacatcgccgagacctgtacaggggactcatctcaatgtccaccaaacctacataaactggacggctactactgtgatcacgaacaaggcaggtgctacggggggagatgcaaaacgagggacaggcagtgtcaggtactgtggggacacgcggccgccgatcggttctgttatgagaaactgaatgttgagggtacagaacggggctcttgtggcagaaagggaagcggctgggtgcaatgctcaaaacaagacgtcttatgcggatttcttctgtgcgtgaatatcagcggcgccccaagactgggagatcttgttggcgatatttcttcagtaaccttttaccaccaaggcaaggaactagactgccgtgggggtcatgtacaacttgcagacggcagtgacttgagctacgtagaggacggtactgcctgtgggccaaacatgctctgccttgaccatcggtgccttccagcatccgcattcaatttttctacatgccccggtagcggggaaaggcggatctgttctcatcatggagtctgctctaatgaagggaagtgcatatgccagcccgactggaccgggaaggactgcagcatccataaccctctgccgaccagtccgcccaccggggagacagagcgctacaagggaccgtctggaaccaatattatcatcgggtcaattgctggggccgtgctggttgcagccattgtcctgggaggcactggttgggggtttaaaaacattcgaagaggcagaagtggcggggcgtag

SEQ ID NO: 107183 - DNA, 2217 bp, synthetic construct
  misc_feature 1..2217: note = Description of Artificial Sequence: Synthetic coding sequence
  source 1..2217: mol_type = other DNA
atggctgccagaccactgcccgtgtcacctgctagggcgttgctgcttgccttggccggggcattattggccccctgtgaggccaggggtgtgagcctctggaaccagggcagagctgacgaagtggtcagtgcctctgtggggagcggtgacctgtggatcccagtcaagagcttcgatagcaagaaccatcccgaagtattgaatattagacttcaacgggagagtaaggagctgattatcaacttggagcgaaacgaggggctgatcgcatcctcctttacagagacccactatctgcaggatggcaccgatgtgtccctggcccgtaactacacagtgatcctagggcactgctactaccacggtcatgtacgcggttactctgattccgccgtgagcctgtccacatgttctggccttaggggactgatcgtgtttgaaaatgagtcatatgtactggagccaatgaaaagtgccaccaacagatataagcttttcccagccaagaaactcaagagcgttcgtgggtcatgtgggtctcaccacaatactcctaatctggccgccaagaacgtgtttcccccaccaagtcaaacttgggcacgtagacataagagagagaccctgaaagcaaccaaatatgtggaattggtgatagtggcagacaatcgggaatttcaaagacagggcaaagacctggaaaaggtcaaacaacgtctgatcgaaatagccaatcatgtcgataaattctaccgcccattgaatatacgcattgtgctggtgggagtggaggtgtggaacgacatggacaaatgtagcgtgagccaggatccatttactagcctgcatgagtttcttgactggagaaagatgaaactgctgccaaggaagtcacacgataatgctcagctggttagcggagtatattttcaaggcaccaccatcgggatggccccaatcatgagtatgtgtaccgccgaccagtctggaggaatagtgatggaccactcggacaaccccctaggcgccgctgtgacactcgcccacgagctaggacataacttcggtatgaatcacgatacattagataggggctgttcttgccaaatggccgtcgagaagggggggtgcatcatgaacgcatcaacaggatacccttttccaatggtgttctcctcctgctccagaaaggaccttgaaaccagtctggagaaaggaatgggggtctgtctgtttaatctgcccgaggttagagaatcatttgggggacagaagtgtggaaatagatttgttgaggaaggcgaagaatgtgactgcggggagccagaggagtgcatgaatcggtgttgcaacgccactacttgcacactcaagccagacgctgtgtgcgctcatggcctttgttgcgaagattgtcagctcaaacccgccggtaccgcttgcagggatagcagcaattcgtgtgacttgccagaattctgtaccggggcttctccccattgccccgccaatgtgtatctccatgacggccactcgtgccaagatgtcgacgggtattgctataatggcatatgtcagactcacgagcagcagtgcgtaacactgtggggacccggcgctaaacccgcccccggtatttgttttgagcgtgttaactctgcaggggacccatatggaaattgcggcaaagtcagcaagagctcattcgctaaatgtgaaatgcgcgacgccaaatgcggcaagattcagtgtcagggcggggcttccagacccgtgatcggcactaatgcagtgtcaatcgaaacaaacattcctttacagcagggcggccgcatcctttgtagggggacccacgtgtatttaggagatgatatgccggaccccggattggtccttgccggcacgaaatgtgccgatggcaaaatatgcctgaaccgccaatgccaaaacatttcagtttttggcgtgcacgagtgtgccatgcaatgccacggaagaggcgtttgcaataaccgcaagaactgtcattgcgaagcacattgggcgcctccattctgcgataaatttggctttgggggctcaacagattctggccccatcagacaagccgaggcacgacaagaggccgccgaatctaatcgcgagcgcggtcagggacaggagccagttggatcgcaagagcatgccagcaccgcttctctcacccttatctag

SEQ ID NO: 107184 - DNA, 2730 bp, synthetic construct
  misc_feature 1..2730: note = Description of Artificial Sequence: Synthetic coding sequence
  source 1..2730: mol_type = other DNA
atggctgcgagacctctgccagtgagccccgcccgtgctctgcttcttgctctcgctggggcacttctggctccttgcgaggccagaggagtatccctttggaatcagggaagagcagatgaggttgtaagcgccagcgttggtagcggggacctctggattcccgtgaaaagcttcgacagcaagaaccacccggaagtattaaacattcgcctgcagagggagtctaaagaactgataatcaatctcgagcggaacgaaggcttgattgcgtcatcctttactgaaacacactacctgcaggatgggactgatgtgtcacttgctcggaattatactgtcatcctgggtcactgctattatcacggacatgtccggggctactcagactccgccgtttccctaagtacctgctctggcctgcgaggtctcattgtgtttgagaacgaaagctacgttttagaacctatgaagtctgcaacaaatcggtacaaattattcccagctaagaaactcaagtctgtgagaggaagttgtggtagtcatcacaacactcctaacctcgccgctaaaaacgtgttccccccccccagtcaaacatgggctcggcgtcacaagagggagacgttgaaggccactaagtacgtagagctagtcattgtcgccgacaatcgcgaattccaacgtcaggggaaggacttggaaaaggtaaagcagcggcttatcgaaatcgcaaaccacgtggataagttttaccgccctttgaacattcgcatcgtgctcgtgggagtggaagtgtggaatgatatggacaagtgttccgtctcacaggatcctttcacctccctgcatgagtttctggattggaggaagatgaagctcctgccccgcaaatcacatgacaacgcgcaactagtaagcggcgtttactttcagggtacaactatcggtatggccccaataatgtccatgtgtaccgccgaccagagcggcgggattgtgatggatcatagcgataatccgttgggggcggcagtgacattagcacatgaactgggtcacaacttcggcatgaatcacgacaccctggaccgagggtgctcttgtcaaatggccgtggagaagggagggtgcataatgaacgcctccacaggctacccattccctatggtcttctcctcgtgctcacgcaaagatctcgagacttccctggaaaagggcatgggcgtatgccttttcaaccttccggaagtgagggagtctttcggcggccagaaatgcggtaacagattcgtggaggaaggggaagaatgtgactgcggcgagcctgaggagtgtatgaataggtgctgtaacgccacaacttgcaccttaaaacctgatgcagtgtgcgcgcatgggctttgttgcgaagattgtcagttgaagccagctgggactgcatgccgcgactccagtaactcctgcgatctgcccgagttttgtacgggtgccagcccccactgtcccgccaacgtgtaccttcatgacggtcatagttgccaggacgtagatggatactgctataacggtatttgccagacacatgagcaacagtgtgtcaccctgtggggtccgggtgccaaaccagcccccggaatctgtttcgagcgcgtcaattcggccggcgatccctacggtaactgcggcaaggtgtcaaagagttccttcgctaagtgcgaaatgagagatgctaagtgtggaaaaatccagtgccaggggggagcgagcaggccggtgataggcaccaacgcggtatccattgaaactaatatcccgcttcagcagggtggcagaatcttatgtagggggacacacgtatacctgggggatgacatgcctgatcctggtcttgtcttggcggggaccaagtgtgccgatggcaaaatttgtctgaatcgacagtgccagaatatctctgtctttggagtccatgaatgtgctatgcagtgccatggacgcggtgtatgcaataaccggaagaactgccactgtgaggcgcattgggcacctcctttctgtgataagtttggctttgggggaagtactgacagcggcccgatcagacaagccgataatcaggggttgaccataggcattctcgtcaccattctgtgcctgctggctgcaggcttcgtggtctatctaaagcggaagactcttatccggctactctttactaacaagaaaacaacaatagaaaagctcaggtgcgtgaggccaagtaggcccccacgcgggtttcagccatgtcaggcacacctgggccacctcggcaagggcctcatgaggaaaccaccagacagctaccctcccaaagacaatcctcgcagattgttgcagtgtcaaaacgtcgatatatccagaccacttaacgggctcaacgttccacaaccccaatccacgcagcgtgtgctcccacccctgcatcgagcaccccgcgcgccaagtgtcccagcccggcccctgccagctaagcccgctcttcgccaggcacaggggacgtgcaaaccgaatcctccgcagaaacccttaccggccgatcccctcgcccgcacaacaagactcacgcacgccctagcccgtaccccaggtcaatgggagacagggcttcgactcgctcctctgaggcctgctcctcagtacccacatcaggttcctcggagcacccatacagcatacattaaatag

SEQ ID NO: 107185 - DNA, 837 bp, synthetic construct
  misc_feature 1..837: note = Description of Artificial Sequence: Synthetic coding sequence
  source 1..837: mol_type = other DNA
atggcagcccgccccctcccagtgagtcccgcaagagctctgttattagctctcgcaggcgctttgttagcaccttgtgaggctagaggagtctcattatggaaccagggtcgagccgacgaagtggtttctgcgtccgtgggatcaggtgatctgtggatcccagtgaaaagtttcgactctaaaaaccacccagaagtcctaaacatccggctgcaaagagaatcaaaggagttaattattaacttagagcggaatgagggactcatagcctcctcgtttaccgagactcactatcttcaggacgggaccgacgtgtctcttgcgcgcaactatacggggcattgctactatcacggacacgtgaggggctacagcgactcggctgtgtctctctctacctgttcaggtcttcgaggcctcattgtgttcgaaaacgagtcttatgtgcttgaacccatgaagtcagccacgaatcgttataagcttttccctgctaagaaattgaagtctgttagaggctcatgcggatcccaccataacactccaaacctagctgctaagaatgttttccctcccccgagtcagacctgggcacgaaggcataaaagagagacgctcaaggccacaaagtatgtggagctcgttatcgtcgccgataaccgagagttccagcggcaaggaaaggacctggaaaaagtcaagcagcgcttaattgagattgccaaccatgtggacaagttctatagacctctgaacataaggatagtcctggtgggcgtggaagtctggaacgacatggataagtgttccgtctctcaggacccgttcacgtag

SEQ ID NO: 107186 - DNA, 2445 bp, synthetic construct
  misc_feature 1..2445: note = Description of Artificial Sequence: Synthetic coding sequence
  source 1..2445: mol_type = other DNA
atgagactggcacttttatgggccctgggcttgcttggcgctggatcaccgttaccctcatggcccctccccaacatcggtggaaccgaggagcagcaggcagaatccgaaaaggcacctagagaacccctggaaccacaggttctgcaggacgacttgccgatttctctcaaaaaggtccttcagacatccctgcccgagccacttaggatcaaactagagctcgatggggactctcatatcctggaactcttacagaacagggaactcgtgcccgggcggccaacattagtatggtaccagccagacgggacgcgggtggtaagtgagggccataccctggagaactgctgctatcaaggaagagtgaggggttacgcaggcagctgggtgtctatttgtacgtgctccggtctgagggggcttgttgtactgacccctgagcgatcctacacccttgagcagggacccggtgatttgcaagggcccccaatcatcagcaggatccaagatctccacctgcctggacacacatgcgcactatcctggcgggagagcgtacacacacagaagccccccgaacaccccctggggcagcgtcacatccggcggagacgtgacgtggtgactgagacaaagacagtcgaacttgtcatagtggccgaccatagtgaggcccagaaatatcgggatttccagcacctgttaaatagaacactcgaggtggccctgctgctggatacatttttccggcctctgaacgtgcgagtagccctagtgggcctggaggcatggacccaaagagacctagtcgagatttctcccaatccagctgtaacacttgaaaacttccttcactggcgacgcgcccatctcctccctcgcctgccacatgatagtgcccagctggttaccggaacttcattctctgggccaactgttggaatggctatccagaacagcatatgttctcccgatttctccggaggtgtgaacatggaccacagcacatcaatcctgggagtggcttcttctattgcccatgaactggggcatagcttgggccttgatcacgacctacctggtaattcctgcccctgtcccgggcctgcaccagccaagacatgcatcatggaggcaagtaccgattttctgccaggcctcaatttttcaaactgtagccgacgcgccctggagaaggcattactggacggcatgggctcttgcctgttcgaacggctgccgtccctcccacccatggccgcgttttgcgggaacatgtttgtggagccaggtgagcagtgtgactgcggattcctggatgactgcgtggacccctgttgcgacagcctgacctgtcagcttagacccggggcccagtgtgcatctgacggtccctgctgtcaaaattgccaactgcgtccttcgggatggcagtgtagaccaaccaggggtgactgcgatctgcccgagttctgccctggtgactcatcgcaatgtccccccgatgtgtcactcggcgacggcgaaccatgtgccggcggccaggctgtctgcatgcatggaagatgcgcctcatatgcgcagcagtgtcagtccttatggggacctggagctcaacccgcagctcctctctgtctgcaaaccgcgaatactagggggaatgcgtttgggagctgcggaaggaatccaagcggcagttacgtgtcatgtaccccaagggacgctatttgtggccagctgcagtgtcagacaggcagaacacagccccttctcggtagcatccgtgacttactgtgggagacaatcgatgtgaatggtaccgagctgaattgcagctgggtgcatctcgatttggggtccgatgttgcacaacctctcctcaccctgcctggtaccgcttgtgggcctggactggtctgcattgaccatagatgccaacgggtggatctccttggcgcccaggaatgccgaagcaaatgccacgggcacggcgtctgtgatagcaacaggcactgttattgcgaggaaggctgggcgccccccgattgcactacccagctcaaggccacatcctcactcactacggggctcctgctgtcactgctcgttttgctagtgctggtaatgttaggcgcaagttactggtatcgagccagactgcaccagcggctctgccagttgaaaggtcccacatgccaataccgggctgcccaatcagggccatcagaacggcccggccctccacagagagccctgctggcaagaggcacaaagtcccagggcccagccaagcccccaccgcccaggaagcctttgcccgcagatccgcaagggcgctgcccaagtggagacctccctggaccaggagcgggcataccgcccctcgtagtaccatcccgacccgcccctcccccgccaaccgtctcttctctatatctctag

SEQ ID NO: 107187 - DNA, 2520 bp, synthetic construct
  misc_feature 1..2520: note = Description of Artificial Sequence: Synthetic coding sequence
  source 1..2520: mol_type = other DNA
atgaggctggcactcctgtgggcactaggcctacttggtgccggcagccctctgccgtcatggcctttgcccaacattggggggactgaggaacagcaggccgagagtgaaaaggccccgagggaacctctagaaccacaagtcctgcaggacgatcttccaataagtcttaagaaggtgctgcaaactagcctcccagagccactgagaatcaaactcgaactagacggggattctcatattctggaactcctacagaacagagaacttgttccaggacggccgaccctcgtgtggtatcagcctgatgggacgagagtggtatctgaagggcacacacttgagaattgttgctaccaaggcagggttcggggctacgcaggatcctgggtctctatctgtacctgttcaggactcagagggctcgtagtcctcaccccagagaggtcttataccctggagcagggacctggcgatcttcagggcccccccatcattagcaggattcaggacttacacttacctggacatacatgcgctctgtcctggagggaatcagtacacactcaaaagcccccggaacatcctctgggacagcgtcatattcgtcgccgacgcgatgtggtgacagagaccaaaacggtggaactggtgattgtagccgatcacagcgaggcgcagaaatacagggatttccagcacctcctcaatagaacgttagaggtagcactgctcctagatactttcttcagacctttaaacgtcagagtcgccctggttggcctagaggcatggacccagcgggaccttgtggagatttctcccaacccggcagtaactctggaaaactttctccactggcggcgtgcccatctcctgccgcggctccctcacgattctgcgcagctcgtgacaggcacttccttcagtggtcccactgtcgggatggctatccagaactctatctgctccccagatttcagcggtggagtgaatatggatcattctactagtatcctcggcgtggcaagctccattgcgcacgagctcggccactccctagggctggaccacgatctccccggaaactcgtgtccatgtcccggccctgcgccggccaagacctgcatcatggaagcctcaaccgacttcctgccgggactgaacttcagcaattgcagccgccgtgctctggaaaaagctctgttggacggcatggggtcatgcctgtttgaaagattgccaagtctgcctccaatggctgccttttgcggtaacatgtttgttgaaccgggagaacagtgcgactgcggatttttagatgactgcgtagacccttgttgtgacagtcttacatgccagctgagaccaggcgctcagtgtgccagtgacggcccatgctgtcagaactgtcaattaagaccatccggatggcaatgccgacctaccagaggggactgcgacttgcccgagttctgtcccggtgatagctcccagtgccctccagatgtgtcccttggcgatggcgagccctgcgccggcggacaggcagtttgtatgcacggccggtgcgcgtcttatgctcagcagtgccaatcactctggggccccggtgcccagccagcggccccactctgtctgcaaaccgcaaacacccgtgggaacgccttcggcagttgcggaagaaatccttccggaagctatgtctcttgcaccccccgggacgcgatatgcggccaactgcagtgtcaaacaggcagaacccagcccctgctcggcagcatcagggatctgctgtgggagactatcgacgtgaacggcaccgagttgaattgtagctgggtccacttggatctaggaagtgacgtggctcagccactattaactctgccagggaccgcgtgtggacctggattggtgtgtatcgatcaccgatgccagcgcgtggatctgcttggagcccaggaatgcaggtcaaaatgtcatgggcacggtgtgtgcgatagcaatagacattgttattgtgaggaggggtgggccccgccggattgcactactcagctgaaggctacctctagccttaccaccgggctcctcttgagccttctagtgctgctggtcctggtgatgctaggcgctagctactggtaccgggctcgattacatcagaggctgtgtcaactgaagggtcccacatgtcagtacagggcagcccagtctggtccatccgaaagaccggggcctccacagcgcgccctgctggcaaggggcaccaagcaagcttccgccttaagctttcccgcacctcctagcagacctcttccccccgatcctgtgagtaaacggctgcagtcccaggggcctgcaaaacccccgccgcctcgcaaaccactaccggccgacccccagggccgctgccccagcggagaccttccaggccccggcgccggcataccaccattagttgttcccagccgccccgcccctccgcctccgactgtgagttccttgtacttgtag

SEQ ID NO: 107188 - DNA, 2592 bp, synthetic construct
  misc_feature 1..2592: note = Description of Artificial Sequence: Synthetic coding sequence
  source 1..2592: mol_type = other DNA
atgcgtcttgctctgctctgggcattgggcctgttgggtgccggttcaccgctgccaagctggccgctcccaaacatcggcggaacagaggaacaacaagcagaatcggaaaaagcaccccgagaaccccttgaaccccaggtgttgcaggatgacttgccaatctcactcaagaaagtcctgcaaacttctctaccagagccgctccgtattaagctcgagctcgatggggactctcatatcttagagctgttgcagaaccgtgagctggtcccaggacgcccgaccttggtctggtaccagccagatggcacccgggtggtttccgagggccatactctggagaactgctgctatcagggacgcgtccgaggttacgctggctcctgggtgagcatttgcacctgcagcggcctccgagggcttgtggtgcttacacctgaacgatcctacaccctggaacaggggccgggcgatctgcagggtcctcctattatctcgcggatccaggatcttcatctgccaggtcatacttgcgctttgagctggagagagtccgtccacacccagaagccacccgagcatccactggggcagcgacatataagaagacgtagggacgtggtcaccgagaccaagacagttgagcttgtaattgttgccgaccatagcgaggcccagaagtatcgagacttccagcatttgctaaatcggaccctcgaagttgcgctcctcttggatacattttttcggccactcaatgtaagggtcgccctggtgggcttggaggcctggacccagcgggatttggtggaaatatcccctaatcccgcagtaaccctggaaaattttcttcattggagacgtgcccacctcttaccacgcctcccacatgattctgcacagcttgtgaccggcacttctttttcaggaccgacagtcgggatggctatccaaaactctatttgctcacccgatttctccgggggcgttaacatggaccattcaacgagtattctgggggtggcctcttctatagcccacgaactgggacatagcttagggctggaccacgacttgcccgggaactcatgcccttgtccagggcccgcccctgctaaaacgtgcattatggaggcctcgaccgactttttacctggtttaaatttttccaactgcagtagaagggcgctcgaaaaggccctgctggacggtatgggctcctgtctcttcgagcggttgccttcactgcctccaatggcggccttctgtgggaatatgtttgtggagcctggcgagcagtgcgactgcgggttcctggacgactgtgtagatccctgttgtgattcgctaacatgccaactgcgtccaggcgcccagtgcgcctcggatgggccctgctgccagaattgtcagttgaggccttccgggtggcagtgtcggccgacccggggcgattgtgatctgcctgaattctgccctggagatagcagtcagtgcccgcctgatgtatcgctgggcgacggtgaaccttgtgccggagggcaggccgtttgcatgcatgggaggtgtgcgtcctacgcacagcagtgtcagtcactgtggggccctggagcccaacccgcagcccctctgtgcctacaaaccgccaacactcgaggaaacgcatttggtagctgcgggagaaacccgtcaggttcttatgtgtcctgtacacctagagatgctatctgtgggcagctccagtgtcagaccggccgcactcaacctctgctcggtagcatccgcgatctcctttgggagaccattgatgtgaatggaactgagctgaattgctcttgggtccatctcgatctggggtcagacgtggcccagcctttgttgacactgcccgggacagcatgcggccctggactcgtgtgtattgaccacaggtgccagcgggttgatctgttgggagcccaagaatgccgttccaaatgtcacggtcacggcgtttgtgatagtaacaggcactgttactgcgaagagggatgggctccccctgactgcaccacacagctgaaagccacatcatccctgactactggcctgttgctgtccttactggtactcctggttttagtcatgctcggggcatcttattggtatcgtgccagattgcaccagagactatgccagctcaagggacccacatgccaataccgggctgcccagagcgggccgagcgaaaggccaggcccacctcagagagcgttgctcgcgagaggaactaagcaggcctctgccctgtccttccccgcccctcccagcaggccactgccaccggacccagtgagtaaacgcctgcaagctgagttggcggaccggcctaacccccctaccaggcctcttcccgctgacccagtggttcggtcccctaagtctcagggtcccgccaagcctccccccccccgcaagcctctgccagccgatcctcaggggaggtgcccaagtggggacctgcctggcccgggagctggtattccgccattggtcgtgccctccagaccggcccctccccctccaacagtttccagtctgtatctatag

SEQ ID NO: 107189 - DNA, 2517 bp, synthetic construct
  misc_feature 1..2517: note = Description of Artificial Sequence: Synthetic coding sequence
  source 1..2517: mol_type = other DNA
atgcggctggccctgctgtgggccctagggctgctgggcgctggcagcccactcccctcctggcctcttcctaacattggtggaaccgaggagcagcaagccgagtctgagaaggcccctcgcgaacctctggagcctcaggtgctgcaggacgatcttcctatctcactgaaaaaagtgctgcagacttccctgcccgagccacttcgcataaagctcgaactggacggtgactctcacattttggaattgctccagaacagggaactggtgcctggcaggcctaccctggtttggtatcaacccgatgggaccagggtcgtgagcgagggccacactctggagaactgctgttaccagggtcgagttcgaggatacgcagggagttgggtgtcgatttgcacctgctcaggcttgagagggctggtggtcctgacaccagagagatcttacacccttgagcagggacctggcgacttgcaggggccccctattatctctagaatccaggatctccacttacctggtcatacgtgcgctttgtcatggcgtgagtccgtgcatacccagaagcctcccgagcaccccttgggacaacgacatatccgccgaaggagagacgtggttactgagacaaaaaccgtggagctggtcatagtcgccgatcacagcgaagctcagaagtatcgcgatttccagcacctgctgaacaggacactcgaggtcgccctcctattggataccttctttagacccctgaatgtgcgggtcgcattagtcggcctggaagcatggactcagagggacctggtcgagattagccccaaccccgcagttacattggagaattttcttcattggcggagagcacacctgttaccccggctcccccatgactcggcccagttggtgacagggacttctttcagcggcccgaccgtagggatggcgattcaaaatagtatatgttctccggattttagcggtggggtcaacatggaccatagcacaagtatcctgggcgtggcgtcctcaatagcccacgagcttgggcatagcctggggctagaccacgacctcccgggcaacagctgtccctgtcctggaccagctcctgcaaaaacttgcatcatggaggcatcaactgacttcctcccgggactgaatttctccaattgttctcgtcgggccttggagaaagctctcttggatggcatgggctcttgtctcttcgaacggttgccgagcctgccccctatggccgccttctgcgggaatatgtttgtggaacccggggagcagtgcgactgtggcttcctggacgactgcgtcgacccatgctgtgacagcctgacttgccagttgcgaccaggggctcagtgcgctagcgacgggccctgctgccagaactgccagctgcgacccagtgggtggcagtgtcgaccaacccgcggggactgcgacctcccggagttctgtcctggcgattcatcccagtgtccacccgacgttagcttgggtgacggggaaccttgcgccggcggccaggcagtttgtatgcacggacgctgtgcctcatatgcacagcaatgtcaaagcctatggggccctggagcccagcccgccgccccattgtgcctgcaaactgcgaatactagaggtaatgccttcggcagttgcggccgaaatccctcaggcagttacgtctcttgtactccgcgtgacgccatttgcgggcaacttcagtgtcaaacgggacggacccagcctctgcttggtagcattagggatttgctgtgggagaccatcgacgttaacggcacggagttaaattgctcctgggtccacttagatctgggaagcgacgttgctcagcctctccttacgctacctggcacagcctgtggccccggtttagtctgcatagaccataggtgtcaaagggtggatctgctcggtgctcaggaatgccgatcaaagtgccatggccacggggtgtgcgactccaatcggcattgctactgcgaggaggggtgggctcctccggactgtacgacacagctgaaagcgaccagctcactcaccacagggctgcttctgagcttgctagtactgcttgtactggttatgctcggggcctcctactggtatcgggcccgcctgcaccagagactgtgccagttgaagggtcctacctgtcagtatcgcgcagcccagtccggcccctccgagaggcccggacccccacagcgcgcccttctggcgcgaggcacgaaagcagaactcgccgaccggcccaacccccccacccgacctctgcccgctgatcccgtcgtacggagccctaaatcacagggccccgcgaaaccacctcctccacgcaagcccctgccggccgacccccaaggccgctgtccaagtggtgatctgccaggcccgggggccgggattcctccactcgttgtgccttcccgacccgccccacctccaccaactgtttcgagcttatacctgtag

SEQ ID NO: 107190 - DNA, 2319 bp, synthetic construct
  misc_feature 1..2319: note = Description of Artificial Sequence: Synthetic coding sequence
  source 1..2319: mol_type = other DNA
atgcgactcgctctcttgtgggcccttggtctgctgggcgccggttcccctctcccctcttggcccctgcccaacatcggcggcacagaggagcaacaggccgaaagtgagaaggcccctcgagaacccttagagccacaggtgcttcaggatgatttgcctattagcctgaaaaaagtgctgcaaacgtctttacctgaaccactgcggatcaaactagagttggatggcgacagccacatcctcgaattgcttcagaaccgagaactcgtgccgggccggccaaccttggtttggtatcagcctgatggcacgcgcgtggtctccgaaggccatacgctggaaaactgctgctaccaggggagggtcagaggttatgccggatcatgggtttccatttgcacatgcagtggcctccgcggtcttgttgttctcacaccagagcgctcctacacactagaacagggaccgggagatctccagggaccacctattatatctcggatacaagatttacatctaccgggccacacctgcgccctgagctggcgggagtctgtccatactcaaaagccccccgagcatcctctgggccaacggcatattcggaggagacgtgatgtggtcactgagactaaaactgttgagttggtcatcgtagcagatcacagtgaggcccagaagtacagggactttcagcacctactgaatagaaccctcgaagtcgctctgctgctagacacctttttccggccgctcaatgtgagggtggctctggtcggcctggaggcctggacgcagagagatttggtagaaatctcaccgaaccccgccgtgacccttgagaacttcctccactggcgacgggctcatctcctaccacggctgccccatgatagtgcacaactggttaccggaaccagctttagtggtccaaccgtgggcatggccattcaaaactcgatctgctcccccgatttcagtggaggagtgaacatggatcactctacttccattctaggagtggcctcatcaatcgcccacgaactgggacactctttgggattggatcacgacctgcccgggaattcatgtccctgtccgggtcctgccccagcgaagacctgtatcatggaggcatctactgattttttacccggtctcaacttctctaactgctctcgaagggcccttgaaaaagccctgctcgacggaatggggagctgtttgttcgagaggctaccctctttgccacctatggccgccttttgtggaaatatgttcgttgagccaggcgaacagtgtgactgcggtttcttggacgactgcgtggacccgtgttgcgatagtttaacatgccagctgaggcctggggcacagtgtgcctctgatggtccgtgctgccagaactgtcaactcaggccctcaggttggcagtgccgacccacccgcggagattgcgacctacccgagttttgtcccggtgattcgagccagtgtccacccgacgtctcgctgggggatggcgaaccttgcgcggggggccaggccgtctgtatgcatggaagatgtgcatcatatgctcaacagtgccaatctctatggggaccaggcgcgcagcctgccgcgcctctgtgcttgcagactgccaacacaagagggaatgcctttggaagttgtggcagaaacccatccgggtcctatgtcagctgcacaccaagggacgccatctgtgggcagctacagtgccagactggccgcacgcaaccactcctcggcagcatacgagatctcctgtgggaaacaatcgatgtgaacggcaccgagctgaactgcagttgggtccacttggatcttggctctgatgtggcccaaccgctgctgacacttcccggcacagcatgtgggccaggtctggtgtgtatagatcataggtgccaacgggttgatctgctgggcgctcaggagtgtagaagtaagtgtcacggccacggtgtttgcgatagcaaccgtcattgctattgtgaggaaggctgggcccctcccgattgcaccactcagctgaaggctacttcgagtctgaccactggcctgctcctttctctgctcgtgctactggtgttggttatgctgggcgcgtcttattggtaccgtgctcggttacaccagagattgtgtcaactcaaagggcctacgtgtcagtactcacttcgcggccaaccttcaccccacccacaggggagccattgcctgcccaccccacgggcaggcgcacatagagtgacatgccccgcacagggactggaatcaagaccctag

SEQ ID NO: 107191 - DNA, 1563 bp, synthetic construct
  misc_feature 1..1563: note = Description of Artificial Sequence: Synthetic coding sequence
  source 1..1563: mol_type = other DNA
atgcgtctcgcccttctttgggccctgggcttactgggagccggctctccactcccttcttggcctctgcccaacattggcggaaccgaagagcagcaggcggagtccgagaaggctccccgcgagcctctcgagccccaggttctgcaagatgacttgcctatttcactcaagaaagtgttgcagacctccttaccagaaccattgagaatcaaactggaactcgacggcgactcgcacatcctcgagttgctccagaaccgctcctttcttcccggcttgaactttagtaactgcagcaggcgggcactggagaaagcattgcttgacggaatggggtcctgtctatttgagcggctgcctagtctccctcctatggctgcattctgcggcaacatgtttgtcgagccaggggagcagtgtgattgcggattcttagacgactgtgtggacccatgctgcgacagcctaacctgtcagcttcggccaggagctcagtgcgcctccgatggcccctgttgccagaattgtcaactgaggccctccgggtggcaatgccgacccacacgtggcgactgcgatttacctgagttttgtcctggagactcaagtcagtgtccacctgatgtgtctctcggcgatggcgagccctgcgctggtggccaagccgtgtgcatgcacggaaggtgtgcctcctacgcccagcagtgccagtcactctgggggcctggagctcagccagccgcccccttatgcttgcaaaccgctaacacccgcggcaacgccttcggttcttgcggcagaaacccttccggcagctacgtaagctgtacgccccgggacgctatttgtggacaactccagtgccaaacaggcagaactcagccactactgggatccataagagatctgctgtgggagaccatcgatgtcaatgggactgaacttaactgttcatgggtgcacctggatttgggatctgacgtcgcccagcccttgctgacccttccaggtactgcctgcggcccaggccttgtgtgcatcgaccatcgctgccagcgtgtcgatttattaggggcccaggagtgcagaagcaagtgccatggacatggtgtttgtgactccaacagacattgttactgcgaggaggggtgggcaccccccgattgtaccactcaattaaaagccacgagtagcctaactacaggacttcttctgagcttactggtccttctcgtgcttgtgatgctgggagcatcctattggtacagggccaggctgcatcagcgactatgtcagctgaaaggccccacttgccagtatagagccgcccagtccgggccatctgagcgcccaggcccaccccagcgggcattgctggccaggggaacaaagagtcagggacccgccaaaccaccccccccaagaaagcctctccccgcagacccgcagggacgctgtccatctggcgacctgcccggccctggagccggaattccccccttggtggttccaagcagacccgccccaccaccccccaccgtctcctctctgtacttgtag

SEQ ID NO: 107192 - DNA, 2589 bp, synthetic construct
  misc_feature 1..2589: note = Description of Artificial Sequence: Synthetic coding sequence
  source 1..2589: mol_type = other DNA
atgcggctagctctgctgtgggcattaggccttctaggggccgggtccccattgccctcttggcccctgcctaatataggtggtacagaggagcaacaggctgaatcggaaaaggcgccgcgggagccgttggaacctcaggtactccaggacgacctgcctattagcctgaaaaaggtgttgcagacaagcctgcccgagcccctcaggattaagctggaactcgatggcgatagtcatatccttgaacttttacaaaacagagaattagtgccagggcgaccaaccttagtttggtatcagcccgatgggactcgagtggtatccgaaggccatacgttggagaactgctgctaccagggccgcgttagaggctacgccggcagctgggtctcaatctgcacttgctctgggctgcgtggactagtcgtgctcacccctgagcgcagttacacactcgagcagggaccaggcgacctccaaggtccccccattattagcagaatacaggaccttcatctgccaggtcatacctgtgccctcagttggcgggagtcagtgcacacgcagaaacctcctgaacaccctcttgggcagcgacacattcgaaggagacgggacgtggtgaccgagactaagacagtggagctagtgatcgtggctgaccacagtgaggcccagaagtaccgagacttccagcacctccttaatagaacactggaggtggcgctgcttttggacacattctttagacctttgaacgtgcgtgttgccctggtgggtttggaggcttggactcagcgcgatctggttgaaatctcaccaaatcctgctgtaactctcgagaatttcctacattggcggcgcgcgcacctgctccctagactgcctcatgatagtgcacagttggtcacggggacctcatttagtgggcctaccgtgggcatggccatccaaaattctatttgtagccccgatttttccggcggggtaaatatggaccattccacatcaatcctgggcgtcgccagcagtatcgcccacgaactcggccactcgcttgggctggatcacgatcttccaggtaactcatgcccgtgtcctggtccagcccccgccaagacctgtattatggaagcaagcaccgattttctccctggactaaacttttccaactgttccagaagggccttagaaaaggccctgctggacgggatggggagctgtctctttgaaaggctaccaagcctgccgccaatggctgctttttgcgggaacatgtttgttgaaccaggagagcagtgcgactgtgggtttttggacgactgcgtcgatccatgttgtgacagccttacctgccagctgcgcccgggcgcccaatgcgcctccgatggtccgtgttgtcagaattgtcaactcaggcctagcggttggcagtgcaggcccacccgaggagattgtgacctcccagagttttgcccgggagacagctctcaatgcccacccgacgtcagtttgggcgacggcgaaccctgtgccggcggtcaggcagtgtgcatgcatggtcgttgtgctagctatgctcagcagtgtcagtctctgtgggggcctggagcccagcctgctgcaccactgtgcctgcagacagccaatactagaggcaacgccttcgggagctgtggccggaatcccagcggatcttatgtatcctgcacacccagagacgcaatctgtgggcagttgcaatgccagacagggaggacacagcccctgttaggatccattagggacttattgtgggagacgatcgatgtcaacggcaccgaactcaattgttcttgggttcatttggatcttggatccgatgtcgctcaacctctccttaccttgccggggaccgcctgtggcccagggctcgtctgcatcgatcaccgctgccaacgcgttgatctcctgggcgctcaggagtgccgtagtaagtgtcatgggcacggagtgtgcgacagcaacagacactgctattgcgaagagggttgggctccacccgactgtactacacagttaaaagccactagctcgttaacaactgggctgttactgtctcttctcgtgttgcttgtgctggtaatgctgggggcctcttactggtacagagcccgactgcaccagcggctgtgccaactaaaagggccaacctgccagtacagggcggcccaatcaggcccatccgaaaggcctggaccacctcagcgggctctcctggctagggggacgaaagcctctgccttgtctttccctgccccaccatcacggcccctgccccccgatcccgtgtcaaaaaggttgcaggccgagctcgctgatcgacccaatccgcccacgcgccccctccccgctgatcctgtggtgcgctcccctaagagtcagggccctgctaaaccaccccctccaaggaagccccttcctgctgatcctcaggggcgatgcccaagtggggatcttcccggacccggggccggtattccacctctcgtggtgccatctcgaccagcacctccaccaccaacagtaagcagcttatacctttag

SEQ ID NO: 107193 - DNA, 2391 bp, synthetic construct
  misc_feature 1..2391: note = Description of Artificial Sequence: Synthetic coding sequence
  source 1..2391: mol_type = other DNA
atgagacttgccttactctgggctcttgggttactaggggctggatcaccattgcccagttggccccttcccaacataggcggaacggaggaacagcaggccgaatctgaaaaggctcccagagagcctcttgagccacaggttctgcaagatgacctgccaatcagcctgaaaaaggtcctccagactagccttcccgagccattgagaatcaagcttgaactggacggcgactcccacatccttgagttactccagaatagagaactcgtcccagggcgcccaaccttggtgtggtatcaacctgacggaacacgagttgtgtccgaggggcacacgctggaaaattgctgctatcagggtagggtgcgcgggtacgcagggtcttgggtgagcatctgcacttgttcagggctgcgcggattagttgtcctcacacccgagagatcttataccttggagcaagggccgggcgacctccaaggacccccaattatttccaggattcaagacctgcaccttccaggtcacacttgtgcgctgagctggcgcgaatcagtccacacacagaaaccccccgaacaccccctggggcagaggcacatcaggcgcaggagggatgtcgtgacagaaacaaaaaccgttgagctagtgattgtcgccgatcactctgaggcccagaaataccgggattttcagcacctgctgaatcgcaccctggaagtggcattgcttctcgataccttcttccggccgctgaatgtccgcgttgcactcgtcgggctggaggcgtggactcaaagggatctcgtcgagatctcgccaaatccagctgttactctcgagaactttctgcactggcggagggcacatcttctccccaggctgccccatgatagtgctcagcttgtgactggaacgagctttagtggtcctactgttggaatggccatccagaactccatctgtagccccgatttctccggcggggtcaacatggatcattcgaccagcatcctaggggtcgctagttctattgcacacgaacttggacactctctgggcctagaccacgatctcccaggcaatagttgcccttgccccggtccagcccctgcaaaaacctgcattatggaagcgagcacagacttcctccctggactgaatttttcaaattgcagtcgacgagcactggagaaagccctgctggatggcatgggttcctgcctgttcgaacggcttccctcattgccccccatggctgccttttgcggcaacatgtttgttgaaccaggggaacaatgtgattgtggatttctggatgattgcgtggacccatgctgcgattctcttacctgtcagctccgtccaggcgcacagtgcgcaagcgatggaccctgttgccaaaattgtcagctgcgaccttctggctggcagtgccgacccacgcgaggagactgtgatctccctgaattctgtcctggggattccagccagtgccctccagacgtgagcctcggcgatggcgagccctgcgctggagggcaggctgtgtgtatgcatggaagatgcgccagctacgcacaacaatgccagagtctctggggtcctggcgcacagccagccgcaccactgtgtttacaaaccgcaaacacacgtggtaacgcattcggctcttgcggtagaaatccaagcgggtcatatgtatcttgtacaccacgcgatgctatctgtggccaactgcagtgtcagactggtagaactcaaccactactgggcagcatccgagatcttctgtgggaaaccattgatgtgaatggcaccgaattaaactgcagctgggtgcacctcgaccttggtagtgatgtagcccagccgctcctcacactgccggggaccgcctgtggcccgggtctagtctgtatagatcatcggtgtcaacgggtcgatcttttgggtgcacaggagtgcaggtccaagtgtcatgggcacggagtgtgtgattccaatagacactgctattgcgaggagggctgggcccccccggactgcaccactcagcttaaagccacatcatctttgacgactggcctgctgttatcactgctggtcctgctggttcttgtaatgctcggggctagctactggtaccgcgccaggctacatcagcgactgtgtcaacttaaaggaccaacctgccagtacaggctggtcctaagtgctagcaggcctccactgcctggcaggtgtagactcacactgtgccccagagactcctccctgcgcggtcagccttcacctcacccccagggatcacactgcctgccaacaccgcgggccggagctcatagggtcacgtgccctgcacagggcctggagtcacgtccctag

SEQ ID NO: 107194 - DNA, 2475 bp, synthetic construct
  misc_feature 1..2475: note = Description of Artificial Sequence: Synthetic coding sequence
  source 1..2475: mol_type = other DNA
atgcggcttgctttactctgggccctgggactcctgggggctggctccccactgccgtcttggcccctacccaatattgtcctctcctggggtgttctaggaccagccgggggcacagaggagcagcaggctgaatccgaaaaagcacctcgagagcctcttgagccacaagtcctccaggacgacctgccaattagtctgaagaaggttcttcagaccagcctgcccgaaccgttacgcattaaattagagcttgacggcgactctcacatacttgagctattgcagaatagagaattggtgcctggccgcccaacgctggtgtggtaccagcccgacggtaccagagtggtgtccgaaggccatacacttgagaactgttgttatcaaggtagggtacgcggatacgcaggctcatgggtgtccatttgcacctgtagcgggctgagagggctggtagttttgactcccgaacgcagctacaccttggagcaagggccgggggatctccaggggccccccattatttccaggatccaggaccttcaccttcccggacatacatgcgccctctcatggagagagtcggtgcacacacagaagcctcctgaacatcctctgggtcaacgccatattcgccgtcgacgcgacgtggtcacagaaacgaagaccgtcgaactagtgatagttgcagatcacagcgaggcccagaaatacagggacttccagcatcttttgaacagaacccttgaggtggcacttcttctcgatactttcttccgccccctgaatgtgagggtggctttagtaggccttgaagcctggactcaacgggatctcgtcgaaataagcccaaaccccgcagttacacttgaaaactttttacattggcgccgagcccatctcctgcctcgcttacctcatgattccgctcagctcgtaacaggcaccagtttctcaggtccgacagtgggaatggcaatccagaatagtatctgttctccagatttttccggcggcgtgaacatggaccacagcacctccattctgggggtggcctcatccattgctcacgagctgggacactccctcggcttggaccatgacctgcctggcaatagttgcccttgtcctggacccgcccctgcaaagacatgcataatggaagcctcgacagacttcttacccggactgaacttcagcaactgcagtcgacgtgcgcttgagaaagccctcctcgatgggatgggttcctgtctttttgagcggctgccctccctgccacctatggcggccttctgcggtaatatgtttgtggagccgggcgagcagtgtgattgcggatttctggacgattgcgtagacccgtgttgtgactccttgacttgtcaactccgcccaggtgctcaatgtgcctccgatgggccatgctgccagaactgccagctgcgtccaagcggctggcagtgcagaccaacccggggagactgcgatctccctgaattttgtcccggtgattcttcacagtgtccacccgacgtgtccctgggggacggcgagccctgtgcaggaggacaggctgtgtgtatgcatgggcgctgcgcatcctacgcgcaacaatgccagtctctgtggggccccggtgcgcagcctgccgccccactctgcctgcagacagctaacactagggggaacgcattcggatcatgcggccgaaacccttcaggttcctatgtaagctgcacgcccagagacgctatctgcggccagttgcagtgccagactggccgaacacagcccctgctcggctctatccgggacttattgtgggagaccatagacgtaaacggtaccgaactcaattgttcatgggtgcatttggacctgggatcagatgtggctcaaccccttctaacccttccaggaacagcttgcgggccaggattggtgtgcattgaccatcgctgtcaaagggtggatctcttgggcgcccaggagtgccgttccaagtgtcatggccacggggtgtgcgacagcaaccggcactgttattgcgaggaaggctgggctccgccagactgtacaacgcagctcaaagcaacctcgagcttgaccacgggcctcttgctgtccctgcttgtgctgctggtactggtaatgctaggggcgagctactggtatcgcgcccgcttacaccagcggctttgccagctgaaaggccccacatgccagtacagggctgctcaatccggacccagtgaacgccccggccctccccagagagcactgctcgcgagaggcacaaaatctcaggggccggccaagcctccacctccgcgaaagcctctgccagctgatccgcagggccgttgtccatccggcgacttaccggggcccggtgcaggtattccccctctggtagtgccctctcgcccggcaccaccccctcctacagtgtcaagcctgtatctgtag

SEQ ID NO: 107195 - DNA, 2757 bp, synthetic construct
  misc_feature 1..2757: note = Description of Artificial Sequence: Synthetic coding sequence
  source 1..2757: mol_type = other DNA
atgcctggcggagccggcgccgctcgtctctgcttgctggctttcgcactgcagcctctgcgacctcgggctgctagagagccaggttggacacggggatcagaggagggttccccaaaactacaacacgaacttataataccccagtggaagacgtccgaaagcccagtgcgggaaaaacaccccctgaaggccgaactgcgggtgatggccgagggacgcgaactgattctggacctggaaaaaaacgaacagttgtttgctccctcgtacacagagacacactatacctcttccggaaatccacagactactacacggaaactggaggatcattgtttctatcatggtaccgtccgcgagaccgaactctcctccgtcaccttgtccacttgtcgcggcatcaggggtctgattaccgtcagcagcaatctgtcctacgtaatcgaacctcttcccgatagtaaaggtcagcatctcatctatcgcagcgaacacctgaagcccccaccaggaaattgtggcttcgaacacagcaagcccacaacccgagactgggcgctgcaattcacacaacagactaagaagagacctcggcgcatgaaaagagaagacctgaacagtatgaagtacgttgaactctatctggtcgccgattacctggaatttcagaagaaccggcgggatcaagatgccaccaagcataagctgattgaaatagcaaattatgtcgataaattttatcggtctctgaatattcggattgccttggtggggcttgaggtgtggactcacggtaatatgtgtgaagtgtctgaaaacccctatagcactctgtggtcatttctctcctggagacgcaagctcttggctcagaagtatcacgataatgcacaattgataactggcatgtcatttcacggcacaacgattggcctggcacccctcatggcgatgtgctccgtgtaccagagcggcggtgtgaatatggatcactcagagaacgccattggagttgctgcaacaatggcccacgagatgggccataacttcggcatgacacacgattccgccgactgttgctcggcctccgccgctgacggcggctgcataatggcagctgcgactggccatcccttcccgaaagtcttcaacggctgtaatcgcagagagctggataggtacttgcagagcggcggcggcatgtgcctgtccaatatgcctgacacccgcatgttatacgggggcaggcgatgcggcaacggctacctcgaagacggagaagaatgtgactgcggggaggaggaagagtgcaataacccatgttgtaacgccagcaattgtaccctccggccgggggcagaatgcgctcatgggtcctgttgtcaccagtgtaaactccttgcccctggcaccctatgccgcgaacaggcccggcaatgcgatctgcctgagttctgtactggcaaatcccctcactgtcctaccaatttttaccagatggacggtaccccctgcgaaggcgggcaggcgtactgctataatggaatgtgtttgacttaccaggagcagtgccagcagttgtgggggccaggagcaaggcccgccccggatctttgcttcgaaaaggtgaacgtggccggtgacacgttcggtaattgtggcaaggacatgaatggagaacaccgcaaatgtaacatgcgggatgccaaatgcgggaagattcagtgtcagtcctcggaagctcgcccattggaatcaaacgctgtgcctatagatacaacaatcattatgaatggccgccagatccagtgccgcggtacccacgtctacaggggaccggaagaagagggtgatatgctggaccctggcctggtcatgactggtaccaaatgcggctacaatcatatttgcttcgagggacagtgtaggaacacctccttcttcgagacagagggttgtggaaaaaagtgcaacgggcatggagtctgtaataataaccaaaactgccattgtctgcctggatgggccccacccttttgcaatacaccaggacacggtggttctattgactctgggcctatgcccccagaatccgtcggcccggttgtggctggcgtgttagtggctattttggtgctggccgttctgatgctcatgtattactgttgtcgtcagaataacaaactcggccagctgaagccgagcgcgttgccatctaaactccgacagcaattctcttgtccattccgcgttagccagaattctggcaccggtcacgcaaatccgacatttaaactccagaccccgcagggtaaacgcaaagtcatcaatacgccagaaatccttagaaaacccagtcagcctcccccgaggccccccccagactatttgcgaggcggatctcctcctgcgccattacccgcccacttgagccgggccgcccgcaactcccctggccccggctcccaaatcgaacgaaccgagagcagccggaggccaccccctagccggcccattccaccagctcccaactgtatagtttctcaggactttagtcgcccacgccctcctcagaaggctcttcccgcaaatcccgtgccggggagaaggtctctgcctcgccccgggggcgcaagcccactgcgacccccaggtgcaggaccacagcagtctcggccactagcagcgcttgcccccaagttcccagagtatagaagtcaacgggcgggagggatgatctcctcaaagatctag

SEQ ID NO: 107196 - DNA, 2763 bp, synthetic construct
  misc_feature 1..2763: note = Description of Artificial Sequence: Synthetic coding sequence
  source 1..2763: mol_type = other DNA
atgccgggtggggctggggcagccaggctttgcctgctggcttttgctttgcagcctttgagaccgcgagccgcccgtgaacccgggtggacaatctctcggggttccgaggaaggcagcccaaaactgcagcacgagcttatcattccccagtggaaaacgtccgaatctcctgtgcgagaaaaacatccacttaaagccgaacttcgcgttatggctgagggcagagagctgattttggacctagaaaagaatgaacagctcttcgcccccagctacacagagacccattacacatcttccgggaacccacaaaccactacgaggaaacttgaagaccactgcttttaccacggaacggtccgcgaaaccgagctatcttccgtgaccctgagcacatgtcggggtatccgcgggctgatcactgttagctcaaacctatcgtatgtgattgagcccctaccagacagcaaaggacaacacctgatctatagaagtgaacatctcaaacctcctcctggcaactgcggcttcgaacattctaagccaaccacacgagactgggcactgcagttcacccagcaaactaagaagcggccaagacgcatgaaacgcgaggacttgaattctatgaagtatgtggagctgtacctcgttgctgattatcttgaatttcagaagaaccggcgagaccaggacgcgaccaagcacaagctgattgaaatagccaactacgtcgacaagttttataggtctctgaacattagaatcgccctggtagggctggaggtgtggacacacgggaatatgtgtgaagtgtcggaaaacccctatagtactctctggtcttttttgtcatggagacggaaattattggcccagaaataccatgataatgcacagctgataaccggcatgtccttccacggcacgaccatcggcctggcacctttgatggcaatgtgctccgtgtatcagtcaggaggagtgaacatggaccactccgagaacgctataggtgtggctgccactatggctcatgagatgggtcataattttgggatgacacatgactctgccgactgctgctctgcttccgcagcggacggtggctgcatcatggctgctgcgacaggtcaccccttccctaaggtttttaacgggtgcaaccggagagagctcgatagatacctacaatccggcggaggaatgtgtctgagcaatatgccagacactcgcatgctatatggcggccgccgctgtgggaatggatacctggaagatggagaggagtgtgattgcggagaggaggaagagtgcaataacccttgttgcaacgcttccaattgcacgttgaggcctggagccgaatgcgcccacgggtcatgttgccaccaatgcaagctgctggctcccggcacactgtgccgtgagcaagcgcgtcagtgtgatctgccagagttttgcacagggaagtcgccccactgccctaccaacttttatcaaatggatggaaccccatgcgaaggtggtcaagcttattgttacaacgggatgtgcttgacatatcaggagcagtgtcagcagctctgggggccaggggcgcgcccggctccagacctttgcttcgaaaaagtcaatgtcgctggggatactttcggaaattgcggcaaggacatgaacggcgaacatcgaaaatgcaatatgcgagatgctaaatgtggcaagattcagtgccaatcctcagaggcgcggccactggaatcgaatgccgttccaatcgacacgacaattattatgaatggacgccagatccaatgtagagggacccacgtttacaggggccccgaagaggaaggcgacatgctagaccctggtctggtgatgacaggaacaaagtgcgggtacaaccacatctgcttcgaaggtcaatgcaggaacacctcatttttcgagactgagggttgcgggaaaaagtgcaacgggcacggggtgtgcaacaacaatcaaaattgccactgtctgcccgggtgggcacctccgttttgcaacacacccggccacggcgggtctattgacagcggacccatgcctcctgagtctgttgggccagtcgtggcaggcgttctggtggcgattctggtgctagccgtattaatgctgatgtattattgttgtcgtcaaaacaataaactgggacaattaaagccgtccgccctgcccagcaagttgcgtcagcagtttagctgtccttttcgcgtctctcagaactcaggcacaggccacgctaaccctacttttaaacttcagacaccacagggaaagcggaaagtgataaacacacccgaaatccttcggaagccttctcagccgcctcctaggcccccacctgattacctacgtggtggctctccccctgctcccctacccgcccacctatctcgagcagcaagaaattcaccggggcctggctctcaaattgaaaggacagagagctcaaggcgtcctccaccaagcaggcccatcccacccgcccccaactgtatcgtttcacaggatttctctcgaccccggccaccacaaaaggccctgccagccaatcccgtcccggggcgacgaagcttaccgcgcccgggaggggctagcccgctgcggcctcccggagccgggccacagcagagtcggccgcttgccgccctagcccccaagttccctgagtacagaagccagcgagcgggcggtatgataagctctaaaatctag

SEQ ID NO: 107197 - DNA, 1917 bp, synthetic construct
  misc_feature 1..1917: note = Description of Artificial Sequence: Synthetic coding sequence
  source 1..1917: mol_type = other DNA
atgtgcgaggtcagcgaaaatccatacagcacgctgtggagcttcctgtcatggcgcaggaagctgctcgctcagaagtatcatgataacgcacagctcataaccggcatgagtttccatgggaccacaatcggcctagcgcctctgatggccatgtgtagcgtctatcaaagcgggggggtgaacatggaccattcagaaaatgccattggagtggccgctacaatggctcacgagatggggcacaattttggcatgacacatgactcagctgattgttgtagtgcttcggccgcagatggtggctgcattatggctgccgccacggggcacccattcccaaaagtcttcaacggttgcaaccggagggagcttgatagataccttcagtctggaggcggaatgtgcctctctaacatgccggatactcggatgctgtacggtggtaggaggtgcggtaatggttacctggaagatggagaggagtgcgattgtggtgaggaggaggagtgcaacaatccatgctgcaatgctagtaactgcacgctgagacctggtgcagaatgtgctcatgggtcttgctgtcatcagtgcaaactactcgcacccgggaccctatgtcgcgagcaggctcggcagtgtgatctgcccgagttctgtacaggtaagagtccccactgtccaacaaacttctatcagatggacggaactccttgcgagggaggccaggcttattgctacaatggcatgtgtctcacttatcaggagcagtgtcagcagctgtggggccctggagctcgacccgcccctgatctctgctttgagaaggttaatgtggccggggataccttcgggaattgtgggaaggatatgaacggggaacataggaaatgtaatatgcgtgacgctaagtgcggtaagatacagtgtcaatcaagtgaagccaggccactggagtccaatgccgtcccaattgacactaccataattatgaacggacgacaaattcagtgccgaggtacccacgtgtatagaggacctgaggaagagggagacatgctggatcccgggctcgtgatgacaggcactaagtgtggctacaatcatatctgcttcgaaggacaatgtagaaatacaagcttctttgagaccgaagggtgtggaaaaaaatgtaacggacatggtgtgtgtaacaacaaccagaattgccattgtctgcctggctgggcacctccattctgcaacaccccagggcacggtggctccatcgattctggtcccatgccccctgagtccgtcgggcctgtggtcgccggcgtgttggtggctatactggtccttgctgtcctgatgcttatgtactattgttgtcgccaaaataataagctgggccaattgaagccatcagccttgccgtctaaactgcggcaacaattttcatgtccattccgggtttcacagaacagcggaaccgggcatgcgaacccgactttcaagctgcagacaccccaggggaaacggaaggtgattaacactcctgagatccttaggaagccttctcagccgccgcctcggcctcctcccgattatctgcgagggggctcaccccccgcgcccttgccagcacatcttagccgggcggcccgaaatagcccgggccccgggtctcagatcgaaaggaccgaatcgtcacgaagacccccgccatcaaggcccatcccacctgcccctaattgcatcgtgagccagaagtgtctgctaccccctgcaatgatcctaagagccccacagccatccgggaccgttgtatgcttagttatcagttttaatatggccttttacagatccatgcgcattcgcattgagccgggcatcaaaaccaaactgctcgttcttctggtctggaagcaattctag

SEQ ID NO: 107198 - DNA, 2868 bp, synthetic construct
  misc_feature 1..2868: note = Description of Artificial Sequence: Synthetic coding sequence
  source 1..2868: mol_type = other DNA
atgccaggcggagccggtgcagctaggttgtgtctgctggcctttgctctgcaacctctccgacccagggcagcaagagagcctggatggacgcgagggagcgaggagggctcccccaaacttcagcacgaactgattataccacagtggaaaacctctgagtcgcccgtgagagagaagcacccccttaaagcagaactgcgggttatggccgaaggtcgtgagttgatactagatctcgagaaaaatgagcagttgtttgcaccttcctatacagaaacccattacacctccagcggcaatcctcagacaaccacccgcaagttagaagatcattgcttttaccacgggactgtgcgagaaaccgaactaagttctgtgacactcagcacgtgtaggggcattcgtggcctcattactgtcagcagcaacctcagttatgtcatcgaaccactccccgacagcaaaggacagcacttgatttatcgctccgagcatctaaagcctccccccgggaactgcggatttgaacacagtaagcctactaccagagactgggcactccagtttacccagcagaccaagaagcggccccgcagaatgaagcgggaagacctgaactctatgaagtacgtggaactgtacctggttgctgactatctggaattccagaagaatcggcgagaccaggacgccaccaaacataagttgatagaaattgcaaattacgtagataaattctaccggtccctcaatatcagaattgctctcgtgggcctcgaggtatggacgcacgggaacatgtgcgaggtgagtgagaatccctattctacgctttggagcttccttagttggcgccggaaactgctggcccagaaatatcacgacaatgcacagcttatcacaggcatgtcctttcacgggaccacaattggcctggcccctctgatggcgatgtgctctgtctaccagagcggtggcgtaaatatggatcattcagaaaatgcaattggagtagcagctaccatggcccacgagatgggtcataacttcggaatgacacacgatagtgcggactgctgctcggcttctgctgctgacggagggtgcataatggcggcggccaccggccaccctttcccaaaggtattcaacggatgcaatagacgcgaacttgaccggtatttacagtcagggggaggaatgtgcttgtctaacatgccagatacgaggatgctttatggagggcgcaggtgcggtaacggatacctagaggatggagaggagtgtgactgcggcgaagaagaggaatgtaataacccttgctgtaacgcatccaactgtacactgaggcctggcgccgaatgtgcacatggctcttgctgccaccagtgcaaactgctcgccccaggcactctgtgtagggagcaggcgcggcagtgcgacctccccgagttttgtaccgggaagtctcctcattgccccacaaacttctatcagatggatggtacaccttgcgagggtggccaagcgtattgttataacggaatgtgtttgacctatcaagaacagtgccaacagctatgggggcccggtgcccggcctgcccctgatttgtgttttgagaaggtgaatgtggctggagatacgttcggaaattgcggcaaagatatgaacggcgaacatcggaaatgcaatatgagggatgcaaagtgcggcaaaatccaatgtcagagctccgaagctaggcccctcgagtctaacgcagtccctatcgacaccaccatcattatgaacggtcgtcagatacagtgccgcggcacccacgtgtatcgaggtcccgaagaagagggggatatgttagatcccggcttggtgatgacaggcaccaagtgtggctataaccatatctgcttcgaaggccaatgccgtaacacttccttcttcgagacagaaggttgtggtaagaagtgtaacggacacggcgtgtgtaacaacaatcaaaattgccactgcctgccgggctgggccccacccttttgtaacacgccaggccacggagggtcaatcgactcaggccctatgccaccagaatccgttggtcctgtggtcgccggcgtcctggtagctatcttagtactcgccgtgttgatgctgatgtactactgctgtcgccagaataataagcttggacagttaaaacccagtgccctcccttccaagttaaggcagcaattcagttgtccgttccgggtgtctcagaatagtggcaccggccatgcaaaccccacatttaaactgcaaacacctcagggaaagaggaaggtgatcaatactcctgagatcctacgaaaaccttcccaacctccccctagaccgccgcccgactatctccggggcggaagtccgcctgctccattacctgcccatttgtccagagcggccagaaactctccagggccgggatcacagattgaaaggaccgagagctcccggagaccacccccttcacggccgatccctcccgcccctaactgcatcgtcagtcaggacttttcccgcccacggccaccacaaaaggccctccccgcaaacccagtgcctggtcgtaggtctttgcccaggccaggcggagccagtcctttgcgccccccaggtgccggcccacaacagagcagaccattggccgcattggctcccaaagtttctcctagagaggctctcaaggtgaaggccgggacgcgtggactgcagggagggagatgcagagtggagaaaaccaaacagtttatgctgctggttgtatggactgaactccctgaacagaaaccacgcgctaagcacagctgtttcctagtgcccgcctag

SEQ ID NO: 107199 - DNA, 2208 bp, synthetic construct
  misc_feature 1..2208: note = Description of Artificial Sequence: Synthetic coding sequence
  source 1..2208: mol_type = other DNA
atgtggagggtcctgttcctcctctctggactgggcggcctccgtatggacagtaatttcgacagtctccccgtacagatcacagtccccgagaagattcgatccattattaaggaggggatagagtctcaggcctcttataaaattgtgatcgagggaaagccctataccgtgaatctgatgcagaagaacttcttaccacacaactttcgcgtctacagctactccgggacaggcattatgaagcctttggaccaggattttcagaatttctgtcactaccaaggttatattgaaggatacccgaagagcgtggttatggtctcaacttgcacgggccttcggggtgtgctgcagttcgagaatgtgtcttacggcatcgaacctttggaaagttctgtgggattcgaacatgtgatataccaggtcaaacataagaaggcagacgtttcgctttacaatgagaaggacatcgagagcagggatctgtccttcaagctacagtccgtagaacctcagcaagactttgccaagtacatcgaaatgcatgtgatagttgagaagcagctctataatcatatggggagcgacaccacagtggtggcccaaaaggtttttcagcttatcggactgacgaatgccatattcgtgagttttaacattaccatcatcctctctagtctagaattgtggattgatgaaaataaaatagccacaacaggcgaggccaatgaactgctccacacattcctgaggtggaagacctcctacctcgttttgagaccacacgacgttgcctttctgcttgtataccgagaaaaaagcaattacgtgggggctactttccaagggaaaatgtgcgatgccaactacgccggtggcgttgtgttgcacccaagaactatcagcctggaatcactggccgttatccttgctcagctcctcagtctgtcaatgggcatcacctatgacgatataaataagtgtcagtgttctggtgcggtatgcattatgaacccagaagcgatacatttttccggagtcaaaatcttttccaactgctcattcgaagactttgctcactttatatctaagcagaagagtcagtgcctgcacaatcaaccgagattggacccctttttcaagcagcaggccgtttgtggaaacgccaagctcgaggccggcgaggaatgcgattgtgggacagaacaagactgtgccctgataggagagacctgctgcgacatcgctacctgcagattcaaggcaggttctaattgcgcagagggaccttgctgcgaaaattgtttgtttatgtccaaagaacggatgtgccggccttcatttgaggagtgtgaccttccggaatattgtaacggttcttctgcctcatgccctgagaaccactatgttcagaccggccacccctgcggccttaaccagtggatttgtatcgatggagtgtgtatgtcgggagacaaacagtgtactgacacatttggcaaagaggtcgagtttggccctagcgagtgctattcacacctgaatagcaagacagatgtcagtggcaactgcggtatttcagactccgggtatacgcaatgcgaggctgataatctacagtgcggaaagctgatttgtaagtatgttggcaaattcctgctgcagattcctcgggcgacaatcatctacgccaacatcagcgggcacctctgtattgcagttgagtttgccagtgatcacgccgatagtcagaagatgtggatcaaggacggaacatcgtgcggcagtaataaggtctgccgcaaccagcggtgtgtgtcttccagctacctcgggtatgactgtactaccgataaatgtaatgaccgcggcgtatgcaacaataagaagcattgccattgtagcgccagttatctgccgcctgattgtagtgtgcagtccgatctgtggcccggggggagcatagacagcggaaactttccaccagttgctatcccagctcggctgcccgaacggaggtatatcgagaacatttatcatagcaaaccaatgcgatggccattctttctattcatcccattttttattatattctgcgtgctgattgcaatcatggtcaaggtgaattttcagcgaaaaaaatggaggaccgaggactactcttctgacgagcaacccgagtccgagtccgaacctaagggttag

SEQ ID NO: 107200 - DNA, 2151 bp, synthetic construct
  misc_feature 1..2151: note = Description of Artificial Sequence: Synthetic coding sequence
  source 1..2151: mol_type = other DNA
atgtggcgagtgctctttctgttgagcgggttgggaggtctgaggatggacagtaatttcgattccttgccggttcagatcacagtgcctgaaaagatcagatcaattataaaagagggaattgaatctcaggcctcatataaaatagtgatcgaggggaaaccctatactgtcaatctgatgcaaaaaaattttttgccacataacttccgcgtgtattcttacagtgggacaggaataatgaaaccactggaccaggatttccaaaacttctgtcattaccagggttatatcgaagggtatccaaagtcggtggtaatggtgtctacgtgcaccgggctgagaggagttctacagttcgagaacgtcagctacgggatcgagcctctggagagcagtgtggggttcgagcacgtcatctatcaagtcaagcataagaaagcagatgtgtcgttatataacgagaaggacatcgagtcacgagatctgtcttttaagctgcagagtgttgagtataatcacatgggcagtgatactaccgtagtagcccagaaagttttccaacttattggcctgacgaatgctatctttgtgtctttcaatatcactattattctcagcagcctggagctttggattgatgagaataagattgcaaccaccggggaggccaacgagcttctgcacacgttcctgaggtggaagacaagctatctggtattgcggcctcacgacgttgccttcttgctggtgtaccgggagaagtcgaattacgttggggcaacattccagggcaagatgtgtgatgcgaattatgccggaggagtagtcctgcacccccgcacaattagcctcgagagcctcgctgtgatactggcccaattactgagtttgagcatgggtatcacctatgatgacatcaataaatgccaatgctccggtgcggtttgcattatgaaccccgaagccatccacttttctggggtgaaaatcttctccaattgttcctttgaagattttgcccacttcataagcaagcagaaatcccaatgcttgcacaatcagccccgactggatccgttctttaaacaacaggccgtgtgtggaaatgccaagcttgaggccggggaagaatgcgactgtgggacagaacaagattgtgccctcataggggagacctgttgcgatattgccacctgcaggtttaaggccggctccaactgcgctgagggaccttgctgcgaaaattgtctcttcatgtccaaagaacggatgtgtagacccagctttgaagaatgcgacctgccagagtattgcaacggatcttcggcttcctgccccgaaaatcattacgttcagacaggtcatccttgcgggttgaatcagtggatttgcattgatggggtttgcatgtctggtgacaaacagtgtactgacacatttgggaaggaggtcgagttcggaccatcagaatgttattctcaccttaactctaagacagatgtttccgggaattgtggcatcagtgactctgggtatacacaatgcgaggccgacaacctgcagtgtggcaaattaatttgcaaatatgtgggcaaatttttgctgcaaatcccacgagccacaatcatatacgcaaacattagtggtcatttgtgtatcgctgttgagtttgcaagcgatcatgcagacagccagaaaatgtggattaaggacgggacatcctgcggtagtaataaggtgtgccgaaatcagcgttgtgtttctagttcatatctgggttacgactgtactactgacaaatgcaatgatcgcggcgtctgcaataacaaaaaacactgtcattgttccgccagctatctgcccccagattgtagtgtgcagagcgatttatggccgggggggtctatcgactccgggaactttccgcctgtagccatacctgcaaggctgcccgagcggcggtatatcgagaacatttatcactctaaacccatgcgctggcctttctttctttttattccattttttattattttttgcgtgcttattgctatcatggtgaaagtcaatttccagcgcaagaagtggcggacagaagactacagttccgacgagcagcccgagtctgagtccgagcccaagggttag

SEQ ID NO: 107201 - DNA, 2331 bp, synthetic construct
  misc_feature 1..2331: note = Description of Artificial Sequence: Synthetic coding sequence
  source 1..2331: mol_type = other DNA
atggtccagctgcaccaagacacagacccccaaatccccaaaggacagccctgtacactgaacagcagtgaggggggagctaggcctgcagtcccgcacaccctgttctcctctgccctcgacaggtggctccataatgacagctttatcatggcagtgggagagcctctagtgcatatccgtgtgaccctcctgctgttgtggttcgggatgtttctgtctattagcggccatagtcaagcaagaccttctcagtattttacaagcccggaggtggttatccctctcaaggtaatcagccgggggagaggggcaaaagcccccggctggctatcctacagcctgcgattcgggggccagagatacatcgttcatatgcgagttaataaattgttatttgccgcccacctacccgtgtttacgtacacagagcagcacgccctgctgcaggatcagccatttattcaggatgattgctactaccacggctacgtggagggagttccagagtccctggttgcactgtcaacttgctcaggcggctttctgggcatgctgcagataaatgacctggtatatgaaatcaaacccataagcgtatcagctacttttgagcatcttgtgtacaagatcgattccgatgatactcaatttcccccaatgcggtgtggtcttacagaggaaaagattgcccaccagatggagctgcaattaagctataacttcacgcttaagcagtcgtcctttgtgggttggtggacgcaccagcgatttgtagagcttgtggtggtggttgacaatattcgctacctgtttagtcagagcaacgctactactgtccagcatgaagtgttcaacgtagtcaacatagtcgattccttttaccaccccctggaggttgatgttattctgactgggattgatatttggacagccagcaatcctctaccaactagcggcgacctggataatgtgcttgaggatttctccatttggaagaattataatttaaataatcggctacaacacgacgtagcgcatcttttcataaaggacacccagggaatgaaactaggagttgcgtatgtcaaagggatctgtcagaaccccttcaacacaggggtagatgtttttgaggacaacaggctagtagtcttcgccatcacactggggcacgaactagggcataatctcgggatgcagcacgatacgcagtggtgtgtctgcgagctgcaatggtgtatcatgcacgcatatcgaaaagttacgacgaaattctctaattgttcctatgcccaatactgggatagtacgatatcctcaggactatgcatacagccacccccttatccaggcaatatcttccggctcaagtattgcgggaacttggtggtggaagaaggggaggaatgcgactgcggcacgattagacagtgcgcaaaggacccctgttgtctcttgaattgtaccctacaccccggggccgcgtgcgctttcgggatatgctgcaaagattgtaaattcctcccaagtggcactttatgtcgacaacaggtcggcgaatgcgatctcccggaatggtgcaatggtacttcccatcagtgtcctgacgatgtgtatgtccaagacgggatttcctgcaacgttaacgctttttgctatgagaaaacctgcaacaatcacgacatccagtgcaaagagatatttggccaggatgctcggtcggcctcccagagttgctatcaggaaatcaacactcaggggaacagatttgggcactgcggcatcgtggggactacctacgtcaaatgctggacgcccgacattatgtgcgggcgagtgcaatgcgaaaacgtgggcgtaattccaaatcttatagagcactccaccgtgcagcagtttcacctgaatgatacaacttgctgggggactgattaccacttgggcatggcaattcctgacatcggagaggtgaaagacggtacagtgtgcggccctgagaagatttgcattcggaaaaagtgtgcaagtatggtgcacttgtcacaggcctgtcaacctaagacttgtaatatgaggggcatctgcaacaacaaacaacactgccattgcaatcatgaatgggcaccaccgtactgtaaggataaagggtacggcggaagcgccgacagtgggccgccaccaaagaataacatggaaggacttaatgtgatggggaaactcagatacttatccctcctctgcctgctaccacttgttgcctttctcttattttgtttacatgtactgttcaagaagcggactaagtctaaggaggatgaagaaggatag

SEQ ID NO: 107202 - DNA, 2169 bp, synthetic construct
  misc_feature 1..2169: note = Description of Artificial Sequence: Synthetic coding sequence
  source 1..2169: mol_type = other DNA
atggcggttgatggtacactggtttatatccgagtgactctgttgctactttggctaggggtgtttctctccatcagcggttattgccaagcgggaccctcccagcactttacctcaccagaagtggttattcctctcaaggtcatcagccgcgggcgctcagctaaggctccaggctggttaagctacagtctcagattcggcggacagaagcatgttgtccatatgagagtgaaaaaactcctggttagtaggcatcttcctgtgtttacctatactgatgaccgcgctctgttggaggaccaactgtttattcccgacgattgctactaccatgggtacgtagaggcagctcctgagagcctagtggtgttttccgcctgttttggtgggtttcggggggtgcttaagatcagcgggttgacatacgagatcgagccgatcagacattccgctacctttgaacatctggtgtataagattaattctaacgagacacagttcccagctatgcgctgcggcttaaccgaaaaggaggtcgccagacagcaattggagtttgaggaggctgagaatagcgccctggagcctaaatcagccggggattggtggacccacgcttggtttctcgaactcgtggtggtggttaatcatgacttctttatttactcccaatcaaatatttctaaagtacaagaagatgttttcctggtcgtgaacatcgtggactccatgtacaaacagctgggtacatacattatcttaattggtatcgaaatctggaatcagggcaacgttttccctatgacaagcatagagcaagtgctgaatgacttctcccagtggaagcagatatctctgagccagctccagcatgatgctgcccatatgttcatcaagaatagtctgatttccattctgggattggcctacgtcgctggcatttgccgaccgcccatcgactgcggcgtggataatttccagggcgatacctggagcctatttgctaatacggtcgcgcatgagttaggtcacactctgggcatgcagcacgatgaggagttctgtttctgtggggagagaggatgtattatgaatacctttagggtccccgcagaaaaatttacaaactgctcctacgccgactttatgaagacaacactgaatcagggcagctgtctgcacaatcctcctcgactgggcgagatttttatgcttaagcgctgcgggaatggcgtggtcgaacgagaagaacaatgcgactgcggcagcgtacagcaatgtgaacaggacgcgtgttgtctgctgaattgtactctacggccaggcgccgcttgcgcctttggactgtgttgcaaagactgtaaattcatgccctccggcgaactgtgccgtcaggaggtcaacgagtgtgacctgcctgagtggtgtaacggcacctcccatcagtgccccgaggaccgatacgtacaagatgggattccctgttccgattccgcttactgttaccagaagcgttgtaacaaccatgatcagcactgtcgagaaatttttgggaaggacgcaaaatctgccagccagaactgctacaaggaaatcaattcacaaggcaataggttcggccactgtgggatcaatggaacgacctacttgaaatgccacattagtgacgtcttttgcgggcgtgtccagtgtgagaacgtgcgcgatatcccgctgctgcaggatcactttacgctgcagcacacacatatcaatggggtcacatgctggggaatcgattatcatttgcggatgaatatctctgatataggtgaggtaaaggacggtaccgtgtgcgggccgggaaaaatttgtatccacaagaagtgtgttagtctgtcagtgctcagtcatgtctgcctgcccgaaacatgcaatatgaagggcatatgcaataataaacaccactgccactgcggttacggttggagccccccttactgtcaacataggggatacggcggaagcattgacagcggccccgcttctgcgaaaaggggtgtgttcttgcccctcatagtcatccccagcctgagtgtcttgaccttcttatttacagtagggttgttgatgtacttgagacagtgcagcgggccgaaagagactaaggctcactcatcaggatag

SEQ ID NO: 107203 - DNA, 2721 bp, synthetic construct
  misc_feature 1..2721: note = Description of Artificial Sequence: Synthetic coding sequence
  source 1..2721: mol_type = other DNA
atgcaggcagctgtcgctgtgtccgtgcccttcctgctgctatgtgttcttggaacatgccccccagcccgatgtggacaagccggcgatgcctctctcatggagctggaaaagcggaaggaaaatcgcttcgtggaacgacaatcaattgtgcctctgcgtctaatatatcgcagcggcggcgaggacgaaagtcgccatgacgccctcgatactcgggtccgcggggatttggggggaccccaactcacccacgtggaccaagcaagctttcaggtggatgcgtttggtaccagcttcatcctggatgtagtcctgaatcatgatttgctaagtagtgaatacatagaaaggcacattgaacatggtggtaagaccgtcgaggtgaaggggggagagcactgttactatcagggccatattagaggaaatccagattcttttgtagccctcagtacctgtcatggtttgcatgggatgttttacgatgggaatcatacttatctgattgagcccgaggaaaatgacacaacccaagaggattttcacttccattccgtctacaaatcccgcctttttgaattcagcttagacgacctgccctcagagtttcagcaggtcaacattacccccagcaagtttatattaaaaccacggccaaagcggtcaaaaagacagctgaggcggtacccccggaacgtggaggaggagactaaatacatcgagttaatgattgtaaacgaccacctcatgttcaaaaagcatcgcctgtcagtggtgcacacaaacacatacgccaagagtgtggttaacatggcagatctcatctacaaagatcagctgaaaacccggatcgtcctggtggctatggagacctgggcgacagataataaatttgccatttccgagaaccccctgataacactgcgcgagttcatgaagtatcgacgggatttcataaaggaaaaatctgatgctgtgcatcttttcagcggcagccagtttgagtctagcaggagtggcgccgcatatatcggcggcatatgctctctgttgaagggggggggtgtcaacgaattcgggaaaaccgatctaatggcagtgacgctggcgcaatcccttgctcacaacatcggaatcatcagcgacaagagaaaactggcatcaggggaatgcaagtgcgaggatacttggagtggttgtatcatgggggacactggctactatcttccgaagaagtttacccagtgtaacatcgaagagtaccatgacttcctcaatagcggtggcggcgcttgtctctttaacaagccgtctaagttgctggaccccccagagtgtggaaatgggttcatcgaaactggcgaagaatgcgactgcggaaccccagcggagtgcgttcttgagggcgcggagtgttgcaaaaaatgcactctgacccaggatagccaatgtagtgacggtttgtgttgtaagaaatgcaaatttcagccaatggggaccgtctgccgcgaagctgtgaacgattgcgatatccgagagacatgtagcgggaactcttctcagtgcgcccctaacatccacaagatggatggttactcctgcgacggagtacagggcatttgtttcggtggccgatgtaaaactagggatagacaatgcaaatacatctggggccagaaggtgacagcctcagacaagtactgttatgagaagctgaacatcgagggcaccgaaaaggggaactgcggcaaggataaagacacatggattcaatgtaataaaagggacgtcctctgtggatatctcctctgtaccaatatcgggaatattccccgcctgggagagctggacggcgaaataacaagcactctggtcgtgcagcagggacgcaccttaaactgttctggagggcacgtgaagctagaggaagatgttgatctggggtacgtggaggacggaaccccttgtggtccacagatgatgtgcttggaacatcgctgtctgccagttgcaagctttaacttcagcacatgtctttcctccaaagagggcactatctgtagcgggaatggcgtctgttccaacgagctgaaatgtgtgtgcaatcgacattggatcggcagcgattgcaacacatactttccacataatgacgacgccaaaacaggcattactctctccggcaatggagtggctggaacgaacattatcatcggcataatcgcaggaactattctggtcctcgccctcatcctcggcattaccgcttgggggtacaaaaactatagggaacagcgacagctcccccagggcgattatgtcaagaaacctggcgatggagattcattttactctgatattccgccaggagtctctaccaattcagcatccagcagcaagaaaaggtctaacggtctcagtcacagctggtctgaaaggatccccgacacaaaacatatttcggacatctgcgaaaatgggaggccaaggtcaaatagctggcaggggaatctcgggggtaataagaagaagatacggggcaagaggtttagaccgaggtcaaacagtacggaaaccctgtcacccgcgaagtcgccttcctctagcacaggaagcatcgcatcatcgcggaaatacccctacccgatgcctcccctgccagacgaagataagaaggtaaataggcagtccgccaggctttgggagacctcgatttag

SEQ ID NO: 107204 - DNA, 2700 bp, synthetic construct
  misc_feature 1..2700: note = Description of Artificial Sequence: Synthetic coding sequence
  source 1..2700: mol_type = other DNA
atgcaggccgccgtcgcggtgtcggtccccttcctcctgctttgcgtgctcgggacctgtcctcctgccagatgcggacaagctggtgacgccagtttgatggaactcgagaaacgcaaggagaaccgcttcgtcgaacgccagtccatagtgcctttgaggctcatctatcgaagcgggggcgaagatgaatccaggcatgacgccctggacacccgggttagaggcgatctgggggggccgcagctgacacacgtggaccaggccagcttccaggttgatgctttcggcacctccttcattctggacgttgtcctgaatcacgatctgctatcaagcgagtacatcgagaggcatatcgagcacggcgggaagacagtggaggtgaaaggcggagaacattgttactatcaggggcacatccgcggcaacccagactcgttcgtggccctgtcgacttgtcatggcctgcatgggatgttctatgacggtaaccacacttaccttatcgagccagaggagaacgacaccacacaagaagatttccactttcactcagtctataagtcaaggcttttcgaattttccttggacgacctcccaagtgagttccaacaggtcaatattactccttccaagtttattctcaagccacgacccaaacgctcaaaacgtcagctgcgccgctacccccgcaatgtggaggaggaaactaaatatattgaacttatgattgtcaacgatcacttgatgttcaaaaaacacaggctcagtgtggtacatacgaacacctacgctaaaagcgtggttaatatggctgacctaatctataaagaccagctgaagactcgcatcgtcctcgtggcaatggaaacctgggcaactgacaataagtttgccatatcagaaaaccccctaatcaccttaagggagtttatgaaatatagacgtgacttcatcaaagaaaagtctgatgccgtgcacctgtttagcgggtcacagtttgagtcttcgcggagcggcgccgcatacattggcgggatttgtagcctgctcaaagggggaggggtgaatgagttcggcaagaccgacctgatggccgtgactctcgctcaaagcctcgcgcataacattggtatcattagcgataaacggaaactggcgagtggagagtgtaagtgcgaggacacatggtctggctgtatcatgggagataccggatactacctgccaaagaagttcacacaatgtaatatagaggagtaccacgattttctgaatagcggcggcggcgcttgcctgttcaataagcccagcaagctcctcgacccgcctgaatgtggtaatggcttcattgagaccggggaggagtgtgactgtgggactcctgcagagtgcgtgttggagggagctgagtgctgtaaaaagtgcactcttacacaggacagccagtgttcggacggactgtgttgcaagaagtgcaagttccagccgatgggcacggtgtgtcgggaagctgttaacgattgcgacattcgggaaacgtgcagcggaaattcttcacagtgcgctcctaatatccataagatggacgggtactcatgcgacggtgtgcaaggaatctgcttcggtggaaggtgcaagactagggaccggcagtgtaagtacatatgggggcaaaaggtcactgcatcagacaagtactgctacgaaaagctgaacattgaaggcaccgaaaaaggcaattgtgggaaagacaaggatacctggattcagtgtaacaagagagatgttctgtgtggttacctcctgtgcactaacatcgggaatatccccagactcggcgaactggatggagagatcacaagtacgctcgttgtacagcaggggcgtactctcaactgtagcggaggacacgtcaagttagaggaggacgtggacttgggctatgttgaagacggtaccccttgcggtccccagatgatgtgtttggaacaccgttgtctccccgtggctagcttcaatttcagtacttgtctgtcctcgaaagagggcaccatctgtagcggaaatggcgtctgctctaacgaactgaagtgcgtctgtaacagacattggatcggaagcgactgcaatacctatttccctcacaatgacgatgcgaaaactggcattactctgtctgggaacggtgttgccgggacaaatataataataggcataatcgccggcaccatcctggtgctcgccctaattctcggcatcacggcctggggctataacaatatcttcaattttcggtccaatgggctgtcccattcctggtccgagcgcatccctgacactaaacacatttcagacatttgtgagaatggccgccctaggagcaatagttggcagggcaaccttgggggtaataagaaaaagattaggggtaaacgttttaggccacgctctaatagcaccgagtatttgaatccatggtttaagagggactataacgtggcaaagtgggtagaagatgtgaacaagaatacagaaggtccatattttaggactctttctcctgcaaagtctcctagttccagcactggatctatcgctagcagccgcaagtacccctacccgatgccaccactccctgacgaagataagaaggtgaacaggcaatcagcgcggttatgggagacatctatttag

SEQ ID NO: 107205 - DNA, 2580 bp, synthetic construct
  misc_feature 1..2580: note = Description of Artificial Sequence: Synthetic coding sequence
  source 1..2580: mol_type = other DNA
atgcaggctgccgtagcagttagtgtgccattcctgctgttgtgtgtgcttggcacatgcccacctgctaggtgcggacaggccggcgacgcctctctgatggaattggaaaaaagaaaagaaaacagattcgttgaaaggcagtctatagtgcccctgcggttgatctaccgtagcggaggcgaggacgagtcgcgtcacgacgcgctggataccagagtgcggggagatctggggggcccgcagctgactcacgtagaccaggcaagcttccaggttgatgcatttgggacgtcctttatcctggatgtggtgctgaaccacgacttgcttagctcggaatacattgagcgtcatatcgagcatggaggtaaaaccgtagaagtaaaaggtggcgagcactgctattatcagggacacattagagggaacccggactccttcgttgccctttcaacatgccacgggctgcacggaatgttttatgatgggaatcatacatacctgatcgagcccgaagaaaatgacaccacccaggaggatttccactttcactctgtctataagtctcgtctatttgaattctcccttgatgacttgcccagcgagtttcaacaagttaatattacaccaagtaaatttatcctaaaaccgaggcctaagcgatcgaaaagacaactgcggaggtacccccgcaatgtggaggaagagacgaaatatatcgagcttatgattgttaatgatcacttgatgtttaaaaagcaccgactatccgtggttcacacgaacacttatgcaaagtctgttgtgaacatggccgatttaatttataaagatcagctgaaaaccagaatcgtgctggttgccatggagacttgggctacggacaacaagttcgcaattagtgaaaacccactgattacactgcgcgagtttatgaagtacaggcgggatttcataaaagaaaagagtgatgctgtgcacctgttttccggatctcagtttgagtcatcccggtcaggggctgcctacattggcggaatctgctctctgcttaagggagggggcgtaaatgaattcggaaaaacagacctcatggctgtgacacttgcccagtctctggctcacaatattggaataatttcagacaaacgcaagctggcatccggagagtgtaagtgtgaggatacatggtcaggatgcatcatgggggacaccggatactacctgcctaaaaaatttactcagtgtaatatcgaagaataccatgatttcctgaacagcggggggggcgcttgcttgttcaataagccttctaaactacttgatccccccgagtgcggtaatggctttattgaaaccggtgaggaatgtgattgtggaacacccgccgagtgtgtactggagggagctgaatgctgcaagaaatgcacccttacacaggattctcagtgttccgacgggctgtgctgtaaaaagtgtaagtttcagcctatgggtactgtgtgtcgggaggcagttaacgactgtgatataagggaaacctgctcaggcaactcgagccagtgcgcacctaacattcataaaatggatgggtatagttgcgacggagtccagggcatatgtttcggaggcagatgcaagacacgggacagacagtgcaagtacatttggggtcagaaagtcaccgcgagcgataaatactgttatgaaaaactcaacatcgagggcaccgaaaaagggaactgtgggaaggataaggatacgtggatccagtgtaacaagagagacgtgttatgtggatacctgctgtgtactaatatcgggaacatcccccgactgggcgagctggatggcgaaatcacctcaactctcgtggtccagcagggacggactcttaactgttcaggagggcacgttaaacttgaagaggacgtcgatctgggttacgtcgaagatgggactccgtgtggacctcagatgatgtgccttgagcatcggtgtctgcccgttgcttcattcaacttctccacatgtctcagctctaaggaggggacgatctgctcaggcaatggtgtatgttctaatgagctgaagtgtgtgtgcaatcgtcattggataggcagcgactgtaatacatattttcctcataatgacgacgccaaaacaggtataactttatctggcaacggagtcgctggcactaacataatcataggtattatcgcaggtacaatacttgtccttgctttaattctgggcatcacagcctggggttacaaaaactaccgagaacagaggcaattaccccagggggactacgtgaagaagccgggggacggcgattctttctactcggacattcctcctggcgtgtccactaactccgccagctcttccaaaaagcgctccaacggactgtcccactcttggagcgagcgtatacccgatacaaaacatatctccgatatttgcgagaacggccgcccccggagtaatagttggcagggcaacctcgggggcaacaaaaaaaagattcgggggaaaaggtttaggccgcgatccaacagcacagaatag

SEQ ID NO: 107206 - DNA, 2613 bp, synthetic construct
  misc_feature 1..2613: note = Description of Artificial Sequence: Synthetic coding sequence
  source 1..2613: mol_type = other DNA
atgcaggcggccgttgcggtgagtgtcccgtttctgctgttgtgtgtcctgggtacgtgcccccccgccaggtgtgggcaagctggtgacgccagccttatggagttagagaagaggaaggaaaataggtttgtcgagagacagagcattgttccactgcgccttatttatcggagcggaggagaggatgaatcaagacacgacgctctggatacccgggtcaggggagacctcggagggccccagctgacccacgtggaccaagcatccttccaggttgacgcattcgggaccagtttcattttagatgtggtattaaatcatgatctcctgtcatctgaatacattgagaggcatatagaacatggcggtaagaccgttgaagtcaagggcggcgaacattgctactaccagggccatattcgagggaaccccgattcctttgtggccctctctacatgtcacgggcttcatggaatgttttatgatgggaatcacacatacttgatcgagccagaggagaatgacaccacacaggaggattttcatttccattccgtatataagtctagactcttcgagttcagccttgatgacctcccaagtgagttccagcaagtcaatatcaccccaagtaagttcatcttgaagccacgcccaaagaggagtaagcgtcagctgcgtagatacccccgcaacgttgaggaagagactaaatacatcgagctgatgattgttaacgaccatctcatgttcaagaagcaccgactctctgtagtgcacacaaatacttatgctaagagcgtggttaatatggctgatctgatctacaaagaccaacttaaaacaagaattgtgctggtcgctatggagacttgggccacggacaacaaatttgcaatttccgagaacccactaattacccttagggagtttatgaagtaccgccgggacttcattaaagagaagtccgatgcagtgcatttgttctccggttctcaattcgaatcatcacgatcaggcgctgcctatatcggaggtatctgttcgctgctgaaaggcggaggagttaacgagttcggcaaaacggatctcatggcggtgactctggcccaatccttagcccacaatattggaattatcagcgacaaaagaaaactggcatctggggaatgcaagtgcgaggatacctggagcggctgtatcatgggcgatacaggatactatctccccaaaaagttcacgcaatgcaacatcgaggaataccacgactttctaaacagcggtggaggagcttgcctgtttaacaagccctcaaaactgttggacccacccgagtgcggcaatggctttatcgaaacgggggaagagtgtgactgcgggaccccagccgagtgtgttctggagggcgctgaatgctgcaaaaaatgcacccttacccaagattcccaatgtagtgacggcctgtgttgcaaaaaatgtaaatttcagcccatggggacagtgtgtagagaagcagtaaatgattgcgatattcgggagacctgcagtgggaattcttcccaatgcgcaccaaatattcataaaatggatggctattcctgcgacggcgtgcagggaatctgtttcggtggccgatgcaagacgagagatcggcagtgcaaatacatatggggccagaaggttactgcctccgataagtactgttatgagaagcttaacattgagggcaccgagaaaggaaattgcggaaaggacaaggatacgtggattcagtgcaacaaaagagacgttctctgtgggtatttgctgtgtaccaatattgggaatatcccacgcctcggggagctggatggagaaatcacaagtactcttgtcgtgcagcagggtcgcaccctgaactgtagtgggggtcatgtcaagctggaggaggacgttgacctgggctacgttgaggatggtactccctgtggtccccagatgatgtgtctggagcacaggtgccttcccgtggcaagttttaacttcagcacttgtctgagctcgaaggagggcaccatctgctcggggaacggcgtatgtagcaacgaactcaagtgcgtatgtaatagacactggataggttctgactgtaatacatatttcccccataatgatgacgcgaagactgggatcacgcttagcgggaacggcgtggctgggactaatatcatcatcggcatcattgccgggacaattctcgtgctggccctcatcctggggatcactgcatggggctacaagaactaccgagagcaacggagcaatggtctgtcccacagctggtccgagcgaatccccgacaccaagcacatctctgatatctgtgagaatgggcggcctcggtccaactcgtggcagggcaaccttggggggaacaagaaaaaaatcaggggaaaaaggtttagacccaggtctaactcaaccgagaccctgtcacccgccaagtctccaagctctagtaccggatccatcgcctcttctagaaagtacccttaccccatgccaccattgcccgacgaggacaagaaagtgaacagacagagtgctcgcctgtgggagaccagcatttag

SEQ ID NO: 107207 - DNA, 2700 bp, synthetic construct
  misc_feature 1..2700: note = Description of Artificial Sequence: Synthetic coding sequence
  source 1..2700: mol_type = other DNA
atgcaagcggccgttgccgtgtcagtgccctttctgcttttgtgcgtcttggggacttgtccgcctgcccgatgcgggcaggcgggcgatgcatccctgatggaactcgagaagaggaaagaaaataggttcgtcgagaggcagtccatcgtgccccttcgactcatctaccgctctgggggcgaggacgagagtcgccacgacgccttagacacccgggttagaggggatctcggcgggccacagctcactcatgtggaccaggcttctttccaggttgacgcattcgggacttcatttatcctggacgtggtgctcaatcacgacttactctcgtctgaatatatagaacgccacatagaacacggagggaaaactgtggaagtgaagggcggggaacactgctactatcagggccacataagagggaaccctgacagtttcgtggcactcagtacgtgccacgggttgcacggcatgttttatgacggaaatcacacctaccttatcgaacctgaggagaacgataccacccaagaagattttcatttccattcggtctataagtcccgcctcttcgaattctcgctggatgacctgccctccgagtttcagcaggtgaatattacacccagtaaatttatactcaagccaagacccaaacggtctaaaaggcagttgcgtaggtatcctagaaacgttgaagaagaaacaaagtatattgaactgatgatcgtgaacgaccatttgatgtttaagaagcatcgcttaagtgtggtacacacaaacacatacgcgaagtcagttgtgaacatggctgacttgatctataaggatcagctcaagacgcgcatcgtcctggtcgcgatggaaacttgggcgaccgataataaattcgcaatatcggagaacccactaatcactctccgggagttcatgaaatatcgccgcgatttcataaaagaaaagtctgatgcggtgcacctcttctccggcagccagtttgaatcctccagatcaggcgccgcttatatcggcggtatctgttccctcctgaagggtggcggcgtgaatgagttcggaaaaaccgaccttatggccgtcactctggcccagtccctagcccacaacatcgggatcatatcagataagcgtaagcttgctagtggagaatgcaagtgtgaagatacatggtcagggtgcataatgggagacactggatattacttacctaaaaaattcacgcaatgcaacatcgaggaatatcatgatttcctgaattcagggggcggagcctgcttgtttaacaaaccgtccaagctgctcgacccgcccgagtgtggaaacggctttattgagacgggcgaagagtgtgattgtggaacaccggctgaatgtgtgctcgaaggagccgaatgttgcaagaagtgcacacttacacaggactcccaatgctccgatggtttatgttgcaagaagtgtaagttccagcctatggggaccgtgtgcagagaggcggtcaacgactgtgacattcgcgagacttgctccgggaattctagccaatgcgcacccaatatccataaaatggatggatactcttgcgacggcgtgcaaggtatatgttttgggggacgctgcaagaccagagatcgccagtgtaagtacatttggggccaaaaagttaccgcctctgacaaatattgttatgagaaattgaacatagagggcactgagaaggggaactgtggcaaggataaagacacttggattcagtgcaataagagagatgtcttgtgtggctacctgctctgtaccaacatcggcaacatcccaaggctcggagagcttgacggggagatcacaagcacactcgttgtgcagcaaggtagaacactgaactgctctggcggccatgtgaaactcgaagaagacgtggacctgggttacgtagaggacggaacgccatgcggcccccagatgatgtgtctggaacaccgctgtctgcccgtggctagcttcaacttttcaacgtgtctgtcttccaaggagggcaccatctgttctggaaacggagtttgcagcaatgagctcaagtgtgtatgcaacagacattggatcggctcagactgtaacacctattttccgcacaatgatgacgcaaaaaccggcattacactgtcaggtaacggtgtggcaggaactaatattatcattgggataatagctggaaccattctggtcctggccctcatcttaggtatcactgcatgggggtacaaaaattatagagagcagcgcagcaacgggctgagccatagctggtctgagcggattccagacacaaagcatatctcagatatatgcgaaaacgggcgtccccgtagcaactcttggcaagggaatctgggaggtaacaaaaagaagattcggggaaaaaggtttcgcccgagatccaattctacggaatatctgaatccctggtttaagcgggattataacgtggctaaatgggtcgaggacgttaataaaaatacggaaggcccctatttccgaaccctgtcaccagctaaatctccttcctcgtcaacagggtctatcgcaagctctaggaaatacccctaccccatgccgcccctgcccgacgaggacaagaaagtaaatagacagtctgcacgtctctgggagacatccatttag

SEQ ID NO: 107208 - DNA, 2328 bp, synthetic construct
  misc_feature 1..2328: note = Description of Artificial Sequence: Synthetic coding sequence
  source 1..2328: mol_type = other DNA
atgcttcaaggattgctgccggtgagcttactgctttccgtggcagtgtctgcaatcaaggaactcccaggagtcaagaagtatgaggtcgtgtacccaatcagactgcaccctctacacaagcgtgaggctaaagaacccgaacaacaagaacagttcgagaccgagctgaaatataagatgactataaacgggaagattgcggttctgtacttaaaaaaaaacaaaaatctgctagcccccggttatacagagacttattacaactctacgggaaaggaaattacgaccagcccgcagattatggatgattgttactaccagggacatatcctgaacgagaaagttagcgacgcatctatcagcacgtgcaggggcctgcgtggctattttagccaaggggatcaacgatactttatcgaaccattgagccccattcaccgggatggccaggaacatgccctattcaagtacaacccagacgagaaaaactatgactccacatgcggtatggacggggtcctgtgggcccatgatcttcagcaaaatatagccctgcccgcaactaaattggtaaaactgaaagacaggaaggtgcaagagcacgagaaatatatcgagtactacttagtcctcgacaacggagaattcaagcgatacaacgagaaccaggacgaaattcggaagcgagtcttcgaaatggcaaattatgtcaacatgctgtataaaaaactgaatacccatgtcgccctcgtgggcatggagatctggaccgacaaggacaaaatcaaaatcaccccaaatgctagttttacactcgaaaacttttctaagtggcgcggttccgtgctgtcgcggcggaagagacatgatatcgcgcagctgataacagctacagaacttgctgggactactgtcggactggcctttatgagcaccatgtgctccccctacagcgtgggagtagtgcaggaccattctgataacttactgcgcgtcgccggaactatggcccatgagatgggacacaattttgggatgtttcatgacgactatagttgcaaatgccccagtaccatctgcgtgatggataaagccttaagtttctatatcccaaccgatttttccagttgcagccggctatcttatgataaatttttcgaggataagttgagcaactgtctgtttaacgctcctcttcccactgacatcatttccacaccaatctgcggaaatcagctcgtggagatgggtgaagattgcgactgcggcacgtccgaagaatgcactaatatctgctgcgatgccaagacttgcaaaataaaagccacatttcaatgtgccttgggggagtgctgcgaaaaatgtcagttcaagaaagcaggcatggtatgccgcccagctaaggatgaatgtgaccttcctgagatgtgtaacgggaaatcgggtaattgcccagatgacaggtttcaggtgaacggcttcccatgtcatcatggcaagggacattgtctgatgggcacctgtcctaccctgcaagaacagtgcaccgagctctgggggcccggaactgaggtggccgacaagagttgttacaaccgcaacgagggcggcagcaagtatgggtattgccggagagttgacgacacgctcatcccctgtaaagcaaacgatactatgtgcgggaaactgttttgccagggtggatcagacaatctaccttggaaaggtaggatagtgacatttctcacatgcaagaccttcgaccctgaagacaccagccaggagatcggcatggtagcaaacggcacaaagtgcggggacaataaggtttgtatcaatgccgagtgtgtggacatcgaaaaggcctataagtccactaactgcagcagcaagtgcaaaggccacgccgtctgtgatcatgagttgcagtgtcaatgtgaagagggctggatacccccagactgtgatgattcatcagtcgtgtttcatttctcgatcgtggtcggggttttattcccgatggctgtgatcttcgtcgtcgtggcaatggttatccgtcatcagtcttctcgggagaaacagaagaaggaccagcgtccgttaagtacaaccggcactcgacctcataaacaaaaaaggaagccccagatggtgaaggccgtccaaccacaggagatgtctcagatgaagccccacgtgtatgacctccccgtggaggggaacgagcctcctgcaagctttcacaaggacacaaatgccttaccgcctactgtgttcaaggacaaccctgtcagtacaccaaaagatagcaaccctaaggcatag

SEQ ID NO: 107209 - DNA, 1452 bp, synthetic construct
  misc_feature 1..1452: note = Description of Artificial Sequence: Synthetic coding sequence
  source 1..1452: mol_type = other DNA
atggagatctggaccgacaaagataagataaagatcacgcctaatgctagcttcacactggagaatttctctaagtggaggggcagtgtgctttctagacgcaagcgtcatgatattgctcagctgatcaccgccaccgagctcgctggtacgaccgtgggtctggcctttatgtcaactatgtgtagtccgtactctgtgggagtagtgcaggatcattctgacaatctcttacgggtcgcgggaaccatggcacacgaaatgggacacaacttcggcatgtttcacgatgattattcttgcaagtgtccctctacaatctgtgtgatggataaagctttgtctttctatatccccaccgacttttcttcatgctctcggctgtcatatgacaagttttttgaagataagttatccaactgtctgttcaacgctcctcttcccacagatatcatttccacccctatctgcggaaatcagctggttgaaatgggggaggattgtgattgcgggactagcgaggagtgtaccaatatatgttgtgatgctaaaacctgcaaaattaaagccaccttccagtgcgcactgggcgagtgctgcgaaaagtgccaattcaaaaaagccggaatggtgtgtaggcccgcgaaggacgagtgtgatctcccagagatgtgtaacggtaaatcgggcaattgccccgacgatcgctttcaggtgaatggttttccttgtcaccatggcaaggggcactgcctcatgggtacatgtcctacactccaagaacagtgcacagagctttggggtcctggcactgaagttgctgacaaatcttgttacaaccgcaatgaggggggctcaaagtacggctattgccgccgcgtcgatgataccttgattccatgcaaagccaacgacaccatgtgtggcaagctattttgccagggcggaagcgataacctgccctggaaaggaagaatagtgaccttcctgacttgtaagacattcgaccccgaggacactagccaagagattggcatggtcgcaaacggtaccaagtgcggggacaataaggtctgcatcaacgccgaatgcgttgatatcgaaaaggcctataagtccactaactgcagcagtaaatgtaaaggtcacgcagtctgtgaccacgaactccagtgtcagtgtgaggaaggttggatccctcccgattgcgatgactctagcgtcgtatttagacgcttacttcattgcggctggggagccgtccctaatggaggccatttttgcggcgggtgctacgggaatccagcccctgagttacagaggaaagctgaagagcgtagcgaagctaccatctaccattggcatcaggcaactcagacagaggaagagaccccggacgggaagggctgttctacacctcgggacgagtcggatgaggccccctgcgtgtag

SEQ ID NO: 107210 - DNA, 1623 bp, synthetic construct
  misc_feature 1..1623: note = Description of Artificial Sequence: Synthetic coding sequence
  source 1..1623: mol_type = other DNA
atgctccagggtctgctgccggtgtccctgctgctgagtgtggccgtgagtgccatcaaagaattgccaggtgttaagaagtatgaggttgtttatcccatccggctccacccactccacaagcgggaggccaaggagcccgaacagcaggaacaatttgagaccgagttaaaatacaaaatgaccataaacggtaagattgctgtgctgtatctgaagaaaaataaaaacctattagctcctggctacaccgagacttactacaacagtaccggcaaagagattacgacgtctccgcagatcatggatgattgttactatcaaggtcacattttgaacgagaaagtttctgacgcgagcatctccacctgccgtgggctgcgcggctatttcagccagggtgatcagcggtattttatagagccacttagcccaattcatagagatggacaggagcatgcccttttcaagtataaccccgacgagaagaattatgatagcacatgtggcatggatggagtcctttgggcacacgatctgcagcagaatattgccctccctgccactaagctcgttaaactcaaagaccggaaagtccaggaacatgagaaatatattgagtattatctggtgcttgacaacggcgagttcaagcggtacaatgaaaaccaggatgagatccggaaacgcgtgttcgaaatggcaaattacgtgaacatgttatataaaaaactcaacacgcacgttgcccttgttggaatggagatctggaccgacaaagacaagatcaaaataacccctaacgcgtcctttacactggagaactttagtaagtggcggggatcagttttaagtcgtcggaaacgacatgacatcgctcagctaataacagctacggagctggctgggacaactgttggccttgctttcatgtccacaatgtgcagtccgtatagcgtgggggtggtccaagaccactccgataacctgctacgtgtggcaggcacgatggcccacgagatggggcacaattttgggatgttccatgatgactacagctgcaagtgtccctcaaccatctgtgtgatggacaaagcgctcagtttctacatcccaaccgatttcagcagctgcagccgtttgtcctacgacaaattttttgaggacaagctgagcaactgcctgttcaacgctcccctgcctacagacatcatctcaacacccatttgtgggaatcagctggtggaaatgggtgaggactgtgactgcggtactagtgaagagtgcacgaacatatgctgcgatgccaaaacttgtaaaatcaaggccacctttcaatgcgctctcggagagtgttgcgagaaatgtcagttcaagaaggccggtatggtttgccgcccagccaaagacgaatgtgacttacctgaaatgtgtaatgggaaatccggaaactgccccgatgataggttccaggttaatggctttccctgccaccatggcaaagggcactgccttatggggacctgcccaactctacaggaacagtgcaccgagttgtgggggcccggacgtagaacaaatccctttccatgcgcatgcgccaaggaaaaccatttcaggtag

SEQ ID NO: 107211 - DNA, 924 bp, synthetic construct
  misc_feature 1..924: note = Description of Artificial Sequence: Synthetic coding sequence
  source 1..924: mol_type = other DNA
atggccaactatgtaaatatgctctacaagaaactgaacacccacgtggctttggtggggatggagatttggacagacaaggataaaattaagatcactcctaatgcttcctttactcttgaaaacttttccaagtggcgggggtccgtcctgtcacggcgtaagcgccacgacattgcacagcttattaccgccacagaactggcagggacaaccgtagggctggctttcatgtccactatgtgttctccctactccgtgggagtcgtccaagaccactcagataacctgttgagggtcgcaggcactatggcccacgagatgggacacaatttcgggatgtttcacgacgattattcctgcaagtgcccgtctacaatttgcgtaatggacaaagcactctccttctatatcccaacagatttcagctcttgctctcgactgtcctatgacaaattttttgaggacaagttgagtaattgcctcttcaacgcgcctctgcccactgatatcatttctaccccaatttgtggaaatcagctcgtggaaatgggagaggactgcgactgcgggacctccgaagagtgtaccaacatctgttgtgacgccaaaacctgtaagatcaaggctaccttccagtgtgccctgggtgagtgctgcgagaagtgccaattcaaaaaagctggcatggtgtgtcggcccgcgaaggacgagtgcgacctccctgagatgtgcaatgggaagtccggcaattgtcccgatgatagatttcaggtaaacggctttccttgccatcacggcaaggggcactgtcttatgggtacatgcccaacactccaggaacagtgtactgagttatgggggcctggtcggcggactaatccgtttccatgcgcctgtgctaaggagaatcattttcgatag

SEQ ID NO: 107212 - DNA, 2463 bp, synthetic construct
  misc_feature 1..2463: note = Description of Artificial Sequence: Synthetic coding sequence
  source 1..2463: mol_type = other DNA
atgaagatgctgttgctgctgcactgtctaggcgtctttctgtcttgtagtgggcatatacaggacgagcatcctcagtatcattcacctcctgatgtagtgattccagtgcgcataacaggcaccacccggggaatgaccccccccgggtggctgtcctatatacttcctttcggcgggcagaagcatatcatacatattaaggtgaagaagctgctcttttccaaacatcttcctgttttcacatacaccgatcagggtgccattctggaggaccagcctttcgttcagaacaattgctattaccacgggtacgtcgagggagaccctgagtcgcttgtctctctctccacttgctttggcggcttccagggcatcctccagataaatgactttgcgtacgaaatcaagccactggccttctccaccaccttcgagcacctcgtttacaagatggacagtgaagagaaacagttttctacaatgaggtctggcttcatgcagaatgaaatcacttgtcggatggaattcgaagagatcgacaacagcacccagaaacagtctagctacgttggctggtggattcactttaggatcgtggagattgttgtggtcattgataactacctttacataagatacgagcgaaacgattccaagttgttagaagatttatatgtgatcgttaatatcgtagacagcatactggatgtgatcggcgttaaggttctgctctttggtctggaaatatggacaaataagaacctaatcgtggtcgacgatgtgagaaagagtgttcacctctattgcaagtggaagtcagagaacatcacccctagaatgcagcacgacacatcccatctgttcacgaccctggggcttagagggctctccggtatcggggcttttcgtggaatgtgtaccccacacaggtcgtgcgcaatagtaactttcatgaataagacactcgggacattcagcattgccgtcgctcatcatctggggcacaatctcgggatgaaccatgacgaggacacatgccggtgttcccagccccgttgcatcatgcacgagggaaatccaccaattactaagttttcaaactgctcctacggggatttctgggagtacactgttgaaaggactaagtgcctcttggaaaccgttcataccaaagatatcttcaacgtgaagcgctgtgggaatggtgttgtggaggaaggagaggagtgtgattgtgggccactaaaacattgtgccaaagatccgtgctgcctgagcaactgcaccttgactgacgggagtacatgtgcgtttggcctttgctgtaaagactgtaaattccttccatcaggtaaggtctgcaggaaggaggtcaatgaatgcgacctccccgagtggtgtaatggtacttcccacaagtgccctgacgacttttacgtggaggacggcattccctgtaaggagaggggttactgttatgaaaagagctgtcacgatcgaaatgagcagtgccgccggatattcggcgctggggccaacaccgcctccgagacttgctacaaagagttgaatactctgggggaccgagtaggccattgcggcattaagaacgctacttacatcaagtgcaacatttcagacgtccagtgtggacgtatccaatgcgaaaacgtaacagagatccctaacatgtcagatcataccaccgtccattgggcgcggttcaacgatataatgtgttggtcgacagactaccatctgggcatgaaggggcccgatataggagaggtcaaagatgggaccgaatgcggtattgaccatatctgcattcaccgccattgtgttcacataaccatcctgaacagcaactgctcccctgcattttgcaataagaggggaatctgtaacaataagcatcactgccactgcaactatctgtgggacccacctaactgccttattaaggggtacgggggatctgtagactccgggccacctcccaagaggaaaaagaagaagaagttctgctacctatgcatcctacttctgattgtcttatttattctgttgtgctgtctttaccggctgtgcaagaagtcaaagcccataaaaaagcagcaggacgtacaaaccccatcagcaaaagaggaggagaagatccagcgtaggccccacgaactgccaccccagtctcaaccctgggtgatgccaagccagagtcagccacctgtgactccttctcaatctcatcctcaggtgatgccctcacagagccagccccccgtgacaccctctcaaagccaaccccgcgtaatgccctcacagtcccagcccccggtcatgccttcccagagccacccccagttgaccccaagccagtctcagccgcctgtgacaccctctcagagacaaccacagttgatgccaagtcagagtcagcctccggttaccccttcctag

SEQ ID NO: 107213 - DNA, 2463 bp, synthetic construct
  misc_feature 1..2463: note = Description of Artificial Sequence: Synthetic coding sequence
  source 1..2463: mol_type = other DNA
atgaagatgctactgttactacactgcctcggcgtgtttctgtcctgttctggtcatattcaggacgaacatccccaataccattctcctccagacgtggtgatcccagtccgtatcacaggcaccactaggggcatgacaccgccaggctggctttcttacatactgccatttggaggccaaaaacatatcatacacattaaggtgaaaaagttgttattcagtaaacatttacccgtgttcacctatacagaccagggcgctattttagaagaccagcccttcgtgcagaataattgctactatcacgggtacgtggaaggggaccccgagtcgctagtgagtttgtcaacatgttttggcggatttcaggggatactacaaatcaatgacttcgcctacgagattaagccactcgcattttctaccacatttgagcacctggtatataagatggacagcgaggagaaacagtttagcactatgagaagcggatttatgcagaatgagataacctgcaggatggaattcgaagagattgataattcaacccagaaacagagctcctacgtagggtggtggatccacttccggatcgtcgaaattgttgtcgtgatcgacaactatctgtatattcggtatgaacgaaacgactccaaactgttggaagatttgtacgtcattgttaacatcgtggactcaattttggacgtcattggtgtcaaggttttgttattcggactagagatctggacaaacaaaaacctgatcgtcgtcgacgatgtccggaaaagcgttcacttgtattgtaagtggaagtccgaaaatattacaccaagaatgcagcacgacacgtcgcatctgtttaccaccctggggctgcgaggactgagcggtattggggctttccgcgggatgtgtaccccccatcggagctgtgctatcgtcacgtttatgaataagaccctaggcacctttagtatcgcagtcgcccaccatcttggccataaccttggaatgaaccatgatgaagacacctgccggtgctctcagcccaggtgcattatgcatgaaggcaaccccccaatcaccaagtttagcaattgcagctacggcgatttctgggagtacaccgttgagcgcactaaatgcctgctggaaaccgtccatacaaaagacatctttaatgtgaaacgctgcggaaatggagtagtcgaggaaggcgaggaatgtgactgtggacccctgaagcactgcgctaaggacccctgttgccttagcaactgtacccttaccgacggatccacttgtgcattcggcctgtgttgcaaagattgcaagttcctgccctctggtaaggtgtgtagaaaagaggtaaatgaatgcgatttacctgagtggtgcaacggcacgtcgcataaatgtcccgatgacttctacgtggaggacgggatcccatgtaaggaaaggggatactgttatgaaaagtcatgtcacgacagaaatgagcagtgtcgcaggatctttggagctggtgctaatactgcatctgagacctgctacaaggagttgaacaccctaggggatcgcgtcggtcactgtggcatcaagaacgcgacatacatcaagtgcaacatatctgacgtgcagtgcggtcggatccaatgcgagaacgtgactgaaataccaaacatgagtgatcacaccacagtgcattgggcaagatttaatgatattatgtgttggtctaccgactaccacttaggtatgaagggaccagacattggtgaggttaaggatggaacagagtgcgggatcgatcatatctgcattcaccggcactgcgttcacatcacaattctcaatagtaattgcagcccagcattctgcaacaagagggggatttgcaacaacaagcaccactgccattgtaactatctgtgggacccccccaactgcctgattaaaggttacggaggcagcgtcgactcagggccgccgcccaagaggaaaaagaaaaagaagttctgttacctgtgtatactactgctgatcgttctattcatactcctgtgttgtctctataggttgtgtaaaaagtcaaagcctatcaagaagcaacaggatgtccagaccccttccgcaaaggaggaggaaaagatccagcgcagaccgcacgagttgccgcctcagagccagccttgggtcatgcccagccagtctcaacccccggtgacaccttctcagtctcatcctcaagtgatgccatctcaaagccagcccccagtcacacccagtcagtcccagcctcgagtgatgccatcccagtctcaaccgccggtgatgcccagccagtcacatccacagctgactcccagtcagtctcagccaccggtgactcccagtcagcggcagccccagttgatgccatctcaatctcagccccccgtcacaccgagctag

SEQ ID NO: 107214 - DNA, 2463 bp, synthetic construct
  misc_feature 1..2463: note = Description of Artificial Sequence: Synthetic coding sequence
  source 1..2463: mol_type = other DNA
atgaagatgctgctcttactccattgcctcggagtctttttgtcatgctctggacacatccaggatgagcatccccagtaccacagtccgccagatgtcgtgattccagtgcggatcaccggcacgactagagggatgacgcctccaggttggctgtcttatatacttccttttggagggcaaaaacatattatacacataaaggtaaagaagctgctgttctccaaacatctgcccgttttcacttatactgaccagggagccatattggaagatcagccgtttgttcagaacaattgttactatcatggctatgtggaaggcgaccccgaatctctggtttctttgtctacatgctttgggggattccaaggcatcctgcagattaacgattttgcatatgaaattaagcctctggcattctccactacattcgaacacttagtctataagatggactccgaggagaaacaatttagcacaatgaggtcaggcttcatgcaaaacgagatcacttgtagaatggaattcgaagaaatcgacaacagcacccaaaaacagagctcctacgtagggtggtggatccactttcgaattgtggaaatcgtggttgtgatcgacaattacctgtacattcgatacgaacgaaatgacagcaagctacttgaggacctctacgtcattgtcaacatagtggacagcatcctcgatgtcatcggcgtgaaagtcctgctgttcggccttgagatctggacgaacaagaacttgatcgtggtggatgacgtgcggaagagcgtgcatctgtattgtaagtggaagtcagaaaacatcacaccaagaatgcaacatgatacctcacacctgttcaccactctgggattgcgggggctgtcaggtatcggagccttcagaggaatgtgtacaccacacaggtcatgtgccattgtgacctttatgaataaaactttgggcacattctccattgcagtggcgcatcatctgggccacaacctgggcatgaaccacgatgaagatacgtgccggtgcagccagcccaggtgcatcatgcacgagggaaacccccctatcaccaagttttctaattgctcctacggcgatttttgggaatacaccgtggagaggaccaaatgcttgctggaaaccgtgcacaccaaagacatttttaacgttaaacgctgtggtaatggtgtcgtggaggagggcgaagaatgcgattgcgggcccttaaagcattgtgcaaaggacccctgctgcttatcaaactgtacactaaccgatgggagcacatgtgcgttcggtctttgttgcaaagactgcaagtttctcccttccggaaaagtctgtagaaaggaggtgaatgagtgtgatctgcctgaatggtgtaacggaactagccacaagtgtcccgatgatttctatgtggaagacggcattccatgcaaggagcggggctactgctatgaaaaatcatgccacgatagaaacgagcagtgtaggagaatattcggtgcaggggcaaacacagcatctgagacatgttacaaagaacttaacacgttgggcgaccgggtgggtcactgcggaatcaaaaacgctacttatattaaatgcaatatttcggacgttcaatgtggccggatccaatgtgaaaacgtgactgaaattccaaatatgagtgaccacaccacagtccactgggctcgctttaatgacattatgtgctggtcaacagattaccacctgggaatgaagggccccgatattggagaggtgaaggatgggactgagtgcggaatcgaccacatctgcatacaccgccactgcgtacacatcacaatccttaattctaactgctccccagcattttgcaataaacggggtatttgcaataacaaacaccattgtcactgcaactacctctgggatcctccgaactgcctcatcaaaggatacggcggctctgtggacagtggccccccccctaaacgaaagaagaaaaagaagttttgttacctgtgtatactgctcttgatcgtccttttcattctcttgtgttgcctctatagactctgtaagaaatccaagccaattaagaaacagcaggacgtgcagaccccgagcgctaaagaagaagagaaaatccagcgtcgtccgcatgagctgcccccccagtcacagccgtgggtcatgccctcacagtcccaaccacctgtgaccccctctcaaagtcatcctcaggtaatgccgagccagagccagccccccgtgactccatcccagtctcaaccgagggtaatgccatcccagagtcagccacccgtgatgcccagccagagtcacccgcaactaacccccagtcagtctcaacccccagtaacccccagtcaacgccaaccccagctaatgccttcacagtcacagcccccagtgactccttcctag

SEQ ID NO: 107215 - DNA, 135 bp, synthetic construct
  misc_feature 1..135: note = Description of Artificial Sequence: Synthetic coding sequence
  source 1..135: mol_type = other DNA
atgaagatgttgttgttgctgcattgtctgggcgttttcctctcgtgctcgggacacattcaggacgagcatccccagtaccacagcccgcctgatgtggttatacccgtccgaatcaccgggacaaccagatag

SEQ ID NO: 107216 - DNA, 273 bp, synthetic construct
  misc_feature 1..273: note = Description of Artificial Sequence: Synthetic coding sequence
  source 1..273: mol_type = other DNA
atgaaaatgcttctattgctgcactgccttggcgttttcttgtcttgttccggtcacattcaggatgaacatccacagtaccattccccacctgatgtggtcattcccgtgaggattaccggcacaactcgcggaatgaccccccctggatggctaagctacatcctgccgttcgggggccaaaaacacataattcacataaaggttaaaaaactattattcagcaaacacctgcccgtgtttacttataccgaccagggggcaatcctatag

SEQ ID NO: 107217 - DNA, 45 bp, synthetic construct
  misc_feature 1..45: note = Description of Artificial Sequence: Synthetic coding sequence
  source 1..45: mol_type = other DNA
atgaaaatgctgctccttctccactgtctgggtgtctttctctag

SEQ ID NO: 107218 - DNA, 2463 bp, synthetic construct
  misc_feature 1..2463: note = Description of Artificial Sequence: Synthetic coding sequence
  source 1..2463: mol_type = other DNA
atgaaaatgctgctgttgctccattgtttgggagtattcttgtcttgcagcgggcatatccaggacgaacacccgcagtaccactctccgcctgatgtcgtgattcctgtgcgaataacagggacaacccggggaatgacaccccccggttggctctcatatattctgccctttggaggacagaagcacatcatccacatcaaggtgaagaaactgctcttttctaaacacctgcctgtgtttacatacacagatcagggcgcaatactcgaggaccagccctttgtgcaaaataactgctattatcacgggtacgtggaaggggatcccgaaagcctggtttctctgagcacatgctttggaggcttccaagggattctgcaaatcaatgactttgcttatgaaatcaagcccctggctttcagcaccacattcgagcatctagtatacaaaatggattccgaagagaagcagttcagcaccatgcggtcaggttttatgcagaatgaaatcacatgtcggatggagttcgaagagatcgataattctacccagaagcagtcctcttatgtgggatggtggattcatttccggatagtagaaatagtcgtggttatagataattatttgtatataaggtacgaaaggaacgatagcaagcttctggaggatttgtacgtcattgttaatatcgttgattcgattctggatgtgatcggtgtgaaggttctccttttcggactggagatctggactaataaaaatctaattgtggtggacgacgtgaggaagagcgtgcatctgtactgtaaatggaaaagcgaaaatattacacccaggatgcagcatgatacaagtcacctttttacaacactgggtctgaggggcttgtcaggcatcggtgcttttaggggaatgtgtacaccacataggagctgcgctatagtaacttttatgaacaaaactctggggacattttccattgccgtggctcaccatcttggtcacaatctcgggatgaatcacgacgaggatacatgtcgatgtagtcagcctagatgtatcatgcatgaaggaaatccccctattacgaagtttagtaactgttcttatggggatttctgggaatacaccgttgagagaactaaatgcctccttgagacagtgcacactaaggacattttcaacgtgaagaggtgtggaaatggggtggtggaagaaggagaggagtgcgattgcggccctctgaagcattgcgcaaaagacccgtgttgcctgtcgaactgcaccctcacagacggtagcacttgcgcctttggcctttgttgtaaagattgcaaatttctcccctccggcaaggtctgtagaaaggaagttaacgaatgcgatctcccagaatggtgtaacggaacctcccacaagtgccctgacgatttttacgtcgaggatggaatcccctgcaaagagcgcggttactgttacgaaaaatcatgccacgaccgaaatgagcagtgccgccgcatcttcggtgcgggcgccaatactgccagtgagacctgctacaaagaactgaataccttgggggatagagtgggtcattgcggcatcaaaaatgccacctacataaaatgcaatatttctgacgttcagtgtggccgcatccagtgcgagaacgtcacggaaatcccgaacatgagtgaccacacaaccgtgcactgggcccgctttaatgacatcatgtgctggtccacagactatcacttgggtatgaaaggaccagacataggtgaagtgaaagacggcaccgaatgtggcatagaccacatatgcatccatcgccattgcgtgcacatcacaattcttaactcaaactgcagtcctgccttctgcaacaagaggggaatctgcaacaacaagcatcattgccactgcaactatctgtgggacccacctaattgtctgatcaagggctatggaggaagtgtagactccggacctccaccaaagcgcaagaagaaaaagaaattttgctatctgtgcattctgcttctcatagtcctgtttatccttctgtgctgcttgtacagactgtgtaaaaagtcaaagccgatcaagaaacagcaagatgtgcagaccccaagtgcaaaggaggaagaaaagatacaacgcagaccacatgaactccccccacagtcccagccatgggtcatgccttcccaatcccagccgccagtcacaccgagtcagagccatccacaggttatgcccagccagtcccagccaccagttaccccctcccagtctcaacctagagtgatgcctagccagtctcagccccccgttatgcccagtcagagtcatcctcaacttacaccttcgcagagtcaaccccccgtcactcccagtcagaggcaaccgcagttgatgccgagtcagtcacaaccaccagtcacccccagttag

SEQ ID NO: 107219 - DNA, 2373 bp, synthetic construct
  misc_feature 1..2373: note = Description of Artificial Sequence: Synthetic coding sequence
  source 1..2373: mol_type = other DNA
atgcgttcagtccagattttcctcagtcagtgtaggcttctcctgctcttggtgcctacaatgcttctgaaatccctgggagaggacgtgattttccatccagagggggaattcgacagctatgaggtcactatccccgaaaagctctcttttcgcggcgaagttcaaggagtggtgtcccctgtgagctatttgctgcagctaaaaggcaagaaacacgtgcttcatctatggcctaagcgactcctcttgccaagacatctgcgggtattctctttcaccgaacatggagagctccttgaagatcatccgtatattcccaaggactgcaattacatggggtccgttaaggagtcccttgattctaaagccaccatctccacttgcatggggggcctgcgcggagtcttcaacattgacgcgaagcactaccagattgaaccgctcaaggctagtccgtctttcgagcatgtcgtttaccttttgaaaaaagagcagtttggaaatcaggtgtgcggactaagcgatgacgagatcgagtggcagatggctccatacgaaaacaaggctagactgagagatttccctgggtcttacaagcacccgaagtatcttgaactcatcttgttgttcgaccagagtagatacaggttcgtcaataacaatctaagccaagtaatccacgacgctatccttctcaccggcatcatggacacctattttcaggacgttcgaatgagaatccacctgaaagctttagaagtgtggaccgatttcaataagatcagggtggggtatcctgaattggcagaggtgttaggtcgtttcgtcatttacaagaaaagcgtcctgaacgcccgactgagctctgattgggcccacttatacctccagagaaaatataacgacgccttggcttggtcattcggaaaggtttgttcactcgagtacgcggggtctgtgtccacactcctggatactaacattctggctccagcgacctggtctgcccacgaactgggccacgcagtggggatgagtcatgacgaacagtactgccagtgccgaggacggttgaattgcataatggggtctggcaggaccggattctctaactgttcatacatttctttttttaagcacatatcatcgggcgctacatgtctgaataacatacccggcctcgggtacgtcctgaaaagatgtggtaacaaaatcgtcgaggataacgaagagtgtgactgcggcagcacagaggagtgtcagaaagacagatgttgccagagcaattgtaagttgcaacctggcgctaactgtagtattggcctgtgctgccacgattgtcgcttccggccaagcggttatgtatgcagacaggagggaaacgagtgcgatttggccgagtactgtgatgggaactccagcagctgtcctaacgacgtatataagcaggatggaaccccatgtaagtacgagggcagatgcttccggaaagggtgccgcagccggtacatgcagtgccaaagtatctttggccctgacgctatggaagctccaagtgaatgctatgacgctgtcaatctaataggcgaccaattcgggaattgtgaaataactggaatcagaaatttcaagaaatgcgaaagtgccaactccatttgtgggaggttgcaatgcatcaatgtggagactatcccagatctccccgaacacactacaataatttcaacccatttgcaggcagaaaacctcatgtgctggggaactggctaccacctgagcatgaagccgatggggatcccagacctggggatgatcaatgatggcacaagttgtggcgagggaagagtatgttttaagaaaaattgtgtgaactcttcagtgctgcagttcgactgtctacctgaaaaatgcaacacgcgaggcgtttgtaataaccgcaagaactgccactgtatgtacggctgggctcctccattctgcgaagaggtcggctatggagggtctatcgatagcggaccacctggactgctacgcggcgccatcccatcaagcatttgggttgtgtctatcatcatgttccgcctgatcctcctcattctcagcgttgtcttcgtcttcttccggcaagtcatcgggaatcacctgaagcctaaacaggaaaaaatgcccctctcaaaggctaagactgaacaggaagagtctaaaactaaaacggtgcaggaggagagcaaaactaagacgggccaggaagaatccgaagctaaaactggccaggaggaatctaaagctaaaaccggtcaggaagaaagtaaagcgaatatagaaagcaagcgccccaaagctaagagcgtcaagaaacagaagaagtag

SEQ ID NO: 107220 - DNA, 2346 bp, synthetic construct
  misc_feature 1..2346: note = Description of Artificial Sequence: Synthetic coding sequence
  source 1..2346: mol_type = other DNA
atgcgatccgtgcagatcttcttgtctcagtgcaggcttctcttactgctcgtgcctaccatgctgctgaagtcactgggtgaggatgtcatctttcatcccgaaggtgagttcgattcttacgaggtgacaataccagagaagctgtcttttaggggggaggttcagggagtggtaagccccgtatcatatctactgcagctgaagggcaaaaaacatgtgctgcatctctggccgaagcgtcttctgttgcctcgccacctcagggttttcagctttaccgaacacggggaattgttagaggatcatccgtacattcctaaagactgtaattacatgggaagcgtcaaagaaagcctcgacagtaaagccactattagcacctgtatgggaggtctgcgaggcgtgtttaatattgacgccaaacattaccagatcgaaccactgaaggcttctccttcattcgaacacgtggtgtacctgctaaaaaaagagcagttcggcaaccaggtctgcggcttgtccgacgacgagattgagtggcagatggccccttatgagaacaaagccaggctcagggattttcctggttcatacaagcatccgaaatacctggagctgattttgctatttgatcagagtagataccgtttcgtgaacaacaatttgtctcaggtcatacatgacgcgatcctgctgactggaatcatggacacatacttccaggatgtccggatgcggattcaccttaaggccctggaagtatggactgatttcaataagatccgagtgggctacccggagctggcagaggttctaggcagattcgtgatttataaaaagagcgtgctcaatgctaggctctcctctgactgggctcacctgtatctgcagaggaaatataatgatgctttggcctggagctttggcaaggtttgctccctggaatacgcaggatctgtgagcaccctgctggacacaaacatcttagcgcccgccacttggtctgcccacgaattgggccacgccgttggaatgtcgcatgacgagcagtactgtcagtgcagaggaagacttaattgtattatgggttccggacgtaccgggttctctaactgctcctacatttccttctttaagcacatcagctctggagccacttgcttaaataatatccccggacttggatacgtcctcaagcgctgtggcaacaagattgtggaggacaatgaagagtgtgattgtggtagtacagaggaatgccagaaagaccggtgttgccagtccaattgtaagctccagcccggcgcaaactgtagcatcggtctctgttgccacgactgcagatttcgtccatctggatatgtgtgtcgccaggaagggaacgagtgtgaccttgctgagtactgtgacggtaacagttccagttgtccgaacgacgtctacaagcaggacggcaccccatgtaaatacgagggccgctgcttccgaaaaggatgtagatcaaggtacatgcagtgtcagagcattttcggccctgatgccatggaggccccgtctgagtgctacgatgccgttaatcttatcggtgaccagtttgggaactgcgagattaccggtattcgtaatttcaagaaatgcgaatctgccaactcgatctgtggacgcctgcagtgcattaacgtcgaaactattcccgatttaccagaacatacaaccattatatctacccacttacaagcggagaacttgatgtgctggggaactggatatcatttgtccatgaaacccatgggtattccagatctaggtatgatcaacgacggaacatcatgtggcgaaggccgagtctgctttaagaagaactgcgtcaattcatccgtcctccagtttgattgcctccctgaaaagtgcaatacgaggggggtgtgcaacaatcgaaagaactgccactgtatgtacggctgggccccgcccttttgtgaggaggtgggttatggtgggtctatcgattcagggccccctggactgctgcgtggggccattccatccagcatctgggtcgtgtcaattattatgtttcgactgattctgctgatcttgtctgtcgtgtttgtatttttccgccaagtgatagggaaccatctgaagccaaagcaggagaaaatgcctctgtccaaggcgaagacggaacaagaggagagtaagacgaagactgtgcaagaagaatccaagactaaaactgggcaggaggagtccgaggcaaagacgggccaggaggaatccaaggccaatattgagtcgaaaaggcccaaagctaagagcgtaaagaagcaaaaaaagtag

SEQ ID NO: 107221 - DNA, 540 bp, synthetic construct
  misc_feature 1..540: note = Description of Artificial Sequence: Synthetic coding sequence
  source 1..540: mol_type = other DNA
atgggttggcgcccaagaagagccagaggcactcccctgctcctcctactgctgctgctactcctgtggccagtgcccggcgccggggtccttcagggccacattcctgggcagcccgtcaccccccattgggtactcgacgggcaaccgtggcgcacagttagcttagaggaaccggtcagcaagcctgatatgggcctggtcgcattggaggcagaaggccaggagctgttactggagctcgaaaagaaccagctcttggcccctggctatatcgaaacccactacggccccgacggccagcctgtcgtcctggcacctaaccacaccgtacgttgcttccacgggttgtgggacgcaccccctgaagggcgccgcgaggcaaggcgcacacggaaatacttggagctgtacattgtggcagaccacacgctgttccttacgaggcaccgaaacctgaatcatacgaagcaacgtctgctcgaggtagcaaactatgtggaccaggtcgttaacagcgcaggagatgctcacggttag

SEQ ID NO: 107222 - DNA, 336 bp, synthetic construct
  misc_feature 1..336: note = Description of Artificial Sequence: Synthetic coding sequence
  source 1..336: mol_type = other DNA
atggggtggcggcctagacgtgcacgcggcactccactgcttcttcttctgctgctcctattactgtggcctgtccccggagccggcgtgctccagggccatatacctggccagcctgtgacaccccactgggtgctggacgggcagccgtggagaactgtcagtcttgaagagcccgttagcaaacctgatatggggttggtcgccttggaagctgaaggccaggagcttttactagagcttgaaaagaaccagttactcgccccagggtacatcgaaacccactatgggcccgcacaggaatgtagagacctgtgctgcttcgcgcataactag

SEQ ID NO: 107223 - DNA, 2364 bp, synthetic construct
  misc_feature 1..2364: note = Description of Artificial Sequence: Synthetic coding sequence
  source 1..2364: mol_type = other DNA
atgggatggcgcccacgtcgggcacggggcacaccattactgctcctgctcctgctcctgctcctatggccagtgcccggcgctggggtgttgcagggtcatattccaggtcagccagtcactccccactgggttctggatggacagccttggcgtactgtatctctcgaagagcccgtcagtaaaccagatatgggcctggtagccctggaggcagaaggtcaggagctgctgcttgaactagagaaaaatcacagattactcgcacccggctatattgaaacccactacggtccagatggccaacccgttgtgctggcacccaaccacacagaccactgccactaccagggacgcgtaaggggctttcccgatagttgggtagtgctttgcacttgcagcggaatgagcggccttataaccctgagtcggaatgccagctactatttacggccatggccacctcgggggtccaaggattttagtacacacgaaatcttcagaatggagcagctcctgacgtggaaaggaacctgcgggcatcgagaccccggcaacaaagcgggcatgacttcacttcctggaggacctcaaagtcgcgggagacgtgaagcccgtagaaccagaaaatacctcgagctttatatcgtcgctgaccataccctcttcctgacccggcacaggaatctgaaccacactaagcagcggttgcttgaggttgcgaattatgtggatcagcttcttagaaccctagatattcaggtcgccctcaccgggctggaggtttggaccgagcgtgataggtcccgcgtcacacaggatgcaaatgcaacactctgggcatttttacagtggcgtcgcggcctgtgggctcagcgccctcacgacagcgcccagctgctaaccggccgagcctttcagggggcgacagttggactggcgcctgtggaagggatgtgcagggcggaaagcagtggcggcgtgtctacagatcactccgagctcccaattggagctgctgccacaatggctcatgagattgggcattcattagggctgagtcacgaccctgacgggtgctgtgttgaagccgcggccgaatcagggggatgcgtgatggcagctgctaccgggcaccccttccctcgtgtttttagcgcctgtagcagacggcagttgagagcgttctttcggaaaggcggtggggcatgcttatcaaacgcgcctgaccccggactacctgtgcctccggccctgtgcggaaatggttttgtggaagccggcgaagaatgcgactgtgggcccggccaggagtgccgggacctctgctgctttgcacataactgttccctgaggcccggcgcccagtgtgcccatggcgactgttgtgttcggtgccttcttaagcctgccggagcgctctgcaggcaggctatgggggactgcgacttgcctgagttttgcacaggaacaagctcacactgcccacccgatgtctacctgcttgatggctctccatgtgcgcgcggctcaggttattgttgggatggcgcctgccccaccttagagcaacaatgccagcagctgtgggggcctggctcacatcccgctcccgaagcatgttttcaggtggtgaactccgcaggagatgcccacgggaattgcggacaagactctgagggccactttctgccctgtgccggccgagacgcgctctgtgggaagctgcagtgtcagggagggaagccatccctgcttgcccctcacatggtgcccgtggattctaccgttcatctggacggccaggaagtgacttgtagaggcgctctggctctcccatctgctcaattagacttgctggggcttggcctggtggagcctggaacgcaatgtggcccgagaatggtgtgcaactcaaaccataactgtcactgcgccccgggctgggcccctcctttctgtgataagcccggattcggtggaagcatggattccggtcccgtacaggccgaaaaccacgataccttcctcttggccatgctactctctgtgctccttcccttactgcctggggccgggttagcttggtgctgctatcggcttcctggtgcacatttgcagaggtgtagttggggctgtcgacgggatcccgcttgttctgggccaaaagatgggcctcatagggatcacccactgggaggggtacacccaatggagttaggacctactgctaccggccagccatggccgcttgatccagagaactcccacgagccgtctagtcatccagaaaagccgctgccagcagtgtcccccgacccacaggccgaccaggtgcagatgccccggtcatgcctgtggtag

SEQ ID NO: 107224 - DNA, 2442 bp, synthetic construct
  misc_feature 1..2442: note = Description of Artificial Sequence: Synthetic coding sequence
  source 1..2442: mol_type = other DNA
atgggatggaggcccaggcgcgccaggggtactccccttttactgttgctcctgctgctacttttgtggcccgttcctggagcaggggtcctgcaagggcatattcctggacagccagtaacaccccattgggtgctagatggccagccttggcgcacagtgtccctggaggagcccgtttcgaaaccagatatgggactggtggcgttagaggcggagggccaggagctgcttctggagttggaaaaaaatcacaggctgcttgctcctggttacatcgagacccattacggaccggacggccagcccgtggtccttgcacccaaccacaccgatcactgtcactaccagggacgcgtgcgcgggttccctgactcatgggtcgtcctgtgtacttgctcgggcatgtcagggctgatcacgttgagtagaaacgcctcatattacttgaggccatggcccccccggggtagtaaagacttcagtacgcacgaaatctttagaatggagcaactgctcacatggaaagggacctgcggccacagagaccccggtaacaaagccggcatgaccagtctgcccggcggccctcaatctagaggcaggcgggaagctcgtcgcacccgtaagtatttggaattgtacatcgtggccgaccatactctatttctcactcggcaccggaacctgaaccataccaagcagcgactgctggaggttgcaaactacgtcgaccagctgcttcgaaccttagacatacaggtggcgctgactgggttggaggtttggacagagagggaccggtctagagttacccaagacgccaatgcaaccctgtgggcctttctccagtggcgacgggggttatgggcccagagaccacacgactccgctcagctgctcacaggccgtgcctttcagggagcaacggtcggcctggcgcctgtcgaggggatgtgcagggccgagtcttccgggggggtgagcacagatcacagtgaacttccaattggagcagctgcaacaatggctcatgaaataggacattccctcggcctgtcccatgacccggatggatgctgcgtggaggcagccgcagagtccggtggatgcgttatggccgcagccactggccaccccttcccaagggtttttagtgcttgttctcgccggcagcttagggccttctttcgtaaaggtggcggggcatgcctctcaaatgcgccggaccccggactccctgtgcctcctgcattgtgcggaaacggctttgtggaagcgggagaagaatgtgactgcggcccgggtcaggaatgcagggatctgtgctgcttcgcccacaactgctcactgagacccggtgcccagtgcgcccacggggattgctgtgtgcgctgcctgttgaagcctgctggcgccttgtgccgccaggccatgggcgactgcgacctcccagaattctgcactgggacttctagccactgcccccctgacgtctatttgctggatggatccccatgcgctagaggctccggatattgctgggatggtgcctgtcctacccttgaacaacagtgtcagcagctgtggggacccggctctcaccccgcccccgaagcatgcttccaggtggtcaattcagctggagatgcccatggtaattgcggacaggacagtgaaggacacttcctcccttgcgctggccgcgatgcgttgtgcggcaaacttcagtgtcagggcgggaagccctcgcttctggctcctcacatggtacccgttgatagtactgtgcacttagatggccaagaggtgacctgtaggggcgccttggcactgccgagcgctcagttggacctactgggcctcggactagttgagccggggacccagtgcggccccaggatggtctgtcagtctcgtcgctgtcgtaaaaacgcatttcaggagctgcaacggtgccttaccgcttgccactcccacggagtatgcaattccaaccacaactgccactgtgcccctggctgggcgccacctttctgtgataaaccgggcttcggcggatcaatggactctggccccgtgcaagctgagaaccatgacactttcttgcttgcaatgctcttgtctgtactgctacccctgcttccaggtgcaggcctggcctggtgctgttataggctgcctggcgcccacctccagagatgtagttggggctgcaggcgcgaccctgcttgtagtgggcctaaggatggtccccaccgcgaccatccactgggcggggttcatcctatggagttgggcccgactgccactgggcagccatggcctctggacccagaaaacagtcatgaacccagcagccacccagagaaacccctccccgcagtgtccccagatccccaagccgatcaggtgcaaatgccacgtagctgtctctggtag

SEQ ID NO: 107225 - DNA, 417 bp, synthetic construct
  misc_feature 1..417: note = Description of Artificial Sequence: Synthetic coding sequence
  source 1..417: mol_type = other DNA
atgggctggcgcccacgaagagctagagggacccctctgctcctcctccttctccttctgttgctctggcccgttccaggtgctggtgtactacagggacatataccaggacagccggtgacccctcattgggtgcttgacggccaaccatggagaaccgtgtccttggaggagccagtgtctaaaccagacatgggcttagttgccctggaggctgaggggcaagaattactactggagctcgaaaaaaatcataggctgcttgcccccggttatatcgagacacattatgggccagacgggcaacctgtggtgctggctccgaatcacactgtgcggtgcttccacggactttgggatgccccgcccgaagtcccgccacatcattcctatccttattctagcctacacagctag

SEQ ID NO: 107226 - DNA, 543 bp, synthetic construct
  misc_feature 1..543: note = Description of Artificial Sequence: Synthetic coding sequence
  source 1..543: mol_type = other DNA
atgggttggaggccaaggcgcgctcgcggcacacccctgctgctgctcctcttgcttctgttgctatggcctgtgccaggagcaggggttctgcaaggtcacatccctggtcagccagtgaccccacactgggttctagatggccagccctggcgaacagtgtcactcgaagagccagttagcaagcccgatatgggactggtggcacttgaagccgagggacaggaactgctgcttgaactggaaaagaaccagcttctggccccggggtacatagaaactcactacggaccagatggccagcctgtcgtgctggctcccaatcatacagtccgctgcttccacgggctgtgggatgctcccccagagggaagacgcgaggcccggcgcacccggaagtacctggaactctacatcgtagccgatcacaccttgttcttaactcggcatcggaatctgaatcacacaaagcaacgattgctggaggttgcaaattacgtggaccaagaatgtcgcgacctctgctgctttgcacacaactag

SEQ ID NO: 107227 - DNA, 2439 bp, synthetic construct
  misc_feature 1..2439: note = Description of Artificial Sequence: Synthetic coding sequence
  source 1..2439: mol_type = other DNA
atgggatggagaccccggcgggcgagggggacgcctctgctgctgctcctgttactgctcctgctttggccggtcccgggagctggggtgctccagggccatattccaggccagcctgtcacgccccactgggtcctggatggtcagccttggcgtactgtatccctggaggagccggtaagcaagccagatatgggactggtagccctcgaggctgagggccaggagcttctattggagctcgagaagaaccacaggttacttgcacctggttacattgagacccactacggaccagacggccagcctgtggtgctggctccaaatcatacggaccactgtcattatcagggacgagttagaggcttccctgactcttgggtggtgctgtgcacgtgttccggaatgagcgggcttattaccctgagcagaaacgcttcctactatttgcgaccctggccgccccgtgggagcaaagatttttccacccatgaaattttcaggatggagcagttgctgacttggaagggaacttgtgggcatcgtgacccaggtaacaaggccggcatgacaagcctccccggcggcccccagtcccggggacggcgggaagccaggcgtacccgaaagtatctggagttgtatatcgtggctgaccataccctgttcttgactcgtcaccgcaatctcaatcatactaaacagaggcttctcgaggttgccaactacgttgatcagctcctgaggacgttagatatacaggtagctttgacgggacttgaggtttggactgagcgcgataggtctagagttacccaggatgcgaatgccacactctgggctttcctgcagtggcgccggggactgtgggctcaacgtccacatgactccgcccagctgctaacaggtcgcgcctttcaaggcgcaacagtcggattagccccagtcgaaggcatgtgtagggctgaatccagcggtggggtctccactgatcatagtgagttgcctatcggcgccgccgctactatggcccatgagatcgggcactcacttggactgtcgcacgaccccgatggatgttgcgttgaagctgccgcggaatccggaggctgcgtgatggcagcagctaccgggcatcccttccccagggtgttctccgcctgctccaggcggcagctccgcgctttcttcagaaaaggcggaggggcatgtctcagcaatgcccccgacccagggttgcccgtcccccccgctctgtgcggcaacggcttcgtagaagctggagaagagtgtgactgtggccccggacaggagtgtcgggacctgtgttgctttgcccataactgcagcctgcgccccggtgcacagtgcgcccatggtgactgttgcgttcgatgccttctgaagccagccggcgccctatgccggcaggctatgggggattgcgacttacccgaattctgtactggaacctcctctcactgccctcctgacgtttacttactcgatggatccccgtgcgccaggggttccggatactgttgggatggcgcttgcccaactctcgagcagcaatgtcaacaattgtggggacccggatctcatccagcacccgaggcctgcttccaagtcgtgaactccgctggagacgcccatggcaattgcggccaggattcagagggacactttttgccatgtgccggcagagatgcactttgtggaaaactccagtgtcagggcggtaagccctccctcctggcccctcacatggtgccggtggacagcactgtacacctagacggacaggaggtgacctgtagaggtgcactagcactgccctccgcccagttagacctgctgggtctgggcctcgtcgagcccggaacacaatgcggtccccggatggtgtgtcagagtagaaggtgtagaaagaatgcctttcaggagctccagagatgtctaactgcttgccacagccacggcgtgtgcaattcaaaccacaattgccactgtgctccgggctgggctccgcccttttgtgacaagcccgggttcggcggctccatggactcaggacctgtccaggcggaaaatcacgatactttcctgctggccatgctgttaagtgtgctgttaccactcttgcctggcgccggactggcatggtgctgttataggctgcctggagcacatctccagagatgttcctgggggtgtagaagggatccagcttgtagcggaccaaaagatggcccccaccgggatcacccactgggcggcgtgcatcctatggagctgggccctaccgcaacaggacagccatggccgctggacccggagaattcgcacgagccaagctcccaccctgaaaaaccgctacccgccgtgtcgcccgatccccaagaccaggtgcagatgcctagatcttgtctgtggtag

SEQ ID NO: 107228 - DNA, 456 bp, synthetic construct
  misc_feature 1..456: note = Description of Artificial Sequence: Synthetic coding sequence
  source 1..456: mol_type = other DNA
atgggatggaggccgaggagagcccgcggcactcccctgctgctcttgttactgctcctgttgctgtggcctgtgccaggagcaggggtactccagggacacatacccggccagccggtaacaccccactgggtgctggacggccaaccttggcgcaccgtgtccttggaggaaccagtctcaaagccagatatgggactggtcgctctggaggcggaaggtcaggagctgctgttagagctggaaaaaaaccaggatgctctttgcgggaagctgcaatgccagggcgggaagccaagcctccttgctccacacatggtacccgtagactctacagttcacctagatggacaggaagtcacctgccgaggggctcttgcactgccgagcgcccagctggacctgctggggctgggactggtcgaacccggtacccagtgtgggccacggatgtag

SEQ ID NO: 107229 - DNA, 2079 bp, synthetic construct
  misc_feature 1..2079: note = Description of Artificial Sequence: Synthetic coding sequence
  source 1..2079: mol_type = other DNA
atgggctggcgcccaagaagagccagagggacccccttactactcctacttttgctgcttctgttgtggccagtgcctggcgctggggttctgcaagggcatattcctggccagccagttacaccacactgggtgttggacggacaaccatggaggacggtctcacttgaggagcccgtgtctaagccagacatgggcctggttgcactcgaagcagaaggccaggaactgcttctggagcttgagaagaaccaccgtttgcttgcccccggctatattgaaacccactacgggcctgatggccagccagtggtgctggctccaaaccacaccgaccactgccactaccagggcagagtgcgaggttttccagattcctgggtggtcctgtgcacttgcagtggaatgtcgggtctgattaccctcagccgaaacgcaagttattatctccgcccctggccgcctcgcgggagcaaagacttttctacccatgaaatttttcgcatggaacagctcctgacttggaagggcacttgtggtcatcgggatcctggaaataaagcaggaatgaccagcctcccaggtggtccacaaagtagaggccgacgggaggcccgtagaacccgtaagtacttggagctgtacattgtagcagaccacactttattccttaccagacatcgaaatctcaaccatactaaacaacggctgctggaggtcgctaattatgtggaccagctgcttaggaccctggacatacaggtggccctcaccggactggaagtgtggacggaacgcgaccgctcgaggcgtcaactaagggcgttcttccgaaaaggcgggggagcttgtctgtcgaatgcccctgacccaggcctgccggtcccacctgctctctgcggaaacggctttgtcgaagcaggagaagagtgcgactgtggacccggacaggaatgtagggatctctgctgctttgcccataactgctcactccgccctggagcccagtgcgcgcacggtgactgttgtgtgcgatgcttactgaaaccagctggggcgctgtgccgccaagctatgggcgattgtgatctccccgaattctgcacaggtacatcttcccactgtccacccgacgtgtatttgctcgacggatccccttgtgcccggggatctggatactgttgggacggagcctgccccaccctcgagcaacagtgtcagcagctgtggggacctggcagccaccccgccccggaggcgtgttttcaggtggtgaatagtgctggggatgcccacggaaactgtggccaggactctgagggacactttctaccatgcgctggtcgagatgctttgtgcggcaagctgcagtgtcaaggcggcaagccttcactgctcgctcctcacatggttcctgttgacagtacagtccacttggacggacaggaggttacctgtcggggcgctctagccctgccttctgcccagctggatctgctggggctgggccttgtggaacctggcacccagtgcggccccagaatggtatgccagtcccgaagatgtagaaagaacgcattccaggagctgcagagatgtctaaccgcctgccactctcatggagtatgtaacagcaaccataattgccactgtgcccccgggtgggccccacccttttgtgataaacccggtttcgggggatccatggattccgggccagtgcaggcggaaaatcatgacactttcctactcgccatgctcctttctgtactgctgcccctactgcccggcgcgggcctagcatggtgttgctatagactgcccggcgctcacctgcagcgatgttcttggggctgccgacgtgatccggcctgttcaggccctaaggatggccctcatcgggaccacccgctgggaggagtccaccccatggagttaggccctaccgcaaccggccagccctggccactcgatccagagaacagccatgagccatcttctcacccagaaaagccattgcctgccgtttctccagaccctcaggatcaggtccagatgccccgcagctgcctgtggtag

SEQ ID NO: 107230 - DNA, 522 bp, synthetic construct
  misc_feature 1..522: note = Description of Artificial Sequence: Synthetic coding sequence
  source 1..522: mol_type = other DNA
atgggctggcgtccgcggcgcgcaagagggacgccactactccttttgctgctcttgctgctgttgtggccagtgcctggcgccggcgttctgcaggggcatataccggggcagcctgtcactccacactgggtgcttgatgggcagccctggaggacggtgtcactcgaggagcctgtgtccaaaccagatatggggctggtagccctggaagctgagggtcaagagctgctgctggagttggaaaagaaccataggctgcttgccccaggctatatcgagacacattacgggcccgatggtcaacccgtcgtccttgcgcctaaccacaccgttcggtgttttcatggtctctgggacgctccacccgaggaccactgccactaccagggtcgcgtgcgtggctttccggatagctgggtggttctgtgcacatgcagcggcatgcgggctggcgaaaagcgcgcggggccaggcagtacgtggaattgcacgctctggcagactaccccctgcagctag

SEQ ID NO: 107231 - DNA, 291 bp, synthetic construct
  misc_feature 1..291: note = Description of Artificial Sequence: Synthetic coding sequence
  source 1..291: mol_type = other DNA
atggggtggcggccacggcgtgccagagggacaccactcctgcttctgctactacttctcttactatggcccgtgcccggcgccggcgtcttacagggccatatccctgggcaacctgtgacaccccattgggtcttggacgggcagccctggcgaacagttagccttgaagaacccgtgtctaagcctgatatgggattagttgccctcgaagccgaaggccaggaactgctcctggagctcgaaaagaatcagttcgcaatagccactattaccgccaccgttctgtag

SEQ ID NO: 107232 - DNA, 2265 bp, synthetic construct
  misc_feature 1..2265: note = Description of Artificial Sequence: Synthetic coding sequence
  source 1..2265: mol_type = other DNA
atgcttccaggatgcatattccttatgatcctccttatcccccaggtaaaagagaagttcatcttgggcgtggaaggccagcagctggtgaggccaaagaagctgcctctaatccagaagagggatacaggccacacacacgacgatgacatcctgaagacatacgaggaagagttgctgtacgaaattaaactcaatcgaaaaacactggtcttacacctcctgagaagcagagaattcctcggaagcaactattctgagacattctatagcatgaaaggtgaggctttcacgaggcatccacagatcatggatcactgtttttaccagggcagcattgtccatgagtacgacagcgccgcttcaatctctacttgcaatggactgcggggtttctttcggatcaacgaccagaggtacctgatcgagcccgtgaagtactctgacgagggggagcacttagtctttaagtataatctgcgcgtcccctacggggccaattatagttgtacagaactgaatttcactcgaaaaacggttccgggagacaacgagagcgaggaggacagcaaaattaaaggcatacacgatgagaaatacgtggaactcttcatagtggctgacgacacggtctataggaggaacggccacccgcataataaactccggaacagaatctgggggatggtaaatttcgtgaacatgatctacaagactcttaatattcatgtgaccttggtcggaatcgaaatatggactcacgaagataaaatagagctgtacagtaacattgagaccacactgctgagattttcattctggcaggagaaaatccttaaaaccaggaaggactttgaccacgtagttcttttgtccggcaagtggctttactcacatgtccagggcatttcttaccctggtggcatgtgcctaccctactatagcacaagtatcataaaggacttgcttcctgatacgaatatcatcgcaaatagaatggcccaccagctggggcacaacctggggatgcaacacgacgaatttccctgtacttgcccctctgggaagtgtgtcatggacagcgatggctctatccctgcgctgaaatttagtaaatgcagtcaaaaccaataccaccagtacctcaaagattacaagcctacatgtatgttgaacattccctttccttacaacttccacgactttcaattttgtgggaacaaaaagcttgatgaaggagaagagtgtgattgtgggccagctcaggagtgcaccaatccctgctgcgacgctcacacttgcgtgctcaagcctgggttcacctgcgccgaaggagagtgctgcgagagttgccagattaaaaaggctggttctatctgcagaccagccaaggacgagtgcgacttccccgagatgtgcaccggccactccccagcttgccccaaggaccagtttcgtgttaacggctttccctgtaagaattccgaggggtactgtttcatgggaaagtgtccaacaagagaagaccagtgtagcgagttattcgatgacgaagcaattgaaagccacgacatctgctacaagatgaacactaaaggaaataaatttggatactgcaaaaacaaggaaaatagattcctgccctgcgaggagaaagatgtcaggtgcgggaaaatatactgcacaggaggcgaactgtcttctctcctgggggaagataagacataccatttaaaggatccacagaaaaacgctaccgtaaagtgcaaaaccatattcctgtaccatgatagtacggatattggcctcgtcgcttcaggaacaaagtgtggagaggggatggtgtgtaacaacggcgaatgtctgaacatggagaaagtctacatctctacaaattgcccttctcagtgcaatgaaaacccggtagacggacacgggctacagtgtcattgcgaagaaggtcaagcgcccgtggcctgcgaagagaccctgcacgtgacaaatatcaccatactggtggtagtgctggtgcttgtgattgttggcatcggtgtgctcatcctgctcgtacgttaccgaaagtgcataaagcttaaacaggtgcaatcccccccgacggaaacgcttggggtcgaaaacaaagggtatttcggcgacgaacagcagatcaggactgagccaatattgccggagatccatttcctaaacaagccagccagcaaggactccaggggcatcgctgatcctaaccagagcgcaaaatag

SEQ ID NO: 107233 - DNA, 1656 bp, synthetic construct
  misc_feature 1..1656: note = Description of Artificial Sequence: Synthetic coding sequence
  source 1..1656: mol_type = other DNA
gtatgccccaggtcttattttcttgagggacgaggatcgtatagttttctgtctttgttttcaactagtcccgccccataccgccgcaatggacaccctcacaacaagctgcggaatcgaatatggggcatggtaaattttgtaaatatgatttataaaactctaaacattcacgtaacactggtaggcatcgaaatatggacacacgaggacaagatagaactatacagcaacatcgaaacaacactgttgcgtttttccttttggcaggaaaaaatcctcaaaacccgcaaggattttgaccacgttgttctgttgtccgggaaatggctgtactcccatgtgcaggggatcagttatcctggtggcatgtgcctgccctattactccacaagtatcattaaggatctcttacctgacaccaacattatagctaatagaatggcccaccagctggggcacaacctgggaatgcagcacgatgaattcccctgtacatgcccaagcggcaagtgcgtcatggactctgacggctccatccctgcccttaaatttagtaagtgttcccagaatcagtaccaccagtatctcaaagattacaaacccacatgcatgctcaacatcccgtttccctacaatttccacgacttccaattctgtggcaacaaaaagctcgacgagggagaggagtgcgactgtgggccagcacaagagtgcaccaatccatgctgtgacgcccatacttgtgtcctcaagcctgggttcacttgcgccgaaggggagtgctgtgaaagctgccagatcaaaaaggctgggtcaatttgtaggcccgctaaggatgaatgtgacttcccggagatgtgtaccggccactcccctgcttgtcctaaagatcaattccgtgtgaacggcttcccctgcaagaactctgaaggctattgttttatgggaaagtgtccaacccgggaggaccagtgcagcgagttattcgacgacgaggccatcgaaagtcatgacatctgctataagatgaatacgaaaggaaacaaatttggttattgcaagaacaaggaaaaccggtttctgccctgcgaggaaaaggacgtcaggtgcggcaagatctactgcacaggcggcgagctgtccagcttattaggggaagataagacataccacctgaaagatccacagaagaacgccactgtcaagtgcaagaccattttcctatatcatgattccaccgacatcggccttgttgcgtctggtaccaagtgcggcgaaggcatggtgtgtaacaatggcgaatgcctgaatatggagaaggtatacatctctacgaattgcccctcccagtgtaacgagaaccccgtcgacggacacggactgcagtgccattgcgaggaaggacaggcccccgtagcatgcgaggagaccctgcacgtcacaaacattaccatcctggttgtagtcctggtgctggtcatcgtggggattggcgtccttatcctgctagtgaggtacaggaaatgcattaagctgaagcaggtgcagagtccacccacagagaccctgggcgtggagaacaaagggtattttggcgacgaacagcaaatccgaactgaacccatccttccagaaattcactttctcaattag

SEQ ID NO: 107234 - DNA, 2475 bp, synthetic construct
  misc_feature 1..2475: note = Description of Artificial Sequence: Synthetic coding sequence
  source 1..2475: mol_type = other DNA
atgcggggtttgggactatggctcctgggcgcgatgatgctgcccgccatagctccatctaggccatgggcattgatggagcaatacgaggtggtgctcccttggaggctgcccggccctcgggtcagacgtgcactcccctctcatctcggcttgcaccctgaacgggttagctacgtactcggagccaccgggcacaatttcaccctccacctacgcaagaatcgagatctactcggtagcggttacacagaaacatacactgctgcgaatggttctgaggtcactgagcagccaagaggccaggaccactgtttctatcaaggccatgtggaaggctaccctgacagcgccgcttccctgagtacctgcgctggcctccgcgggttttttcaggtaggttccgaccttcaccttatcgaacctctggatgaggggggcgagggcgggaggcacgcagtttaccaagccgagcatctacttcaaaccgctggaacatgcggagtgagtgacgattccctgggctccctgctggggccgcgcactgcagccgtgtttcgacccagacccggcgattcacttccaagcagagaaacccgatacgtggaattgtacgttgtagtggacaacgccgagtttcagatgttgggcagcgaagcagcggtgcggcatcgtgtcctcgaggttgtaaatcacgtcgacaagctttaccagaagctgaactttcgcgtggtcctggtagggttagagatttggaacagccaggatcgattccatgtgtccccagatccaagtgtaacactggaaaacttgcttacctggcaggcccggcagcgcaccaggcgccatttgcacgacaacgtgcagctgatcaccggcgtcgacttcacaggtaccacggtcggtttcgcccgggtttctgcgatgtgttcccattcaagtggggcagtaaaccaggaccactctaagaaccccgtgggagttgcttgtactatggcccatgagatggggcataacctggggatggatcacgacgaaaacgttcagggctgcaggtgtcaggagcgcttcgaagccggccgatgcatcatggccggcagtataggctcttcttttccccgtatgttctcagattgtagccaagcatacctggagtctttcctggaacggcctcagtccgtgtgtctcgcaaacgctccagatctctctcacctagtcggcggcccagtgtgcggcaatctgttcgttgaaaggggtgagcagtgtgattgtgggccacccgaggattgtcgaaaccggtgttgcaatagtacaacgtgtcagctagctgagggagcccagtgtgctcacggaacatgttgccaggagtgtaaagtcaaacccgcgggcgaactttgcaggcctaaaaaggacatgtgtgacctcgaagaattctgcgatgggaggcacccagagtgccccgaagatgcattccaggaaaatggtacaccctgctccggaggttattgctacaacggagcatgccccacattggctcagcaatgccaggccttctgggggcccggaggccaagctgcggaggagtcatgttttagctacgatatcctgcccggctgtaaggctagccgctacagagccgatatgtgcggggtattacaatgtaaaggcggacagcagcccctgggcagagctatatgcattgtggacgtctgccacgccttaaccaccgaggatggtacagcatacgaacctgtgccggagggcactagatgcgggccagagaaggtctgctggaaggggagatgtcaggatcttcacgtttatagatcaagcaattgtagcgcccagtgtcataatcacggcgtctgtaatcacaaacaggagtgccactgtcatgcgggctgggcgccaccccattgcgccaagctgctgaccgaagtccacgctgcttcaggctctttgcccgttttcgtggtggtggtgctggtccttctggccgttgtactcgtaacactagcaggaattatcgtctatcgcaaggcgcgatctaggatcctgtcacgaaacgtcgctcctaagactactatgggcaggtccaatcctctgttccaccaggctgcgtctcgggttcctgcaaaagggggcgctcctgccccatcaaggggtccacaggagcttgtgcccacaactcacccgggtcaaccagcgagacacccagcgtcgtcagttgcactgaagcggccaccccccgctccacccgttacagtgtcttcacccccatttccagtgcctgtctacacaaggcaagcgcctaagcaggtgatcaaacccacatttgccccccccgtcccaccggtgaagcccggtgccggagctgcaaaccccgggccagcagaaggcgctgttggccctaaagtcgccctgaaaccgcccatacagcggaagcagggtgccggggcccccacagctccctag

SEQ ID NO: 107235 - DNA, 2202 bp, synthetic construct
  misc_feature 1..2202: note = Description of Artificial Sequence: Synthetic coding sequence
  source 1..2202: mol_type = other DNA
atgagaggactgggcctgtggctgctcggcgccatgatgttgccggggcctgcaccacgagaaggcgaattgcggccttggggacaccgtgctcagctccatccgccaccggctgaagaacagggcccagcaggcttaaggctgcatcgggacctttacgggtgtcaatggttgcggggcgatggcgcagcatcacgcgcgggtcccttactgctgcccggaccacgtaggggagtgcccggtttatctcggcagccccagcatctgtgtagaccccaggtgggcagtgacttacacctgatcgaacctcttgacgagggcggtgagggaggccgacacgctgtgtaccaggccgagcacttgctccagacagccgggacatgcggagtgtccgatgactctttgggctctctacttgggccccggacagcagccgtctttaggccccggccaggagactctctgccaagccgggaaacccggtacgtggaactgtacgtggtggtggataacgcagaatttcagatgctcggctcagaggctgcagtgagacacagggtactggaggtcgtcaaccatgtggataaactgtaccaaaaactgaactttagggttgttctcgttgggctggagatctggaactcgcaagacagattccatgtgagtccagacccatccgtcacgctggaaaatttgctgacctggcaggcgcggcagcggacacgaaggcacttgcacgacaatgtgcagctcattacaggggttgacttcactggtacaaccgtaggctttgctagggtcagcgccatgtgtagccactcgtcgggtgccgtgaaccaggaccattcgaagaatccggtgggggttgcctgtacgatggcacatgagatgggtcacaaccttggaatggaccacgacgagaatgtgcagggctgtagatgccaagaacgctttgaagctgggaggtgcatcatggccggatctattggcagcagcttcccccgaatgttttcagattgtagccaagcatacctggaaagttttctagagaggcctcagagcgtgtgtctggcgaacgctcccgatctgagccatctggtgggaggtcctgtatgtggcaatctctttgtggagcgcggcgagcagtgtgattgtggcccacccgaagactgcagaaataggtgctgcaattccaccacctgtcaactggccgagggtgcacagtgtgcacacggaacctgttgccaggaatgcaaggtgaagcctgctggcgaactttgtagaccaaaaaaggacatgtgtgatctggaagagttttgcgatggtagacacccggagtgcccagaggatgcgtttcaagagaatggaacaccgtgctccggaggctactgctacaatggtgcctgtcccaccctggctcagcaatgtcaagcattttggggccctggaggccaggccgcagaggaatcttgcttcagctacgatattcttccaggatgcaaggctagtcgatatcgcgcagacatgtgcggcgttctgcaatgcaaagggggacagcagcccctcgggcgggccatatgcattgtcgacgtttgccacgctcttactacggaagatgggactgcgtacgagcctgtgcccgagggaacccgctgcggcccagaaaaggtatgcaatcacaaacaagagtgccattgccacgcggggtgggccccaccacactgtgcgaagcttcttacggaagtacacgccgcatcggggtctttgccagtattcgtggtggttgtgctggttctactcgctgtggtcctggttaccctcgcagggattattgtgtaccgaaaggccaggtcaaggatcctttcaaggaatgttgctcctaaaacaacaatgggtcgcagtaatcccctgtttcatcaggccgcaagccgtgtgcctgccaagggaggcgctccagcgccatccaggggccctcaggagctggtgcccaccactcatccgggtcagcctgcgcgacaccctgcttcctctgtcgctctgaaaaggccaccccctgcaccgccagtgacagtgtcgtcacctccattcccagtgccggtctatacaaggcaggctcctaagcaaggggccgtcggacccaaagtggctctgaagcccccaatccagcgcaagcaaggtgcgggagcgccaaccgctccctag

SEQ ID NO: 107236 - DNA, 2229 bp, synthetic construct
  misc_feature 1..2229: note = Description of Artificial Sequence: Synthetic coding sequence
  source 1..2229: mol_type = other DNA
atgaggggtttaggcctgtggttgctgggagccatgatgctgccggccatagctccatcaaggccatgggccctgatggagcagtacgaggttgtgctgccctggagacttcccggcccgagagttcgccgcgctctgcctagccatcttgggttgcaccctgagagggtgtcctacgttctgggagctactgggcataattttacgctgcatctgcggaaaaaccgcgatctgcttggcagtggatacactgaaacctatacagcagccaatggtagtgaggtgaccgagcagccacgtgggcaagatcactgcttctatcaaggacacgtcgagggctatcccgattcagcagccagtctcagtacgtgtgccggcttaagaggttttttccaggtgggctctgatctccacctgatagagccattggacgagggaggggaggggggccgccacgcggtttatcaggccgaacatctgctgcagacagccggtacatgcggagtgagtgacgacagcctgggatctttacttggccctagaacagccgctgtgttcagaccaagaccaggtgactccctgcctagcagagaaacacgatacgtggagctatatgtggtggtggataatgctgaatttcagatgctaggctcagaagccgcggtcaggcatcgggtgctggaggttgtaaatcatgtcgacaagctttaccaaaaactgaactttagagtggttctcgtgggtttggagatttggaacagccaggataggtttcatgttagccctgatccttctgttactctagagaacctattgacatggcaggctagacagaggactcgacgtcacttacacgacaacgtgcaactgattacaggcgttgattttaccggcacaacagtgggatttgctcgggtgtcagctatgtgttctcactctagcggagccgttaatcaggatcattccaagaacccagttggtgtggcgtgcactatggctcacgagatggggcacaatcttggtatggaccacgatgagaatgtgcagggttgtcgatgtcaggagcgcttcgaggccgggcggtgtataatggcaggctcaataggctcctcatttccgaggatgttcagcgactgttcccaggcctatctggaaagctttttggaaaggccccaaagcgtctgtctcgcaaacgcccctgacctaagtcatctggttggcgggcccgtgtgtggaaatctcttcgtagaacggggtgagcagtgtgactgtgggcctccagaagactgtcgaaatagatgctgtaactctactacatgtcaattggcagagggggcccagtgtgcacacggtacctgctgtcaggagtgcaaagtcaagccggccggtgaactgtgccgaccgaaaaaggatatgtgcgacctcgaggagttctgcgatgggcggcaccccgaatgtcctgaagacgcattccaggagaacggcacgccgtgcagtgggggatactgctataatggcgcctgtccaaccttagcacagcagtgtcaggctttttgggggccaggcgggcaagctgccgaggagagttgcttctcctatgatatactgccaggctgcaaagcctctaggtatcgagccgacatgtgcggagtccttcagtgcaaggggggccaacagcctctgggaagggccatatgcatcgtggacgtctgccatgccttaactaccgaagatgggactgcatacgagccagttccagagggaaccagatgtgggcccgagaaagtgtgctggaagggtcggtgccaagacttacatgtctataggagctctaattgctcagcacagtgtcataaccatggcgtatgcaatcacaagcaggaatgtcattgccatgccggatgggcgccgcctcactgcgccaagttactcacagaagtccacgccggttgccagcctcgagcaggacaaggaagggggagcagccctatacagggcccacccagggcgggaccacaccacccacctgggcccgcccgccccaccccaggtctcttgggaggatctgaagaggcagccccttgttcgtcggggcattgtgtccagcccactcttcctagctcttgcctacatccagcaggcaccaaagctggccatcaggcgaatgtcaggacaccttccgcaccatcgcagactagggggtggtgcggacaaccttggtcatcatag

SEQ ID NO: 107237 - DNA, 2460 bp, synthetic construct
  misc_feature 1..2460: note = Description of Artificial Sequence: Synthetic coding sequence
  source 1..2460: mol_type = other DNA
atgggcagcggcgctcggttcccttcaggaacattacgggtacggtggctgcttctgctgggtctggtgggacctgttctgggcgccgctcggcccggattccaacagacctcacatctttcttcctacgagatcatcaccccatggcgtttgacgcgagagcgcagagaagccccaagaccttatagtaaacaggtctcttacgtgattcaggccgagggcaaagagcatatcattcacctggagcgtaacaaggacctgcttcctgaggattttgttgtctatacttataataaggaggggacactgatcacagaccatcctaatatccagaatcactgtcattaccgcggctacgtggaaggcgttcacaattccagtatagccctgtcagactgtttcgggctgcggggactactgcacttggagaatgcgagctatgggattgagccccttcagaactcctcacatttcgaacatataatctatcggatggacgacgtctacaaggagcccctgaagtgtggggtgtctaataaggatattgagaaggagacagctaaagatgaggaagaagagcccccgtctatgacacagctcctccggagacggcgcgcagtgctgccacagacacgttacgtcgaattgtttattgtggtggacaaagagcgatacgatatgatgggtagaaatcagaccgcagttcgggaggagatgattctgctcgcaaactatctcgattctatgtatatcatgctgaatatccgcatcgtactcgtgggactggaaatttggacaaatggcaatctgatcaacattgttggcggggccggagacgtgctgggcaatttcgtgcagtggcgcgaaaagtttctgattacacggaggcgacacgacagtgcccagctcgtattgaaaaaggggtttgggggcactgctggcatggctttcgttggtacggtttgcagccggtcacatgccggcggtatcaatgtttttggccaaatcaccgtggaaacctttgctagtattgtggcgcatgagctcggccacaacctggggatgaaccatgatgatggacgggactgcagttgcggggccaaaagctgtattatgaactccggtgctagtggcagccggaacttcagctcgtgttctgcagaggatttcgagaagcttacactcaacaagggagggaattgcctcctcaatattcccaagcccgatgaagcttactccgccccctcatgtggaaataagttagtcgacgccggcgaagagtgcgattgcggcacaccaaaggaatgtgaactggatccgtgctgcgaaggaagtacttgtaaactgaagtcattcgccgagtgtgcctacggtgactgctgtaaggattgtcgcttccttccgggaggcaccttgtgccgaggaaaaacttcggaatgcgatgttccagagtactgtaacggctccagccaattttgccaacccgacgtgtttatccaaaatggttatccatgccagaataacaaagcgtattgttataatggaatgtgtcagtactacgacgcacagtgtcaggtgatcttcggatccaaagcgaaggcagcccccaaggactgttttatcgaggtgaacagcaaaggcgaccggttcgggaattgtggcttttctggaaatgaatacaagaagtgtgccaccggaaacgcactgtgcggaaaactgcaatgtgaaaacgtgcaggaaatcccagttttcggaatcgttcctgccatcatacagacgccaagccgcggtactaaatgttggggggtcgatttccagctggggagtgatgtccctgatcctggcatggttaatgaaggaacaaagtgtggcgcaggcaagatctgcagaaacttccagtgtgtcgatgcgtcggtacttaattatgactgtgacgtccagaagaaatgtcatggccacggggtgtgtaactctaacaaaaactgccactgcgaaaacgggtgggcacccccaaactgcgagacaaagggctatggaggaagtgtagactccggcccgacctacaacgagatgaataccgccctccgcgatgggcttctggtgtttttcttcctaatcgtgcctctgattgtgtgtgcgatctttatatttataaaacgcgaccaattgtggaggtcttactttcgcaaaaaaagatcccaaacttacgagtccgatggcaagaaccaagctaatccttcccggcaacccggcagcgtgcctcggcacgtatcaccagtgacacccccacgtgaagtgccgatttatgcaaatcgattcgccgtgcctacctacgctgctaaacaaccccagcagttcccgtcaagaccacccccaccccagccaaaggtgtccagccaagggaacctcatccctgcaagacccgcccccgcccccccgctctattcttcactcacctag

SEQ ID NO: 107238 - DNA, 2904 bp, synthetic construct
  misc_feature 1..2904: note = Description of Artificial Sequence: Synthetic coding sequence
  source 1..2904: mol_type = other DNA
atgcaacgcgccgtccccgaggggtttggccggcgaaaacttgggtccgacatgggtaacgccgaaagagctcccgggtccaggagttttggacctgtgccaacccttctgctactagccgcggccttgctcgccgtcagtgacgccttgggtaggcccagtgaggaggatgaagaactggtggtgcccgagctggagagggcgcccggtcatggcactaccaggttacggttgcatgcattcgatcaacagctcgacttggaactcagacccgactcttcatttcttgctcccgggtttactctgcagaatgtggggcgaaagagcgggtccgaaacaccgctcccagagacagacctggctcattgcttttactctgggacagtcaatggcgatccgagcagcgcagccgccctgagtctatgcgagggcgtgcggggggccttttacttgttaggcgaggcatacttcatacagccccttccagctgctagtgagaggctggcaaccgccgcacctggcgagaaaccccctgctcctctgcagttccatctgctgcgacggaatcgacagggggatgtggggggtacatgcggggtagtggatgatgagcctcgccccaccggcaaagccgagactgaagacgaagacgagggaactgaaggagaagatgagggggcccagtggtccccacaggatcccgctctgcaaggtgtgggtcagccaacgggaacgggcagcatacgaaagaagcgcttcgtgtcttcacacagatacgttgagactatgttggttgcggaccagagtatggctgagttccacgggtccggattgaaacactacctgctgacattgttcagcgtcgcggcacgactgtacaagcatccatccattcggaatagcgtgagtctcgtagtggtgaaaatcctcgttattcatgacgagcagaaagggccggaggtaaccagcaacgctgccctgacactgagaaatttctgtaactggcagaagcagcacaaccctccaagtgatagggacgctgaacattatgacaccgctattctgtttactagacaagatttatgcgggtcccagacttgcgacaccctgggtatggcagacgtaggaactgtgtgcgatccaagccgcagttgcagcgtgattgaggacgatggacttcaggccgccttcacgaccgcccacgagctaggacacgtattcaacatgccccatgacgacgcaaaacagtgcgcatccctgaacggcgtcaatcaggactctcacatgatggcaagcatgctgtccaatctcgatcattctcagccctggtcaccctgtagcgcctatatgatcacatccttcctggacaatgggcacggcgaatgcctgatggataagccgcagaacccaatccagttgcccggagatcttccaggcacctcatatgacgcgaatcggcagtgtcagttcacgtttggagaggatagtaaacactgtcccgatgctgcgagtacgtgcagtactttgtggtgcacgggcaccagtggcggcgtgctggtctgtcaaacgaagcactttccctgggcggacggcaccagctgcggtgagggcaaatggtgcatcaacggtaaatgtgttaacaaaactgaccggaagcactttgacactccgttccatggctcatggggtatgtggggcccatggggagattgctccagaacgtgcggagggggcgtgcagtatacaatgagggagtgcgacaaccctgtgccgaaaaacggcggcaagtactgtgagggaaaaagggtcagatatagatcctgcaaccttgaggattgccctgataacaacggcaaaacatttagagaagagcagtgtgaagcacacaacgagtttagtaaggccagcttcgggagcggccccgctgtcgaatggataccaaagtacgccggagtctcccccaaggaccggtgtaagctaatttgccaggcaaagggaatcggctatttttttgtcttacagcctaaagtagtagatggtactccatgttcaccagactccacgtcggtctgtgtccaagggcagtgcgtcaaggctggctgcgataggattattgactccaagaagaaatttgataagtgcggagtgtgcggaggcaatgggtcaacctgcaagaagatcagtgggtccgtcacttcagcaaaacccggttaccatgatattatcaccatcccaaccggagctaccaacatcgaggtgaagcagcgtaaccagcgtggctcacgcaataacggttcgtttctcgcgatcaaggcggctgatggaacttacattttgaatggagattatacgcttagcaccctggagcaggatatcatgtataaaggtgtcgtgctccgatactccggttcctccgcagcattagagaggatacgctctttttccccactgaaagaaccccttactattcaggtcctaaccgtgggtaatgctctgcggccaaaaatcaagtatacatatttcgtaaaaaaaaagaaggaatcctttaacgcgataccaaccttctccgcctgggtgattgaagaatggggggagtgctctaaaagttgcgaactgggatggcaaagaagactggtggagtgtcgggacatcaatggccagccagccagcgagtgtgcgaaagaagtgaaacctgcatccacacgcccatgtgcagatcacccttgccctcaatggcagctgggcgaatggagtagttgctctaagacatgtggcaaagggtataaaaaaagaagtctgaaatgcttatcacacgacggcggggtgttgtcacatgagagttgtgatccactcaaaaagccaaaacacttcatcgacttctgcaccatggccgaatgcagttag

SEQ ID NO: 107239 - DNA, 3312 bp, synthetic construct
  misc_feature 1..3312: note = Description of Artificial Sequence: Synthetic coding sequence
  source 1..3312: mol_type = other DNA
atggctccagcatgccagattctccgttgggcattggcacttggtcttggactcatgttcgaggtcacgcacgcctttagatcccaggatgaattcctctcaagtctcgagtcttacgagatcgcgtttcctacaagggtagaccacaacggagccctgcttgccttcagtccacccccccctagacgtcaaagacgaggaactggcgctactgcagagtcccggcttttttataaggtcgccagcccaagcacgcatttccttttaaacctaacaaggtcctcccgacttctggccggacatgtttccgtcgagtactggacgcgggaggggcttgcttggcaaagggccgcgcggcctcattgtctatatgcaggacatcttcaggggcaggcctctacttcgcatgtggccatctctacgtgtggcggcctgcatggcctgattgttgccgatgaggaggagtacttaatcgagcctcttcatggaggaccgaaaggctccagatcacctgaggagagcggcccacacgtggtatataagagaagctctctaaggcacccccatctggataccgcttgtggcgtgagggatgaaaagccctggaaggggaggccttggtggttgcgtaccctgaagccaccccccgcgcgccctctggggaacgagacggaaagaggccagcctgggctcaaaaggtctgtgagcagagagaggtatgtggagaccctggttgtagccgacaaaatgatggtcgcctaccacgggcggcgggacgttgaacaatacgttctggccatcatgaacatcgtcgccaaactttttcaagattcaagtctcggaagcactgtaaacattctggtgacccgtcttatcctgttgacggaagaccagcctaccctggagatcacacaccacgctggcaagtctctcgactcattttgcaagtggcagaagagcattgtcaatcactctggacatggcaatgctatccccgagaatggagtggctaatcatgatactgcagtcctcataaccagatatgacatttgtatctataagaataaaccctgtggtactctcgggctcgctccagtgggcggaatgtgtgagcgcgagcgttcctgttctgtgaacgaggacattggcttggctaccgccttcactatcgcacacgagattggccatactttcggcatgaaccacgacggggtgggcaatagctgcggcgctcggggccaggaccccgccaaactgatggcggcccacataacaatgaagacaaatcccttcgtctggtcttcctgttcacgggattatatcaccagctttctcgattcaggattgggactgtgtctgaataacaggccccctaggcaggattttgtttacccaaccgtagcccctggtcaggcgtatgatgcagacgaacaatgccgctttcagcacggggtaaagtctcgccagtgtaaatacggagaggtttgtagcgaactgtggtgtttgtctaagagcaatcggtgcataactaattccatccccgccgccgaaggaacactctgccagacacacacaattgacaaggggtggtgttacaaaagggtgtgtgttccatttggctctagacccgaaggggtcgatggtgcttgggggccttggaccccatggggggactgtagtaggacatgtgggggaggagtcagctcctcatcaaggcattgcgacagtcctaggccaaccattggcggaaagtattgcttaggagagaggcgcaggcaccggtcttgtaatactgacgattgtccccccggctcacaggacttcagggaggtacaatgcagcgagttcgacagcatacccttcagggggaagttctataagtggaaaacctataggggcggcggtgtgaaagcatgttccttaacctgcctggctgagggattcaacttttatactgagcgcgcagccgccgtggtcgatggaaccccctgcaggcctgacacagtggacatatgcgtgagtggagaatgcaagcacgtgggctgcgaccgcgtgctgggctcagacttacgagaagacaagtgtcgcgtttgcggaggtgacggctccgcttgtgaaaccatcgaaggcgtgttctcacctgcaagcccaggagccgggtatgaggatgtggtgtggattccaaaggggtctgtgcacattttcatacaagacctaaatctcagcctttcccaccttgccctgaaaggggaccaggaatctctgcttctggaaggactgcctggcactccacagccacataggctcccactggccggcactacgtttcaactgcgtcagggaccagaccaggtccagtcattggaggccctgggcccaatcaatgcatctctgattgtgatggtgttagcgaggacggaattacctgctttgcggtaccgcttcaacgcacctatagcacgggattctttgccaccctactcttggcactacgcgccgtggactaagtgttctgctcagtgtgccggcggatcccaagtgcaagccgtggagtgccggaaccagctggattctagtgccgtggcacctcactattgctccgcacattccaagttacctaaacggcaacgtgcctgtaacactgagccttgtcctcccgattgggtggtgggcaactggtctctgtgtagcaggtcatgcgacgcaggagtcagatcccggtccgtggtctgtcagaggcgcgtgtccgcagctgaggagaaggccctcgatgattccgcctgcccccagccgagaccgcccgtgctagaggcatgccacgggcccacctgtcctccagagtgggccgccctggactggtctgagtgtacacccagttgcggccccgggctccgtcaccgcgtagtcctgtgcaaaagcgcggaccatcgagccaccctccccccagcccattgtagcccagcggctaaaccccctgctacaatgcgctgcaacctccgaagatgtcctcccgccaggtgggttgcaggggagtggggtgaatgctctgctcagtgtggggtggggcagcgacagcgatctgttcgctgcaccagtcacaccgggcaagcctctcatgaatgcacagaggcactcaggccccccacgacgcagcagtgtgaggctaagtgtgacagcccaacacctggagacggtcctgaggaatgtaaagatgtgaataaagtggcttactgcccactggtgctgaaattccagttttgctctcgagcatatttcagacagatgtgctgtaagacctgtcatggccactag

SEQ ID NO: 107240 - DNA, 2544 bp, synthetic construct
  misc_feature 1..2544: note = Description of Artificial Sequence: Synthetic coding sequence
  source 1..2544: mol_type = other DNA
caagacgacggcggcctatctcgagccccgggctgtggagctgtgtgtcccgggcatcacgagcactgtcaagtagcaaagctgtttcaagacagctcactgggctccacggtaaacattctagtgacccgactgattttactaaccgaagaccagcctactttagagattactcatcacgctggcaagtctctggactcattttgtaagtggcaaaaatccatcgtcaatcacagtgggcacggcaacgctatccccgagaatggggtggcaaaccacgacacggccgtgctcataactaggtacgacatttgtatatacaagaataaaccttgcggtactctgggcctcgctcctgttgggggaatgtgtgaacgggagcgctcttgtagcgttaacgaggacattgggctggccactgcgttcaccatcgcacatgagatcggccacactttcggtatgaaccacgatggggtgggcaactcttgtggcgcccgcggccaggacccagcgaaattgatggccgcccatatcacaatgaaaacaaatccatttgtgtggtctagctgctcaagagattacatcacctcattcctggattcaggcttgggcctgtgtcttaacaatcggccaccaaggcaggactttgtctatcccacagtagctcctggccaagcttatgacgcagacgagcagtgccggtttcagcatggtgtaaaatccaggcagtgtaagtacggggaggtctgcagtgagctctggtgcctgtccaaatcgaacaggtgcattacaaacagtatacccgccgcggaggggaccttgtgtcagacccacacaattgataagggatggtgttataaaagagtctgcgtgcccttcggcagcagaccagagggagtggacggagcctgggggccctggaccccttggggggactgttccagaacttgcggcgggggggtttctagttctagtcgtcactgcgatagcccccgccctaccattgggggtaaatactgcctgggggaaaggcggcgccacagatcctgtaatacagacgattgccctcccggcagccaagatttccgggaggtgcagtgtagcgagttcgactcaatccccttccgcggaaagttctacaagtggaagacctaccgaggaggtggcgtgaaagcttgtagtctgacatgcctggcggaggggtttaatttctacactgaacgggccgcagcagtcgtggacggaaccccctgcaggccggataccgtggatatttgtgtgagtggcgagtgcaaacacgtgggatgcgatagggtgctcgggagcgatctgagagaagataagtgccgagtctgcgggggcgacggaagtgcatgtgaaacaatagaaggagtctttagccctgctagcccaggtgctggttacgaagatgtggtgtggatccccaaagggtcagtccacatcttcatacaggacctgaacttgtctctttcacacctcgcactgaaaggtgaccaggagtcgctgcttctggaggggctacccggtacaccccagccacatcgattgcctctggcgggcacaacatttcagctgcggcaagggcccgaccaggtgcagagcctcgaagccctgggtcccatcaacgcgagcctgatagtgatggtcctggctagaacagaattgcccgctctcaggtaccgcttcaatgctcccattgcccgggatagtctgcctccctacagctggcactatgcaccttggactaagtgctctgcccagtgcgccggggggagccaggtgcaggcagtggaatgcagaaaccaactcgactcgtctgccgtggccccgcactattgctcggcacactcgaagctgcccaagcgtcaacgagcttgcaacacagaaccctgtccgcctgactgggttgtgggcaactggtcactctgttcgcggtcgtgcgatgccggggtgaggagtaggagcgtggtgtgtcagcgccgcgtctccgcagcggaagagaaagccctcgatgacagcgcctgcccccagcccaggcccccggtgttggaagcatgccacgggccaacttgcccacccgagtgggcagctcttgattggagcgaggtgtctcggccactgccctccaggcccctcggatgcccaggcggcgtttcaaccgaaacacctctgaggggactgcaggtctcttgcccgttactgacctctcattggggatctacgctgagtacgaagaggccgttccagcttcagtgtacgccaagttgcggccctgggttgaggcaccgtgtggtcctctgtaaaagcgccgatcaccgcgctaccctgccgccagctcactgttcccccgccgctaagccccccgctacaatgcggtgtaacctgcgaaggtgtccccccgctagatgggtagccggcgagtggggcgaatgcagtgcccagtgtggagtgggacagagacagcgcagtgttagatgtacatcccacactgggcaggcatcccatgagtgtaccgaggcctag

SEQ ID NO: 107241 - DNA, 4530 bp, synthetic construct
  misc_feature 1..4530: note = Description of Artificial Sequence: Synthetic coding sequence
  source 1..4530: mol_type = other DNA
atgccatgcgcacagcgtagctggctcgctaatctgagtgtggtggcccagttacttaatttcggcgcactatgctatggccggcagcctcagccaggccccgtaaggtttcccgaccgacgccaggagcacttcattaagggtcttccggagtatcatgtggtcggcccagtgagggtggatgctagcgggcatttcctctcctacggcctccactatcctatcactagcagccgtcgcaagcgggacctcgacggatccgaggactgggtctattatcggatcagtcatgaggagaaagacctttttttcaacctcactgtcaaccaagggtttctgtccaactcatacataatggagaaacgctatggcaatctgtcccatgtgaagatgatggcgtcctctgcacccctgtgccatctgtccgggaccgttctgcagcagggaaccagggtcgggaccgccgcactctcggcttgtcacgggcttaccggattctttcagctcccacatggcgattttttcattgaaccagtcaaaaagcatcctctggtggagggggggtaccacccccatatcgtgtatagaaggcagaaagtgcccgagacaaaagaaccaacgtgcggactgaaggattcggtcaacatcagccagaagcaggaactgtggcgtgagaaatgggaacggcacaatctgccgtcaaggagcttgtcccgacgctctattagcaaagaacggtgggtagaaaccctggtcgtcgccgacactaaaatgattgaatatcacggctccgagaacgtggagagctacatactcactatcatgaacatggtgacgggactgttccacaatcctagcattggcaatgccatccatatcgtcgtcgtgcggcttatcctccttgaggaagaagagcagggcctcaagattgtccaccatgctgagaaaacactcagctctttctgtaaatggcaaaagtccataaatcccaagagtgacttgaatcctgtgcaccacgacgtagctgtgctgctcactcgcaaagacatttgcgctggctttaataggccttgcgaaaccctgggcctgtctcacctgagcggcatgtgccaaccccatcgcagctgcaatataaacgaagatagcggcttaccactcgcttttactattgcccacgaactcggccacagctttgggatccagcacgacggaaaggaaaacgactgcgaacccgtagggcgccacccctatattatgtcgcggcagctccagtacgaccccactccattaacttggtctaagtgcagtgaggagtatattaccagattcctggaccggggctggggcttttgcctggatgatatcccaaagaaaaaaggtttaaagtccaaggtgatcgccccgggagttatctacgacgttcaccatcagtgccagctccagtatggtccaaacgctacgttctgccaggaggtggagaatgtctgccagaccctctggtgtagcgtgaaaggattctgcaggtccaagttagacgccgcagccgatgggacccagtgtggagagaagaagtggtgtatggcaggtaagtgtatcacagtaggaaagaagcctgagtcgatccctgggggatgggggcggtggtcaccttggtcacattgttcccgtacctgcggggctggcgtccagtcagcagagaggctttgcaataaccccgagcctaaattcgggggcaagtactgtaccggcgagcgcaagcggtatcggctgtgcaacgttcacccctgtaggtccgaggcccctacttttcggcaaatgcagtgcagcgagttcgacacagtcccctacaaaaacgagctctaccactggttccctatattcaatccagggtacgtcgacatcgggctcatccctaaaggagccagagacataagagttatggagatagaaggcgccggaaacttcctagccatcagatctgaagatcctgagaagtattacttgaatggcggattcatcatccagtggaacggcaattacaagctagcaggaaccgtgtttcagtacgatagaaagggcgatcttgaaaaactgatggctaccggcccaacaaacgaaagcgtctggatacagttgcttttccaggtgacgaatccaggcattaaatatgaatacactatccaaaaagacggactggataatgacgtcgaacagcaaatgtacttttggcagtatggacactggaccgagtgttcagtgacatgcggtacagggattagaagacagaccgcccattgtatcaagaaaggccgtggcatggtgaaggcgacattctgcgacccggaaacccagcccaacggccgacaaaaaaagtgccatgagaaggcctgtccaccaagatggtgggctggagaatgggaagcatgctcagccacctgcggacctcacggagaaaagaaacggactgtgttatgcatccaaacgatggtaagcgatgaacaggctctgccacccactgattgccaacacctcctcaaacctaaaacgctgctgtcttgtaatcgcgacatcctgtgccccagcgactggacagttgggaattggtccgagtgttccgtctcttgtggtggcggcgttcgcatcaggtctgtcacttgcgcaaagaaccacgacgagccctgcgatgtgaccaggaagcctaactcccgggccctttgtggcctccagcagtgtccttcctccaggagggtccttaagcccaataagggaaccatttccaacgggaagaatcccccaaccctgaaacctgtccccccacccacttccaggccccgaatgcttaccactcctaccggccctgagagtatgtccacctcaacaccagctatctcctctccaagcccaacaactgccagtaaggaaggcgaccttgggggtaaacagtggcaggactcctctacccagccagagttatcctctcggtatttaatctccaccggctcaacatcacagcctattttgactagccagagcttgagcatccagccaagtgaggagaacgtgtctagctctgacaccggcccaactagtgaggggggactggttgcgactacgacctcgggctctggactttcatcttcccggaatcctataacttggcctgtgacccctttctacaacactctgaccaaaggccccgaaatggaaatccacagcgggtcaggcgaagagagggaacaacccgaagacaaggacgagtcgaatcccgttatatggactaagatcagggttccggggaacgatgcacctgttgaatcgactgagatgccgctcgcacccccacttacccctgatctgtctcgggaatcctggtggcctcccttcagcacggtgatggaaggtttgctcccctcccagagaccaactaccagtgaaaccggtacgccacgggtggagggtatggtgacggaaaaacctgccaacacactgttacctctggggggtgaccaccagcctgagccatctggcaaaactgctaataggaatcacctgaagttacccaacaacatgaatcaaacaaagtcttccgaaccagtccttacagaagaggacgcgacgtcgttaatcactgaggggttccttctgaacgcgagtaattataagcagctaaccaacgggcatggtagtgcacactggattgtcggcaattggagcgaatgcagtacaacatgtggccttggggcatactggcggagggtcgaatgtagcacacagatggattctgactgcgcggcaatccagcgccctgatccagcaaaacgctgccacctgaggccctgcgcgggatggaaagttgggaattggtctaagtgtagccgtaactgtagtggtggattcaagatccgcgaaattcagtgcgtagacagccgcgatcacagaaatttgcgaccattccactgccagttcctggctgggatcccccctcctctaagcatgtcttgcaacccggagccctgcgaggcttggcaggtggagccatggtcgcagtgcagccgctcctgtgggggcggtgttcaagagcgcggcgttttctgccctgggggtctgtgcgactggaccaaaagacctacgagcacaatgtcatgtaatgaacatctctgttgtcactgggccactggcaactgggatttgtgttcaacctcatgtggcggtgggttccagaaaagaacagtccagtgcgtgcctagtgaggggaataaaacagaggatcaggaccaatgtctctgtgaccacaaaccccgcccgccagagttcaagaaatgcaaccagcaggcctgtaagaaaagcgctgatttgctgtgtactaaagataaactctccgcctcgttttgccagactttaaaagccatgaaaaagtgttcggttccaaccgtgagagcggagtgttgtttctcctgtcctcaaacccacatcacacatacccagcggcagcgcaggcagaggctgcttcagaaatccaaagaactgtag

SEQ ID NO: 107242 - DNA, 4785 bp, synthetic construct
  misc_feature 1..4785: note = Description of Artificial Sequence: Synthetic coding sequence
  source 1..4785: mol_type = other DNA
atgccgtgtgcgcagaggtcctggcttgctaatcttagcgtcgttgcccagctcctgaattttggagccctgtgctatggcaggcagccccaacctggtccagtgagattccccgatcgccgtcaggagcacttcatcaagggactcccagaatatcatgttgtcggtcctgtccgggttgatgcctctgggcacttccttagttatggcctccattacccgattacatcctcccggcggaagcgcgatctggatgggagcgaggactgggtctactacagaattagtcacgaagagaaagatttatttttcaacttgaccgtgaatcagggcttcttaagtaattcctacataatggagaagagatacggcaatctgagccatgtgaagatgatggcttcctcagcaccactctgccatctgagcggaaccgtattgcagcaggggacccgtgtagggacggctgcgctctccgcgtgccatggactgaccggtttcttccaactgccacacggcgacttcttcatagagcctgtgaaaaagcatcctctggtggaaggcgggtaccaccctcatattgtttaccggcggcagaaggtgcctgaaacgaaagagccaacttgtggactaaaggattccgtgaacatttcacagaaacaggagttgtggagagaaaagtgggaacgccataaccttccatctcgcagcctctcaaggcggtccattagcaaggagagatgggtcgagacacttgttgtggcggatactaaaatgatcgaataccatggttccgaaaatgtggaatcctacatcttaacaattatgaacatggtaacaggactttttcataacccgtccattgggaatgctatacacattgtggttgtgagacttatccttctggaagaagaggaacaggggctgaagattgtgcaccacgcagagaaaactctgagttcgttctgcaaatggcagaaaagcatcaatcctaagagcgacctcaatcctgtccaccatgacgtggccgttttattaacccgaaaggatatctgtgcaggctttaaccggccatgtgaaactctgggtctgagccatttgtccggcatgtgccaaccccaccgcagctgtaacatcaacgaggacagcggacttcccctcgcctttaccatcgcgcacgagctggggcactcgttcgggatccagcacgacggcaaggaaaacgattgcgagcccgtcggacggcacccatatattatgagcagacagcttcagtacgaccctacgcctctcacatggtccaaatgctcagaggaatatatcacccgctttctagaccgcggatggggattttgtttagacgacatcccaaaaaaaaagggacttaaatcaaaggttatcgctccaggggtcatatacgacgtgcaccatcagtgccagctgcaatacggcccgaatgcaacattttgtcaggaagtggagaacgtatgccagacactctggtgtagtgtgaaaggcttctgtagatccaagctcgatgcagctgccgacggaactcaatgtggcgaaaaaaagtggtgtatggccgggaagtgtattactgtcggcaaaaagcctgaatccattccagggggctggggccggtggtctccttggtctcattgttcccgtacctgcggggccggggtacagtctgccgagagactgtgcaacaatcctgaaccaaagttcggaggaaagtattgtacgggagaacgaaagagatatcggctttgtaatgttcatccgtgcagatctgaagcccctacatttcgccagatgcaatgctctgaatttgacactgtgccatataagaacgaactgtaccactggtttccaattttcaatcccgcacacccatgtgagctgtactgtagacctatcgacggtcagttcagtgagaaaatgctcgacgccgtgatcgatggcacaccttgcttcgagggtggcaatagcagaaacgtctgcattaacgggatttgcaaaatggtgggttgtgattacgagattgactcgaacgccactgaggaccggtgtggcgtgtgtcttggagacgggtctagctgtcagactgtaagaaagatgttcaagcagaaggagggcagcggctatgtggatataggcctgatccccaagggggcgcgtgatattagggtgatggagatcgagggggctgggaatttcctcgcaataaggtctgaggatccagaaaagtactatctgaacggtgggtttatcattcaatggaatggtaattataagctagccggaacggtgttccaatacgaccgtaaaggtgatctggaaaaactcatggctactgggcctaccaatgagagtgtgtggatccagttgttgttccaagtcacaaatcccggcataaaatacgaatacaccattcagaaggatggacttgacaacgacgtggagcagcagatgtacttttggcagtacggacactggaccgagtgctctgtgacctgcggcactggtatacggaggcagacggcgcactgtataaagaaaggccggggaatggtgaaggcgacattctgcgatccggagacccagcctaacggcagacaaaagaaatgccacgaaaaggcgtgtcccccccggtggtgggccggagaatgggaggcctgcagtgctacctgtggcccacacggggaaaagaagaggacagtgctctgcatccaaacaatggtttcagatgaacaggccctaccacctacagattgtcaacacctcctgaagcccaagacacttctatcgtgtaatcgggatattttgtgtccttccgactggacagtaggaaactggtccgaatgcagtgtatcttgtgggggaggagtgcggattcgatcagtgacatgcgcaaagaatcacgacgagccttgcgatgtgaccaggaaaccaaacagtagggctctgtgtggactgcaacagtgtcctagctctcgtagagttctgaagcccaacaaggggaccatttctaacgggaaaaatccccctacgctcaaacccgttccaccccccacatctcgaccgcgaatgcttaccacaccaaccgggcccgagtctatgtcgacttccacgcccgccatctcgagtccatcccccactactgcatctaaagaaggggatctgggtggcaagcaatggcaggatagtagcacacaacctgaactctcatccagatacctcatcagtactggaagcaccagccagcctattttgacttcccagagcttgagcatccagccatcagaggagaatgtcagttcctccgacacggggccaacctctgagggcggtcttgtggctactaccactagcggatcgggactgtcatctagtaggaatccaattacttggccagtaacacctttttacaatacgctcactaaaggacccgaaatggaaatccacagtggatccggagaggaacgagagcagcccgaggataaagacgaatcgaatcctgtgatttggacaaaaataagagtgcccggaaatgacgcacctgtggaatctactgagatgccactcgcacccccgctcacgccggacctgtccagggagtcttggtggcctcccttcagcaccgtgatggagggccttctgccttcacagcggcccaccacatcagaaacgggaacaccaagggtcgaaggcatggtgacagaaaaaccagccaataccctgctgcctcttgggggcgaccatcagccagaaccatcgggtaaaacagccaatcgcaatcatttgaagctgccaaacaacatgaaccagacaaaaagttcggaaccagtgttgacagaggaggatgcaactagcctgatcactgagggtttcttactcaacgcctccaattataaacagctaaccaatggccacggcagcgcccactggatcgtggggaactggtcagagtgctccactacatgtgggttaggcgcatactggcgccgcgtagaatgctctacacagatggatagtgattgtgcagctattcaacggcccgaccctgctaagagatgccacttgcgtccctgcgccggatggaaagtaggtaactggagcaaatgttctagaaactgctcaggggggtttaaaatcagggagatccagtgcgtggattcaagagaccacagaaatctgagaccttttcactgccagtttctggcagggattccacctccactgagcatgtcctgtaaccccgagccctgcgaagcatggcaagtggagccttggtcccagtgctcacgatcctgcggagggggcgtgcaggaacggggtgtgttctgcccagggggtctgtgcgactggacaaagaggcccacaagcaccatgtcctgcaacgagcacctatgctgtcactgggccacaggcaattgggacctttgtagcaccagttgcggaggcgggtttcaaaagcggactgtgcaatgcgtaccaagcgagggcaacaaaacagaggatcaggaccagtgcttgtgtgaccacaaacctcgtcctccagagttcaaaaaatgtaatcagcaagcatgtaagaagagtgccgatctgctttgcactaaagacaaactgtcagcttcgttttgccagaccctgaaagctatgaagaaatgcagtgtgcctacggtccgagccgaatgttgtttctcttgccctcagacccacattacgcatacacaacgacaaaggagacagagactactgcaaaagtctaaggagctgtag

SEQ ID NO: 107243 - DNA, 699 bp, synthetic construct
  misc_feature 1..699: note = Description of Artificial Sequence: Synthetic coding sequence
  source 1..699: mol_type = other DNA
atgccatgcgcccagagatcttggctggcaaatctgtctgtagtagctcaactcttgaacttcggcgcattatgctacggccgccagccacaaccaggcccagtcagattcccagaccgccgccaggaacacttcattaaagggttgcctgagtatcacgttgtaggacctgtgcgggtggatgctagtggacactttctatcttatggcttacactacccaatcacatcaagtagacgcaaaagggacctggacgggtcagaagactgggtgtattacaggattagtcatgaagaaaaagatctcttcttcaatctaaccgttaaccagggatttttatctaattcttacatcatggaaaagcgctacgggaacctttctcatgttaagatgatggcaagtagtgctccactttgccatctgtccggtacagtgctgcagcaggggaccagggtggggactgccgcattgtcagcttgccatggccttacagggtttttccagctgccacacggagatttctttattgagcccgttaaaaagcaccccctggtggagggcgggtatcatccccacatcgtttaccgtaggcagaaggtacctgagacaaaggaacctacgtgtggactcaagggtatcgtgacacacatgtcatcatgggtggaagagagcgtgcttttcttttggctcttctactag

SEQ ID NO: 107244 - DNA, 3675 bp, synthetic construct
  misc_feature 1..3675: note = Description of Artificial Sequence: Synthetic coding sequence
  source 1..3675: mol_type = other DNA
atgaagccccgagcccgcggttggaggggactggctgccttgtggatgctcctggctcaggtggccgaacaagcccccgcctgcgctatggggccagccgccgcggctccaggctcccccagtgtccccagacccccgccgcccgccgagcgaccgggatggatggaaaagggcgagtatgatttagtgagcgcttatgaggtggaccatagaggagactatgtgtctcatgaaattatgcaccaccagcggaggcgacgggcagtgcccgtctctgaagtggagagcctgcacttgcgccttaaaggaagccggcacgactttcatatggatttgaggacgtcttctagcttagtcgccccagggttcattgtccagaccctgggaaagactggcaccaagtccgtgcagactttgccacccgaggatttctgcttttaccagggaagtcttagaagccacagaaattcttctgtggccttgagcacctgccagggcctgagtggcatgattcgtacggaggaggcagactattttctgcgccccctgcccagtcacttatcatggaagctgggcagggctgcccagggatcgtccccctcacacgttttatataagaggtcaaccgaaccccacgctccgggggctagcgaggtgctggtcacgtcaaggacctgggaattggctcaccagccactccactcatccgacctgcggctgggactcccccagaagcaacatttttgcggacggcgtaagaagtacatgccccagccccccaaggaggatctattcatcctcccggacgaatacaaatcatgtttgaggcataaacggtctttgcttcgctctcaccggaatgaagagcttaacgtcgagacactcgttgtcgtggataagaaaatgatgcagaaccacggacacgagaacatcaccacttatgtgctgacaatcctgaacatggtgagtgcgctttttaaagacggaaccatcggcggaaatattaatattgccatcgtcggcctcatcctgctggaagacgaacagccaggactcgtcatctcacatcacgccgatcacacactttccagcttttgtcaatggcagtccggattgatgggcaaagatgggacccggcacgaccacgcaatcctgctcaccggccttgatatttgttcttggaaaaacgagccttgtgacaccctggggttcgctcccattagcgggatgtgtagcaaatacagatcctgcacaataaacgaagatacgggactcggccttgcatttactatcgcacacgagtctggacataacttcggaatgatccacgatggggaagggaacatgtgcaaaaagagtgagggaaatatcatgtccccgaccctcgctggacgtaatggtgtcttttcgtggagcccatgctcccggcaatacctgcacaagttcttatcaacagcacaggcaatatgcttggccgatcaaccaaagccggtgaaggagtataaatacccagagaaattgcctggcgaattatatgacgccaacacgcagtgcaagtggcagttcggcgagaaagcaaagttgtgtatgctcgattttaaaaaggacatctgcaaggccttatggtgtcatcgcatcggacgcaagtgcgagacaaaattcatgcctgcagccgaagggactatttgcggacacgatatgtggtgtaggggtgggcagtgcgtaaagtacggcgatgaggggcccaaacccacacacggccattggtccgattggtccagttggtccccttgttcccgtacctgtgggggaggggtgtcccacagatcccggctctgtacgaacccaaaaccctcccatggaggcaagttctgcgaaggcagcacccgcaccctaaagctttgcaactctcagaaatgtccccgtgattcagtggactttcgggcagcacagtgcgctgagcataattctcggcgctttaggggccggcactacaagtggaagccgtacactcaggtagaggatcaggatttgtgcaagctgtactgcatagctgaaggcttcgatttttttttttctctaagcaataaggtgaaggatgggacaccctgcagcgaggattccaggaacgtgtgcatagatggtatctgcgagcgcgtggggtgcgataacgttttgggaagcgatgccgttgaagatgtgtgtggcgtttgtaacggtaacaacagcgcatgcaccatccatcggggcctttatacaaagcaccaccatactaatcagtattaccacatggtaacgatcccgagtggtgccagatcaatcaggatttatgagatgaacgtgagtacaagctatatatctgtgaggaacgccttacgaagatattacttgaatggacactggacagtggactggcccgggcgttacaagtttagtggcactacatttgactacagacgcagttataacgagccggagaacctaatagcaactggcccaacaaacgagaccctgattgtggaattactgtttcagggtaggaacccaggcgtggcatgggagtactcgatgccaagactgggcacagagaaacagccccctgcacaaccgtcctacacttgggccatcgtccgtagcgagtgcagcgtgagctgcggcggaggtcaaatgactgtaagagaggggtgctaccgcgatctgaagttccaggttaatatgtcattctgtaatcccaagaccagacccgtcacaggtttagttccttgtaaagtttccgcctgcccgccttcatggtccgttggcaattggtccgcctgttctcgaacctgtggcggcggcgctcaatcccgcccggtccagtgtacaaggcgcgtccattatgatagtgagcctgttcccgctagcttgtgtccccagcccgccccttcctcccggcaagcctgtaatagccagtcatgcccaccagcgtggtctgcaggaccatgggccgaatgctcccatacatgtggtaaaggctggcggaaacgcgcggtggcctgcaagagcaccaatcctagcgcccgagctcaactcctcccggacgcagtttgcacatcagagcccaagcccaggatgcatgaggcatgtctgctgcagaggtgccataagccaaaaaagcttcaatggctggtgagcgcttggtcgcagtgctctgtaacgtgcgagcgcgggactcagaagcggtttttgaagtgcgcggagaaatacgtgagcggaaagtaccgcgagctcgcaagcaaaaaatgcagtcatctcccaaagccgagcttagaacttgaaagagcatgtgcccctcttccctgcccaagacaccctcctttcgccgccgcaggccccagcaggggctcatggttcgctagcccctggtcccagtgcacagcctcttgcggcgggggcgtccagacccgaagtgtgcagtgtctcgcggggggtcggcctgcatccgggtgtctgctccatcaaaagccttctgccagcctggcttgcaacactcacttttgtccgatcgcagaaaaaaaggacgccttctgtaaagactactttcactggtgctatctggtgcctcagcacgggatgtgttcacacaaattttatggcaaacaatgttgtaagacatgctcaaagagtaacctgtag

SEQ ID NO: 107245 - DNA, 2787 bp, synthetic construct
  misc_feature 1..2787: note = Description of Artificial Sequence: Synthetic coding sequence
  source 1..2787: mol_type = other DNA
atgaagccacgagcaagaggctggcgcggactggccgctctgtggatgcttctggcgcaggtggctgagcaagctcctgcgtgtgctatggggcctgccgccgcagcccctggttctccctctgtgcccagacccccaccgccagctgaaaggcctggttggatggaaaagggggagtacgatctggtcagcgcatatgaagtggaccacagaggggattacgtgtcacatgaaattatgcaccaccaaaggcggcggagggcagtgccagtaagcgaggttgagagcctccaccttcgcttgaaaggtagtaggcacgacttccatatggatctccggacctcctcctccttagtcgctcctggtttcattgtgcagaccctcgggaaaaccggtaccaaatcagtgcagaccctccccccagaagacttctgcttctaccaagggtccttgaggtcccacagaaactcatcagtcgctctgtcaacttgccaggggctgtcaggcatgatacggacagaggaagcggattattttctgaggccccttcctagccacctatcatggaaactgggcagagctgcacagggcagctctccatcccatgtcctgtataagcggagcaccgaacctcacgcccctggagcaagcgaggtactggtgaccagtaggacgtgggaactcgcccaccaaccactgcactccagcgatctgcggttgggcctcccacaaaaacagcatttctgcggccgtaggaaaaaatacatgccacagcctcccaaagaggacctctttatcctgcctgatgaatataaaagctgcctccggcacaagaggtcactgctcaggagccaccgtaacgaggaactgaatgttgagactttagtggtggtcgataaaaaaatgatgcagaatcacggccacgaaaacatcaccacatacgtgctcacgatactcaatatggtgtcggccctgttcaaagacggtacaatcggcggcaatatcaatattgcaattgttggcctgatccttctcgaggacgagcagcctggcttagtgatttcacatcatgctgatcatacgttgtcatccttttgtcagtggcagagcgggcttatgggcaaagacggcaccaggcatgaccacgctatcctgctcaccggactggacatctgtagctggaagaatgagccttgcgacacactgggctttgcccccatcagcggaatgtgttcaaagtatcgtagttgcactattaacgaagatactggactgggtctagccttcaccatcgcccacgaatctgggcacaactttggcatgattcatgacggtgaagggaatatgtgtaagaaatctgaggggaacatcatgtcacccactctggcagggcgcaacggcgtctttagctggagtccctgttccagacagtaccttcataagtttttgtctaccgcccaggctatctgcctggccgatcaacccaagccagtaaaggagtataagtatccagaaaagctgccaggggaactgtatgacgcgaacacccagtgtaaatggcaatttggggagaaggctaagctatgtatgctcgattttaagaaagacatatgcaaagccctctggtgtcaccgcatagggagaaaatgtgagaccaagtttatgccagctgccgaaggaaccatctgtggacacgatatgtggtgtcggggcgggcagtgcgtgaagtatggagacgagggaccgaaaccaacccacggccactggagtgactggtccagctggagcccctgttctagaacttgcgggggaggagtgtcccatcgatccaggctttgtactaatcctaagccatcacacgggggcaaattctgtgaaggctctacacgtacactcaagctgtgcaactcccagaaatgcccacgagactctgtggactttagagctgcccaatgtgccgagcacaactctcggcggtttagaggacgccactacaagtggaagccttatacccaagttgaggatcaggatctgtgcaagctatactgtatagccgaaggtttcgatttcttctttagtttgagtaacaaagtgaaggacggtactccctgctccgaggatagtcggaatgtgtgtattgacgggatctgtgaaagggtgggttgtgacaatgtgctcggttccgatgctgtagaggatgtctgcggagtgtgcaacggtaacaacagcgcttgtacaatacatagaggattgtacaccaagcaccatcacaccaaccagtactaccacatggttaccattccgtcaggtgcccggtcaatccgcatctacgagatgaacgtgtctacctcttacatttccgtaaggaatgctctccggaggtattacctgaacggccactggaccgtcgactggcccggaaggtataaatttagcggcaccacgtttgactaccgcaggtcatataacgaacccgaaaatctgatcgctactggcccaacgaacgaaaccctgattgtagaactgctgttccaaggtaggaatcccggagttgcctgggagtactcgatgcctcgtttaggaactgaaaaacagccgcccgcccaaccaagctatacctgggcaattgtcagaagcgagtgctccgtcagctgcgggggtgggcagatgactgtgcgagaaggatgctatcgggactttttatattttatgttctatctgagtcagttatttgcctccgagtgccccttcaaaaatacactgctgcacgcttttctctgcaagtag

SEQ ID NO: 107246 - DNA, 3288 bp, synthetic construct
  misc_feature 1..3288: note = Description of Artificial Sequence: Synthetic coding sequence
  source 1..3288: mol_type = other DNA
atgtgcgacggcgcccttctcccgcccctggtgctgcccgtgctgctgcttcttgtgtgggggcttgaccccggcacagcagttggcgacgccgccgccgacgtagaagtggtgttaccatggagagtgcggcccgatgacgtgcacttgccaccgctgcccgcggcacccggacctagaagaaggagacggccccgcactcccccagccgctccaagggcgagacctggcgaacgagctctgcttctgcacctgcctgccttcggccgagatttatatctccaattgcgaagggacctgaggttcttgagcagagggtttgaggttgaggaagccggcgccgcgagacgtcgcggccgccctgctgagctatgtttctactccggtcgggtgctcggacatccggggtcactggtctccctgagcgcttgcggagccgctggggggctggtggggctgatccagctggggcaggagcaggtgctcatacagccactcaacaattcccagggcccattctctggcagggagcatttaatccggaggaaatggtccctaacaccttctccttctgccgaagcgcagaggccggagcaactgtgcaaagtgctgacagagaagaagaagccaacttggggtaggccgtcccgtgattggagagagaggcggaatgctatacgattgacctccgaacatacagtagagacacttgtggtagccgacgccgatatggtccagtatcacggggccgaggccgcccagcgtttcatattaaccgtgatgaacatggtgtacaacatgttccagcatcaatctctaggcataaaaataaacatccaggtgacaaagttagttctgctgcgccagcgaccagccaagctatcaattggtcaccatggcgaaagatcactcgaatccttttgtcactggcagaacgaagaatatggcggcgccagatatttggggaacaaccaggtgcccggggggaaagacgatccaccactggttgacgcagccgtttttgtgacacgcaccgatttctgtgtccataaggacgagccgtgcgacactgtgggtattgcgtatctaggtggcgtctgtagtgctaagcggaagtgcgtcctggcagaagataatggtctcaacctggctttcacgattgcccatgagctggggcacaacttgggcatgaatcacgatgacgaccattcctcttgcgcgggaagaagtcacataatgtctggcgaatgggttaaggggcgtaatccgtccgatttgtcgtggtccagttgttctcgggatgatctagagaatttcctcaagagcaaagtcagtacctgcctcctggtaactgaccctcgaagccagcacaccgtgcgccttccccataagctcccgggaatgcattacagtgctaatgagcagtgtcagatactgttcggtatgaatgccaccttttgccggaacatggaacaccttatgtgcgccgggctctggtgtctggtggagggtgatacctcttgtaagacaaaacttgaccctcctctggacggaacggagtgcggagcagacaaatggtgccgggcgggtgaatgtgtgtctaagaccccgattcccgaacacgtagacggagactggagtccgtggggcgcctggagcatgtgctccagaacgtgcggaaccggtgcgcgctttcgacagaggaaatgcgataatcctccgccaggccccggtggtactcactgccctggcgccagtgttgaacatgccgtgtgtgaaaatctgccatgcccaaaaggattgccctcctttagagaccagcagtgtcaggctcacgatcgcttatcaccgaaaaagaaggggctccttaccgccgttgtcgtggacgacaaaccatgcgagctctactgttccccacttggaaaggagagtcccctcctagtggctgatagagtcctcgacgggacgccttgtggcccatatgaaaccgatctttgcgtgcatggcaagtgtcagaaaattggatgcgatgggatcataggctccgccgccaaagaggacaggtgtggtgtatgtagcggcgatgggaagacttgtcacttggtgaagggagatttcagccacgccagaggcactgcacttaaggacagtggcaagggatctatcaactctgactggaagatagagctacccggagagttccagattgcagggaccactgtcaggtacgtcaggcgcggactgtgggagaagatcagtgcgaaggggcctacaaaactgcctctccatcttatggtgctgcttttccacgaccaggattacggaatacactacgaatatacggtgcccgtaaacagaactgctgaaaaccagtctgaaccggaaaaaccacaggattctctatttatttggactcactcgggatgggaaggatgttccgttcaatgcggaggtggggaaaggcgcaccatcgtgagctgtacaagaattgttaacaagacaacaactctggtcaatgatagtgactgcccacaggcctcaaggcccgagccacaggtaagacgctgcaatctgcatccatgccagagcagatgggtggccggcccctggtcaccttgctccgctacctgcgaaaagggttttcagcaccgcgaggtaacgtgtgtttatcagctgcaaaacgggacacacgttgcaacaagacctctgtactgccctgggccacgccctgccgccgtgcaatcctgcgaaggtcaggactgcttgtctatttgggaagcgtcagagtggagccagtgctctgccagctgtggaaagggggtctggaagcggacagtggcttgtaccaattcgcagggcaaatgcgatgcttctactcgccctcgggcagaggaggcctgtgaggactactctgggtgctatgaatggaaaactggtgactggtctacatgctctagcacctgtggtaaggggttacagagtagggtggtacaatgcatgcataaggtcactggcaggcatggctccgaatgtcccgccctcagtaagccagctccataccggcagtgttaccaggaagtttgcaatgacaggataaacgccaacacaataacttctccccgcttagctgcactgacttacaagtgcaccagagatcagtggaccgtttactgtcgggtaatccgcgaaaagaacttgtgccaggacatgcggtggtatcaacgatgctgtcagacatgcagggatttctatgcgaataagatgcgccagcctccaccaaattcgtag

SEQ ID NO: 107247 - DNA, 3666 bp, synthetic construct
  misc_feature 1..3666: note = Description of Artificial Sequence: Synthetic coding sequence
  source 1..3666: mol_type = other DNA
atggaatgcgcccttctgttagcttgtgcgttcccagccgccgggagcggcccgcctcgcggcttggccgggttaggtcgagttgccaaagccctgcagctgtgttgtctatgttgtgcgtccgttgccgctgccctcgcatccgacagcagctcaggcgcatcggggcttaatgacgactacgtcttcgtcactcctgttgaggtcgatagtgccgggagttacataagtcatgatatcctgcacaacggacgaaagaagaggagcgcacagaatgccaggtcctctctgcactatagatttagtgctttcggacaggagctccacttggagctcaaacctagtgctattctctcttctcactttattgtacaggtcctcggtaaggacggcgcatctgaaacgcaaaaacccgaagtccagcagtgtttctaccaagggttcattcggaacgactcctcatcttccgtagccgtaagcacatgtgccggcttgagcggcctgattagaacaagaaagaacgagttcctgattagtcccctgccccagttgctggcccaggagcataattactcatctcccgctggccatcacccacacgtgctatacaagcgcaccgcagaggaaaaaatccagcgctataggggctaccctgggtccggtaggaactatcctggctattctccctcacacattcctcatgcctctcaatccagagagaccgaataccaccaccgtaggcttcagaaacagcacttttgcggacgacgcaaaaaatacgccccaaaacctcctacagaagacacatacttaaggttcgatgagtatggatcatccggtcgtcctaggcggagtgcgggcaagagtcagaaaggcctcaacgtggagacgcttgtggtagccgacaagaaaatggtggagaagcatggaaagggcaacgtcactacttacattttgacagtgatgaatatggtatccggactattcaaggatggcaccattggatcagatatcaacgttgtcgtcgtgagcctgattctactggaacaggagcctgggggtctgctgatcaatcaccatgctgatcagagtctcaattctttctgtcagtggcagtccgcgttgattgggaagaacggcaagaggcacgaccatgctattctgctgacagggttcgacatctgttcttggaaaaacgagccatgcgacacgctgggcttcgcccccatctccggtatgtgttctaagtaccggtcttgtactatcaatgaggacaccgggttgggcctagctttcaccattgcccacgagagtggccacaacttcgggatgatccacgacggtgagggaaatccctgccgtaaggcggagggaaatattatgagtcccacgctaaccggaaacaacggcgttttttcctggtccagttgctcacgtcagtacctcaaaaagtttctcagcactcctcaagcgggttgccttgtggacgagccaaaacaggcagggcagtacaagtatccagacaaactcccgggacagatatatgatgctgacacacagtgtaaatggcagttcggagcgaaagcgaaactctgctcactcgggtttgtcaaagacatctgtaagagcctgtggtgtcacagggtaggccacaggtgcgagaccaaattcatgcctgccgccgaagggacagtctgcggtctgagcatgtggtgtcggcaaggtcagtgtgtgaagtttggcgaactggggccacgtcctatacatggtcagtggtccgcctggtcaaagtggagcgagtgcagtcggacctgtgggggaggcgttaaatttcaggagagacattgcaataatccaaagccacagtacggaggtctcttttgtcctggctcctcaagaatatatcagctatgtaacatcaatccatgcaatgagaattctctcgattttagggcacagcagtgcgctgagtataattccaagccttttcgcggctggttctaccagtggaaaccctataccaaagttgaggaggaggatagatgcaaactctactgcaaagctgagaacttcgaattttttttcgccatgagcgggaaagtgaaggacgggacaccttgctctcctaataaaaatgatgtgtgtatcgatggggtgtgcgagctcgttggatgcgaccacgaactgggctcaaaggcagtgtctgacgcgtgtggtgtctgcaaaggggacaactctacatgcaaattctacaagggcctctacctaaaccaacacaaagccaatgagtattatccagttgtcctcatccctgctggagcacgctcgatcgaaatccaggaactccaagtcagttcgagttaccttgcagttcgctccctttcacaaaagtactacctgactgggggatggtcgattgactggccaggcgagtttcctttcgccggaacgacctttgagtaccagcggtctttcaacagacccgaaaggctgtatgcaccggggcccacaaatgagacactcgtgtttgagatattgatgcaaggtaagaacccaggaatcgcttggaaatatgcactgcccaaagtgatgaacggcacaccacccgccacaaagcgcccagcatacacttggagcattgtgcagagtgaatgcagtgtgtcgtgtggcggtggctatattaacgtgaaagctatttgtctgagggaccagaacacccaagtgaattctagcttctgcagcgctaaaacaaaacctgtgactgagcctaaaatctgtaatgcattcagctgtccagcctattggatgcctggcgagtggagtacatgctcaaaggcctgtgctggaggacagcagagcaggaagatccagtgtgtgcaaaagaagccttttcaaaaagaggaagcagttcttcattctctgtgcccggtatcaacccccacacaggttcaggcctgtaattctcatgcctgtccgcctcagtggagtctgggcccctggtcccagtgttctaaaacttgcggtagaggagtccggaagcgcgaactcctgtgtaaaggcagtgccgcggaaacgctgccagaaagccagtgcacaagtctgccccggccggagcttcaagaaggttgcgtgctggggcggtgtccaaaaaacagccggctgcagtgggtagcttctagttggtcagagtgttctgcaacgtgtggactgggcgtcaggaaacgagagatgaagtgcagtgaaaaagggtttcagggcaagctgataacctttcccgagcgccggtgcagaaacattaaaaagcctaatcttgacctcgaggaaacatgcaaccgtagagcctgcccagcacaccctgtttacaacatggtggcaggttggtactccctgccctggcaacagtgcacggtcacctgtggagggggcgtccaaactcggtcagttcactgtgttcagcaggggcgccccagctctagttgtctgctccatcagaagcccccggtgttgcgggcctgtaacacaaacttctgccccgccccggaaaagcgggaggatccaagctgtgtggatttttttaactggtgtcatttggtcccgcagcacggagtgtgcaaccataagttttacggcaaacaatgttgcaagtcctgtacaagaaaaatttag

SEQ ID NO: 107248 - DNA, 825 bp, synthetic construct
  misc_feature 1..825: note = Description of Artificial Sequence: Synthetic coding sequence
  source 1..825: mol_type = other DNA
atggaatgcgcccttctcttggcgtgcgcttttcccgcagctggttcaggacctccacgggggctagccggtctgggcagagtcgctaaagcactacagctctgttgcctgtgctgcgcgagcgtggcagctgctcttgcctccgactcctcctctggggcttccggactgaacgatgattacgttttcgtcacgcctgtagaagtcgatagcgccggatcctatatttcccacgacattctgcacaatggaagaaagaagcgctcagctcaaaatgcaagatcctctttgcattacagattcagcgccttcgggcaggagcttcacttggaactaaaaccatcagcaattctgtcttcacacttcattgtgcaagttctggggaaagacggcgcctccgaaacccagaagcccgaggtgcaacagtgtttctaccaaggcttcattcgtaacgactcatctagttcagtggctgtcagcacatgtgccgggctgtccggactaatcaggacacggaaaaatgagtttttgattagtccactgccccagttgcttgcccaggagcacaactactcctcccctgccggccaccatccccacgtcttgtacaagcgtacggcagaggagaagatccagaggtaccgcggatatccagggtcaggtcgcaattaccctggatatagcccgtctcatataccacacgcctctcagtcccgcgaaactgaataccaccatcggcgtctgcagaaacagcacttctgtgggcgacgaaagaagtgcatatgtagccaggcgagccacagaggtcatctgtccaaagtttag

SEQ ID NO: 107249 - DNA, 3636 bp, synthetic construct
  misc_feature 1..3636: note = Description of Artificial Sequence: Synthetic coding sequence
  source 1..3636: mol_type = other DNA
atggatcctcccgctggggccgcccgcaggctgctttgtcctgcattgctgcttctgctcctgctgttgcccccaccgttgttaccacccccccctcctccggccaacgctaggctggccgctgctgccgatccgcccggcgggccgctggggcacggcgcggaacggatcctagctgtgcctgtgcgtacagacgctcagggccggttggtgtctcacgtggtctcagctgcaaccagccgagccggggtcagagccaggcgcgctgcaccagtgaggacacccagctttcctggggggaatgaagaggagcccggaagtcatctgttctacaatgtgacagtgttcggtcgagatcttcatctccggctgagacctaatgcaaggctcgtggcccctggcgctactatggagtggcagggcgaaaagggcaccaccagagtcgagcctttgctggggtcctgcttatacgtgggcgatgtggctgggctggcagaggccagctcagtcgctctgtcgaactgtgatgggctggcgggactgattcggatggaggaagaggagttctttattgaaccactggaaaaaggactggccgctcaagaggctgagcagggccgggtccatgttgtgtatcggcgacctcctacaagtccacccctgggaggtccacaagccttagacacaggcgcgtctctagacagtttggactcactgtcccgggcgctgggagtcctggaggagcatgcgaactcctctagacgccgcgcacggaggcacgctgctgatgacgattacaacattgaagtgctgttgggcgtagacgacagcgttgtacagtttcacggaaaagaacatgtacagaagtatctcctcacattaatgaatattgtgaacgagatttaccacgacgaaagcctcggggcccacattaacgtggttcttgtgagaatcatcctgctgtcttatgggaagagcatgagcttgattgagattggtaatccctcccaaagtctggagaacgtatgccgctgggcatatctgcagcagaagcccgatactggtcacgatgaataccatgaccatgccattttcctaacaaggcaggattttggcccaagtggaatgcagggatatgcacccgttaccgggatgtgtcaccctgtgagaagctgtacgctgaatcatgaggacggcttctcttcagcgttcgtggtggcccacgaaaccggacacgtactggggatggaacacgatggccagggaaaccggtgcggtgacgaggtgagactcgggtctatcatggctcctctggttcaggccgcatttcatcgcttccactggagcaggtgttcacagcaggagctttcaaggtatcttcacagttacgactgtctcctcgacgacccgtttgcacatgattggcccgccctgccccagcttcccggtctgcactacagcatgaatgagcaatgtcggttcgactttggccttgggtatatgatgtgtacggcattcaggacatttgacccttgtaaacagttgtggtgctcacaccccgataatccctacttttgcaaaacaaagaagggcccgcccctggacgggactatgtgtgcaccaggcaagcattgctttaaaggccattgtatttggctgacccctgacattctgaaacgtgatggtagttggggcgcctggtctcctttcggaagctgcagccgtacctgtggaacaggagtgaagttccgcacccgccagtgtgacaatcctcatccagctaacggaggtcgcacctgctccggacttgcctatgactttcagctatgttcgcgacaagactgtccagactccctggctgacttcagggaggagcaatgtcggcaatgggatctatactttgaacacggggacgcccaacatcactggctgccccacgagcatcgggacgcaaaggagagatgccacctgtactgcgaatcccgcgagaccggagaagttgtgagcatgaaaaggatggtgcacgatggcacacgttgctcatacaaggatgccttctctttgtgcgtgcggggcgattgcaggaaggtggggtgtgacggggtcatcggctcttctaagcaggaagacaaatgtggcgtctgcggaggtgataacagtcactgtaaggtggtgaaagggacctttactcgctccccaaaaaaacacggatatatcaagatgtttgagatcccggccggcgccaggcacctcctgatccaggaagttgacgcaaccagccatcacctggccgtgaagaaccttgagacaggcaagttcattttaaatgaggagaacgacgtggacgcaagttctaagacttttatagctatgggagtcgaatgggaatatcgcgacgaagacggccgggagactctccagaccatgggccctctacacgggacaatcaccgtcctggtcattcctgtgggggatacaagggtctcactgacctataagtatatgatacatgaggatagcctgaacgttgacgataacaatgtactcgaggaggatagcgtggtttacgagtgggcgttaaaaaagtggagtccctgtagcaagccctgcggcggtgggtcccagtttaccaaatacggctgcagacgacggctagaccataaaatggtgcaccgcggcttttgtgctgccctgtccaagcctaaggctatcagaagggcttgcaacccccaggaatgctctcaacctgtctgggtgaccggtgaatgggaaccttgttctcaaacctgcggcaggacaggaatgcaggtgcggtctgtcagatgtattcagcctttgcacgacaacaccactcggtcagtgcatgccaaacactgcaatgatgcacggcccgaatcgcgcagggcctgctcccgggaattatgccccggcaggtggagagctggaccatggtctcagtgcagcgtgacatgcggaaatggaactcaggagagaccagtgctgtgtcgcaccgctgacgactcatttggtatctgccaggaggaacggccagagacagcaaggacgtgtcgcttaggcccgtgtccgcgtaatatctcagatcccagcaagaagtcttacgtggtgcagtggctgtcaagacctgacccagattccccaattcgtaagatcagctcgaagggccactgtcagggagacaagtccattttttgtaggatggaggttctttccaggtattgtagcatcccagggtataataagctgtgttgtaagagctgcaacctctacaataacctgactaacgttgaaggccggattgagccccctccgggcaagcataatgatattgatgtgttcatgcctacactgcctgttcccacagttgcgatggaggttcggccttcacccagcaccccattggaggttccactaaacgcctcctccacgaatgccacagaagaccatcctgagactaatgcagttgatgagccctataaaatccacggcctcgaggacgaggtccagccaccaaacctgattcctagacgtccctctccttacgaaaagaccaggaaccagaggatacaggaactcatcgatgagatgcgaaagaaggagatgcttggaaagttctag

SEQ ID NO: 107250 - DNA, 1701 bp, synthetic construct
  misc_feature 1..1701: note = Description of Artificial Sequence: Synthetic coding sequence
  source 1..1701: mol_type = other DNA
atggacccacccgccggcgccgcccgtagattgctctgccctgctctgctcctgcttttgctgctgctgccccctccactgttaccacctcctcctccccctgcaaacgccaggctggccgccgcggccgacccaccaggcggcccgctaggtcatggcgcggaacgaattctagcggtcccagttagaacggacgcccagggccgtctcgtctcacacgtggtgagtgcggccacttcaagggcgggggtgagagccaggagagctgccccggttcggactccctcctttccaggcggaaacgaagaggaaccgggatcccacctcttctacaatgttacggttttcggcagggatctgcatttacggttgaggcccaatgcgcgcctggtcgctcccggagctacaatggagtggcagggggagaaagggaccactagggtggaaccactcctcggcagctgcttgtatgtaggagatgttgctggactcgccgaagccagctccgttgcgctctcaaactgtgacggcttagcaggcctgattcggatggaggaggaagagttcttcatagagcctctcgaaaagggtctcgctgcccaggaagcggagcagggaagggtgcacgttgtgtatagacgaccccccacaagccctccattagggggaccacaagccctggacacaggggccagcctagacagcctggattccctgtcccgagcattgggtgtcctcgaagagcacgccaactccagtcggcgacgcgcgaggcgccacgctgcagacgatgactataacatagaggtactgctgggggtggacgattctgtcgtacagtttcacggtaaggagcacgtgcaaaagtatctcctgactctgatgaacatcgtgaatgagatctaccacgacgagtcactgggtgcacacatcaatgtggtgctggtgcgaatcatccttctgtcatacgggaaaagtatgtcattaattgagattgggaacccttcccagagtctggagaatgtgtgtcggtgggcctaccttcagcagaagcccgatactggccacgacgagtaccatgatcacgccattttcctaacgcgacaggattttggacccagcggaatgcagggatacgcccctgtgaccggaatgtgccaccccgtgcgctcatgtactttaaaccacgaagatggcttctcatccgccttcgtggtcgcacatgaaactggccatgtgctggggatggaacacgatggacagggcaatcggtgcggcgatgaggtgcgccttggcagcatcatggctccactggtccaggcagcgtttcatcgcttccattggagtcggtgctcccaacaggaactgtccaggtatctgcacagttacgattgcttactagacgatcctttcgcccacgattggcccgccctaccacaactgcctggtctccattacagcatgaatgaacagtgtcggtttgatttcgggctcggatatatgatgtgcaccgcgtttcggacttttgacccttgcaagcagctctggtgttcacatccggacaatccctatttctgtaaaactaaaaaggggccgcctctggacggaaccatgtgcgcaccaggcaagttccggccaggtgcagtggctcacgcttgttacccttccacccttgggggccagggccggtggattgcatag

SEQ ID NO: 107251 - DNA, 4515 bp, synthetic construct
  misc_feature 1..4515: note = Description of Artificial Sequence: Synthetic coding sequence
  source 1..4515: mol_type = other DNA
atgtgggtggcgaaatggctgacaggcttgctgtaccacctctcactgttcatcacccgctcatgggaggttgatttccacccgaggcaggaggctctggtgaggactctgacctcctacgaggtggttatcccagagagagtcaacgaatttggcgaggtgttcccccaaagccatcacttttcacgacagaaaaggagctcagaggctcttgaaccaatgccatttagaacccactacaggtttacagcatacgggcagttgttccagctcaacctcactgctgacgcctcctttttagctgcaggctacactgaggtacacctcgggactcctgagcgaggagcttgggaatccgacgccggtccttcagaccttagacattgtttctatcgaggccaagtaaacagtcaggaagactataaggcggttgtgagtctctgtggtgggctgactggaaccttcaaagggcagaacggtgagtacttcttagagccaatcatgaaagccgatggtaatgagtacgaggacggccacaacaagcctcacctgatctaccgccaagacctgaacaactcatttctgcagacactgaaatattgctctgtgtccgagagtcagatcaaggaaacttccctcccgtttcacacttatagcaacatgaacgaggacctcaacgttatgaaagagagagtactagggcacacctcaaagaatgtgccgctgaaggacgagcgtcgccatagtaggaagaaacgccttatatcttaccctagatacatcgagatcatggttactgctgacgccaaggtggtttcagcccatggctctaatctgcagaactacattttgaccctaatgtctatagtagccaccatatacaaagaccccagcattggaaatttaatccacatagtggtggtcaaactggtgatgattcatagagaagaagaaggacctgtaattaactttgacggggccactaccctgaagaatttctgttcctggcaacaaacgcagaacgacctggacgacgttcatcctagccatcatgatactgccgtactgataacacgcgaagacatatgctcctctaaggaaaagtgcaacatgctgggcctctcttatttaggtacgatatgtgacccccttcagagctgtttcataaatgaggaaaagggactgatttcggccttcacgatcgcccatgagctaggccacacattgggggtgcaacacgacgataatccacgctgcaaagagatgaaagtgacaaagtaccacgtgatggccccagcactgagctttcacatgtccccctggtcttggagcaattgtagtcgcaagtacgtgaccgagttcctggatacaggctatggagagtgcctgctggataagccagacgaggaaatctacaatctcccctctgagcttccaggatcccgatatgacggaaacaagcagtgcgagttggcgttcggccctgggagccaaatgtgcccacacattaacatctgcatgcatctgtggtgcacttccactgaaaaactgcataaagggtgtttcacacagcatgttcccccagctgatggaacagactgcggcccaggcatgcactgcagacacggactctgcgtgaataaagagacggaaacccgaccagtgaatggggagtgggggccgtgggagccttactcgtcatgttcccggacctgtggaggcggcattgagtctgccactcgtcgttgcaaccgaccagagccacgaaatggcggaaactactgcgtcgggcgacggatgaaattccgttcttgcaacactgactcctgtcccaaaggcacccaggattttcgggaaaagcagtgcagcgactttaatggtaaacacctggacatcagcggcattccgagcaatgtgcgatggctgcctcgctattctgggatcggcactaaggatcgatgcaagctctattgccaggtggccggcacaaactatttctacctgctcaaagacatggtcgaggatggaacaccctgtggaaccgaaagctacaatatcgactgtaattgtgtgctgaaggcagcaggatgcgaccacgtgctcaactcctcggcaaagattgacaagtgcggcgtctgtggaggggacaactcttcgtgtaagaccattacaggagtgtttaacagctctcattatgggtataacgtggtcgtgaaaatacccgctggggccactaatgtcgatatccgacaatatagctactccggtcaaccagacgatagctatctggctctatctgacgcggaagggaatttccttttcaatgggaacttccttttgtctactagcaaaaaagagatcaacgtgcaaggaactagaacagtcatcgagtactcaggctccaacaatgccgtcgaaaggatcaattctacaaataggcaggagaaagaaatcctcattgaggtcttatgcgtgggcaacctttacaatcctgatgtccactattcattcaatatccctttagaagagagatccgatatgtttacgtgggacccatacggtccatgggagggatgcacgaagatgtgccagggccttcaaaggcgaaacatcacttgtatacacaaaagcgatcacagtgtggtcagcgataaggaatgtgatcatttacccctgccatcttttgtaacccagtcctgtaataccgactgcgagcttcgctggcatgtcatagggaagtcggagtgttccagccagtgcggccagggctataggaccctggacatccactgtatgaagtatagtatccacgaaggtcaaacagtccaggtggacgaccattactgcggagaccagttgaaaccaccaacccaggaactgtgccatggaaattgcgtgtttaccaggtggcattatagcgaatggagtcagtgttcacgctcctgcggtggcggcgagcgctctcgggagtcctattgtatgaacaatttcgggcatcgcctggcagataatgaatgtcaggagctgagcagagttactcgagagaattgtaacgagtttagttgtccctcttgggcggcctctgaatggagcgaatgtctcgtgacgtgtggtaaggggacaaaacagaggcaagtttggtgtcagttgaacgtggaccacctctcagacggattttgtaattcttccacgaagcctgaatctctgagcccctgcgaacttcacacttgcgcctcatggcaggtgggtccttggggcccctgtacaactacttgtggccatgggtaccaaatgagagatgttaaatgtgtcaatgagcttgcaagcgccgtgctcgaggataccgagtgtcatgaggctagccggccttccgatagacagagctgtgtgctgaccccctgctcatttatcagtaagctggaaaccgccctgctgcccacggttcttattaaaaagatggcacagtggcgccacggaagctggacaccctgcagtgtaagctgtggaagagggacccaggcccgctacgtcagttgcagggatgcgcttgaccgaatcgctgacgagtcatattgtgctcatctcccaaggccagccgaaatttgggattgctttaccccatgcggcgagtggcaagcaggcgactggagtccttgttctgcaagctgtgggcacggcaagacaacccgccaagtgctgtgcatgaattaccaccaacctatcgacgagaactactgtgatccagaagtccgccccctgatggagcaggagtgctctctggccgcttgcccccccgcccatagccatttcccaagctcccctgtgcagccctcctattatctgtctaccaaccttccgcttacgcagaaactggaagacaatgagaaccaggttgtgcacccatcggtgcggggaaatcaatggcggacgggcccatggggtagctgctcctcttcgtgctcagggggactgcaacaccgggcagttgtttgccaggacgagaatggccagtcagcgtcctactgcgacgcagcgagcaagccccctgagctgcagcagtgcgggcccggcccctgccctcagtggaattatggcaactggggagagtgcagccagacttgcggcggtggcataaagtcaagactggtcatttgccagttccccaacgggcagatcctggaagaccataattgtgagatcgtgaataaacccccgagcgtgatccagtgccacatgcatgcctgcccagccgacgttagttggcaccaggaaccttggacctctgaagacttgaaagtcaaacttttaccccagaggaccataatactgtgggagttgatgaagaatattttctgtcacgggaagcacagtcatatgtacctgatcaacgtcgtaacagatcatctcttatacccacgtcactgcgaccccgagactatcgaaacctacttcttgagtctgtggtccctgcagtttacctggggcgatctgaagtattacaagaatagtctctag

SEQ ID NO: 107252 - DNA, 5733 bp, synthetic construct
  misc_feature 1..5733: note = Description of Artificial Sequence: Synthetic coding sequence
  source 1..5733: mol_type = other DNA
atgtgggtcgccaagtggctcacgggtcttttgtatcacctctctttgtttattacgcgatcctgggaggtggacttccatcctcgacaggaggctttagttaggaccttgacaagctatgaagtagtcatcccggagcgtgttaacgagtttggagaggtctttccacagtctcaccatttcagtaggcaaaaacgttcaagcgaggccctagaacctatgcccttccgcacgcactatcggttcaccgcctatgggcagcttttccagctaaacctgactgccgacgctagttttcttgccgccggatacactgaggtgcacctgggaacacctgagcgaggagcttgggagtccgatgctggtccgagtgatctcagacattgtttctataggggccaggtaaactctcaggaggattataaggccgtcgtgtccttatgcgggggtctaaccggaacttttaaaggtcagaatggcgagtactttcttgagcccataatgaaggccgacgggaatgaatacgaagatggccataacaagcctcacctcatctaccgtcaggacctaaataattcctttctccagacgctgaagtactgtagcgtgagcgagtcccagattaaggagacatccctgcctttccatacttattcaaatatgaatgaggacctgaatgtcatgaaagaacgggtactgggccatacatctaagaacgtccctttgaaggacgaaaggaggcactcccgtaagaagcgcctgatctcttacccccgatacatcgagatcatggtgaccgccgacgcaaaagtcgtctcagcccacggcagtaacctccagaactacattctcacactgatgagcatagtggccactatttataaagaccccagtataggcaatctgattcacatcgtggtggtcaaactggtgatgatccaccgggaagaggaggggcccgtcattaacttcgacggcgccacaactctaaagaacttctgtagttggcagcaaacccagaatgacttagacgacgtccaccccagtcaccatgacacggccgttttaatcactagagaggatatctgttcgtccaaggaaaaatgtaatatgctgggcctgagttacctgggtacgatttgcgacccactgcagagctgcttcatcaatgaggagaaagggctgatttccgccttcacaatcgcccatgaattgggtcacacattaggcgtgcagcacgatgataaccctcgctgtaaagagatgaaggtgactaagtatcacgtcatggccccggcattatcttttcatatgagcccttggtcttggtcaaattgctcacgaaaatacgtgacagaattcttggacacaggttacggggaatgccttttagacaaaccagatgaagaaatttacaacctgcccagcgaactccccggcagccgctacgacggcaataaacaatgcgaactagccttcggccccggctctcagatgtgtccacatatcaacatatgtatgcatttatggtgcacttctacggagaaattgcataagggttgctttacccaacacgtcccgcctgccgacggcaccgattgcggtcccggcatgcattgtagacacggactgtgcgtgaacaaggagaccgagactagacccgtgaacggcgagtgggggccatgggaaccttatagtagttgtagccgcacatgtggaggtgggatagagtcggcaacccggcgatgtaatcgcccggaacctaggaacggcggcaactattgtgtcggccgtaggatgaagtttaggagctgtaacacagatagctgtccaaaaggcactcaggatttcagggaaaagcaatgtagcgacttcaacggaaagcacttggacatcagcgggatcccttcaaacgtcagatggctccccagatacagcgggatcggcactaaggacaggtgtaaactgtactgtcaggtggccgggacaaactacttttaccttctaaaagacatggttgaagacggtactccttgtggtacggaaacccatgacatctgtgtacagggccagtgcatggctgccggatgtgaccacgtgttgaatagcagcgcgaagattgacaagtgtggggtgtgcggcggagataactcatcgtgcaaaactatcaccggtgtgtttaactcaagccactacggttacaacgttgtggtgaagatccctgccggcgccactaatgtcgacattaggcagtactcgtatagtgggcagcccgatgattcttatctagcgctatcagacgctgaggggaatttcttgtttaacgggaacttccttctgtccaccagtaagaaggagattaatgttcaggggacacggacagtgattgaatactcgggcagtaacaacgccgtggagcgtataaattcaacgaataggcaggaaaaagagctgatcttacaagtgttgtgtgtcggtaatctctataatccagatgtgcactatagcttcaatataccgctagaagagcggagcgacatgtttacctgggacccgtatggcccctgggagggctgtacaaagatgtgccaggggttgcagcgaagaaacattacatgtatccacaagtccgatcacagtgtagtctccgacaaagagtgtgatcaccttccacttccttcgttcgtcacccagtcctgtaacacagactgtgaactccgctggcacgtaatcggtaagtcagaatgttcctcccagtgcgggcagggctatcgcaccctggacatccactgtatgaaatacagcatacacgaaggccagacagtgcaggtcgatgatcactactgtggcgatcagctgaagccccctacacaagaactgtgccatggaaattgcgtgtttacacggtggcattactctgaatggtcccagtgctcaagatcctgtggggggggagaaaggtcacgcgaatcatattgtatgaataatttcgggcatcgcttagctgataatgaatgccaggagctctcccgggtgaccagagagaactgcaacgagttctcctgcccatcatgggctgcatcagaatggagtgagtgcctcgttacctgtggaaaggggacaaagcagcggcaagtgtggtgccagctcaatgtagatcacctgtccgatggtttctgcaacagttccactaagcctgagtctctgagtccttgtgaattacacacctgcgcctcttggcaagtggggccgtggggtccttgcactacaacctgtggccacgggtatcagatgagagatgtcaagtgcgtcaatgagcttgcctctgccgtcctcgaggatacggaatgccacgaagcgtccaggccgtccgatcgacagtcgtgcgtacttacgccatgcagcttcattagcaagctcgagactgcgctgctgccgacagtgctcattaagaaaatggcgcaatggaggcatgggtcctggaccccctgttctgtcagttgcgggagaggaacacaggcccggtatgtgagctgtcgtgacgcgcttgatcggatagccgacgagtcatattgcgctcatctgccaagacccgcagagatttgggattgtttcactccctgcggggagtggcaagccggggactggagtccctgcagcgccagttgcggccacggcaaaaccacacgccaggtgctttgcatgaattatcaccagcccattgatgagaactattgcgatcctgaagttcgccctctgatggaacaggaatgttccctggcagcatgccctcccgctcattctcacttcccaagttctcctgtccagcccagctactacctgtctactaatctgcccctgactcagaagctggaggataacgaaaaccaggtggtgcatccctccgtccgcgggaaccagtggcggaccggtccatggggtagttgctcatcttcctgttctggaggtttgcaacacagggccgtggtttgccaggatgagaatgggcagtccgcctcctactgcgacgccgcctccaaacccccagagctgcagcagtgtgggcctgggccctgtcctcaatggaattatggtaactggggtgagtgttcccagacttgtggggggggaatcaagtcaaggctggtgatctgtcaatttccaaatgggcagattcttgaagaccataattgtgagattgtcaataagccaccaagcgttatccagtgccatatgcatgcctgtcccgccgatgtttcctggcatcaagaaccatggacaagttgcagcgcatcatgtgggaaaggcaggaagtatcgtgaggtcttctgcatcgaccaattccagcgcaagctggaagacaccaactgctcacaggtacagaaaccccctactcacaaagcatgccgatctgtgagatgccctagttggaaggctaattcctggaacgagtgctctgtgacatgcggtagtggggtgcagcaacgggatgtctattgccggctgaagggggtcggacaggtggtagaagagatgtgtgatcagtccacccgcccctgctcccaacggaggtgttggagccaggactgcgtgcagcacaagggcatggagcgaggacgtctgaactgttctacgtcttgcgaacgcaaagattcccaccaacgaatggagtgtacggataatcagatcaggcaggtcaacgagattgtctacaacagctcaacaatatcgctgacgtcaaagaattgtcgcaatccaccctgcaattatatagtagttaccgccgatagcagtcagtgtgccaataactgtggattcagttaccgtcagaggatcacttactgtaccgagatccccagcaccaaaaagcacaagctgcatcggttacgtcctatcgtgtatcaagaatgtcctgttgtgccaagctcacaggtctaccagtgtatcaattcctgtctgcatctggccacctggaaggttggcaaatggagcaagtgttctgtcacttgtgggatcggtattatgaagcggcaggtaaagtgcataaccaaacatggcctctcttcggacctgtgcctgaatcatctgaaaccaggagcacagaagaagtgctacgctaatgattgtaaatctttcactacctgcaaggaaatccaggtgaagaatcacataaggaaagacggagactactatctgaatatcaagggccgcatcatcaagatttactgtgccgacatgtacctggagaacccaaaggaataccttacgctggtgcagggtgaggagaacttttctgaagtgtatggatttagactgaagaatccctaccagtgccctttcaacggctcaagaagagaagattgcgagtgtgataacggccatcttgcagcagggtacactgtctttagtaaaatccgaattgatctcactagcatgcagataaagactaccgatctcctgttctccaaaactatcttcggcaatgctgtgccttttgcaaccgctggtgattgttactccgcatttcgctgtccccaaggacaattttctatcaaccttagcggcaccggaatgaagatctctagcaccgccaaatggcttactcagggctcatacacgtcggtgtcaatccggcgctctgaggatggaaccagattcttcggcaaatgcggtggatattgtggtaaatgcctaccacatatgactacgggcctccccattcaggttatctag

SEQ ID NO: 107253 - DNA, 1869 bp, synthetic construct
  misc_feature 1..1869: note = Description of Artificial Sequence: Synthetic coding sequence
  source 1..1869: mol_type = other DNA
atgtttacctgggacccatacgggccgtgggaaggctgcacaaaaatgtgtcaagggcttcagcgaaggaacatcacatgcatccacaaatcagaccacagcgttgtctccgataaggaatgcgatcacctccctctcccgtctttcgttacccagtcttgcaacactgattgcgagctgcggtggcacgtgatcggaaagtccgaatgttcatctcagtgtggacagggctaccgcaccctcgacatccactgcatgaagtattctattcatgagggacaaaccgttcaggtggatgatcattactgtggtgatcagctaaagccgcctactcaggaactgtgccacggcaattgtgtgttcactcgctggcattacagtgaatggagtcagtgctctcgatcctgcggtgggggagagaggtcacgggagtcttattgtatgaacaacttcgggcataggctagcagacaacgagtgtcaggaactttcccgagtcacacgcgaaaactgtaacgagttctcctgtccctcctgggcggcatcagaatggtccgaatgtctcgttacttgcgggaagggcactaagcagcgccaggtgtggtgccagctgaacgtcgatcatttaagcgacggattttgtaactctagcaccaagccagagagcctttctccctgcgagttgcatacatgtgcatcctggcaggtgggcccatgggggccctgcacaaccacatgcggccacggataccaaatgagggatgtgaagtgtgtgaacgagctggctagcgctgtgctggaagacactgagtgtcatgaggcctcccggccctcagaccggcagtgtagcgtgagttgtggcagggggacccaggccagatacgtcagttgcagagacgcactggaccggattgctgacgagtcatactgtgcccacttacctcggccagcagagatttgggattgtttcaccccttgtggggagtggcaggccggagattggtcaccctgctccgcatcatgtggtcacggcaaaactactcggcaggtgttatgtatgaactatcaccagcccattgatgagaactactgcgaccccgaagttcggcctttaatggagcaggagtgttctctggcagcatgtccaccggcccactcccacttccccagttcccccgtccagccaagctactacctttctaccaacttgcccctcacacagaagctggaggataatgagaatcaggtggttcatcctagcgtccgggggaatcagtggcgcacaggcccttggggaagttgcagctcctcctgctctggcggcttacaacaccgtgcagtggtgtgtcaagacgagaacgggcagtctgcaagttactgtgatgcagcttccaagccgccggagctccagcagtgcggacccggcccatgtccccagtggaactatggcaattggggcgagtgtagtcagacctgcggtggcggaattaaatcacggttagtgatttgtcagttccccaatggccaaatccttgaggatcataactgcgagatcgttaataagccaccatccgtaattcaatgtcacatgcatgcctgtcctgccgacgtatcatggcaccaggaaccttggactagtgaagatctcaaggtgaaactgctgccgcagagaacaattatactgtgggagcttatgaagaacatcttttgtcacggcaagcactctcacatgtatctgatcaatgtggttacagatcaccttctttatccccggcactgtgaccccgagaccatagaaacttactttttatcattatggagtctccagtttacatggggggatctgaagtattataaaaatagcctctag

SEQ ID NO: 107254 - DNA, 4515 bp, synthetic construct
  misc_feature 1..4515: note = Description of Artificial Sequence: Synthetic coding sequence
  source 1..4515: mol_type = other DNA
atgtgggtcgccaagtggctgactggactcctttaccacctgtccctattcattacacggtcctgggaagtggacttccacccaagacaggaggctcttgtccggacccttacatcctacgaagtcgtaatacccgagagagtgaatgaatttggcgaggtgttcccacagtcccaccacttttcgcgtcagaaaaggtccagcgaggccttggagccaatgccttttcgaacacattacaggttcacagcatacgggcagctattccagttgaatctaacagctgatgcctcgtttttggcagctggatatacagaggttcaccttggcacacctgaacgaggtgcgtgggaaagtgacgcgggcccctcagacttgcggcattgcttctatagaggacaggtgaatagccaggaggactacaaagctgtggtgagcctgtgtggcggactgacgggcacctttaaaggacaaaacggtgaatactttctagagcctatcatgaaggcggacggcaatgagtacgaggatggtcacaacaaacctcacctgatttacaggcaggacctaaacaatagctttttgcagactctgaagtactgctcagtgtcagagagccagattaaggaaacatccctgccttttcatacatattcaaatatgaatgaagatctgaacgttatgaaggaaagggtgttggggcacacctcaaaaaatgtccccctcaaagatgagcggcggcactcaagaaagaagagactcatctcatatccaaggtacatcgaaatcatggtgacagccgacgccaaggtcgtgtctgctcacggatccaatctccagaattatatattaacactgatgtcaattgtagctaccatatacaaggaccctagcattggaaatttaatccacattgtggttgtcaaattggtaatgatccacagagaagaggagggccctgtgatcaatttcgacggtgccactaccctcaaaaatttttgttcatggcaacaaactcagaatgatttagacgacgtgcacccaagtcaccacgacactgccgtgttaattacccgagaggacatttgtagcagcaaggagaagtgcaacatgttggggttatcgtatctcgggactatatgtgatccgctgcagagctgttttattaatgaagagaagggcctaatctccgctttcaccatcgcacatgaactgggtcacaccctgggtgtgcagcacgacgacaatcccagatgtaaagagatgaaagtgacaaaatatcacgtgatggcacctgcgctgagtttccatatgtcaccttggagttggtcgaactgttcgagaaaatatgtgactgaattcctggataccggctatggtgaatgtcttctggataaacccgatgaggagatctacaatcttcccagtgaactgcccggtagcagatatgatggcaacaagcagtgtgaacttgctttcggacccgggagccagatgtgtcctcacattaacatttgtatgcatctgtggtgtacctcaacagagaagctccataagggctgtttcacccagcacgttccaccagccgacggaaccgactgtgggcccggcatgcactgcaggcacggcctgtgcgtgaacaaagaaacagagacaaggcccgtaaatggcgagtggggaccctgggagccgtatagctcctgttcacggacctgcggcggggggatcgagtctgctacaaggaggtgtaaccgccctgagccgcggaacggaggcaactattgtgtaggtagacggatgaagttccgctcgtgcaacacagatagctgtcctaagggtacccaggacttcagagagaaacagtgttctgacttcaatggaaagcatttagatatttccggcatcccgtccaatgtgcgttggctgccccggtactccggaatcggcacgaaggatcgttgtaaactgtactgccaggtcgccggtactaattacttttacctcttgaaagatatggtggaagacggtactccctgcggcactgagacccacgatatctgtgttcagggacagtgcatggcagcaggctgcgaccatgtcctgaacagttcagctaagattgacaaatgtggtgtttgtggtggcgataatagttcatgcaaaacaattaccggggtctttaacagctctcattacggatacaacgtggtggtgaaaatccctgcgggcgccacaaacgtggacatccgccagtatagctacagcggacagccagatgacagctatcttgcgctgagcgatgccgagggtaactttttgttcaatgggaattttctgctgagcacatctaagaaggagatcaacgtccagggcacgcgcacagtgattgagtattcaggttctaacaacgcagttgagcggattaacagtacaaatcgacaggagaaagagctgatcctgcaagtcctctgtgtaggtaatctttacaacccagatgttcattacagcttcaacataccgctagaggaaagaagtgatatgtttacctgggacccctatgggccatgggaaggttgcacgaagatgtgccagggcttacaacggcgtaacattacttgtatccataaatctgaccactccgtagtgagcgataaggagtgcgatcacctccctctgccatcgttcgttacccagagttgtaacactgattgcgaacttaggtggcacgtgatcggcaaaagcgagtgttcctcccagtgtggccagggatatagaacactggatattcattgcatgaagtattctattcatgaagggcagacagtgcaggtggatgaccactactgcggggatcagctcaaaccccccacccaagagctgtgccacggcaattgcgttttcacgcggtggcattacagtgagtggtctcagtgttccagaagctgcggagggggtgagagaagccgcgagagctactgtatgaataattttggccatagattagcggataacgagtgccaggagctgtctagggttacgcgggaaaattgtaatgaattcagctgccccagctgggcagcatctgagtggagtgaatgcctggttacttgtggaaaaggcaccaaacaacggcaggtttggtgccaactgaatgtagatcatttatcggacggcttttgcaatagttccaccaagcctgaatccctgagtccttgtgaattgcatacctgtgctagctggcaggttggcccatgggggccgtgtaccacgacctgcggacacggatatcagatgagggacgtgaagtgcgtcaatgagcttgcctctgccgtgctagaagacacagaatgccatgaggcgtctcgcccctctgaccggcagtcgtgtgtactgactccctgtagtttcataagtaaactggaaaccgctctcctaccaacagtactgataaagaagatggcgcagtggaggcacgggtcctggacaccttgctctgtgtcatgcggcagggggactcaggcccgctacgtgagctgccgggatgcactggacagaatcgccgacgaaagctattgtgcccacctgccaagaccagccgaaatttgggattgcttcactccgtgcggcgaatggcaggccggagattggagcccgtgcagcgctagttgtggccatggcaagaccactcgccaagtgctgtgcatgaactaccaccagcccatcgatgagaactattgcgacccagaagttaggccgctgatggagcaggagtgttccctcgccgcctgccctccggcacactcacactttccttcgagccctgtgcagcctagctattacctaagtaccaacttgcctcttactcagaaactggaggacaacgagaaccaagtggtccacccatcggtccgggggaatcagtggcgcacaggtccatggggctcctgctcctctagttgtagcgggggactccaacacagggccgtggtttgccaagacgagaatggtcagagtgccagctattgtgacgctgcatccaaaccccccgagttgcaacagtgcggtcccggaccatgtccgcagtggaattacggaaactggggagagtgctctcagacttgcggcggcgggatcaaaagtcggctggtcatttgccaattccccaatggccagattctcgaagaccataactgcgagatcgtgaacaagcccccgtccgtcattcagtgccatatgcatgcgtgccccgccgatgtgtcttggcaccaagaaccatggacatccgaggatttaaaagttaagctgctgccacaacgcaccataattctgtgggagctgatgaagaacatcttctgccacggtaaacacagccacatgtatctcattaacgtagttactgaccatctgctctaccctagacattgtgatcctgaaacgatcgaaacatattttctttccctgtggagcctgcagttcacctggggtgacctcaagtactataagaattccctgtag

SEQ ID NO: 107255 - DNA, 3618 bp, synthetic construct
  misc_feature 1..3618: note = Description of Artificial Sequence: Synthetic coding sequence
  source 1..3618: mol_type = other DNA
atggtccttctgtcactgtggctcatcgcagcagcactggtggaggtgcgcacaagcgccgatgggcaggccgggaatgaagagatggtgcagatagacctgcccattaaaagataccgggaatatgagctagtgactcccgtgagcactaatctggagggccgctacttgagtcacaccctgagcgcctctcacaagaagcggtccgcaagagacgtctcgtctaaccccgagcaactgttttttaatatcaccgcctttggaaaggacttccacctccggcttaagcccaacactcagctggtcgctccaggcgccgtggtggagtggcacgagactagccttgtgccgggtaatatcacagatcctatcaataaccaccagccgggctccgccacctacagaatcagacgaaccgaaccactccaaactaattgcgcgtacgtaggcgacatcgtggacatccccggcacctccgtcgccatatccaactgtgacggccttgctggaatgataaagtcagacaatgaggagtactttattgaaccccttgagcgtggcaagcagatggaggaggaaaagggccggatacacgttgtgtacaagcggtcagcagtggagcaggccccaatcgacatgtctaaagacttccattacagggagtcagatttggaaggccttgacgatctgggcactgtctacggcaatatccaccagcagctaaatgaaacaatgcgcagaaggagacacgctggcgaaaatgactataacattgaggttcttctcggcgttgacgattccgtcgtccgatttcatggcaaggaacacgtgcagaactatttactgactcttatgaatatagtcaacgaaatctatcatgacgagtctttgggggtccacataaacgttgtactggtgaggatgattatgcttggatacgctaagtcaatttctctgattgagcgaggcaacccctcccgatcacttgagaacgtgtgccggtgggcatcccagcaacagcggtcagatctaaatcactctgagcatcatgaccacgccatcttcttgactcgccaggactttggacctgctgggatgcagggatacgccccagtcacggggatgtgtcatcctgttcgaagttgcacactcaaccacgaggacgggttcagctcagcctttgtggtagctcatgaaaccggacatgtgcttggcatggaacacgacgggcagggcaacagatgcggcgatgagacagctatgggtagtgtgatggcccccctagtgcaagccgcgtttcaccgatatcactggtctaggtgtagtggccaggagctcaaacgctacatccactcctacgattgcttgcttgatgacccattcgaccacgactggcccaaattaccggagctgcctggaattaactactccatggatgaacagtgtagatttgacttcggtgtggggtacaagatgtgcactgcattcagaacgtttgacccatgtaagcagctgtggtgtagtcacccagataacccttatttttgcaaaactaagaagggtccacccctggatggtacagagtgtgcagccggaaagtggtgttacaagggccattgtatgtggaagaatgcaaaccaacagaaacaagatggcaattggggctcgtggacaaagttcggatcttgttccaggacctgcggcaccggcgtgagatttagaactcggcaatgcaacaaccccatgccaataaacggcggccaggactgtccaggcgtcaacttcgagtatcagctgtgtaacactgaagaatgtcaaaagcatttcgaagacttcagagcccaacagtgccagcagcggaatagccacttcgagtatcagaacactaagcatcactggctgccctatgaacaccctgatccaaagaagcgatgccacctgtactgtcagagcaaagagacaggcgatgtggcctatatgaagcaacttgttcatgacggcactcactgtagttataaggatccttattctatatgcgttcggggagagtgcgtgaaggtaggatgtgataaggaaataggatctaacaaagtggaggataaatgcggtgtttgtggtggggataactctcactgcagaaccgttaaggggacttttacccggactccccgcaagcttgggtatctcaagatgttcgacatcccaccaggagcccggcatgtcctcattcaagaagatgaagcttctcctcacatcttagctatcaagaatcaggccaccggtcactatatcctgaatggcaagggcgaggaagccaaaagcagaacattcatcgacttgggggtggagtgggactacaatatcgaggatgatatagaatccctgcatacggatggccctctgcatgacccagtcatagtattgatcattccccaggagaatgataccagatcttctctgacgtataaatacataatccacgaggactctgttccaaccatcaactcaaacaacgtcatacaagaagagttagacacctttgagtgggccctgaaaagctggtcgcagtgcagcaaaccatgcggaggcggtttccagtatacaaagtatggttgccgccgaaagtcagacaacaagatggtgcatagatctttttgtgaagccaacaagaagcctaagcctattcggaggatgtgtaatattcaggagtgtactcaccctctttgggtagcggaggaatgggaacactgtacaaagacctgtggctcgagtggctaccagttgcgtacagtgagatgtctgcaaccactgctcgatggcacgaaccggtctgttcatagtaaatattgtatgggagatcgccctgaatctcgcaggccatgtaaccgcgtgccatgtcccgcacagtggaaaacaggaccatggagtgaatgtagcgtgacctgcggtgaagggacggaggtccgacaagtcctgtgccgggccggcgaccactgcgacggcgagaaacccgaatcagtccgggcttgccagttaccaccctgtaatgacgagccgtgtcttggcgacaagagcattttctgtcagatggaggtcctcgccagatactgctcaatccctgggtacaataaactgtgttgcgagtcttgctctaagcgttcctccaccttgcccccgccatacctcctggaggcggcagaaacacacgacgatgtgatctcaaacccctcagatctgcctcgctcccttgtcatgccaacaagcctggtgccctatcactcagagactcctgctaagaagatgagccttagcagcatttctagcgtgggcggacccaatgcctatgccgccttccgcccgaactcaaagcctgacggagccaatctgaggcagaggagcgcccagcaggccggcagcaagactgtgcgtctggtcaccgtgccctcctcacctcctaccaaaagagtgcatttatcaagtgcaagccagatggcagccgctagtttttttgccgcctctgactcgattggcgcctcaagccaggcccggacgtccaagaaggacgggaagataatcgataacaggcgcccaaccaggtcctctaccctagagcgctag

SEQ ID NO: 107256 - DNA, 1020 bp, synthetic construct
  misc_feature 1..1020: note = Description of Artificial Sequence: Synthetic coding sequence
  source 1..1020: mol_type = other DNA
atgagtcagactggcagtcacccgggtcgcggactcgccggaagatggctctggggtgctcagccctgtttgctcctgcctatagtcccactcagttggttagtgtggttgctgctcttgcttctggcatccctgttgccctccgcacgcctcgctagcccactgccacgggaggaagagatcgtattccccgaaaagctgaacggcagtgttttacctgggagcggggccccagcccggcttctgtgccgactccaggcattcggcgagactcttttgctggaactggagcaagatagcggtgtccaggttgagggacttacagtccaataccttggccaagccccagaactgttgggtggagccgaacctggtacctacctgacagggactatcaatggtgaccccgaatccgtcgcttcgttgcactgggacggaggagcgctcctcggagtgcttcagtaccgcggagccgagctgcatttacagcctctggaaggaggtactccaaatagtgcaggtggtccaggggcccacatacttcggcggaagagccctgcctcggggcagggccctatgtgcaatgtcaaggccccacttggatctcctagtccgcgacccagacgggccaaaaggtttgccagtctgtcccgttttgtagagacgctcgttgtcgccgacgacaagatggcagctttccatggggccgggctgaagcgatatctactcaccgtgatggcggccgcagccaaagcttttaagcacccctctatcagaaaccccgtgtctctggttgttaccaggctcgtaattctgggatccggcgaggaaggcccccaggtggggccttccgcggcccagacactacgttctttttgtgcctggcagagaggactgaatacacctgaagatagcgaccccgaccattttgatacagctattctgtttaccagacaagtgcggccacaatccgcccctcaagctatgcactgtaccattctccgtagcgccacgacttag

SEQ ID NO: 107257 - DNA, 2514 bp, synthetic construct
  misc_feature 1..2514: note = Description of Artificial Sequence: Synthetic coding sequence
  source 1..2514: mol_type = other DNA
atgtctcagaccggctcgcacccgggccgcggcctggctggaaggtggctttggggcgcacaaccgtgtctcttactgcctattgtaccactctcctggctcgtctggttgctgctcctgctcttggcctcattactgccctctgccaggcttgcctctccacttccgcgggaagaggaaatagtgtttcctgagaagctgaatggctcagtgctccccggctcgggcgcccccgctagattgctctgcaggttacaagcattcggcgagacattactgctagaactggagcaagactctggcgttcaagtggaagggttgaccgtacaatacctgggacaagccccggagctccttggcggcgccgaacccggcacctatctcaccggaacaattaacggggacccggagtctgtggctagtttacattgggacggaggagcactgcttggtgtgctacaataccgcggcgccgagctacatctgcagcccctcgaagggggcacccctaattcagctgggggaccaggggctcatattcttagacgtaaatccccagcctcaggccaaggacccatgtgtaacgtcaaagctcccctcggttcaccaagtccacggccaagaagagctaagagattcgcatccctcagtcgcttcgtcgagactctggtcgtggcagacgacaaaatggctgcgttccatggcgcgggcctgaaaaggtatcttctgactgtaatggcggctgccgctaaagcatttaagcacccctctatcaggaaccctgtaagtcttgtggtgacccgactggttatcctaggatcaggagaagagggaccccaggtgggtccatcagctgcacagactctgcgatccttctgcgcttggcagagaggactgaacacacccgaggattccgacccggatcatttcgacactgccattcttttcacacgccaggacctgtgcggggtgtccacttgtgatacgcttgggatggcggacgtcggcactgtctgtgaccctgccagatcctgcgccatcgtcgaggacgacggccttcagtcagcttttacagccgcccatgagttaggacatgtgtttaatatgctgcacgataattccaaaccctgcattagcttaaatggtcctttaagcacatcccgccatgtgatggcccctgtaatggctcatgtggaccccgaagaaccatggtctccatgctctgctaggtttattacagatttcttggacaacggctacggtcactgtctgcttgacaagcctgaagctccactccatttacctgtcactttcccaggtaaagactatgatgctgatagacagtgtcaactgacctttggcccagattcgcggcactgcccccagttgcccccaccttgcgcagctctgtggtgcagcgggcatctgaacggccatgcaatgtgtcagacgaagcactctccgtgggcagacggaaccccctgcggcccagctcaggcatgtatgggtgggaggtgtcttcacatggatcagctccaagattttaatatcccgcaagccggaggttggggaccctggggcccatggggagattgctcccggacctgcgggggcggggtacagttctccagccgcgactgtacccggccggtcccaagaaatggaggtaaatactgtgaagggcggcggacccggttccggtcttgtaacactgaggattgcccgaccggatcagccttgacgttcagggaagagcagtgtgctgcatacaaccatcgcacggatctgtttaagagttttccagggccaatggactgggtgcctcgatacacaggagtggcgccacaagaccaatgtaaactgacctgtcaggcacaggctctgggctactactacgtactcgagccaagagttgtggatggaacaccatgctccccggactcctcctcagtctgtgtgcagggaaggtgcattcatgccggctgcgatcgcatcatcggaagcaagaaaaagttcgataaatgcatggtgtgtggcggagatggttcgggatgcagtaagcagagtggatcttttaggaaatttcgctatggctacaataatgtggtcactattcctgctggcgccacgcatatcctcgtgagacaacaggggaaccccggtcatcgaagcatttaccttgccctcaagctgcccgatggctcgtacgcgctgaacggggaatataccttgatgcctagccccactgacgttgtgctccccggcgcggtcagcttgcggtatagtggagcaacggcagcctccgaaacactctcggggcacggccccctcgcacagcctctaactctgcaagtgctggtcgccggaaacccacaggatacccgcttgaggtattctttttttgtcccccggcccacaccaagtacacctaggccgactcctcaggactggctccatcgtagggcccaaatactggagattcttcggcggaggccttgggccggaaggaagtag

SEQ ID NO: 107258 - DNA, 2793 bp, synthetic construct
  misc_feature 1..2793: note = Description of Artificial Sequence: Synthetic coding sequence
  source 1..2793: mol_type = other DNA
atgctgctggggtgggcctccttactgctgtgcgctttcagactgcctctcgctgccgtcgggccagctgccacccccgcccaagacaaagccggacagcctcctacagcagcggccgccgcacagccgcgtcggcgacagggcgaagaggttcaagagagggctgaaccaccaggacatccccacccacttgctcagcgtcgtcggtctaaaggactagtccagaatatcgatcagctgtactctgggggtggcaaagtggggtatctcgtatatgccggaggacgcaggtttctgttggacttagagagggacggcagtgtggggattgccggcttcgtccccgccggtggtggcaccagcgctccgtggcgacaccgcagccactgtttttaccgagggacagttgacgggagcccacggtccctcgcagtattcgatctctgtggcgggttggacggcttcttcgcagtgaagcacgcccgctacaccttgaagcctctgctgcgcggcccttgggcagaggaggagaaaggacgagtctatggagatgggtcagcaaggatcttgcatgtgtacacacgggaggggttcagctttgaggcactgcctcctagagcgtcttgcgaaactccagctagtacaccggaggctcatgaacatgcgcccgctcacagtaacccttccgggagggccgctctcgccagtcaacttctggaccagagtgcacttagccctgccggcggctcagggccacagacatggtggcgaaggcggaggagatcaatcagcagagcgcgccaggtcgagctattgttagtggcggacgcatctatggctcgactatatgggcgtggcctccagcattatctactgaccctggcatccatagctaatagattgtacagccatgcctcaatagaaaaccacattcggttagccgtagtcaaggtagttgttttaggtgataaagacaagagcttggaagtgtctaagaacgcagcaaccaccctcaagaacttctgtaagtggcaacatcagcataaccaactgggcgacgaccacgaagaacactacgatgctgccatcttgttcacacgggaagacttatgtggacatcattcatgcgatacactgggcatggctgacgttggcacgatatgttctccagagcggagctgcgccgtcatcgaggatgacgggctccacgctgcatttacagtggctcacgaaattgggcatctgttgggactgagccacgacgactctaaattctgcgaggaaacttttggcagcaccgaggacaagaggctcatgtccagcatcctgaccagtatcgacgcctccaaaccctggagcaagtgcacatccgcaacaatcactgaatttctggacgacgggcacggcaactgtttactcgacttaccaagaaaacagattcttggccccgaagagttgccaggccagacctatgatgcaacgcagcagtgcaacctcactttcgggcccgagtatagtgtttgtcccggaatggacgtatgcgcccgactgtggtgcgcagtcgtgcgtcagggccagatggtgtgcctgaccaagaaactgcccgcagttgagggaacaccttgtgggaaaggtaggatttgtctgcagggtaaatgcgtcgacaagactaagaaaaagtattattctacttcatcccacggcaactgggggtcgtgggggtcgtggggtcagtgctcgaggtcgtgtggcgggggcgtgcagttcgcttaccgtcattgcaacaatcctgctcctaggaacaacgggcgctactgtacgggcaaaagggcaatctaccgtagctgctccctcatgccgtgccctccaaatggcaaatctttccgccatgaacagtgcgaggctaagaacgggtatcagtccgacgctaagggtgtcaagacatttgtggagtgggtaccaaagtatgcaggcgtccttcccgctgatgtctgtaaacttacctgtcgggccaaaggtaccgggtattacgtggtgttctcccccaaagtcaccgatggaaccgaatgtcgcctttatagcaattcagtctgcgtccggggaaagtgcgtgcggaccgggtgcgatggaataataggtagcaagctccagtacgacaagtgcggcgtgtgtgggggggacaatagtagttgtaccaaaattgtgggcacttttaacaaaaaatccaagggctacactgacgtggtcagaattcctgaaggggctacacacataaaggtccgccagtttaaggccaaagaccagaccagatttacagcataccttgcccttaagaagaaaaacggcgagtatctgattaacggcaagtacatgatctctaccagtgaaacaataattgatatcaatggtaccgtaatgaattacagcggttggtcgcacagggatgacttcctccatggaatgggctatagcgcaacgaaggagatcttgatcgttcagatactggccactgatcctactaaaccgctggatgtgcgctactctttttttgtgccgaagaaatcaacaccaaaagtgaattccgtgacctcgcacggctctaacaaggtaggcagccacacctcgcagcctcaatgggttaccggcccatggttggcgtgcagcagaacttgtgacacaggatggcatactcgtacggtgcagtgccaagatggcaacaggaaacttgctaagggttgtccactgtcacagaggccatctgccttcaagcagtgtctcctgaaaaagtgttag

SEQ ID NO: 107259 - DNA, 2577 bp, synthetic construct
  misc_feature 1..2577: note = Description of Artificial Sequence: Synthetic coding sequence
  source 1..2577: mol_type = other DNA
atggaaatcctgtggaaaacgttgacctggattttgtcactcataatggcatcttccgaatttcactcggatcaccggctctcttatagtagccaagaggaattcctgacttaccttgaacactaccaactcacaataccaatccgcgtggaccagaatggtgcatttctatccttcactgtaaagaacgacaagcattcccggaggcggcgatctatggatcccattgatccccagcaggccgtgagcaagctcttcttcaaactttctgcttatgggaagcactttcacctcaaccttactctcaatacagacttcgtctccaagcatttcactgtggagtactggggcaaggatggaccgcagtggaaacacgactttctcgacaattgccattatactggctacctccaggatcaaagaagtactaccaaggtggctctcagcaactgcgtgggcctgcacggtgttatagccacagaggatgaggaatatttcatcgagccactaaagaatacaacggaagattcgaagcacttctcctacgagaacggccatccccacgtgatttacaagaagagtgcattacagcagaggcacctgtacgatcattcacactgtggggtcagtgactttacaaggagtgggaagccctggtggttgaacgatacatctaccgtgtcttattctctcccaatcaacaatacacacatacatcataggcaaaagaggtcagtgagcatagagcgcttcgtagaaaccttagtggtcgctgataagatgatggtgggataccacgggcgaaaagacattgagcattatatcctttcagtaatgaacatcgtggccaaattgtatcgtgatagttcgctgggcaatgtggtgaacatcattgtggcgcgtctgatcgtactgacggaagaccagccaaatttagaaatcaatcatcatgctgacaagtctcttgactcattctgcaagtggcagaagtccattctgtcacaccaaagtgacgggaacacgattcccgagaacgggattgcacaccatgacaacgctgtgctgattactagatatgacatttgtacctacaaaaacaaaccttgcggtaccctgggccttgcgtctgtcgctggaatgtgtgaaccagaaaggtcttgctcgatcaacgaggacattggtcttgggagcgcctttacaattgctcatgagatcggacacaactttggcatgaaccatgacgggataggaaattcttgcagaaaggtgatgaagcagcaatacggatcctcacactattgcgaatatcagagctttttcctggtctgcctgcagtcaagattacatcatcagctgtctcgtgaagtgtgtcgagaactctggtgtttatctaaaagcaacagatgcgtcacaaattcaatcccagccgccgagggaacactatgtcagactgggaacatcgaaaaggggtggtgctatcaaggggactgtgtgccattcggaacatggcctcagtcaatcgacggagggtggggcccctggtccctgtggggggagtgctctaggacttgtggaggcggagtctcttctagcctgagacactgtgattcgccggccccgagcggcggaggaaagtattgtctcggggagcggaaaagatatcggtcttgtaatactgacccatgcccccttggcagtagagatttccgcgaaaaacagtgcgccgacttcgacaatatgccattccggggaaagtattacaactggaaaccttacactggagggggagtgaagccttgtgctcttaattgtctagctgaaggttataatttttataccgaacgcgctccagcagtgatcgacggcacgcaatgcaatgccgactccctggatatatgcataaacggcgaatgcaagcacgttggctgtgataacattttaggcagcgatgcaagagaggatcgttgccgggtgtgtggcggagacggttccacatgcgatgctatagaagggttctttaacgactccctccccagaggcggatatatggaggtcgtccaaatcccaagagggtccgtgcacatcgaggtacgggaggtggccatgtccaagaactacatcgcactgaaatcagaaggtgatgactactacattaacggtgcctggaccatagactggccccgtaagttcgatgtggccgggaccgcatttcattacaagcggccaaccgacgagccagaatcattagaagccctgggccctacaagcgagaatctgattgtgatggtgctgcttcaggaacagaatctcggcattagatataagtttaatgtgcctattacacgcaccggatccggagataacgaggtaggatttacttggaaccaccagccctggtctgagtgttccgccacgtgcgccggcggcaaaatgccaacccgtcagcctacacagcgggccagatggcgcaccaaacacatcctctcgtacgcactttgcctgctaaagaaactcattggaaacatatcctgtcggttcgccagtagctgcaacctagctaaagagacccttctctag

SEQ ID NO: 107260 - DNA, 3354 bp, synthetic construct
  misc_feature 1..3354: note = Description of Artificial Sequence: Synthetic coding sequence
  source 1..3354: mol_type = other DNA
atggagatcctctggaaaaccctcacttggatcctctccctgattatggcttctagcgaattccactctgatcaccggctgtcctacagctcccaagaagagttcctgacttatctggagcactaccaacttacgatccccatcagggtcgatcagaacggagcatttctcagctttactgtcaagaacgacaaacactcccgccggaggcgatcgatggatcctatcgatcctcagcaggccgtctctaaacttttttttaaactcagtgcctatggcaaacacttccaccttaatctcactcttaataccgattttgtgagcaagcactttactgtggagtattggggcaaggacggacctcagtggaaacacgatttcctcgacaattgccactatactggttacctccaggatcaaaggtccactaccaaagtggctctgagcaattgcgtcggccttcacggcgtcattgctactgaggatgaggagtatttcattgagcctctcaagaacacaacagaagattctaaacacttcagctatgagaatggacaccctcacgtcatctataagaagagcgctctacagcagcggcatctgtacgaccatagccactgtggcgtgagtgattttacaaggagcggcaagccttggtggctaaacgatacctctacagtgagctactcattgcctataaacaacacccacattcaccatcgccagaaacggagcgtctctattgaaagattcgtggagaccctcgtggttgccgataaaatgatggtcgggtatcacggtcgcaaggacattgaacactatatcctttccgtcatgaacatcgtggcgaagctctatcgggatagcagcctaggcaatgtggtcaacattatcgtggcccgccttattgtcttgactgaggaccaacccaatctagagataaaccaccatgccgataaatctttagattctttctgtaaatggcaaaaaagcatcctgtctcatcaatccgatggcaacacgatcccggaaaatggcatcgcgcaccatgacaacgccgtattgattactcgttacgacatttgcacctacaaaaataagccttgcggtacactcgggctggcctcagtggcaggcatgtgcgaaccagaaaggagttgctccatcaacgaggacattggtctgggttcagcttttactattgcccatgagataggacataacttcgggatgaatcacgatggcataggcaacagctgtggtaccaaaggacacgaagcagcgaagctcatggccgcccatatcacagcaaacactaaccctttttcctggtccgcatgctcccgagattacatcacctcattcttggactcagggaggggtacatgtctggataatgagccccccaaaagggactttctctaccctgcagtagcaccaggacaagtgtacgacgcagacgaacagtgtcggttccagtatggcgcaacgtcacgtcagtgtaagtacggagaggtatgccgggagttgtggtgcctgagtaagtccaataggtgcgtcactaactctataccagctgctgagggcactttatgtcagacaggaaatatcgaaaaggggtggtgctaccagggggactgcgtgcccttcggaacctggccacagagcatcgacggtggttggggcccctggtcactgtggggcgagtgtagtcgcacttgcgggggtggcgtgagctccagcttgcgccattgtgattcgcctgccccaagcggtgggggaaagtactgccttggcgaacgaaagcggtatcgcagctgcaatacggatccttgcccactgggctcgcgagattttagggagaagcagtgcgctgacttcgacaacatgccattcaggggcaagtattataactggaaaccctatactggaggaggagtaaagccctgcgctctgaactgtctggccgagggttacaacttctatactgagcgcgcaccagccgttatcgacggcacacagtgtaatgcggacagtctcgatatttgtattaacggcgaatgcaagcacgttggttgcgataacatcttagggagcgacgcccgcgaggaccgttgtcgcgtgtgtggcggcgatggcagtacctgcgatgcaatcgaaggtttcttcaacgattcattgcctaggggcggttatatggaagtggtccagatcccaagaggatctgtacatatcgaggtccgggaagtcgccatgtcaaagaactatattgcgctgaaaagcgaaggggatgactactacatcaacggggcctggacaatcgattggcctcgaaagtttgacgtcgctggtacggcattccactataagcggcccactgacgaacccgagagtctggaagcattgggccccactagtgagaatttaattgtcatggtgctattgcaggagcagaatctggggataaggtacaagtttaacgtaccaatcacaaggactggttcaggcgataacgaggtcggcttcacttggaaccaccagccttggtccgagtgctcagcgacatgcgctgggggcgttcagcggcaggaggtggtatgcaagagattagatgataacagtatcgtccagaataattactgcgaccctgactccaagcccccggaaaatcaacgggcctgcaataccgagccctgtccaccggaatggtttatcggcgattggctagagtgtagcaaaacctgcgatggcggaatgagaacccgcgcagtcctgtgtattagaaagattggccctagcgaggaagagaccctcgactatagtggctgcttgacgcataggccagtcgagaaagaaccttgcaacaatcaatcctgccctccccagtgggttgcccttgactggtccgagtgtacacctaagtgcggtccggggtttaaacatcgcattgtcctttgcaagtcttccgatctcagcaagactttccccgccgcccagtgccctgaagagtctaaacctccggtccgcattaggtgcagcttaggccgctgtccccctccgcgttgggtcacaggggattgggggcagtgctctgctcaatgcggcttgggccagcaaatgaggactgtccagtgcctttcctatacgggtcaggctagctctgactgtctcgagacagtccgacctcccagcatgcagcagtgtgaatctaaatgtgattcaactccgatcagcaatactgaggagtgtaaggacgtcaacaaggtggcctactgtccactggttctgaagttcaagttttgttctagggcatatttccgacagatgtgctgtaaaacttgtcagggccattag

SEQ ID NO: 107261 - DNA, 1407 bp, synthetic construct
  misc_feature 1..1407: note = Description of Artificial Sequence: Synthetic coding sequence
  source 1..1407: mol_type = other DNA
atggaaattctctggaaaactctgacctggatactgagccttataatggcttccagtgagttccactccgatcacagactaagctatagctcccaagaagaattccttacgtacctcgagcattaccagttgaccattcccatcagagtcgaccaaaacggtgcctttctttctttcactgtgaagaacgacaagcattctcggaggaggaggtccatggatccgattgatccacagcaggccgtctctaagctgttcttcaaactctcagcctatggcaagcactttcacctcaaccttaccctgaacacggattttgtgtcaaagcatttcacagtagagtactggggcaaggacggaccgcaatggaagcatgactttctggataactgtcactatacggggtatctccaggaccagcggtccaccacaaaagtcgccttaagtaactgcgtggggctccacggagtgatcgccaccgaagatgaagagtacttcatcgagcctctgaagaatacaaccgaagactctaaacactttagctatgagaacgggcacccacacgtaatttataagaagagtgccttacagcaaagacacctgtacgaccactcacattgtggggtgtccgacttcactcgaagtgggaaaccttggtggctgaacgataccagcaccgtctcctattcattgccgatcaacaacacccacatacatcacagacaaaagcggagtgtgtcgatcgagcgttttgtcgagacactggtcgtggcagataagatgatggtaggttatcacggccgcaaggatatcgagcactatatcttatctgtgatgaacatcgtggcgaagctctatcgggactcctcgttggggaacgtcgttaatatcatcgtggcccgactcatcgtcctaaccgaggatcagcctaacttagagattaatcaccatgctgacaaatcgcttgactccttttgcaagtggcagaagagcatactcagccaccagtccgacggaaacacaattcccgaaaacgggattgctcaccatgataacgcagtgttgatcactcgatacgacatctgtacatacaagaataagccttgtgggactctcggccttgcctccgtggctggaatgtgcgaaccagagagatcctgtagcatcaatgaggatatcgggttaggctccgcttttacgatagcccacgagatcggacacaacttcggaatgaaccacgacggaatcgggaacagttgcgggacgaaaggccacgaggcagcaaaactaatggctgcccatatcaccgcaaataccaacccctttagctggagtgcctgttccagggactacatcacatcttttctagagttcttaaagttaggtgactctataagtggctcctag

SEQ ID NO: 107262 - DNA, 5061 bp, synthetic construct
  misc_feature 1..5061: note = Description of Artificial Sequence: Synthetic coding sequence
  source 1..5061: mol_type = other DNA
atgccagggggcccatctccaagaagcccggcccccctgctgcggccacttcttcttctcctgtgtgcacttgcccccggagctccgggccccgcccccggtcgcgccaccgagggccgggcagcactagatatagtacatcctgttcgcgtggacgctggaggcagcttcttgtcctatgaattatggcctcgtgccctccgtaagagagacgtcagcgtccggcgtgatgctcccgcgttctacgaactgcagtatcgaggacgagagttgaggttcaacctgaccgctaaccagcatcttttggcacctggatttgtctcagaaacaagacgcagaggaggcctgggtagggcccatatacgagcacacacacccgcgtgtcacctccttggtgaggttcaggaccctgagctggaaggtggactggccgccatttccgcctgcgacggtctgaagggggtgttccagctgtccaacgaggactatttcatagagccacttgactcagcccccgcaaggcctggacatgctcagccgcacgtagtctacaagagacaggctcctgaaagattagcccagcgcggggactcttcggcaccttccacttgtggtgttcaggtataccccgaacttgagagcagacgcgaaaggtgggaacaacggcaacaatggcgacgaccccggctgcgacgcctgcatcagagatcagtttctaaggaaaaatgggtcgagacccttgtggtcgccgacgccaaaatggtagaatatcatggtcagcctcaagtggagtcctacgtgttaacgattatgaatatggtcgccggcctgtttcacgatccgtctataggaaatcccatccatatcactatcgtgcgcctggtgcttctggaagatgaagaagaagatttgaagatcacccaccacgccgacaatactctcaagtctttttgcaagtggcaaaagtctatcaatatgaagggcgatgcacaccccctacaccacgacaccgccattctgctgacgcgtaaggacctatgcgccgctatgaatagaccctgcgaaaccctgggactgtctcacgtggccgggatgtgccaaccccatcgctcctgttccattaacgaagacactggcctgccactggcctttaccgtggcccacgagctaggccactcgttcggcattcaacatgatggctcaggaaatgactgcgaaccagtggggaagagaccctttatcatgtcccctcaattgctttatgatgctgccccgctaacgtggtcaagatgttcccgccagtacattacccgctttttggatcgcggatgggggctttgtctggacgatcccccggccaaagatataattgatttcccctctgtccctcccggcgtgttgtatgacgtgagtcatcagtgtagattacagtatggagcctactcagccttttgtgaggacatggataacgtgtgtcacacactatggtgcagtgttggcacgacctgccactccaaactcgacgcagctgtcgatggaactaggtgtggcgagaataaatggtgtctctcaggtgaatgtgtacccgttggtttcaggcccgaggctgtcgatggtggctggtccgggtggtccgcttggtcaatttgctctcggtcctgtgggatgggagtacaatctgctgaacggcagtgcacccagccgacacccaagtacaaggggcgctactgcgttggagaacgcaaacgtttccggctctgtaacctgcaagcttgccccgcgggccgccctagcttcagacatgttcagtgctctcactttgatgccatgttgtataaggggcagttacatacttgggtgcctgttgtgaacgatgtgaatccttgcgagctccattgtagacccgcgaatgagtactttgcggaaaaactccgcgacgccgtggtcgacgggaccccttgctaccaggtcagagctagtcgggatctttgtattaatggcatttgcaagaacgtcgggtgtgatttcgagattgactcaggagcaatggaggatcgttgcggggtgtgccacggaaacggatcaacctgccacaccgtgagtggcacattcgaggaggctgaaggactggggtacgtcgacgtaggtcttattccagcgggcgccagggagatccgtattcaggaggtggctgaggccgccaatttcctggccttaaggtcagaggatcccgagaaatatttccttaacggagggtggaccatccagtggaacggagattatcaggtcgccgggaccacttttacgtatgcacgccgagggaattgggaaaatctgacatctccagggcctacgaaagaaccagtgtggatccagctgctgtttcaggagagcaacccgggggtacactatgagtacaccatccaccgcgaggcggggggccatgatgaggtgcctccccccgtgtttagctggcattacggaccttggactaaatgtacagtaacatgcgggcgcggagttcagagacaaaatgtgtattgtctcgaaagacaagcaggccccgtcgacgaggaacactgcgatcctttgggacggcctgatgaccagcagaggaagtgttccgagcagccttgcccagcacgttggtgggcaggtgaatggcagctttgcagttcatcctgcggtccaggaggcctctctagaagagccgttctctgtattagatcggttggcctagatgaacagtcagctcttgagccacctgcttgcgagcatctgccaaggccacccacagaaactccctgcaatcgccacgtgccatgccctgcaacttgggctgtgggtaactggtctcaatgctccgtgacctgcggtgagggaacccagcgtagaaacgtcctgtgtactaacgataccggtgtgccctgtgacgaagcccagcagcccgcttctgaggttacatgttctctgccgctctgccggtggccgctcggcacactgggacctgagggcagtggaagcggctccagttcacacgaactcttcaatgaggccgactttatccctcaccacctcgctcctaggccatcaccggcttcaagtccgaagcccggcaccatggggaacgctatcgaggaagaggcgcccgagttggacctgcctggacctgtgttcgtcgacgacttttactacgactataattttattaacttccacgaagatctctcttacggtccatccgaagagccagatctcgacctggcaggaacgggcgacaggacccctcctcctcatagtcatcctgccgccccctctactggaagccccgtacctgccactgagccgccagcggcaaaggaggagggtgttctgggcccttggagcccctccccctggccaagccaggctggacgatccccgccgccaccttcagaacagacccccggaaaccccctaattaattttctccccgaagaggataccccaatcggcgcaccagatctgggtctaccttctttgtcatggcccagagtgtctacagacggtctacagacgccagcaactccagagagccaaaatgacttccccgtgggtaaagattcacaatctcaactgccacccccttggcgtgacagaacaaacgaggttttcaaggatgacgaagaacccaaaggtcggggtgcgccccatcttccaccgaggcccagttccacattaccaccgctgagtccagtgggaagcacccactcttctcccagtccagatgtcgccgaactgtggactggtggcacagtggcttgggagcccgcactggagggcggcctcgggcccgtggactccgagctgtggcccacagtgggggtggcttcactgttaccccctcctatcgctcctctgcccgaaatgaaggtaagagacagcagcctggaacctggaacccctagttttcctaccccgggaccaggttcgtgggacctgcagaccgtggccgtctggggtacgttcctaccaacaactttgacaggccttggacacatgcccgaaccagccttaaaccctggtcctaaagggcagccagaatcactctccccagaggtcccactgagcagtaggcttctcagtacccccgcttgggacagtcccgctaactcacaccgtgtgcccgaaacccagccactcgctccgagtctggccgaggccggccctcccgcggatcctctggtggtgcgaaatgcggggtggcaggccggaaactggtccgagtgcagtacgacatgcgggttgggggccgtgtggcgtccggtgagatgtagctctgggcgggatgaagattgtgcgcccgcgggccgcccccaacccgccagacggtgccatctgcgtccctgcgctacgtggcattcagggaattggtccaagtgctctcgatcatgcggcggaggaagtagtgtccgagatgtgcagtgtgtcgacacccgggacctgaggcccctccggccgttccactgtcagcctgggcccgccaaacctcccgctcaccggccatgcggggctcagccatgtctttcgtggtatactagctcctggcgcgaatgttcagaggcatgcggcggtggcgagcaacagcgactggtcacatgtcctgagcccggcctttgcgaggaggctctcagaccgaatacaacaagaccttgcaatacccatccgtgtacacagtgggtggttgggccctgggggcagtgttcaggtccatgcggcggtggggtgcagaggcgtctggtcaaatgtgtgaatactcaaaccggtcttcccgaggaggactctgatcaatgtggacacgaagcgtggcccgagagttctcgaccgtgcggaactgaggattgtgaaccggtcgaaccacccagatgcgagagagacagactgagtttcgggttctgtgagacgctgcgcctgcttggtcggtgtcagttgcccactatcaggacccaatgttgccgtagctgtagccccccttcccatggagcgccgagtcgtggtcaccaacgcgtagcccgccgctag

SEQ ID NO: 107263 - DNA, 1383 bp, synthetic construct
  misc_feature 1..1383: note = Description of Artificial Sequence: Synthetic coding sequence
  source 1..1383: mol_type = other DNA
atgcctggaggcccttccccaagatccccagctccactgctgaggccactgcttttgcttctttgtgcccttgcccctggggcacctggccctgcccccggaagggcaaccgagggccgggcagccctcgatatcgtgcacccagtcagagtcgatgctggcggatctttcctcagttacgagttgtggccccgcgccctccggaagagggatgtgagtgtgcgacgcgacgccccagccttttacgagctgcagtatagaggtcgggaacttaggttcaaccttaccgctaaccagcacttacttgcgcccggattcgtgagcgaaacaaggaggaggggggggctcggacgcgcccacatccgggcccacacccctgcctgccacttgctgggtgaagtgcaggatccggagttggaaggcggccttgcggctattagcgcctgtgatgggttgaaaggcgtgttccagctgagcaacgaggattactttatagagcctctggactcagcacccgcgagaccggggcacgcacagcctcacgtcgtttacaaacgtcaggcccccgaacggctggcgcagcgaggagatagtagtgcaccgtctacctgtggggtgcaggtttaccccgagctggaatcgaggagagagaggtgggaacagcggcaacaatggaggcgcccgcggttgcgcagattacatcagcgaagcgttagcaaggaaaaatgggtagaaactctggtcgttgcagacgccaagatggtcgaataccatggacaaccgcaggtggaaagttacgtgttgactataatgaatatggtcgccggtctgttccacgacccctctataggcaacccaattcacattaccatcgtgcggctagttctcctggaagacgaggaggaggacttaaaaattacccatcacgccgacaacactcttaagagtttttgcaagtggcagaagtccatcaacatgaagggggatgcccaccccttgcaccacgataccgcgattctgcttactcgaaaggacttgtgtgcagcaatgaacagaccgtgcgagaccctgggcctctcacacgtcgccggcatgtgccaaccccacagaagctgctctattaacgaggacacaggccttcctctggcgtttaccgtcgctcacgagctcggacacagttcctgcacaacccccctaccaagccccggccccgcggcagctgcgagtatttctccaggctcgctctcagtgcagagacaaaatgtgtactgtcttgaacgtcaggccggacccgtagatgaggagcactgtgatccccttgggaggcctgacgatcagcagcgtaagtgttcagagcaaccttgtcctgcttcagcgcaatag

SEQ ID NO: 107264 - DNA, 2670 bp, synthetic construct
  misc_feature 1..2670: note = Description of Artificial Sequence: Synthetic coding sequence
  source 1..2670: mol_type = other DNA
atgctcccggctcccgctgctccacgctggccacccctgctgctcttactgctattgttgctgcccctggcccgcggagctccagcaaggcccgccgcaggcgggcaagcttcagagctggttgttcccactcgacttcctggcagcgctggtgagcttgcgcttcatttgtcagcctttggcaagggcttcgtgctgaggttggctccagacgacagttttctcgccccagagtttaaaattgagcgactcggcgggtcaggaagagctacgggcggagagagaggtctgcgcgggtgctttttctcggggacggtcaacggggaacccgaatccctggctgccgtgagcctctgccgcggactcagcggatcctttctcctcgacggggaggagttcacaattcagccacagggggctggtggcagtttggcgcagccccataggctacagagatggggtcccgccggggccaggcctctccctagggggccagagtgggaggtggagactggggaagggcagagacaagagcggggagatcatcaagaggatagcgaagaggaatcccaagaggaggaagccgaaggagccagcgaacctccaccaccccttggagcgacgagccgtactaagaggttcgtctccgaagcacgctttgttgagactctgttagtggcagatgcatccatggcagccttttacggcgcggacctccagaaccacatcttaaccttgatgtccgtggccgccaggatctacaaacatccaagtattaagaacagcatcaatcttatggtcgtaaaagtcctgatcgtagaggacgagaagtggggaccggaagtttcagacaacggtggcctgaccctgcggaacttctgcaactggcagcgcagatttaatcaacccagtgaccggcaccccgaacattatgatacagccatcctcttgactagacagaatttttgtggacaggaaggtctgtgcgacactctgggagtggccgacattggaacgatatgcgatcccaacaaaagctgtagcgtgatcgaagacgaggggctgcaagctgctcacacactggctcatgagctcgggcacgtcctctctatgccccacgatgattccaagccttgcaccagactgtttgggccgatgggtaaacaccacgtgatggcaccactatttgtgcacttaaaccagacactgccctggtcgccctgctcagcaatgtacctgacggagctgctagacggcggccacggggactgcctgcttgacgctccagccgccgctcttcccctgcccacaggcctgccaggtcggatggctctgtatcaactggatcaacaatgccggcagatcttcggccctgatttcaggcattgtcctaataccagtgcacaggacgtgtgcgctcagctatggtgtcacactgatggcgctgagcctctgtgccataccaaaaatggctcgttaccttgggcagacggaactccttgtggacctgggcacctttgtagcgaagggtcctgcctgccggaagaggaggtggagagacccaagcctgttgctgacggaggctgggccccatggggcccatggggagagtgctcaaggacatgcggaggcggggtccagttttcccacagagagtgtaaggacccagagccacagaatggcggcaggtactgtctcggccgtcgggcgaaataccagagttgtcatacagaggagtgccctcccgatggcaagtctttcagagaacagcagtgcgaaaagtataatgcttataattacacagacatggacggcaatctgctccagtgggtcccgaagtacgcgggtgttagccctcgggatagatgcaaactgttctgccgcgctcggggaaggagtgaattcaaagtgttcgaggccaaagtgatcgatgggaccctttgtggacccgaaaccttggccatctgcgtaaggggacagtgtgtgaaagccgggtgtgatcatgtggtggactcgcccagaaagctcgataagtgtggcgtgtgtggaggaaaagggaactcttgtcgaaaggtgtcaggaagtctcactcccaccaactatggctacaatgatatcgtgactatacctgcgggtgccacgaacatcgatgtcaaacaacggagccaccctggagttcagaatgacggcaactaccttgccctcaagacggccgatggccaatatctcctcaatgggaacctggccatctccgctatagagcaggatatcttggtaaagggtaccatcctcaaatattcaggttcaattgcaacgctggagcggctccagtcctttcgacctctgcctgaaccactgaccgtgcagttgctgacagtgcccggcgaagtgttccctccaaaggtgaaatatactttcttcgttcctaatgatgtagatttttctatgcagagctcgaaagagcgggctacaaccaatataatccagcccctgttacatgcgcaatgggtactgggcgattggagtgagtgctctagcacatgtggtgccggatggcaaagacgtacggtcgagtgccgggatcccagtggccaggcatcggctacatgcaacaaagctctgaagcccgaggatgcgaagccctgtgagtcacagctgtgccccctatag

SEQ ID NO: 107265 - DNA, 2757 bp, synthetic construct
  misc_feature 1..2757: note = Description of Artificial Sequence: Synthetic coding sequence
  source 1..2757: mol_type = other DNA
gctgccagagctaggctgggcgggggaggggccggtggagccggctgcgccagccaacgaggcagaagagggtctgcaccagcagctggcccccgcggccctagcagaccttgtactcggcttataccactttttctcgaacgtgcagcaggaccacgctccggcagacagcatctgcccgccccaggcgggctcctgccatctcctgcacgaagccacagacgaagcccacatgcgcccagacccaggagacccccagtggcctcagcaccggcggcagctgcagccgccgctgccgctggaccccggcgaccaggaccggcaaggagtagaggagccggcctgggtgcgggcggagcacacgccgtggcccggctcaggggctgcttcttttcaggcaccgttaacggggagcccgaatccctcgctgctgtgagcttatgccggggactcagtggtagcttcctgctcgacggcgaggagtttacaatccagcctcagggtgctggaggcagcttagcccagccccatcgattacagcgctggggcccggcgggcgcacgtccacttcctcgcgggccggaatgggaagtggaaacaggggaaggacagagacaagaaaggggcgaccatcaggaggactcagaagaggagtcacaagaagaggaggccgagggcgcctcagaaccgccccccccccttggagctacttccagaacaaaacgattcgtgagtgaagcaaggtttgtcgagaccctcttggtggccgatgcgtccatggctgccttctatggtgcagacctacagaatcacattctgaccctcatgtctgtggcagctagaatctataagcacccatccatcaagaacagcatcaaccttatggtggtaaaagttttaatagtggaggacgaaaaatgggggcctgaagtgagcgataacggggggctgaccctgcgcaatttttgtaattggcaaaggcgattcaatcagccatccgacagacatccagaacattatgatactgctatccttctcaccaggcagaatttttgtggacaggagggactgtgtgatacccttggagtcgctgacattgggactatatgtgaccccaacaaatcctgtagtgtcatcgaagatgaagggttgcaggccgcccacacgttggcccacgaactcgggcacgtgctctctatgccacacgatgattcaaaaccttgcacccggttgttcgggccgatgggcaaacaccacgtgatggcccccctgttcgttcacctgaatcagacgctaccttggtctccttgctccgcaatgtatctgacagagctgctagatgggggccatggtgattgtctcctcgatgccccggctgccgcattgcccctgcctactggcttgccaggtcgcatggccctgtaccaacttgaccaacaatgccgtcagatttttggcccagattttcggcactgtcccaatacctctgcgcaggacgtgtgcgcccagctctggtgccacacagacggagccgaacctctgtgtcacactaaaaatggcagcttaccttgggctgatggcactccttgtggccctggccacctgtgtagtgaggggagctgcctgcccgaagaagaagtggaaagaccgaaacccgttgcggatggaggctgggcaccttgggggccttggggggaatgttccagaacatgcgggggcggagtacaattcagccatagagaatgtaaagatcctgaaccacaaaatggaggccgttactgcctgggcagacgcgctaaatatcaatcatgtcacacagaggaatgcccgcccgatgggaagtcgttcagggaacagcagtgtgagaagtacaatgcatataactatacggatatggacggcaacctgctgcaatgggtgccaaaatacgccggagtctccccaagggaccggtgcaaactattctgtcgggccaggggtcgctctgagtttaaggtgttcgaagctaaggtgattgatggcactctgtgtgggcctgaaacactggcgatctgtgtaagggggcagtgtgtgaaagcgggatgtgaccacgtggtggactcacccaggaaacttgataaatgcggtgtgtgtgggggcaaggggaatagctgccgcaaagtgtcggggtctctgacaccaaccaattacggttacaatgacatagtaacgatcccagcgggcgccaccaacatcgatgtgaagcagagatcacatcccggagtacagaatgacgggaactatctggccctgaaaacagcagatggacagtacctgcttaacggtaacctggctatttctgcaatcgagcaggatattcttgttaagggcactatcctgaagtacagcgggtccatcgccacactggaaaggctccagagtttccgacccctgccagagccgctcactgtgcagctccttaccgtgcccggcgaagttttccctccaaaagtgaaatacactttcttcgtacctaatgacgtggatttctcaatgcagtcctctaaggagagggccaccacaaacattattcagcctctgctgcacgctcagtgggtgctcggcgattggagcgaatgctccagcacttgtggcgccgggtggcagcggcgcaccgtggaatgcagagatccctcagggcaggccagcgccacctgtaacaaggcactaaagccggaagatgcaaaaccatgtgaatcgcaactgtgtcccctatag

SEQ ID NO: 107266 - DNA, 5724 bp, synthetic construct
  misc_feature 1..5724: note = Description of Artificial Sequence: Synthetic coding sequence
  source 1..5724: mol_type = other DNA
atgcagttcgtgagctgggccacgctgctcaccttgctggttcgagacttggccgagatggggagtcctgatgccgcagccgccgtccggaaggacagactccaccctcggcaggtcaagctcctggaaacgctgtcagaatatgagatcgtgtcacccatcagagttaatgctctgggagagcccttccccactaacgtgcatttcaaacgaacgcggaggagtattaatagcgctacagacccctggccagccttcgcaagttcttcatcctcctccacatcatctcaggctcactatagacttagtgcgttcggccagcagttcctgttcaaccttacagccaatgctggcttcattgcaccgttgtttacagtgacccttttgggtacccctggggtgaaccagaccaagttctattcagaagaagaagctgagctgaaacattgcttctacaagggctacgttaataccaattctgaacataccgcagtgatcagcttatgtagtggtatgctgggtacgtttaggagccatgacggagattacttcatagagccactgcagtccatggacgagcaggaagacgaggaggagcagaataagcctcatattatttatcggcgcagtgccccccaaagagagcctagcaccggaaggcatgcgtgcgatacaagcgagcacaagaacagacacagcaaagataaaaagaagactagggctcgcaaatggggtgaaaggatcaatctagcaggggacgtcgccgcgttgaattccgggctggcgacagaggcattcagtgcgtacggtaacaaaaccgacaatacaagagaaaaacggacacacaggcgtaccaagagatttctttcctatccgcgattcgttgaagtgttagtggtggctgataatcgcatggtgtcataccatggcgaaaacttgcagcactacattctcacgctgatgagtatcgatggcccatctattagcttcaacgctcagactactctcaagaatttttgtcaatggcagcactccaaaaatagtcccggcggaatccaccacgacaccgctgtcttgttaacccggcaagatatatgcagagctcacgataaatgcgatacgctcgggttggcagaattaggaacgatttgcgatccatacaggtcgtgtagtatctccgaagattcaggcttatccaccgcattcacgatagcacacgaactaggacacgtgtttaacatgccccacgatgataacaacaagtgcaaagaggaaggagtgaagtcgccacaacacgttatggctccaaccctgaacttttacacaaatccttggatgtggagcaaatgctcgcggaagtacataactgaatttctagacaccgggtacggggagtgtttgctgaatgaaccagagtccaggccctatccccttcctgtgcagctccccggtattctttacaacgtgaacaaacagtgcgagcttatcttcggtcccgggagtcaagtgtgtccatacatgatgcagtgccgtcgcttgtggtgcaacaatgtaaatggagtgcacaaggggtgtcgcacgcaacatactccttgggcggacggaacagaatgcgagcctggaaaacactgtaaatacggcttttgcgtccctaaagaaatggatgtgcccgtgacagatggcagctggggatcatggagtccttttgggacttgttcccgaacctgtggaggtggcatcaagactgctatcagggaatgcaatcggcctgaaccaaagaatggagggaaatactgcgttggcaggcggatgaagttcaagtcctgcaacaccgagccctgtctcaaacaaaaaagggattttcgcgatgagcagtgtgcacatttcgatggtaagcattttaacattaatggcctgttgccaaatgtccgttgggtcccgaagtactccgggattcttatgaaggacagatgtaaacttttttgtagggttgctggcaataccgcgtactaccaattaagggacagggtcatcgacgggaccccttgcggccaggataccaatgatatttgtgtacaggggctgtgtaggcaggccggctgtgaccatgtgctgaatagcaaagcaaggcgggataagtgtggcgtgtgcggcggggacaattcctcatgcaagacagttgcagggacgttcaatacagtgcactacggatacaatactgtggtgcgcattcccgctggagccactaatatcgatgttcgtcagcactccttctccggcgagaccgacgacgacaactacctcgccctctcttcatcgaagggggaatttctcttgaatggcaattttgtcgttacaatggctaagcgtgaaattaggatcggtaatgccgtagttgagtactccggctctgaaacagccgtagagagaataaacagtacagaccgcattgaacaggaactgctgctccaggtcctctctgtgggaaagctctacaatcccgatgttcgttacagttttaatattcccatcgaggacaaacctcagcagttttactggaattctcatggcccttggcaggcatgttcaaaaccatgccagggtgagaggaagcgcaaattggtctgtacccgagaaagcgaccagctcaccgtgagtgatcagagatgcgacagactgcctcagccaggccatattactgaaccctgtggaactgactgcgatctccgatggcacgttgcttctcggtccgaatgcagcgcccaatgcggactgggatatagaacattagatatctactgcgccaaatatagccgcctggacggtaaaacagaaaaggtggacgatggcttctgtagttctcatccgaagccttccaacagagagaaatgcagcggcgaatgcaatacgggcggttggcgctactcagcttggaccgagtgttcgaaatcctgcgacgggggaacccaaaggcgccgggccatatgcgtcaacacgcgaaacgatgtcctggacgactcaaaatgcactcaccaggagaaggtaaccatacagcgctgcagtgaatttccatgccctcagtggaaatccggcgattggtccgaatgtcttgtgacatgtggtaaaggacacaaacataggcaagtgtggtgccagttcggtgaagaccggttgaatgatcggatgtgtgatcctgagacgaaacctacttctatgcagacttgtcagcagccagagtgcgcttcgtggcaggctggaccctggggtcaatgttcagtgacgtgtgggcagggctaccagctgcgtgccgtgaaatgtataatcggcacttatatgtccgtggtcgatgacaatgattgcaatgctgccacccggcccaccgatacgcaagactgcgagctcccctcatgtcatccccctcctgctgcgcccgagacccgccgcagcacatacagtgctcctaggacccagtggaggttcgggtcatggacaccctgtagtgctacttgcgggaagggcacgaggatgcgctatgtgtcgtgtcgggacgaaaacggttcagtggccgatgagtcagcctgcgcgacgttgccaaggccagtcgccaaggaagagtgctccgtcacgccctgtggtcagtggaaggcgctagactggtcttcatgttcagtaacctgcggacaaggccgggccacccggcaggttatgtgtgtgaactacagtgatcacgtgattgaccgcagtgagtgcgatcaggattacatacctgagaccgatcaggactgttcaatgagcccttgtccgcagcgaactccggactcaggtcttgctcaacatcctttccagaatgaagattaccgtccaaggagcgcgtccccatctaggacgcatgtgctggggggaaaccagtggcgcaccggaccctggggcgcctgctccagcacatgcgctggaggtagccagcgaagggtcgtggtctgtcaggacgaaaatggttacactgccaacgattgcgtcgagagaattaagcctgatgaacagagagcatgcgagagcggcccatgcccacagtgggcttatggcaattggggcgaatgcacaaagctttgcgggggcggaattcggacgcgcctagttgtgtgtcagcgcagtaatggggagcgctttccagatctgtcctgcgagatcctggacaagcctcccgatagagaacagtgcaatactcacgcttgccctcatgacgcggcttggagcacagggccctggtccagctgttctgtgagttgcggcaggggtcacaaacaaagaaatgtttactgtatggctaaggacggcagtcatctggaatccgactactgcaagcaccttgccaagccacatggtcacagaaagtgtagaggaggccgttgtcccaagtggaaggccggggcttggtcccagtgtagtgtgtcctgcggtcgaggtgttcagcagagacatgtaggctgtcagatcgggacccataagattgccagggaaaccgaatgcaacccttatacccgacccgaatcggaaagggattgccagggtccaagatgtcctttgtacacttggcgtgcagaagagtggcaggagtgtaccaagacctgtggggaaggaagtaggtaccggaaggttgtttgcgttgatgataataagaacgaagtacatggtgcaagatgcgatgtgtcaaaacgtcccgttgaccgtgagtcttgttcactccagccctgcgaatatgtgtggatcaccggcgagtggtccgaatgctcagtaacatgcggcaaaggctacaagcagcgtctcgtgagttgctccgaaatttatacaggcaaagaaaactatgagtattcttatcaaacaaccattaattgtccaggaacacaaccaccgagcgttcacccttgctacctgcgtgactgccctgttagcgcgacttggcgggtcggtaactggggaagctgcagcgtgagctgtggggtgggtgtgatgcaacgatcagtccaatgcctgacgaacgaagaccagccctcccatttgtgtcacacagatctgaaaccagaagagcgcaaaacatgtagaaatgtgtacaattgcgaattaccgcagaactgcaaggaagtcaagaggctgaagggagcctctgaggacggcgaatattttctgatgatcaggggcaaacttctgaagattttctgtgccggcatgcactcagatcatccaaaggaatatgtaaccctggttcacggcgatagtgaaaacttttcagaggtttacggccacagactacataaccctacagagtgcccctacaatgggtctaggagagatgactgccagtgcaggaaggattacacagctgcaggctttagctcgtttcaaaaaatcaggatcgacttgactagcatgcagatcattacaactgacctgcagttcgctcggacatcagaaggccacccagtgccctttgccactgccggggattgctactctgctgcaaagtgccctcaaggccggttcagcattaacctttatggaacgggactgtcactgacggagtcagcacggtggatctctcaggggaactatgccgtcagtgatattaagaagagccccgacggcacaagggttgtgggaaaatgcgggggatactgcggtaaatgtaccccttccagcgggactggactcgaagtgagagtgttgtag

SEQ ID NO: 107267 - DNA, 2976 bp, synthetic construct
  misc_feature 1..2976: note = Description of Artificial Sequence: Synthetic coding sequence
  source 1..2976: mol_type = other DNA
tgagaatgtagtgcccagtgcgggcttggctaccgcactttagatatctattgcgccaagtactcaagactggacgggaaaacagaaaaggtggacgatggcttctgctctagccatcccaagccgtctaatcgagaaaaatgctccggggagtgcaacacggggggctggaggtacagcgcttggaccgaatgttcgaagtcctgcgatgggggaacgcagaggagacgagcgatctgtgttaatactcgcaacgacgtgcttgatgactccaaatgtactcaccaagagaaggtcactattcagaggtgctccgaattcccatgtccacagtggaagtccggggactggtccgagtgtttagttacatgcggaaagggacataaacacaggcaggtttggtgccaattcggcgaggaccggctaaacgatcgcatgtgtgaccctgaaactaagcctacatctatgcaaacctgccagcagcccgaatgcgctagctggcaggcgggaccgtggggacagtgttcagtgacatgtggccaaggttaccaattgcgcgcagttaaatgtatcatcgggacctacatgtcagtggtggacgacaacgattgcaacgcagcgactaggcccaccgatacacaggactgcgagctgcctagctgccacccaccccccgctgcgcctgagacccggcggtccacatactcggcccctaggacccaatggagattcggcagttggaccccatgcagtgccacttgcggcaaggggactcggatgcgttacgtcagttgcagggatgaaaatggaagtgtggcggacgaatcagcctgtgcaactctgccgaggccggttgccaaagaggagtgcagcgtgaccccttgcgggcaatggaaggcactggattggtcctcatgcagtgtgacatgcggccagggtcgtgcgacgaggcaggtgatgtgtgttaactactctgatcacgtgattgacagatctgaatgtgaccaggactacattccagaaacagatcaggattgttccatgagtccgtgtcctcagcgcacgcctgattctggactcgctcagcatcctttccagaacgaagactatcgaccacggagcgcatctccctcgagaacccacgtgctgggtggaaatcagtggaggaccggcccttggggagcctgctcatctacctgtgctggcggtagccaacgcagggtcgtagtgtgtcaggacgagaatggctatactgccaacgattgcgtagaacgcattaaacccgatgaacagagagcttgtgagagcggcccttgccctcagtgggcctacggcaattggggcgagtgtaccaaactatgcggcggagggatccggacccggttagtcgtttgccagagatccaacggcgaaaggtttcctgacctgtcttgtgaaattttggataagcctcctgatcgtgaacaatgcaacacccatgcctgtccacacgacgcggcctggtcaacaggtccgtggagcagctgttccgttagttgcggcagaggccacaaacagcgtaacgtctactgtatggctaaagacgggagccacctggagagcgactactgcaagcacctggccaaaccccatggccatcgcaagtgtcgcgggggaagatgtcctaagtggaaagctggggcgtggtcacagtgctcagttagctgtggcaggggggtccaacagcgccatgtagggtgccagatcgggacacacaagatagctcgcgagacggagtgcaatccatataccagaccggaatctgagcgtgactgccagggtcccagatgtccgctgtatacatggagagccgaggaatggcaggagtgcacgaagacttgtggagaaggcagccggtatcgcaaagttgtctgtgtggacgacaataagaacgaggttcacggcgccaggtgcgacgtgagtaagaggcctgtggaccgtgaatcatgcagcctgcagccatgcgaatacgtgtggatcactggagaatggtccgaatgctccgtaacatgcggtaaaggatataaacagcgcctggtgagttgttctgaaatctacacaggaaaagagaactacgaatacagctatcagaccactatcaactgccctgggacacagccaccttccgtccatccgtgttacttgagggactgcccagtgagcgctacctggcgcgtgggaaactggggcagctgtagcgtgtcctgtggcgttggggtcatgcagcgttcggtccagtgccttaccaatgaggatcaaccatcgcacctctgtcatacagacttaaagccagaagaaaggaagacctgcaggaacgtgtacaactgcgagcttccccagaattgcaaagaagtgaaaagactgaagggcgcgtctgaggatggcgaatactttttgatgattagaggaaaactactgaagatcttctgtgcgggaatgcactctgaccatccgaaagagtacgtgacccttgtccacggagattccgagaatttttctgaagtttacggtcatcggctgcacaatcccacggagtgtccatacaacgggagtcgcagggacgactgtcaatgccgaaaggattatactgccgcgggtttctcctccttccagaagatcaggatcgatctcacaagtatgcaaattatcacaacagacctgcagttcgccagaacatccgaaggacatcccgtgcctttcgctaccgccggggattgttactcagccgcgaagtgtcctcaaggacgcttctccataaacctatacggaacagggttgagcctgaccgagtccgcccgatggatcagtcaaggtaactacgccgtatccgacatcaagaagtcaccagatggcacacgcgtggtcgggaaatgcggtggatactgtggtaagtgtactccttcaagcgggaccggcttggaggttcgggttctctag

SEQ ID NO: 107268 - DNA, 5808 bp, synthetic construct
  misc_feature 1..5808: note = Description of Artificial Sequence: Synthetic coding sequence
  source 1..5808: mol_type = other DNA
atgcagtttgtgtcttgggccacgctgctgactctcctggtgcgggaccttgctgagatgggctccccagacgctgctgccgctgtaaggaaagacagactgcacccacgccaggtgaaattgcttgagacattgtctgagtacgaaatcgtgtctccaatcagggtgaacgcgttaggggaaccattccccacaaacgtccactttaaaagaactcgcagaagtataaactccgctactgacccctggccggctttcgccagctcctctagttctagtacttcaagccaggcccattatcgcctgagtgcctttgggcaacagtttctgtttaatcttacggccaacgctggctttatcgccccattgtttacggtcacgttacttggaacaccaggagtgaaccagaccaaattttactccgaggaagaagccgagctgaaacactgtttctataaaggctacgtaaataccaactccgagcatacagccgtgatatctctctgctcgggcatgctgggtacatttagatcccacgacggcgattactttatcgaaccacttcagtcgatggacgaacaggaggacgaagaggagcagaataagccccatatcatttaccggcgcagtgccccccagcgggaaccctcaacggggcggcacgcttgtgacaccagcgagcacaagaacaggcatagtaaggacaaaaagaagactagggccagaaaatggggagaaagaattaatttggccggggacgtggccgccctgaactcgggcctcgctacagaggcatttagcgcctatggcaacaaaactgacaacactagagaaaagagaacccaccgccggacgaagcggttccttagttacccgagatttgttgaagtgctggtggtggccgacaacaggatggtttcgtaccatggagagaatctgcagcactatattctgacgttgatgtctatcgtcgctagtatttataaggatccgtccatcggcaatttgatcaatatcgtgattgttaacttgatcgtcatccataacgaacaagacggcccaagcattagtttcaacgcccaaaccactcttaaaaacttctgccaatggcaacatagcaagaacagtcccggcggcatacaccatgataccgctgttctgctaactaggcaagatatctgtagggctcacgacaagtgcgacactttgggactggctgaactcggaacgatatgcgatccataccgctcttgcagtatctcagaggattctgggctgtcaaccgcgtttactatcgctcacgagctcgggcacgtcttcaatatgccgcacgacgataataataaatgtaaagaagaaggagtgaagagccctcagcatgtgatggctccaacactgaatttctatacaaacccatggatgtggtcaaagtgttcgagaaaatacatcaccgaatttctagatacaggatatggcgaatgtcttctcaatgagcccgagagccgaccttatcccctgcccgtccaattaccgggcatcctatataatgtgaacaaacagtgtgagctaatctttggtcctggctcacaggtgtgcccttacatgatgcaatgtcgcagactgtggtgcaacaatgtgaatggggtgcacaagggttgcaggacccagcacactccgtgggctgacggaactgagtgtgaacccggcaaacactgcaagtatggtttctgtgtgcctaaagagatggacgtgccagtcacagacggttcatgggggtcttggtctccctttgggacttgctcccggacatgtggcggtggcattaaaaccgcaattcgtgaatgtaaccggcccgagcctaagaatggcggaaagtattgtgtaggaaggaggatgaaatttaagagttgcaacaccgaaccctgtcttaagcagaaacgagattttagggacgaacagtgtgcacattttgacgggaaacactttaacattaatggactgctacctaacgtgcggtgggtacccaagtattctgggatcttgatgaaggatcgctgcaagctgttttgtcgagtagctggaaataccgcatactaccagcttagggatcgcgtgatagatggtaccccatgcggccaggacacaaatgacatctgcgtgcaagggctgtgccgacaggccggctgtgatcatgtccttaattccaaggcacgcagagataagtgtggcgtgtgcggaggggataactctagttgtaagacggtggccggcacctttaatactgtgcattatggctacaatactgtggtccgcattcctgccggagcaaccaatatcgacgttcgacagcatagcttctctggcgaaacagatgatgacaactatctcgccctgtcttcctctaaaggagagtttttgcttaacggaaacttcgtcgtcaccatggccaagagggaaattaggatcggcaatgcggtcgtggaatactcgggatccgagacagccgttgagcgcatcaattccaccgatcggatcgagcaggaacttctccttcaagttttgtcggttgggaaactttataatccagacgtgagatactcattcaatattcctatcgaggacaagccacagcagttctattggaacagccacggaccttggcaggcatgctcaaaaccttgccagggtgagaggaagaggaagttggtctgcacgcgcgagtctgatcagttaaccgtctccgatcaacggtgtgaccgcctgccacagccgggccacattaccgaaccctgtggaaccgactgcgatctccgctggcacgtggcatcccgtagcgagtgctctgcacagtgcggcctcggatatcgcacactcgacatctattgcgccaagtacagccgcctggatgggaagacagagaaagtggatgacgggttctgcagctctcatccgaagccgtcaaaccgagagaaatgctcgggggagtgcaataccggcggctggcgttattcagcctggactgagtgttccaagtcatgcgatggcggaactcagcggaggcgggccatctgtgttaatacacgtaacgacgttcttgacgacagtaaatgtacacaccaggagaaggttactatccagcggtgcagtgagttcccgtgtccacagtggaagagcggcgactggagcgagtgcctggtcacgtgcgggaaaggccacaaacacagacaagtgtggtgtcagtttggtgaagaccgccttaatgatcggatgtgtgatcctgaaaccaaacctacctccatgcagacttgccaacagcctgagtgcgcctcttggcaagcgggtccatggggccagtgctctgtgacctgtggtcagggctaccaactccgagctgtgaaatgcatcatcggaacctatatgagtgtggtcgacgacaatgattgtaatgcagctacccgtcccaccgatacgcaggactgtgagctgccctcttgtcatcccccacctgctgcgcccgagactaggcggagcacttatagcgccccaaggacccagtggcgtttcggctcctggactccttgctctgccacctgtggaaaaggtacacggatgcgctacgtgtcctgtagggatgagaatggaagcgtggcagatgaaagcgcatgcgctacgttaccccgaccagtcgccaaggaggaatgcagcgtgactccctgtggacaatggaaggcactggactggtccagctgttcagtcacctgtggacagggacgagcaactagacaagtgatgtgtgttaactactctgaccacgttatcgaccgcagcgaatgtgatcaggattacatcccagagaccgaccaggattgttccatgtccccttgtcctcagaggacccccgacagcggtttggcccagcaccctttccagaacgaggattacagaccgaggtcagcttcaccctccagaacccatgttctgggcgggaatcagtggcgcaccggaccatggggcgcatgttcttccacatgcgccggcgggtcacagcggagagtggtcgtttgccaagacgaaaacggatacacagccaatgactgcgtagaacgtataaagcccgatgagcaacgcgcatgcgagagcgggccttgcccccagtgggcctatggcaactggggagaatgtaccaagctgtgtgggggaggcattagaacacgactggtcgtatgccagcgaagtaacggcgagcggtttccagatctgtcctgtgagattctcgataagccacctgatcgggaacagtgtaacacgcatgcttgtccgcacgatgcagcatggagcacaggcccctggtccagttgtagtgtcagctgtggacgagggcacaagcagagaaatgtgtactgtatggctaaggacgggagtcacctggagagtgattattgcaaacaccttgctaaaccacacggccatcgaaagtgcaggggcggcagatgccccaagtggaaagctggcgcttggtcacagtgttccgtgagctgcggcaggggggtccaacagaggcatgttgggtgtcagatcggcacacacaaaatcgcaagggagacagagtgcaacccctatacccgacccgaaagtgaacgcgactgccagggtccgcggtgccccctgtacacgtggagggctgaggaatggcaggagtgcacaaaaacctgtggcgagggatcaagatacagaaaggtggtctgcgttgacgataataaaaacgaagttcacggtgcgaggtgtgacgtcagcaaacgtcctgttgatagagagagttgctctctgcagccttgtgagtatgtctggatcacaggggagtggagtgaatgcagtgtgacgtgtgggaagggatacaaacagagattggtgtcctgcagcgaaatttataccgggaaggaaaactacgaatatagctaccagaccacaataaactgcccaggcacccaaccacccagtgttcatccttgctatctaagggactgccccgtatcagctacatggcgggttggtaattgggggagctgcagcgtttcatgcggcgtgggtgtaatgcagcgatccgtgcagtgcttgacaaatgaagatcaacccagtcacctctgccacaccgacctcaaaccagaggaaaggaaaacgtgtagaaatgtgtacaactgcgagcttcctcagaactgcaaagaagtgaagagattgaagggagcctcggaagacggtgaatactttctgatgatcaggggcaagttgctcaagatcttttgcgcagggatgcacagcgatcaccctaaggagtacgtaactcttgtgcacggagactcagaaaattttagcgaggtctatggacacagactgcacaatccaaccgagtgcccatacaatgggtctagaagggacgattgtcagtgtagaaaggactatacagcggccggtttcagttcattccagaaaatcaggatcgaccttacctcaatgcaaattattaccactgatctccagttcgcacgcacctcagaaggacacccagtgcccttcgcaacagcaggagattgctatagtgccgccaagtgtccccagggaagattctccatcaatctctacggcaccggactgagtttaaccgagtccgccaggtggatctctcagggaaattatgcagtctcggatatcaaaaagtcccctgatggaacccgtgtggtgggaaagtgcggtgggtactgtgggaaatgcacaccatcctctggaacgggattggaggtaagagttctgtag

SEQ ID NO: 107269 - DNA, 1176 bp, synthetic construct
  misc_feature 1..1176: note = Description of Artificial Sequence: Synthetic coding sequence
  source 1..1176: mol_type = other DNA
atgattttgaacggagaagagatcatcttaagtctccagaagacaaaacatttgcttggtcctgattataccgaaaccctgtatagcccacggggagaggagataactaccaaacctgaaaatatggagcactgctactacaaggggaatatcctcaatgagaaaaactctgtcgcctccattagtacttgcgacggacttcgcgggtattttacccatcaccaccagcgctatcagatcaagcctctgaaatccaccgatgaaaaggagcacgctgtgttcactagcaatcaggaggagcaagaccctgctaaccatacctgcggcgttaaatctaccgatgggaagcaagggcccattcgtattagccgctccctgaaaagcccagaaaaggaggactttctccgggcccagaagtatattgatctgtatctggtcctggataatgctttttacaaaaattacaatgagaacctgacgttgattcgcagtttcgtgttcgacgtcatgaatcttctcaacgtgatttacaatacaatagacgtccaagtcgccctggtaggtatggagatatggagcgacggggacaagatcaaagtggttccatccgcttcgacaaccttcgacaactttctgcggtggcatagcagcaatttggggaagaagatacacgatcacgcacaactcctttcaggaatcagctttaataatcgccgcgtgggtctggcggcctcaaacagtttatgtagcccttccagcgttgccgtgatcgaggcgaaaaaaaaaaacaacgtcgcattggtcggagtcatgagccacgaactggggcacgtactggggatgcctgacgtgccctttaacacaaagtgcccatctggctcctgtgtgatgaatcagtacctgtctagtaaatttcccaaggatttttccacatcttgtagagcacattttgaacggtatctgctgagtcagaagcccaagtgcctgctccaggctcccatccctaccaacatcatgactaccccagtgtgcggtaaccacctattggaggtgggggaggattgtgactgtggctcccctaaggagtgcacgaacctctgttgtgaagccctcacttgcaagctcaaacctggtaccgactgcggcggggatgcgcccaatcacaccactgagtag

SEQ ID NO: 107270 - DNA, 1413 bp, synthetic construct
  misc_feature 1..1413: note = Description of Artificial Sequence: Synthetic coding sequence
  source 1..1413: mol_type = other DNA
atgttgaggggcatctcacagcttcccgctgtggccacaatgtcatgggtgttgctgcctgtgctatggctcatagttcaaacacaggcgatcgctatcaaacagactcccgaactaaccctgcatgagattgtatgccccaaaaaactgcacatacttcataaaagagagatcaagaataaccagacagaaaaacatggaaaagaggagcggtacgaaccggaggtccagtaccaaatgatactgaacggcgaggagatcattttgagtttgcagaagactaaacacctcctcggcccagactatactgagaccctatactcgccacgcggtgaagagatcaccacaaaacccgaaaatatggagcattgctactacaagggtaacatacttaacgagaaaaattcagtcgcatcaatctccacctgcgatggactgagggggtactttacccatcatcatcagcggtaccaaattaaacctcttaaatcgactgacgaaaaggaacatgctgtatttaccagcaaccaggaagagcaggacccagcaaaccacacatgtggagtcaagagcaccgacggaaaacaaggccctatcaggattagtaggagtctgaaaagccccgagaaggaagatttcttacgggcccaaaagtacatcgacctctacctcgtgctggataacgccttttacaaaaactacaatgaaaatctgaccctgatcagaagttttgtttttgacgttatgaatctcctcaacgtcatctacaacacaatagatgtacaagtcgcgctagtgggtatggagatttggagcgacggtgacaagattaaagtcgtgcccagcgcatcaaccacattcgacaacttcttaagatggcactcctccaacctgggtaaaaaaattcacgaccatgcccaactactctcaggaatcagctttaataatagaagagttggtttggcagccagtaacagcctctgcagcccttcttcggtggccgttatcgaggccaaaaagaagaataacgtcgctctcgtgggggtcatgagccatgaacttggccatgtcttaggtatgccggatgtaccgtttaacacaaagtgtccctctggcagctgcgtgatgaatcaatatctgtcgtcaaaattccctaaggactttagtaccagttgccgggcccacttcgagcgttatctactctcccagaagcctaaatgtctccttcaggccccaattcccaccaacattatgaccacgccggtttgcggcaaccacctactggaagttggcgaggactgcgattgtggctccccaaaggagtgcaccaatctgtgctgtgaggcccttacttgcaaactgaagccagggacagattgcgggggagatgctcccaaccacaccaccgaatag

SEQ ID NO: 107271 - DNA, 1176 bp, synthetic construct
  misc_feature 1..1176: note = Description of Artificial Sequence: Synthetic coding sequence
  source 1..1176: mol_type = other DNA
atgatcctcaacggagaagaaatcattctgagcctccaaaagacgaagcatctgctcggaccagattataccgaaaccctctatagcccgagaggggaagagataactaccaaacccgagaacatggaacactgctattataaggggaacatcctgaatgagaaaaactctgtcgcttctatcagtacttgcgatggcctgcgcggatacttcacccaccaccatcagcgctaccaaattaaaccacttaagtctacagatgagaaggagcacgcggtgttcaccagtaaccaggaggagcaagaccccgctaaccatacttgtggtgttaagtctacggacggcaagcagggccccatccgtatctcccgtagtttaaagtctccagaaaaggaggattttctgcgtgcccagaagtacattgatttgtatctggtgcttgataacgccttttacaaaaactacaacgagaacctgaccctcatcagaagctttgtgtttgacgtaatgaacttattgaatgttatctataataccatcgatgtacaagttgcacttgtcgggatggaaatctggtccgatggagataaaatcaaggtagtccctagcgcatcaaccacatttgataactttctccgctggcatagttccaatctgggaaaaaaaatacacgatcatgcacagttgctgtcaggcatctctttcaacaatcggagggtgggtttagcagctagcaattccctgtgttcaccctctagcgtcgctgtaatcgaggcaaaaaagaaaaataatgtggcattagttggtgtgatgagccacgaactggggcatgtgctcggtatgcccgacgtcccatttaatacaaagtgcccaagtggatcatgtgtgatgaaccagtacctctctagtaagttcccaaaggatttttctaccagttgccgagcccatttcgaaagatatttgctgagccaaaaaccaaaatgcttgctgcaagcgccaattcccacaaatattatgaccactccagtatgcggcaaccatctcctggaagtgggggaggactgtgattgcgggagccccaaggagtgtaccaacctgtgctgtgaggctttgacttgcaaacttaagccaggaacagattgcggaggcgacgccccgaatcatactaccgaatag

SEQ ID NO: 107272 - DNA, 2052 bp, synthetic construct
  misc_feature 1..2052: note = Description of Artificial Sequence: Synthetic coding sequence
  source 1..2052: mol_type = other DNA
atggagtgttgccgtagagctaccccggggacccttcttctatttttggccttcctgcttctatccagccgcacggcgagaagtgaggaggatcgtgacggtctctgggacgcctggggtccatggagtgaatgttctcgtacatgcgggggaggagcctcctacagtctgagacgatgtcttagctcaaagtcctgcgaggggagaaatatccggtaccgcacttgctcaaacgtggactgcccccctgaggccggtgatttcagggctcagcagtgcagcgctcataatgacgtcaagcaccacgggcaattctatgagtggcttcccgtgagcaacgatcccgataacccctgcagtttgaaatgtcaggctaaagggacaaccctggttgtagagcttgcccctaaagtgctggacggcacgcgttgctataccgaaagcttggatatgtgcatttccggcctttgccagattgtgggttgcgaccatcagctcggcagcacagttaaagaggacaattgcggcgtttgtaatggtgatggatcaacttgcaggttggtgcgcggacagtataagtcccagctgagcgccacaaaatccgacgacaccgtcgtcgctattccttatggaagcagacacattcggcttgttctgaaaggccccgaccatctgtatctggaaaccaagaccctgcagggcacaaagggggaaaattcactctcaagcaccggtaccttcctggtggacaattcctcagtcgactttcagaagtttcccgacaaggagatactgcgaatggccggccctcttactgccgattttatcgtgaagatacggaactccggctccgcagactctaccgttcagttcattttctatcagccgatcatacatcgatggagagagacagatttttttccttgcagcgctacctgcggcgggggataccaacttacctccgccgaatgctacgatctcagatcaaatagggtggttgccgaccagtattgtcactactatccagagaacattaaaccaaagcccaagctgcaggagtgtaacctggatccttgtcctgcatctgacggctacaagcaaattatgccgtatgatttgtaccatccattaccccgatgggaagccacaccttggaccgcctgttcctccagctgtggcggaggcattcagtctagagctgtgtcctgtgtggaggaggacatccaaggccacgtgactagcgtagaggagtggaagtgtatgtacacaccaaaaatgcctatcgcacagccctgcaatattttcgactgcccaaagtggctcgcacaggagtggtcaccatgtaccgtgacttgcggacagggcctgcggtaccgagtggtgctctgtatcgatcaccgcgggatgcacactggtgggtgctctcccaagaccaagccacatatcaaggaggaatgtattgtccccacaccttgttacaagcctaaggaaaagctccccgtcgaggccaaattaccatggttcaagcaagctcaggaacttgaggaaggggccgccgtgagcgaagagccttcctttatcccagaagcctggtccgcctgtaccgtgacatgtggtgttggaacccaagtgcggatcgtccgctgccaggttctgctgagtttcagccagtcagtggcagacctgccgatcgatgaatgcgagggtccaaagcctgcctcccagcgggcctgttatgccggcccctgtagcggggagatccctgagttcaacccggacgagaccgacggacttttcggcggactccaggatttcgacgagctgtacgactgggaatacgaggggtttacaaagtgcagcgagagctgcggagggggagtacaggaagctgttgtgtcgtgtcttaacaagcagacacgagaaccggccgaagagaatctctgtgtaaccagcaggcggcctcctcagctgctgaagtcctgcaatctggacccttgtcccgcccgcagtagtattgactccgcctggaacgcgtgtaacgttttgtgctag

SEQ ID NO: 107273 - DNA, 1401 bp, synthetic construct
  misc_feature 1..1401: note = Description of Artificial Sequence: Synthetic coding sequence
  source 1..1401: mol_type = other DNA
atgtgcctgactgatgagtgggggttctttttctttttttttctgggcgtgcccgaagcggaggttacctggtttcgaaacaaaagtaagctgggctcaccccaccatcttcacgaagggtcacttctgcttaccaacgtcagctcatccgaccaaggcctgtactcttgtagggcagccaacctgcacggcgagctgaccgagtccacacaactgctaattctggaccctccacaggtccctactcagctcgaggacataagagcgctgttggccgctacaggcccaaatctgccctctgtcctgacgagcccactcggaacccagctggtgctggatccgggtaattctgcgctcctaggctgtccaattaaagggcaccctgtgcccaacatcacctggtttcatggcggccaacctattgtgaccgccaccggcttgacgcaccacatccttgccgctggccagatcctgcaggtggctaacttgagcgggggttcccagggtgaatttagctgcttagctcaaaacgaggccggcgtgctgatgcagaaggcctctctcgtaattcaagactattggtggtctgtagacagactggccacttgttccgccagctgcggtaacagaggcgtgcagcagcccaggctccgctgtcttctcaattccacagaggtcaacccagcccattgcgccggaaaggttcggcccgccgtacagccaattgcgtgtaaccggcgggactgtcccagtagatggatggtgacctcttggagtgcttgcacccggtcatgcggcggaggcgtgcagacgcgaagggtcacgtgtcagaaattgaaggcctccggcatcagcacccctgtcagcaatgatatgtgcacgcaggttgccaaacgccctgtagacactcaggcctgtaaccagcaactctgcgtagagtgggcattctccagctggggccagtgtaatgggccatgcatcggccctcacctggccgtgcaacacaggcaagtgttctgccaaacaagagacggaatcacgcttccgtccgagcaatgtagcgctctcccgaggccagtgtctacccagaattgctggagcgaagcatgctcagttcattggagagtttccctttggactctctgcacagccacctgtggaaactacggctttcagagcaggcgtgtggaatgtgtacacgcccggaccaacaaagcagtgccagagcatctttgtagctggggaccccgtccagccaactggcagaggtgcaacataacaccatgtgaaaatatggaatgcagagatacaaccagatactgtgagaaggtcaagcagctgaagctgtgccagttgtcccagtttaaatcccgatgttgtggaacctgtggcaaggcttag

SEQ ID NO: 107274 - DNA, 1578 bp, synthetic construct
  misc_feature 1..1578: note = Description of Artificial Sequence: Synthetic coding sequence
  source 1..1578: mol_type = other DNA
atggaatgttgcagacgggcaactcccggcaccctactcctcttcttggcttttcttctgctgagcagtcgtacagctaggtctgaggaagatagagatggtctctgggacgcatgggggccctggtcagaatgttcgagaacatgcggcgggggcgcaagctattcgctacgacggtgtctgtctagtaaatcttgcgaggggcgcaatatccgataccgcacctgcagcaatgtagactgcccccctgaggctggagatttcagagcacagcaatgcagtgcacataatgacgtgaaacatcacggccagttctacgagtggcttccagtgagcaacgaccctgataatccctgctccctcaagtgtcaggccaagggcaccactctggtggtggaattagccccgaaagtgctcgatggaacacggtgttatactgagagcttggacatgtgtatttccggcctctgccaaatcgtggggtgtgatcaccaactcgggtccacagtcaaagaggacaattgtggcgtgtgcaatggcgatggcagcacgtgccgcttggtgagggggcaatacaagagccagcttagcgccacaaagagtgacgatacggtcgtggccattccatacggttctcgccacattcggctagtgcttaagggtcccgaccatttatacctggagaccaaaaccctacaaggaacaaaaggagagaactcgttgtcttccacggggacgtttttagttgacaactcttccgtggacttccaaaagttccccgataaagagattctgagaatggccggacccctgacagcagatttcatcgtgaaaatccgcaattctggctctgctgactccactgtgcagtttatcttttatcaacccatcattcacaggtggcgggaaacggacttctttccctgtagcgcaacatgcggaggaggctaccagctgaccagcgcggaatgctatgacctacggtccaatcgggttgtcgctgaccagtattgccactattaccctgaaaatatcaaaccgaaaccgaagctgcaggagtgtaacctggatccttgcccagctagcgacggatataaacaaatcatgccgtacgacctctaccaccctctccctcgatgggaggcaactccttggacagcctgctcttcttcctgcggaggtgggatccagagccgcgccgtctcctgtgtcgaggaggatattcagggacacgtgacctcggtcgaagaatggaagtgcatgtacacccccaagatgccaatcgctcagccctgcaacatttttgattgtcctaaatggctggcccaggagtggagcccttgcacagtgacatgcggccaggggcttcgttacagggtcgtcctgtgtattgaccatcggggaatgcacaccggcggatgttcccctaaaacaaagccccatattaaggaggagtgcattgttcccaccccatgctataagcctaaagaaaagctgcctgtcgaagccaaactgccatggttcaagcaggcccaggaactcgaggagggagccgccgtaagtgaggagcccagctag

SEQ ID NO: 107275 - DNA, 786 bp, synthetic construct
  misc_feature 1..786: note = Description of Artificial Sequence: Synthetic coding sequence
  source 1..786: mol_type = other DNA
atgtgcctgactgacgaatggggcttctttttcttcttttttctgggtgtacccgaagctgaagtgacatggtttcgtaataaatcaaagctgggcagcccccatcacttacacgagggctcattgcttttgaccaacgtgtcatctagcgaccagggattgtacagctgccgtgcagccaacctgcatggcgaactcacagagtccacgcagctattgattctggatccgccccaggtccccacccagcttgaagacattagggcactattggccgccaccgggccaaatctaccttccgtcctcacaagcccccttgggactcagctcgtgttggatccgggaaattccgctctgctgggctgtccaatcaaggggcatcctgtgcccaatataacctggttccatggaggacagcctatcgtaactgcaactggtctaacacaccacatcctggccgccggtcagatcctgcaagtggctaacctcagtggggggtctcagggggaattcagctgtctggcacagaatgaggccggcgtgctgatgcagaaggcctcactggtcatccaggattactggtggtcagtcgatagactagctacatgttctgccagctgcggtaaccgaggcgtgcagcagcccagattgcggtgtctccttaatagcaccgaggtaaaccctgcacattgtgcagggaaggtcagacctgccgtgcaaccaatcgcctgtaacagacgggattgtcctagtcgggctatgggcctggcttctggtcttacctag

SEQ ID NO: 107276 - DNA, 5289 bp, synthetic construct
  misc_feature 1..5289: note = Description of Artificial Sequence: Synthetic coding sequence
  source 1..5289: mol_type = other DNA
atggagtgttgcagaagagcaacacctggcacattattgttgttcctggcctttctactgttgtcaagcaggaccgctcgaagcgaggaagatcgggatggactgtgggacgcgtgggggccatggtcggaatgtagcaggacctgcggaggtggcgccagttatagcttaagaaggtgcttaagcagcaagtcttgtgaaggacggaacatcagatataggacctgttcaaatgtagactgcccacctgaggccggcgacttcagagcacagcagtgcagcgcgcataacgacgttaagcaccacggacaattttacgagtggctgccagtgtctaacgaccctgacaacccatgttccctcaagtgccaggccaaaggcacaactctggttgttgaactggccccaaaggtactggatggcacgcgttgttacactgagagcctggacatgtgcatttcaggtttgtgtcaaatagtcggatgtgaccaccagttagggtcgacggtgaaggaggacaactgtggtgtgtgcaacggagacggctctacgtgtcgcctggttcggggccagtataaaagtcagctctccgcaaccaaatctgacgatacggtcgtagctatcccctatggttctaggcacatcaggctggtcctgaagggcccagaccacctttatctggaaacgaagactctacaaggcaccaagggagagaacagtctctcaagtaccggtacgtttctggtggataattcaagcgtagactttcaaaaatttccggacaaggagatactccgaatggcagggccgctcaccgctgacttcatagtgaaaattcggaattctggctctgctgactccaccgtgcagtttatcttctaccagccgatcatacaccgctggagggagaccgatttctttccttgctctgctacttgtggaggagggtatcagctcaccagcgccgaatgttatgacctccgctctaatcgagtggttgccgaccagtattgccattactatcccgaaaacataaagcccaagccaaagttacaggagtgcaacctagacccttgtccggcgtcagatggctacaaacaaattatgccttacgacctgtatcatcctctgcctaggtgggaagcaacgccatggacagcctgttcatcatcctgcgggggcggcatacaatccagggccgtgtcttgcgtcgaggaggacatacagggtcatgtcacgagcgtagaagagtggaaatgcatgtacacccctaaaatgcccattgctcagccctgtaatattttcgattgcccgaaatggctggcccaagagtggagcccctgtacagtgacgtgtgggcaaggcctgaggtatcgggtggtgctctgcattgaccaccgcggaatgcacaccggcggctgctcacccaagaccaagccccatatcaaagaggagtgcattgtacccaccccatgctataagccaaaggaaaaattgcctgtagaggcaaagcttccctggttcaaacaggcccaggaactggaagaaggggcagcggtgagtgaagagccctcattcattcctgaagcttggtcagcctgtaccgtgacatgcggagtggggacacaggttagaatcgttcggtgtcaggtactcctcagtttttctcaaagcgtggcagatctgcccatagatgaatgcgagggcccaaagcctgcctctcagcgtgcctgttatgcaggcccttgctcaggtgagatccccgagttcaacccagatgaaacagacggactttttggtggccttcaggactttgatgagctgtacgattgggaatatgagggatttacgaagtgcagtgaaagttgcggcggaggcgtccaggaggccgtggtctcttgcctgaataaacagacaagagaaccagctgaagagaacctgtgcgttaccagccggcgaccaccccagctgcttaagtcttgcaaccttgatccttgcccggctcggtgggaaatcggcaaatggagtccctgcagtcttacatgtggcgtggggctacagacccgcgatgtgttttgcagccatcttctttcaagagaaatgaacgagacagtcatcctggctgatgagctgtgtcggcagccaaagccatctactgttcaggcctgcaatcggttcaattgtcccccagcctggtaccccgctcagtggcaaccatgttccaggacctgtggtggaggagtccagaagcgggaagtgctctgcaagcaacggatggcagatggcagttttctggagctcccagagacattttgttctgctagcaagcccgcctgccaacaggcttgtaaaaaggatgattgcccaagcgaatggctgctgtcggactggaccgagtgttccacaagctgtggagaaggcacccaaacccgatcagctatctgtcggaagatgctcaaaaccgggctgtctaccgtggttaactcgaccctgtgtccgcctctcccttttagttcctccattagaccctgtatgttggcaacctgtgctcggcctggcaggcccagcactaagcacagccctcacattgccgcagctagaaaagtatatatccaaactcggcggcagcgtaagctgcacttcgtagtgggcgggttcgcatacttactgcctaagacagccgttgttctcagatgtcccgcccggcgggtgcgtaagcccctcattacatgggaaaaagatgggcagcaccttatcagttccacccatgtgactgttgcaccgtttggctatttgaaaatacaccgtcttaagccaagtgatgccggtgtatacacatgttctgccggcccagcccgcgagcattttgtgatcaaactcatcggagggaacaggaagctcgtcgctcgccccctgtcgccgcggagcgaggaggaagtattagcgggacggaagggcgggcccaaagaggcccttcagactcataagcaccagaacggtatcttttccaacgggtctaaggccgaaaagcgcggactggcagcaaatcccgggagcagatatgatgacctggtgagccgactactggagcaggggggatggccaggtgaactattagcatcttgggaagctcaagactccgcagaacgcaacaccacaagcgaagaagatcctggtgcagagcaagtgctgcttcatttgccctttaccatggtgaccgagcagaggagactggacgacatcctggggaacctgtcccagcagccagaagagttgcgcgacttatattctaaacacttggtggctcagctggcacaggaaatctttcggtctcacctcgaacatcaggatacactactcaaaccatccgagaggcgcacttctccagtgacactgagcccccataaacatgtgtccggattttccagttcgcttcgtacctcttctacaggcgacgccggcggtggttcccggagacctcaccgaaagcctaccatcctccggaagatcagcgctgcccagcagctgtcagcctcagaagtcgtgacacatttggggcaaacagtcgcactggctagcgggaccctcagtgtcctgctgcactgcgaagctataggtcacccccggcctacaatctcttgggctcggaatggagaggaggtacagtttagtgatcggattttgctccagccagatgatagcctgcagatcctggcaccagtcgaagccgatgttgggttttacacgtgtaatgctaccaacgctttgggctatgacagcgtctccatcgcagtaaccctcgcaggtaaacccctggttaaaaccagcaggatgactgtcattaatactgagaagcccgccgtgactgtcgatattggtagcacaatcaagaccgtgcagggggtgaacgtcacaattaattgccaggtggccggggtgccagaagctgaagtgacatggtttcgaaataagagtaagctcggaagcccacaccacctccatgagggatcgctgctcttaaccaacgtctccagctctgaccagggcttatacagctgcagagctgccaatctgcacggtgagctcaccgagtctacacagctgttgatactggaccctccccaggttccaacacagctggaggatatacgcgcactgctggccgccaccggccctaatttgcctagcgttctgacatcccctttggggacacagttggtcctggatcccggcaattccgctctgctaggctgccctattaagggacaccccgttccgaatatcacgtggttccacgggggtcagcccatagtgactgccacagggctaacacaccatattttggcagctggacagattcttcaggtagccaacctatccggcggttctcagggtgagttcagttgccttgcccagaacgaggccggcgtgcttatgcaaaaggccagccttgtcatacaggattattggtggtcggtggataggttggccacatgttccgcttcatgtggaaaccgaggggttcagcagcccagactcaggtgtttactcaactcgactgaagttaacccagcccactgtgccggaaaagtaaggcctgctgtgcagccaatcgcatgtaacagacgggattgtccgtctagatggatggttacatcatggagtgcatgtacccgtagctgcgggggcggtgtgcagacccgtcgggtcacatgtcagaagctcaaagcgtccggtattagcaccccggtgtcaaacgacatgtgtacacaggtggcaaaacgccctgtagacactcaggcctgcaaccagcaactatgtgtggagtgggcattttcgtcgtgggggcagtgtaatggcccctgtatcggcccgcatctggcagtgcagcaccggcaggtgttctgccaaacacgagacggaatcactctgccgtcagaacaatgtagtgccttgccgagaccagtgtcaacacagaattgctggtctgaggcttgctccgtccactggcgtgttagtctgtggaccctgtgtacagcgacttgtggcaactatggctttcagtcccggagagtcgaatgcgtccatgcacggactaataaggctgtccccgaacatctatgcagttgggggccacggcccgctaattggcaaaggtgtaatattacgccctgcgaaaatatggagtgcagagacacgactagatactgcgagaaagtgaagcagttgaaattatgccagctcagccagttcaagagccgctgttgcggtacctgtggtaaagcctag

SEQ ID NO: 107277 - DNA, 1320 bp, synthetic construct
  misc_feature 1..1320: note = Description of Artificial Sequence: Synthetic coding sequence
  source 1..1320: mol_type = other DNA
atggagtgttgtagaagagctaccccagggactctgctgctgtttctagctttcctgcttctctcttctaggactgcccgatctgaagaagacagagacggactgtgggatgcctggggcccctggagtgaatgcagtagaacctgcggtggaggtgctagctacagtcttagaaggtgcctcagctccaagagctgtgagggtcgaaacataagatacaggacctgctctaatgtggactgccctccagaagctggagactttagagctcagcagtgttccgcccacaatgatgtgaaacatcatggacagttctacgaatggctacctgtcagtaatgaccctgataatccctgctctctaaaatgtcaggccaaggggaccactcttgtggtcgagttagctcccaaggtcctggacgggacacgctgctacaccgaatctttggatatgtgcatctcagggctctgccagatagttggttgcgatcatcagctgggtagtactgtgaaggaggataactgcggagtgtgtaacggagacggtagcacctgtcgtctggttagggggcagtacaagagccaactgtcagccacaaagtcagatgatacggttgtggccatcccgtatgggagcaggcatattcggctggtactgaaaggaccagatcacctgtacctcgagactaagactctacaaggcacaaaaggggagaatagcctgagtagcaccggaacgttcttggtggacaattctagcgtggacttccagaagtttccagataaagaaattctgaggatggcaggcccactaaccgcagactttatagtcaagatcagaaattccggctccgcagactctaccgtgcaattcatattttaccagccaatcatccaccgttggcgggaaaccgatttcttcccctgtagcgctacctgcggtggtggctaccagctgacctctgcagagtgctacgaccttcgcagcaatagggtggtcgcagatcaatattgccactactacccggaaaatataaagcccaagcctaaactgcaggagtgcaaccttgacccgtgccccgcacggtgggaggctactccgtggaccgcatgttccagctcttgtggcggcggaattcaatccagagccgtgtcatgcgttgaagaggacattcagggtcatgtaaccagcgtggaggagtggaagtgcatgtacaccccaaagatgccaattgcccagccatgtaacatctttgactgccctaaatggctggcccaggaatggtctccagtcacagtgccgtccttcttcgtgcactag

SEQ ID NO: 107278 - DNA, 2856 bp, synthetic construct
  misc_feature 1..2856: note = Description of Artificial Sequence: Synthetic coding sequence
  source 1..2856: mol_type = other DNA
atggatggccggtggcagtgttcatgttgggcctggttcctgcttgtgctggccgttgtggcgggcgatacagtgtcaactgggagtaccgataactccccgaccagcaatagcctcgaggggggcactgacgccaccgccttctggtggggcgagtggacaaagtggaccgcctgcagtagaagttgtggcgggggggtcaccagccaggagcggcactgtttgcaacagcgtcggaaatccgtgccaggccctgggaatcgtacttgtactggaacctcaaaacgataccagctctgcagggtacaggagtgcccacctgatggaagatcattccgagaagagcagtgcgtcagctttaatagtcacgtttataatggccgaactcaccagtggaagcctctttaccccgacgattacgtgcatatatcttccaagccctgtgatctccactgcacaaccgtggacggccagagacagctaatggtacctgcccgggatggaactagctgtaaattgacagacttaaggggcgtttgtgtatccggcaagtgcgagccaatcggatgcgatggggtgctcttttctacccataccttagataagtgcgggatctgccagggcgatggttcaagctgtacacacgtgactggaaactataggaagggcaacgcccacctcggatactccctggtgacccacatcccagccggcgctagggatattcagatcgtggaacgcaaaaagtctgccgacgtcctggctctggccgacgaggcagggtattacttttttaatggcaattataaggtcgactcgcccaagaacttcaacatcgccggcaccgtggttaaataccgcagacccatggacgtttacgagactggtatcgagtacattgtggctcagggacccacaaaccaggggctgaacgtaatggtttggaaccaaaacgggaagagcccatccatcacattcgagtacacgttgcttcaacctccacatgagagtagaccacagccaatttactacggtttttcagaatcagccgaatcccaagggcttgacggcgcgggcctaatgggattcgtaccacataatgggtccctgtatggacaagcaagttctgaaagactcggcctcgataaccgactttttggccaccccggccttgatatggaactgggtccctcacagggccaggagactaatgaggtgtgtgagcaagctggaggcggggcatgcgaagggcctcccaggggtaaaggatttagagaccgaaacgtcaccggcactcctctgaccggagacaaagacgacgaggaagtagatactcacttcgcttctcaggagttctttagcgcaaacgcaatttccgatcagctgcttggtgccggctcggacctcaaagatttcacactaaacgagacggtcaatagcattttcgcgcagggggccccccggagctcattggctgagtctttttttgtggactacgaggagaacgaaggggcgggcccttatctcctgaacggcagctacttggagctttcttccgaccgggtggcaaattcctcttcagaggccccctttcccaacgtttcgacctctctactcaccagcgccggcaatcgcactcacaaagcaaggacaaggcctaaagcgcgaaagcaaggtgtgtccccagccgacatgtaccgatggaagttgtcctcacacgagccctgcagtgccacctgcaccaccggcgttatgtcagcgtatgctatgtgtgttcgctatgatggcgtggaagttgatgattcatattgtgacgcgctgaccaggcccgagcctgtgcacgaattttgcgcaggaagggaatgccagccgcgctgggaaacctcgtcttggtctgagtgctccagaacatgtggtgaaggctaccaatttcgggtggtgcgttgttggaagatgctatccccaggcttcgactcttctgtgtatagcgatctctgtgaggcagccgaggcggtgcgaccggaagagaggaagacatgccggaaccctgcttgtggcccccagtgggaaatgagcgagtggtcagaatgcactgcgaaatgtggtgagagatccgttgtaacccgggacatcagatgtagcgaagacgagaaactgtgtgatcccaacacacgccccgttggagaaaaaaactgcacaggtccaccttgcgatcgtcagtggactgtgtcggattggggcccatgttctgggagctgcggccagggcaggacaatacgccatgtgtattgcaagacctcagatggccgggtggtcccagaaagccagtgccaaatggagaccaaaccgctggcaatacatccttgcggtgacaaaaattgtccggcgcactggttggcccaagactgggagcggtgtaacactacatgtgggcgaggagtgaagaagcgccttgtgctgtgtatggaattagctaatggcaagcctcaaacacgttcagggcccgaatgcggcttggcaaagaaacctcctgaggaaagcacctgcttcgagcgtccttgctttaagtggtatacgtccccctggtctgaatgcaccaagacttgcggcgtcggagttaggatgcgagacgttaaatgctatcagggaactgacatagtgcggggctgtgaccccctagtgaaacccgttggaagacaagcgtgcgatctgcagccctgccccaccgagccaccggatgatagttgccaggatcagcctggtactaattgcgctcttgcaattaaggtcaatctatgcggacattggtactattcaaaagcatgttgtcggtcttgccgccctccccatagctag

SEQ ID NO: 107279 - DNA, 2856 bp, synthetic construct
  misc_feature 1..2856: note = Description of Artificial Sequence: Synthetic coding sequence
  source 1..2856: mol_type = other DNA
atggatggccgatggcaatgttcgtgttgggcgtggtttcttctggtccttgctgtcgttgcaggggacactgtaagtaccgggagtacagataacagtcccacctccaattctctcgaaggtggcactgacgccaccgcgttttggtggggcgaatggacaaaatggaccgcctgctctcgatcttgcggaggcggcgttaccagtcaggagcggcactgtctccagcagagacggaagagtgtgccgggaccaggtaataggacatgcactgggacaagtaaaaggtaccagctctgtcgagtccaggagtgccccccagacgggcgctcatttcgggaggagcaatgtgtgagttttaacagccacgtgtataacgggagaacccatcagtggaagcccctgtatccagacgattacgtgcacatcagctccaagccctgcgatctgcactgtactactgtggatgggcagcgccagctaatggtccccgcaagagatgggaccagctgcaagttgacggatctgagaggcgtctgcgtgtccgggaaatgtgagcctatcggttgtgacggggtgcttttcagcacgcatactctggataaatgtggtatctgccaaggcgacgggtcctcctgcacccacgttaccggcaactacaggaaaggtaacgctcatctgggatatagtctagtgacacacatccccgcaggagcccgtgatatccaaatagtggaacggaaaaaaagcgcagatgtgctcgcgctggctgatgaggccggctattactttttcaatgggaactataaggtggactcgccgaagaattttaatatcgccggcaccgtggttaaatacagaagacccatggatgtttatgagaccggcattgaatatattgtcgctcagggaccaactaatcagggcctgaacgtgatggtgtggaatcagaacgggaaatccccttccatcacatttgagtacactctgctccaacccccgcacgagagcagacctcagcctatctactatggtttctctgagagcgcagaatctcagggattagatggggcagggctgatgggctttgtgcctcacaatggcagtctctacggtcaagcttccagcgagagacttggcctggacaaccgactgttcggccatcccggattagatatggagctgggccctagtcagggacaggagaccaacgaagtgtgcgagcaagccgggggcggtgcttgcgagggacctccacgtggtaagggtttccgcgatcggaatgtcactggtactcctctgacgggcgacaaggacgacgaggaggtagacacccattttgcttctcaggaatttttctctgccaatgccatctctgaccagctgctaggtgcagggtctgatctgaaggatttcaccctgaatgagacagtgaacagtatttttgcgcagggcgcccctaggtcttccttagcagagagcttctttgtggactatgaggaaaacgagggagcaggaccatacctgctgaacgggtcatacttggaactgagcagcgacagggtcgccaactcaagctcagaggcgccgtttccaaacgtcagcacaagtctcctcacctccgcagggaaccgaacacataaggccaggacccggcccaaagctaggaagcaaggagtgtctcctgcagatatgtacagatggaagctcagctcccacgagccttgctcggcgacatgcacaacaggagtaatgagcgcttatgccatgtgcgtgcgctatgatggggtggaagttgatgattcttactgtgatgctctcacccgaccggaaccggtgcacgagttctgtgctggccgcgagtgccaaccccggtgggagacatccagctggtctgagtgttctaggacgtgtggggaggggtatcaatttcgcgtcgtgaggtgctggaagatgctttcaccagggttcgactctagtgtttatagtgacctgtgtgaagcagcagaagccgtccgtcccgaagaaagaaagacatgcagaaaccccgcttgtgggccacagtgggagatgagtgaatggtctgagtgcacagctaaatgtggggaacggtccgtcgtaactcgggacattagatgtagcgaggatgagaagctgtgcgacccaaacactcgcccagtgggagaaaagaactgtaccgggcccccatgcgatcggcaatggacagtgtccgattggggaccctgctctggatcgtgcggccagggcaggacaattcgccacgtgtattgtaagacttccgacggacgagtggtgcctgagagtcaatgccaaatggaaactaagcctctcgctattcacccctgcggagataagaactgccccgcacactggctggctcaagattgggagaggtgcaacaccacatgcggtcgaggcgtaaagaaacgcttggtactgtgcatggaattggctaatgggaaaccacagactcggagtgggccagagtgcggcttggcaaaaaaacctccggaggagagcacatgcttcgagagaccatgtttcaagtggtacacgtccccatggtccgagtgcactaaaacttgcggcgtcggagtgcgaatgcgggacgtcaagtgttaccagggcacagatatcgttcgcggatgtgaccccttggtaaaacctgtaggcaggcaggcctgcgacctgcaaccgtgcccaacagaaccccccgatgatagctgccaggatcagcctgggacaaattgcgccctggcgatcaaagtcaacctgtgtggccattggtactatagcaaagcctgttgtcgatcctgtcgcccaccacactcctag

SEQ ID NO: 107280 - DNA, 3183 bp, synthetic construct
  misc_feature 1..3183: note = Description of Artificial Sequence: Synthetic coding sequence
  source 1..3183: mol_type = other DNA
atgctgtttgaagtcggcgaaggcggcggggcaggcgaagaaggaaagggcaggggtcgcccaggacgctcactttgcacccacgccgcccccgcgcgcactgcacacctggcgccatcggcactgcggagcgcgcggcccttcctgtgggaggataacctcctgacccgttcccagggactgcctgacaatcatgatcaacttgtacctgataacctggaggcctgggcacttgctggccctcgggggttgtttcccaaaagaacacttgtgatctggaagcgtataggggccggcctagttgttactgtggcgctacttccaagaatggacggccggtggcaatgtagttgttgggcatggtttttactggttcttgccgtcgtcgctggagacaccgtgtcaacaggctctaccgacaatagtccaaccagtaactcgctggagggcggtacagacgctactgccttttggtggggggagtggacaaaatggactgcctgttctcgttcctgtggtggaggggtcacctcccaggagcggcattgtctgcagcagcggaggaagagcgtgccgggaccagggaataggacttgcaccggcaccagcaagagataccagttgtgcagagtgcaggagtgccctcccgatgggaggtcgttccgcgaggagcagtgcgttagtttcaacagccatgtgtacaacgggaggacacaccaatggaagccactctaccccgatgattatgttcatatatcatccaagccttgcgatctgcactgcactacagtggatggacagcgtcagctgatggtgccggctagagacggtacctcctgtaagctgacagacctgcgaggggtgtgtgtgtccggcaagtgtgaacccataggatgcgatggcgtcctgttttccactcataccttagataagtgcggcatctgccagggtgatggtagttcctgcacccacgtgaccgggaattaccggaagggtaatgcacacctggggtattccctggtgacgcatatacccgcgggagctcgggacatccaaattgtcgaaaggaaaaagagcgcggacgtcctcgctctggccgatgaagctggttactacttctttaatggaaattataaggtggattcccccaagaactttaatatcgcgggtacagttgtcaagtatcggcggcccatggatgtttacgagaccggtattgagtatatcgttgcgcaaggcccaactaatcagggcctgaacgttatggtctggaaccagaacggcaaaagcccctctatcactttcgagtacaccctgttgcaaccaccgcacgaatctagaccacagccaatctattatggcttcagcgaatctgccgagagtcaggggcttgacggtgctgggctgatgggctttgtacctcacaatggctccctctatggacaagcaagctctgagagactgggcctagacaaccgcctatttggtcaccctggcttggacatggagcttggaccctcccaaggccaggagacaaatgaggtttgtgaacaagcaggtggcggcgcttgtgaagggcccccccgtgggaaggggttccgtgaccggaacgttaccggaacgccactgacaggggataaagacgatgaggaggtggacacccacttcgcctcccaggagtttttctccgctaatgccatcagcgaccagctgcttggtgctggctccgatttaaaggatttcaccctgaacgaaaccgtgaatagtatctttgcacagggcgcgcctcgctcctctttggctgagagcttcttcgtcgattatgaagagaacgaaggcgccgggccctatttgctaaacggaagttatctggagctcagcagtgaccgcgtggcaaactcttcctcagaagcaccattccctaatgtgagcacgagcttgctcacatcagccggaaatcggacccacaaggctcgtacaaggcctaaagctcgcaagcagggagtgtcaccagcagatatgtaccgatggaagctctccagtcatgaaccatgctctgcaacttgcacgacaggcgtgatgagcgcctatgctatgtgcgtccggtacgatggagttgaggttgatgacagctattgtgacgctctgactaggcccgagcctgtgcatgaattctgcgcaggcagggaatgtcagccacgctgggaaacttctagctggagtgaatgctcgaggacatgcggtgaaggataccagttcagggtggtgcgttgctggaaaatgttgtcaccaggtttcgacagcagtgtgtacagcgatctttgtgaggcggcggaggcggtgaggcccgaggaacgcaagacatgcaggaaccccgcctgtgggccccagtgggaaatgtctgagtggtccgaatgcaccgccaagtgtggggagcggagcgtggttaccagagacattcgctgtagtgaggacgagaagctgtgcgacccaaacacccggcctgtaggcgagaaaaattgcaccgggccgccctgcgacaggcagtggacggtcagcgactggggaccctgtagcgggtcatgtggacagggccggactattcgccatgtgtactgcaagacctctgatggacgtgttgtccccgagtcccagtgtcagatggaaactaagcctctggccattcatccttgcggcgacaagaattgccccgcccattggctggctcaggattgggaacgttgcaacactacttgcggccgtggtgttaaaaaaagattggtgctctgcatggagctcgcgaacgggaagccacaaacacgctcagggcccgagtgcggcttggccaagaagccacccgaagaatccacctgctttgaacggccctgctttaaatggtatacatccccttggagcgagtgtactaaaacctgcggcgtcggcgtcaggatgagagatgttaaatgctaccaagggacagacatcgtgagggggtgcgaccctttagtcaagccggtaggcaggcaggcctgtgatctgcagccctgtcccacagaaccacccgacgattcatgtcaggaccagccaggcacgaactgcgcccttgccatcaaagtgaacctatgtggacactggtattattccaaagcttgctgtcgaagttgccggccaccacacagctag

SEQ ID NO: 107281 - DNA, 5076 bp, synthetic construct
  misc_feature 1..5076: note = Description of Artificial Sequence: Synthetic coding sequence
  source 1..5076: mol_type = other DNA
atggcctcctggacctcaccctggtgggttctgatcggcatggtgttcatgcacagccccctgccacagacaacggccgagaaatcacccggcgcatattttctgccagagtttgcactgagccctcagggatctttccttgaggacacaacgggcgagcagtttttaacgtaccggtacgacgaccagacctctcggaatacgagaagcgatgaagacaaggacggtaactgggatgcttggggagattggagtgactgttcccgtacctgcgggggcggagccagttactctttgcgccggtgcctgacagggagaaattgtgagggtcagaatattaggtacaaaacatgtagcaaccacgactgtccaccggacgccgaggatttccgcgctcagcagtgcagcgcctacaatgacgtccagtaccagggtcattactatgagtggttgcctagatataacgatccagcagcaccttgtgccttgaagtgtcatgctcaaggacagaatctcgttgtggaactggctcccaaagtgttagatggaacccggtgtaacactgactccctggatatgtgcatttccggcatttgccaggcagtgggctgtgatcgccagctgggcagcaacgcaaaggaagacaattgcggggtgtgtgcgggcgatggatctacctgccgtctggtgagagggcagtcgaagagtcatgtctccccagagaagcgggaagagaacgtcatcgcggtgcctcttgggtctcgcagtgtgcgaataaccgtgaaaggccccgcgcacctgtttatagaaagcaagactctgcagggatctaagggggaacattctttcaactcgcccggcgttttcttggtggaaaatacgactgtggaattccagcgggggtcagagcggcagacattcaaaatccccggtcccctgatggccgatttcatctttaaaacacgatataccgccgctaaagactccgtggtgcagtttttcttttatcagcctatcagccaccaatggagacagaccgatttctttccttgtactgtgacatgcggtggagggtaccagctcaatagcgctgaatgcgttgacatccggctcaagcgagtggtacccgatcattactgtcactattacccagagaatgtgaagcccaagcccaagctcaaagaatgcagcatggacccttgccccagtagtgatggttttaaagaaatcatgccatacgatcactttcagccactgcctaggtgggagcacaatccgtggactgcctgcagcgtgtcctgcgggggcggcattcagcgtcgctccttcgtgtgtgtggaggaatcgatgcatggggagattctgcaggtggaagagtggaaatgtatgtatgccccaaagccaaaggtcatgcagacctgcaacctgttcgattgccccaagtggattgcgatggagtggagtcagtgcaccgtaacatgtggccggggactgcgctatagggtggtactgtgcattaaccatcgaggggaacacgttggtggctgtaatccgcagttaaagcttcatattaaggaggagtgcgtgattcctataccatgctacaaacccaaggaaaagtcacccgtggaggccaagctgccctggctgaagcaggctcaggaactggaggaaactcggatcgccaccgaggagccgaccttcataccagagccttggtctgcttgctcaacgacttgcggcccaggagtgcaggttcgagaggttaaatgccgggtgctgctgactttcactcaaacagagacggagcttcctgaggaggagtgcgaaggtccaaaactgcctacggagagaccatgtctgctggaggcttgcgatgaatcacccgctagccgcgaactcgatatccccctgcccgaagactccgagacgacatacgactgggaatacgcagggtttaccccctgtacagcaacttgcgttggaggacatcaggaggctattgcggtgtgtttgcacatccaaactcagcagacggtgaacgactccctttgtgacatggtgcatcgcccccccgccatgtcgcaggcttgcaatacagagccctgtcctccccggtggcatgtcggttcctggggcccctgcagcgcaacgtgcggggtaggaatacagaccagagatgtttactgcttgcacccaggggagactcccgctccgccggaagagtgtagagatgagaagccccatgccctgcaagcgtgcaatcaatttgattgtccacctggttggcatatcgaagaatggcagcagtgcagtaggacctgtggtggaggaacgcagaataggcgggtgacctgtagacaactgctaactgacggatctttcttgaacctctccgatgagctgtgtcagggtcctaaggcctcttctcacaaaagctgcgcccggacagattgccctcctcacctcgccgtgggggattggtcaaaatgctctgttagctgtggagtcggcatccagcgccgcaagcaggtgtgtcagagactggccgccaagggtcgacggatacctctgagtgagatgatgtgccgcgacctgcctggattaccacttgtgagatcctgccagatgcccgaatgcagcaagataaagagtgaaatgaaaacaaaacttggggaacagggacctcagatcctctccgtacagcgggtctacatccaaacacgggaagaaaagagaatcaatctgacaattggatccagagcgtatctgctgcctaacacctccgtgataataaagtgtcccgttcggaggttccagaagtccttgatacagtgggagaaagatggaagatgcttgcagaacagcaaacggctaggcatcactaagtctggcagtctgaagattcacggactcgccgcccccgacatcggtgtttatcgatgcatagcagggagcgcccaagagacagttgtacttaagttaattggaactgataatcgacttatcgctaggcctgctctgcgggaaccgatgagggagtatccggggatggaccattccgaagccaactctcttggcgtcacctggcataagatgaggcagatgtggaacaacaaaaacgacttgtatttggacgacgaccatataagcaaccagccttttttacgagccctgttaggtcactgcagtaattccgcgggctctactaactcctgggagcttaagaataaacaattcgaagccgctgtaaagcagggagcctattccatggatactgcgcagttcgatgagctcattcggaatatgtctcagttgatggagactggtgaagtgtctgacgatcttgcttctcaacttatttatcaattagtcgccgagctggccaaagcccagcccactcacatgcaatggcgggggatacaggaagagacaccccctgccgctcagttgaggggcgagacaggctcagtttcgcagagctcacatgctaagaactctggcaaattgacatttaagcctaaggggcctgtgctgatgcgtcagagccagccacccagtatttctttcaacaaaacaatcaattctcgaatcggaaacaccgtctacattacgaagagaacagaagtcataaacattctctgtgacctgataactccctcagaggcaacttacacatggacgaaggatggaacactgctgcaaccatccgttaaaatcatactggacggcactggtaaaattcaaatccagaacccaacccggaaggaacagggaatatacgaatgtagcgtggccaatcacttaggatccgatgtagagtcctccagcgtgctttacgctgaggcacccgtaatcctaagtgtagagagaaacattacaaaacctgaacacaatcacctctcagttgtggtcgggggtatcgtggaggctgccctaggagccaatgtcactattcgttgccctgtaaaaggagtaccccagcccaatatcacttggcttaagcggggaggctctttatcaggtaatgtgtctctcctgttcaatgggagcctcctgctccagaacgtctcactcgaaaacgaagggacatatgtgtgtattgctaccaacgccctgggcaaggctgtcgccacctccgttctccacctgctggagcgaagatggcctgaaagccgaatcgtattcctccaaggccacaaaaagtacatcttacaggctacgaatactaggaccaactctaacgatccaacaggtgaaccaccaccacaggagccattctgggagcccggcaattggtcccattgcagcgccacttgcggacatttaggtgctaggattcagcgaccccagtgtgttatggccaacgggcaggaagtgtccgaagccctttgcgaccacttacagaagcctcttgcagggtttgaaccgtgcaatattcgggactgccccgccaggtggttcacctccgtttggagccagtgcagtgtctcatgcggagagggttatcattcccggcaggttacttgtaagcgcacaaaggccaacggcaccgttcaggttgtgtccccacgggcttgtgcaccgaaggaccgcccccttgggcgcaagccctgctttggtcacccttgtgtccagtgggaacctggaaaccggtgcccgggacggtgtatgggtcgcgctgtccggatgcaacaaaggcacacagcttgccaacacaattcgtccgacagcaattgcgacgatcggaaaagaccaactctaaggcgaaactgtacgagtggtgcttgcgatgtgtgttggcacactggcccttggaaaccatgcactgccgcatgtggtaggggtttccagagtcggaaggtcgactgcatccatactcggagctgtaaaccagtggctaagagacattgtgttcagaaaaagaagcctatctcctggagacattgtctgggcccctcatgtgacagagactgtactgatactactcactactgcatgtttgtcaaacacctgaatctgtgctccctggatcgatacaaacagcgctgctgtcagagctgtcaggagggctag

SEQ ID NO: 107282 - DNA, 3225 bp, synthetic construct
  misc_feature 1..3225: note = Description of Artificial Sequence: Synthetic coding sequence
  source 1..3225: mol_type = other DNA
atggagaattggacaggaagaccctggctctacctgctgttgctactctctctgccgcagttgtgcctggatcaagaggtgctctcaggccactcattgcaaaccccaactgaggagggtcagggtcccgaaggagtctggggaccgtgggttcagtgggcctcctgttctcaaccctgtggcgtgggggttcagcgccgctcacgtacttgtcagcttcccacggtacagctccacccaagcctgcccctccccccccgacccccacggcatcctgaagctctcttaccacgcggtcagggtccccgcccccagacttcacctgagaccttgccactgtatcggactcagtcaagggggcggggcggaccacttaggggtcctgcctcgcatcttggccgtgaggagacacaggagatccgcgctgcaaggagaagtaggttgcgagacccaataaagccagggatgttcgggtacgggcgggtgcccttcgctcttccattgcaccgtaaccgtcggcaccctcggagtccaccaaggtctgaactgtccctaatcagcagccgcggcgaggaagcgatcccctcccccactccgagagcagagcccttctcagccaacggcagtccccagacggagctgcctccgaccgaactcagtgttcacacaccgtcccctcaggcagagccgctgagccctgaaactgcacagacagaagtagctccacgtacaagacccgctcctctccggcaccaccctcgcgctcaggcgtccgggacggaaccaccaagtcccacccactccctgggtgaaggaggcttcttccgtgcatcacctcaaccgcggcgccctagctcccaagggtgggcgtccccacaggtagccggcagacgcccagatcccttcccatctgtgccgcggggacggggccaacaagggcaaggcccgtggggtaccggggggacacctcatggccctaggctggagcccgaccctcagcatcccggggcctggctaccgctcctctccaacggcccacacgcttccagcctgtggagcttgttcgcccccagcagtcccatccccaggtgctccggcgagtcggaacagctaagggcctgctcccaggcaccctgtcccccagaacagcctgaccctcgcgcattgcagtgcgccgcgttcaactcacaggagttcatggggcagttgtatcagtgggaacctttcactgaagtccagggttcccagcggtgtgagcttaactgcagaccacgaggattccgcttctacgtgcgccacacagaaaaggtgcaagatggcactttatgccaacccggcgcccctgatatctgcgtcgcagggcgatgtctaagccctggctgcgatggaattttgggatcaggccgacgcccggatgggtgcggcgtctgcggaggcgatgattctacctgtcggctggtgtccggtaacctgacggatcgtggagggccactagggtatcaaaagatactctggatcccagcaggagccctcaggctgcaaatcgcacaactgagaccctcatctaattatctcgcactgagaggcccaggcgggcgcagcatcatcaacggaaactgggctgtagaccctcctggcagctacagagcgggcggcaccgtgtttaggtacaatcggccccctcgggaggaggggaaaggagagagtctatcggccgaagggccaaccacacagcccgtagacgtctacatgatctttcaagaagaaaatcccggggtgttttaccagtacgttatttccagtccaccaccgattctagaaaatccaaccccagaaccccctgtcccccaactgcagcctgagattctcagggtcgagccacccctggcaccggcaccacgacccgctagaactcccggcaccctgcagcggcaggtgagaatcccacagatgcctgcccctccccacccacgcacgccccttgggtcacctgctgcctactggaagagggtaggccactcggcctgttcggcatcgtgcggaaaaggtgtgtggcgacccattttcctctgtatttccagggaatctggcgaggagctggatgagagaagctgtgccgccggagccagacctccagcttcacctgagccctgtcacggcactccctgtccaccttactgggaagcaggggaatggacgagctgttctaggtcttgcggcccaggaacccagcacaggcagctgcagtgtagacaggagttcgggggagggggttcaagcgtgccccctgagcgatgtggtcacctgcccagacccaacatcacacagagctgtcagctgagactttgtggtcactgggaggtgggttcaccctggagccagtgctcagttcgctgtgggaggggacagcggtctagacaggtgaggtgcgtgggcaataatggagacgaagtcagcgaacaggaatgcgcaagtggtcctcctcagccaccttctagggaagcgtgcgatatggggccatgtaccacggcgtggttccattccgactggagctccaagtgctcagcagagtgcggtacgggaatccagcgtaggtcggttgtttgtctgggttctggggctgcccttggtcctgggcagggggaagccggagctgggaccggacaaagctgccctacggggtcacggcccccagatatgcgtgcctgtagcctgggcccttgcgaaagaacctggaggtggtacaccgggccctggggcgaatgctcgtccgaatgtggatcaggcacacagagacgagatatcatctgcgtctcaaagctcggcacagagtttaacgtaacgtccccctcgaactgttcacacctgcctagacctcctgcccttcagccatgccagggccaggcctgccaggatcgatggtttagcacgccctggtctccttgcagtcggtcctgtcagggcggcacacagacacgggaggtgcagtgcttgagtacaaatcaaacactgtccactcgatgccctccacagctgcgcccttcaagaaaaaggccatgtaactcccaaccctgcagccagcgccccgacgatcagtgcaaagatagcagcccccactgtccactggtcgtgcaagcaagactgtgcgtctatccctattacactgccacatgctgtcgcagttgtgcccacgtgctggaaagatcaccacaagaccctagctag

SEQ ID NO: 107283 - DNA, 3225 bp, synthetic construct
  misc_feature 1..3225: note = Description of Artificial Sequence: Synthetic coding sequence
  source 1..3225: mol_type = other DNA
atggagaactggacgggacgtccctggttatacctcttgcttctcctgtccctgccccagttgtgtcttgaccaggaagtgctctcaggtcatagcttgcagactcccaccgaggagggacaggggcccgaaggcgtgtggggaccctgggtccaatgggccagctgcagtcagccttgcggggtgggtgtgcagaggcgctcgcgtacctgtcaactcccaacagtgcagctgcacccctcgctacccttgccaccgagaccaccccgacaccccgaagccctgctaccccggggtcagggccccaggcctcagacatcgcctgaaaccctgcctctgtatcgcactcagtccagaggacgtggaggccctcttcggggccctgcttctcacctgggtagagaggaaacacaagaaatacgcgccgcccggcggtccagactgagagacccaataaagcctggcatgtttgggtacggacgcgtgccattcgcattgcctctgcacaggaatcgccggcatcctcggtcccctcctaggtcagagctgtcattgatatcttcacgcggggaagaggccattccgtccccaacacccagagcggagcccttcagcgccaacggatctcctcaaacagagctgcctcctacggaactgtctgtgcacaccccatcaccccaggccgagccattaagccccgagacagcacagactgaggtggccccccgaacaagacctgctcccctgcgccatcatccaagagcacaggcatccggcactgagcctccctcccccactcatagtcttggagagggaggtttctttagagcatccccacagcccagacgcccaagctcacaaggttgggcttctccccaggtggccggtagacgcccagacccctttccaagcgtgccaagaggcagaggacagcaaggacaaggcccctggggcaccggaggaacaccacatgggcctcgtttagagcccgacccacagcatccaggcgcctggctgcccctcctttcaaacggcccacacgcgtcgagcctctggtccctgttcgctccatctagtccaatcccccgctgctcgggggagtctgaacaattgagagcctgttcccaggctccatgccctcctgagcagcccgatccgcgtgctttacagtgtgctgcattcaacagtcaagaattcatgggccagctctatcagtgggagcccttcactgaagtccaggggagtcagcgttgcgagctgaactgtcgacctcggggcttccgcttttacgtccgacacactgaaaaggtccaggacggtacactctgccagcccggagcacccgacatttgcgttgccggaagatgtctgagcccaggctgcgacgggatcttagggtctggacggaggcccgacgggtgcggagtttgtgggggcgatgatagcacatgccgtctcgtgtctggaaacctgactgataggggcggccccctgggctaccagaaaatactttggatccccgctggggctctgagactccagatcgcacagctgcgtccctctagtaactaccttgcgcttcggggccctggaggccggtccatcatcaacggaaattgggccgtggatccgcctggaagttaccgagcagggggaacggtgtttaggtataatcgtccccctcgtgaggagggaaaaggggagagtctgtcagcggagggccctacgactcagccagtcgatgtgtatatgatttttcaggaggagaatccaggtgtcttttatcagtacgtcatttcctcccctccacctatccttgaaaacccgacacccgaaccaccagtcccgcagctgcaacctgaaattctgcgggtggaacctcccctggcccctgcgccacgcccagctcgtacaccggggaccctccagagacaggtgcggatcccacagatgcctgcaccgccgcaccctaggaccccccttgggtccccggcggcctactggaagagggtgggccactcagcttgttctgccagctgcggcaagggagtatggagaccaattttcctgtgcatttccagggagagcggagaagagctggatgagcggagttgtgccgccggtgcccggccacccgccagccctgaaccttgtcacggcaccccatgccctccatattgggaggccggagaatggacatcatgcagcaggtcctgtgggcccggtacacagcatcgccaactccagtgcaggcaggaattcggcggtggaggatcttccgtcccacctgagagatgtgggcacctgcctcggcctaacattactcagtcttgccagttgcgcctctgcggtcattgggaggtcggatccccgtggtcccagtgcagcgtccgttgtggtaggggacagcgcagcaggcaggtgcgatgcgtaggcaacaacggggatgaagtctccgagcaggagtgcgccagtgggccgccacagcctccatcaagagaagcatgcgacatgggtccctgtaccactgcctggttccactcagactggtccagcaagtgctctgccgaatgtgggaccgggatccagcgtagaagcgtggtctgtttgggcagcggggctgcactgggtcccggccaaggtgaggcaggcgcaggcacaggccagagttgtccaaccggatctcggcccccagatatgagggcttgtagtcttggcccgtgtgaaaggacatggcgctggtatactggcccgtggggagaatgctcatccgaatgcggctccgggacgcagcgacgagatattatctgcgtgagcaagctcggtactgagttcaatgtgacaagtccgtccaactgcagccacctgccaagacctccggccctgcagccctgccagggtcaggcctgtcaggaccggtggttttcaacgccttggagtccctgctcacgcagctgccagggcgggacacaaactagagaggtccagtgtttatccaccaatcagaccctgtcaacccgatgtcccccgcaattgcgaccttcacgaaagcggccatgcaatagccaaccttgcagccagaggcccgacgatcaatgtaaggattcttctccgcactgtccactagttgtgcaggcgagactctgcgtgtacccttactacacagccacgtgttgccgctcctgtgcccacgtcttagagaggagcccacaggacccatcctag

SEQ ID NO: 107284 - DNA, 3294 bp, synthetic construct
  misc_feature 1..3294: note = Description of Artificial Sequence: Synthetic coding sequence
  source 1..3294: mol_type = other DNA
atggaaaattggacaggtaggccctggctgtatctactcctgctgctgtcactgcctcaactgtgcttagaccaggaggtgttaagtggtcacagcctgcagaccccaacggaggagggacaggggcctgagggagtgtggggtccttgggtccagtgggcctcttgctcccagccctgcggggtgggcgtacaacgacggtctcgcacctgtcagttgcccaccgtacagctgcacccctctctgccactgccaccacggccacctaggcacccagaagccttgctgccgagaggacaggggccccgaccccagacgtccccagagacattgcctctgtataggacacagtcacgcgggagaggagggcctttacgcgggccagctagccacctaggtcgggaggagacccaggagatccgtgctgcaagacggagccgcctgcgcgatccgattaagcctggtatgttcgggtacgggcgcgtgccattcgctctccccttgcaccggaatcggaggcatccaagatcacccccaagaagcgagctcagtttgatctctagccgcggcgaagaggcgattccaagccctacccctagggccgaacctttcagtgctaatgggtcaccccaaaccgaactgccccctactgaactgtcagtacacacaccttctccacaagcagaaccccttagtccagaaaccgcccagacagaagtcgcgccccggacacgacccgcaccattgaggcaccatccccgcgcccaagcatctggtaccgagccacccagcccaacacactccctgggcgaaggaggattcttccgcgcaagtccccagccaagacgcccgagttcccagggctgggcctcaccacaagttgccggaagacgtccagatccattcccctctgttcctagaggccgtggacagcagggtcaagggccatggggaacgggtggtacccctcatgggccccgactggagccggaccctcagcatccgggggcctggttgcccctcctgtctaacggaccacatgcttcatcgctgtggagcctgtttgccccaagttcccccattccacggtgttccggggagtccgaacaactgagagcttgttcgcaagcaccttgtccacccgaacagcccgatcccagagcgctccaatgcgctgctttcaattctcaagaattcatggggcagctttaccagtgggaacccttcaccgaggcacctctcctacccctacgacacgccttcttccttctccccggtgctgggagcggagactcaacgggcgtgcagggctctcagcgctgcgaactaaactgcaggccaagggggtttcgcttctacgtgcggcatacagaaaaagtccaggacggcactctgtgtcagccaggggctcccgatatctgcgtggctggaagatgcctcagtccagggtgcgacggaatcttgggcagcgggaggcgccctgatggctgcggggtttgtggcggcgacgatagcacctgccgcctggtatccggcaacctgacagacagagggggccctttgggctatcagaagatactttggattcccgcaggagccttgcggctgcagatagcccagctgaggcctagcagcaattatctggctctgagaggaccgggaggccgctcgatcattaatgggaattgggccgtagatccccccggctcatatcgggccgggggtacagttttccggtacaatcggcctccaagggaagaaggaaaaggagaatcactctccgcagaaggacctaccacacagcctgtcgacgtttacatgatcttccaggaggagaacccaggagtcttttaccagtacgtgatatcctcgccaccccccatcctcgagaaccccacacctgaacctcctgtccctcaattacaaccagaaattctgcgggtcgaaccacctttagccccagctcctcgacctgcccgtactcctggcacactccagcgtcaagtgcgaataccacagatgcctgcccccccccaccctcggacgccattaggcagtccagccgcttactggaagcgggtgggccactccgcctgcagcgcctcttgtggtaaaggagtgtggagacctatttttctgtgtatctctcgggagtccggtgaagagttggacgagaggtcatgtgccgctggagctcgcccccctgcttcacctgagccatgccacggtaccccctgtcctccttactgggaagcgggcgagtggaccagctgctcgagatcttgtggcccaggcacgcaacatcgccagctccagtgtagacaagaattcggcggtgggggatcgagcgttccgccagagcggtgcggtcatctgcctagaccgaatataactcaatcatgtcagctcaggctatgcggccactgggaagttggatcaccatggagccagtgttccgtgcgctgtggacgcggccagcgttctcgccaagttcgatgtgtaggaaataacggtgacgaagtaagcgagcaggaatgcgctagcggtccgccccaacctccttccagggaggcctgcgacatggggccctgcacgaccgcctggttccattctgactggagcagcaaatgctcggccgagtgcggaaccggaatacaacggcgtagtgtcgtctgtctgggctctggcgccgccttgggtccgggccagggagaggccggcgccggaacaggacagagctgtccgacgggctcacggcccccagacatgcgcgcgtgtagcctggggccgtgcgagaggacgtggaggtggtacaccggaccatggggtgaatgttcctccgaatgcgggtcaggcacccaaagacgcgatatcatatgcgtatctaagctgggcaccgagtttaacgtgacttccccctcaaactgtagccatttgccccggccgcccgcactgcagccctgccagggacaggcatgccaggaccggtggtttagtacaccttggtctccctgctcccgctcctgccagggggggacacaaacgagggaggttcaatgtctctcaacaaaccagaccctcagtactaggtgcccaccccagcttcgcccctcgagaaagcggccgtgtaactcccagccttgctcacagcgtcctgatgatcagtgtaaagactcatctccccattgccctttggtggtacaggcaaggctctgcgtctatccctattatacagctacgtgctgccgatcctgcgcccatgtgctcgagcggagccctcaggacccaagctag

SEQ ID NO: 107285 - DNA, 2634 bp, synthetic construct
  misc_feature 1..2634: note = Description of Artificial Sequence: Synthetic coding sequence
  source 1..2634: mol_type = other DNA
atggaaaactggaccggtagaccctggctgtacctactgctgctcctctccctgccccagctgtgtctggaccaggaggtgctcagcgggcatagcctgcaaacccccacagaggagggacagggaccagagggagtgtggggcccctgggtgcagtgggcaagctgtagtcagccatgcggggtgggtgtccagcgcaggtccaggacttgccagttgccgaccgtacagctccacccgagtctgccactgccaccgcgacctccccgacatccagaggccctactccctagaggacaagggcctaggccacagacctctccagaaaccctgcctttatatcgtacgcagtctcgcggacggggcggccctcttcgaggaccggcctcacacctgggaagagaggagacacaggagatcagagcggcacgtcgatcacggctgcgggaccccatcaagcctggcatgttcgggtacggccgcgtgcccttcgcactacctctgcacagaaatcggcgccatccccggtccccacccagaagtgaactttctcttatatcatctaggggcgaggaagccattccttcccctacccctcgagccgagccgttctccgccaacggctctccccaaacggagctccctcctacagagcttagcgtacacacgccaagcccacaagctgagccactttctcctgagaccgcgcagacggaagtggctccccgcacccgcccagcccccttgaggcatcacccacgggctcaggctagtggaactgagccccccagtccaacgcacagccttggcgagggaggttttttccgagcatcaccacagccgcggcgtccgtcaagtcaaggctgggcctcccctcaggtggcaggaagaagacctgatccttttccttcagtgccgcgtggacgcggtcaacagggacaaggcccgtggggcaccggaggcacgccccacggtcccaggctggagcccgatccccagcatcctggtgcttggctgccactcctctcaaacggaccacacgcctcctcgctgtggagtctgttcgcacccagtagccctatcccccgatgtagcggagaatcagagcagttgcgagcctgttctcaggccccttgccccccagagcagccagatcccagggcacttcagtgcgccgccttcaacagccaggagtttatgggtcaactctatcagtgggaaccattcacggaagttcagggctcacaacggtgcgaattaaactgtcggccaagaggatttcggttttacgtgaggcataccgaaaaagtccaggatggaactctatgccaaccgggagctcccgacatatgcgtggctggccggtgcctctctccaggttgtgacgggatcctgggctcaggacgccgtcctgacggctgcggcgtgtgcggaggcgacgactctacttgcaggctggtgtccggtaatctcacggacagagggggacctttgggctaccagaagatcctgtggattcccgctggtgccctgcgactgcagatagctcaactgcgccccagctctaactacctggctttaagggggcctggcgggcgctccattattaatggaaactgggccgtcgatcccccaggctcttatagggccggaggtaccgtgtttagatacaacaggcctccaagagaagaaggcaagggggaatctctgtcggccgaggggcctaccacgcagcccgtggacgtgtatatgatttttcaagaggaaaatcctggggtcttttatcagtatgtaatttcctctccacctcctattctagaaaaccccacacccgagcccccagttcctcagctgcagccagagattcttcgggtggagccgcctttggctcctgccccccgcccggctaggacgcctggcacgctgcagcgccaggtccggatcccccaaatgcctgcccctcctcatcctagaacgccattgggctcccccgctgcctactggaaaagagttggccatagcgcctgttctgcctcatgcggcaaaggggtatggcgtcccatattcctgtgtatttctagagagtcaggagaagagctcgacgagcggtcttgtgccgccggtgcacggcccccagcgtctccagagccttgtcatggcaccccatgtccaccatactgggaggctggggagtggacctcttgttctcgatcttgcgggccaggcacccagcaccgccagctccagtgtagacaagagtttggcggcgggggctcaagcgtcccgcccgagaggtgcgggcacctgcccaggccaaacatcacgcagagctgtcagctgcgcctgtgtgggcactgggaggtgggaagcccatggtctcaatgctctgtcaggtgcgggcgggggcagcgcagcagacaggtccgctgtgtgggcaataatggagacgaggtgtccgagcaagagtgtgcatctgggccccctcagccgccatcccgggaggcctgcgacatgggcccgtgtaccactgcttggttccactctgattggagctcaaaggtgagtccagagccgcctgctatcagctgcatcctgggcaaccatgcacaggatacctctgctttccccgcttag

SEQ ID NO: 107286 - DNA, 1311 bp, synthetic construct
  misc_feature 1..1311: note = Description of Artificial Sequence: Synthetic coding sequence
  source 1..1311: mol_type = other DNA
atgggcagccttgcccttgccggagttctgatggcagtcgaaagcgttggcgttatgatcttgccagtggccctgtttcgcggcaccagcctgaccgagggcgccccctgggctataagacggtcctgtgggtttcaaagagagccgtgtgggtctaggttaccaagctcagggctggctcccacgacatggcatttcgtggctctgggcaggagtatcataaatggcaactgggctgtggacccccccggctcatatcgcgccggcggaacggttttcaggtacaatcgaccaccaagggaggaagggaagggtgagtccttgtccgccgagggccctaccacgcaaccagtggatgtgtacatgatcttccaggaagagaaccccggcgttttttaccagtacgtgatcagcagccctcccccaatccttgagaaccctacaccagagccacccgttccacagctccagccagaaatcttacgggtagaaccaccactggctcctgcacccagacccgctcggacccccggcaccctccagcgacaggtcagaatccctcagatgcccgcccccccacaccccagaactccgttaggatcccctgccgcatattggaagcgcgttgggcactctgcctgttccgcttcctgcggcaaaggtgtgtggcgcccaatttttctttgtatcagccgagagagcggcgaagaactggatgagcgcagctgcgccgcaggggcgaggcccccagcctcaccagagccttgccatggcaccccctgccccccatactgggaagcaggcgagtggacttcttgttctcgctcctgcggccctggcacacagcatagacagttacaatgtcgccaggagtttggagggggggggtcatctgtgccccccgagagatgcggacacttaccaagaccaaacataactcagagctgccaactgcgcctatgcggacactgggaagttggctctccatggagccagtgcagtgttcgttgcggtaggggtcaacggagccggcaggtccggtgtgtggggaacaatggggatgaggtgtccgagcaagaatgcgcatcaggtccacctcaaccaccatccagggaggcttgcgacatgggcccgtgcaccactgcctggtttcactcagattggtcaagcaagtgctcagctgagtgtggcacaggaatccagaggaggtcagtggtttgtctcggaagtggcgctgctctgggtcctgggcagggcgaggcaggcgccgggaccgggcagagctgcccaacaggaagtagacctccctag

SEQ ID NO: 107287 - DNA, 2130 bp, synthetic construct
  misc_feature 1..2130: note = Description of Artificial Sequence: Synthetic coding sequence
  source 1..2130: mol_type = other DNA
atgcctggtattgacaaacttcctattgaggagacattagaggacagcccacaaacccggagcttgctgggagtgttcgaggaggatgctaccgctatttcaaattacatgaaccagctataccaggctatgcatcgaatttacgacgctcagaacgagctttccgccgccacgcatttaacctccaagctcctgaaagaatacgagaagcaaagatttccccttgggggggatgatgaggtcatgtctagtaccttacagcagttttcaaaagtgatcgacgagttatcttcctgtcacgccgtcctatccacccagttagcggatgctatgatgttccccataacccagttcaaagaaagagacctcaaagaaatactgacgcttaaggaagtctttcagatagccagtaatgatcatgacgcagctattaatcggtactcacggctgtcaaaaaagagggaaaatgataaggttaagtacgaggtcacagaggatgtctatacaagtagaaagaagcaacaccaaaccatgatgcactacttttgcgctctaaatactctgcagtacaagaaaaaaatcgcactcctagagcctctgctggggtacatgcaggctcagattagtttctttaaaatggggtctgagaatctcaacgagcagctagaggagtttctcgctaacatcgggacaagcgtgcagaacgtgcgcagagagatggattcggatatagaaacgatgcagcagactatagaggatttggaggtggcctccgatccactctacgttccagatcctgacccgactaagtttccagtaaacaggaatctgactaggaaggccggctacctcaatgcaaggaataaaacaggcctggtttcttccacttgggatcggcagttttattttacccagggcggtaatctgatgagccaagctcgaggggatgtcgccggcggtttagccatggatatcgacaactgctcagtgatggccgtcgactgcgaagaccgccggtactgcttccagatcacaagctttgatggaaagaagagctccattttacaggccgaaagcaaaaaggatcacgaggaatggatctgtaccatcaacaatatcagcaagcaaatctacttatcagaaaaccctgaggagacggcggcccgagtcaatcagagcgctctcgaggctgtcacccctagcccatcatttcagcagcgccacgaatccttgaggccggcggctgggcaaagcaggcctcctacagctcgcacaagcagcagcggctccctcgggagcgaatcaaccaatcttgccgctctgtctctagactccttggtcgcccctgacacacctatacagtttgatattatctctccagtgtgtgaagatcagcccggacaggccaaagcattcggtcagggaggcaggcgcaccaacccgtttggggaatcaggtgggtcaacaaagtccgagaccgaagattccattcttcatcaactgttcatcgtgcgctttttgggctcaatggaagtgaagagcgatgaccatcctgatgttgtgtatgagacaatgcggcagatcctggctgcccgcgccatccacaatattttccggatgacggagtcacacctactggtgacatgtgactgtttgaaactgatagacccacagactcaggtcacgaggttgactttccccctgccctgtgttgtgctgtacgctacccaccaagaaaacaagcggctgtttggcttcgtccttcgtacatcgtcgggcagatcagaatctaatcttagttccgtgtgctacatttttgagtccaacaacgagggggagaaaatttgcgacagcgtgggactggccaaacaaatagccttgcacgccgagctcgaccgccgagcatctgagaagcagaaagagatagaaagagtgaaagagaagcaacagaaggagctcaacaaacagaagcagattgagaaagatctggaagaacaaagccggttaatcgctgcttcttctcgtcctaaccaggctagttcagaagggcagttcgttgtgctgtcatcctcccaatccgaggagtcagacctgggggaagggggtaagaagagagaatccgaggcctag

SEQ ID NO: 107288 - DNA, 1995 bp, synthetic construct
  misc_feature 1..1995: note = Description of Artificial Sequence: Synthetic coding sequence
  source 1..1995: mol_type = other DNA
atgcccgcagtcgataaactgctcctggaggaagccctccaagatagcccccagacccgatctttgctctcagtgttcgaagaggacgctggcacattgaccgattacactaaccagctgctccaggcgatgcagcgggtatatggagcccaaaatgagatgtgtctagcaacgcaacaattaagcaagcagctgttggcatatgagaaacaaaacttcgcactcggtaaaggggatgaagaggttatcagcacccttcactacttttccaaagttgtcgatgagttaaacctgctccatactgagctggccaaacaactggcggacactatggtgcttcccatcattcaatttagagaaaaggacctgaccgaggtttctactttgaaggacctttttggccttgcgtcgaacgaacacgacttatccatggctaagtacagtagactgccaaagaagaaggaaaacgaaaaagtgaagacggaagttgggaaggaggttgccgcagcacgacgaaagcaacatctttcttcccttcagtattactgtgccttaaacgcattgcagtaccgcaaacagatggctatgatggaaccaatgattggtttcgctcacggtcagattaatttttttaagaagggcgccgagatgttcagcaaaaggatggatagtttcctgagctctgtagccgacatggttcaatctattcaggtggaactagaagccgaagcggagaagatgagggtttcccagcaggaacttctgtcagtcgatgagagcgtctatactcctgatagcgatgttgcagccccccaaataaacagaaacctcatccagaaagccggatatctcaatctacgcaacaagaccggactggtgacaacaacttgggagagactgtacttttttacccagggaggaaatttgatgtgtcagcctcgcggggctgtggccggcggtctgatacaggatctggataactgcagtgtaatggccgttgactgtgaagaccgaaggtactgcttccagattaccacccccaatggcaaatcaggaatcattctgcaagcagaatcacgcaaggaaaatgaagagtggatctgtgcgatcaacaatatcagtagacaaatttacctgactgataatcctgaagccgtggctataaaacttaaccaaaccgcactgcaggccgtcacccctattacctcatttgggaagaagcaggagtcatcatgtccaagccaaaacctcaagaattctgagatggagaatgagaatgataagatcgtgcccaaggccactgccagcctacccgaggccgaggagttgatcgccccgggaacgccaattcagttcgatatcgtactgcctgcaaccgaatttctggaccagaatcgcggctcccgaaggaccaatcctttcggagagactgaagatgaatcatttcccgaagcagaggacagccttctgcagcaaatgttcatcgtcagatttcttgggtcaatggcggtgaaaactgatagtactactgaagttatttatgaggccatgcggcaggtactggccgccagagccattcacaatattttccggatgacagaaagccacctgatggtgacatcccagtccctgcgacttattgacccccagacccaggtgagtagggcaaatttcgaattgacctccgtgacgcaattcgcagcacaccaagaaaataaaagattagtgggattcgttatcagagtgccggagtccacgggcgaagaatccctgagcacctacatttttgaatccaattccgagggcgaaaaaatttgctatgccatcaatctcgggaaagaaatcatcgaggtgcagaaagaccctgaggcactagcccagctcatgctgtcaatcccgttaaccaatgatggtaaatatgtgcttttgaacgatcagccagacgacgacgacggtaatccgaatgagcatcgaggcgccgaaagcgaggcatag

SEQ ID NO: 107289 - DNA, 2013 bp, synthetic construct
  misc_feature 1..2013: note = Description of Artificial Sequence: Synthetic coding sequence
  source 1..2013: mol_type = other DNA
atgcctgccgtcgataaactgctactggaagaggcattacaagactccccccaaacccggagcctcctcagcgttttcgaggaggatgccggcacacttactgactatactaaccagcttctgcaagctatgcaacgtgtctacggagcacagaatgaaatgtgtctcgcaacacagcagctaagcaaacagctcctagcttacgaaaaacagaatttcgccctgggcaagggagatgaagaagtgattagtacactccactattttagtaaagtcgtggatgaattgaacttactgcatactgagcttgctaagcagctggctgatactatggtgctgcccatcatccagttccgggagaaggacctgaccgaggtatcaacacttaaggacctgttcggactcgcctctaacgatgtgtgtttgttccttgagcacgatttgtcgatggcaaagtacagcaggttgccaaagaaaaaagaaaatgagaaggtgaaaactgaggtaggaaaggaggtcgccgccgcgcgccgaaagcagcacctgtctagtctacagtattactgtgccttaaacgccttacagtatagaaaacagatggcgatgatggagccgatgataggattcgcccatggccaaattaacttcttcaaaaagggggccgagatgttcagcaaaaggatggacagcttcctttcatcagtagccgatatggtgcagtcaattcaggtcgagcttgaggccgaagctgaaaagatgcgagtgtcacaacaggaacttttatcagtggacgaaagcgtttataccccagatagcgatgtggctgctccacagatcaatcgtaatctgatacagaaggcaggatacctaaacttgcgcaataagaccggtctggtgacgacaacctgggaaaggctgtatttctttacacaaggcggcaacctgatgtgccagcctcgaggcgctgtggccgggggcttaatccaggacctggataactgctcggtaatggctgtcgattgcgaggaccggcggtactgtttccaaattactactccgaatgggaaatccggcattatcctccaagcggagagccgaaaggaaaatgaggagtggatttgcgctattaataatataagtcgtcagatttacctaaccgacaacccggaagctgtggcgatcaagctcaatcagaccgccttgcaagcagtgacacccatcaccagtttcggcaagaaacaggaaagcagctgtcctagtcagaacctcaaaaactcggaaatggagaatgagaatgataaaatagtgcccaaggcgacagcatcacttccagaggcagaggaattaatcgctccgggcacccctatccagttcgacatcgtgctgcctgcaacggagtttctggatcagaataggggttctaggcgcacaaaccctttcggggaaactgaggatgaatcctttcctgaagcagaggacagcctacttcagcagatgtttattgtgcgcttcctggggtcaatggctgttaagacagactcaactactgaggtgatctacgaggcaatgcggcaggtactcgccgcgagagcaattcataacatttttaggatgacagagagtcaccttatggtgacctcccagagcttgcggctcatcgaccctcagactcaggtcagcagagccaattttgagctgacatctgtaactcaattcgccgcccaccaggagaataagcgcctggtcggttttgtaatccgggtgcccgaaagtaccggagaggagtctcttagtacatacatcttcgagagcaattctgaaggagagaaaatatgttatgccataaacctggggaaagagatcattgaagtgcagaaggatcctgaggctctggcccaactcatgctgtccattcctctcactaacgacggtaagtatgtcctgctcaatgaccagcccgacgacgacgacggtaatcctaacgaacatcggggcgccgagtctgaagcgtag

SEQ ID NO: 107290 - DNA, 2760 bp, synthetic construct
  misc_feature 1..2760: note = Description of Artificial Sequence: Synthetic coding sequence
  source 1..2760: mol_type = other DNA
atgacagacagtaaatactttacaactacaaagaaaggcgagatcttcgaactcaaggccgagctaaattctgataagaaagaaaagaagaaagaggccgtgaaaaaggtcatagcatccatgacggtgggcaaggacgtcagcgctctattccccgacgtcgttaactgtatgcagaccgacaatctggagctgaagaaactcgtctacctgtacctgatgaactatgccaagagccaacctgatatggctatcatggccgtcaacactttcgtgaaggactgcgaagatccaaacccattgatccgcgcacttgccgtccgcacaatgggttgtatccgagtggataagataactgagtatctatgcgagcccctgcgtaagtgtctcaaagatgaggatccttatgtccgtaagactgcggccgtttgtgtggcaaagttgcatgatatcaatgcccaattggtggaagatcagggcttcctggacactttgaaggatctgatttcggactcgaacccaatggtggtagccaatgccgtggccgcactctcagaaatagccgagtctcatcccagctcaaacctgttggaccttaacccccaatctatcaataaactcctgacagccctcaacgaatgtaccgagtggggacagatattcatcctggactgcctcgcaaactacatgccgaaagacgaccgcgaggctcagtccatctgcgagcgcgtaactcctagactgtcacatgcaaactctgccgtggtcctcagcgctgtgaaagttctgatgaagttcatggaaatgctgtccaaggacttggactactacgggaccctactcaaaaagctggctccacctctggtgaccttgttgtctgccgaacccgagcttcagtacgtggctctccggaacatcaatctcatcgttcagaagcgcccagaaatactgaagcatgagatgaaagtcttcttcgtcaagtacaatgatccaatttacgtgaagctggagaaactcgatatcatgattcgtttggcaagtcaggctaatatcgcacaggtacttgccgagctgaaggagtacgccaccgaagtggacgtggacttcgtccgtaaggctgtgcgggccatcgggaggtgcgcaattaaagtagaacaatcggccgagcgatgcgtgagcaccctgctggacctaattcaaacaaaggtgaattatgtggtccaggaagcaatcgtggtgatcaaagacattttccggaaatacccaaacaaatatgagtcagtgatagctactctctgcgaaaatctcgacagtctggacgagcccgaggccagggcggcaatgatttggatagttggagagtacgccgagcggattgacaatgctgacgagctactggaatcattcttagagggtttccatgatgaatccacacaagtgcagctgcagctgcttactgcaattgtaaagctgtttcttaagaaacccacagaaacacaagagctggtgcagcaggtcctgtccctggccactcaggactctgacaaccctgatctgcgtgacagaggatatatctactggcgacttttgagtacagaccctgttgcagccaaagaggttgtgttagcagagaagccgttgatctccgaagagactgatctcatcgaacccaccctgctggacgaactaatctgttacataggaaccctagcttcagtgtaccataaaccgccatccgccttcgtcgagggggggaggggcgtcgttcataagtccctgccacctaggactgctagtagtgagagcgctgagtctccagagaccgccccaacaggtgctcctcctggggaacaaccagatgtgatccctgctcagggtgacctgcttggtgatttactaaacctggacctaggtcccccagtttcggggccccccctggccacatcatccgtgcaaatgggagccgtcgatctcttgggcggcggcctggactccctgattggcggtacgaattttgtggcacctcctacagccgccgtgccagcaaatctcggtgcgcccataggttcgggcctttcggacctcttcgacctgacatccggcgtgggcactctgtcgggcagctatgtggcgccaaaggcagtcggatctataagtatggatctgcagcttaccaataaggcccttcaggtaatgacagattttgcaatccagttcaacaggaacagcttcgggctagcccccgcaacccctctccaagtgcatgctcctctgtcccccaaccagaccgtcgagatcagtctgcccctttccaccgtcggctccgtcatgaagatggagcctttgaacaacttgcaggtggccgtgaagaacaatattgacgtgttctatttttctaccctgtatcccctgcatattctgtttgtggaggatggaaagatggacagacagatgtttttggccacgtggaaggatattcctaacgaaaatgaagctcaattccagattcgggattgcccactcaatgctgaggccgccagcagtaagctgcaatcaagtaatattttcactgttgccaaacggaacgttgaaggtcaggacatgctctaccaatcgctcaaactgacaaatggcatctgggtgctggcagaattacgtattcagccgggcaacccatcttgcaccttatcgctcaagtgtagggcacctgaggtcagtcagcacgtgtatcaagcctatgagaccatcttaaagaattag

SEQ ID NO: 107291 - DNA, 2829 bp, synthetic construct
  misc_feature 1..2829: note = Description of Artificial Sequence: Synthetic coding sequence
  source 1..2829: mol_type = other DNA
atgacggacagcaaatacttcaccactacaaaaaagggtgagattttcgaacttaaagccgagctgaactcggataaaaaagaaaagaaaaaggaagccgtcaaaaaggtcattgcctcaatgacagtggggaaggatgtctccgcactttttcctgacgtcgtcaactgtatgcaaaccgacaatctggagctgaagaagctggtttacctttatctaatgaattacgccaagtcccaacccgatatggcaataatggcagtcaacacctttgtgaaagattgtgaagatccaaacccactgattagagctctcgcagtgcggactatgggctgcataagggtcgataaaataactgaatatttgtgcgagcccctgcgaaagtgcttaaaagacgaagacccatatgtgcggaagaccgctgctgtctgtgtcgctaaattacacgatatcaatgctcagctcgtcgaagaccagggtttcctagatacactcaaagatctgattagcgatagcaaccccatggtagtggccaacgccgttgctgcgctgagcgaaatagcggaatctcacccttcaagcaatctccttgacctcaaccctcaaagtattaacaagttgctgactgccttgaatgagtgtaccgagtggggacaaatatttatcctggactgtttggccaattacatgccaaaagatgaccgggaagcccagtccatatgtgagcgagtaacgccacggctgtctcatgcaaatagcgccgtggtcctgtcagctgtaaaggtcctgatgaagtttatggaaatgctatcaaaggacctggactactatgggacccttctaaagaaactggctccgcctctggtaactctgctgtctgctgagccagagctccaatatgtcgccctgagaaacatcaatctcatcgtgcagaaacggccggagatactcaagcatgaaatgaaagtgttctttgtgaagtacaatgaccctatttacgtcaagctcgagaaacttgatatcatgatcaggctcgccagtcaggctaatattgcacaggtgcttgccgagctcaaggagtacgcgacagaggttgacgtggactttgtgcgaaaagcggtaagagctatcggccgctgtgctattaaggtggagcagagcgcagagcgttgcgtaagcaccctgctcgacctgatccagactaaagtgaattacgtcgtgcaggaagcaatcgtggtgataaaagacatatttcggaagtacccaaataaatacgaaagtgtgatcgctacactatgtgagaatctggactccctcgacgagcccgaagcaagagctgcaatgatctggattgtgggcgagtacgcggagcggattgacaacgctgacgaactgcttgagagctttctcgaagggttccacgatgaatccacccaggtgcagctccagttactgaccgccatcgtgaaactgtttctcaagaaaccaacagagacccaggagctggtgcaacaggtactctccctcgccacacaagatagtgacaatccagatctgcgcgatagaggctacatatattggagacttctcagcacggatccagtggcagcgaaagaggtggtattggccgaaaagcctctcatctctgaggaaacagatctaattgaacccacactattggacgagctcatctgttatatcggtaccctagccagcgtctaccataagcctcccagcgctttcgtcgaggggggcagaggagtagtgcacaaaagcctgcctccgcggaccgcgtcatccgagtcagctgagtccccagagactgcccctaccggcgctccgcccggcgagcagcccgatgtgattccagctcagggagacctcctgggagatctgctcaatctggatctcggacctcctgtgtctggaccccctctcgccacaagctcagttcagatgggcgctgtcgacctgttgggtggcggacttgactctctgataggggggacaaacttcgtagcacccccaacagcggccgtgcctgcaaacctgggtgcccctattggaagtgggctgtcagatttatttgaccttacatcaggcgtgggcacactcagcggaagctacgtggcccccaaggctgtgtggttgcctgccatgaaggccaaagggctggagatttccgggacgtttactcggcaggtgggaagtatcagcatggacctccaattgactaacaaggcattacaagtcatgacggatttcgcaatccagttcaacagaaacagtttcggcttggctcctgccacacctcttcaggtgcatgctcccctctcacctaaccaaacagttgagataagtttgcctttatccactgtgggatctgtcatgaagatggaacccctgaacaatctgcaggtcgccgtgaaaaacaacatcgatgtgttctacttttcgaccctttatcctctacacatcctttttgttgaggacggtaagatggacagacagatgtttctcgcaacttggaaggacatcccaaatgagaatgaggcacaatttcaaattcgggactgcccattgaatgcagaagcggcaagtagcaaactgcagtcttcaaatatattcaccgtggccaagagaaacgttgagggccaggacatgctgtaccagtcccttaagctaactaacggtatttgggtcttggcggagctgcgcatacaacctggaaatccgagctgtacggatcttgagttatccctgaaatgtagagcgcctgaagtttctcagcacgtgtatcaggcctacgagactattcttaaaaactag

SEQ ID NO: 107292 - DNA, 2850 bp, synthetic construct
  misc_feature 1..2850: note = Description of Artificial Sequence: Synthetic coding sequence
  source 1..2850: mol_type = other DNA
atgaccgatagcaaatacttcaccactactaaaaaaggcgaaattttcgagctgaaagctgaattgaatagcgataaaaaagaaaagaaaaaggaagccgtaaagaaggtgatcgccagtatgactgttggcaaggatgtgagcgccctcttcccagacgttgtcaactgcatgcaaacagataacctagaactgaagaagctcgtctacctctacttgatgaattatgctaagtcgcagccagacatggcgataatggcggttaacaccttcgtcaaggactgtgaggacccaaatccactgatccgcgctctggcggttcgcacgatgggctgcattagagtcgataagatcaccgagtacctttgcgagccactgcgaaagtgcctcaaggacgaggacccttacgtccggaagaccgcggccgtttgtgtggcgaaactgcacgatatcaatgcacaactggtggaagaccaaggttttcttgatacgctcaaggatctgatctctgactccaatcctatggtggtagctaatgcagttgccgctttaagcgaaattgcggaaagccaccctagtagcaacctcttagatctcaacccgcagtcaattaataagctactgaccgcgttgaatgaatgtacagagtgggggcagatcttcattctggattgtctagctaattacatgccgaaggatgatagagaggcgcagtcaatttgtgaacgggttacccccagactgagccatgctaactccgctgttgttctatcagctgtcaaggtcctgatgaaattcatggagatgctttcaaaagaccttgattattatggtactcttcttaagaaacttgctccgccccttgttaccctgttgagtgcagagcctgagctgcagtacgtcgcactccggaatattaacctaattgtgcagaaacggccagagatcctcaagcatgagatgaaggtgttttttgtgaagtataatgacccgatttacgtcaaactcgagaaactggatattatgattcgcctggcctcccaagctaatatagcccaggtacttgccgagttgaaagagtatgcaaccgaggtcgatgtcgatttcgttaggaaggcggtcagagcgataggcaggtgcgcaattaaggtggagcagtccgccgaaaggtgtgtcagcactctgctcgacctgatccagacaaaagtgaactatgtggtgcaagaagctatcgtggtgatcaaagacatctttcggaaatatcccaataaatacgaatcagttatcgctaccctgtgcgagaacctggactcgttagacgagcccgaggcccgggccgccatgatctggattgtcggtgagtacgccgaaagaattgacaacgcagatgagctgttggagagctttctcgagggcttccacgatgagtcaacccaggtgcagctgcaactgctgacagctattgtaaagctgtttctgaagaagcctacagaaacccaggagctggtccagcaggtgctgagcctggctacccaagacagcgacaatccagaccttagggacagggggtacatctactggcgtcttctctcaacggaccccgttgccgccaaggaggtggtgctcgcggaaaaacccctcatctccgaggagacggatctgatagagccaactctgctcgatgagctgatatgttatatcgggacgctggcgtcagtatatcataagcctcccagcgctttcgtcgagggaggacggggcgtggttcacaaaagcctacctcccagaaccgctagctcggaaagcgcagagtcccccgaaactgccccgaccggcgcaccgcccggagagcaacccgatgtgatccccgcccagggggatctgctgggtgacctgctgaacttggatttgggccctccggtcagcggacccccgctcgcgacatcctccgtacagatgggggcggttgatctgctgggcggcggcctggactcgctcatgggggatgagcccgaaggcatcggtggcaccaatttcgtggccccacccacagcagccgtcccagccaacttaggcgccccaataggctcggggctcagcgacctttttgatctcacaagcggcgtgggaaccctgtccggctcatacgtcgcccccaaggctgtgtggctacccgccatgaaagcaaagggattagagattagtggaactttcaccaggcaggtcggctccatttctatggacttgcagctaaccaacaaggccctgcaggtgatgactgatttcgcaatacagtttaatcgaaactcatttggcctagctcctgccaccccacttcaagtgcatgctccgctgtctcctaaccaaaccgtcgagatttccctgcctctcagcactgtgggcagcgtgatgaagatggagccgttgaacaacctacaggtggcagtcaagaacaatattgacgtgttttacttcagtaccctttaccctctccacatcctgttcgtcgaagatggaaaaatggacaggcagatgttcctggcaacatggaaggacataccgaacgagaacgaggcgcagttccagattagggattgcccactgaacgccgaagccgcctccagtaaactccagagcagcaacatttttactgtcgctaagaggaatgtggagggccaggacatgctctatcagagcttgaagctgacaaacggaatttgggtcctagccgaactgcgcatccagcctggaaacccctcgtgcaccgacttggagttaagtcttaaatgtagagcacctgaggttagccaacacgtgtaccaggcctacgagacaattcttaagaactag

SEQ ID NO: 107293 - DNA, 2820 bp, synthetic construct
  misc_feature 1..2820: note = Description of Artificial Sequence: Synthetic coding sequence
  source 1..2820: mol_type = other DNA
atgaccgatagcaagtactttacaactaccaagaaaggcgagatctttgagttaaaggcagagctgaattccgataaaaaagaaaaaaagaaggaggccgtcaaaaaagtgatcgcttctatgaccgtgggaaaggacgttagcgctctctttcccgatgtagtgaattgtatgcagaccgataatctcgagttgaagaaactggtgtacctgtatctgatgaattacgctaagtcacagcctgacatggccatcatggccgtgaacacgttcgtgaaggactgcgaggaccccaatccactcattcgggcgcttgctgtaaggactatgggatgtatacgagtcgacaagatcaccgaatacttgtgcgaaccactccggaaatgcctcaaggatgaggacccctatgtccgcaagaccgccgccgtgtgtgtggcaaagttgcacgacatcaatgcacagctggtggaggatcaaggcttcctcgatacactgaaagatctgatctcagacagtaatccgatggtcgtggccaatgcggtagcggccctatccgagatcgccgagagccaccccagttccaaccttctggacttgaacccacagtctattaataaactgctaaccgctttgaatgaatgtacggagtggggccagatctttatcctggactgcctggcgaactacatgcccaaggacgatagggaagcccagtccatctgtgagagggttactccacgcctcagtcacgcaaactcagccgttgtactgagtgctgtcaaagtgcttatgaaattcatggagatgctttctaaggatttggactactatggaacccttttaaaaaaactggctccccccctggtcaccctgttatctgcggagcccgaactgcagtacgtcgcgttaagaaacattaaccttattgttcagaagcgtcccgagatacttaagcacgaaatgaaggtgtttttcgtgaagtacaatgacccaatttacgtgaaactcgagaagttagacatcatgattcggctcgcttctcaggctaacattgcccaagtgctggccgagttaaaagagtacgccactgaggtcgatgttgattttgttcggaaagccgtgcgcgctatcggtcggtgcgcgattaaagtcgaacagagcgccgaacgctgcgtgagcaccctgctagacctcatacagacaaaagtgaactatgtggtccaagaggccatcgtagtgatcaaagacatctttagaaaatatccaaacaagtacgaaagtgttatagccacactgtgcgaaaacctcgactctctggatgagcccgaagcacgtgctgctatgatttggatcgtgggggaatatgcagaacgcattgataatgcagatgagttactagagagcttccttgaagggttccatgacgagtcaactcaggtccagctgcaattgctaaccgccatcgtgaagctatttctgaaaaagcccaccgagacacaggaactggtgcagcaggtgctctcattggctacacaggactcagacaatccagacttacgggatagaggttacatttactggagactgctatctacagaccctgtggctgctaaggaagtggttctagcagaaaaacccttaatttccgaagaaaccgatctcatcgaacccactctactggatgaactgatctgctatattggtactttggcttctgtataccacaagcccccctccgcgttcgttgaaggaggtcgcggggtggtgcacaagtctctgcccccccggacggcatcttctgagtcagcggagagcccagaaaccgcccctaccggcgcacctcccggggaacagccagacgtgatcccagcgcagggcgatttgctgggagacttgctgaacctagatctggggccaccagtctcagggccacccttggcaacctcttcagtccaaatgggagccgtagatctcctgggcggcgggttggattccctcatcggtggcaccaactttgtggcacccccgaccgctgcagtcccagctaatctgggggcccctatcggctctggcctgagcgatttattcgacttgacatccggggtgggcactctctcaggatcttacgtggcccccaaagccgtgtggctacctgctatgaaagctaaaggcctcgaaattagtgggacattcacaagacaggtgggctcgatctctatggatttgcagttgaccaacaaagccctccaagtcatgacagattttgctatacagttcaatcggaatagttttggtctggcccctgcgactcctctacaggtgcatgcccccttaagtcccaaccaaactgtcgagatctctctcccactcagcactgttggcagcgtaatgaagatggaacccctgaataacttgcaagttgcagtgaaaaacaatattgacgtgttttactttagtacgctttacccactgcatatcctgttcgtcgaagacgggaagatggatagacagatgttcctggctacctggaaggatattccaaacgagaatgaggctcagtttcaaatcagagactgcccgttgaacgccgaagcagcatcgagcaagctgcagagctctaacattttcacggtggcaaagagaaacgtagagggacaggacatgctgtatcaatccctcaagctgacaaatggaatatgggtgttggccgagctcagaatccagccgggtaatccctcatgtacactgtcccttaaatgtagagctcctgaagtcagtcagcacgtttatcaggcatacgagaccattctgaagaattag

SEQ ID NO: 107294 - DNA, 2850 bp, synthetic construct
  misc_feature 1..2850: note = Description of Artificial Sequence: Synthetic coding sequence
  source 1..2850: mol_type = other DNA
atgactgatagtaaatatttcaccaccactaaaaaaggagaaatttttgagctgaaggccgaactaaattctgataaaaaagaaaagaaaaaagaagctgttaaaaaggtcattgcttctatgacagtcggcaaagacgtcagcgcactgttccctgatgtcgtgaattgcatgcagacagacaacttggagctgaaaaagttggtgtacctctatctaatgaattacgccaaatcacaacctgacatggcgattatggccgtgaacacatttgtaaaggattgtgaggatcccaaccccctgatccgtgcgctggcagtcaggactatgggttgcatcagagtcgataaaataaccgaatacttgtgtgagccgttaagaaagtgcctgaaagatgaggacccttatgtcagaaaaacagcggccgtctgtgtggctaagcttcacgatatcaatgcccagctggttgaagatcaggggttcctggataccctaaaggacttaatttctgactctaatccaatggtggtcgcgaacgccgttgcagctctgtccgaaatagcagaatctcaccctagctctaaccttctggatctcaaccctcaaagtataaacaagttgttgacagcgctaaacgagtgcacagagtgggggcagatctttatcctggattgcctagctaattatatgccaaaggatgaccgcgaggcacagtccatctgtgagagagtcacccccaggttatcacacgcaaactcagccgtggtcctttccgccgtcaaagtgctgatgaaattcatggagatgttgtcgaaggacctcgactattacggcaccctgctgaagaagttggcgcccccgctcgtgaccttgttgtcagcagagcctgagttgcaatacgtggctctgcgtaacatcaatcttatcgtgcagaagaggccagaaatcctaaaacacgaaatgaaagtgttctttgtgaagtataacgacccgatctacgtgaagctggagaaactcgacattatgataaggctggcatcacaggccaacatcgcccaggttctagccgaactcaaggagtacgctacggaagtggatgtcgactttgtacgcaaagcagtgcgcgctattggcaggtgcgctataaaggtagagcagtccgctgagcgatgtgtctctacactccttgatcttatccagactaaggtaaactatgtcgtgcaagaagctatcgtcgttatcaaagacatatttcggaagtatcccaacaagtacgaatcggtgattgccacattatgcgagaatctggatagcctggatgaaccagaagctagagccgcgatgatctggattgtgggggagtatgctgagcggatcgataatgctgacgaattactagaatccttcttggagggcttccacgacgagtccactcaagtacaactgcagctgttgaccgctattgttaaactttttcttaagaagcctacggagacccaagaactcgtacagcaggtgctcagcctcgccacacaagatagcgataacccagatttgagagataggggctacatctattggaggctgctgtccactgacccagtcgcagctaaagaagtcgtactggctgagaagcctctcatctcagaggaaaccgaccttatagagcctactctgctggatgagctgatttgttatattggtacgctggcttctgtctaccacaagcctccctcagcctttgtcgagggagggagaggcgttgtgcataagtcccttccacctcgcaccgccagtagcgagagtgccgagagtccagaaacagcacccacaggagctccacctggcgaacaaccggatgttatccctgcacagggggatctactgggggatctcctgaacctcgatttaggaccccccgtgagtgggcctccactggctacaagcagtgtgcaaatgggcgccgtggacttgctcggcggaggtctggactccctgatgggggacgagccagagggcattggtgggacaaactttgttgcccctccaaccgcagcggtgcctgctaatctcggcgcccctataggaagcggtctgagcgacctgtttgacctgacctccggggtgggcaccttatccggctcctatgtagccccaaaagcagtatggttaccggccatgaaagccaagggtctagagatctccggtacattcacacgccaggttggaagtatttctatggacctgcaactcaccaacaaagctttgcaagtgatgaccgacttcgccattcagtttaatcgcaactccttcggcctcgcacccgcaactccactgcaggtgcatgctcccctctcaccaaatcaaacagtcgagatatctctgccactctctaccgtggggtccgtcatgaagatggagcccttgaacaacctccaggtggctgtcaagaataacattgatgtgttctacttttcaacattgtatccactccatatcctattcgtggaagatggaaaaatggataggcagatgttcctggctacttggaaggatattcccaatgaaaatgaggctcagtttcagatacgcgattgtcctctgaacgccgaagctgcaagctccaaattgcagagtagtaacatttttacagttgctaagagaaacgtcgaaggacaggatatgctctaccagtcactgaagctcaccaatggtatctgggtgttggccgagttaagaatccaacccggcaacccctcctgtaccgatctggagttgtcactgaagtgtcgagctcctgaagtgtcacagcacgtgtatcaggcatatgagactatcctgaaaaactag

SEQ ID NO: 107295 - DNA, 2820 bp, synthetic construct
  misc_feature 1..2820: note = Description of Artificial Sequence: Synthetic coding sequence
  source 1..2820: mol_type = other DNA
atgacagactccaagtactttacaacaacaaagaaaggagaaatcttcgagctgaaagcagaactgaattctgataaaaaggagaagaaaaaggaggccgtgaaaaaggttatcgcgtctatgacggtaggcaaggacgtgagtgcgctgtttccagacgtggtgaattgcatgcaaaccgataacttagaattgaagaagctggtgtacttgtatcttatgaattacgctaaaagccagccagacatggccatcatggctgtgaataccttcgtaaaagactgtgaggatcctaatcctctgatccgcgcactggcagttagaactatgggttgtatcagggtagacaagatcacagaatacttatgtgagcccttgcggaagtgtttgaaggatgaggacccttacgtgaggaaaacagccgccgtttgcgtggccaagctgcacgacattaatgcccaactagtggaggatcagggatttctggacacccttaaagacctcattagcgactccaacccgatggtggttgcaaacgccgttgccgctctgtctgagattgccgaatcccaccctagttccaatctactagaccttaatccccagagcattaataaactcctgactgctttgaacgagtgcaccgaatggggacagatcttcattttggattgtttggctaattatatgcctaaagatgatagagaagcccagtctatctgtgaacgcgtgaccccccgactgtcgcacgcaaattccgccgtcgtgttgagcgccgtcaaagttttgatgaaatttatggaaatgttatcaaaagaccttgattattacggcacactgctgaagaagctcgcacctcctcttgtgactctgcttagtgctgagcccgaattacagtatgtggcactgagaaatattaacttaatcgtgcagaaaaggcccgagattctgaaacatgaaatgaaagtcttcttcgtgaaatacaatgatccaatctatgttaaactcgagaagctcgacatcatgattcgactcgcctcgcaagctaacattgcacaggttctggcagaactgaaagagtacgcaaccgaagtggacgtcgatttcgtcaggaaggccgtgagagctataggccgctgtgccataaaagttgaacaatccgcagagagatgtgtgagcacactgctggacctgatacagacgaaggtcaactacgtggtgcaggaggctatcgtggtcatcaaagacattttcagaaaatacccaaacaagtacgaaagtgtcatagccacgctttgtgaaaatctagacagtctcgacgagccagaggctagagcagcaatgatttggatcgtcggtgaatacgcagaaagaattgacaacgctgatgaattgctggagtcctttctggaagggttccatgatgaaagcacacaggtgcagctgcaactgctgacagctattgtgaagcttttcctcaagaagccaactgagacacaggaattagtgcaacaggtgctgagcctggctactcaggacagtgacaatcctgatctgagagatcgcggatacatatactggcgcctcctgagtacggaccccgtagccgccaaagaggtagtgcttgcagaaaagcctctgatatctgaggagacagaccttattgaaccaaccctactggacgagttgatttgctacattggtaccctggcaagcgtttaccataagccgccgtcggccttcgtcgagggcgggagaggagtagtgcacaaaagcttgcccccccgcacagctagctctgagtctgccgagtcccccgaaacagcacctacaggagcaccccccggggagcagccagacgtgatccctgcccagggcgacttgctgggggacctccttaaccttgacctgggtccccccgtcagtggacctccgcttgcgacatcctcagtgcagatgggcgctgtcgacttactgggcgggggcctcgactctcttatcggcggtacaaattttgtggctccacccaccgccgcagtgcctgctaacctcggtgcccctattggtagcgggttgtccgatctttttgatctcacatccggcgtgggcaccctatccgggagttatgtagctccaaaggccgtgtggctgccggcgatgaaggctaagggcctggaaatctcaggtacctttacccgccaggtggggtctatctccatggacctccagctgacaaacaaagcactgcaggttatgaccgactttgccattcagtttaataggaattcctttggattggccccagccactcctctccaggtgcacgcgccccttagcccgaatcaaacagtcgaaatttcgctgcctctttctacagtggggagcgtcatgaaaatggagcctcttaataacctgcaggtcgccgttaaaaataacatagacgtgttttatttctcaaccttgtaccctctgcatatactcttcgtggaagacggcaagatggaccgccaaatgtttctagccacgtggaaggatattccaaatgaaaatgaggctcagtttcagattagggactgccccctgaatgctgaggcagcgagctcaaagttacagtctagtaatatctttaccgtcgccaaacggaacgttgagggacaagatatgctctatcagagcttaaaactcaccaacggaatttgggtgttggctgagcttaggatccagcccgggaacccgtcgtgcactttaagtctgaaatgtcgggctccggaggtgtctcagcacgtgtatcaggcatacgaaacaattctgaaaaactag

SEQ ID NO: 107296 - DNA, 1737 bp, synthetic construct
  misc_feature 1..1737: note = Description of Artificial Sequence: Synthetic coding sequence
  source 1..1737: mol_type = other DNA
atgaccgatagcaaatatttcactaccaccaagaagggagagatctttgaacttaaagcggaattgaattcagataagaaagagaaaaagaaagaggcggtgaaaaaggttatcgccagtatgacagtggggaaagacgtgtctgcattatttcccgacgtcgttaattgcatgcagacagacaacttggagttgaagaaacttgtttacttgtaccttatgaactacgcgaaatctcaaccggatatggcgattatggctgtgaataccttcgttaaggactgcgaggatccgaatccgttaattcgcgcactggctgtccggacgatgggatgtatcagggtggataagataacagagtatctgtgcgagcctctcaggaaatgtttgaaggatgaagacccttacgttcgtaaaactgctgcagtttgtgtcgcaaaactacacgacattaatgcccagctcgtcgaagaccagggatttctcgacactctcaaggatctgatctctgacagtaaccctatggtggttgctaatgccgttgcggccttatcagagatagccgagagccacccctcttctaacctgttggatcttaatccacagtcaattaacaaactgctcactgcccttaatgagtgcaccgaatggggtcagatctttatcctggattgtcttgcgaattacatgcccaaagacgatcgagaagctcagagtatttgcgaacgcgtgactccacggctgtcccacgctaatagcgcagtcgttctgagcgcagtgaaggtcctgatgaaattcatggagatgttaagcaaggatctggattactacggcaccctcttgaaaaagcttgcgcctcctttagtgactttgctctccgctgaacccgagctacagtatgttgccctaagaaacattaacttgattgtgcaaaaaaggccggaaatcctgaaacatgaaatgaaagtgttttttgtgaaatataatgaccctatctatgtcaagttagagaagctagacattatgatacgtttagcatcacaggccaacatcgcacaggtgctggccgagcttaaggaatatgccacagaggtagatgtagacttcgtacgcaaggcagtcagggctatcggccggtgtgccatcaaggtggagcagagcgctgagcggtgtgtctccacgctgcttgatctcatacagacaaaagtaaattacgtggtgcaagaggcgattgttgtaatcaaggacatctttaggaagtatccgaataaatatgagtcagtgatcgctactctgtgcgaaaacctggactccctagacgagccggaggcaagagcagccatgatctggattgtgggagagtacgcagagcgcattgacaatgctgatgagctgcttgagtctttcctggaggggtttcacgacgagtccactcaggtgcaacttcaactgctcaccgccatcgtgaagctcttcctgaaaaaacccaccgaaacccaagaactggtgcagcaggtgttatctctggcaactcaggacagcgataaccccgatcttagagatagggggtacatctattggcgcctgttgtccacagacccggttgcggcaaaggaagtggtcctggcagagaagcccctgatctcggaagaaaccgatttgattgagccaactctccttgatgagctcatttgttacatcgggacattagcttcagtgtaccataaaccgccctag

SEQ ID NO: 107297 - DNA, 2820 bp, synthetic construct
  misc_feature 1..2820: note = Description of Artificial Sequence: Synthetic coding sequence
  source 1..2820: mol_type = other DNA
atgactgatagcaaatacttcactacaaccaagaaaggggagattttcgagctgaaggccgagctgaattcggacaagaaagagaaaaaaaaggaagcggtcaagaaggttatagcctcaatgactgtgggtaaggatgtgagtgccctttttccagacgtggtgaattgcatgcagaccgataacttggagcttaagaaactggtctatctgtatcttatgaattatgccaagagccagcctgacatggcaataatggccgtaaatacattcgtgaaggattgtgaggacccaaatcccctgattagggccttggctgtgcggactatgggctgtatccgagtggataagatcaccgaatacttatgcgaacctctgcgcaaatgtctaaaggatgaagatccttacgttcggaagacagcagctgtctgcgttgccaagttgcatgacataaacgcgcagttggtagaggaccaaggattcctggacactcttaaggacctgatctccgatagtaatcccatggtggtggccaacgctgtggccgcactctctgaaatagcggagagccacccttctagtaatctccttgacctgaacccccagtccatcaataagctcctgaccgctctgaatgagtgcaccgagtggggccagattttcatcctggattgtctggcaaactatatgcctaaagacgatcgggaggcccagagtatttgtgagcgcgtgactccccgactgtcccatgctaatagcgcggtggtgctttctgctgtgaaagtgcttatgaaatttatggaaatgttaagcaaagatttggattactatggaacattactgaaaaaactggcacctcccctggtgacgctgctttccgctgagcccgagctccagtacgtggctctgcggaatattaacctgattgtacagaaacggcccgaaatcttgaaacacgagatgaaggtgttctttgtcaaatataacgatcctatctacgtgaaactggaaaagctggacatcatgattagactcgcttctcaggccaacattgcccaggtgctggcggaactaaaagaatatgccaccgaggtcgatgtggacttcgtgcgtaaggctgttcgcgccatcggcagatgcgccatcaaagttgagcaaagcgccgaaagatgtgtgtcaacattactggatctgatccagaccaaggtaaactatgttgttcaggaggctatcgtcgttataaaagacatttttagaaagtatccaaataaatatgagtccgttatcgccaccctatgtgagaatctggattctcttgatgaacctgaagctcgggcggcaatgatttggatcgttggcgaatacgcagagaggatcgacaacgccgatgagcttttggaatcattccttgagggtttccatgatgagtccacccaagtgcaattgcaactgctcactgcaatcgtcaagctctttctgaagaagcctacagagacacaagaactggtgcagcaggtcctctctttggcaacgcaagactccgacaaccctgacttaagggacagagggtacatatactggcgcctcttgagcacagaccctgttgcagcgaaagaagtagtgctcgccgaaaagccattgatcagtgaggaaacagatcttatagaacccaccttgctggacgagttgatctgctatataggtacgcttgcctcagtgtatcacaaaccgccatccgcctttgtcgaaggagggcgtggggtggtacacaagagtctgcctccacgtaccgcttcatccgagagtgcggaatcacccgagacggcacctacaggcgcaccgcccggcgagcagccagacgtcatccctgctcagggagatctgctgggagacctgctcaatctggacttgggcccacccgtgagcggtccaccactggccaccagtagcgtgcagatgggagctgtcgatctattggggggaggtctcgactcactcatcggagggactaattttgttgccccgcctacagccgccgtgccggctaatctaggggcccccatcggctccgggttgagtgatctctttgaccttacatcaggggtgggaactctgagcgggtcttacgtggcacccaaggccgtatggctccctgccatgaaggctaagggactcgaaatcagcgggacgttcacccgtcaggttggcagcatcagcatggacctgcagttaacaaacaaggctctccaggtgatgaccgacttcgcaatccagtttaaccgaaacagcttcggtctggcccccgctacaccccttcaggtgcacgcgcccctgtcacctaatcagaccgtcgagatttccttgcccctgtcaaccgtcggctccgtgatgaagatggaaccgctcaataatctgcaggtcgcagtgaaaaacaacattgacgtgttttatttctccacgctataccccttacacatcctgttcgtcgaggatggcaagatggaccgtcaaatgtttcttgccacttggaaggatattcccaatgaaaatgaggcgcagttccagatccgagattgccctcttaatgcagaagccgcatctagcaaattacagagtagcaatatatttacagtagcgaaacggaatgtggagggacaggacatgctgtaccagtcactgaaactgactaacggtatctgggtgttagccgaactcaggatccagcccggaaatccctcctgcaccctgagccttaaatgccgggctcctgaggtgtcccagcatgtgtatcaggcatacgaaacaattctcaaaaattag

SEQ ID NO: 107298 - DNA, 2469 bp, synthetic construct
  misc_feature 1..2469: note = Description of Artificial Sequence: Synthetic coding sequence
  source 1..2469: mol_type = other DNA
atgcctgcacccatccgtctgcgcgaactgattcgcactataaggacagcccggactcaggcggaggagcgcgaaatgatccagaaagagtgtgccgctatacgctctagcttcagagaggaagataatacatatagatgcagaaacgtggccaagctgctctatatgcatatgctgggatatccggcccacttcggacagttggaatgtttgaagctcatagcctcccagaaattcaccgataaacgcattggctatctgggtgcgatgctactcctcgacgagaggcaagacgtgcacctgctgatgactaactgtatcaagaacgatctgaatcactcaacacagttcgtgcagggtctagccctctgcaccctggggtgcatgggctcctccgaaatgtgcagggatctggccggggaggtggaaaagctactcaaaacgtccaactcttacctcagaaagaaggccgctctgtgcgcggtgcacgtcatcagaaaggttcccgagttgatggaaatgttcctgcccgccactaaaaacctactgaacgagaaaaaccacggagtcttacacacctcagtggttctgcttacggagatgtgcgaaaggagcccagatatgctcgcacactttaggaaactcgtccctcagctggtccgtatcctcaagaacctgattatgtccggctattcacctgaacacgacgtaagtgggatatcagatccattcctgcaggtgagaattctaagactccttaggattctcggtagaaacgacgacgacagtagcgaagctatgaatgacatcctggcccaggtggctacaaacactgagacatccaaaaacgttgggaatgccatcctctacgaaacagtactgacaattatggacattaagtcagagagcggactccgtgtgctggctatcaatattctcgggagattcttactgaataacgataagaatatacggtatgtcgcgctgacgtcacttctgaaaacggtgcagacagatcataatgctgtccaacgacatcggagcaccattgtggattgccttaaagacctcgacgtttccattaagcggagagccatggagctcagtttcgccctcgtgaatggtaacaatatccgggggatgatgaaagagctactgtacttcctcgacagttgcgagcccgagttcaaggccgattgcgcaagtggcatattcctggcggctgagaagtacgcaccaagcaaacgctggcacattgacaccattatgagggttctaactaccgccggctcctacgtgcgcgacgacgcagttcctaatctaatccaacttatcacgaactcagtcgaaatgcacgcctacacagtgcaacgcttgtataaagcaatattgggtgactactcccagcagcctctggtgcaggtagctgcatggtgtattggagagtacggggacttgctggtgagtggccaatgcgaagaggaagaaccaatacaggtcactgaggatgaagtgctggatatcctagagtctgtattgatatccaacatgtcgaccagcgtgaccagagggtacgctttgaccgcaatcatgaaactgtctactcggtttacatgtaccgtcaatagaataaagaaggtcgtctccatctacgggagctcaatcgacgtggaacttcagcagagagccgtcgagtacaatgccctgttcaagaagtatgaccatatgcggagtgctttgcttgaaagaatgcctgtgatggagaaagtgaccacgaacgggcctaccgaaatagtccagacaaacggggagaccgaacctgcgccactggagacaaaacctcccccttcgggtccgcagcctactagtcaggcaaatgatctgctcgacttgttaggcggcaacgacattacaccagtcatccctacagctcccacaagtaagccgtcatctgcagggggtgaactgcttgacctcctgggcgatattaatcttactggtgcgcccgctgccgcccctgcccccgccagcgtaccccagatctcccaaccgccatttcttttggacggcctgtcatcacagcccctgtttaatgatattgccgctgggattcctagcattactgcttactccaagaatggcttgaagatcgaattcacttttgaaaggtccaatacaaaccctagtgtgacggtaataaccatccaggcaagcaactccactgaactggacatgacagatttcgtgtttcaggctgccgtgcctaaaacatttcagctccaacttctttcaccgagctctagcatcgtgcccgctttcaacaccggcacaatcacacaagtaatcaaggtgctgaatccacagaaacagcaactgagaatgagaataaagctcacttataaccacaaagggtccgccatgcaggacctggcggaagttaacaactttcctccccaatcatggcagtag

SEQ ID NO: 107299 - DNA, 2478 bp, synthetic construct
  misc_feature 1..2478: note = Description of Artificial Sequence: Synthetic coding sequence
  source 1..2478: mol_type = other DNA
atgcctgccccaattcggttgcgcgagctgataaggacgatcagaaccgcgcggacccaggcggaagaacgagaaatgattcagaaagaatgcgccgccatccgttcatccttcagagaagaggacaacacttatagatgccggaacgttgcaaaactgttatacatgcatatgttagggtaccccgcacattttggacaactcgaatgtttgaagctgatcgcttcccagaaattcaccgataaacgaatcggttacctgggagcaatgcttctgctggacgagcggcaagatgtacatcttctgatgacaaactgcataaaaaacgaccttaaccacagcacccaatttgtgcagggcctagctctgtgcaccctcggatgtatgggctcgagcgagatgtgccgggatcttgcgggtgaggtagaaaagctgcttaagactagcaattcgtacctgaggaagaaggcggccctgtgcgccgtgcatgtcatacgtaaggtgccagaactcatggagatgttcctacccgctacaaagaaccttctaaatgaaaaaaaccatggagtcttgcatacatcagttgtgcttctaacagaaatgtgtgagcggtcccccgacatgttggcacacttccgcaagaacgaaaaattggtgccgcagctcgtgcggatcctgaaaaacctcattatgtctggctactcgccagagcacgatgtatctggtatttccgacccatttctgcaggttcgtattctccggcttctgaggattctcgggcgaaatgacgacgatagcagcgaggcaatgaatgacatcctggcccaggttgccacaaatacagaaacatccaagaatgttggcaatgcgatcctttatgagaccgtgctgacaatcatggacattaaatccgaatcaggcctaagggtgctggcaattaacattttgggaaggtttttactgaacaacgataagaatatccgctatgtggctttaacaagcctgttaaagacagtgcagactgaccacaacgctgtacagcgacaccgctctaccattgtggactgcctgaaagacttagatgtctccatcaaacggagggccatggagctttcatttgctctggtcaatggaaacaatataagaggtatgatgaaggaattgctgtattttctggacagttgtgaacctgagttcaaagctgattgtgcatctggtattttccttgccgctgaaaaatacgccccctccaaaaggtggcatatcgacacaattatgagggtgctgacgaccgctggctcttacgtgagagacgatgctgtgccgaacttaatccagctgatcacaaacagcgtggaaatgcacgcatacacagtgcaacggctgtataaagccatcctgggcgattattcccaacagcccttggtgcaggttgccgcatggtgtatcggcgaatacggggatctcctggtatcaggccagtgtgaggaggaagaaccgatccaggtgactgaggatgaggttctcgacatactagaatccgtcttgatctccaatatgagtacaagcgtaacacgcggatacgcactgactgcaatcatgaaactgagcacacggttcacctgtacagtgaacagaatcaaaaaagtggtgagtatatacggcagcagcatagatgtggaactgcaacagcgcgctgtcgaatacaacgcattattcaaaaagtatgatcacatgcggtcagcccttcttgagcgtatgcctgtgatggagaaggtgacaacaaacggcccgacagagatcgtacagacaaacggagaaaccgaaccagcgcccctggagacaaagcctcctccttccggcccccaaccaacatcccaggccaacgatctccttgatctgttgggcggaaacgatataaccccagtgatacccacagcacctaccagcaaaccatcttcggccggaggcgagctcttggacctcttgggtgacattaacctcacaggagcacctgccgccgctccagcccctgcatccgtgccgcaaatctcccagccgcctttcctgctggatggcctgagttctcaacccctcttcaatgacatcgccgcagggatcccctcaataactgcatactccaagaatggcctcaagatcgagttcacctttgagcgctcaaacacaaacccatccgttacggtaatcacgatccaggcctccaattctaccgagctcgacatgaccgattttgtcttccaggcagctgttccgaagacctttcagctccagctcttatcaccatcctccagcatcgtgccggcttttaacacaggaaccattacacaagtgatcaaagtgttgaatcctcagaaacagcagttgaggatgcgtatcaagcttacatataatcacaaaggatccgcaatgcaggatctggccgaagtcaataactttcccccgcaaagctggcagtag

SEQ ID NO: 107300 - DNA, 2478 bp, synthetic construct
  misc_feature 1..2478: note = Description of Artificial Sequence: Synthetic coding sequence
  source 1..2478: mol_type = other DNA
atgcctgctccaatcaggctaagggagttaatcaggacaattcggacagctagaactcaggcagaggaaagagagatgatccaaaaggagtgcgcagcaatcagatccagcttccgggaagaagacaacacctacagatgtaggaatgtggccaaacttttatacatgcatatgctgggatatcccgcccactttgggcaactggagtgtctcaaacttatcgcttcccagaagttcacagacaaaagaatcggttatctgggagctatgctcctgttggacgagcggcaggatgtgcacttgttgatgacaaattgcatcaagaatgacttgaaccacagcacccaattcgtgcagggattggcactgtgcacacttggatgcatgggttcctccgagatgtgtcgagacctggcaggtgaggtggagaagctgctgaaaacctccaactcatacttacgtaagaaggccgccctgtgcgccgtgcatgtgatcaggaaagtccccgagctaatggaaatgttccttcctgcaaccaagaacctgctgaatgaaaagaatcacggagtcttgcatacgagtgtggtcctactcaccgaaatgtgcgaacgctcccctgacatgttggctcacttccgaaaggaaagtaaattggttccccagcttgtccggatattgaaaaacctgataatgtccggatattcgccagaacacgatgtctctgggattagtgatccttttctgcaggtgagaatcctccggctcctgagaatcctgggtaggaatgatgacgattcaagtgaggcaatgaacgacatcttggcacaggttgccaccaacactgagacttccaaaaacgtaggcaatgcaatactgtacgagactgtgctgacaataatggacatcaagtccgaaagcggtctcagagttctcgccatcaacatactgggccggttcctgctgaacaatgacaagaatattcggtatgtcgcacttactagcctgctgaaaaccgtccagaccgatcacaatgccgtgcagagacatcgctcaacaatcgtcgactgcctgaaggacttggacgtgtctataaagcgaagggcaatggaattatcatttgccctggttaacggaaacaatatccgcgggatgatgaaagagcttttatattttcttgatagctgtgaaccagagtttaaagctgactgcgcgtcggggatcttcctggcggcagagaagtacgctccctcgaaacgctggcacatcgacacaattatgcgcgtgctcacgactgccggcagctacgtccgggatgacgccgtgccaaacctcatccagttaatcacaaattccgtagaaatgcacgcctacacagtgcaacgcctgtataaggcgatcttgggggactacagccagcaacccctcgtgcaggtggcggcttggtgcattggagagtacggggatttgttagtcagcggacagtgcgaggaagaggaaccaattcaggtgacagaagacgaagttctggacattttggaaagcgtgctaatctcaaacatgagcacgtctgtgaccagaggatatgctctgacggccatcatgaagctgtctactagatttacctgcacagtcaataggatcaagaaggtcgtgtctatttatggaagcagtatagacgtggaactgcagcaaagggccgtggaatacaatgccctctttaaaaaatatgaccacatgagatcagctttgctggagaggatgcccgtcatggagaaagtcaccactaatgggcccacagagattgttcagaccaatggcgagacagagcctgcccccttggaaactaaacctcctccctctggtccccaaccgacatcccaggcaaatgatctgcttgatctgctcggtgggaacgacatcacacccgtcatcccaacagctccaacttcaaagccttcatctgcagggggcgaattactcgacttactgggagatataaatctcactggcgcccccgccgccgctcccgccccagccagcgtcccgcaaatcagccagccacccttcctgctcgatgggttgagcagtcaacctctatttaacgatatagctgccggcattccgagcattactgcctactcaaaaaacggattgaaaattgagtttacattcgaacggagcaatactaacccctccgtgaccgtaattaccatccaagcatccaattctaccgagctcgacatgacggactttgtgtttcaggccgctgtcccaaagacattccaactgcaattactttccccatccagcagcatcgtccctgcctttaacactggaacaataacgcaggtcataaaagttcttaatccccagaaacagcagttgaggatgcgaattaagctgacctataaccacaaagggagtgccatgcaggacctggctgaggttaacaacttccctccacagtcctggcagtag

SEQ ID NO: 107301 - DNA, 1698 bp, synthetic construct
  misc_feature 1..1698: note = Description of Artificial Sequence: Synthetic coding sequence
  source 1..1698: mol_type = other DNA
atgtttgggagctgctgccactgctgtagaagacctcgaagttgctggttccatagcagatttcgagcagtttccggtgtccaatcacaagccgtgggcgtggagaaaaggagacagcgatcatgggcccggcgaggcagggaaccgcagggcttgttgagattattggagggacgaccccggggattggggcccggcggctccgcaagaaggggagtgccttgttgcggagtggcccccccgcgcatgcccgcacccatccgcttacgtgagctcattcgaaccatccggacagcaagaactcaagccgaggaacgggaaatgatacagaaggaatgcgccgctattcgttccagctttagggaggaggacaatacctaccggtgtcgaaatgtggcaaagttattatacatgcacatgttagggtacccagcccacttcgggcaactagaatgtcttaaactgattgcctctcagaaattcaccgataagcgcataggctacttaggcgccatgttactgctcgacgagcgccaggacgtgcacctgttgatgaccaactgcatcaaaaatgatctaaaccactccacacagttcgtgcaggggctagctctatgtaccttgggatgtatgggatcttcagaaatgtgccgcgatcttgccggggaggtggaaaaactgctcaagacttccaactcttacctgaggaagaaagcagccctgtgcgctgttcatgtaatccggaaagtgcccgagctgatggaaatgtttcttcccgccacaaagaacctcctcaatgaaaaaaatcatggagtgctccacacatctgtggtcctgttgactgaaatgtgtgagagatctccggatatgttggctcactttcggaaagaatcgaaactggtcccacagctggtgcgaattctaaagaatcttatcatgtcaggttacagtccagagcacgacgtgtcagggatatccgatccatttctccaggtccggatcctgaggctgctgaggatactaggtaggaatgatgacgacagtagcgaagccatgaatgacatcctcgcccaggttgcaaccaacacagagacgtctaaaaacgtggggaatgcaattctctacgagaccgtgctcaccattatggacatcaaatctgaatccggcctgcgggttctagctatcaatattctgggacggtttctactaaacaatgacaagaacataaggtacgtggccctgacaagcctcctgaaaacagtccaaacagatcataatgcagttcagagacaccgttccaccatcgtcgactgcttgaaagacctggacgtttccataaagagaagggctatggaactgagctttgcgttggttaatgggaataatatccgaggcatgatgaaggaactgctttattttctagactcatgcgagcctgagttcaaggcggactgcgccagcggtatcttcttagctgcggagaaatacgctccctcgaagcgctggcacattgacactataatgagagtactgacaacagcaggaagttacgtgcgcgacgacgccgttcctaacctcattcagcttattacaaattctgtggaaatgcacgcctatacagtgcagaggttgtataaggcaatcttgggcgattatagccctaccttcggcacgagcggctgtatggtgtaccgctag

SEQ ID NO: 107302 - DNA, 2538 bp, synthetic construct
  misc_feature 1..2538: note = Description of Artificial Sequence: Synthetic coding sequence
  source 1..2538: mol_type = other DNA
atggaaaagaatatcaatctgagaaactgtcagaccctgaatacatatgtgatgctcacccacctcaggatgccagcacctatcaggctacgagagctgattcgcacaatcagaacagccaggacgcaggccgaggagcgtgagatgatccaaaaggagtgcgccgccattagatcatctttcagagaagaggataacacatacagatgccgaaacgtcgcaaagctcctctatatgcatatgttgggctatccagcgcattttggacaattggagtgcctcaaattgatcgccagtcagaagttcacagacaagcgcattggatacctgggggccatgctactgctcgacgaaaggcaggatgtccatctgttgatgactaattgcattaagaacgatttgaatcacagcacacagtttgtgcagggcctggctctgtgtaccctcggctgtatggggtcaagcgagatgtgccgggatctagcaggtgaagtcgaaaagctgttaaaaacgtccaactcatacctccgaaagaaagcagctctatgtgccgtccatgtaattcgtaaagtgcccgagctgatggagatgtttttgcccgccactaaaaacctcctgaatgaaaagaaccatggcgtgctgcacacttcagtcgttctcttgacagagatgtgcgagcggtccccagatatgcttgcccacttcagaaagttggtgccacagctggttaggatcttaaagaatctaataatgagcggttattcacccgaacacgacgtcagcggcattagcgacccatttctccaggtccggatccttaggctgctgagaatactggggagaaatgatgatgatagtagtgaagccatgaatgatatcttggcgcaggttgccactaacaccgagacctcaaagaatgtggggaatgcaattctctatgaaactgtgctgactatcatggacattaaaagtgaatccgggctgagggtgctggcaattaatatccttgggagattcctactgaacaacgacaagaatatacggtacgtggcactcacatctttgctcaagaccgtacaaacagaccacaatgctgtgcagagacaccggtccacaatcgttgactgcctgaaagatctggacgtcagcattaagcggagagcaatggaattgtcatttgccctcgttaatggcaataacatccgtggaatgatgaaagaacttctgtactttctggacagttgcgaacccgaatttaaggcggactgcgccagtggaatttttctggccgctgagaagtacgctccgtccaagcgatggcacattgacaccattatgcgcgtcctcaccactgcagggtcttatgttcgggacgatgccgtacctaaccttatccagctcattaccaatagcgtcgagatgcatgcctacaccgtccagcgcctgtacaaggccattctgggggactatagccagcagcctctcgtgcaggttgctgcctggtgtatcggtgaatacggagatcttttagtctcagggcagtgcgaagaggaggaacccattcaagtgacagaggacgaggtgctggacattttagaaagcgtcttaatctctaacatgtctacttctgttaccaggggctacgctctgactgccatcatgaaactatcaactcggtttacctgcacagttaatagaattaaaaaagtggtgtcaatttacggcagctcaattgatgtcgaactgcaacagcgagccgtggaatacaatgctttgttcaaaaagtacgaccacatgaggagtgctctgttggagcggatgccagtgatggagaaagtcacgacaaacgggccaactgagattgtccagactaatggagaaacggaaccggctcccttagaaactaagccgccaccctccggcccccaacctacatcacaggctaatgacctcctggacctgctaggggggaatgacattaccccagtgattcccaccgccccgaccagtaagccttccagcgccggcggtgagctgcttgatctactgggggatatcaatctgactggtgcacctgctgccgcccctgccccagcaagtgtgccccagatctcacagcctccattcctgttggatggcctgagcagtcagcccttattcaatgacattgccgctggaatcccgagcattaccgcttatagcaaaaatggcctgaagatagaatttactttcgagcggtcaaacaccaacccttctgtcaccgtgattacaatacaggccagtaactccacagagctcgatatgacggattttgtgtttcaagctgcagtgcctaagacttttcagctccaactgctgtcaccttcctcctcaattgtgcctgcatttaatacaggaacaataacgcaggttataaaagtgttgaacccccagaagcagcagctccgaatgagaattaagctgacatataaccacaaggggagcgctatgcaagacctcgcagaggtcaacaatttccctccacagagctggcaatag

SEQ ID NO: 107303 - DNA, 531 bp, synthetic construct
  misc_feature 1..531: note = Description of Artificial Sequence: Synthetic coding sequence
  source 1..531: mol_type = other DNA
atgccagctcctatcaggcttagagaattgatcaggacaatcaggaccgcacgaacccaggctgaagaacgggaaatgatccagaaggaatgcgccgctattcgatcctcgttcagggaggaagacaacacgtatcgatgtcgaaacgtggcaaaactcctgtacatgcacatgctcggctacccggcacatttcgggcagctggaatgcctcaagttaattgccagccagaagtttaccgacaagagaattggctatctcggcgccatgctcctgctggatgagcgacaggacgtgcatctgctcatgacaaattgcattaaaaatgacctgaatcactcaacccagtttgtgcaaggcctcgcattatgcactttgggatgcatgggaagttccgagatgtgcagggacctcgcgggggaggtggaaaaactgctgaagacctctaactcttacctgcggaagaaggagatgatttacaagcaaacaaatgtcacaggttacatactgggcggcattcccaattcatag

SEQ ID NO: 107304 - DNA, 1047 bp, synthetic construct
  misc_feature 1..1047: note = Description of Artificial Sequence: Synthetic coding sequence
  source 1..1047: mol_type = other DNA
atgaaagacaagatgtgtcgagacctggcgggagaggtagagaagctgctgaagacctctaactcatacctgcgcaaaaaagccgccctttgtgccgtgcacgtaattaggaaagtgcctgaactgatggagatgttcttgcctgccacaaaaaaccttctgaacgaaaaaaaccacggggtgctgcacacttccgtagtgctgctaactgagatgtgcgagcggtccccggacatgctggcccattttcggaagctcgttccccaattggttaggattttgaagaatctaatcatgagtgggtactccccagagcacgatgtgtctggcatttccgacccattcctccaggtgaggatcctgcgactgctgaggatcttgggtaggaatgatgatgatagctccgaggccatgaacgatatcttggctcaagttgctactaataccgagaccagcaagaatgtgggaaatgctatcctttacgaaaccgtgctcacaattatggatatcaagagcgaatcgggactgcgggtgctggctataaatattctcgggaggttccttcttaacaacgacaaaaatatcaggtatgttgccctaacttccttgttgaagacggtccagacagatcacaacgccgtacagagacacagaagcaccattgtggattgtctgaaggaccttgatgtatctattaagagaagagccatggagttgtcctttgctctggtgaatggaaacaatatccgtggaatgatgaaggaactactttacttcctagactcctgcgagcccgagttcaaggcagactgtgcgagcggcatcttcctcgcagcagtgccgaagaccttccagctgcaactcctgtcccctagctcctcgattgtacctgcctttaacactggcacgatcacgcaggtgatcaaggtgcttaaccctcagaaacagcagttgaggatgagaattaaactgacctacaatcacaaaggatcggccatgcaggacctcgccgaagttaacaatttccctccccagagctggcagtag

SEQ ID NO: 107305 - DNA, 1272 bp, synthetic construct
  misc_feature 1..1272: note = Description of Artificial Sequence: Synthetic coding sequence
  source 1..1272: mol_type = other DNA
atgtccgcctcagccgtgtacgttcttgacctgaagggtaaggtgcttatttgtcgtaactatagaggcgacgttgatatgagcgaagtggaacattttatgcccattttgatggaaaaggaggaggagggcatgctttcaccaatcctcgcccacggaggggtacggttcatgtggattaagcacaacaatctgtatctcgtagcgacctctaaaaagaacgcatgcgtttcactggtgttttcttttctctacaaggtagtgcaggttttttctgaatattttaaggaacttgaggaagaaagtattagggacaactttgtcattatctatgagttacttgacgaacttatggacttcggatatccacaaacgactgactctaagattctccaggaatacattacccaggaggggcacaaactcgaaacaggagctccccggccaccggcaactgtgactaatgctgtttcctggcgcagtgagggaatcaagtaccggaaaaacgaggtgttcctggatgtgatcgagtccgtgaacctccttgtgtccgccaacgggaacgtgcttcgctcagaaatcgttggctcaattaaaatgcgggtctttcttagcggtatgccagaattacggctgggactgaatgataaagtgctgtttgacaacactggacgcgggaagtctaaatccgtcgagttagaggatgttaaattccatcagtgtgtgaggctgtctcgttttgagaacgacagaacaatatcttttatccctcctgacggcgagtttgaactaatgtcttaccggctgaacacacatgtgaagccactgatctggatcgagagtgtgatcgaaaaacactcacatagcaggatcgagtacatgattaaagcgaagtctcagtttaagagaaggtcgactgcaaacaatgtggagatacatatccccgtcccaaacgacgcagatagcccaaagtttaaaacgacggtgggctcagtgaagtgggtccctgagaattccgaaatcgtgtggagcattaagagtttccccggcggcaaagaatacctgatgcgcgcacatttcgggttaccaagtgttgaggccgaggataaggagggtaagcccccaattagtgtaaaatttgagattccgtactttacaacaagcggcatccaagtccgctacctcaagatcatcgaaaaaagtggctatcaggccctcccctgggtgaggtacatcacccagaatggagattatcagcttcggacccagtag

SEQ ID NO: 107306 - DNA, 1113 bp, synthetic construct
  misc_feature 1..1113: note = Description of Artificial Sequence: Synthetic coding sequence
  source 1..1113: mol_type = other DNA
atgagcgcatccgcagtttacgttttagatttaaagggcaaagtgctcatttgccgaaactatcgcggcgatgtggatatgagtgaggtggagcacttcatgccaatcttgatggaaaaggaggaggagggtatgctcagtcctattcttgctcatggcggagtgaggtttatgtggataaagcacaacaatctgtaccttgtagccacgtccaaaaagaacgcatgtgtctctttagtgttttctttcctgtataaggtagtgcaagtgttttccgaatattttaaagaattagaggaggagtctatcagagacaattttgtaatcatttatgagctgctcgatgaactaatggacttcggctatccacagacaactgactcaaagatcctccaagaatacataacccaggagggccacaagctggaaacaggtgcacctcggcctcccgccacagttaccaacgccgtgagctggcgttcagaagggattaagtaccgtaaaaacgaggttttcttagatgtcattgaatctgttaacctgctggtgtcagccaacgggaatgtgctgcggtcggaaatcgtgggctcaattaaaatgcgcgtattcctgtccggcatgcccgaactacggttgggcctaaacgataaagtccttttcgacaacactggaagggggaagtcaaagagcgtagaactggaggatgtgaagttccatcaatgcgtccgcttgtcacgattcgaaaatgacaggactatttcgttcatcccgccagatggtgaatttgagctgatgagctaccgtctgaatacgcacgtgaaaccgttaatatggatcgagagcgttatcgagaagcactcccactcccgtatcgagtacatgattaaagggggcaaagagtatctgatgcgagcccacttcggactgccctccgtcgaggcagaggacaaagagggcaaaccacccattagtgtcaaattcgagattccgtattttacaacaagcgggatccaggtgagatacctcaagataattgagaagtccgggtatcaagcgctgccctgggtgcgctacatcacgcagaacggggactatcagttgcggactcagtag

SEQ ID NO: 107307 - DNA, 1308 bp, synthetic construct
  misc_feature 1..1308: note = Description of Artificial Sequence: Synthetic coding sequence
  source 1..1308: mol_type = other DNA
atgagcgcatctgcagtgtacgtgctggacctgaaagggaaggttctgatctgccgcaattaccggggcgatgttgacatgtccgaagttgaacacttcatgccaatcctcatggagaaagaagaggaaggcatgttgtcccccattctagcgcatggcggagtgaggtttatgtggattaaacataacaatctctacctcgtggccacatcaaagaagaacgcttgcgtgagcctggttttcagcttcttgtataaggtggtccaggtattctctgaatatttcaaggagctggaagaggagtcgatcagagataattttgtcattatctatgagctattggacgagctgatggatttcggctacccccagactactgacagcaagatactgcaggagtacatcacccaggaaggccacaaattagagaccggggcccctaggcctcctgccactgttaccaacgcagtctcatggcgtagcgagggaataaagtacagaaagaatgaagtctttctggatgtgattgagtccgtgaacctgctgggaaaataccccggtgtgggctggctggggcatacagtgagcgccaacggtaacgtgttgcggtccgagattgtgggatcaattaagatgcgtgtcttcctgtcgggtatgcccgaacttcgcctggggctcaatgacaaagtgttgtttgacaacacaggcaggggcaaatcaaagtccgtggagctcgaggatgttaaattccaccaatgcgtaagactgagcagatttgagaacgatagaactatctcctttatcccaccggacggtgaatttgagctgatgtcataccgacttaacacccacgtgaagccactgatctggatcgagtctgtgattgaaaagcactctcatagtaggatcgagtacatgattaaagctaagagccagttcaaaaggcggagcactgctaataatgtcgaaatccacatccccgtgccgaacgatgcagacagtcccaaatttaaaactaccgtcggcagtgttaaatgggtcccagagaatagcgagatagtctggtctatcaaaagtttccccggcgggaaagagtacctgatgcgcgcacacttcggcttgccttcagtggaagccgaggacaaagagggcaagccgccgatctccgtcaaattcgaaataccttacttcaccacatccgggatacaagtgaggtacttgaagataattgagaagtctggataccaggccctgccatgggtgcgctacattactcagaatggcgactatcagctgcggacacagtag

SEQ ID NO: 107308 - DNA, 1056 bp, synthetic construct
  misc_feature 1..1056: note = Description of Artificial Sequence: Synthetic coding sequence
  source 1..1056: mol_type = other DNA
atgagcgccagcgctgtgtatgttctggacctcaagggtaaagtggtacaagtatttagtgaatattttaaggaattggaagaggagtcaatccgcgataactttgtgattatttacgagcttcttgacgaacttatggactttggctatccgcagacaaccgactctaaaattctgcaagagtacatcacgcaggaaggccacaagttagaaacaggtgccccgagacctcccgccactgtcactaacgctgtttcctggagaagtgagggcattaagtatcggaagaacgaggtgttccttgatgtgattgagtcagtgaacctgctagtgtctgccaacgggaacgttctgaggagcgaaatcgtgggaagcataaaaatgcgcgtctttttgagtggcatgcctgaactccgccttggattgaatgacaaggtgctttttgataacacaggccgtgggaaatcaaagtcagtggagctggaggatgtaaaatttcaccagtgcgtgcgactgtcccgctttgaaaacgacaggaccatctcatttatccctcccgacggagagtttgaactgatgagttataggctcaacacacatgtcaagccactgatttggatcgagagcgtgatcgaaaagcactcccactccagaatcgaatatatgatcaaagccaagtctcagtttaaacgaaggtccactgccaataacgtggagatccacattccggtgccgaatgatgccgacagccctaaattcaagacaaccgttggatctgtcaaatgggtaccagagaactccgaaatagtctggtcaataaaaagcttccccggaggcaaggaatacctgatgcgggcccactttgggctgccatctgtcgaggcggaagacaaagaagggaagcctcccataagtgtcaaattcgagattccttacttcacaacgtcgggtattcaggtgcgctatctaaaaatcattgagaagagcggctaccaggcgctcccgtgggtgaggtatatcacccaaaatggtgattatcaacttcggacccagtag

SEQ ID NO: 107309 - DNA, 1272 bp, synthetic construct
  misc_feature 1..1272: note = Description of Artificial Sequence: Synthetic coding sequence
  source 1..1272: mol_type = other DNA
atgtccgcctccgcagtgttcattctagatgttaaaggcaaaccactgatctcccggaactacaaaggcgatgttgcgatgagcaagatagagcactttatgccgttgctcgtccagcgggaagaggagggggcacttgcgccccttttatcccacggccaagtccatttcctctggataaaacattcaaatctgtacctggttgcaacaaccagtaaaaacgcgaacgcgtccctagtctacagcttcttatacaagacaatcgaagtgttttgcgagtattttaaggagctcgaagaagaatccatccgtgacaacttcgttattgtttatgagctactggacgagctcatggactttgggttcccacaaaccactgactcgaaaatccttcaggaatacattacccagcagtctaataagctcgagacagggaaatctcgtgtgcctccgaccgtgacaaacgcagtgagttggcgaagtgagggcatcaaatacaagaaaaacgaggtatttatcgatgttattgagtctgttaacctgctggtgaatgcaaacggaagtgtgctgctgagtgagatagtgggcacaatcaagctgaaggtgtttctgtctggcatgcctgaactccgtctggggctgaatgatcgagtactctttgaactgacgggtcgctctaaaaacaaatctgtagaactggaggatgtcaaatttcatcagtgtgtacgcctgtcacgcttcgacaacgataggacaatctccttcatccctccggacggcgacttcgagctgatgtcataccggctatcgactcaagtgaagccccttatctggattgagtcagtcattgaaaaattctcacactctcgcgtggagatcatggtgaaggccaaaggccaattcaaaaaacagagcgtagcgaacggcgtggagatctcagtccccgtgcctagcgacgccgacagtccccgcttcaagacctccgtcggtagcgccaagtatgttccagagcgcaatgtcgtcatctggtccatcaagtcatttcccggcggcaaagagtaccttatgcgtgctcattttggccttccctccgtggaaaaggaagaggtagaagggcggcctcctatcggagttaaattcgagatcccgtatttcacggtgagtggcatacaggttagatatatgaaaattatagaaaagagcgggtaccaagctctaccttgggttcggtatatcacccaaagtggggattatcagctgcggacaagttag

SEQ ID NO: 107310 - DNA, 477 bp, synthetic construct
  misc_feature 1..477: note = Description of Artificial Sequence: Synthetic coding sequence
  source 1..477: mol_type = other DNA
atgatgaggtttatgctccttttttctcgccagggaaaattgagactgcagaaatggtaccttgccacttcagataaagagcggaaaaaaatggtgagggaactgatgcaggttgtcctagcccgtaaacccaagatgtgctccttcctcgaatggagagacctgaaggtggtgtacaaaagatacgcaagcctgtacttctgctgtgccatcgagggccaggataacgaactcatcaccttagagttgatccacaggtatgtagagctgttagataagtacttcgggtctgtatgcgagctcgacattatatttaatttcgagaaggcctatttcatcctggacgaatttctgatgggaggcgacgtccaggatacttctaaaaagtcggtgctgaaagcaatcgagcaagccgaccttctccaggaagaagatgagagcccaagatctgtactggaagagatggggctagcctag

SEQ ID NO: 107311 - DNA, 477 bp, synthetic construct
  misc_feature 1..477: note = Description of Artificial Sequence: Synthetic coding sequence
  source 1..477: mol_type = other DNA
atgatgagatttatgctactgttctctaggcaaggcaaactgcgcttgcaaaagtggtacctggcaacctccgacaaagagcggaagaaaatggtaagagaactcatgcaggtagtactggctcgcaagcctaaaatgtgtagctttttggaatggcgggacctgaaggtagtctataaacggtatgcttcactgtatttttgctgtgctatcgagggacaagacaatgagttgattaccctcgaactcattcaccgatacgtcgagctgctggataagtactttggtagtgtttgtgagctggacatcatctttaacttcgaaaaagcttattttatcctggacgaatttctgatgggcggggacgtgcaagacacctctaagaaatctgttctcaaggcaatcgagcaggcagacttgttgcaggaggaagacgaatctccacgctctgtgctggaggaaatgggattggcatag

SEQ ID NO: 107312 - DNA, 474 bp, synthetic construct
  misc_feature 1..474: note = Description of Artificial Sequence: Synthetic coding sequence
  source 1..474: mol_type = other DNA
atgcagtttatgctactgttctcacggcaggggaaattgagactgcagaaatggtatgtgcccctctccgacaaggagaagaagaagattacacgagagctggtgcaaaccgtgctggcacggaagccaaagatgtgctctttcctagagtggcgtgacttaaaaatagtctacaaaagatacgcatctttgtatttctgctgcgccattgaagatcaggataatgagctcatcacgctggagattattcacagatatgtggagctgctggacaaatacttcgggtctgtgtgtgaattggacatcatctttaacttcgaaaaagcatatttcattctggacgaatttttactggggggggaggtacaggagaccagcaaaaaaaacgtgctcaaggccatcgaacaggcggacttgctccaagaagaagcagagacccccagatccgtactcgaggagattggcctgacctag

SEQ ID NO: 107313 - DNA, 462 bp, synthetic construct
  misc_feature 1..462: note = Description of Artificial Sequence: Synthetic coding sequence
  source 1..462: mol_type = other DNA
atgctgttattttcacggcagggcaaactgagactgcagaagtggtacgtccccttgagcgataaggagaagaaaaaaatcacaagagagctcgtgcagactgtgctggctcggaaacctaaaatgtgtagttttcttgaatggagggacctgaaaattgtatataagcgctatgcatctctgtatttctgctgtgcaatagaggatcaagataacgaactgattacactggagataattcaccggtatgtcgaactgctggataaatactttggcagtgtctgcgagctggacattatattcaatttcgaaaaagcttactttatccttgatgagtttctccttgggggagaagtccaggagactagcaagaagaatgtgttaaaagctatcgaacaggcagatctgctgcaggaatcacagaatgaagagtggggcggactcagcgaagatatactgtag

SEQ ID NO: 107314 - DNA, 483 bp, synthetic construct
  misc_feature 1..483: note = Description of Artificial Sequence: Synthetic coding sequence
  source 1..483: mol_type = other DNA
atgcaattcatgttactcttttctcgccagggaaagctacgcctacagaagtggtacgttcctttgagtgacaaggagaagaaaaagatcacgcgcgagctggtgcagaccgtgttagccaggaaaccaaaaatgtgctctttcctcgagtggagagacctaaagatcgtgtacaaaagatacgcatccttgtatttctgctgtgctattgaagaccaggataacgagctgataacgctcgagatcatacataggtatgttgaactccttgacaagtactttggctccgtatgcgagctagacatcatttttaacttcgagaaagcttacttcatcttagacgaatttctgctcggaggagaggtgcaagaaacaagcaagaaaaacgtactgaaagcgattgaacaggctgacctgctgcaggaaaagacggagaccatgtatcacagtaaaagctttattggcttcaagaaggcttattag

SEQ ID NO: 107315 - DNA, 609 bp, synthetic construct
  misc_feature 1..609: note = Description of Artificial Sequence: Synthetic coding sequence
  source 1..609: mol_type = other DNA
atgcctgctggatgccctccacatagcaccaccgccagcttacctcaacatggcgataggggcttcccattcgcagcagcagctgctgctggacaggcgcccccccgtcctagacccgctgccgccatgcagtttatgctgctttttagcagacagggcaaactccgacttcaaaagtggtatgtccccctgtctgacaaggaaaaaaaaaagatcacgcgggagctcgtgcagacggtcctggctcgtaagccaaagatgtgctcttttctggagtggagagatttgaaaatcgtctataagcgatacgcaagtctctacttttgctgtgctatagaagaccaggacaatgagctgataacactggagattatacacagatatgtagagctccttgataaatacttcggcagcgtgtgtgagcttgatattatctttaactttgagaaagcatatttcatcttagacgagttcctgctcggaggtgaagtccaagagacctccaaaaagaacgttttaaaggcaatcgagcaggccgatttgctccaggaaaagaccgaaacaatgtaccatagcaaatccttcatcggattcaagaaagcttactag

SEQ ID NO: 107316 - DNA, 441 bp, synthetic construct
  misc_feature 1..441: note = Description of Artificial Sequence: Synthetic coding sequence
  source 1..441: mol_type = other DNA
tgacgacaggggaagcttaggttgcagaaatggtatgtgccactatccgataaggagaagaagaagattactagagagcttgtgcaaacggtgcttgcacgaaagcccaagatgtgctcattcctggagtggcgagatttgaaaatcgtgtataaacgctacgcctctttgtacttctgttgtgcaatcgaggatcaagataacgaactcattacattagaaattattcatcgctatgtcgagctccttgataaatattttggcagcgtctgcgagttggacattatctttaacttcgagaaggcctattttattcttgacgaatttctgctaggaggtgaggtccaagagacaagtaagaagaatgtgttgaaagccattgaacaagctgacctgcttcaggagcctagacacgaatacttcaacgtgcccgtgtactag

SEQ ID NO: 107317 - DNA, 462 bp, synthetic construct
  misc_feature 1..462: note = Description of Artificial Sequence: Synthetic coding sequence
  source 1..462: mol_type = other DNA
taactcctcttctcaagacaaggcaagcttagacttcagaagtggtacgttcctctgtccgacaaagaaaagaaaaaaattactcgcgaactggtgcaaacagtcctggcccgaaagcccaagatgtgcagctttctagagtggagagacctgaagatcgtgtataagagatatgcctccttatacttctgttgtgccatagaggaccaagataacgaactgataacactggaaatcattcaccgctacgtcgaattactggacaaatattttgggagcgtgtgtgaactcgacatcattttcaatttcgagaaggcttactttatcttggatgagttcttattaggcggtgaagttcaggagaccagcaagaagaacgtattaaaagcaattgagcaagctgatcttttgcaggagagtcaaaacgaggagtggggcgggttgtcagaagacatcctgtag

SEQ ID NO: 107318 - DNA, 588 bp, synthetic construct
  misc_feature 1..588: note = Description of Artificial Sequence: Synthetic coding sequence
  source 1..588: mol_type = other DNA
atgcctgccggctgcccaccccactctactacagcttcgctcccccagcatggagacaggggctttccgtttgccgctgccgctgcagccggacaggccccaccccgccccagaccagccgccgctatgcaattcatgttgctttttagtcggcagggtaaattgcggcttcagaaatggtatgttcccttgtccgacaaagagaagaaaaagatcactagagaactggtgcagactgtgctggccaggaagccgaaaatgtgtagcttcttggaatggagggacctcaaaatcgtatacaaacggtacgcctcattgtatttctgttgcgcgatcgaagatcaggataacgagctgattactctggagattattcaccgctacgtggagctcctcgacaaatacttcggcagcgtgtgcgagttagacattatatttaatttcgaaaaggcctatttcatcttggatgagtttctgctcggcggcgaagtccaagagacctcaaagaaaaatgtgctgaaggcaattgaacaggctgacctcttacaggagccacgacacgagtattttaacgttcccgtgtattag

SEQ ID NO: 107319 - DNA, 315 bp, synthetic construct
  misc_feature 1..315: note = Description of Artificial Sequence: Synthetic coding sequence
  source 1..315: mol_type = other DNA
atgattcgcttcattctgattcagaaccgtgccggcaagactaggctggctaaatggtacatgcagtttgacgatgacgagaaacagaagctgatcgaagaggtacatgcggttgtcaccgtcagagacgcaaagcacaccaacttcgttgaagtgctgaacgaatattttcataatgtctgtgaactggatttggttttcaatttctacaaggtatacacggtggttgacgagatgtttctggctggggaaataagggagacaagtcagactaaggttctgaaacagctccttatgttacagagcctggagtag

SEQ ID NO: 107320 - DNA, 2868 bp, synthetic construct
  misc_feature 1..2868: note = Description of Artificial Sequence: Synthetic coding sequence
  source 1..2868: mol_type = other DNA
atgcccgcggtttctaagggcgacggaatgcgtggccttgccgtttttattagcgacatacggaactgcaagagcaaagaggcagagatcaagcgaataaacaaggaattagccaatatccgctcaaagtttaagggagataaggctcttgatggatatagtaagaaaaagtatgtctgtaagttattgttcatctttctgctgggccacgacattgactttggacacatggaagctgtaaacctgctttcctcaaacaaatacaccgagaaacagatcgggtacttgtttatttcagtattggtcaatagtaattccgaactgatccgcttaatcaacaatgctatcaagaacgaccttgcttctcgcaacccgactttcatgtgtctcgcattgcattgcattgcaaacgtgggtagccgcgagatgggtgaggcattcgcggccgatatcccgcgaatcctcgttgcgggcgactctatggactcagtgaagcaaagcgccgccctttgcctgttaagactgtacaaggcctccccagatctcgtacccatgggggagtggactgccagagtggtccacctgctaaacgatcagcacatgggggtagtgactgccgcggtatccttaatcacctgcctttgcaaaaagaatccagatgattttaagacatgtgtctcattggccgtgagtcgcctgtcaaggatagtaagcagtgccagcaccgacctccaggattatacctactattttgtgcctgccccttggctgagcgtgaagctcctgcgcctgctgcagtgttatcctccacctgaagatgccgccgtcaagggccggttggtcgaatgcctggagacagttctcaataaggcccaagagccacctaaatctaaaaaggtacagcactcgaatgccaagaacgctattctctttgaaaccatttctttaattatccactatgactccgagcctaatctgcttgtgagggcctgcaaccaactggggcagttcctgcagcatagggagaccaacttgagataccttgctctggagtctatgtgtaccctcgcatctagtgagttctcacacgaggccgtgaaaactcatatcgacaccgtaatcaatgctctgaaaaccgagcgggatgtttcagtcaggcagagagccgctgacctcctatacgcaatgtgtgacagaagcaacgcaaagcagattgtgagcgagatgctcaggtacctagagacggcagactacgccatcagagaggagattgtgcttaaagtggcgatcttagctgagaagtatgctgtggactattcttggtacgttgacacgattttgaaccttatccggatcgccggcgattatgtcagcgaagaagtgtggtaccgagttctgcaaattgtcactaaccgtgacgatgtgcagggatatgcagcgaaaacggtattcgaagcccttcaggcccctgcctgtcacgaaaacatggtaaaggtgggagggtacatcctgggcgaatttggaaacttgatcgcaggagacccaagatcaagccctcctgtccagttttcactgttgcattcaaagttccatctttgtagcgtggcgacgcgagccctgttgctatctacatacattaaatttattaatctcttccccgaaactaaagctacaattcaaggcgtgttacgcgcgggatcccagctgcgcaatgctgatgtggagctgcagcaaagggcagtggaatacttgacccttagcagcgtggcaagcacagatgtgctggcgactgtactcgaagaaatgcctccctttcccgaacgcgagagcagcattctcgcaaagctcaaaagaaaaaagggtcctggtgcaggtagcgcgcttgacgacgggcgtcgggacccttcctctaatgatatcaatggaggcatggagcctacccctagtacagtctccactcctagtccatccgctgacctgctagggttgagagccgccccacctcctgctgctcctcctgcgtctgcaggagctggtaatctcttggtggacgtgttcgacggtcctgctgcccagccttcattaggaccaactcccgaagaggcattcctaagtcccggccctgaagatatcggacctcctattccagaagcagacgagctgcttaataaattcgtgtgtaaaaacaacggggtactgttcgaaaatcaacttcttcagatcggggtgaagagcgagttcagacagaacctgggtcggatgtatctattttatggaaacaagaccagtgtgcagttccagaacttcagtccaaccgtcgtgcacccaggcgatctgcagacccagttagcggtccagaccaaacgagtggctgcacaggtggacggaggcgcccaagtgcaacaggttctgaatatagaatgcctaagggatttcctcacccctcctcttctgtctgtccgatttaggtatggaggagcccctcaggccctgacactcaagctcccggtcactatcaacaaattttttcagccaaccgagatggctgcccaagactttttccagcgatggaaacaactctcactgcctcagcaggaggcccagaaaatttttaaggccaatcaccccatggacgccgaggttacaaaagccaaacttctgggctttggcagtgctctgctggataacgtcgatcccaacccagaaaactttgtgggagccgggatcatccaaactaaagcattacaggtgggatgcctactgagactggagcctaatgcccaggctcagatgtaccggctgaccctccggacatctaaggagcccgtgagtcgtcacctctgcgagttgcttgcccaacagttctag

SEQ ID NO: 107321 - DNA, 2934 bp, synthetic construct
  misc_feature 1..2934: note = Description of Artificial Sequence: Synthetic coding sequence
  source 1..2934: mol_type = other DNA
atgccggccgtcagcaaaggcgacggtatgcgcggtcttgccgtgttcattagcgacatcaggaattgtaagtcaaaggaggctgagattaaaaggattaacaaggagctcgccaacatcagatcaaaattcaagggagataaagccctggatggctacagcaagaaaaaatatgtgtgtaaactcctatttatctttcttctagggcatgacatcgacttcggccacatggaggccgtgaatttgctgagcagcaacaagtataccgaaaagcagataggctatctgtttatctcagttctcgttaattccaacagtgagctcattcggctcatcaacaacgccattaaaaacgacctggcttctcgaaatccgactttcatgtgcttagccctccattgcatcgccaatgtgggctcacgcgagatgggggaagcatttgccgctgacattccacgcatccttgtagcaggcgactccatggacagtgtaaaacagagcgccgccttatgtctgcttagattgtataaggcctcccccgatctcgtacctatgggagaatggaccgccagggtcgtccacctgcttaacgaccagcacatgggcgtggtgacagctgccgtgtccctgataacctgtctgtgcaaaaaaaatcccgacgacttcaagacgtgtgtctccctagctgtctcaaggctgtcacgaattgtctccagtgcttccactgatttacaagattacacatactatttcgtgccagcaccatggctgagtgtaaagttgcttaggctgctccagtgctatccacctcccgaagacgctgctgtcaaaggccgtctggtcgagtgcttagagacagtgcttaacaaagcccaagaaccacctaaaagcaaaaaagttcagcattctaacgccaagaacgctattctgtttgagacaatttctcttattatccattatgacagtgaaccgaaccttttagtgcgagcatgcaaccagcttggacagtttctgcagcacagggagactaatttgaggtacctggctctggagtctatgtgcacgctggccagctccgagttctctcacgaagctgtaaaaacacatattgatacggtcattaacgccctcaaaaccgaacgggatgtgtcggttcgacagcgggcggccgatctgctgtatgcaatgtgcgataggtccaacgctaagcagatcgtcagcgaaatgctgcggtatctggagaccgccgactatgccataagagaggaaatagtcctgaaggtggctatcctggctgagaagtacgccgtggattattcgtggtacgttgacacaattttaaacctaatacgcatagccggggactatgtgagcgaagaagtgtggtatagagtattacagatcgtgactaaccgtgatgacgttcagggctatgccgccaagacagtgttcgaggccctacaggcgcctgcctgtcacgaaaacatggtgaaggttggaggttacatcctcggggagttcgggaatctgatagccggggaccctagaagcagcccgccagtgcagttcagtctgctacactccaaattccacctgtgttcagtagccacgcgagcactgcttctgtccacgtacatcaagtttatcaacctattcccggagacaaaggcgactattcaaggtgtactgagagcaggtagccagctgaggaacgctgacgtggaacttcagcagcgcgctgtggaatatctgaccctgtcctcagtagcatcaactgatgtcctggccaccgtcctggaggaaatgccacccttccctgaacgcgaaagctcaatcctcgcgaagctaaaaagaaagaaggggcctggcgccggaagcgctctagacgatggtcgccgcgacccttcttcaaacgatattaacggcggcatggaacccacaccatcgaccgtatcgaccccttcccctagcgccgacctgctcggccttagggctgcgccaccgcctgcagccccccctgccagcgccggtgctggaaacctcctcgttgatgtgtttgatggtcctgccgcccaaccctccctgggtcctactcctgaagaggcattcctttcagagttggaacccccagctcccgaatcccccatggcacttctggccgatcctgcccctgctgctgatccaggacccgaagatattggtcccccaatccctgaagctgacgaactgcttaacaaattcgtttgcaaaaataatggggtgctgttcgagaatcagttgctgcagattggagtgaagtctgagttccgacaaaacttgggccgcatgtacctgttttatggaaacaagaccagcgtacagttccagaatttcagtcctacagttgtgcatccaggggatttgcagactcaattagctgtgcagacaaaaagagttgcagctcaagtcgacgggggggcccaggtgcaacaagttctgaacatcgagtgtctacgcgatttcctcaccccgcctctccttagcgtaagattccgctatgggggggctcctcaagctttaacgctcaagctgcccgtaaccattaacaagttctttcaaccaacagagatggcagctcaggatttctttcagaggtggaagcagctatccctgcctcaacaggaggcacagaagatatttaaggccaaccaccctatggacgccgaagttactaaagccaagctgctgggattcggttcagcgctgctggataacgtcgaccccaaccccgagaatttcgtcggcgcaggaattatacagacgaaagcgctccaggtgggttgcctgctgcggctcgaacccaacgcacaggctcagatgtatagattgaccctgcggacttccaaagaaccagtgtccagacatctgtgtgagctgctcgctcaacagttttag

SEQ ID NO: 107322 - DNA, 1404 bp, synthetic construct
  misc_feature 1..1404: note = Description of Artificial Sequence: Synthetic coding sequence
  source 1..1404: mol_type = other DNA
atgggattagctttgcactgcatagcctctgtggggtcccgggagatggctgaagcgttcgccggtgagatcccaaaagtcctggttgctggggacacgatggacagcgtaaaacaatccgccgccctgtgcctgctgagactgtatcgaacctcccccgatttggtgccaatgggtgattggacatctagagttgtccatctgttgaatgatcagcatttgggtgttgtgactgctgcaacaagtctcatcacgaccctggcacaaaagaacccagaggagttcaaaacgagtgtctccctggccgtcagcagactgagtagaatcgttaccagcgccagcactgaccttcaggattacacctactacttcgtccctgcgccctggctaagcgtgaagcttttgagattgctccagtgttaccccccaccagatccggcggtcagggggagactgactgaatgcctggagacaatcctcaacaaggcccaggagccacccaagagtaagaaagtccaacactctaatgcaaaaaacgccgttctattcgaagcaatttccctgatcattcaccatgatagcgagcctaatctgttggttagggcttgtaaccagcttggacagttcctgcagcacagggaaacgaatctccgatatctcgcattggagtccatgtgtaccctggcctcatcagaatttagtcatgaagcagtcaagacccatattgagaccgtgattaacgctctgaaaaccgagcgggacgtgtcagtcctgcctcccacacccccgaggagcctgtgggaacagcagtgtcactgtgcttggagaggactctcactgggagtctggccgagctggtggctgcatacctggcgaaggcctggccccctgggcggggcccaactgactttagtcctactgcagagccagttggactgcttcccaaggcaggattttaacctggaattccgtaatatatgtatttgtaatgacttctggcagaagcacgtgagctggccggatgtcactgtcctgctgtctcaattgttgttcgttaagggcgtttgctacgcccctgccgtggctgaagcactggacgtccagcctggagaggagcgtccggccggccccgcagggccacccggcctccaaggtaaggtttgggccggcggggcacgcctgagaggtgttcttgtgagcttcctctcagaatgggctagtcccggccacggcgccggactttccccttctactgggcccgtgcagtctagcctcgagggattgtggcggcgtgacgcatccgtgtggtccgggtccgagggcgcaataggtcgtatgccctgtgcaacttgcggcctgtgtctgacatgtcacttggactcagcccctagactgcacgtttag

SEQ ID NO: 107323 - DNA, 2823 bp, synthetic construct
  misc_feature 1..2823: note = Description of Artificial Sequence: Synthetic coding sequence
  source 1..2823: mol_type = other DNA
atgcccgctgtaagcaagggggacgggatgaggggcctcgcggtcttcatcagcgacatccgaaactgcaaaagcaaggaggcagagatcaagagaattaacaaggaactggccaacatccggtcaaagttcaaaggcgacaaagccctcgatgggtactcaaaaaaaaaatacgtgtgcaaactcctgtttatctttctgctcggacacgatattgatttcgggcacatggaggcggtcaatttgctcagctcaaaccgatacaccgaaaagcaaattggctatctctttatatctgttctcgtgaactccaactccgagctcatccgcctcatcaataatgcgataaagaacgatctcgcatcaagaaatccaacatttatgggcctggccctccattgcatcgcctctgtgggctctcgtgaaatggccgaggcctttgctggagagatcccaaaagtgctggtcgcaggcgacactatggattcagtgaaacaaagcgcagctctctgtctgttgagactctaccggacctcccctgaccttgttccgatgggggactggacctccagagtcgtacaccttcttaacgatcagcacctgggggtggttactgcggccacctctctcattactacacttgcacagaaaaatccggaggagttcaagactagtgtcagcctggccgtctcccgcctgtcacgcattgtgacctccgcatctaccgacctacaggactatacttattattttgtgccggctccttggttgtctgtcaagctcttgaggctgttgcagtgctaccctccccctgaggaccccgccgtacgtggtcgattgactgaatgcttagaaacaatcttgaacaaggcgcaggagcctcctaagtccaaaaaggtacagcactcaaacgccaagaatgctgtcctcttcgaagctataagccttattatccaccacgacagcgagcccaatctgttggtcagagcttgtaaccagctagggcagtttctgcagcaccgggagaccaacctgcgttacttggctctggagagcatgtgcaccctggcctccagcgaattcagtcacgaagccgtgaagacccatattgagaccgtcatcaacgctctgaaaacagaaagagacgtatcagtgcgccagcgggcagtggacctcctgtatgccatgtgtgaccggtccaatgccccccagattgtggcggagatgctgtcctacctggagactgccgattactcgattcgcgaagagatcgtcctgaaggtagccattcttgcagagaaatatgccgtcgactatacttggtatgtcgatactatacttaaccttattcgaattgcaggcgattatgttagtgaagaggtttggtaccgggtcatccagatagttatcaatcgcgatgatgtgcagggttacgcagcaaaaaccgtgttcgaggccctgcaggcacctgcctgtcatgaaaatctagtaaaggtgggagggtacatcctaggagagttcggcaacctaattgctggcgacccacggtcctcccccctgatccaatttcacttactacactctaagttccacctgtgtagcgttcccacccgagccctgcttctaagtacttacattaagttcgtgaacttattccccgaagtaaagcccacaattcaggacgtcttgcgctcagacagtcaattgcgcaatgccgatgttgagttgcaacagcgtgccgttgaatatctgagactgagcactgtcgctagtactgacattttagcaacagtccttgaggagatgcctcctttccccgaacgggagtcttctatactcgcaaagttgaagaaaaagaagggccctagtacagttacagacttggaggacaccaaaagggatcgaagtgtggacgtgaatggaggacctgagccagccccagcgagcacatcggccgtctccacgccatcaccatctgccgatctgctcgggctcggggccgccccccctgctcctgcaggccctccgcctagttctggcggatccggtctgctcgtggacgtattcagcgatagcgcttctgttgtggcacctctggctcctggatccgaggacaattttgctcgattcgtgtgcaagaataacggcgtgctatttgagaaccagctgctgcaaattgggttgaaaagcgagttcaggcagaatttgggaaggatgtttattttctatggaaacaaaaccagtactcagttcctgaattttaccccaaccttaatatgtagtgacgacctacagccaaatctaaacttacagactaaacctgttgacccaaccgtggaaggaggagcccaagttcagcaggtggttaatattgaatgcgtgagcgacttcactgaagctcctgtgttgaacattcaatttcgctacggcggcactttccaaaatgtgtccgtgcagcttccaattaccctgaacaaattcttccagcccaccgagatggcttcccaggatttctttcagaggtggaaacagttgtctaacccccagcaggaagtgcaaaacatctttaaagcaaagcacccaatggacactgaagtaactaaagcaaagattatcggctttgggtccgctcttctggaagaggtggacccaaatccggccaatttcgtaggggctggcattatccacacaaaaactacccagatagggtgcctgctcagactcgagccgaacttacaggcccagatgtaccgcttaacactgcgaacctcaaaggaggccgtgtctcaaagactctgcgaactgttatcggctcagttttag

SEQ ID NO: 107324 - DNA, 1062 bp, synthetic construct
  misc_feature 1..1062: note = Description of Artificial Sequence: Synthetic coding sequence
  source 1..1062: mol_type = other DNA
atgcctgcagtgtccaagggagatgggatgaggggtttagctgtcttcatttccgatattcgcaactgcaaatccaaagaagccgaaatcaaacgcataaacaaggagctggccaacattcggtccaaattcaagggtgacaaggctctagatggatacagcaaaaagaaatatgtgtgtaagctgctgtttatctttctgctagggcatgatatcgattttggacacatggaggccgtgaatcttttaagtagcaataggtatacagaaaaacagattgggtacctctttataagcgtactggtgaattctaattccgaattgatcagactcataaacaatgcaataaaaaacgacctcgccagtcgcaatcccaccttcatgggccttgctttgcattgtatagcgagtgtgggatcaagggaaatggcagaggccttcgccggagaaattccaaaggtgttagttgccggagatacaatggatagtgtcaagcagtccgccgctctgtgtctgctgcgcttgtatagaacgtcaccggatttggtgcctatgggtgattggacatcccgcgtcgtgcacctgttgaatgaccagcacctgggagtcgtgactgcggctacctccttgataaccaccttggctcaaaaaaaccctgaggagtttaaaacaagtgtaagcttagcagtgagccgcctgtccaggatcgttactagcgcatctactgacctccaggactacacttattactttgtgccggctccctggttgtctgtgaagctcttgagactgctgcaatgctacccccccccagatccagccgtgcgcggcaggctaaccgaatgtctggagaccattctcaacaaagcacaggaaccccccaaaagtaagaaggttcagcatagcaacgcgaaaaatgctgtcttattcgaggctatcagcctgatcatccaccacgatcgagagccaaatctccaggctcagatgtaccgtctgaccctgcgcacatcaaaggaagccgtgagccagcgcctgtgcgagcttctgtctgcacagttttag

SEQ ID NO: 107325 - DNA, 1971 bp, synthetic construct
  misc_feature 1..1971: note = Description of Artificial Sequence: Synthetic coding sequence
  source 1..1971: mol_type = other DNA
atgcctgccgtttctaagggagacggcatgagagggctcgcagtcttcatctccgatatcagaaattgtaaatctaaggaggcagagatcaaacgcattaacaaagagctggctaatatacgcagcaaattcaaaggggacaaagcccttgatggatattcgaagaagaaatacgtctgcaaacttctgttcattttccttttaggacacgacatcgatttcggacacatggaggcggtgaatctgctttcgtccaacaggtatacagagaaacagatcggatacctattcatctcagtcctcgttaattcaaattcagagctaattagactgatcaacaatgcaatcaagaacgatctggctagccgtaacccgacctttatgggcctcgcactccactgcatcgcatccgtgggttccagggagatggccgaagctttcgccggtgaaattccaaaagtgcttgtggccggggacaccatggatagcgtcaagcagtccgccgctctctgtctgttgaggttgtaccgcacgagccccgaccttgtgccaatgggtgactggaccagccgcgtggtgcacctcctgaatgatcagcacctaggcgttgtgacagccgcaacatctctgatcaccacacttgcccagaagaatcctgaggaatttaaaaccagtgtgagtctagccgtcagtcgtcttagtaggattgttaccagtgctagtaccgacctccaggactacacctactattttgtgccagccccatggctaagtgtcaagctgctgcgcttgctgcagtgctatccccctcctgaggatccggccgtccgtggacgtctgaccgagtgcctagagactatcttgaataaggcgcaggaacctcctaagtccaagaaagtgcagcattcaaacgcaaagaacgcggtgttgttcgaagctatcagtctgatcatccaccacgactccgaaccgaacctgctcgtccgtgcatgcaatcagctcggacagtttctccagcatcgcgaaacgaatctgagatatctggcactggagagcatgtgcaccctcgcgagcagcgagttcagccacgaagcggttaaaactcatattgagaccgtcataaacgccctcaaaaccgagagggacgtctccgtccgccagcgggccgtagacctgctctacgccatgtgcgaccggagcaacgcgcctcagattgtggcggaaatgttgtcctatcttgaaaccgccgactacagtattcgagaggagattgtcctcaaggtggcaattttagccgaaaagtatgccgtggactatacatggtacgtagacacaatcctgaacctgattagaatcgccggtgattacgtgtcagaggaagtgtggtatcgcgttattcagatcgtgatcaatcgagatgacgtgcaaggttatgctgctaagaccgtgtttgaagccctgcaggcccctgcatgtcatgagaacctggtcaaggtgggaggttatatcctaggcgagttcggaaatctaatcgccggcgatccccggtcctccccccttattcagttccacctccttcacagcaaattccacctgtgctcagtgccaacacgagctctgttgctaagcacgtatattaagtttgtgaatctcttcccggaagtcaaacccaccatccaggacgtcctgaggtctgactctcagttgagaaacgctgacgtggagcttcagcagagagccgttgagtacctgcgcctgtccacagtggcgtcaaccgacatcttggcaactgttctcgaagagatgcctccattccccgaacgcgagagctcaatactcgctaagctaaagaaaaagaaaggtcccagcaccgtcacagatttagaagataccaagagggatagatctgtagacgtgaatggtgggcctgagccagcaccagcctcgacttctgccgttctctgcttgtag

SEQ ID NO: 107326 - DNA, 2820 bp, synthetic construct
  misc_feature 1..2820: note = Description of Artificial Sequence: Synthetic coding sequence
  source 1..2820: mol_type = other DNA
atgccagctgtgagcaagggggatggcatgcgcggattggccgtattcattagtgacataagaaattgtaaatccaaagaagcagaaattaaaagaatcaacaaggagctggcgaatatcagatctaagttcaaaggcgacaaggcactggatggctattccaaaaaaaaatatgtatgcaagttacttttcatttttttgttaggacacgatatagactttggccatatggaggctgtgaatttactctcctctaaccgatacactgagaaacaaatcggctacctgtttattagtgtgctcgtgaactctaattccgagcttatccggctgattaataacgccatcaagaacgacctcgcttctcggaaccctacttttatgggattagccctgcactgtatagcttccgtgggatcccgggaaatggctgaagccttcgccggcgaaataccaaaggtgctggtggctggtgacaccatggattcagtgaagcagagcgccgccttgtgcctgttgagactctatcgcacatctcctgaccttgtgccaatgggagattggacgagccgcgtggttcacctcctcaatgaccagcacctcggggtagttacagcagctactagtctaatcacgacactggcacagaagaatcctgaggaatttaaaacatccgtctccctggctgtatcacggctgtcgcgaattgtcaccagcgcctctaccgatctgcaggattacacttattatttcgttccagctccttggttgtccgtaaagctgctacgtctgctccagtgctacccgccacctgaccctgccgttagagggcggctgaccgagtgcctcgagactattctcaacaaagcacaagagcccccaaaatccaaaaaagtccagcactcaaacgcaaaaaatgccgttctgttcgaggcgatcagcttgataatccatcacgactcagagccaaatcttctagtcagagcctgtaaccagctcgggcagttcctgcagcaccgggaaacaaacttgcgctatctcgctctcgagtccatgtgtacgctcgcttcctccgagtttagccacgaggctgtgaagacccatatcgaaactgtaatcaatgcgttgaagacagagcgcgatgtgagcgtccggcagcgggcagtggatctgctgtatgcgatgtgcgacaggtccaacgctccacagattgttgctgaaatgctgtcctacctcgagacagctgattattctatccgggaggagatcgtcctgaaggtggctattctggccgagaagtacgccgtagattatacttggtacgtggatactattttgaatcttatccgaatcgcaggagattacgtgagcgaagaggtgtggtatcgtgtgatacaaattgtcattaatcgcgacgatgtgcaggggtatgcggctaagaccgtgttcgaagctcttcaggcccccgcctgtcacgagaacctggtgaaggtgggagggtacatcctgggagagttcgggaatttgattgcaggggaccctagatcaagccctctgatccagtttcacctgctgcactccaagtttcacctgtgttctgttcccacacgagcgctgctgttgagcacctatattaagttcgtcaaccttttcccagaagtcaagccaacgatacaggatgttctccgctcagactcccagctccgcaatgcagacgtggaactccagcaaagggccgttgaatacttgcggctgtccaccgtggccagcacagatatactggcaacggtgctggaagagatgccgccattcccagagcgcgaatctagtatcctagccaagctgaaaaaaaagaagggaccctcaacagtcactgatctcgaggatactaagcgagacagatccgtcgacgttaacggggggcccgaacctgctcctgcttcaactagcgcggtatccaccccatctccatctgctgacttattaggtctgggcgctgcaccccccgccccagctggaccccctcccagtagtggcggctctgggctgctggtcgacgttttttcggactccgcgtctgtagtggcacccctggcccccggctccgaggataacttcgcacgattcgtctgcaagaataacggggtgctgttcgagaatcagcttttgcagataggtcttaagtccgagttcagacaaaacctgggccgcatgttcatattttacggcaataaaacctctacccagttccttaattttacccccactctcatctgctctgacgatcttcagcccaacttgaacttgcagaccaagcccgtggaccctacggtcgaggggggcgcccaagtacagcaggttgtgaacattgaatgtgtgtctgactttacagaggcccccgtcctaaacatccaattccgctacggcgggactttccagaacgtgtctgtgcagctgcccatcacgctgaacaaattctttcaacctacggaaatggccagtcaggacttctttcagcgctggaagcagcttagtaacccacaacaggaggttcagaatatttttaaggctaagcacccgatggacaccgaggtgaccaaggcgaagattataggatttggatcagcgctactcgaggaggtggatccaaatcccgccaactttgtcggtgccggcatcatccacacaaaaactacacaaataggatgcctgctgaggctggagccgaatctgcaggcacaaatgtatcgactgactctcaggaccagtaaggaggcggtatcccagagactgtgcgagctcctatctgctcaattttag

SEQ ID NO: 107327 - DNA, 2040 bp, synthetic construct
  misc_feature 1..2040: note = Description of Artificial Sequence: Synthetic coding sequence
  source 1..2040: mol_type = other DNA
atgcctgccgtgagcaagggagacggaatgcgtggcttggcggtattcatctctgacatcaggaattgcaagagtaaggaggcggagataaaacgtatcaacaaagaactggctaatattcgctccaaattcaagggtgacaaagctctggatgggtacagtaaaaaaaagtacgtgtgtaagcttctctttatcttcctcctggggcatgacattgatttcggccatatggaggcagtgaacctattgagttccaatcgctacactgagaagcagattggttatctgttcatcagcgtcctcgtgaatagcaattctgaactgataagactgatcaataatgccatcaagacggagagagacgtatcagtgcggcagcgggccgtcgacctgttatatgctatgtgcgacagatccaatgccccacagatagtcgcggagatgctatcttacctcgaaaccgctgattattctattcgagaggaaattgttctgaaggtcgcaattctggcagagaagtatgctgtcgactacacatggtatgtagacaccatcctgaatctgattagaatcgctggggattatgtgagcgaggaagtttggtatcgagttattcagatcgttattaaccgggacgatgtgcagggctatgcagcgaaaacggtattcgaagcacttcaggccccggcgtgccacgagaacctggttaaagtgggcggatacatcctcggcgaatttggtaatctgatcgccggtgacccgcgatcctcacccctcattcagttccacctgttgcattccaaatttcacctgtgctccgttcccaccagagctttacttctgtcaacttacatcaagtttgttaatttatttcccgaagtaaagcccactatccaggacgtcctccggtcagatagtcaactaagaaacgctgatgtcgagttacagcaaagggccgttgagtatcttagactgtctaccgtggcaagtacggacattctcgctaccgtactggaagagatgccacccttcccagagagagaatcttctatcctggccaagcttaaaaaaaagaaaggtccatccacagtcaccgacctcgaagacacaaaaagggataggagcgttgacgttaacggagggcccgaacctgctcctgccagtaccagcgcggtgtcaaccccatccccaagcgctgacctcttgggtttgggcgctgctccaccagcccctgctgggccgccccctagctctgggggctcaggtttgcttgtagacgtgttcagtgactcagcgtccgtcgtggcgccactggctcctgggtcagaagacaatttcgcccgctttgtatgcaaaaacaacggagttctcttcgagaaccagctcctacagattggactgaaatccgaatttagacagaacctcggccgcatgttcatattctatggaaataaaacctctacccagtttctcaacttcactccgacattaatctgcagcgatgatctgcagcctaaccttaacctgcagaccaaaccagtggatcccactgttgaagggggggcgcaggtgcagcaggtggtgaatattgagtgtgtcagcgactttactgaggcccctgtcctaaacatccagttcagatatggcggaacatttcagaacgtttctgttcagctgcccatcacactcaacaaatttttccagccgaccgagatggcatcacaggattttttccagcggtggaagcagctgtcaaacccccagcaagaagtacagaatattttcaaggctaagcatccgatggacacggaagtgactaaggctaagatcataggattcgggtctgccttactcgaggaagtcgatcctaatcccgcaaacttcgttggagcgggcattatacataccaaaacgacacaaattggatgtctgttgagactcgaaccaaacctgcaggcacaaatgtacaggcttaccctgagaaccagcaaagaggcggtctcacagagattgtgcgagctgctgagcgcacaattttag

SEQ ID NO: 107328 - DNA, 2031 bp, synthetic construct
  misc_feature 1..2031: note = Description of Artificial Sequence: Synthetic coding sequence
  source 1..2031: mol_type = other DNA
atgcctgcagtgtccaagggggacgggatgaggggtctggcggtgtttatttccgatatccggaattgcaaaagcaaagaagccgagataaaacggattaataaagagctggctaatatccgatccaagttcaagggtgataaagcgctagacggatattccaagaagaagtacgtgtgcaagctactgttcatattccttttaggacatgatattgattttggacacatggaggcagtgaatctcctcagcagtaacaggtacacagagaaacaaatcgggtacctgtttatctctgttcttgtcaattctaacagcgaactgattagactgatcaataacacggagagggacgtgagtgttcgacaaagagctgtcgacctcctttacgccatgtgtgacaggagtaatgccccacagattgtcgctgagatgttatcgtacttggagaccgccgactactcaatccgggaagagatcgttctcaaggtagctatccttgccgaaaaatacgctgtagattatacctggtatgttgacacaatcctgaacctgatcaggatcgcgggtgattatgtctccgaggaggtgtggtaccgagtgattcagatcgtcataaatcgggacgatgtgcaggggtacgcagctaagaccgtgttcgaggccctgcaagcaccagcctgtcacgagaatttagtgaaggtgggaggatatattctgggcgaattcggaaaccttattgcaggggacccccggtcctccccattaatccagttccatctgctgcatagcaaattccacctgtgttcagtgcctacccgcgccctgctgttgtctacttacattaaattcgttaacctttttcctgaagtgaagccgacaatccaagacgtgctccggtccgactctcagctgagaaacgcggacgtggaactgcagcagcgagccgtggaatacctgcgattaagcaccgtggcaagcaccgatattctagcgacggtcctggaagaaatgcctccctttccggagagagaaagttccatcctggctaagctgaagaaaaaaaaagggccttcaactgttaccgacctggaggatactaagagggaccgctcagtcgacgtgaacggtggccctgagcctgcacccgcgtcaactagcgccgtatctaccccatcaccatcagcagatcttctgggtcttggggctgctcctcccgcgccagccggccccccaccttcctcaggaggctctggcttgctggttgacgtcttctccgattctgccagcgttgtggctccactcgcccctggcagtgaggataatttcgctcgctttgtatgcaaaaacaatggcgtcctcttcgagaaccagctgctgcagatagggcttaagtccgaatttcgccaaaaccttgggaggatgttcatattttatgggaacaaaacatcaactcagttcttgaatttcaccccaactctgatttgctcagatgatcttcagcccaatctcaatcttcaaacaaaaccggtggacccaacggttgaaggaggggcccaggtgcaacaggtcgtaaacattgagtgcgtgagcgacttcaccgaagcacctgtactcaatatacagttcaggtatggcgggaccttccagaatgtctctgtgcagctgcctatcacgctcaacaaattcttccagccaacagagatggcttcgcaggacttctttcagagatggaagcagctcagtaatccacagcaggaagtccagaatatatttaaagccaaacacccaatggatacagaagtcactaaggccaaaattatcgggttcggctcagccctcttggaggaagttgacccaaaccccgctaactttgttggtgccggtatcatccacactaaaaccacccaaataggttgcctcttaagacttgagccgaatcttcaggcgcagatgtataggttgactctgcgtacatccaaggaagccgtatcccagaggctctgtgaactgctctcagctcagttctag

SEQ ID NO: 107329 - DNA, 2814 bp, synthetic construct
  misc_feature 1..2814: note = Description of Artificial Sequence: Synthetic coding sequence
  source 1..2814: mol_type = other DNA
atgacagacagtaaatactttaccaccaataagaagggggagatcttcgaactgaaagccgaactcaataacgaaaaaaaggaaaagaggaaggaggccgtaaaaaaggtcattgccgcgatgactgttggcaaggacgtgagttcactgtttcccgacgtagtaaattgcatgcagactgacaacctcgaactgaaaaaactggtatatctttatctgatgaactatgcaaagagtcagccagacatggcgattatggctgtcaacagttttgtgaaggattgcgaggacccgaacccactcatacgggccctcgcagtaaggactatgggctgtatacgcgtggacaaaattaccgagtacctgtgtgaacctctgagaaagtgcttgaaagatgaagacccgtatgtgaggaagacagccgctgtgtgcgtcgccaagctccacgatatcaacgctcagatggtagaagaccaagggttcctggatagcctgagggatctcatcgcggatagcaaccccatggtggttgccaacgcagtcgccgcgctctcagaaatctctgaatcacatcctaactcaaatctgttagacctgaacccccagaatatcaataagctgctgacagccctgaacgaatgtactgagtgggggcagattttcatccttgactgtttgtccaactataaccctaaagacgatagggaggctcagtccatctgtgagcgagtcacccctcgcctctcccacgctaatagcgcggttgtgctgtcagctgttaaagtactgatgaagtttctggaactgctccccaaagatagcgattattataacatgctgctgaaaaaattggccccacctcttgtcacccttctttcaggagaaccagaggtgcagtatgtggccctccggaacatcaatcttatcgtccaaaagcgtcccgagatcttgaagcaggagattaaagtgttctttgtgaaatacaatgatccaatatacgtgaaactggagaagttggacattatgattaggctggcgtcccaagctaacatcgcgcaggtactggcagagcttaaggaatatgccaccgaagtggacgtcgatttcgtccgaaaggcagtgcgagccatcggtcggtgcgctataaaagtggagcaaagcgcagaacggtgtgtgtccacactgctggacctcattcagacaaaagtgaactatgtcgtgcaagaggctattgttgtgatacgggacattttcaggaagtacccaaacaagtatgaatccataattgccaccctttgtgagaatttggattcactcgacgaaccagacgcgagagctgcaatgatctggatcgtgggggagtacgcggaaaggattgataatgcagacgaactgctcgagtcgtttctggaaggtttccacgacgaaagcacccaggttcaactgactctcctgacagctattgtgaaattgtttctgaagaaaccttcagagacgcaggaactggtccaacaggtgctgtctctagccacgcaagatagcgacaacccagatctgcgagacagggggtacatttattggaggctgttgtcaacagatcctgtgaccgcgaaggaggtggtactgtcggaaaaaccattgatcagcgaggaaaccgatttgatcgaacccacgcttctggacgaactcatctgccacatcggatccctggcctcagtctatcacaaaccccctaacgcttttgtggaaggatcgcacggtatccataggaaacacctccccatccatcatgggagcactgatgccggggatagcccagtgggcactaccactgctactaatctggagcaaccccaggtaattccttctcaaggtgatctgctgggcgatctactcaaccttgacctgggtcctcccgtgaacgtcccccaggtttcatctatgcagatgggggctgttgaccttctgggcggtggactggattcattagttggccagagttttataccatcctcagtgcctgccacctttgctccttcccctacccccgcagtcgtaagtagcgggctgaacgatctgttcgagctctccactggaatcggaatggcaccgggaggatatgtagccccgaaagccgtgtggctgcctgcggtgaaggctaaaggcctcgagattagcggcacattcacccataggcagggccacatttacatggagatgaacttcaccaacaaggcgctgcagcacatgactgactttgccatccaatttaacaagaattcatttggtgtgattccctcgactccgttagcaattcacacaccactgatgccgaaccagagcatcgacgtctccttaccactcaacaccctgggacccgtcatgaaaatggagcctttgaataacttgcaagtagcagtgaagaataatatcgacgtgttttatttttcgtgtctaatacctctgaacgtgttgttcgtggaggacggcaagatggaacgccaggtgttcctggcaacctggaaagatatccctaatgaaaacgaacttcagttccagatcaaagaatgccacctcaacgccgatactgttagtagcaaactccaaaataataacgtttataccatcgccaagcgcaatgtggagggccaagacatgctgtatcaatccctgaaactcacaaatggcatatggatcttagcagaattacgtatccagcccggcaaccccaattacaccctgagcctgaagtgtagggccccggaagttagccagtacatctaccaggtttatgacagtatcctgaaaaattag

SEQ ID NO: 107330 - DNA, 2856 bp, synthetic construct
  misc_feature 1..2856: note = Description of Artificial Sequence: Synthetic coding sequence
  source 1..2856: mol_type = other DNA
atgactgatagcaagtacttcacaactaataagaagggcgaaatctttgagttaaaggcagaactcaacaatgagaagaaggaaaaacgcaaggaggctgtgaaaaaagtgattgccgcaatgacagtgggcaaagatgtgagtagtctcttccctgatgtcgtgaattgcatgcagacagataatttggaactgaagaagctcgtctacctgtacctgatgaactacgctaagtcccaaccagatatggcaattatggccgtgaattcttttgtgaaggattgcgaggaccctaaccctttgatccgagcgttggcagttcgtacaatgggatgtatcagagttgacaagatcacagaatatctctgtgaaccgctgaggaaatgcctgaaagatgaggacccctacgtgaggaagaccgctgccgtctgtgtggcaaaactccatgacatcaacgctcagatggtggaagatcaaggcttcctggatagcctgcgcgacctcattgcagactccaacccgatggtagttgctaatgccgtggcggctctatctgagattagcgaatcccatcccaacagtaacctgctggacttgaacccccagaacatcaataagctgctcacggccctgaacgagtgtaccgagtggggtcagatcttcatccttgattgcctgtccaattacaatccgaaagatgatcgcgaggcccagtcaatttgcgagagggtgacccccagactgtcacacgctaattctgctgtagtgctctctgcagtgaaggtgcttatgaaattcctggagctcttgcctaaggatagcgactactacaatatgctgctaaaaaaacttgctccccccctcgtaactttactgtccggggaaccagaggtccagtacgtggcactcaggaacatcaatttgatagtccagaaacggcccgagattctcaagcaagagatcaaggttttttttgtaaaatataatgatcctatctacgtcaaacttgagaaacttgacatcatgatccgcctggccagtcaggctaatattgctcaggtgctggcagaactcaaagagtatgctacggaagtggatgtggatttcgtaaggaaagctgtcagagctatcggtaggtgtgctattaaggtggagcagagtgccgagaggtgcgtgagcactctgctagacctcatccagaccaaggtgaattacgtcgtccaggaggctatcgtggttattcgcgacatctttaggaagtatcctaataagtacgaatcaattatcgcaacattatgcgagaatcttgacagtctggacgaaccggacgccagggccgccatgatctggatcgtcggagagtatgccgaacggattgataacgctgatgagctgttagaatcctttctcgaaggtttccatgacgagtccacccaggttcagctcacactgttgacagctatcgttaagctgtttttgaagaagccttccgaaacacaggagctcgtccagcaggtactaagtcttgctacacaggactcagacaatcctgaccttcgtgaccgcggctatatttactggcggctgctttctaccgaccccgtgactgccaaggaagtcgtgctcagcgaaaagccgctcatcagcgaagaaaccgatcttattgagccaaccctactggatgaactcatctgtcatatcggtagtttggcgagcgtctaccacaagcctcccaacgcctttgtggagggatctcatggtatacaccgaaaacacttgcccatccaccacggttctaccgatgccggagatagccccgtcggtactaccaccgccactaatctggaacagccgcaggtcattccttcacagggcgatctgctcggcgatctcctgaatctagatctgggccccccagtgaatgtgccacaagtcagtagcatgcagatgggtgccgtggatctccttggaggcggactcgactccctcctgggttcagatctgggcgggggaatcgggggcagcccagccgttggtcagtccttcatcccctcctccgtcccagcaaccttcgcgccctcacctacccccgccgtcgtctcgtcgggcctgaacgatctgttcgaactctcgacaggtatcggcatggcgccagggggctacgtcgctcctaaggccgtctggttacctgctgttaaggcaaagggcctcgagatcagtggtacctttacacatcggcagggccatatttacatggagatgaatttcactaataaagccctgcagcatatgacagattttgctatccagttcaacaagaatagctttggcgtaataccaagcacccctctcgccatccatacgcctttgatgccaaaccagtccatagatgtctctctccccctgaacacactcggcccagtgatgaaaatggagcccctcaataatttgcaagttgccgttaagaataatatcgatgtcttttatttctcttgccttattccactgaatgtgttatttgtggaggatggcaagatggaaagacaggtgtttctggccacctggaaggacataccaaatgagaatgagcttcagttccagatcaaggaatgccatctcaatgccgacacggtaagtagcaagctgcagaataataatgtgtataccattgctaaacggaatgtggagggacaggacatgttgtatcagtcccttaagcttacaaacggcatttggatactggctgaactcaggattcagcctgggaaccccaattacaccctgtcattaaaatgtagggctcctgaggtgtctcaatatatctaccaggtttacgatagcattctcaaaaattag

SEQ ID NO: 107331 - DNA, 2856 bp, synthetic construct
  misc_feature 1..2856: note = Description of Artificial Sequence: Synthetic coding sequence
  source 1..2856: mol_type = other DNA
atgactgattccaagtacttcacaacgaataagaagggggaaattttcgagttgaaagctgagctcaataatgagaagaaggagaagcgcaaagaggctgttaaaaaagtgatcgctgctatgacagtgggaaaggacgtgtcctcgttgttccccgacgtggtcaactgtatgcagactgataatttggagttaaaaaaactagtttatctctacctcatgaactatgctaagtcccagccagacatggctattatggcagtgaattcctttgtgaaggattgtgaagaccccaatccactaattcgcgctctggcagttcgaacgatgggttgtattcgcgttgataaaatcaccgaatacctgtgcgagccactgaggaaatgtctcaaggacgaagacccctatgttcgtaagaccgccgctgtctgcgttgcgaaactgcacgacatcaacgcccaaatggtcgaggatcagggatttcttgacagtctgcgagatctcatcgcggattctaaccccatggtagtggcaaacgccgtggctgccctatccgagatatcagaatcccaccctaactcaaatctcctagacctcaaccctcagaatatcaacaagctcctgaccgctttaaatgagtgtacagagtggggacaaattttcattctagactgtttatcaaactacaacccgaaagacgatagagaggcccagtccatctgcgagcgggtgacgccacgcctgtctcatgccaacagcgcggttgtgctctctgccgtaaaagtgctgatgaaattcctggagctgctgccgaaggattccgactattataatatgctcctcaagaagttagccccgcccctggtgacgctcttaagtggagaaccagaagtgcaatatgtagctcttaggaatattaatctaatcgtgcaaaagagaccagaaatccttaagcaggaaataaaggtgtttttcgttaagtacaatgacccgatttatgtcaaactcgagaaacttgacattatgattagactagcatcacaagcgaacatcgcgcaggtcctggcagagctgaaggagtacgccaccgaggtggatgtagatttcgtccggaaggccgtgcgcgctatcggacgctgtgccatcaaagtcgaacagagtgccgaacgatgcgtgagtacacttctagacctgatccagaccaaagtgaattatgtggtgcaggaagcgattgtagtaattcgcgacatcttccgaaagtaccccaataagtacgaatcaatcattgcgacgctgtgtgagaacctggactcgctggacgagccggatgcacgcgcggccatgatttggattgtcggtgaatatgcagagaggatcgataatgctgatgagctcctggaatctttcctggaagggttccacgacgagtcgacacaggtccagctgaccctgctgacagcaattgttaaactgtttctgaagaaaccatccgagactcaggaacttgtccaacaggttctcagccttgctacacaagactctgacaatcccgatctgagagaccgcggctatatttactggcgtctattatccaccgacccagtgacagccaaagaggtggtcctgagcgagaagcctctgatcagtgaggagacagacttgattgaacccaccctcttggacgagcttatctgtcacataggtagcttggcctctgtataccacaagccccctaacgccttcgtggagggttctcatggcattcacagaaagcatttgcccattcaccacggatcgactgacgctggagacagcccagtaggtaccaccactgccacaaatctcgaacagccacaggtcatcccttcacagggagatctactgggcgatcttctcaacctggacctcggtccccctgtcaacgtcccgcaggtctccagcatgcagatgggcgcggtagatcttttaggcggcggcctggatagtcttctcgggagtgatctaggaggcggcattggtggttcgcctgccgtcggacagtcgttcatcccttcgtcggtgccggccactttcgcaccttcaccaacgccagcggtggtttctagcggcctcaatgatttatttgaattaagtacaggcattggaatggctcctggtggctatgttgcgcccaaagcagtttggctgcctgccgtgaaagccaagggcctcgaaataagtggaacttttacacaccgccagggtcatatttatatggagatgaatttcaccaataaagctctgcagcacatgaccgactttgcaatacagtttaataagaacagcttcggggtgattccttctacccccctcgccatccacactcctctgatgcccaaccagtctattgacgtgtctctcccattgaatactttagggcccgtaatgaaaatggaacccctcaataatctccaggtggcagttaaaaacaatattgacgtcttctacttctcgtgtctgataccgctaaacgtgctattcgtcgaagacggaaaaatggaaagacaggtctttctcgctacatggaaggatattccaaatgaaaatgaactgcaatttcaaatcaaagagtgccacctgaacgcagatactgtgtcttcaaagctacagaataataatgtatacaccatagctaagcggaacgtggagggtcaagacatgctgtatcaaagcctcaagctaacaaacggtatatggattttggctgagctaaggatccagcctgggaatccgaactatactctgtcattgaagtgcagggcccctgaggtgtctcagtacatctatcaagtgtacgacagcatcctgaagaactag

SEQ ID NO: 107332 - DNA, 2643 bp, synthetic construct
  misc_feature 1..2643: note = Description of Artificial Sequence: Synthetic coding sequence
  source 1..2643: mol_type = other DNA
atgcagaccgacaatctggaattgaagaagttggtgtacttgtatctgatgaactatgccaagagccagcctgatatggccatcatggccgttaattcctttgtgaaggactgcgaggaccctaacccgcttattagggcactggcggtgagaactatgggatgtatacgcgtcgataagattaccgagtatctgtgcgagccactgcgaaagtgcctgaaagatgaagatccctacgtcaggaaaacagccgccgtgtgcgtcgctaaactccacgacattaacgcacaaatggttgaagaccagggattccttgacagtctgagggatttgatagctgattccaatccgatggtcgtcgctaatgccgtcgcagctctgtctgagatcagcgagagccatccaaacagtaatcttctcgacctgaacccacaaaatatcaataagttgctgaccgctctcaacgagtgtacagaatggggtcagatcttcatcctggattgtctgtctaactacaaccccaaagatgaccgggaagcccaaagcatttgtgaacgtgttacacctcgcttgtcacacgccaactctgctgtggtcctgagcgccgtaaaggtcctcatgaagtttcttgagctgttacctaaagacagtgattactacaatatgctactgaagaaacttgccccccctcttgtgaccctcctgagtggggaacctgaagttcagtatgttgctctcaggaacatcaacttgattgtgcaaaagaggcccgaaatcctcaaacaggaaattaaagtgttcttcgtgaagtataatgatcccatctacgtgaagttagagaaactagacattatgatcaggcttgcctcccaggccaatatagcacaggtgctcgccgagctcaaggagtacgctactgaagtggacgtggattttgttagaaaagcagtgcgagcaatcggccggtgtgctatcaaggtcgagcagagcgccgaaagatgcgttagtaccctgctggatctgatccaaactaaagtgaactacgtggtgcaagaggcgatcgtggtgatcagagacatcttccgcaagtatcctaataagtatgagtcaatcattgccacgttatgcgaaaatctggacagcctggatgagcccgacgcacgcgccgccatgatctggattgtgggcgaatacgccgagcggatcgataatgctgatgagctactggaatcatttcttgaagggtttcacgacgagtcaacccaggttcagctgaccctgctgaccgctattgtgaagctgtttctgaagaaaccttccgaaacgcaggaactagtgcagcaggtccttagcctcgcgacccaagattctgacaatcccgatctgcgtgaccgtggatacatttattggaggctgctatctaccgaccctgtgacagcaaaggaagtggtgctctcggaaaagcctcttatttcagaggagaccgacctgattgaacccactttgctggatgaactgatatgccatatagggtccctggcctccgtatatcataagccacctaatgcgttcgtggagggctcacatggtatccaccgaaaacatctcccaatccaccatggctcaaccgatgccggagactcccctgttggcaccacaaccgcaacaaacctcgaacagccccaggtcatccccagtcagggggaccttctaggcgacttgcttaacctggacttaggtccccctgttaatgtccctcaggtgagttccatgcagatgggggctgtcgacctacttggtggtggattggacagcctagtaggtcagtcgtttattccctcctccgtacctgctacttttgcccctagccctacgcctgccgtagtgagttcaggtcttaacgatctgtttgagttgtctacaggtatcggaatggcacctggagggtatgtggctcccaaggccgtgtggttgcctgcagtgaaggccaaggggctcgagatctctggaacattcacgcataggcaggggcatatctacatggagatgaacttcacaaacaaggctctgcaacatatgacggactttgccattcaattcaacaagaacagcttcggcgtcattccctccacgcctcttgcgattcacacaccactaatgcccaaccagtcaatcgacgtgtctctgcccctgaatactctcgggcccgtcatgaaaatggagccgttgaataacctgcaagtggccgtaaaaaacaatatagatgtgttttactttagctgtttaatacctctcaacgtgctattcgtagaggacggtaaaatggaacgacaggttttcctagccacctggaaggacattcccaacgagaacgagctccaatttcagattaaggagtgccatttgaacgccgataccgtgtcctccaagctgcaaaacaacaacgtatacactatagctaagcgcaacgtagagggtcaggatatgctgtaccagtctctgaaactgaccaacggaatctggatactggccgagcttcgtattcagcccggaaatcctaactatactctgtctttaaaatgtagggcgcccgaggtgtctcagtacatctaccaggtgtatgatagcattctgaagaattag

SEQ ID NO: 107333 - DNA, 2067 bp, synthetic construct
  misc_feature 1..2067: note = Description of Artificial Sequence: Synthetic coding sequence
  source 1..2067: mol_type = other DNA
atgaagtttttggagctcctacccaaagatagcgattactacaacatgctgctgaaaaaacttgctccacctttggtcactctcctcagtggagagcccgaggtgcaatatgttgcgttgaggaacataaatctcatagtccaaaagagaccggagatcctcaaacaggaaataaaggtgttttttgtgaagtataatgatcctatctatgttaaactggagaaactggacataatgataaggcttgcctcccaagccaatattgcccaggtgctggccgagttgaaggagtatgctactgaggtggatgtggactttgtgaggaaggcagtacgggcaatcgggagatgcgccatcaaagtagagcagagcgccgaaagatgtgtgtccaccctgttagaccttatccagacaaaagtgaactatgtggtgcaggaagcaatagtcgtgatccgggatattttccggaagtatccgaataagtacgaaagcattatcgccactctctgtgaaaatctggattccttggatgaaccagacgccagggctgccatgatctggatcgtgggggaatatgcagagcgcattgataatgctgatgagctgctcgagtcgtttctcgaaggctttcacgacgagagtacacaggtgcagctcactctgctcacagccatcgtaaagctgtttctcaagaagccaagtgagacccaggaacttgtgcaacaggtactgagtctggctacccaggacagcgataatcccgatctgcgggatagaggctacatctactggcggctgctgagtaccgatccggtcacggcaaaggaggttgtgctatccgagaagcccctgattagtgaggagacggacctgatcgagccaacattgctggatgagctgatctgccatatcggctctctggccagcgtgtatcataagcctccaaatgcatttgttgagggctcgcatgggatccaccgcaaacatctgccaatacaccatggatctactgacgccggtgattctcccgttggcaccacaacagccacaaatctggagcaaccgcaagtgatcccctctcagggggacctgctgggcgatctgcttaacctcgatctcggaccacccgtgaacgtccctcaggtatctagcatgcaaatgggcgcagtggatctccttgggggcggacttgacagcctgctgggaagtgatctgggggggggaatcggcgggtcaccagctgtgggtcagtcgtttataccaagcagtgttcccgcaacatttgctccgtcacctacccccgccgtggttagtagtggtcttaacgatctgttcgagctgtctactggcattggaatggcacctggaggctatgtggctcctaaggctgtgtggctcccagctgtgaaagccaaaggactcgaaatttctggcacatttacacacaggcagggtcacatttacatggaaatgaattttaccaacaaggctttacaacacatgacagacttcgctatccagtttaacaaaaacagttttggcgtgatacctagcacccccctggccattcacactcccctgatgcctaatcagtcaattgacgtgagtctacctctaaacacattaggcccagttatgaagatggagcccttgaataaccttcaggtggcagtgaaaaacaacatagatgtgttttacttctcttgcttaatacctctgaacgttctattcgtggaagacggtaagatggagcggcaggtgtttctcgctacatggaaggacattcctaacgagaatgagttgcagttccagatcaaagaatgccacctaaatgccgataccgtgtcctctaagttgcaaaataacaatgtatacaccattgcaaagcgtaacgtggaaggacaagatatgttatatcagtcactgaaactcaccaacggcatctggatattagcagaactacgtatacaaccggggaacccgaattataccttaagtcttaaatgcagggcccccgaagtcagtcagtatatctatcaagtttatgactcaatccttaaaaactag

SEQ ID NO: 107334 - DNA, 1308 bp, synthetic construct
  misc_feature 1..1308: note = Description of Artificial Sequence: Synthetic coding sequence
  source 1..1308: mol_type = other DNA
atgatcggtggactgttcatttacaatcataagggggaagtgttgatttcaagagtctatcgggatgacattgggagaaatgcagtcgacgccttcagagtaaatgtcatacacgccaggcagcaagtcagaagtccggtcaccaatatcgccagaaccagcttctttcacgtaaagcggtcaaatatttggttggccgccgtcactaagcagaatgtaaacgcggcaatggtgtttgaattcttgtataagatgtgcgatgtcatggccgcttacttcggcaagattagtgaagagaacataaagaataatttcgttctgatatacgagcttcttgacgaaattcttgacttcggctacccacagaatagtgagactggcgctctgaagacctttatcacccagcagggtattaagagccagcaccaaactaaggaggagcagtcacagattaccagccaagtcactggacagattggctggcgcagagaaggtattaagtacaggcgaaatgagctttttcttgacgtcctggaatcagtgaacctgttgatgtctccacagggacaggtcttgagtgctcacgtctcaggcagggttgtcatgaagtcctacctgtcaggtatgcccgagtgtaagtttggcatgaacgacaaaattgtgattgagaagcaaggcaaagggactgctgacgaaacaagcaaatccggtaaacaaagtatcgcaattgacgactgtaccttccatcaatgtgtgagactgagcaagtttgattccgagcgctccatctctttcatccctcccgacggggagttcgaactaatgcggtacagaacaactaaggacattatcctcccgttccgagtcatccctctggtaagggaagtgggtaggaccaaattagaagtaaaggtcgtaattaaatccaactttaagccaagtctacttgctcagaaaattgaggtccgtatccccactcctcttaacacgagcggtgtccaggtgatctgtatgaagggaaaggctaagtacaaggcctccgaaaatgccattgtgtggaagatcaaacgcatggccggaatgaaggaatcccaaatctcagcggagatcgagctgctgccaacaaacgacaagaaaaaatgggcccgcccgcccattagcatgaattttgaggtcccttttgccccttctggactcaaggtgcgatacctgaaggtctttgagcctaagcttaattacagcgaccatgacgtgatcaaatgggtccggtatatcgggaggagtggtatctatgaaacacgatgctag

SEQ ID NO: 107335 - DNA, 1302 bp, synthetic construct
  misc_feature 1..1302: note = Description of Artificial Sequence: Synthetic coding sequence
  source 1..1302: mol_type = other DNA
atgatcggcggcttgttcatctacaatcacaaaggtgaagttctgatttcccgggtatacagggacgatatcgggcgaaacgccgttgacgcttttcgagtcaatgttatccacgctaggcaacaggtgagaagcccggttacaaacatagcccggacctccttcttccacgtcaaacgtagcaatatctggctcgccgcagtaaccaagcagaacgtcaacgctgccatggtgtttgaattcttgtataagatgtgcgacgttatggccgcttacttcgggaagatatccgaagagaacatcaaaaataattttgttctgatctatgaactgctggacgagatccttgactttggctacccccaaaactccgaaactggcgcccttaagacattcattacccagcagggcatcaagagccagaccaaggaagagcaatcacagatcacctcgcaggtgaccgggcagatcggctggaggagggaaggaataaagtacagacggaatgagctgttcctggacgtgctggagtctgtgaacttgttaatgtctccacaaggacaagttctgtccgcccacgtgtccgggagggttgtaatgaaaagctatctatcaggtatgccagagtgtaaattcggcatgaacgacaagatagtcatagagaagcaaggtaagggcaccgctgatgagactagcaaatctggcaagcagtcaatcgccattgacgactgcacgttccatcagtgcgtgaggctgtccaagttcgactccgaacgctcgatatcctttatccctccagacggggaattcgagttgatgcgctaccgcacaaccaaagacatcattctccctttcagggtgattccacttgtacgggaagttgggcggaccaagctcgaggtgaaagttgtgattaaaagcaattttaaacccagtttgcttgctcagaaaattgaggtccggattccaaccccgttaaacaccagcggtgtgcaggtcatctgtatgaaaggaaaggccaagtacaaggccagtgaaaacgctattgtatggaagatcaagcgcatggcaggcatgaaagagtcccaaatatcagcggaaatcgagttgctccccacgaatgacaagaaaaagtgggcaaggcctcccattagcatgaattttgaggtgccatttgctccctctggactgaaagtgcgctacctgaaggtgttcgagccgaagctgaattattccgaccacgacgttattaagtgggtgcgctatattgggaggagcggaatttacgagacccgttgctag

SEQ ID NO: 107336 - DNA, 1302 bp, synthetic construct
  misc_feature 1..1302: note = Description of Artificial Sequence: Synthetic coding sequence
  source 1..1302: mol_type = other DNA
atgatcggggggctgttcatctacaatcacaaaggcgaagtgctgatctctagggtctaccgcgacgacattgggcgcaacgccgtggatgctttccgcgtcaatgtaattcatgctaggcagcaggtgcgttcccctgtgaccaatattgcccggacttctttctttcacgtgaagaggagcaacatctggctcgcagccgtgacaaagcagaatgtaaatgccgctatggtgtttgaattcttgtataaaatgtgcgatgtgatggctgcatactttggaaagatctccgaggagaatataaagaacaactttgttttgatctacgaacttttagatgaaattctggactttggctacccgcagaattctgaaaccggagccctcaaaacattcatcactcagcaaggtatcaaatcacaaaccaaagaagagcagtcccaaatcacctctcaggtcactggtcagattggttggcggcgggagggcatcaaatataggagaaacgagttattcctggatgttctagagtccgtcaatttactgatgtctccccaagggcaagtcctgagtgcccatgtctcaggccgagttgtaatgaagagctatctgagcggaatgcccgagtgtaagtttggcatgaacgacaagatagtgatagagaaacaaggtaaaggcactgctgatgagactagcaaatcaggcaagcagtctattgccatcgacgactgcaccttccaccaatgtgttagattgtctaaatttgactcggaacgctccattagctttattccccccgacggtgaatttgagctgatgaggtacaggacgacaaaagatatcatcctaccctttcgggtgattcctctggtgagggaagtgggtcgcacaaagctggaggtgaaggttgtgattaagagcaattttaagccttccttgctcgcgcagaagatagaggtccggatacccactccgctcaatacttccggagtacaggttatttgtatgaagggcaaggcgaaatataaagcaagtgaaaatgcaatagtctggaagatcaagaggatggcagggatgaaagagtctcagatcagcgccgagattgagcttcttcccaccaatgacaagaaaaagtgggccagaccaccaatcagcatgaactttgaggtgccttttgcccctagcgggctgaaggtgcggtacctcaaagtcttcgaaccaaagttgaattacagtgatcacgacgtgatcaaatgggtgcgctatattggaagatccggaatctatgagacgcgatgctag

SEQ ID NO: 107337 - DNA, 342 bp, synthetic construct
  misc_feature 1..342: note = Description of Artificial Sequence: Synthetic coding sequence
  source 1..342: mol_type = other DNA
atgataggcggcctgttcatctacaatcataagggggaggttctgatcagtagagtgtaccgcgacgatattgggcggaacgccgtggacgcgttcagagtgaatgtgatccacgccagacagcaagtgaggtctcccgttacaaatatagcaagaacgagctttttccacgttaagagatcaaatatatggctcgccgcagtgactaaacagaacgtcaacgcagcaatggtgttcgaattcctctacaagatgtgcgacgtgatggcagcttatttcggtaagatctctgaggagaacatcaagaacaactttgtcctgatatatgagcttctcgactag

SEQ ID NO: 107338 - DNA, 1263 bp, synthetic construct
  misc_feature 1..1263: note = Description of Artificial Sequence: Synthetic coding sequence
  source 1..1263: mol_type = other DNA
atgataggtggactttttatatataatcataaaggcgaggtcctcattagtcgtgtctacagagatgatatcgggcgaaacgctgtggacgctttcagggttaacgtgatccacgcccggcagcaggtcagatcaccagtgacaaacatctggctagccgctgtcaccaaacaaaatgtgaacgccgcaatggtgttcgagttcctttataaaatgtgtgatgtgatggcagcctatttcggcaagataagcgaagagaatatcaagaacaatttcgtgctaatttacgagttactggacgagattttggattttgggtacccccagaactctgaaacaggcgcgttgaaaacctttattacccaacagggaattaagtcccagaccaaggaggagcagtctcagatcacttcccaggtgaccggccagattggctggcggagggagggaatcaaatacaggagaaatgagctcttcctcgatgtcctcgagtcagtgaacctgctcatgtctcctcagggccaggtgctaagcgcccatgttagcggccgcgtggtgatgaagtcttatctcagcggaatgcccgagtgcaagttcgggatgaacgacaaaatcgtgattgagaagcaagggaagggcaccgccgacgagactagcaagtccgggaaacagtctattgctattgatgattgtacattccaccagtgcgtgcgcctgagcaaattcgactcagagcggtcgatctcattcattccccctgatggcgaatttgaactaatgcggtatagaaccacgaaagatattatcttaccttttcgtgtgataccgcttgtccgagaagtcggccggactaagctcgaagttaaagttgtgatcaaaagtaacttcaaaccatctcttctcgcacagaaaattgaggtcaggatcccaacacctcttaacacgagcggggtccaagtcatctgcatgaaagggaaggctaaatacaaggcgtccgaaaatgccatagtgtggaaaatcaagcggatggcagggatgaaggaatcgcaaatcagcgctgaaatagaactgctcccaacaaatgacaagaagaaatgggcccggcctcctatcagcatgaactttgaagtacctttcgctcccagcggactcaaggttaggtatctcaaagtgttcgagccgaaactaaattactctgatcacgacgttatcaaatgggtaagatatatcggacggagcgggatatatgaaactcgatgctag

SEQ ID NO: 107339 - DNA, 1128 bp, synthetic construct
  misc_feature 1..1128: note = Description of Artificial Sequence: Synthetic coding sequence
  source 1..1128: mol_type = other DNA
atgattggggggctttttatttacaatcacaaaggggaggtgctgatctcccgggtttacagggacgatatcggtagaaatgctgtggcagcatacttcggcaaaatctccgaggaaaatataaagaacaatttcgtcttaatttacgagctcctggatgaaatactcgacttcgggtacccccagaactcggagactggagccttgaaaacgtttataactcagcaaggtattaagtctcaacatcagaccaaagaggaacagtctcagataacatcacaagtgaccggccagatcggatggcgaagagaaggtatcaagtatagacgaaatgagctcttcctcgatgttttggaatccgtgaatctgctaatgtccccccaggggcaggtccttagtgctcacgtctccggccgagttgtcatgaagtcatatctgagtggcatgcccgagtgtaaattcgggatgaacgataaaatcgtcattgagaaacagggaaagggaaccgctgatgaaacgagcaaatcaggtaaacagagtatagcaattgacgactgtacgtttcatcagtgcgtgcgtctctccaaattcgactccgaaagatctatatcttttatccccccagacggcgagttcgagttaatgagataccggacaaccaaggacataatactgccctttcgcgtaattcccttggttagagaggtgggacgtacaaaacttgaggtcaaggttgtcattaaaagtaattttaaaccaagtttattggcccagaagatcgaggttagaatacccacccccctcaacaccagcggggtgcaagtgatttgcatgaaaggaaaagccaagtataaagccagcgaaaacgcaatcgtgtggaaaatcaagcgcatggccgggatgaaggaatcccagatctctgcggagatcgaattgttgccaacgaatgataagaaaaaatgggctcgaccgcccatcagcatgaactttgaggttccgtttgccccgtctgggctgaaggtgcgataccttaaggtcttcgaacctaaattgaattacagtgatcacgacgtcataaaatgggtccggtacatcggcaggtcaggtatttatgaaacacgctgctag

SEQ ID NO: 107340 - DNA, 429 bp, synthetic construct
  misc_feature 1..429: note = Description of Artificial Sequence: Synthetic coding sequence
  source 1..429: mol_type = other DNA
atgatccgctttatcctcatccagaatcgcgctggcaaaactagattagctaagtggtacatgcagttcgacgatgatgaaaaacagaaacttatcgaggaggtccatgcagtcgttaccgttagggatgcaaagcacacgaatttcgtagagttcagaaactttaaaatcatctaccgtcggtatgctggactatatttttgtatctgcgttgacgtcaatgacaacaatctcgcctaccttgaagctattcacaactttgttgaagtgctcaacgagtatttccacaacgtatgcgagctcgacctggtctttaatttttacaaagtgtacactgtggttgatgagatgtttctagccggggagatccgtgagacaagccaaaccaaggtgttgaagcagctgctgatgttacaatctcttgagtag

SEQ ID NO: 107341 - DNA, 315 bp, synthetic construct
  misc_feature 1..315: note = Description of Artificial Sequence: Synthetic coding sequence
  source 1..315: mol_type = other DNA
atgatcaggttcattctgattcagaatcgcgcagggaagactcgtttggcaaaatggtacatgcaattcgacgatgatgagaagcagaaacttattgaggaggtgcatgcagtcgtgactgtaagggacgccaagcacactaattttgtggaggtgctaaatgagtactttcacaatgtgtgtgagctggatctcgtgttcaacttttacaaagtgtacacagtggtggatgagatgtttctggccggtgagattagagagacctcgcagacaaaggttctgaaacaattgcttatgctgcagagcttagagtag

SEQ ID NO: 107342 - DNA, 3285 bp, synthetic construct
  misc_feature 1..3285: note = Description of Artificial Sequence: Synthetic coding sequence
  source 1..3285: mol_type = other DNA
atgagcagcaactccttcccatataacgagcaatccggcggcggcgaagccactgagctcggacaggaagccacgagcacgatcagtccaagtggcgcttttggccttttctcatccgatctaaagaagaacgaggacttgaagcagatgctcgagagtaataaggattcagccaaattggacgccatgaagcgtatcgtcggaatgattgccaagggaaagaacgccagtgaattgtttccagccgtggttaaaaacgtcgccagcaagaacatcgaaataaaaaaactggtgtacgtttacttagtgcggtatgccgaagagcagcaggatcttgctttacttagtatctccacattccagagggctctgaaggatccaaatcagcttattagggcatcggctctccgggttctgtcttctattcgagtgcccatcattgtgccaatcatgatgctcgctatcaaggaagctagtgccgacctgtccccatacgtgaggaaaaacgccgcccatgcaatccagaagctttactccctggacccagaacagaaagagatgttgattgaagtgatcgagaagctgttaaaagacaaatctactctggtggcaggctctgtcgtgatggccttcgaagaggtgtgtccagacaggatcgatcttattcataagaactatcgaaagctttgtaatttgctggtagacgtagaggagtggggccaggtggtgatcattcacatgttgaccagatatgctaggacacagttcgtcagcccttggaaggagggtgatgaactggaggacaacgggaaaaacttctacgaatcagatgatgatcagaaagagaagaccgacaagaaaaagaaaccttatacgatggacccagaccacaggctgctgatccgaaacaccaagcctctgctgcagagtagaaatgccgccgtcgtgatggctgtcgcccagctctattggcatatctcaccaaaatcagaagcgggcatcatcagcaagtctcttgtgcggttactccgttcaaatagagaggttcaatatatcgtgttacagaatattgccaccatgtcgattcagaggaagggaatgtttgaaccttacctcaaatccttttatgtgagaagcacagatcctacgatgatcaagactctgaaactggaaatccttaccaacctagctaatgaggctaacatcagcactcttctgcgcgagtttcaaacatacgttaaatcacaggacaagcaattcgctgcagctaccatccagactataggtcggtgtgcaacaaatatccttgaagtgaccgacacctgcttaaacggattagtgtgtcttttatctaaccgggatgaaattgtggttgccgagagtgtggttgtgatcaaaaagcttctgcaaatgcaaccagctcaacacggcgagataatcaagcacatggccaaactcctggactctattacagtacccgtggcaagggcgagcatcctatggcttatcggtgaaaattgcgaacgagtgcctaagattgctccagacgtgctgagaaagatggccaagagcttcacttccgaagacgaccttgtgaagctgcagatcctcaatctaggtgccaagctctacctgaccaattcaaagcagactaaactactcacgcagtatatattaaaccttgggaagtacgatcagaattatgatatccgcgacaggacccgattcattaggcagttgatcgtacccaacgtgaaaagtggtgctctttcgaagtacgccaaaaaaatcttcctggcacagaaaccagcccccctcctggagtctccatttaaagatagagatcactttcaattgggcacgctttcacacactcttaatataaaagcaactggctacctcgagctgtcaaattggcccgaggtggcccccgacccctccgttcgcaacgtggaggtcattgaactggccaaagaatggacacctgcaggcaaggctaagcaagaaaattctgccaagaaattctattctgaatcggaggaggaagaagattcttccgacagcagctcggacagcgagagtgagtctgggagcgaatctggtgaacagggcgaaagcggcgaagaaggagacagcaacgaggattcatctgaggactcaagtagtgagcaggactctgagagcgggcgtgagagtggactcgagaacaaacgtaccgcgaaaagaaattccaaggccaaagggaaaagcgattccgaggatggggagaaagaaaatgagaagtccaaaacttctgactcaagcaatgatgaatccagttctatagaggattccagcagtgattcagagtcggaatccgaacccgaatcagagtcagagtcaaggcgtgtgacgaaagagaaggagaagaaaaccaagcaggacaggacacccctcaccaaggatgtgtcccttctggatctagacgactttaaccctgtaagtacacctgttgctctccccacacccgccctatctcccagccttatggccgacctggaaggcctgcatctgtccacttcctcctccgtgatctcagtgagcacgcccgcatttgtgccaactaaaactcacgtgttactgcaccggatgagtggcaaaggattggccgcccactatttttttccaaggcagccgtgcatttttggtgacaagatggtttctatccaaattacactgaacaatacaacagatcggaagatcgagaatatacatattggcgagaagaaattacccattggaatgaaaatgcacgtgttcaatcccattgatagcctcgagccggaaggctcaatcacagtgtccatgggcattgatttctgcgactccacccagacagcatccttccagctctgcacgaaagacgactgctttaacgtaaacatccaaccacctgtgggcgaactgctccttccagtggcaatgagtgagaaagatttcaaaaaggaacagggggtcttgactgggatgaatgagacctcagcggtgataatcgctgcaccccagaatttcaccccatccgtgatatttcaaaaggtggtgaatgtggccaacgtcggcgccgttccaagcgggcaggacaacatccatcgcttcgccgctaaaactgttcattctggtagcctaatgctcgtgacagtggaactgaaagaagggagcacagcccaattgatcattaacactgaaaaaaccgtcattggatctgtactgctgcgggaactgaaaccagtgctgtctcaaggatag

SEQ ID NO: 107343 - DNA, 1698 bp, synthetic construct
  misc_feature 1..1698: note = Description of Artificial Sequence: Synthetic coding sequence
  source 1..1698: mol_type = other DNA
atgagctccaactcatttccgtacaacgagcagtcgggcgggggggaggctacagaactgggacaggaagcgacaagcactatctcacctagcggagccttcggtttattttcctctgatttgaagaaaaacgaggacctgaagcaaatgctggagtcaaataaggattctgctattaaagaggcaagcgccgacctgtctccctacgtccggaaaaatgcggctcacgctatccagaaactgtattcccttgatccggagcagaaagagatgctcattgaagtcattgagaaactgctaaaggacaagtccactctggtcgctggttcagtcgtaatggctttcgaggaagtatgccctgataggatcgatctgattcacaagaactaccgtaaactgtgcaatcttctggttgacgttgaggagtgggggcaggttgttatcatccatatgcttacgcggtacgcacgtacgcagttcgtctctccatggaaggagggcgatgaactcgaggacaacggaaagaacttttatgagtcagatgatgaccagaaagagaaaacagataagaaaaagaaaccctatacaatggaccctgatcataggctgttgatacgcaatactaaaccactgttacagagcagaaacgccgctgtcgtgatggccgttgcccaactgtattggcacatttccccaaagagcgaagcagggatcatatctaagtcattggttagactcctcaggagcaaccgcgaagtgcagtacatcgtcctgcagaatatcgcaaccatgagtattcaacgcaaaggaatgttcgaaccttacctcaagtctttttatgttagaagcacagatccaaccatgataaagactctgaagcttgagatcctgactaacctagcaaatgaagcaaatattagcaccttacttcgagagtttcagacctacgtgaagtcccaggataagcagtttgccgcagccaccattcaaaccatcggtcgatgcgcaacaaacattctggaggttactgatacatgtctaaatggcctcgtttgcttattgtctaatcgtgatgagattgttgtagcagagtcagtcgtcgtgataaaaaagttgctgcagatgcagcccgctcaacacggggagattatcaaacacatggccaagcttctcgactcaatcactgtaccagtggcgagagcctccatcctatggctcatcggcgaaaactgcgaacgagtgcccaaaatcgctccagacgtacttagaaaaatggccaaatcttttacttcagaggacgacctagtgaaactgcagatcctcaatttaggggcaaaactatatctgaccaactcaaaacagaccaaacttctgacacaatatatcctgaacctgggcaaatatgatcaaaactatgacatcagggaccggacccggttcatcagacagttaatcgtcccaaatgtgaagtctggggccttgtccaaatacgcaaaaaaaatcttcctggcacaaaaaccggcaccgctgctggaatctccgtttaaagacagggatcattttcaactggggacactctcccacactcttaacatcaaggccaccggctatctggagctgtcaaattggcccgaggtggcacccgaccccagcgtgaggaacgtggaggtgatcgaattagtggtcctatcagagtag

SEQ ID NO: 107344 - DNA, 2403 bp, synthetic construct
  misc_feature 1..2403: note = Description of Artificial Sequence: Synthetic coding sequence
  source 1..2403: mol_type = other DNA
atgtcttcgaatagctttccgtacaacgagcaaagcggaggtggagaggccaccgagctgggccaggaggcaactagtaccatttccccttcaggtgcattcgggcttttttccagtgatctcaagaaaaacgaagatcttaaacagatgctggaatccaacaaagactcagctaaactggatgcaatgaagcgtatagttgggatgattgcgaaggggaaaaacgctagcgagttgttccctgccgtggtgaaaaatgtggcctctaaaaacattgaaattaaaaagctggtctacgtgtatctagttcggtacgcagaggagcagcaggacttagccctcttgtcgatttccacattccaaagagccctgaaggaccctaatcagttaatccgagcgagcgctctccgcgtactatcatccatccgggtgcccattattgtgcccatcatgatgcttgccatcaaagaggcctccgcagacctcagcccttatgtgcggaagaatgctgcccatgctatccagaagttgtactccctggatccggagcagaaggagatgctcatagaagtgatagagaagctccttaaagataagtctaccctcgtggccggctcagtggtcatggccttcgaggaggtttgtccagataggattgacctgatccataaaaactacaggaagttgtgtaatctactggttgatgttgaggaatggggacaggtggttataatccatatgttgaccagatacgcccgtacccaatttgtgtctccctggaaagaaggggacgaactggaagacaacggcaaaaacttctatgaaagtgacgacgaccaaaaagagaagaccgataaaaagaaaaagccgtatactatggatcctgaccaccgactgctcatccgaaatactaaacctctgctgcagtcgagaaacgctgcagtcgtcatggcagtcgcgcagctgtactggcacatcagccccaagagcgaggccggtatcatttccaagagcctcgtccgcctgttacgctctaatagggaggtgcagtacatcgtcctgcagaacatcgcgactatgtcaatccagcgcaaggggatgttcgagccttacctgaaatcgttttatgtgcgatctaccgatccgactatgatcaagacgttgaagttggaaatactcacaaatttggcgaatgaagcaaacattagtactttactgcgcgaattccaaacttacgttaagtcacaggataaacaattcgcggcggctacaatccaaaccatcggacggtgcgctaccaacattctggaggttactgatacctgccttaacggactagtgtgtttgctgtcaaaccgtgacgaaattgtggtggcagaatcggtcgtcgtgattaagaagttgcttcaaatgcagcccgcgcagcacggagaaatcatcaaacacatggccaagctgcttgactcaatcaccgtgccagttgcccgggctagcatcttgtggcttattggagagaattgcgagcgtgtacctaagatcgcaccagacgtgctgcgaaagatggcaaaaagtttcacgtctgaagatgacctggtcaaactgcaaatactcaatctaggtgccaagctctacctgaccaattcaaagcagaccaaactgttgacccagtacatcttaaaccttggcaagtatgaccagaattacgatatccgggatcgcacaaggttcatcaggcaactgattgtacctaacgtgaagagtggggcgctaagcaagtatgccaaaaagatcttccttgctcagaaacctgccccgttgttagaaagccctttcaaggaccgggatcacttccagttagggacgctcagccacacgttgaatataaaggctacaggatatttggagctgagcaattggcccgaggtggctccagatccctccgtcagaaacgtggaggtgatcgaattagccaaggagtggaccccggccggcaaggcaaaacaagagaacagcgcgaagaagttttactcagaatctgaagaggaagaggatagttccgactcctcctccgatagcgagagtgagtccggaagcgaatcgggcgaacagggagagtccggcgaagagggggacagtaatgaggacagctccgaggattcctccagcgagcaggattccgagtcagggcgggaatcaggattagagaacaagagaacagccaagcggaacagtaaggctaaaggtaagtccgatagcgaggatggcgaaaaagaaaatgaaaagtctaagacaagcgactcgtctaatgacgagtctagctctatagaggactcttcatctgactctgaatccgaatccgagccagaaagcgagagcgaaagccgtagagtgaccaaggagtag

SEQ ID NO: 107345 - DNA, 582 bp, synthetic construct
  misc_feature 1..582: note = Description of Artificial Sequence: Synthetic coding sequence
  source 1..582: mol_type = other DNA
atgataaaagctattctcatctttaacaatcacgggaagccgagattgtccaaattttatcaaccttactccgaagacacacagcagcagataatccgggaaacctttcacctcgtctctaagcgggacgaaaatgtatgcaatttcttggaaggggggctgctgataggcgggtccgataataagctgatttaccgtcactacgccaccctgtatttcgtgttttgcgttgactcctccgagagtgaattgggcattcttgatttgatccaagtgtttgtagaaactctagataagtgcttcgagaatgtctgtgaattggatctcattttccatgtagacaaggtgcataatattttagcggaaatggtgatgggcggcatggttttggaaaccaatatgaacgagattgttacacagatcgacgcgcagaataagcttgaaaagtccgaggcaggtttggccggagcccccgcccgggcagtgtccgcggtcaagaacatgaacctccccgaaattccaaggaatattaatataggggacataagtatcaaagttcctaatctcccatcattcaagtag

SEQ ID NO: 107346 - DNA, 450 bp, synthetic construct
  misc_feature 1..450: note = Description of Artificial Sequence: Synthetic coding sequence
  source 1..450: mol_type = other DNA
atgattaagtttttcctgatggtgaataagcaggggcaaactcgcctcagcaagtactatgagcacgtggacatcaacaaaagaaccctgttggaaacagaggtgatcaagtcctgcctatccagatccaatgagcaatgtagcttcattgagtacaaggacttcaagcttatctatcggcaatacgccgcactgtttatagtggttggtgtgaacgatactgagaacgagatggccatctacgagtttatacataacttcgtggaagtgctggatgagtacttcagcagggtatccgaactggatgtgtcattttttaatacggtcttccattcaacctggcaaatgcactccgggccttaccaaacccggtcttgttcagttacacaggcgggcgtgcaacggtgcgatcacggctcactgcatcccggctcccctggactcaagtag

SEQ ID NO: 107347 - DNA, 408 bp, synthetic construct
  misc_feature 1..408: note = Description of Artificial Sequence: Synthetic coding sequence
  source 1..408: mol_type = other DNA
atgataaagtttttcctgatggtcaacaagcaagggcagacgcggctctccaagtactacgaacacgtggacattaataaaagaaccctgctagagaccgaggtgattaagtcatgtctcagccggagcaacgagcagtgcagctttattgaatacaaggacttcaagttaatctatagacagtatgctgcactgttcatcgtcgtaggggtgaatgacaccgagaacgaaatggcgatctacgagtttatccataactttgtcgaagtgcttgacgagtacttcagtagagttgagcccatcgacgaactgcccaaaatttgcagcgcgttagagcctcaacagacgtgcttttctccagacagtagcagcttcaagggtgcagctagtacgacacctatctactag

SEQ ID NO: 107348 - DNA, 2220 bp, synthetic construct
  misc_feature 1..2220: note = Description of Artificial Sequence: Synthetic coding sequence
  source 1..2220: mol_type = other DNA
atgccttatctgggtagtgaggatgtggttaaagagctgaagaaggcactctgcaacccgcatattcaggccgacaggttaaggtatcggaatgtaatccagagggtgatccgttacatgactcaaggcctcgatatgagcggtgtgtttatggaaatggtgaaagccagtgctaccgtcgatatcgttcagaagaagctcgtgtatctctacatgtgcacttacgctcccctgaagcctgacttggctctgttggccattaatacactttgtaaggattgctcggaccctaatcctatggtccgggggttggcgctgagaagtatgtgttccttgcgcatgccaggcgtacaagagtatattcagcaaccaattctgaatggcctcagggataaagcctcctatgttcgcagagttgccgttcttgggtgcgccaagatgcacaacttgcatggtgattctgaagttgatggagccctcgtcaacgaactatactctctcctcagagatcaggacccgatcgtggttgtgaactgtctcagatctctggaagagatccttaagcaggaagggggtgttgtcattaataaacccatcgcccatcatctcctgaaccgcatgtcgaaactcgatcagtggggtcaggccgaggtgctgaatttcttgctgcgataccagccaaggagcgaagaggagctgttcgacattctaaacctgctcgactctttcctcaagtcctcctctcctggagttgttatgggagcaaccaagctgtttctgatacttgccaagatgtttccccatgtgcagacagatgtcctcgtgagggtgaaaggcccactgctggctgcctgttcatccgagtccagagagctgtgctttgtcgctctgtgtcacgttcgccagatactgcactcactgcccggtcactttagtagtcattataagaagttcttctgtagttacagcgagccacactatatcaaacttcagaaagtggaggtgttgtgcgaattggtaaacgacgagaatgttcagcaggttctcgaggaattgcgcggttactgtactgatgtttcagccgactttgcacaggctgccatcttcgctattgggggtattgctcgcacatacacagatcaatgcgtgcagattctgaccgaattactgggccttagacaggaacatattaccacagttgttgtgcagacatttagagacttggtctggttgtgtcctcagtgcaccgaggccgtgtgccaggctttacctggctgcgaagaaaatatccaagacagcgaaggaaaacaggccctaatctggctactgggggtgcacggtgagcggattccaaatgccccctacgtgctggaggacttcgtcgagaatgtgaaatctgaaactttccccgccgtgaaaatggagctgctgacagcattactgaggcttttcctatcccgacccgcagaatgtcaggatatgctgggccgacttctttactactgtattgaggaggagaaagacatggctgtacgggacagagggctgttctactacaggttgctgctagtggggatcgacgaagtcaaaagaatcctgtgtagtcccaaatccgacccgacactgggtctactggaggaccctgccgaacgccccgtgaactcgtgggctagtgatttcaatacccttgtgccggtatacggcaaggcccattgggctacaatctctaaatgccaaggagctgagcgatgcgatcctgaactgccaaagacctccagcttcgcggcaagtgggcctctgatcccagaagagaataaggagagggtgcaggaactgcccgactctggcgcactgatgctggtgcctaacagacagctcaccgccgattacttcgaaaaaacctggctgtccctcaaggtggcgcaccagcaggtgctgccttggcgaggggaattccacccagacactctgcagatggccttgcaggttgtcaacattcaaactatcgccatgtcccgagctggtagtcggccttggaaggcatacctgtccgcacaggacgataccgggtgcctgttccttacagagctcctccttgagccggggaacagcgagatgcagatttccgtgaaacagaatgaggctcggactgagaccctcaactcctttatctccgttttggaaactgtaattgggactatcgaggagattaagtcctag

SEQ ID NO: 107349 - DNA, 891 bp, synthetic construct
  misc_feature 1..891: note = Description of Artificial Sequence: Synthetic coding sequence
  source 1..891: mol_type = other DNA
atgccatatctcgggtcagaagatgtggtgaaggaactgaaaaaagcactgtgtaacccacacatacaggcggataggctccggtataggaatgtgattcaacgcgtgattagaatgccaggtgtccaggagtatattcagcaaccgatccttaacggtctgcgcgacaaagcttcatatgttagacgagtggctgttttaggatgcgcaaagatgcacaatctgcacggagactccgaagtggacggggcgctggtgaatgagctgtattcgctcctgagggatcaggacccaatcgtggttgtaaactgtctccgctccctggaggagatactcaagcaggaagggggcgtcgtcattaataaacccattgcccaccatctgttgaatcgaatgtccaagttagatcagtggggtcaggccgaggttctgaacttcttgctgcggtatcagccacggtccgaggaagagctgttcgacattctcaacctcctcgacagttttcttaaatctagttccccaggggtggtaatgggcgccacgaaactattcctcatcttagccaagatgttcccccatgtgcagaccgacgttctggtgcgggtcaaggggcccttgctggctgcttgctctagcgaaagccgcgaactttgtttcgtggcactgtgtcacgtgcggcagatcctccactccctgccggggcatttctcctctcattacaagaagttcttttgcagctacagcgagccccactatattaagctccaaaaggtagaggtattatgcgagctggttaacgacgagaatgtacaacaggtcctcgaggaactgaggggatactgcaccgacgtgtcagccgactttgctcaagccgcgatcttcgcaatttag

SEQ ID NO: 107350 - DNA, 909 bp, synthetic construct
  misc_feature 1..909: note = Description of Artificial Sequence: Synthetic coding sequence
  source 1..909: mol_type = other DNA
atgccttatctgggtagcgaagacgtagttaaagaacttaagaaagccctctgtaacccacacatccaggcagacaggctgcgctaccgtaatgtgatccagcgagttatccgttatatgacccagggacttgacatgagcggagtattcatggagatggtcaaagcctccgccaccgtggatatcgtgcagaaaaagctggtgtatctgtatatgtgcacatacgctccacttaaacccgacctcgccctcctggccatcaataccttatgtaaggattgctcggatcctaacccgatggtgcgagggcttgccttgcgatctatgtgctccctgcgcatgagtaagctcgaccagtgggggcaggcagaggtgcttaacttcctactgagataccagcctcgctctgaggaggaactgttcgacatcttaaacctcctggattcctttctgaaatcaagtagtcccggggttgtgatgggggccacaaaactgttcctgatcctggcgaagatgttcccccacgtgcaaactgacgtgctcgtaagagtgaaaggccctttactggctgcgtgttcctcagagtccagggagctatgttttgtcgctctctgccatgttagacagatcctccattctctgccaggccacttctcgtctcactataagaaattcttctgttcttactcggagcctcattatataaaactgcagaaagtggaggtgctatgcgagctcgtgaatgatgagaacgtgcaacaagtcctcgaagagcttcgagggtattgtaccgacgtaagcgctgacttcgcacaggcggctattttcgcaattggccggtgtctccttcttttccttctggagaatcttgaccagccagcccgaaagctatggctggaggaaccatag

SEQ ID NO: 107351 - DNA, 1716 bp, synthetic construct
  misc_feature 1..1716: note = Description of Artificial Sequence: Synthetic coding sequence
  source 1..1716: mol_type = other DNA
atgccctatctgggatcggaagacgtcgtgaaggaactcaaaaaggctctgtgcaaccctcatattcaggcggaccgtctgcgataccgcaatgtcatccagcgcgtgatccgaatgagcaaacttgatcagtggggacaggctgaggtgctgaattttctgttaagataccagccaagatcggaagaggagttgttcgacatactgaatttgctcgattccttcctgaagagctcgtcccctggcgtcgtaatgggtgcaacgaagctgtttcttatccttgcgaagatgttcccccatgtgcaaacagatgtcctcgtaagagtgaaaggacccttgttggccgcctgctcttctgagtctagggaactctgtttcgtggcactgtgtcatgttagacagattctgcacagtcttcccggacattttagttcccattataagaaatttttctgctcgtattctgagccccattacattaaactccagaaagtggaagtcttgtgtgagttggtaaacgatgaaaacgttcagcaagtcctggaggagttgaggggatactgtaccgatgtaagcgccgacttcgcccaagccgcaattttcgctattgggggcatagcccgaacgtacacagatcagtgtgtacagatcctgaccgagctgctgggtctgaggcaagagcacattacaacagtggtggtgcaaacattccgcgatctggtctggctgtgcccccagtgtaccgaggcagtatgtcaggcccttcccggctgcgaggaaaacattcaggatagcgaaggaaagcaggccctcatttggctgctgggagtacatggcgaacgaatacccaatgccccctatgtcctggaagacttcgtggaaaatgtcaagtccgaaacattcccagcggtgaaaatggagctgttgaccgccctgttgcggctcttcctctcacgccccgcggaatgccaagacatgctcggtcgtttgctgtactattgtatcgaggaggaaaaagacatggccgtgagagataggggcctattttattaccgacttctgcttgttggaatagatgaagtcaaacggatactgtgctcacccaagtcagatcccactttgggcttgctggaagaccctgccgagaggccagtcaattcctgggccagtgattttaatacccttgtacctgtttacggcaaagcccactgggccaccatctcaaagtgccagggcgcggagcgctgtgatcccgagcttcccaaaactagctcgttcgccgcttccggccccctcatcccggaagaaaataaagaacgggtccaagagctgcccgacagcggagccctaatgctggtgcctaatagacagctcaccgctgactatttcgagaagacctggctcagcctcaaggttgctcatcagcaagttctgccttggagaggggagttccaccccgacacactccagatggctctgcaggtcgttaatatccagaccatcgctatgagccgcgctggaagccggccctggaaagcctacctgagcgcccaggatgataccggatgcctgtttctaacagagctgctcctcgagcccgggaattcagagatgcagattagtgtaaagcagaatgaggccaggaccgagaccctcaactcatttatttctgttctggagaccgtcatcgggaccattgaggagatcaagagttag

SEQ ID NO: 107352 - DNA, 2220 bp, synthetic construct
  misc_feature 1..2220: note = Description of Artificial Sequence: Synthetic coding sequence
  source 1..2220: mol_type = other DNA
atgccgtatctgggcagtgaagacgtggtcaaggaactcaagaaggccctgtgcaatccgcatattcaggcggatcgcttgcgctaccgaaatgtgattcagagggttatcaggtacatgactcagggccttgatatgtctggagtgttcatggagatggtgaaggcttcggcaaccgtggacatagtgcagaagaagctcgtttatttgtacatgtgcacttacgctcccttaaaacccgatctcgccctgctggccataaatactctgtgcaaggattgtagtgatccaaaccccatggtgcgcgggttggcccttcgatcaatgtgctcattaaggatgccgggagtccaagagtacattcaacagcctattctgaatggactgagggataaagcttcctatgtgcgtagggtcgccgtcctagggtgtgctaagatgcacaacctccatggcgactcagaagtagatggtgcacttgttaacgagctttattctttactcagggaccaggaccccatcgtggttgttaactgtttgcgcagcctggaagagatcctaaagcaggaggggggggtcgtgatcaacaagcctattgcccatcacctcctgaaccgcatgtccaaattggatcagtggggccaggcagaggtgttgaactttctgctgaggtaccagccgcggagcgaggaagagctgtttgacatactgaacctgctcgacagcttccttaaaagctctagccccggggtggtaatgggggccacaaagttgtttctcattctcgccaagatgtttccccatgtgcagactgacgtgttggttagagtgaagggcccccttctggctgcttgttcctcagaatcccgtgagctctgttttgtcgccctctgtcacgtgcgccagatactccactctctgcccgggcactttagctcacactacaagaaattcttctgttcttactcggaacctcactacattaagttacagaaagttgaagtgctctgcgaacttgttaatgacgagaacgtgcagcaggttttagaggagctccgcggttactgtactgacgtgtcggcagattttgctcaggccgcaatcttcgccatcgggggcattgccagaacatatacagatcagtgtgtccagattctgaccgaactgctgggattaagacaagagcatatcaccacagtcgttgtccagacattccgagatctggtatggctttgcccgcaatgtactgaagccgtttgtcaggcccttccgggatgtgaagagaatattcaagactccgaaggtaaacaggccctgatttggctgttaggcgtccatggagagaggatccccaacgcgccctatgtcctcgaagactttgtagaaaatgtgaagagcgaaacctttccagccgtcaaaatggaactcctaaccgccctcctaaggctgttcctgagccggccagctgagtgtcaggatatgcttggaaggttactatattactgcatcgaggaggaaaaggatatggcggtaagagacaggggcctgttttactaccggctcctgctggtgggaattgacgaagttaagcggatcctgtgcagcccaaagtccgatcctactcttggcctcctcgaggaccccgctgaacggcccgttaactcttgggccagcgatttcaacacactggtccccgtctacggtaaggctcattgggctactatcagtaaatgtcagggagccgagcgctgcgatcctgagctgcctaagacctctagcttcgccgcatccggcccactcattcccgaagagaacaaagaaagggtccaagaactaccggactctggcgctttaatgctggttcccaataggcaattgactgcggattacttcgagaaaacatggttatctctaaaggtcgctcatcagcaagttttaccatggcggggtgagtttcacccggatacactgcagatggcactacaggtcgtgaacattcagacaattgcgatgtcaagggctggcagtaggccttggaaggcttatctctctgcgcaggacgacactgggtgcttgttcttgacagagcttctcctggagcccggcaatagcgagatgcagatctccgtcaagcagaacgaagcaagaacagagacattgaacagttttatctcagtgttggagacggtcattggaaccatcgaggaaatcaaaagctag

SEQ ID NO: 107353 - DNA, 789 bp, synthetic construct
  misc_feature 1..789: note = Description of Artificial Sequence: Synthetic coding sequence
  source 1..789: mol_type = other DNA
atgccttacctggggagcgaggacgtggtgaaagaactcaagaaagccctgtgtaacccgcatatccaggccgataggctaagataccgcaacgtcatccagcgtgtgattagatatatgacacaggggctcgatatgagcggcgtatttatggaaatggtcaaggcctctgccacggtggatatcgtgcagaagaagctggtttacctctacatgtgtacatatgcaccgctaaagcctgatctcgccttgctggcgattaacaccttgtgtaaagactgctctgacccaaacccaatggtgcggggcctcgctctccgctcaatgtgctctttacgcatgcccggagtgcaagagtacatccagcagccaatcttgaatggactgcgggacaaagctagttacgtgaggcgagtggctgtgcttggctgtgcaaagatgcacaatttacacggcgactcagaggtcgacggggcattagtaaacgaactgtactcactgttgcgagaccaggacccaattgtagtggtgaactgcctgcgtagcctcgaagaaatattgaaacaggagggcggcgtggtcattaataagccaattgcgcatcacttactgaacagaatgtcaaaactggatcagtggggacaggctgaggtgctcaacttccttctcaggtatcaaccccgatccgaagaggagctgttcgacatcctgaacctccttgattccttcctaaaatcttcctcacccggggttgtgatgggtgcgacaaaactgtttctgattctgtag

SEQ ID NO: 107354 - DNA, 528 bp, synthetic construct
  misc_feature 1..528: note = Description of Artificial Sequence: Synthetic coding sequence
  source 1..528: mol_type = other DNA
atgccctacctggggtctgaggacgttgtcaaggaactcaagaaagcattatgtaacccccacattcaagccgatcggcttcgctatcggaatgtcattcagagggtgataaggatgtctaagctcgatcaatggggacaggctgaggtcctgaacttcttgcttcggtaccagccaaggtctgaagaagaactttttgacatcctgaacctgctggattcgtttttgaagtcctcctcacccggagtagttatgggcgcgacaaagctgtttctcatattggctaaaatgttccctcatgtccagacagacgtgctggtgcgcgtcaaagggccactgttggccgcctgttcttccgagtcacgggagctatgtttcgtggccctgtgccacgtgcgtcaaattctccattccttgcccggccatttctctagccattataagaagttcttctgttcatactctgagcctcattacatcaaactgcagaaagttgaggtgctgtgtgaactcgtgaatgacgagtag

SEQ ID NO: 107355 - DNA, 3414 bp, synthetic construct
  misc_feature 1..3414: note = Description of Artificial Sequence: Synthetic coding sequence
  source 1..3414: mol_type = other DNA
atgtcagacattgtggagaaaacgttgactgccttgcccgggttatttctacaaaatcagcctggaggcggaccagctgcagccaaagcgtccttttctagcaggctggggagcctcgttcgcggaatcaccgctctgaccagcaaacatgaagaagaaaaactgatccagcaggagttgtcatccctgaaggctaccgtctctgcccctactaccaccctgaaaatgatgaaggaatgtatggtgcgcctcatttattgcgaaatgttgggatacgacgcctcgttcggctacatccatgccatcaaacttgcccagcaaggcaacttgctggagaaaagggtcgggtacctggcagtgagcttgtttcttcacgagtctcatgaattactgctcctactggtgaacactgtagttaaagacctgcaatctacgaacctggtggaggtatgcatggccctgactgtcgtatctcaaatctttccctgtgagatgatccctgcagtgctccctttgatagaagataagctacagcactccaaggagattgttcgaagaaaggccgtgctggcactgtataagtttcacctgattgctcccaaccaggtgcagcacatccatattaagttccgcaaagctttgtgcgatcgggatgtgggtgttatggccgccagcctccacatatacctgcggatgatcaaggaaaattcaagtggctacaaggacctcaccgggtcttttgtgaccatcctgaagcaggtggtcggcggtaaacttcctgtggagtttaactatcactctgttccagcgccctggctgcaaattcagctgttacgcatattaggactgctcgggaaagacgatcagcgtactagtgaactcatgtatgatgttttggacgaaagtttaagacgtgcagaactgaaccacaatgtcacttacgcaattctgttcgagtgcgtgcacacagtgtactccatctatccgaaatcagaattgctggaaaaagctgctaagtgcatcgggaagtttgtgttatcccccaagattaacttgaaatatctcgggcttaaggccttaacgtacgttatacagcaggatcctacattggccctccaacaccagatgactatcatcgagtgtctggaccaccccgaccccataatcaaaagagagacattggaactgctgtatagaattacaaatgcgcaaaatataacggtgattgtgcagaagatgctcgaatatctccaccaaagcaaggaagaatacgtgattgtcaacctggtgggcaaaatcgctgagctcgccgagaagtatgccccggacaatgcttggttcatccagactatgaacgctgtatttagcgttggaggagacgttatgcacccggatatccctaataactttttgcgccttcttgctgagggctttgatgacgagacagaggaccagcaacttagactttacgccgtgcagtcctacctgacccttttagacatggagaacgtgttctacccccagcggttcctccaggtgatgtcttgggttctcggagaatattcctacctgctggacaaagaaactccggaggaggttatcgccaaactgtacaagttactgatgaacgactctgtttcaagcgagaccaaagcatggcttatcgccgcagtgaccaagctgacctcccaggcacacagctcgaacaccgtggaacgactgattcatgaatttacgattagcctggatacttgcatgcggcagcacgcattcgagctaaaacacctgcacgagaatgtggaactgatgaaaagcctgctacctgttgacagatcgtgtgaagatctggtcgtagacgcatcactctcctttctggacggatttgtcgcagaaggcctgtctcagggcgcagcaccatacaaacccccgcatcagcgccaagaggaaaagctgtcccaggagaaagtgctgaactttgaaccatacggtctcagcttcagtagcagcgggtttacaggcaggcaaagtccggctggtataagcctggggtctgacgtcagcggaaattccgcggaaacaggtctgaaggaaacgaattcccttaaactggagggcattaagaaactctgggggaaggagggatatctgccaaagaaggaaagtaagactggcgacgaatcaggcgccctccccgtcccccaagagagtatcatggagaatgtggatcaggctattacgaagaaagaccagagccaagttcttactcaaagcaaagaagagaaagagaagcaactactggcaagctctctctttgtggggctcggctctgagtccactattaacctcctgggtaaagcggatacagtgagtcataagtttcgccgcaagtctaaagttaaagaggccaagagcggggagaccacatccacgcacaacatgacctgttcctcgttttccagcctgagtaatgtggcctacgaagacgactattatagtaacacactccatgataccggggataaagaactgaaaaaatttagcctcacctccgagctactcgattccgagtctctcaccgagcttccactggtggagaagttttcctactgctcccttagcactccgtcactgtttgcaaacaacaatatggaaatttttcatccaccccagtctaccgcggccagcgtggcaaaagagtcgtcacttgccagcagctttctcgaggagacgacagaatacatccactcaaacgccatggaagtgtgtaacaacgagactatctccgtgtcgtcttataaaatctggaaggatgactgtctgctgatggtgtggagcgtgaccaataagtccggtctcgaactgaaaagtgccgatttggagattttccccgctgaaaattttaaggtaaccgagcagcctggctgctgcctgccagtgatggaggccgaaagcacgaagagctttcagtactctgtccagatcgaaaaaccatttactgaaggtaacctgacaggcttcatctcttatcacatgatggacacccacagtgcccagttggagttctctgtcaatctttctctgctggacttcattagaccccttaaaatcagctctgatgatttcggaaagctgtggttgtcttttgctaatgacgtcaaacagaatgttaagatgtcggaatctcaggctgcactgccatccgctctcaagactctccagcaaaagctgcgactgcacatcattgaaatcatcgggaatgagggtctgctggcatgccagctgttgccaagtattccttgcctgctacattgtagagttcacgcggatgtcctggcattatggttccggtcatcatgctctacgttgcccgactacctgctgtaccagtgccagaaggttatggaaggcagctag

SEQ ID NO: 107356 - DNA, 1362 bp, synthetic construct
  misc_feature 1..1362: note = Description of Artificial Sequence: Synthetic coding sequence
  source 1..1362: mol_type = other DNA
atgatcagccaattctttatattaagctcaaagggcgatcctctgatctacaaggacttcaggggagactctggcggtagagatgtcgccgaactgttttacagaaaactgacgggtctaccaggggacgagagccctgtggttatgcatcatcatgggcgacactttatccatatacgccactctggcctatacttagtggtcacaacgtcagagaatgtctctccgtttagcctgcttgagctgctgagccgcctggctacccttctgggtgactactgtggctcacttggagaggggacaatctctagaaacgtcgccctggtctatgagcttttagatgaagtgctggactatggttatgtgcagacgaccagcacagagatgctgcgcaactttatccagacggaggcggtggtaagcaaacctttttccctgttcgacctgtcctctgttggattattcggagctgaaactcagcagtccaaagtcgcccccagcagtgccgcttctcgccctgtcctgtcctccagatccgatcaatctcagaagaatgaagtattcctggacgtggtggagcgcctttctgttttgatcgctagtaatggcagtctgctcaaggtggacgtgcagggggagataaggctaaagagcttcctgccctcggggtctgaaatgcgcatcgggctcactgaagaattttgcgttggcaagtcagaattgcggggttatggtcctgggataagagtcgacgaagtgtcattccattctagcgtgaatcttgatgaattcgagtcccaccggattctccggctgcagccccctcagggagaacttacggtgatgagataccaactgtccgacgatctcccttctcctctcccattcagactgttcccatccgtacaatgggacagaggaagcgggagactgcaggtgtatctgaagcttcggtgcgatttgttatctaaaagccaggctcttaacgtgaggctgcatctgcctttaccccgcggcgtcgtgagcctctcacaagagctgtcctcccctgaacagaaagctgagttggccgaaggtgcattacggtgggacctgccccgcgtccaaggcggtagccaattgagtggcctttttcagatggacgtgcccggccctcccggtccaccctctcatggactgtcgactagtgcctctccgctggggctgggtcctgcctccctgtcctttgagctgccacgccacacgtgttctgggttgcaggtgaggtttctgaggcttgctttcaggccatgtggcaacgcgaatccccataaatgggtgcggcatctgtctcatagtgatgcatacgttatccgcatctag

SEQ ID NO: 107357 - DNA, 1362 bp, synthetic construct
  misc_feature 1..1362: note = Description of Artificial Sequence: Synthetic coding sequence
  source 1..1362: mol_type = other DNA
atgatcagccagttctttatcttgtcctccaagggagatcctttgatttacaaggactttcggggtgattctggaggcagggatgtggccgaactgttttataggaagcttacaggtctgccaggagatgagtcacccgtggtgatgcatcatcacggacgacacttcatccacatccgccacagcggcttatacctggtagtcacaactagcgaaaatgttagcccttttagtctgctggagctgctaagccgcttggcaacacttctgggagactactgtgggtcactaggcgagggcacgatttccagaaatgtggctctggtctacgagctgctagatgaggtattagactatggctatgtgcagacaacatcaaccgaaatgctcagaaacttcatccagaccgaggctgtcgtaagtaagccattcagcttgttcgacctttcctctgtcgggctcttcggggctgagactcaacaatccaaagtggcaccatctagtgccgctagcaggcccgtcctttcatctaggtccgaccagtcacagaagaacgaagttttccttgatgtggtggagaggctatctgtattaatcgcctctaacggatccttacttaaagttgatgtccaaggagagatccggttaaagtctttcctgccctccggtagtgaaatgcgtatcggactcacagaagaattttgcgtgggaaaaagcgagttgcgggggtacggtcccggaattagggtggacgaagtatcctttcattcttcagtcaatctggacgagttcgagtcccatagaattctcaggctgcagcctccacagggagagctgacggtcatgcgttatcagctgagcgatgatctcccatcaccccttccgttccgactctttccgagcgtgcaatgggataggggctctgggagactccaggtctacctgaaactacgttgtgacctgttgtctaaaagccaagctttaaatgtgaggctgcacctgcccctgcctagaggtgtggtgtccttgtctcaagaactgtcctcgcctgaacagaaggccgaactcgcagagggcgcactcaggtgggatcttcctagagtccagggtggttcccagttatccggcctattccagatggacgtacccgggccacccggccctcctagccacggtttgagcacttccgccagcccactgggcctagggcccgctagtctgtcctttgaattgcctagacatacgtgcagtggcttacaagtgagattcctgaggttggcctttcggccttgtggcaatgcaaacccccacaaatgggttcgtcatttgagccactcagatgcctacgtgatccggatatag

SEQ ID NO: 107358 - DNA, 1653 bp, synthetic construct
  misc_feature 1..1653: note = Description of Artificial Sequence: Synthetic coding sequence
  source 1..1653: mol_type = other DNA
atgagcgccgcttggatcccagccctgggactgggagtctgcctcctgctgctccctggaccagccggctccgagggtgcggcacccatagccattacatgcttcacacgcggccttgatatcagaaaggagaaagccgatgtgctctgtccagggggctgccctctggaagagttctcagtgtatgggaacatcgtctatgctagcgtctcttccatatgtggtgctgccgtgcataggggcgtcatctcaaactccggcgggccagttcgcgtctacagcctgccaggccgcgagaattacagtagcgtcgatgccaacggcattcagtctcagatgttgagcagatggtctgcaagcttcaccgttacaaaagggaagtcctccacccaagaagcaaccggtcaggctgtgtctacagcacaccctccaactgggaagcgtctgaagaaaacacctgaaaagaaaaccggcaacaaggactgtaaagctgatatcgcattcctaatcgatggctcttttaatatcgggcaacggcggtttaatctacagaagaacttcgtcggcaaagtcgcactaatgctgggaattggaactgaagggccacacgttggacttgtgcaggctagtgaacacccaaaaatcgaattctacctgaagaatttcacttccgctaaggacgtactcttcgcgatcaaagaagttggattccgaggtggcaacagcaatacagggaaagccttaaagcacacagcccagaaattttttaccgttgatgcaggcgtgcggaagggaataccaaaggtcgtggtggtgtttatagatggttggccaagtgacgacatagaagaggctggtattgtggcgagagagttcggtgtgaacgtcttcattgtcagcgtcgctaagcctattcccgaggagttgggaatggtccaggatgttaccttcgttgataaggctgtatgtaggaataacgggttcttctcgtatcatatgcccaattggttcgggactaccaagtatgtgaaacctctggttcagaagctttgtacccacgaacaaatgatgtgcagcaagacctgctataatagtgtgaatatcgcattcttaatcgacggatcctcttccgtcggcgatagcaatttccggctaatgctggaattcgtcagtaacattgcaaagacattcgaaattagtgatattggagcgaaaatagccgcggtgcagttcacgtacgatcagcgcactgaattctcctttacagactactccaccaaggagaatgtcttggctgtcattagaaacatccggtacatgagtgggggtacagctaccggagatgcgatatcttttaccgtgcgcaacgtgttcgggccaatccgcgaaagcccaaacaagaacttcctggtgattgtgacagacggccagagttatgacgacgtgcagggtcccgccgctgccgcccatgacgctggaatcactattttctcagtgggcgtcgcttgggctccattggacgacctaaaggacatggcatccaaacctaaagaatctcatgccttttttactcgagagttcaccgggctggagcctattgtttctgatgtgattcgggggatctgcagagatttcctagagagccaacagtag

SEQ ID NO: 107359 - DNA, 435 bp, synthetic construct
  misc_feature 1..435: note = Description of Artificial Sequence: Synthetic coding sequence
  source 1..435: mol_type = other DNA
atgataaaatttttcctgatggtcaataaacagggccagacacgtctgtcgaagtactacgaacatgttgatattaacaaaaggacgctactggagactgaagttattaaatcttgcctgagcaggtctaacgagcaatgcagcttcattgagtacaaagacttcaagttgatctacagacagtacgcagccctgtttatcgtggtgggcgtgaatgacactgagaacgaaatggcaatctatgagttcatccacaacttcgtcgaggtgctggatgagtatttcagcagggtggttaagggacacatcatgtttaatttggacaaagtgcacatcatcctggacgaaatggttctcaatggttgcatcgtcgaaactaatcgggcaagaatcctggctccattgctgattctggacaagatgtctgaatcatag

SEQ ID NO: 107360 - DNA, 435 bp, synthetic construct
  misc_feature 1..435: note = Description of Artificial Sequence: Synthetic coding sequence
  source 1..435: mol_type = other DNA
atgatcaaattttttttaatggtgaataagcaggggcagaccagactgtcaaagtattacgagcacgtagatatcaataaaagaacactgctcgaaaccgaagttattaagagctgtcttagtcggtccaacgaacagtgcagttttatcgaatataaggatttcaagctcatctacaggcagtatgcagcactgtttattgtggtgggcgtcaacgatacggaaaatgaaatggccatttatgaatttatccacaatttcgtggaggtcctcgacgaatattttagccgggtttctgaactggatatcatgttcaatctggacaaagtacacattattctagatgagatggtcttaaacggttgcattgtggagactaatcgggcacgaattctcgctccactcttgattcttgataaaatgtctgagagctag

SEQ ID NO: 107361 - DNA, 27 bp, synthetic construct
  misc_feature 1..27: note = Description of Artificial Sequence: Synthetic coding sequence
  source 1..27: mol_type = other DNA
atgattaaatttttcctcatggtatag

SEQ ID NO: 107362 - DNA, 297 bp, synthetic construct
  misc_feature 1..297: note = Description of Artificial Sequence: Synthetic coding sequence
  source 1..297: mol_type = other DNA
atgattaagttcttcctgatggtcaacaagcaggggcagacacgcctatcaaagtactacgaacacgtcgacataaataaacgcactctgttggagacagaagtgatcaagagttgcttgtctcggtctaacgagcaatgtagtttcatcgagtataaagatttcaaactgatttatcggcagtacgcggcgctgttcattgtggtgggcgtgaatgatacagagaatgagatggcaatctatgagtttatccacaactttgtcgaggtgctggacgagtatttcagcagagtgtag

SEQ ID NO: 107363 - DNA, 402 bp, synthetic construct
  misc_feature 1..402: note = Description of Artificial Sequence: Synthetic coding sequence
  source 1..402: mol_type = other DNA
atgattaagttcttcctgatggtcaacaagcagggtcagactcggctgtccaaatattatgaacacgtcgatattaacaagaggactcttttagagactgaagtgataaagagctgcctgagccgttcgaatgagcagtgcagttttatcgagtacaaagatttcaagctcatctacaggcagtatgccgcgctgtttattgtggtgggcgtcaacgacacagagaacgagatggccatctatgaatttatccacaatttcgtggaagtgttggacgaatatttttctcgcgtgagcgagctggacatcatgttcaacctggacaaggtgcatataattctggacgaaatggtcttgaatggttgtattgtggagaccaatagggcccgcatcctcgcctag

SEQ ID NO: 107364 - DNA, 4611 bp, synthetic construct
  misc_feature 1..4611: note = Description of Artificial Sequence: Synthetic coding sequence
  source 1..4611: mol_type = other DNA
atgggcgtagtgaactttgtgtttcgagctagtgaggacctgcaggtactcgagaactactcagatgccccgatgacaccgaaacagattctccaggtcattgaagctgaaggattgaaggagatgtcggggacctcccctctggcatgtctcaatgccatgctgcatagcaatagtcgaggcggtgagggccttttttacaaattgcctggcagaatttcgctctttacgctcaaaaaggatgccctccagtggtcacgacatcccgcaaccgtagagggggaagagccagaagataccgccgacgtcgagtcatgtgggtccaacgaagcgagcaccgtgagcggggaaaatgatgtatctctcgacgaaacctcctccaacgctagctgtagcactgagtcacagtccagaccactgtcaaacccacgagacagctacagagcctccagccaggccaataaacagaaaaagaagaccggagtaatgctgcctagggttgtactgacccctttgaaggtcaatggcgcacacgtagagagcgccagcggtttctccggctgccatgctgatggagaatcaggcagtccttcctctagcagttcagggagtctggctctggggtccgctgccatccgcggccaggcagaagttactcaagatcctgcccctctgctccgcggatttagaaagccagccactggccagatgaagaggaatcggggcgaagagatcgactttgaaacccctggtagtatcctggtgaacacaaacttaagggcactcattaattcccgtaccttccacgcgcttccttctcacttccagcagcagctgctgttccttctacctgaagtggacagacaggtcgggacagatgggctgctgcggctgtctagtagcgccttgaacaatgagtttttcacgcatgccgcacaatcatggagagaaagactcgccgatggcgagtttactcacgagatgcaggtgcgtattcgccaggagatggagaaagagaaaaaagtggagcagtggaaagagaagttttttgaggactattatggccagaagttgggcctgactaaagaggaatcactacaacaaaacgtgggccaggaggaagcagaaatcaaatccggcctatgcgtgcccggcgaatcagtccggatacagagggggccggctacccgacaacgagacggtcacttcaagaagaggtcacggccagacctgcgaacccgagcacgccgaaatctgtacaaaaagcaggagtcagagcaagccggggtggctaaagacgcgaaaagcgtcgcatccgacgtgcctctgtacaaggacggcgaagccaagacagaccctgccggtttgtccagtccacacctcccagggaccagttccgctgctccagacctggaaggccccgaattccctgtcgaaagcgtcgcttcccggattcaggccgagccagataacctggcacgagcttccgccagtcctgatagaattccttcgctacctcaggagactgttgatcaagagcctaaagaccagaaacgaaagtcgtttgaacaggctgcgagcgccagcttcccagaaaagaaaccacgactggaagaccgccagagctttaggaacaccatcgagtctgtccacacagagaaacctcagcctaccaaagaagaaccgaaggtgccacccatccgcatccagctgtccagaatcaagccgccttgggtcgtgaaaggtcagcccacctatcaaatatgcccccggatcatacctactaccgagtcaagctgcagagggtggactggcgcccggactctagccgacattaaagctcgcgccttgcaggtgcgaggcgcacggggacaccactgtcacagagaggctgcaacaaccgccatcggaggcggcggcgggccaggtggcggcggcggcggcgccacggatgagggcggcgggcgggggagctcctctggagatggcggggaggcctgcggacatcccgaaccaaggggaggtccctcaacccccggaaaatgcacttctgacctgcagcgaacccagctactacccccgtatccgcttaatggcgaacatactcaagcgggcaccgctatgtccagagcccgtcgggaggacctcccatccctccggaaagaagagtcctgcctactccagcgggctactgtagggctgaccgatggcctgggcgacgcgagtcagcttcctgtggcgcctaccggcgatcaaccctgtcaggcactgcctctgttgagcagccagacatcagttgccgagagactcgtagagcagccgcagttgcatcccgacgtcagaacagaatgcgaaagcgggaccacgtcttgggaaagcgatgacgaggaacagggacctactgtgcccgccgataacggccctattctgtctctagttggagatgacactctggagaagggcaccgggcaggccttagactcgcatcccaccatgaaggatccagtgaacgtgaccccctcctccactcccgagagcagccccacggactgcctgcagaatcgcgccttcgatgacgagctcggactaggtggctcttgcccaccgatgcgagaaagcgatactagacaagagaacctgaaaactaaagccctcgtatcaaactccagtctgcactggattcctattccgtctaacgatgaggtggtgaaacagcctaaacccgagtcgcgggagcacataccctcggtagaaccccaggtgggagaggaatgggagaaagcagcgccaacaccacctgcactccccggtgaccttactgccgaggagggactggacccactggattcgttgactagcttatggaccgtgccctctcgtgggggctccgattcaaacggctcctactgccagcaggttgatattgagaagttaaagatcaacggcgattctgaagcattgagccctcacggcgagtcaactgatacggcttccgacttcgaaggccacctgacggaagatagctctgaagccgacacaagagaagctgcagtcaccaagggaagctccgttgataaggatgagaagcctaactggaaccagtcagcccccctgtcaaaggtaaacggcgatatgcgcctagtgacacggacggatgggatggtagcccctcagagttgggtctcccgggtgtgtgccgtacgtcagaagatccccgacagtctccttctggcatctactgagtatcagccacgggctgtttgcctctccatgccggggtctagcgtcgaagccaccaatccccttgtgatgcagcttctgcaaggcagcctacccctcgagaaagtgttgcctcccgctcacgacgattctatgtcagagtctccgcaggtgcccctgaccaaagaccagtcccacggcagtctgagaatggggagcttgcacggtctgggcaaaaacagtgggatggtggacgggagctccccgtcatcactgagggcacttaaagaaccattgttacccgattcctgtgagactggcacaggcctggctcggatcgaggcaactcaggctcctggggccccgcaaaaaaattgcaaagccgtgccctcttttgactcactgcatcccgtaactaatcccatcacaagtagccgcaaactggaggaaatggattcaaaggagcaattttcctctttttcttgtgaggaccagaaagaagtgcgcgctatgagccaagactcgaatagtaacgccgcccccggcaagtcccccggtgatctgacgacaagccggaccccccggtttagctccccaaacgtaatttcttttggccctgagcagacaggaagggccctgggtgatcagagcaatgtgaccggacagggcaagaagctgttcggaagtggcaacgtggctgccacactgcagagaccgcgacccgctgacccaatgcccctgcctgctgagattcccccagtgttcccctctggaaaactcggcccaagtaccaatagtatgtctggcggggtacagactccccgcgaggactgggctcccaaacctcacgcattcgtggggagtgtaaagaacgaaaagacctttgtggggggtcccttgaaggctaacgcagagaacaggaaagcaaccggccattccccgttggagctcgtgggacatctggagggtatgccattcgtgatggaccttccgttctggaaactcccaagggagccaggaaaaggcctgtcagaacctctagaacccagctctctgccaagtcagctctctatcaagcaggctttctatggcaaactgagtaaattacagctgtctagcacatcttttaactacagtagcagctctcccaccttccccaagggcctggcgggctccgtggtccagctgagtcataaggccaatttcggggctagccattctgccagtctttccctccagatgttcacggattcttctaccgtggaaagcattagtctacagtgtgcatgctccctgaaagcgatgatcatgtgccagggatgcggcgccttctgtcacgatgactgtattggaccgagtaaactttgtgtcctatgtcttgtcgtgcggtag

SEQ ID NO: 107365 - DNA, 4626 bp, synthetic construct
  misc_feature 1..4626: note = Description of Artificial Sequence: Synthetic coding sequence
  source 1..4626: mol_type = other DNA
atgaaggacaagcagaagaaaaagaaagagcgcacgtgggccgaagcagcccggctcgtactggagaactacagcgacgcccctatgactcctaagcaaatccttcaggttatcgaggcagagggactaaaagaaatgaggtccggaaccagcccgttggcctgtctgaacgccatgctgcacagcaatagccgcggaggtgagggactcttctacaaactgcccgggagaatcagcctctttacactaaagaaggacgcgctgcagtggagtaggcaccctgctactgtggagggcgaagaacctgaggatactgccgatgtggaatcctgtgggtcaaatgaggcatcaactgtcagcggagagaacgacgtttctctcgacgagacctcttctaatgctagctgcagcacggagagccagagtcgacccttgagcaatcctcgcgactcctatagggccagttctcaagccaataagcaaaagaaaaagaccggcgtgatgctgccccgcgtggtgctgaccccacttaaagtgaacggcgcccacgtggagtctgcctcaggattttcaggctgtcatgccgatggggagagcggctcaccttctagcagcagtagcggttcattagccctggggagcgcagccatccgcgggcaggctgaggtgactcaggacccggcacccctgctcaggggtttcagaaagcccgcaacaggtcaaatgaagagaaatcgcggcgaggaaatagatttcgagacaccagggagcattctcgtgaatacgaaccttagggccctgatcaactcacggacctttcacgcgctgccgtcccattttcagcagcagctacttttcctcctgcctgaagttgatcggcaggtcggcaccgatggcttgttgaggctctcctcatctgccctcaacaatgagttcttcacgcatgcagctcaaagctggagggaaagactggccgacggcgaatttactcacgagatgcaggttagaatcaggcaggaaatggagaaagagaaaaaggtggagcagtggaaggagaagtttttcgaagattattatgggcaaaagctgggcctgacaaaagaggagtctctgcagcaaaatgtgggacaggaggaagcggaaattaaatccgggttatgcgtgcccggagagagtgtcaggattcagcgaggcccagccacacgacagcgggatgggcattttaaaaagagaagccggcccgatctgcgcacccgggcccgccgcaacctttacaaaaagcaggagagcgagcaggcgggagttgctaaggatgcaaagagtgtggcttcggacgtcccgctgtacaaggacggagaagctaaaaccgatcctgctggcctatcaagtccccatctcccaggaaccagctccgccgctcctgacctagagggtccggagttcccagttgaatcagttgcatccaggattcaggctgaacccgacaacctggcaagggcttccgcaagcccagaccggattccgtccctgcctcaggaaaccgtagatcaagaacccaaagaccagaagcggaaatcttttgaacaagcagcgagtgcctcatttccagagaaaaagccccgcctggaagaccgacaatcctttcggaacacgatcgaatctgtccatacggagaagcctcaacccaccaaagaagagcccaaggtgcctccgatccgcattcagctcagtcgcattaaaccaccctgggtcgtgaaaggtcagcctacttatcagatatgcccaagaatcatccccaccaccgagtcttcatgtaggggctggaccggtgcgcgcacactcgcggacataaaggccagggctctgcaggtgagaggagctcgtggccaccactgccatcgcgaagccgctacgacggcaattggtggcgggggtgggcccggcggaggcggtggcggcgcgacagatgagggcgggggccgggggagttcatcaggggatggcggcgaagcgtgcgggcatcccgaacctagaggaggtccctccactcccggaaaatgcacaagcgacttacagcgcacccagctcctgcccccctatcccctcaacggagagcacactcaggcaggtacagcaatgagcagggctagaagggaggatctgcccagtctgcgcaaagaggagtcttgtctcttacaacgggccactgtgggcctaacagatgggttgggcgatgcttctcagctgcctgtcgcacccaccggcgatcagccatgccaggcgctgccactgctgtcttcccagacaagtgtagctgagcggctggttgagcagccccagctgcacccggatgtccgaaccgaatgcgagagcggcaccacttcctgggagagcgacgacgaggaacagggtcccaccgtgccggcagacaacgggcccatcttatcccttgttggcgatgatacactagagaaaggcacgggacaagcacttgatagccatccgactatgaaggacccggtcaacgtgacgcccagttcaactccagagtccagtccaactgattgtctacaaaatcgggcttttgacgacgagctgggtctcggcgggtcctgcccccctatgagagagtccgatacacggcaggagaatttgaaaaccaaagctctggtctccaattcctcgctgcactggattccaatcccttccaacgatgaggttgttaaacagcctaaacccgaatccagagagcacattcccagcgtggagccacaggtcggcgaggaatgggaaaaagcggcccctaccccacctgccctaccaggcgacttaaccgccgaagaggggttggacccactggattccctgaccagcctctggacagtgccctcacgaggggggtctgacagtaatggttcctattgccagcaggttgacattgaaaagctgaagattaatggggattctgaagctctatctccacatggcgagtccactgacaccgcatccgactttgagggccacctgacagaggactccagcgaggcggacaccagggaggcagctgtaaccaagggcagctccgtcgacaaagatgaaaagcctaattggaatcaaagcgcacctctgagcaaggttaatggggacatgaggctcgttacacgtactgatggaatggtggccccccagagctgggttagtcgcgtatgcgctgtgcgtcagaaaatcccggactccctgctgctcgcatcaacagagtaccagcctagagctgtgtgtcttagtatgccaggcagttcagtcgaagcaactaaccctttggtaatgcaattgcttcaggggagcctgccccttgagaaggttctgcctccagcacacgacgactccatgagcgagagcccccaggtccccctgacgaaggatcaaagtcacggctctttgaggatgggaagtctccatggtctgggaaagaactcggggatggtagacgggtcatccccttcttctctacgggccttgaaagagccgttattgccagattcatgtgaaaccggtacaggactcgcccgcattgaggcgacccaagctccaggcgcaccacagaaaaattgcaaggccgtgccatccttcgattctctccatcccgtgaccaaccccatcactagcagcaggaaactggaagagatggattcaaaagagcagttttcatccttcagctgtgaagatcagaaggaggtccgggcaatgtcgcaggattctaattccaacgctgcacccggtaagtccccaggggacctgaccactagtagaacgcctcgtttctcgtcccccaacgtgatatcttttggcccggaacagaccggccgggctcttggcgatcaatccaacgtgactggacaagggaagaaactgtttggctctggtaacgttgccgctacactccagaggcctcggcctgcagatccgatgccgttaccagctgagataccacctgtcttcccatcaggcaaacttgggccgtctactaactctatgagtggaggcgtccaaacgcccagagaggattgggcgcccaagccacacgcattcgtggggagcgtgaagaacgagaagactttcgtgggcgggcccttgaaagctaatgccgagaaccgcaaggctaccggacacagtccgctggagcttgtgggtcaccttgagggcatgccattcgtgatggatcttccattctggaagctgccccgggagcctgggaagggactgtccgagcccctggagcccagcagcctgccatcccaactttccatcaagcaggcattctatggtaagctgtccaaactacaactgtctagcacatcctttaactacagctctagctcgcctacatttccaaagggcctggccggaagcgtcgttcagttgtcccacaaggcaaactttggtgcatcccatagtgcaagtctcagtttacaaatgttcacagacagtagtacagtagaatctattagcctacagtgtgcatgttccctcaaggcaatgattatgtgccagggctgcggggccttttgtcatgacgactgcataggaccctccaagctgtgcgtgctttgcctggtcgtgagatag

SEQ ID NO: 107366 - DNA, 4626 bp, synthetic construct
  misc_feature 1..4626: note = Description of Artificial Sequence: Synthetic coding sequence
  source 1..4626: mol_type = other DNA
atgaaggacaaacagaagaagaaaaaggaaagaacttgggccgaggccgctcgcctggtcctggagaactacagcgatgctcccatgacaccgaagcagatacttcaagtgatagaagctgagggcctgaaggaaatgcgatctgggactagcccgctggcttgccttaacgctatgctgcacagcaactctagaggaggcgagggactgttttataaattaccagggaggatctcactgtttacgctgaagaaggacgccttgcagtggtctcggcatcctgcgactgtcgagggggaagagccagaggacactgccgatgtggaatcgtgtggttcgaacgaggcttcaacggtcagtggtgagaacgacgtgagcctcgacgaaacctcctctaatgccagctgtagcactgagtctcagtctcgaccgttatccaatcctagagattcctatagggccagcagtcaagccaacaaacaaaagaaaaaaacaggggttatgctgcctagggtggtcctgaccccacttaaggtcaatggcgcccacgtcgagagtgcgagcgggtttagtggctgccacgcagatggagaatcaggatccccaagctcgtccagctccggctcactggctttaggcagtgcagcgatacgcggccaggccgaagtgacccaggatcccgcccccctgcttcgaggtttcaggaagccagctacgggacagatgaagcggaataggggcgaagaaatcgacttcgaaacacccggcagcatcctggtaaacactaacctccgtgcgcttattaactcacgcacctttcatgcactgcccagccatttccagcagcagctcttattcctgcttcccgaagtggaccgccaggtcggtaccgatggcctcctgcgcctgagctccagcgccttgaacaatgaattctttactcatgcagcacagtcttggagggaaaggctcgccgacggcgagtttacgcatgaaatgcaagtccggatcaggcaagagatggaaaaggagaagaaagtggagcagtggaaggaaaagttctttgaggattattatggccagaaactgggcctcacgaaggaagagagtctacagcaaaacgtggggcaggaagaagcagaaattaaaagtggcttgtgcgtccccggcgaaagcgttagaattcagcgcgggccagcgactcggcaacgcgatggacatttcaaaaaaagatccagacccgatctgcgcacaagggctcgccgaaatctttataagaagcaggagtctgaacaggccggggttgcaaaggatgctaaatctgtcgcgtccgatgtacctctgtacaaggatggggaagccaagactgaccctgcaggtctgagcagccctcacctgccaggtacaagcagtgctgcccctgaccttgagggcccagaattccccgtggagtctgttgctagtcggatccaggcagagcctgacaatttggccagggcttcagccagcccggatcgcatcccaagccttccacaggaaactgtggatcaggaaccaaaggaccaaaaacgtaagtcctttgaacaggccgcgtccgcctccttcccggagaaaaaacctcgcctggaagaccgacaatcattcagaaataccattgagagcgtgcatactgaaaaaccccagcctaccaaagaggaacccaaggttcctcctataagaattcagctctcacggataaaacctccgtgggtggtgaagggccagcctacttatcagatctgcccaagaatcatacccaccacagaatcgtcctgtcggggctggacaggggctagaaccttagctgatatcaaagctcgcgcactgcaggtccgaggagcacgaggccaccactgtcacagggaagcggccactactgccattggcggcggtggcggccccggaggtggggggggaggtgccacagacgaaggcggtggccgtggctccagttctggcgatggtggtgaggcttgcggccacccggagccccgaggaggtcctagcacgccaggcaagtgcaccagcgacctccagcgtacacagctgctccccccctacccgctaaacggtgagcacacccaggcaggcaccgcgatgtcgagagcccggcgcgaggatctgccgtccctaagaaaagaggagtcctgtctgttacagagggctaccgtgggccttactgacggccttggggacgcatctcagctcccagtggcaccgacaggcgaccagccctgtcaggctctgcccctgctctcgagtcagacaagtgtggctgaaagattggtggagcaacctcagctgcacccggatgtgagaacagaatgtgaaagcgggacgacctcctgggagtctgacgacgaagaacaggggcccaccgtgccagccgacaatgggccgattctgagcctggtaggcgatgatactctggagaaaggaacgggtcaagccttggactcacaccccaccatgaaggatcccgtgaatgtaaccccttctagcactccagagagttcgccaaccgactgtctgcagaatagggcttttgatgatgagctgggactgggcggcagctgtccccctatgcgtgagtcagatacaagacaggaaaacctcaaaacgaaggccttagtctctaactcgtcactgcattggattcccatcccatccaatgacgaggtggtcaagcagccaaagccagaaagccgggaacatattccttcagtggaacctcaggtgggggaagagtgggaaaaagctgccccaacaccaccagcccttcccggggatctgacagccgaggaaggcttggaccccctagacagccttacgtccctatggaccgtgccttctaggggcggatctgactctaatgggagctattgccaacaggttgatattgaaaaactgaagattaatggtgattccgaggcactctcccctcacggagaatctacagacactgcatccgattttgaagggcacttgactgaagatagcagcgaggctgacactagagaagcggccgtgaccaagggttcaagcgtggacaaggatgaaaagccaaactggaaccagagtgcccccctgagtaaggtgaatggtgacatgcggctggttacacgtacggacgggatggtggccccccaaagctgggtgtcccgcgtttgcgctgtgcgccagaaaattcctgattccctcctgttggcttcaacagaatatcagcctagggcagtgtgcttgtctatgcctggctcctcagtcgaagcaacaaatccgctagtgatgcagttgttgcagggctccctccccctggagaaagtgctaccccccgctcacgatgactctatgagcgagagcccccaagtgccgctcacaaaggaccagtctcatggatccttgagaatggggagcctacacggcttgggcaaaaattctggcatggtcgacggcagttcgcccagctccctgcgcgccctcaaagaaccactgttacccgacagctgcgagacaggtacaggattggctcgtattgaggccacgcaagcaccgggggcaccccaaaagaactgcaaggccgtcccatccttcgattccttgcaccctgtcactaaccccattacaagcagccgcaaactcgaagaaatggatagtaaggagcaattctcctctttctcttgtgaagaccagaaggaggtgcgtgccatgagtcaggacagtaactccaacgcagccccgggaaaaagccccggtgatctgacgacctccagaaccccgagatttagtagtccaaatgtcattagtttcggccccgaacaaacgggcagagcactaggtgatcaaagcaatgtgactggacagggcaaaaagctgttcggatccggaaacgtcgccgccaccctccagaggccaagacccgccgaccccatgcctctgcctgccgaaattccgccagtgttcccctccggcaaactggggcctagtacaaactcaatgtcaggcggggtgcagaccccccgagaggactgggcccccaaaccccacgctttcgtgggctcagtgaagaacgaaaagacatttgtagggggaccactcaaggcaaacgccgagaacagaaaagccacagggcattcgcccctggaattagtgggacacctggaaggcatgcccttcgtgatggatcttccattttggaagttgccgcgggaacccggcaaaggcctctccgagcccctggaaccttcaagcctgccgtcccagttgtcgattaagcaggctttttatgggaaattgagcaagctgcagcttagctcaacatcatttaattacagcagctcttcacctaccttcccaaagggtctcgcgggatccgtggtgcagctctctcacaaggcaaactttggggccagtcattcagccagcctgagtctccaaatgtttaccgattcatctacagtggagagcatctccctgcagtgtgcatgttcgctgaaagcaatgatcatgtgccaggggtgcggggccttttgccacgacgactgcattggcccgagtaagctgtgcgtcctgtgtttagtggtacgctag

SEQ ID NO: 107367 - DNA, 4389 bp, synthetic construct
  misc_feature 1..4389: note = Description of Artificial Sequence: Synthetic coding sequence
  source 1..4389: mol_type = other DNA
atgctctctttccccaatctcaaccaagtgctagagaattattcagatgcccccatgactccaaaacagattttgcaggtgatcgaggccgaaggactgaaagaaatgagctcgggcacctctccactcgcctgcttaaacgcgatgctccattcgaactcccggggcggtgagggcctattttacaagcttccgggccgtatcagcctattcacactaaagaaagatgccctgcagtggtcacgccatccagcgaccgttgagggggaagaacccgaggatacagcagatgttgaaagctgtggatcgaacgaggccagtactgtgtcaggggagaatgatgtgtccctcgacgagaccagctctaatgccagctgctcaacggaatcccagtctcgcccactcagcaatccgcgcgactcctatagagcttctagtcaggccaacaaacagaagaagaaaaccggggtgatgctgccaagagtcgtgctgacccccctgaaggtgaacggtgcccatgtggaatcagcttccggccagatgaagcgaaatcggggcgaggaaattgactttgaaacccccgggtccatattagtaaacaccaacctaagagcactgataaattcacgaacctttcacgcactgccatctcacttccagcagcagctattgtttctcttacctgaagtcgacaggcaggtcggtaccgatggattactacgcttgagttcctcggcactgaataatgaatttttcacccacgccgcccaatcctggcgtgagcgactcgcggacggagagttcactcacgagatgcaagtgcgcataaggcaggaaatggagaaagagaagaaggtggagcagtggaaggaaaagttttttgaagactattacggtcagaaactgggcctcacgaaagaagagagcttacaacagaacgtgggccaggaagaggccgaaatcaaaagcggattgtgcgtgccaggagagtcagtaaggatccagcgcggaccggccacgagacagcgcgacgggcatttcaaaaagaggagccgacccgatctgaggactcgagcacgaagaaatctttataagaagcaggagtccgagcaggccggggtggccaaagacgccaaatccgtagcctctgatgtgcctttgtataaagacggcgaggcaaaaaccgatcccgccggactgtcctctcctcacctgcccggtacatccagcgcagctcccgatctggaggggccggagtttcccgtggaatccgtggcttcgcggatacaggccgagcccgataatctggcccgggcgtcggcctcgccggacagaatccccagcctgccccaggagaccgtggaccaggaaccaaaggatcagaagcggaaatctttcgagcaggctgcctccgcaagttttcccgagaaaaagccaagactagaagaccggcaatcatttcgaaacactatcgagtcagtacacactgagaaacctcagcccactaaagaggaacctaaagtgcccccaattcggattcagctgtccaggattaaaccgccatgggtcgtcaagggccagccaacctaccaaatttgccctaggataatacccactacggagtcatcatgccgaggctggaccggcgcaaggactctggccgacattaaagcacgtgctttacaggttaggggcgctagaggccaccattgccacagggaagccacagacgaaggaggcgggcgtgggtcctcctctggggacggcggggaggcctgcgggcatccggagcccagaggcggacccagcacacctggcaagtgcacaagcgacttgcagcggacccaacttttaccgccctatccgctaaacggcgaacacacccaggccggaactgccatgagccgggctcggcgtgaggacctcccgtctctcagaaaagaggagtcttgccttctccaaagagctaccgtgggccttaccgatggtttgggcgatgcgtcccagctccctgtggcccctaccggcgatcagccctgtcaggccctgccgcttcttagctcacagactagcgtagcagagaggttagtggagcagccgcaattacaccccgacgtaagaaccgagtgcgaaagcgggacaacttcttgggagagcgatgatgaagagcagggtccgacagtccccgcagataacggaccaatcctgtcactcgtcggggatgatacgttggagaagggcactgggcaggctttggattctcaccccactatgaaagacccagtaaacgtcacaccgtcaagtacccctgagtccagcccgaccgattgcctccagaatagagccttcgatgatgaactgggcctgggggggtcttgcccaccaatgagagagtctgacactaggcaggagaacctgaagacgaaggctcttgtttcaaacagctccctgcattggatcccaattccctccaacgatgaggtggtaaagcaaccaaaaccggaatctcgggagcacataccatctgtggagccccaggtcggtgaagagtgggagaaagccgctccgactcctccagctctgcctggcgatttaaccgcagaagagggactggaccctttggattcgcttacatccctgtggactgtgccaagcagagggggctccgacagcaacggatcatactgccagcaagtggacatcgagaagctgaaaatcaacggagattccgaggcactgtcaccccatggtgagtctacggacaccgcatccgatttcgaagggcatctaaccgaagattccagcgaggcagacacacgagaggcagcggtaacaaaagggagctctgtcgataaagatgaaaaacctaattggaaccagtcagctccgctgtccaaagtgaatggagacatgcgtctggtaacccgcactgacgggatggtggccccacagagttgggtgtcaagggtatgcgcggttcggcagaaaatcccagatagtttgctgctggcctcaactgaataccagccccgtgcagtctgtctgtctatgccaggaagtagcgttgaggcgacaaacccgttagtaatgcagctgcttcagggctcactgcctttggagaaggtgcttccacccgctcatgacgattctatgagcgaaagcccccaagtacctttaacaaaagaccagagccatggatctctgagaatgggctctctgcacgggctgggtaagaactcaggcatggtggatgggagttccccctcctccctgcgcgccctgaaggagcctctgcttcccgattcatgcgaaacaggcaccgggctggcgcgtatcgaggcaacccaagctcctggtgctccccaaaagaactgtaaggccgtacccagctttgattccctgcacccagtgactaaccccattacctcatctcgtaagcttgaagaaatggattccaaagagcagtttagttcattcagctgtgaggaccagaaggaggtcagagcgatgagtcaggactctaactcgaacgctgccccagggaagagccccggcgacctgactacctcacggacgccaagattctcctcccctaacgttattagcttcggacctgagcagaccggccgagctctcggcgatcaatctaacgtcacaggacaagggaagaagctgttcggcagtggaaatgtggcagcgactctgcagcgtccccgacccgccgatcccatgcctcttccggccgaaattccccccgtgtttccctcaggcaagcttgggccctccacgaatagtatgagcggcggagtgcagacccccagggaagattgggcccccaaaccccatgctttcgtaggaagtgtcaagaacgagaaaacattcgttggaggaccgctgaaggctaacgccgagaatcgcaaggccacgggccattcaccgttggagcttgtgggccatctggaagggatgccctttgtaatggatctccctttctggaagctcccccgtgaaccaggcaagggcctatccgagccactggaacccagctcactgccctcccaactgtctatcaagcaggctttctatggcaagctgagcaagctgcagctgagtagcacctcctttaattactctagcagtagccctacattcccgaagggtttggcaggcagcgtggtgcagctttctcacaaggcaaactttggtgcttctcactctgcctccttatcactccagatgttcacggatagttcaactgtggagagtatttcactgcagtgtgcctgcagtctgaaggcaatgatcatgtgtcagggatgtggagccttctgccacgatgattgtatcgggcctagcaaattgtgtgtgctttgcctggtggtgcggtag

SEQ ID NO: 107368 - DNA, 4626 bp, synthetic construct
  misc_feature 1..4626: note = Description of Artificial Sequence: Synthetic coding sequence
  source 1..4626: mol_type = other DNA
atgaaggacaaacagaagaagaaaaaagagcggacatgggcagaagcagcaagacttgttctggaaaactactcagatgctcccatgaccccaaaacagatcctgcaggtgatcgaagctgagggcttgaaggagatgcgctccgggacctctccactggcttgtttaaatgccatgctgcactccaactcccgcggcggcgaggggctgttctataaactgcccggacggatcagcctcttcaccctgaagaaggatgcgttacagtggtcccgccaccccgcaaccgtggagggggaagagcctgaggacactgcagacgtggagtcctgtgggagcaacgaagcttcgacagttagcggagaaaacgacgtgtctctggatgagacttccagtaatgcctcttgctctacagagagtcaatcccgtcctctttctaatccccgggattcatatcgtgcctccagccaggccaacaaacagaagaagaaaaccggcgtgatgctgccgagggtggtgcttaccccactgaaggttaatggtgcacatgtggaatcagctagtggcttcagtggttgccacgccgatggtgagtccgggagccctagttcgagctctagtggatccctggctctgggatctgctgctatccgcggccaggcagaagtcacccaagaccctgcacccctgctgcgcggtttcaggaagcccgctactggtcaaatgaaaaggaacaggggagaggagatagattttgaaacaccaggaagtatcctggtcaataccaaccttcgcgcccttatcaattcacgaacatttcatgccctaccgtcccacttccaacagcaacttcttttcctcctaccagaggtcgatcgacaggtgggcacggacgggttgcttaggttaagtagctctgctcttaacaatgagttcttcactcacgccgcgcagtcttggagagaaaggttggccgatggtgaatttacccacgagatgcaggtgcgaattagacaagagatggagaaggagaagaaagtggagcagtggaaggaaaaattttttgaggactactacggtcagaagttgggcctgacaaaagaagagtccctccagcagaatgtcggccaagaagaggccgagatcaagagcggtctgtgcgtgcccggggagtctgtgaggatacagcgcggaccagctacccgccaaagggacgggcattttaagaaacgtagccgaccagacttacgaacgcgtgcccgccgaaacctatacaaaaagcaggagagtgagcaggcaggtgttgctaaggacgctaagagtgtagctagcgacgtgcctctttacaaggatggcgaagctaagaccgatccagctggtctgtcttcaccgcacctccccgggacctcttctgcagccccagatctggaaggtccggagtttcctgttgaatccgttgcatcaaggatccaagcggagcccgataaccttgcacgtgcgtccgccagcccagataggattcccagtttaccccaagaaaccgtggatcaggagcctaaggatcagaagagaaaatctttcgagcaggctgcctcggcaagttttcctgagaagaaaccaaggttggaggaccgacagtctttccggaacacaatcgagtctgtccatacagagaaacctcaacccacaaaagaagaaccaaaagtgcctcccattagaatccagctaagcagaataaagccgccctgggtggtgaaggggcaacctacataccagatttgccctcgcatcattcccactactgaatcttcttgtcgcgggtggactggggcccgcactctggccgacataaaagccagggctttacaagttaggggagccaggggacaccattgccacagagaagccgccactaccgccattggcgggggggggggcccaggaggcggagggggcggagctacggacgagggggggggacggggctcgagttcaggggatggtggggaggcatgcgggcacccagaaccacgcggtggtcccagcacgcctggcaagtgtacttcggacttacagagaacacaactgctgcctccctacccattaaacggagagcacacacaggcaggcaccgctatgtctagagcacgcagggaggatcttcccagcctgcgaaaagaggagagctgtctgctgcagagagccacagtgggcttgactgatggattgggggacgcctctcagttgccagtggcgcccacaggagatcagccatgccaggccctgccactgctcagctcgcaaacctcagttgcagaacggttagtggagcagccacagctacacccagacgtaaggacggaatgcgagtccggcaccacaagctgggaaagtgacgatgaggaacagggccccaccgtgccagccgataacggccccatcctttctctggtcggcgacgacaccctagagaagggaacaggacaggctttggatagtcatccaacgatgaaggatccagtcaatgtgactccttcatctacaccggaaagttcccctaccgattgtttacagaaccgggctttcgacgatgagctcgggttaggggggagttgtcccccaatgagggagtctgacactcggcaggaaaatctgaaaacgaaagcgctggtcagcaactccagtctgcattggatcccgatcccatctaacgacgaagtcgtgaagcaacccaaacccgaatcacgcgagcacataccatcagtagaaccccaagtgggggaagagtgggagaaggccgcccccacccccccagccctgccaggggatctgactgctgaggaaggtctggatccacttgatagtctgacttcactgtggactgtcccgagcagaggggggagtgattccaatggctcttattgtcagcaagtcgatattgagaagttgaaaatcaatggggactcagaagcactgtcaccacacggggaaagtaccgacacagctagtgatttcgaaggacatttgacagaagacagctccgaggccgacacacgagaggctgcggtgaccaaaggaagctcagtggacaaagatgagaaacccaattggaaccagagtgcgcctctgagcaaagttaacggcgacatgcgccttgtcactagaacggacggaatggttgccccacaatcctgggtgtcacgcgtgtgtgctgtgagacagaaaatcccagattccctattgctggctagtactgaataccaacctcgcgccgtgtgcttgtcgatgccagggtccagcgttgaggccactaaccccctggtgatgcagctgcttcagggtagcttgcccctggagaaagtgctgccaccagcacatgatgacagcatgtccgagtctccccaggttcctctcaccaaggatcaaagtcatggatcacttcgcatgggttccttacatggtctgggcaagaattcaggcatggtggatggcagttctccctcctccctgcgcgcactgaaggagccgctcttaccggatagttgtgagactgggactgggttggcccgtattgaggctactcaggcccccggggctccacagaagaattgcaaggcggttccaagctttgacagcttacatccggtgaccaaccccattactagtagtcgcaagctggaggagatggactctaaagaacagttttcgtctttcagctgtgaagatcagaaagaagtgagggccatgtcacaagacagtaacagcaacgcagcacctggcaaaagccctggagacctcaccacctccagaacgcctagattctcttccccaaatgtgatatcttttgggcccgaacaaacggggagagccttgggggatcagtctaatgtgaccggtcagggtaaaaaattatttgggagtggaaatgtagctgctactctgcagcgccctcgccctgctgacccaatgcccttgccagcggaaattccacccgtgtttccctccggaaaactgggcccctcaactaacagcatgagcggcggcgtgcagactcctcgtgaggactgggcgcccaaaccacatgcattcgtgggcagcgtgaagaacgaaaagactttcgtgggcggcccattgaaggcaaacgctgagaacagaaaagccactgggcacagccccctggaattggtggggcatcttgaaggaatgccattcgttatggacctgccattctggaaactacctagggagccaggcaaggggttgtccgagccattggagccaagttcgttgccttctcagctatccattaagcaagcgttctacggtaagctctctaagctccagctgagctctaccagtttcaattattcttctagctcgcctaccttccccaagggattagcagggagcgtcgtacagctgtcccacaaagctaattttggcgcaagtcatagtgcctccctatctctgcagatgttcacggattcaagtaccgtcgagtctatctcgctgcagtgtgcatgctcattgaaagctatgattatgtgccaaggctgcggagccttttgtcacgacgactgtatcggtcctagcaagctctgtgtgctatgcctagtagtgagatag

SEQ ID NO: 107369 - DNA, 225 bp, synthetic construct
  misc_feature 1..225: note = Description of Artificial Sequence: Synthetic coding sequence
  source 1..225: mol_type = other DNA
taatgggcagaggcagcgagactcgtgcttgaaaactactcagatgcccctatgaccccaaaacagatcctgcaagtgattgaagcagaaggtcttaaggagatgcgctctgggactagccccttagcctgtctcaatgctatgctccactcgaattctaggggtggcgaggggctcttttataagctgcccggtcgcataagtcttttcacactgaaggtgtag

SEQ ID NO: 107370 - DNA, 258 bp, synthetic construct
  misc_feature 1..258: note = Description of Artificial Sequence: Synthetic coding sequence
  source 1..258: mol_type = other DNA
atgaaagataaacagaaaaagaaaaaagagagaacttgggcagaggccgccagactcgtcttagagaactatagcgacgctcctatgactcccaagcaaatcctgcaggtgattgaggctgaaggtctgaaagaaatgaggtccggcacctcaccattagcatgtctcaatgctatgctgcactcgaactcaagaggcggagaagggcttttttacaagctccctgggcgaatatccctatttacacttaaggtatag

SEQ ID NO: 107371 - DNA, 255 bp, synthetic construct
  misc_feature 1..255: note = Description of Artificial Sequence: Synthetic coding sequence
  source 1..255: mol_type = other DNA
atgaaggacaaacagaagaaaaagaaagagaggacctgggccgaggcagctagattggtcctcgaaaactattcagatgccccaatgactcctaagcagattctccaggtgatcgaggctgaggggctgaaggagatgtctgggacatcccccctggcttgtttaaatgcgatgctgcatagtaacagtcggggcggagaggggcttttttacaagctgcctggcagaatatcattgttcactctgaaacgttag

SEQ ID NO: 107372 - DNA, 2757 bp, synthetic construct
  misc_feature 1..2757: note = Description of Artificial Sequence: Synthetic coding sequence
  source 1..2757: mol_type = other DNA
atgaagcggacaaaatgtgccgatatagacgtggagaccccagattctatactggtgaacaccaacttgcgggccctaattaacaaacacaccttcagtgtcttgccaggggactgtcagcaacggctccttttattgctgcccgaagtcgatagacaagtcggccccgacggacttatgaaactgaatggtagcgccctcaacaatgaattttttacatccgccgctcagggctggaaagagcgactgtcagagggcgagtttacccctgaaatgcaggtccgcattaggcaggaaatcgaaaaggagaaaaaggtcgagccttggaaggagcagttcttcgagagttactacggccagtcctccgggttgtctcttgaggatagtaagaaattgaccgcaagtccatcagacccaaaggtgaaaaagacacctgcggagcaacctaagagtatgccagtatctgaagcttcgttgatcagaatagtgcccgtggtgtcgcagtcagaatgcaaggaagaggcacttcagatgtctagccctggcagaaaggaagagtgcgagagtcagggcgaggtccagcctaatttttctacctcctcagagcctttactaagctcagccctcaacactcatgagctctcctcgatcctgcccattaaatgccccaaagacgaggatcttctcgaacagaagccagtaacgtccgctgagcaggaaagcgaaaagaatcacctcacaaccgcatcaaactacaataaatccgagagtcaggaatccctggtgaccagcccctcaaaaccgaaaagtcccggcgtggagaaacccatcgtgaagcccactgcaggcgcaggcccacaagaaacaaatatgaaagagccattggccacactagtagatcaaagccccgaatcattgaagcgcaagagttcactgacacaggaggaagcccccgttagctgggaaaagcgccctcgcgtgaccgagaatcggcaacatcagcaaccttttcaagtttctccccagccatttctgaataggggggatcgaatacaggtgagaaaagtacctccacttaaaataccagtctcaagaataagtcctatgcctttccacccctcccaggtgtcacctagagcccgatttcccgtcagcattacgagtcccaacagaactggagccagaaccttggccgatatcaaagctaaagcgcaacttgtgaaagcccagagagccgcggcagcagctgctgccgctgctgctgctgcagccagtgtgggtggcacaattcctggaccagggccaggaggaggccaaggccccggcgagggcggagagggccaaaccgccagaggcggcagccccgggtccgaccgcgttagtgagacagggaaggggcctacacttgaactagccgggaccggttctcggggaggcacgcgggagctgcttccgtgtggcccagagacacagcctcagagtgagactaagactacccctagccaagcccagccacacagcgtctctggggctcagctccagcagactcctcccgtcccccctactccggccgtgtccggggcctgcacaagcgtcccatcccccgctcatatcgagaaacttgacaacgaaaagctgaatccaacacgggccaccgccaccgtcgcatctgtatcccatccacaaggcccctcctcctgtcggcaggagaaagccccatcaccgacagggtttcaacttgaagacatatccacatcgcagagatttatgttgggatttgccggcagaaggacgagtaagccggctatggccggacactatctgttaaatatctcaacatacggacgaggatcggagagcttccggcggacacactcagtgaaccctgaggatcgcttctgcctgagtagccccaccgaagctctgaagatggggtatactgattgcaagaacgctaccggcgaaagcagctcatccaaagaggatgataccgacgaggaaagtaccggagacgaacaggagagcgtgacagtgaaggaagaaccacaggtcagccaatccgctggcaaaggcgacactagttcaggaccccacagccgagaaactctttccacctccgattgtctagcgtcaaagaacgtaaaggctgagatcccactaaacgagcagactacattatcaaaggagaattatctgtttacccgtggccagacgtttgacgaaaaaacgctggccagggatctgatccaggccgcccagaaacagatggcccacgctgttagaggtaaagccattcgcagtagtcctgaactgtttagctccacggtgcttcctctgccagcggactctccaacccaccagcctctattgctgccaccgttgcagacgccaaaactgtacggatcacccacccaaatcggcccaagctatcggggaatgataaacgtgagcacttcttcggacatggaccacaattccgctgtgccaggatcacaggtctcttcaaacgtaggagatgtcatgtctttctcggtgaccgtcaccaccattccagcatctcaggccatgaacccttcttctcacggacagacaatccctgttcaagctttttctgaagaaaacagcatcgaaggtaccccaagtaaatgctattgtaggctgaaggctatgatcatgtgcaagggctgcggagcattttgccacgacgactgcatcggaccttctaagctgtgtgtgtcatgtctcgttgtgcgttag

SEQ ID NO: 107373 - DNA, 4224 bp, synthetic construct
  misc_feature 1..4224: note = Description of Artificial Sequence: Synthetic coding sequence
  source 1..4224: mol_type = other DNA
atgtcacacaaagaaattctgcaggtgatacagcgggagggactgaaggagatctcctctgggacctctcccctggcatgcttaaacgccatgctgcacaccaactccaggggagaggagggcatcttctacaaggtgcccggccgcatgggagtctatacccttaaaaaagacgtgcccgacggtgtcaaagagctgtcagagggtagcgaggagagttccgacgggcagtcagactctcagagctcagagaactcatctagtagctccgatggaggctcgaataaggaagggaagaaatctcgctggaaacggaaggtgagctcatcttccccccaaagcggctgcccaagccccactataccagccggcaaggtgattagccctagccagaagcactccaaaaaggcgctgaaacaagccctcaagcagcaacagcaaaagaagcagcagcagcaatgccgtcccagcatctcgatctccagtaaccagcaccttagtctgaagaccgtgaaagccgcaagcgacagtgtgcccgctaaaccagcaacatgggagggaaaacagtcggatggccagactgggagtccccagaattctaactctagtttttcctccagcgtgaaggtcgagaatacactgttagggctgggcaaaaagtcttttcaacgtagtgagagattacatacacgccagatgaaaagaacaaaatgcgcagacatcgacgtggaaacaccagattcgatcctagttaacacaaacttgcgggctttgattaataagcacactttctccgtactcccgggagactgccagcagagattgctgctccttctgcctgaggtcgatcgacaagttggtcctgatgggctcatgaagcttaacggttcagctctcaataacgagtttttcaccagcgctgcacaaggctggaaggaacggctctccgagggcgagttcacccctgaaatgcaggtgagaatccgacaggaaatcgagaaagaaaaaaaagtggaaccttggaaagagcagttcttcgaaagctattacgggcagagctccggcttgtccttggaggattccaaaaagctgacggccagcccctctgacccgaaggtcaagaagacccctgctgagcagcccaaatccatgcctgtgagtgaggcttctctgattagaatagtgcccgtggtgtcccagagcgagtgcaaggaggaggcattgcagatgtcatctcccggaagaaaggaggaatgcgagtctcagggagaggttcagcctaacttttcaaccagcagtgagcctttattgtcctccgccttaaatacacatgagctctcatctatccttcccattaagtgtcccaaggatgaggatctgttagaacagaaacctgtaacgtctgcggagcaggagagcgagaaaaaccatttaacgaccgcgtccaactataataagagcgaaagtcaggaatccctggttacgtcccccagcaagccaaagtccccaggcgtggagaaacctattgtcaagccaaccgccggtgctgggcctcaggagaccaatatgaaagagccactcgccactctggtggaccagagtcccgagtctctgaaaaggaagtcaagcctgacacaggaggaggccccggtctcatgggagaaacgtcccagagtgacagaaaaccgccagcaccaacagccttttcaggtgagcccccaaccattcctgaatcgcggcgatagaatccaagtccggaaagttccacccctaaagattccagtatcccgtatttcccctatgcccttccatccgtctcaagtgagcccaagggctcgattcccagtgtcaatcacaagcccgaataggacaggtgctaggaccctggccgacataaaggcaaaagcccaactggtcaaagcacagcgagcggctgcggctgccgcggcggcggcagcagccgctgcctctgtgggcggtactatcccgggcccagggccaggtggcggacaggggcccggagagggaggggagggccaaacggctcgaggggggagtcccggatctgaccgggtcagtgagacaggaaaaggacctactctcgagcttgccgggacgggaagtcgcggcggtactcgggaactgcttccttgtggtcctgagacacagccccagagtgagaccaagacgacaccctcccaggcgcagccacacagcgtgtccggggcccaacttcaacagactccgcccgttcctccgactccagcggtgagtggggcatgcacatcggttccaagtcccgcacacatcgaaaaactcgacaatgagaagctcaatcccacaagagcgaccgccacggtagcctctgtgtcacacccccaaggtccaagctcatgtaggcaggaaaaggcgccctcccccacggggcccgcactgatttctggggcttcacccgtccattgtgccgcagatggaactgttgaactgaaagctgggccatctaaaaatatcccgaatccatctgcttccagtaagacagacgcttccgtgccagttgcagtgactccatcaccgctaacctcactgctgactacagctaccttagagaaactgcctgtacctcaggtgtcggcaactacagcgcctgcaggaagtgctccacctagctccaccctgcctgctgccagctcactcaaaacacccggaacatcattgaacatgaacggcccaacgttgcggcctacttcatctatcccagctaacaaccctctggtcacacagttgctgcaaggaaaagacgtgccgatggagcagattttacccaaacctctgaccaaagtcgagatgaaaacagtgccacttaccgctaaggaggagagaggcatgggagccctgattgccaccaacaccactgagaactcaacccgtgaagaggtgaatgaacggcagagtcaccccgctacccagcaacagctgggcaaaacgctgcagtccaagcagctgcctcaggtaccccgccccttgcaactgttctctgcaaaagagttacgggactcatccatcgacacacatcaataccacgagggactgtctaaagccacccaggatcagattctgcagaccttgattcaaagagtgcggcggcaaaacctgttatcggttgttcccccatctcaattcaatttcgcccacagtgggttccagctcgaagacatctctacgtcccagcgatttatgctgggatttgccggtcggagaacctccaagcccgctatggctggacattacttgcttaacatctctacttacgggcggggctcggagtcctttagaaggacccacagtgttaaccccgaggaccgtttttgtttatcgtcccccacagaggcgctgaagatgggatacacagattgtaagaatgccacaggggagtccagctcatccaaagaggacgatactgatgaggaatctactggggatgagcaggaaagtgtgacagtgaaggaggagccacaggtcagccagtcagcagggaaaggggataccagtagtgggccacattcgcgcgagacccttagcacttctgattgtcttgcgtcaaagaatgtaaaggcagagatccctctgaatgaacagacaacattatccaaagaaaactatctcttcacccgcgggcagaccttcgacgagaagaccctggcccgggaccttattcaggccgcgcagaaacaaatggctcacgcggtcaggggtaaagccattaggtcttctccagagctgttcagcagtacagtgctccctctccctgccgacagcccaacacatcagccactgttgctcccccctctgcagacccctaaactctacggctcacccacacaaatcggcccttcctaccgggggatgattaacgtttccacctctagtgacatggatcacaactccgccgtgcctggatcacaagtgtccagtaacgtcggcgatgtgatgagtttttcagtgaccgtgaccaccattccagcttctcaggctatgaacccctcctcccacggacagaccattccagtccaggcgttttccgaagagaacagtatcgaaggtactccaagcaagtgttattgtcgattgaaggcaatgattatgtgcaaagggtgcggggccttttgtcacgatgattgtatcgggccttccaaactctgcgtttcttgtctcgtggtgagatag

SEQ ID NO: 107374 - DNA, 2757 bp, synthetic construct
  misc_feature 1..2757: note = Description of Artificial Sequence: Synthetic coding sequence
  source 1..2757: mol_type = other DNA
atgaagagaactaaatgtgcagatatagacgtagagacccccgattcgatcctcgtgaacaccaatttgcgcgccttgattaataaacacacattttccgtgctccccggggactgccaacaacgactgctcctgttattgcctgaggttgatagacaggtgggacccgatgggttgatgaaactaaatggtagcgcacttaacaatgaatttttcacctcagccgctcagggatggaaagagaggctgtccgagggcgagttcactccagagatgcaggttagaatccgccaggagattgaaaaagagaagaaagtcgaaccttggaaagaacaatttttcgaatcatattacggacaaagcagcggactttcactggaagacagcaagaagcttacagcctcccctagtgaccctaaagtgaaaaaaacaccagcggaacagccgaaaagcatgcctgtttctgaggcctccctgatcaggatagtgcccgttgtgtcgcagtcagagtgtaaggaagaagcactgcaaatgagttcccctggaaggaaggaggagtgtgaaagtcagggcgaagtccagccaaacttttctacttcttcggaacccttgctgagttctgccctcaacacgcatgaattgagctcaatactgcctattaagtgcccgaaagacgaggacctccttgagcaaaaaccggttacctctgcggaacaggagtctgagaagaatcacctaactacagctagtaattacaataagagtgagtctcaagagtctctcgtgacttctcctagcaagccaaagagtcccggagtggagaaacctatcgtcaagcctaccgccggggcaggcccacaggaaacgaatatgaaggagccgctggcaactctcgtagatcagtctccagagtcgctcaaacgcaagtcctcactcacacaggaagaagcgccggtgtcttgggaaaagcgaccccgagttacagaaaatcgccagcaccagcaaccgttccaggtgagccctcaacctttcctgaatagaggagaccgcatacaggtgcggaaagtgccccctctgaaaatccctgtgagcagaatttcccccatgccatttcacccctcacaggtgagtccaagagctaggttccctgtgtcgattacaagccctaatcggacaggtgcccgcacgttggccgacatcaaggcaaaggcccagttggtgaaggctcaaagagccgccgccgcagccgcagccgccgccgcagccgccgcttctgttggcgggaccatcccagggccggggcctggcggagggcaaggacccggggaaggaggtgaggggcagactgcacgtggtggtagcccaggtagcgatcgggtgtctgaaactggaaaggggccaaccttggagctcgccgggaccggatccaggggcggaaccagagagctgcttccctgcggccccgagacccagccacagagcgagacaaagaccactccctcgcaggcccagccccacagtgtgagcggtgcccaactgcagcagactccacccgtaccgcccacacccgctgtgagcggagcttgcacatctgtccccagcccagcacatatcgaaaagctcgacaatgagaaactgaacccaacaagagccactgcgactgtggcttctgtgtcccacccacagggccccagctcatgtcggcaggagaaagctccctcccctacaggttttcagctggaagacatctccacaagccaaagattcatgcttggcttcgcaggccgaagaacgtccaaacctgcgatggccggccactacctccttaatatctctacctatggacggggatctgaaagtttcagacggacccactctgtgaaccccgaggatcggttctgtctgagcagtccaacagaggctttaaagatgggctacactgactgcaagaacgctactggagagagctccagtagtaaggaggatgacacagacgaagagtcgaccggagatgaacaggaatctgttacagtgaaagaggagcctcaggtgtcacaatccgccggaaagggcgatacgtcaagtgggcctcactccagagaaacactcagtaccagcgactgtttggcaagcaaaaatgtgaaagctgaaataccattgaatgaacagacgaccctttccaaggagaattacctattcacacgcggacaaactttcgatgagaaaaccctggccagagacttgatccaggcggcccaaaaacagatggctcacgccgtcaggggcaaagccattaggtcctcccccgagctcttttccagtacagtgttgccactgccggccgattcccccacacaccagcccctcctgctgcctccactgcagactcctaagctctatggcagcccgacacagatcggcccgagctacagaggcatgattaacgtttccacatcttccgatatggaccataactccgcagtccctggctcacaggtgagtagtaatgttggtgatgtgatgtcattctccgtaacagttaccaccattcccgcgagtcaggcaatgaacccctcctctcatggccagacgattcccgtgcaggccttttctgaagagaactccattgaagggactcctagcaagtgctactgtcgcctgaaagcgatgatcatgtgtaaagggtgcggtgctttctgtcacgatgactgtatcggacctagcaagctgtgcgtcagctgcctggttgtgcgttag

SEQ ID NO: 107375 - DNA, 4308 bp, synthetic construct
  misc_feature 1..4308: note = Description of Artificial Sequence: Synthetic coding sequence
  source 1..4308: mol_type = other DNA
atgagggaaaaaggccggagaaaaaaaggcagaacctgggcggaagccgcgaagacagttctggagaagtatcctaatacccctatgagtcacaaggagatcctgcaagtcattcaaagagagggcttgaaggagatcaggtccgggacctctcccttagcatgtctgaacgcgatgctgcacacgaattctcgtggagaagaaggcatcttttacaaagtcccgggcaggatgggagtttacaccctgaaaaaggatgtgcccgatggagttaaagagttgtctgaaggaagtgaggaatctagtgacggtcaaagtgatagtcagtccagcgagaactcctcaagcagttccgatggagggtcgaacaaggagggcaaaaagtctcggtggaaaagaaaagtgtcctcctcctccccccagtctggctgtccaagtcccacaattccagccggcaaagttatttccccaagtcagaaacatagcaaaaaggccctgaaacaagctctgaagcagcaacaacagaagaagcagcaacagcagtgcagaccttctattagcatctccagcaatcaacaccttagcctgaagacagttaaagcagcttccgactcagtcccagccaagcctgccacttgggaaggcaagcagagcgacggtcagactggctccccccagaattcaaacagttcattttcctccagtgtcaaagtggaaaacacactgctgggcttaggtaagaagtccttccagaggtcagaacgtctgcatacccgccagatgaagcggaccaagtgcgcagacattgatgtggaaacccccgactctatactagtcaatacaaatttgagggccctcatcaataagcacacttttagcgtgctgcctggcgactgccagcagagacttctcctccttttaccggaggtcgacagacaagtggggcccgacggccttatgaagttaaacggaagcgctctcaacaacgagttctttacctccgccgctcaagggtggaaggaaagattgtctgaaggcgaattcacacctgagatgcaagtgaggatcagacaggagatcgagaaggagaaaaaagtggagccatggaaagaacagttctttgagtcctactacgggcaatctagtggactgtctttagaggattctaagaaactgacagcaagtcctagtgacccaaaggttaagaagacaccagccgagcagcccaaaagcatgcctgtttccgaagctagtctcatcaggatagtacccgtggtcagccagagtgaatgtaaagaggaagcactgcagatgtcaagtcctgggcgaaaagaggagtgcgaaagccagggcgaggtgcagcccaactttagcacatcatccgaaccccttctgagttccgcccttaatactcacgaactctcaagcattctgcccataaaatgccccaaagacgaagacctgttagaacagaagccagtgacctccgcagagcaggaaagtgagaagaatcatctgactacggctagtaactataacaaatctgagagccaggagagtcttgtgaccagcccttctaagccaaaaagcccaggggtggagaaaccgatagtcaagcctacagccggcgcaggtccccaagaaaccaatatgaaagagccactagcaaccctcgttgaccagtcccctgagagcctaaagaggaaatcatccttgactcaagaggaagcacccgtgagctgggagaaacgcccaagggtcaccgagaaccgtcaacatcagcaaccctttcaggtatcacctcagccatttctcaacagaggggacagaattcaagtgcggaaagtgcctcctctcaaaataccagtgtcgcggattagccctatgccatttcacccttcccaggtctcaccgcgcgcacggttcccagtctcaattacctctccgaaccggaccggcgccaggacactggctgacattaaggccaaagcgcagctagtgaaagcgcagagggcggccgctgccgctgcagccgccgccgcggctgcagcctctgtggggggaactatccccgggccgggccccggcggaggtcagggccctggagaaggtggcgaagggcaaactgctagagggggcagtccaggatccgacagggtgtccgagaccgggaaaggtccgactctcgagctggcaggaaccggctctcgaggggggaccagggagttactaccctgtggacccgaaacacagccgcagagtgagaccaaaaccacccccagccaggcccaaccccactcagtgtcgggggcgcagctgcagcagacccctccggtgccgccgactcctgctgtgtctggagcgtgcaccagtgtcccatcccctgctcacatcgaaaaactggacaatgaaaagttgaatcccacgcgcgccacagctacggtcgcaagcgttagccatccacagggtccctcttcatgccggcaggaaaaggctccgagcccaactggtccagccctgatcagcggtgcctcccccgtgcattgcgctgccgacggcacagtagaactgaaagcaggtccaagcaaaaatatccctaacccgagtgcctcgagtaagacggatgccagcgtgcctgtcgctgtaactcctagcccactgacctccctcctgacaaccgctacactggaaaaactgcccgtaccccaggtgtctgcaactaccgcacctgcgggcagtgctccgccttcttcaacgctgcctgctgcttcctcgctgaaaaccccgggaacatctctaaacatgaacggaccaactctgaggcccacctccagcattcctgcgaataatcctctggtgactcagctcctgcaggggaaagacgtgcctatggagcaaatactgcccaaacctctaacgaaagtcgagatgaaaactgtgcctttgacagcaaaggaggagagagggatgggagccctcatcgctaccaacactaccgagaatagcactagagaggaggtcaacgaaagacaatctcacccggctacccagcagcagcttggaaagactcttcagagcaagcaactgcctcaggtcccccggcctctccaactgttctctgctaaagagctgagggattcttcaatagatacccatcagtaccacgagggtctttccaaggccacgcaggatcagatacttcagaccctgatacaacgagtgcgcagacagaacctcctgtccgttgtgccgccgagccagttcaatttcgcacacagcgggttccagcttgaagatatatccacatcccagagatttatgttggggtttgccggaaggaggacatcgaagccagcaatggccgggcactacctgctaaatatctcgacatacggccgtgggtcagagtccttcaggaggactcacagtgtcaatcctgaggacagattctgcttgtccagtcctaccgaggctttaaaaatgggatacactgactgtaaaaatgctacaggggagagtagttcctccaaggaagacgacactgacgaggagagtaccggagatgaacaggaatccgtgacagtgaaggaggagccacaagttagccagtccgccgggaaaggtgatacttctagcggaccccatagcagagagactctgagcacgagcgattgcttagctagtaagaacgtcaaggccgagattccactgaacgaacagaccaccctcagcaaggaaaattacctgttcacgcgggggcaaacgttcgacgagaaaacactggccagggacttgattcaggccgcccaaaaacagatggcccatgccgttcgaggcaaagcaatcaggtcctcacctgagctgttcagctctacagtcctgccgttaccggccgactccccgacgcatcagcctctgttgctcccccccctgcaaacccccaagttgtatggcagccccacccaaatcggtccgagctatcgaggcatgatcaatgtgtctacttcatcggatatggaccacaactctgctgttcccggatctcaggtctcctccaacgtgggcgatgtaatgtccttttccgtgaccgttacaacaatccccgccagccaagctatgaacccatccagccacgggcagactatcccagtgcaggccttttccgaggaaaactcaattgagggaactcctagcaaatgctactgtagactaaaggctatgattatgtgcaagggctgcggggccttctgccatgatgattgtattgggccctctaaactctgcgtgtcttgtctggtggtcaggtag

SEQ ID NO: 107376 - DNA, 6747 bp, synthetic construct
  misc_feature 1..6747: note = Description of Artificial Sequence: Synthetic coding sequence
  source 1..6747: mol_type = other DNA
atgaaagacaaacggaaaaagaaagatcggacgtgggcagaggccgctagactggccctggagaaacaccccaatagtcccatgacagccaagcaaatcctggaggtgattcagaaggaaggtctcaaagagacgtctggcacttctcccctcgcatgcttgaatgccatgcttcacacaaatacccgtattggggatggcactttctttaaaatacccggaaaatctggcctctacgcactgaaaaaggaagagagtagctgtcctgcagatggcactttggaccttgtatgtgagagcgaactggacggaactgatatggcggaggccaacgcccatggcgaggaaaacggtgtttgctctaagcaggtgacagatgaggcgagcagcacccgggactcctcgctcaccaacacggcggtacagtccaagctggtctctagctttcagcagcacacaaagaaggccctgaaacaggcactcaggcaacagcagaaacgccggaacggggtgagcatgatggtcaataaaacagtgccacgtgttgttctgacccctctgaaagtgtctgatgaacagtctgactcaccaagcggctcagagagcaagaatggcgaggccgactctagtgataaggaaatgaaacacggccagaagtctcctaccggtaagcagactagccaacacttgaaaagattgaaaaagtcggggctgggacacctaaagtggacaaaggctgaggacatcgacattgaaacaccagggtcgatcttggtgaatacaaacttgcgagcgctgataaataaacatacctttgctagtcttccccagcatttccagcagtaccttctacttttactgccagaggtggatcggcaaatgggttccgatggcatcctgcggctgtcaaccagtgcactgaataacgagttcttcgcttatgccgctcaaggctggaaacagcgtcttgctgagggggaatttacacctgaaatgcagctgaggatacgtcaggaaatagaaaaggaaaaaaaaacagagccttggaaggaaaagtttttcgagcgcttctatggagaaaaattggggatgtcccgggaggaaagtgtgaagcttactacagggccaaataatgcaggagcacagtctagctccagctgcggcacctccgggcttcctgtatccgcccaaaccgccctcgcagaacaacagcctaagagtatgaaaagcccagcaagtccagagcccgggttctgtgccactctgtgccctatggtcgagatcccgccaaaggatattatggctgagttggagtcggaggatatcctcatccccgaggagtcagtgatccaagaggaaatcgccgaagaagtggagacgtctatctgcgaatgtcaagacgaaaatcataagacgatcccagaattttctgaggaggccgaatccctgaccaattctcacgaggagcctcagattgccccacccgaagacaacttagagtcttgtgtgatgatgaatgatgtgctggagaccctgccgcatattgaagtcaagatcgaaggaaagtccgagtccccccaggaagaaatgacggtggtgattgaccaactcgaggtgtgcgacagcctgattccaagcacatctagcatgacacatgttagtgacacggagcacaaagagtcagagacagccgttgaaacgtccaccccaaaaatcaagactggctccagttccttggagggacagtttcccaacgaaggcatagcaatcgacatggagctgcaatcagatcccgaagagcagctatctgagaacgcatgtattagcgagacctctttctcaagcgagagtccagagggggcctgcacatctctgcccagccccgggggagagacccagagcacaagcgaggaatcttgcacccccgccagcctggaaactacattttgtagcgaggtcagttctaccgagaacacagataagtacaaccaacgcaattctacggatgaaaattttcacgcatcgctgatgtcagagatctccccgatttctacaagtcccgagatatcagaggcgtctttgatgtccaacctacccctgacttccgaagcttcacctgtctccaatctgccgcttacaagcgagacttcccccatgagtgatttgcctttaacaagtgagacaagtagcgtgagttcaatgctgttgacttcggagacaacctttgttagttcactgcctctaccaagcgaaacctcgccgattagcaatagctccatcaacgaacgcatggctcaccagcagcgcaagtcaccctccgtctctgaggagcctctgagcccccagaaggacgaaagttcagccactgccaaacctctcggggagaacttgacatcccaacagaagaacctgagcaatacacccgagcccatcataatgagttcttcttccatcgccccagaggcttttccaagcgaagacctacataacaagaccctgagccagcaaacatgtaaaagtcatgtggatactgagaagccataccccgccagtattccagagttagcgtccactgaaatgataaaagtcaagaaccacagcgtcctccagcggaccgaaaagaaagttttaccttccccactggaactgtccgtgttcagtgaagggacagacaacaaggggaatgagctgccaagcgccaaattgcaggataaacagtacatcagttctgttgataaggcccccttttcggaaggttctcggaataaaacccataagcaaggttcaacccagtcccgcctggaaacaagccatacttctaagtctagcgagccatctaaatcacctgatggtatcagaaatgaaagccgcgatagcgaaatcagtaagcgcaagactgctgagcagcatagttttgggatctgtaaagagaagcgggcgaggattgaggatgatcagagcacgagaaatataagctcttcttctcctccagagaaggagcaaccacccagagaagaacctcgagtgccgcctctgaaaatccagcttagcaagattggaccaccatttatcattaaaagccagcctgttagcaaacccgagtccagggcatcaacaagtacctccgtcagcggtggccgcaacaccggtgctcgaaccttagcagatatcaaagccagggcccagcaggccagagctcagagggaagccgccgcagctgctgccgttgctgcagccgcctctattgtgtccggagctatgggctcgcccggcgaaggtggcaaaacacggactctcgcccacatcaaagaacagactaaggctaagctattcgcgaaacatcaagccagagctcacctgttccagacttctaaggaaacccgactgcctcctccgctatcatcaaaggagggcccccccaatcttgaagtgagcagtaccccagagactaagatggaaggatcaacaggtgtgataatagtgaatcccaactgtagatctccctccaataagagtgctcatttgagggagacaacaactgtgctccaacagagcctgaacccaagcaaacttcctgaaaccgctaccgatctaagcgtccacagctccgatgaaaacattcctgtttctcacctgtccgagaagatcgtgagttctacgtcctcggagaactcatccgtgcctatgctgttcaataagaacagcgtcccggtcagcgtgtgctctaccgccatcagcggggccattaaagagcatcctttcgtgagtagcgtggacaagtctagtgttctaatgagcgtggattctgctaatacaacaatctctgcttgtaacatatccatgcttaaaaccatccagggtacagatacaccctgcattgctatcattccaaagtgcatagaatcaactcccattagcgccacaaccgagggatccagcatttcgagctcaatggatgacaaacagctcctgatctcatcttccagcgccagtaatctcgtttcgacccagtacactagcgtgcccacaccaagtataggaaataacctgccaaatctctctacatcttctgtgctaattccaccgatgggcatcaacaaccgctttccgagtgagaagatcgctatccccggatctgaggagcaggccaccgtaagtatgggcaccaccgtccgcgcagcgttgtcatgttcagatagcgtggctgtgaccgattccttagtcgcgcatccaaccgtggccatgttcaccggcaatatgttgacaattaatagttacgacagccctcctaagctgagcgccgagagcctcgataaaaactctgggcctcgaaacagggcagataactctgggaagccgcagcaaccacccggaggctttgctcccgctgcaattaaccggagtatcccttgcaaggtcatagtcgaccattccacaacattaacgagttccctgtctctcaccgtaagtgttgagtcaagcgaggcttctcttgacctccagggacgtcctgtccgtactgaggccagcgtccaacccgtcgcttgcccccaagtaagtgtcatttctcgtccagaaccagtggcaaacgaaggcattgatcattcctcaaccttcattgcagcctccgcagctaagcaagattccaaaaccttgcctgccacttgtaccagcttgagggaacttccactagtcccagacaagctgaatgaaccaacagcaccgtcgcataattttgccgaacaggccagaggacccgcgccgttcaaatcagaagccgataccacatgtagtaatcagtataatccaagtaaccggatctgttggaatgacgatgggatgcggtccactggccagcccctggtgacccattccgggtcctccaagcagaaagaatatcttgaacagtcttgtccgaaggccatcaagacggagcacgctaactacttgaatgtgagtgagctccatccgagaaaccttgttaccaatgttgctttgcctgtcaaaagcgaacttcatgaggccgataaaggcttccgtatggacacagaagacttccccggtcctgagttacctcccccagctgccgaaggggcctcatccgtccagcagactcagaatatgaaggcatccacatcatctcccatggaagaggctatcagcctggctactgacgccctaaaaagggttccgggcgcaggctcatccggatgcagactgagctccgtcgaagcaaataaccctctagtgacacagctcctccagggaaacctccccctggaaaaggttcttccacaacctcggctgggggcaaaactggaaattaaccggctgccgctcccgctccagactacatccgttgggaaaactgcccctgaacgcaatgtcgagatccctccttcatcccctaaccccgatggcaagggatatctcgccggcaccttagcccccttgcagatgagaaaacgggagaatcacccaaagaagagggtagcaagaactgttggtgagcatacgcaggtgaagtgcgaacccggaaaactcctggtggaaccagacgtgaaaggcgtcccatgtgtgatctcaagtggcatctcacagctgggtcattcccagcctttcaaacaggagtggctcaacaaacacagcatgcagaataggatcgtacactcccctgaggtgaagcaacagaagcgcctccttccatcatgctcttttcaacagaatctgttccacgtcgacaagaatggaggtttccacacagatgccgggacgtcccatcgccagcaattttaccagatgccagttgccgccaggggccccattccgactgccgctctgctgcaagcctccagcaaaacgccagtggggtgcaatgcattcgcctttaacagacacctggagcaaaagggactgggtgaggtgtcgctgagctccgcgccacatcagctgaggctcgccaacatgttatcccccaacatgcctatgaaggaaggggatgaagtcggagggacagcacataccatgcctaacaaggctcttgtgcacccccctccaccccctccgcccccaccgccaccaccattagcactgccaccgccgcctcccccccctccccccctccctccacccctgcccaatgctgaagtgccttccgatcagaaacagcccccggttacaatggaaactacaaagcggctctcctggcctcaatcgaccggaatctgttctaatattaagagcgaaccactgagtttcgaagagggcctgagctcttcttgtgaactcggaatgaaacaggttagttacgatcagaacgagatgaaagaacagctgaaagcctttgcccttaaaagcgccgattttagctcatatctgctgtcagagccccagaagccttttactcagctggccgctcagaagatgcaggttcagcagcagcaacaattgtgcggaaattatcctacaatccatttcgggagtacatcatttaagcgcgccgcatcagccattgagaaaagtattgggatcctcggcagcggctctaacccagctaccggtctatccggtcagaatgcccaaatgcctgtacaaaatttcgcagactcctccaatgcggacgaactggagctgaaatgctcatgcagactaaaggcgatgatcgtgtgtaagggctgcggagctttttgccatgacgattgcatcggtccctcaaaactgtgtgtggcttgtctggtcgtgcgttag

SEQ ID NO: 107377 - DNA, 2307 bp, synthetic construct
  misc_feature 1..2307: note = Description of Artificial Sequence: Synthetic coding sequence
  source 1..2307: mol_type = other DNA
atgaacggtgattctcgcgccgctgttgtgacgtcgcccccccctactaccgctccacataaagaacgctacttcgacagggtggatgaaaacaacccagaatacttgcgggaacgtaatatggcgcccgaccttcgccaggactttaatatgatggagcaaaagaagcgtgttagtatgattctgcagtcccccgcattctgcgaggagctggagtctatgatccaggagcagttcaaaaagggcaaaaaccccaccgggttattggctcttcagcaaatcgctgacttcatgactaccaatgtgccgaatgtttatccagcagcccctcagggcggtatggccgccctgaatatgagtttgggcatggtcaccccagtcaatgacctcaggggatcagactccatagcgtacgacaagggcgagaagctgttaaggtgtaaactggctgcattctaccgattagccgaccttttcggctggagccagctcatctacaaccacatcaccactcgcgtcaactcagagcaagagcacttcctgattgtgccatttggacttctctacagcgaggtcaccgcaagttcattagtgaagatcaacctgcagggtgatatagtggatagaggctctacgaacttaggagtgaatcaggccggatttacgttgcatagtgccatctatgccgcgagaccagatgtgaagtgtgtagtacatatccatactccagccggagcagctgtatctgcgatgaaatgcggtcttttgcctatctctccagaggctctcagtctgggcgaggttgcttatcacgactatcacgggattctagttgacgaggaggagaaagtgttgatccaaaagaatctgggaccaaaatcaaaagtgctcattctgcggaaccacgggctagtgtccgtgggtgaatcagtggaggaggcgttttactacattcacaacttggttgtcgcatgcgaaatccaggtgcgtacactggccagtgccggtggcccggacaatctcgtgctcctcaatccagagaagtacaaggctaagtcacgaagccctggcagtccagtgggcgagggaactggttctccgccaaaatggcagatcggagagcaggagttcgaggcattgatgcgcatgcttgacaatcttggataccgaacagggtatccttacagataccccgcccttcgggagaaatccaagaaatatagcgatgtggaagtcccggcgtcggtcaccggctacagctttgcctcagatggggactcaggcacttgttcccccctaaggcacagcttccagaagcaacaacgagaaaaaaccaggtggttgaactctggacgcggagacgaagcctcggaagaaggacaaaatggcagctctcccaaaagcaagactaaggtctggacaaatattactcacgatcatgttaagccactcttacagagcctttcatctggcgtgtgcgtgccctcctgcatcactaactgcctttggactaaagaggacggccatagaacgtccactagtgccgttccaaatctcttcgttccattgaacactaatcctaaggaggtgcaagaaatgagaaataagattcgcgagcagaacctgcaggacatcaaaacagccgggcctcagtctcaggtgctgtgcggggtagtgatggacagaagtctcgtccaaggcgagcttgtgacagcctcaaaggccatcatcgagaaggagtatcaaccccatgtcattgtgagcaccacaggccctaacccattcactacgctgaccgatcgtgaactggaagaataccgacgcgaagttgagcggaaacaaaagggatctgaggagaatttagatgaagccagggaacagaaggaaaagtcaccaccggaccagccagcggttccgcatccccctccaagcactccaattaagctggaggaggatctggtccctgaacctaccactggtgatgactctgacgctgccacttttaagcccacactcccagatttgagtcctgatgagccgagcgaagccctggggttcccaatgctcgagaaagaagaggaggcccaccggccaccatctcccaccgaggctccaacagaagctagcccagagcctgcaccagacccagcccctgttgcagaggaggccgcaccctctgccgtggaagagggggcagccgccgaccctggtagcgatggatctccagggaagtctccatcaaagaagaagaagaagttccggaccccttcctttctcaaaaaaagtaaaaagaagtccgattcttag

SEQ ID NO: 107378 - DNA, 1989 bp, synthetic construct
  misc_feature 1..1989: note = Description of Artificial Sequence: Synthetic coding sequence
  source 1..1989: mol_type = other DNA
atgaacggtgactcacgagccgcggtggtcacctctccaccacccactactgctccccataaagaaagatacttcgacagggtggatgaaaacaatcctgaataccttcgtgaaaggaacatggcccccgatctacgacaggacttcaatatgatggagcaaaagaagcgggtgagcatgatactgcagtcacctgcattctgtgaggaactggagtctatgattcaggagcagttcaagaagggtaagaatcctactggcctgctggccctgcaacagatagcagattttatgaccaccaacgtaccaaacgtgtaccccgccgctcctcagggggggatggctgctttgaacatgtctctgggtatggtcactccggtgaacgacttgcgcggcagtgatagtatcgcctatgataaaggggaaaaactgctccggtgcaaacttgccgcattctaccgcttagctgatctctttggttggtctcaactgatatataatcacattaccactcgggtgaacagtgagcaggaacatttcctgatcgtgccatttggcttactgtatagcgaagtgacagccagttcgctggtaaagatcaatctgcaaggtgatatcgtcgacagaggaagcaccaacctgggggtcaaccaagcaggttttaccctacactcggcaatttatgctgcccggcctgatgtgaagtgcgtggtacacatccatacaccagccggtgcagcagtatctgcaatgaagtgtggactcctccctataagtcccgaagctttgagcctgggcgaggtggcttaccacgactaccacgggatcttagtggacgaggaggaaaaagtgctcattcaaaagaacctcggtcccaagtccaaagtgctgattctccgcaatcacggcttggtctccgtgggggaatcggtagaagaagccttctactacattcataaccttgtcgtggcttgtgaaattcaagttcgcacgctggccagtgctggcggtcccgacaacctcgtactgctgaaccccgaaaaatataaggccaaaagccgatcacctggcagcccagttggggaggggacggggtctccgcccaaatggcagattggcgagcaggaatttgaggcccttatgcggatgcttgacaacctgggctatagaacgggatacccttatcgataccccgccctgcgtgaaaagagtaaaaagtacagcgacgtcgaagtaccagcctctgtgacaggatactctttcgcgtctgatggggactccgggacatgctctcccttgaggcactcatttcagaaacaacagagagagaaaacccgctggttaaactccggacggggtgacgaagccagcgaggaagggcagaacggtagctcgcccaaaagcaagacaaagtggaccaaggaggatggacatagaactagcacatctgccgtacctaatctctttgtgccactgaacaccaaccctaaggaggtgcaggaaatgaggaacaagattcgcgagcagaatcttcaggacatcaagaccgcaggaccccagtctcaagtgctatgtggcgtggtaatggaccgctccctggtccaggatgcccccctatctgactgcaccgaaactatcgaaggccttgaactcactgaacaaacctttagtccggctaaatccttgagttttcgaaaaggggagttggttaccgcgtcgaaggctatcattgagaaggaataccagccacacgtgatcgtgagcacgaccggtccgaaccccttcaccacactcactgaccgcgagctggaggagtataggcgggaggtcgaacggaagcagaagggcagtgaggagaacttggacgaggccagggaacaaaaggaaaagtcaccccccgaccagcccgccgtcccccatcctccgccctccacccccatcaagctggaagagggcgacggctgcgcgagagagtatttactgccttag

SEQ ID NO: 107379 - DNA, 1989 bp, synthetic construct
  misc_feature 1..1989: note = Description of Artificial Sequence: Synthetic coding sequence
  source 1..1989: mol_type = other DNA
atgaacggcgattcaagagctgctgtggtgacaagtccaccaccaaccactgccccccataaggagcgctattttgaccgcgtggacgagaataatcccgaatatttgcgcgaaagaaatatggcgcccgatctgcgccaagacttcaacatgatggaacaaaaaaaacgggttagtatgatcctgcaaagccccgccttctgcgaggaactcgagtctatgatacaggaacagtttaagaaaggcaaaaatcctaccgggctgcttgccctgcagcaaatcgcggacttcatgacaaccaacgttcccaatgtttaccctgctgcaccccagggcggaatggccgcactgaacatgagtctggggatggttactccagtaaacgatctcagggggagcgacagcatagcatacgacaagggggaaaaactgcttcggtgtaagctggcagccttctaccggttggccgaccttttcggctggtcccagctcatatataatcacattactacacgcgtaaactccgaacaggaacattttctgatcgtcccgttcgggcttctgtactccgaggtgactgcctcctcactggtgaaaattaacctccagggagatatagtggacagaggttccaccaacctaggggtgaatcaggctgggttcaccctgcattccgctatatacgcagcccgccctgacgtcaagtgcgtggtccacatccacacccctgcaggggcagctgttagcgctatgaaatgcggcctgcttcccattagtcccgaggctctgtcattaggagaagtcgcttaccacgattaccatggcattctcgtcgatgaggaggagaaagtgctgattcaaaagaatttgggtcctaaatctaaagtcctgatactccggaatcacggactcgtctctgtcggcgagtctgttgaagaagcattctattatatccataacctcgtcgtcgcctgcgagatccaggtccgaactctcgccagtgccggtgggcccgacaacttggtgctgctgaaccctgagaaatataaagctaaaagcagatccccaggatcccctgtgggcgaggggactggctctcccccgaaatggcagatcggagagcaggagttcgaagctcttatgcgcatgctggataacttaggctacagaacaggatacccatacagatatccagctctgagggaaaagtctaaaaaatacagcgatgttgaggtcccagccagcgtaaccgggtactcctttgcctcagacggagactctggcacctgttctccactcaggcactcatttcagaagcagcaacgcgaaaagactcgctggctgaactcaggaaggggcgacgaggcatccgaggaaggacagaacggctccagccccaaatccaaaaccaaggtttggacaaatatcacccacgaccacgtgaagccgctgctgcagagtctctcctctggggtttgcgttccaagttgcatcaccaattgtctctggacaaaggaggatggccatcggacttccacatccgcagtgcccaacctttttgttccgcttaacactaatccaaaggaagtccaagagatgaggaataagatacgtgagcaaaatctgcaggatattaagaccgccgggccccaatctcaggtgctgtgcggagtggttatggaccgctcattggtccagggcgaacttgttactgccagcaaagccattattgagaaagagtaccagccccacgtaattgtcagcactacaggccctaacccatttaccacactgacagatagagagctggaggagtaccgtagagaagtcgagaggaagcagaaagggtccgaggagaaccttgacgaagccagagaacagaaggaaaagagccctcccgaccagcccgcggttccgcacccccccccgtctacccccatcaagctggaggagggtgatgggtgtgcccgagagtatctgcttccctag

SEQ ID NO: 107380 - DNA, 1203 bp, synthetic construct
  misc_feature 1..1203: note = Description of Artificial Sequence: Synthetic coding sequence
  source 1..1203: mol_type = other DNA
atgaacggggactctcgcgccgccgtggtgacatccccaccaccaactaccgcccctcataaggaacgctactttgaccgcgtggacgaaaacaaccctgagtacctcagagagagaaatatggcacccgatctccgccaggatttcaacatgatggaacagaagaagcgtgtatctatgattctgcagtctcctgccttttgcgaggaattggaatccatgatccaggagcaattcaaaaaaggtaaaaaccccacagggctgttggccttgcagcagattgccgactttatgacaaccaatgtcccaaatgtttaccctgcggcgccccagggggggatggctgctctgaacatgtctctgggaatggtaacgcctgtcaacgatctcagaggttccgactctattgcctacgacaagggtgaaaaactgttgaggtgcaaactggcagccttctatcggctggccgatctcttcggttggagtcaacttatttacaatcatataacgacccgagtcaatagcgagcaagagcactttctaattgtgcctttcggacttctgtattctgaggttaccgcatcctctttagtaaaaatcaacctccaaggcgatatcgtggacagaggcagcacaaacttaggagtcaatcaggcagggtttaccctgcacagcgccatctatgctgccagaccggatgtcaaatgcgtggtccatattcacacacctgctggagcagctgtgtccgctatgaaatgcggcctgcttcctatcagcccagaagccctcagtctcggtgaagtcgcgtaccacgattatcatgggatactcgtcgacgaagaggagaaagtcctcatccagaagaatctgggaccaaaaagtaaggtgctaatcctgcggaaccacgggctggtgtctgtgggtgaaagtgtcgaggaggccttctactacatccacaatttagtggtcgcttgtgaaatccaggtgcggacacttgcctcagccggtggaccggacaacctggtgctgcttaacccggagaaatacaaggccaaatctcgctctcccggcagtcctgtgggagagggaaccgggagccctcctaagtggcagattggggagcaggagttcgaggcccttatgagaatgcttgacaacttggggtatcggactagcagctctggcagaagacaagatggatag

SEQ ID NO: 107381 - DNA, 1989 bp, synthetic construct
  misc_feature 1..1989: note = Description of Artificial Sequence: Synthetic coding sequence
  source 1..1989: mol_type = other DNA
atgaacggggacagccgggccgctgtggtcacaagtcccccccctaccacagctccccacaaagagcgctatttcgatagagtggatgagaataatcccgagtacctgagagaacggaacatggcccccgatctccgccaggattttaacatgatggagcagaaaaagagggtgtccatgatcctgcaatctccagccttttgtgaggagctggaatccatgatccaggagcagttcaagaaggggaaaaatcccactggtcttctggctctgcagcagattgctgacttcatgacaaccaatgtgcctaatgtctatcctgccgccccccaggggggaatggccgctctgaatatgtcactggggatggtgactccagtgaatgacctccgtggaagcgacagtatcgcttatgacaaaggggagaagctactgcggtgtaagctggccgctttctataggctcgcagacctgttcggctggagccagctaatctacaaccatatcaccactcgtgtgaatagtgaacaggagcacttcttgatcgtcccatttggcctgctttactcagaggtgacagccagcagcctcgtaaagattaacttgcagggagatattgtcgaccgcggaagcacaaacttgggggtcaatcaagccgggtttactcttcactccgccatctatgcagccaggccagatgttaagtgtgtggtccatatccacactccagccggagcggcagtatcagcaatgaagtgcggcttgctgccgatctctcccgaggcactcagcctcggagaagttgcatatcatgattaccacggcattctcgtcgatgaggaggaaaaagttctcatccagaaaaacctgggaccaaagtcaaaggtgctgatcctgaggaaccacgggttggtgagcgttggcgaatcggtggaggaagccttctactacattcacaacttagtggtggcctgcgagattcaggttcggacactggcgagcgcgggaggcccggacaatctggtcctgcttaatccggaaaagtacaaggccaagtcacgcagccctggttcaccagttggcgagggaactggaagcccgcccaagtggcagatcggggagcaggagtttgaggcactcatgcgtatgctcgataacctggggtacaggacaggctacccttacaggtacccggccctcagagaaaaatctaagaagtactctgatgttgaggtccccgcttccgtgacaggctattctttcgcttcagatggagactctggcacatgctcccccttaagacacagcttccagaagcaacagcgcgagaaaacgagatggctgaactccggtcggggcgatgaggcttccgaagagggccagaatggctcaagccccaaaagcaagaccaaagtctggaccaatattactcacgatcatgtgaagccactgcttcagagcctgtcctccggcgtgtgcgtgccaagctgcatcacaaactgcctgtggaccaaagaggatgggcatcgtacatcaacaagtgctgtgccgaacctgttcgtacctttaaacaccaatcccaaagaagtgcaagaaatgaggaacaagatcagagagcagaacctccaggatatcaaaaccgccggtcctcagtcacaggtgctgtgtggggttgtcatggataggtccctggtgcaaggcgagctggtgaccgcgtctaaagcaatcatcgagaaagagtaccagccccatgtaatcgtgtccaccacaggtcctaatccctttaccacgctgaccgaccgcgagttggaggagtaccggagagaagtggaacgcaaacaaaaagggtctgaggagaatctggacgaggcacgcgaacagaaggaaaagtcaccaccagaccagcctgctgtcccccaccctccgccttccacacccatcaagttagaagagggcgacgggtgcgcgcgcgagtacctgctgccatag

SEQ ID NO: 107382 - DNA, 2214 bp, synthetic construct
  misc_feature 1..2214: note = Description of Artificial Sequence: Synthetic coding sequence
  source 1..2214: mol_type = other DNA
atgaacggggacagtagagccgccgtggtcacatcaccaccacctactacggccccccataaagaaagatacttcgacagagtggatgaaaataatcctgaatatttgcgtgagagaaacatggcacctgacctgcggcaggacttcaacatgatggaacaaaagaagagagtttcgatgatcctgcagagcccagcattttgcgaagaactggaatccatgatccaggaacaattcaaaaagggtaaaaatcctactggtctcctagccctgcagcagattgccgactttatgacgactaatgtgcccaacgtataccccgccgcaccccaaggtggaatggccgctctgaacatgtcgctgggaatggtgacccctgtcaatgaccttagagggtcagattctatcgcttacgataagggggaaaagctgctcagatgcaagctcgcagctttctataggctcgccgatcttttcggctggagccagctaatttataaccacatcacaaccagagtgaacagtgagcaggagcatttcctcattgtgcccttcggcctgttgtattcagaggttaccgcttccagcttggtgaagattaacctgcaaggcgacatcgtggaccgcggcagcacaaatctgggagtaaaccaggccggcttcacactccattcagcgatatatgcagcccgccctgatgtgaagtgcgtggtgcacattcacactcccgcaggtgcagcagtgtctgctatgaagtgcggcctccttcccattagccccgaagccctcagtctgggagaagtcgcgtaccacgattatcatggcatcttggttgacgaagaggagaaagtgctgattcaaaaaaatcttggcccgaagtccaaagtgctgatcctaagaaatcacggactggtgtcggttggcgagagtgttgaggaagccttctactacatacacaatttggtggtggcatgcgagattcaggtgagaactctggcgtcggctggagggcccgataatctggttctgctgaaccccgaaaagtataaagcaaaatccagatctccgggctcacctgtcggagaggggactggcagccctccaaagtggcagataggcgagcaggaattcgaggcgttgatgcgcatgctggacaacctgggatatcgcacagggtatccatataggtatcccgcgcttcgggagaagagtaagaagtactcggacgtggaggtacccgcgagcgttacgggctacagctttgcaagtgacggagattccgggacatgcagcccactccgccactcatttcagaaacagcaaagggaaaagaccagatggttgaactcaggaagaggagatgaagccagcgaggaaggtcagaacgggtctagccctaaaagtaagactaagtggacaaaggaggatggccataggacatctacatccgccgtccctaatctgttcgttccactgaacacgaatcccaaggaggtgcaagaaatgagaaacaagattagggagcaaaatctgcaagatatcaaaaccgcggggcctcaatcccaggtgctgtgtggagttgtgatggatcgatcactagtacagggcgaactcgttaccgcctctaaagcgattatcgaaaaggagtatcagcctcacgtgatcgtatccacaacaggacctaatccttttacaactcttaccgacagggaactggaggaatatagacgcgaggtcgaacggaagcagaagggcagtgaggagaacctcgatgaggcccgggagcagaaagaaaaatcaccgcccgatcaacccgccgttccccatcccccgcccagtaccccgattaagcttgaggaagatctcgttcccgaacctactaccggcgacgacagcgacgcggccacgtttaaacccacacttccagatctctctccagacgagccaagcgaagctttgggcttcccaatgctcgagaaagaggaggaagctcatcggcccccgtctcccaccgaagctcccaccgaagcctctcccgagccagccccagacccagctcctgtggccgaagaagcggcaccatctgctgtggaggaaggggcagcagcagatcctggctctgacggctctccaggtaagtctcctagcaagaagaagaaaaagtttcggacacctagcttccttaaaaagagcaagaagaagtccgattcctag

SEQ ID NO: 107383 - DNA, 2214 bp, synthetic construct
  misc_feature 1..2214: note = Description of Artificial Sequence: Synthetic coding sequence
  source 1..2214: mol_type = other DNA
atgaacggcgattcaagagccgcagtcgtgacttcccccccacctactacggcaccccacaaggagaggtactttgatcgagtggacgaaaataatcccgaatatcttagggagcgcaacatggctcctgacctccgccaagatttcaacatgatggaacagaagaagcgcgtgagcatgatcctccagtcacccgcattctgtgaagagttggaatcaatgatccaggaacagttcaaaaaaggaaaaaaccccacagggctgctggccctgcaacagatcgctgacttcatgacgactaatgtgccaaacgtctaccccgctgccccacaagggggtatggctgctttaaatatgagtctcgggatggtgacaccggtgaacgacttaagggggtccgactccatagcttacgacaaaggcgagaagttgctgaggtgtaaactggctgccttctataggctggccgacctctttggctggtctcagttgatttacaaccacatcactactcgggtcaattccgaacaggagcatttcttgatcgttcctttcggtcttctgtacagcgaagtgaccgctagctctctggttaaaatcaacttacaaggcgatatagtcgatcgtggttcgaccaaccttggagttaatcaagccggcttcaccctgcattccgccatttacgcagctagacctgatgtgaaatgtgtggttcatattcacactccagcaggcgcagcagtgtctgctatgaaatgtggactgcttcctatatcacctgaagcactgtctctgggggaggtggcctatcacgattatcacggtattcttgtcgacgaggaagaaaaagttctcatccagaaaaaccttggcccaaagtctaaggtgctgatcctgcggaatcacgggctcgtgtccgtcggagagtcagtcgaagaggctttttactacattcacaatctggtggtggcttgtgaaatccaggtgagaaccctcgctagcgctggcgggccagataatctggtgttgttgaacccagaaaagtacaaagcgaagagccgctcacccgggagtcccgtcggcgagggaacgggctctcctccaaagtggcagatcggggagcaggagtttgaggctctgatgaggatgctcgacaatctgggctaccgcaccggatacccatatcggtatcctgcgcttagggagaaatctaagaagtattctgatgtggaggtgcccgcttccgtgacaggatacagttttgccagcgacggcgactctggaacctgcagtcctttgcgacacagctttcaaaaacaacagagagagaaaacaaggtggttaaattccggtcgaggagatgaagccagcgaggagggacaaaacgggtcttcccccaagagcaaaacaaagtggactaaagaggatggacacaggacatccacctccgcagttccaaatctgtttgtacctttgaacaccaaccctaaggaggttcaggagatgagaaacaaaattcgcgaacagaatctgcaagacatcaaaaccgcagggccacagagtcaggttctctgcggcgtggtgatggataggtcccttgtccagggcgaattggttaccgccagtaaggcgatcattgagaaagagtatcagccacatgtgatcgtctctacaaccggccccaatcccttcacaacgcttacggacagagaactcgaagagtacaggcgcgaagtagaacgcaaacaaaagggtagcgaagagaacctggacgaagctagagaacagaaggagaagtctcccccagaccaacctgctgtgccacatccaccgccctcaacccccatcaaactggaggaggaccttgtgcctgagcccactaccggtgacgacagcgatgctgccacctttaagcccacacttcctgacctatcacctgacgaaccaagtgaagccttaggctttcctatgttggagaaggaggaagaagcacaccggccgccctcacccacggaagcccccacggaagcctcccccgagccagcaccagatcccgcaccggtggcagaagaggctgccccctctgccgtggaagagggagctgccgccgacccaggcagcgatggaagccccgggaaatcaccttcaaagaaaaagaaaaagtttagaaccccctcatttctgaaaaaatccaagaagaaaagtgactcttag

SEQ ID NO: 107384 - DNA, 414 bp, synthetic construct
  misc_feature 1..414: note = Description of Artificial Sequence: Synthetic coding sequence
  source 1..414: mol_type = other DNA
atgaatggcgattccagagctgccgtggtaacgagccccccacctaccaccgccccacataaagagaggtatttcgatagagtcgacgaaaacaatcctgaatatttgcgagaaaggaatatggccccagacctgcggcaggactttaatatgatggagcagaagaagagagtgtccatgattctgcagagtcccgcattctgtgaagagttggagtcaatgatccaggaacaatttaaaaaaggtaagaaccccactggacttctggccctgcaacagatcgctgacttcatgacaaccaacgttccgaacgtctacccagccgcaccacaggggggtatggccgctctcaatatgagcttggggatggtgactcctgtgaacgatctgcgcggtagcgactccattgcctag

SEQ ID NO: 107385 - DNA, 1899 bp, synthetic construct
  misc_feature 1..1899: note = Description of Artificial Sequence: Synthetic coding sequence
  source 1..1899: mol_type = other DNA
atgaatggtgactccagagcagccgtagtaactagcccaccaccaaccaccgccccacacaaggagaggtacttcgaccgtgtggacgaaaacaatcccgagtacttgagggaaagaaacatggcccccgacctgaggcaagactttaatatgatggaacaaaaaaaacgggtgagcatgattctccaatcccctgccttttgcgaagagctggaatctatgattcaagaacagtttaaaaaaggcaagaacccaactggcctgctggccctgcagcagatcgcagatttcatgactaccaatgtgcccaatgtttatcccgctgcaccacagggtggaatggccgccctgaatatgtccttaggaatggtcactccagtgaatgacctgcgagggagcgactctatcgcttacgacaagggggagaaactgctcaggtgtaagctcgcagcattttatcggttggcagatctctttggctggtcacagctaatctacaatcacatcaccactagagtgaactccgaacaggaacacttccttatcgttccgttcggcctcttatactcagaggtcacagcctctagcctggtgaagatcaacctgcagggcgatatcgtagaccgagggagtaccaatctgggagtcaaccaggctggttttacgttacattccgccatttacgctgcaaggcccgacgtaaagtgtgtcgttcatattcacacacctgccggcgccgccgttagcgccatgaagtgtggccttttgcctatttcccccgaggccctctccttgggggaagtagcttaccatgactaccatggcattctggtggatgaagaggagaaagtgttaatacaaaagaacttgggccctaagagcaaggtgctgattctccggaatcacggtctggtatcagtgggagagagtgtggaagaagcgttctactatattcacaatcttgtagtggcctgtgagattcaggtgaggactctagccagcgctggcgggcccgacaacctggtcctgcttaaccccgagaaatataaggctaagtccagaagcccgggatcaccagtgggcgaggggaccggctctccccctaagtggcaaattggcgaacaggaatttgaggcgctgatgcgaatgctagacaacttagggtaccgcaccggctacccataccgctaccctgccctgcgcgaaaaatccaagaagtactccgacgtcgaggtgcctgctagcgtgacaggttattctttcgcctcggatggtgattccggaacgtgctcccctctaagacattctttccagaagcagcagcgggaaaaaacaagatggctgaactctggcaggggggatgaggcgtccgaagaaggtcagaacggctcttcccctaaaagcaagacaaagtggacgaaggaagacgggcaccgaacgtcaaccagtgcagtcccgaatctgtttgttcccctcaatactaaccctaaggaagtacaggaaatgaggaataagattcgcgagcagaatctgcaagacattaaaacagccgggccccagtctcaggtgctttgtggagtggtcatggaccggtccctggtccaaggggagctcgtcaccgcttctaaagctattatcgagaaggagtaccagccccatgtaatagtttccactactggtcccaatccctttacaacactgactgatagggagctggaggaatatcggagggaggtggagcggaaacagaagggctctgaggaaaacctggacgaagctcgcgagcagaaggagaagtcacccccggatcagcctgccgtgccacaccccccgccgtcaacacctatcaaactggaggaggccggagacgggtgcgctagagaatacctgctcccttag

SEQ ID NO: 107386 - DNA, 1335 bp, synthetic construct
  misc_feature 1..1335: note = Description of Artificial Sequence: Synthetic coding sequence
  source 1..1335: mol_type = other DNA
taagtcttgatccttcggaaccacgggctggtttctgttggagaatcagttgaagaggcattctattatattcacaacctggttgtcgcctgcgagatccaggtgcgcacattggcctcggccggggggcctgacaacctcgttctgttgaatcccgagaaatataaggccaagagcaggtctcctggctctcccgtgggagagggaaccggatcaccacctaagtggcagatcggggagcaggaattcgaggccttgatgagaatgctggataacctgggatatcgtaccgggtacccttataggtaccccgcccttcgggaaaagtcaaaaaagtattccgacgtggaagtgcccgcttcagtcactggttatagctttgccagcgacggggattcaggcacttgcagtccccttcgccattcctttcagaaacagcagagagaaaagacaagatggctgaatagcggaaggggggatgaggccagtgaggaaggacagaatggtagcagtccaaagagcaagacaaaggtctggacgaatatcacccatgaccacgtgaaaccactgttgcaatcacttagtagcggcgtgtgtgtaccatcatgcattactaattgtctctggaccaaagaagatggacaccgaaccagcacttctgctgttcctaatttatttgtgcccctgaacactaacccaaaggaagtccaggagatgcggaataagatcagagagcaaaacctgcaggatatcaagaccgctggaccccaaagccaggtgctctgcggcgtggtcatggataggtccctggtgcaaggggagctggtcaccgcctccaaggccatcatcgaaaaggaataccagcctcacgttatcgttagcaccacaggccctaatcccttcacaacactcacagacagggagctggaagaataccgccgtgaggtggaacgaaagcaaaaggggtcggaagaaaacctggatgaagcaagggagcagaaagaaaagtcccctccagatcagcctgccgttccccaccctccgccgagtactcctattaaactggaggaggacttggtccccgaacccactacgggagatgattcagacgctgccacttttaagcctacgctacctgatctgtcacctgatgagcccagcgaggcactggggttcccaatgcttgaaaaagaggaagaagcgcataggccgcctagccctaccgaggcgcccaccgaggcctcaccagaacctgcacccgacccggctccagtagccgaagaagctgcacccagtgccgttgaggaaggcgccgcagcagacccgggctcctag

SEQ ID NO: 107387 - DNA, 2181 bp, synthetic construct
  misc_feature 1..2181: note = Description of Artificial Sequence: Synthetic coding sequence
  source 1..2181: mol_type = other DNA
atgtcggaggagacagtgcctgaggccgcctcacctccgccacctcaggggcagccttactttgaccgctttagtgaagacgatcccgaatacatgcggcttcgcaaccgcgcagctgacttgcgccaggatttcaatctgatggagcaaaaaaagcgagtgacgatgatcctgcagtctccaagtttcagggaggaactggagggtctgattcaagaacaaatgaagaaggggaataattcctccaatatttgggctctcagacagattgctgactttatggcttcaacgtctcacgcagtcttcccaaccagttcaatgaacgtatccatgatgacccctatcaatgaccttcacaccgccgactctctcaatttagctaaaggggagcgcctcatgagatgcaaaatcagctctgtctatagattgctggatctgtacggatgggcccagttgtccgacacttacgtcacacttagagtcagcaaagagcaagatcatttcctgatttccccgaagggagtctcctgctctgaggtcactgctagcagtcttatcaaggttaacatcctcggagaagtggttgaaaagggttctagttgtttcccggtggacactaccggcttttgtctgcacagcgctatatacgctgcaaggccggatgttcgctgcatcatccatctgcacacacccgccacagctgccgtaagcgccatgaagtggggactcctgccagtctcacacaatgcgcttcttgttggcgacatggcttattacgactttaatggagagatggagcaggaggcagaccggataaatcttcagaaatgcctcggaccaacgtgtaagatccttgtccttcgaaaccatggcgttgtggctctgggagacactgtcgaggaagccttttataagatctttcatctgcaggccgcatgcgagattcaggtgtctgctctaagctccgccggcggagtcgagaacctgattttgctcgaacaggaaaagcaccggccacacgaggtcggcagtgtgcagtgggcaggtagcacctttggacccatgcaaaaatcacggctaggcgagcatgagtttgaggctctgatgaggatgctggataacctgggataccgcacgggatacacctacaggcacccttttgtgcaggaaaagacaaaacataagtcagaagtcgagatccccgcaactgtaacagcattcgtgtttgaagaggatggtgcgcccgtcccagcactgcgccagcacgcgcagaagcagcagaaggagaaaacgaggtggttgaatacgccaaacacctatttgagggtgaacgtcgcagacgaagtccagaggagcatggggtctccccggcctaagacaacatggatgaaagcagacgaagtggagaagagtagtagtggaatgcctatccgaattgaaaacccgaatcagttcgtgccgctctatacggacccccaggaagttttggagatgaggaataagatcagggagcagaacaggcaggacgttaaatctgccggcccacagagtcagctgctcgccagcgttatcgctgaaaaaagtcgttccccgtcaacggagtcacagctcatgagcaagggtgatgaggacaccaaggacgactcagaagagactgtcccaaacccattttcacagctgaccgatcaagaactggaagagtacaaaaaggaggtggagagaaagaaacttgaacttgatggggagaaagagaccgcccccgaggagccgggaagcccagccaagagcgcacctgcaagccccgtgcagtctcccgctaaagaagccgaaaccaaatcccccctggtgtccccatctaaaagtcttgaagaaggtactaaaaaaacagagacatcgaaagccgctacaacagaacccgaaacaactcagcccgaaggagttgtggtgaatgggcgtgaggaagaacagacagcagaggagatcctgtccaaagggctatctcagatgacaacgtctgctgatacagatgtcgatacatcaaaggataaaactgagagtgtcacttccgggccgatgtcccccgagggtagccccagcaagagtccgagtaagaagaagaagaaattccgcactccttcttttctcaaaaagagtaagaagaaggaaaaagtggaatcatag

SEQ ID NO: 107388 - DNA, 297 bp, synthetic construct
  misc_feature 1..297: note = Description of Artificial Sequence: Synthetic coding sequence
  source 1..297: mol_type = other DNA
atgagcgaagaaacagttcccgaagctgcctcacctccccctccacagggacagccatattttgatagatttagcgaggatgaccccgaatacatgaggttgaggaacagagccgccgatctccggcaagattttaatctgatggagcaaaagaagagagtcactatgatcctgcaaagcccctcctttagggaggaactagaaggtctaattcaagagcagatgaagaaggagtacaaaaaggaggtggagcgcaagaagctggagctggacgcacctgggtggttctcaagttag

SEQ ID NO: 107389 - DNA, 1764 bp, synthetic construct
  misc_feature 1..1764: note = Description of Artificial Sequence: Synthetic coding sequence
  source 1..1764: mol_type = other DNA
atgagtgaggagactgtgcctgaagccgcttcgcccccccccccacaaggtcagccctacttcgacaggttttcagaggacgacccagaatacatgaggcttaggaatagggcggctgatctccggcaagattttaatctgatggaacagaagaagagagtcacaatgatcctgcaatccccgtcatttcgcgaggagcttgaggggttgattcaggagcagatgaaaaagggcaacaacagtagtaacatttgggcccttagacaaattgcggacttcatggcttctacctcccatgcagtcttccccacctcttcaatgaatgtctccatgatgactccaatcaatgatctgcacaccgctgattctcttaacctggccaaaggcgagcgcttgatgaggtgtaaaatctcgtctgtgtatagacttcttgacctctacggctgggcccagctgagcgatacatacgtgacgctccgtgtttcgaaggagcaggaccacttcttgatttcccccaaaggagtgagctgctcagaagtcacagcctccagtctgattaaggttaacatcctaggagaagtcgtggaaaaaggatcgagctgttttccagtcgacaccacaggcttttgcctgcattctgccatctacgctgctcgcccggacgtaaggtgtattatccacctgcataccccagcaacagcggcagtgtcagctatgaagtggggcctactgcctgtgtcccacaacgcacttctcgtgggtgacatggcttactacgattttaacggcgagatggaacaggaggcagacagaatcaacctccagaaatgcctgggtccaacctgcaaaatactggtgttgagaaatcatggagtcgttgccctcggggacacagtagaggaggccttttacaagatttttcatctgcaggcagcatgtgagattcaggtttccgccctgtcttcagcagggggggtcgaaaatttgatcctcttagagcaggaaaagcaccggccacacgaagtgggctctgtgcagtgggccggctccacttttggcccaatgcagaagagccgtcttggcgagcacgagtttgaggctttgatgagaatgcttgacaatctgggctaccgaaccggctatacctataggcatccgtttgttcaggaaaaaacaaagcacaaatcagaggtggagatccccgcaaccgtcacagctttcgtatttgaggaagacggagctcccgtccctgccctaagacagcatgcgcagaagcaacagaaggagaagaccaggtggctcaataccccaaacacttacctgagggttaatgtggccgacgaggtgcagagatctatgggcagtccccgaccaaagacaacctggatgaaagccgacgaagtggagaagagcagctccggcatgccaattaggatcgaaaatcccaaccagtttgtgcctctgtacactgacccgcaggaggtgcttgagatgcggaacaagatccgggagcagaatcgccaagacgtgaaatcagccggaccacaatcccaattgttggctagcgtcattgcagaaaaaagcaggagcccatctaccgagtcccaactgatgagtaagggcgatgaagacacaaaagacgactcagaggaaactgttcccaatccctttagtcagctcacagatcaggagctggaggaatataagaaagaggtagaaagaaaaaaactcgagttggacgcaccaggctggttctctagttag

SEQ ID NO: 107390 - DNA, 2181 bp, synthetic construct
  misc_feature 1..2181: note = Description of Artificial Sequence: Synthetic coding sequence
  source 1..2181: mol_type = other DNA
atgtctgaggagaccgtacccgaagcagcatccccgccaccccctcagggccagccctattttgacagattttctgaagatgacccagagtacatgagactccggaatagggccgcagatctccggcaggactttaatctgatggagcaaaagaaacgcgtaaccatgatcctccagagcccaagcttccgcgaggaactggaaggtttgattcaggagcagatgaagaaggggaataatagctccaacatctgggccctgaggcagatcgctgactttatggcctcaacatcgcatgcagtttttcccactagctcgatgaatgtgagtatgatgacgcctattaacgacttgcacacggccgacagcctgaacctggccaagggcgagcgcctgatgagatgcaagattagtagtgtgtaccgcctcctggatctctacggctgggcccagcttagcgatacttatgtgacactgcgcgtgtcaaaggagcaggatcacttcctgatctcaccaaaaggcgtctcctgttccgaggtgaccgcctcatcactcatcaaggtgaatatcctgggggaagtggtagaaaagggttcatcttgctttcctgtggacaccaccggcttctgtctgcattctgctatctacgctgcacggccagacgtgcgctgtataatccacctacataccccagcaacagccgccgtctctgctatgaaatgggggcttcttccggtcagccataacgctttactggtgggggacatggcttattacgactttaacggggaaatggaacaggaagccgatagaatcaatctgcaaaagtgcctgggcccaacctgcaagattttggtgctaaggaatcacggggtggtagcgctaggggatactgttgaagaagccttttataagatcttccatctgcaagccgcgtgcgagattcaggtgtcagccctctccagcgctggtggcgtggagaacctgatactcctcgaacaggagaagcatcggccccacgaagtgggttccgtccagtgggctggatccacttttggtccaatgcaaaaaagtagattaggtgagcacgagtttgaggccctgatgcggatgctggacaatctgggctatcgaacaggctacacataccggcaccctttcgttcaggaaaaaacaaaacataagagtgaagttgagattcccgcaacagtgaccgcatttgtgttcgaggaagatggggcgcctgtgcccgcattgaggcagcacgcacaaaagcagcagaaggagaaaacgcgttggcttaatacccctaatacatatttgcgggtgaacgtggctgatgaggttcaacgttccatgggcagcccacggcccaaaacaacctggatgaaagcagatgaggtggagaagtctagtagtggaatgcccatcaggatcgaaaatcctaaccaatttgtgccactttacaccgatccccaagaggtgctggaaatgcgcaacaaaataagagaacaaaaccggcaggacgtgaagtctgccggtccgcagagccagctgctggcctctgtgattgccgaaaagtcaagaagcccctcgacagagagtcagctgatgtccaaaggcgacgaggatactaaagatgacagcgaagaaaccgtgcctaaccccttctctcagcttaccgaccaggaactcgaggaatacaaaaaagaagttgagcggaagaaactggagttggacggcgagaaggagaccgcccctgaggaaccaggcagccccgccaagtccgctccggcctccccagtccagtcacccgccaaggaagcagagacaaagtcaccccttgtgtccccatccaaatccctggaagaaggaactaaaaaaacagaaacgtccaaagctgctactaccgagcctgaaactacgcaacccgaaggggtcgtagttaacggaagagaagaagagcagacagcagaggaaatcctgtccaagggtctctcccagatgacaaccagcgctgacactgatgttgatacatccaaggataagacagagtccgttacctcgggcccgatgtcccctgaaggaagtccatctaaaagtccaagcaaaaaaaagaagaagtttcgtactccgtccttcctgaaaaagagcaaaaaaaaagaaaaagttgagagctag

SEQ ID NO: 107391 - DNA, 2181 bp, synthetic construct
  misc_feature 1..2181: note = Description of Artificial Sequence: Synthetic coding sequence
  source 1..2181: mol_type = other DNA
atgtcagaagaaaccgtccccgaggccgcctcaccaccacctccacaggggcagccatactttgatcgtttctcagaggacgatcccgagtatatgaggctgcgcaatagagctgcggatctccgacaggacttcaacttgatggagcagaagaaacgagtcaccatgatactgcagtcaccctcttttagagaggaactagaaggtttaattcaggagcagatgaagaagggaaacaactctagtaacatttgggcactacggcagattgcagatttcatggcaagcaccagccacgctgtttttccaacctctagcatgaatgtgagcatgatgactccaatcaatgatctgcacactgcagactcccttaacctcgccaaaggagagcggctcatgagatgtaagatatctagcgtatacaggcttctcgacctctacggctgggcgcaattatctgatacctatgtaacactgcgtgtatctaaggagcaggaccactttctcatctcccctaaaggagtttcctgcagtgaagttactgcaagcagtctgataaaggtcaatattttaggagaggtggtagagaagggaagcagctgctttcctgtcgacacgactggcttctgcctccacagcgctatctatgcagcccgcccggacgtaaggtgcattatccacctgcatacccccgccacagcggctgtgtcggcgatgaagtgggggcttctgcctgtgagccacaatgccctgcttgtgggcgatatggcatattatgacttcaatggcgaaatggaacaggaagccgatcggattaacctgcagaaatgtctaggacccacttgtaaaatcctcgtcctccggaaccatggagtagtagccctcggggacaccgtggaagaagccttttacaaaatcttccacctgcaggccgcttgtgaaattcaagtttctgccctgtcctccgctggaggagtcgagaatctgattctgctggagcaagagaagcacaggccccatgaagtgggaagtgtacaatgggctggtagtacgttcggccccatgcagaagagcagattgggggaacacgaattcgaggctcttatgaggatgctggacaatctcggctatcgaacgggatatacctataggcacccatttgtgcaggagaagaccaaacacaaatctgaggtcgaaattcccgcgactgtcacagccttcgtgtttgaggaagacggtgccccagtaccagccttgcgtcagcatgcccaaaaacaacagaaagagaaaacccgatggctgaatacacccaacacttaccttagggtgaatgttgccgatgaggtgcagcgctcaatgggatcaccgcgccctaagacaacttggatgaaggccgacgaagtagaaaaaagcagttcaggcatgccaattcgaatcgaaaaccctaatcagttcgttcctttatacactgatccccaggaagtgcttgagatgaggaacaagatcagagaacaaaatagacaagacgtgaagtctgcaggccctcagtcacaactgcttgcctccgtaatcgctgagaagagtcgaagcccatctacagagtcacaactcatgagcaagggcgatgaagatactaaagatgacagcgaagaaaccgtccctaaccccttctcacagctgaccgaccaggagctggaagagtataagaaagaggtggagcgcaagaaactggaactggatggtgagaaggagaccgcccctgaggagcctggatccccagcgaagagcgcaccagcctcccctgtgcagtccccagccaaagaggctgagaccaagtcccccctggtgtcaccatccaaatccctcgaagagggtacaaaaaagacagaaacttctaaagcagctaccacagagccagaaaccacccagcctgaaggcgtagttgtgaacggtagagaagaggagcagaccgctgaagagattctgtctaagggcctcagtcagatgaccacctccgctgacacagatgttgacacaagtaaggataaaacagaatccgtgacttccggtccaatgtccccagaaggttcaccgtctaaaagcccttcgaagaaaaaaaagaagtttcgcacgcccagtttcctcaaaaaaagcaaaaagaaggaaaaggtggagagctag

SEQ ID NO: 107392 - DNA, 1680 bp, synthetic construct
  misc_feature 1..1680: note = Description of Artificial Sequence: Synthetic coding sequence
  source 1..1680: mol_type = other DNA
atgagcgaagagactgttcctgaagcagcgtccccccctccaccacaagggcagccttattttgaccgcttctcagaagatgatcccgaatacatgcgccttcgaaaccgggctgctgacctccgacaggacttcaacctgatggagcagaagaaacgcgtcacaatgattcttcaaagtcccagcttccgcgaagaactagagggcctcatccaggaacaaatgaaaaagggaaacaactcctccaatatttgggccctgcgccagattgcagactttatggcttctacctctcacgccgtcttccccacaagttccatgaacgtttctatgatgaccccaattaatgacctgcacacagcagatagccttaacctggctaagggagaacggctcatgagatgtaagatctcatctgtctatcgcctcctcgacctctatggatgggcccagttgtctgacacatacgttactctgagggtgagtaaagagcaggaccacttcctgatcagcccaaaaggggtttcttgcagcgaggtcacagcctcctccctgatcaaggtaaacattctgggcgaggtagtggaaaaggggtcaagctgtttcccggtggacacgaccggcttttgtctgcacagcgcgatttacgccgctcgccccgacgtcagatgcatcattcacctccacactcctgctaccgccgcagtgagcgcaatgaaatggggtcttctgccagttagccacaacgctctgctagttggagatatggcatattacgattttaacggcgaaatggaacaggaggccgatagaatcaatttgcagaaatgccttgggccaacatgtaagattctcgtgctgagaaaccacggggtggtagccttgggcgataccgtcgaggaggcgttttacaaaattttccatctgcaagctgcttgcgagattcaagtaagcgctctgagcagtgcagggggcgtggagaacctcatcctgctcgaacaggagaagcataggcctcacgaagtcggctctgttcagtgggctgggtccaccttcggcccgatgcagaagagtcgtctgggtgagcacgaattcgaggcacttatgaggatgctggacaacttgggatacaggactgggtatacttaccggcacccgttcgtccaggaaaagactaaacataaaagcgaggtggaaatcccggccactgtaaccgccttcgttttcgaggaggatggagctccggttcccgccctcaggcagcatgcccagaaacagcagaaggaaaagactaggtggttgaatacccctaacacctacctcagggtcaacgtagctgacgaagtgcagcggtccatgggctccccccgacccaaaacgacctggatgaaggcggatgaagtggagaaatctagcagcggcatgcctatacgcatcgaaaaccccaaccagttcgttccactgtatacggatccgcaggaagtgcttgagatgaggaacaaaatccgtgagcagaatagacaggacgtgaagagcgctggacctcagtctcagctgctagcctcagtgattgctgaaaaatcacggtcccccgttgaacagcggctgcccctgacggggggagagacttgccttccttcagggagttctgtccccggggcaggactgcaggacccatag

SEQ ID NO: 107393 - DNA, 681 bp, synthetic construct
  misc_feature 1..681: note = Description of Artificial Sequence: Synthetic coding sequence
  source 1..681: mol_type = other DNA
atgtccgaagagactgtgcccgaagccgcttcaccccctcccccacagggtcagccttatttcgaccggtttagcgaagacgacccagagtatatgagactgcggaacagagctgcggacttacgacaagatttcaatctgatggagcagaaaaagagagtcacaatgattctgcagtcgccatcctttcgcgaagagctggagggcttgattcaggagcagatgaaaaagggaaacaactcctccaacatttgggccttgcggcaaattgctgatttcatggcctcgactagccatgctgtgtttcccacaagctccatgaacgtgtctatgatgaccccaatcaacgacctgcataccgccgacagtctgaacttggctaagggcgagcggttaatgaggtgtaagattagtagtgtgtataggctgcttgatctctacggctgggcccaactgagtgacacctatgttacactcagagtcagcaaagagcaagatcactttctcatctccccaaagggagtgtcatgttccgaggtaacagctagctccctcataaaggttaatattttgggcgaggtagttgagaaaggctcatcgtgctttcctgtggacaccacaggcttctgtctgcatagtgcaatatacgccgccagaccggacgtgagatgtataatctag

SEQ ID NO: 107394 - DNA, 432 bp, synthetic construct
  misc_feature 1..432: note = Description of Artificial Sequence: Synthetic coding sequence
  source 1..432: mol_type = other DNA
atgtcagaggagactgtgcccgaggccgcctcacctccaccaccacaggggcagccctatttcgataggttttcagaagatgatcccgaatatatgcgactcaggaacagggccgccgatcttaggcaggattttaatttgatggagcagaaaaagcgggtcacaatgattctccagtccccctccttccgcgaggaactagaaggcctgatccaagaacaaatgaaaaagggaaataacagtagtaatatttgggctctgaggcaaatcgcagatttcatggctagcacttcacacgccgtctttccaacttcgagtatgaatgtgtccatgatgacgcctatcaatgacctgcataccgctgattccctaaatttggccaagggggagaggctgatgcgctgtaaaatatcttcggtatacagactgtag

SEQ ID NO: 107395 - DNA, 1728 bp, synthetic construct
  misc_feature 1..1728: note = Description of Artificial Sequence: Synthetic coding sequence
  source 1..1728: mol_type = other DNA
atgccccgacgccgagtgcctggcgccaattgcaagcctaccggcaaaatgagcgaggagacagttccagaagccgcaagcccccccccgcctcaaggccagccctattttgacagatttagtgaggatgatcccgaatacatgaggctccggaaccgcgcagcggacctaagacaggattttaacctgatggagcagaagaagagagtgaccatgatcctgcagtccccatcatttcgagaagaactcgaaggcctaatccaagaacagatgaagaaggggaataatagcagtaacatctgggcactgaggcagattgccgattttatggcctctacctcccacgccgtctttccaactagcagtatgaatgtgtctatgatgacgcccattaacgacctgcacacagcggacagcctcaaccttgcgaagggggagagactgatgaggtgcaagatatccagcgtgtatcgcctgctggatctctatggctgggcacagctcagcgatacttatgtcacgttgagggttagcaaggaacaggaccacttcctgatctccccaaaaggggtttcttgttccgaagtgactgcatcaagccttattaaggtgaacatcttgggggaggtggttgagaaaggctcaagctgcttccccgtggatactaccggcttctgcctacactcagcaatctatgcagcccggccggacgtccgctgcattattcacctgcacaccccggctactgctgcagtcagcgcgatgaagtggggcctgctgcccgttagccacaacgccctcctggtcggggatatggcctactatgactttaatggcgagatggaacaggaagccgacaggatcaacctgcagaaatgcctgggccccacatgcaaaattttagttctgaggaatcacggggtcgttgccctgggcgatacagttgaggaggccttttacaaaattttccacctgcaggctgcatgcgaaatccaggtgagcgccctaagctcggcgggaggtgtcgagaacctgatactgttggagcaggaaaaacaccggcctcatgaagtgggctccgttcagtgggcagggtcgacattcggaccaatgcagaaatccaggctgggcgaacatgaattcgaggcactcatgcgcatgcttgataacctcgggtataggaccggctatacgtaccgccatccatttgtgcaggagaagacaaagcacaagtctgaggttgagatcccagccacagtcacagctttcgtgtttgaggaggacggcgcccctgtacctgccctgcgccaacatgcccagaagcagcagaaagagaagacacggtggctgaacacgcctaacacctatctgcgggtgaatgttgcagatgaggtacagcgaagtatgggctccccgcgacccaaaactacctggatgaaggccgatgaagtggaaaaaagttcatcaggcatgcccatcaggattgagaatccgaatcagttcgtgcccctgtacacagacccgcaggaggtgctcgagatgcggaacaagatcagggaacagaacagacaggacgttaaaagcgcagggcctcagtcccagttgctggcctcggtgattgctgagaagtctagaagccccgtcgagcagcgcctgcctttgacaggcggtgagacttgtctccccagcggatcttccgtgccaggagcaggcctgcaagatccttag

SEQ ID NO: 107396 - DNA, 54 bp, synthetic construct
  misc_feature 1..54: note = Description of Artificial Sequence: Synthetic coding sequence
  source 1..54: mol_type = other DNA
atgtcagaggaaactgttcctgaagcggccagcccacccccaccccagggttag

SEQ ID NO: 107397 - DNA, 846 bp, synthetic construct
  misc_feature 1..846: note = Description of Artificial Sequence: Synthetic coding sequence
  source 1..846: mol_type = other DNA
atgagtgaagaaacagtacctgaagccgcaagccctcctccccctcagggccagccttatttcgacaggttttcagaagatgacccagaatatatgcgccttcgaaatagggccgccgacttgcggcaagattttaacttgatggaacagaaaaagagggtgacgatgattctgcaatcaccctcatttcgagaagagctcgagggactcatccaagagcagatgaagaaagggaataattccagcaacatctgggccctgaggcagattgcggatttcatggcctccacatcccacgctgttttcccaacttccagcatgaatgttagcatgatgaccccaatcaacgatctacacaccgctgattctcttaacctggcaaagggcgagcggctgatgaggtgcaagatctcgtccgtgtaccgcttgctggacttgtacgggtgggcgcagctcagtgacacctatgtgactctgcgggtcagcaaggaacaggatcatttccttattagcccaaagggagtgtcctgcagcgaagtaacagcctcctctctcgtcagtgaggttctggagatgcgcaacaagattcgagaacagaatcgtcaggacgtcaagtctgctggtcctcagtctcagttgcttgcctctgtgatagccgagaagtctaggtccccctctacggagagccagctgatgtccaaaggcgacgaggacaccaaggacgacagtgaggagactgtgccaaatccattcagccagttaacagaccaagaattagaagagtacaaaaaagaagttgaacgcaaaaaacttgagctcgacgcaccggggtggttctcatcctag

SEQ ID NO: 107398 - DNA, 1932 bp, synthetic construct
  misc_feature 1..1932: note = Description of Artificial Sequence: Synthetic coding sequence
  source 1..1932: mol_type = other DNA
atgtctgaagagacagtgcccgaggccgcttctccacctccgccacaagggcagccatactttgatagattcagcgaggatgaccctgaatacatgagactgcgtaatcgagcagccgatttgcgccaggactttaaccttatggagcaaaaaaagagagtgacaatgatcctgcagtcaccctctttccgggaagagttagaaggtcttattcaggagcagatgaagaagggcaataacagttctaacatatgggctctgcggcagatagcggacttcatggcaagtacatcccacgcggtatttccaactagttccatgaacgtatcaatgatgactcccattaacgatcttcacacagcggattccctcaacctcgccaagggagagaggttgatgagatgtaagattagcagcgtctacagactcctcgatttgtacgggtgggcacagctatcagacacctacgtgactctaagagtttcaaaagaacaggaccattttttgatcagccctaaaggggtatcttgtagtgaggtcacagcatcgtcgctaattaaggtgaacatcctgggagaggttgtcgaaaagggatcctcttgctttcctgtagacaccacgggcttctgcctccactccgccatatacgcagctaggcctgatgttagatgcatcatacatctacacaccccagcaactgccgcagtaagcgccatgaaatggggtcttcttccagtttctcataatgcattgctcgtcggggacatggcatactacgactttaatggcgagatggagcaggaggccgataggatcaatctccaaaagtgtctgggacccacttgtaagattctggtactgagaaaccacggcgtcgtggctctgggggataccgtagaggaggcattctataagatctttcacctacaagctgcatgtgaaatccaggtttccgcgctgtccagtgccgggggggtggaaaacctgatcctcctggaacaggagaagcacagaccacacgaagtggggtcagtccagtgggccggcagtacattcggacctatgcagaagagccgcctgggagagcacgaatttgaagctttaatgcgcatgctggacaatttgggttaccgcactgggtacacctacagacatccttttgtgcaagaaaagacgaaacataagagtgaagtggagatcccagccactgttacggcgtttgtgttcgaggaagatggcgctcctgtacctgcgctgcgtcaacacgctcagaagcagcaaaaagaaaagacgcgctggctgaacacccccaacacttatctgagggtcaacgttgccgatgaagtccaacggtctatgggaagcccacggcccaaaacgacctggatgaaggccgacgaagttgagaaaagcagctcaggtatgccaataaggattgaaaatcccaaccagttcgtgccattatacacagaccctcaggaggtgctggagatgcggaataaaattcgcgagcagaatcgccaagatgtaaagtccgcaggaccacaatcccagctgctggcttccgttattgccgagaaatcccgaagtccatcaacagagtctcagctgatgtcaaagggagatgaggacacgaaggatgactcagaggagaccgttcctaacccgttctctcagctcaccgatcaagagcttgaggagtacaaaaaagaggtggagcggaagaagctcgagctggatgagacaggccaggaaagagagccaggatccggcccagctgtatgtgagttcttcagcgtcgctctgcatatttggtccaatatcttggaaagaaagaagctcccccagaaatctctggcccacttacagtccttacatcttttactgcagtgtcgggcgcagcggaggaggcagagacagagagcattgtag

SEQ ID NO: 107399 - DNA, 2025 bp, synthetic construct
  misc_feature 1..2025: note = Description of Artificial Sequence: Synthetic coding sequence
  source 1..2025: mol_type = other DNA
atgtctagcgatgcatcgcagggagtgatcacaacacccccacctccaagcatgcctcataaggagaggtactttgaccgtatcaacgagaacgatccggagtacatccgtgaacgcaatatgtcacctgacctccgccaggatttcaacatgatggagcagagaaaacgcgtcacacaaattctacaatcccccgcattcagagaggatctggaatgcctgattcaggagcagatgaagaagggtcataaccccaccggcttgcttgctctacagcagattgccgactacattatggccaactcattctctgggttcagcagcccaccgctttctctgggaatggtgacccccataaacgaccttcccggagccgacaccagtagctatgtgaaaggggagaaacttactagatgtaagcttgccagcctttaccggcttgtcgatctgttcggatgggcgcacctagcaaacacctatatttctgttcgaattagcaaggagcaagaccacatcataatcattccacgcggactcagtttttcagaagccaccgccagcaacttagtaaaggtcaatattatcggcgaggtagtggaccagggctccactaatctgaagatcgatcacacaggtttctcaccacacgccgctatctacagcacccgccctgacgtgaagtgtgtcattcacatccacactctagcgaccgctgccgtatccagtatgaaatgcggaattttgccaatctcccaggaatccctcctgctcggcgacgttgcctattatgattatcaggggtcactggaagagcaggaggaacgcatccagcttcagaaagtgctgggcccctcctgcaaggtactggtgctgaggaaccacggcgtggttgcactgggcgagacactggaggaagctttccattatatctttaacgtacagctcgcctgtgagatccaggtccaggccctggctggagccggcggtgttgacaacctgcatgtcctagactttcagaagtataaggccttcacttacactgtggcggcatcaggaggcggtggtgtaaacatgggctctcaccagaagtggaaagttggggaaatcgagtttgaaggacttatgcgaaccctggataatcttggatatcgtaccggatacgcttacagacaccccctgattcgcgagaaaccccggcacaaatctgacgtggaaattcccgcaactgtgacggcctttagttttgaggacgatacagtgcctttgtcaccacttaaatacatggcccagcgccagcagagggaaaaaactaggtggctgaactcccccaacacatatatgaaagtaaatgtacccgaagagagccgcaacggtgagactagtccccgaactaaaataacttggatgaaggccgaagattccagcaaggtgagtggagggaccccaattaaaatcgaggacccaaaccaattcgtgccattgaacacgaaccccaacgaagtcctggagaaacgtaacaaaataagggagcagaatcgatacgaccttaagaccgccgggccccaatctcagttactggcaggaattgttgttgataagccaccctccaccatgcagtttgaagatgacgaccacggcccccccgctcctcctaatcctttctcccatttgactgagggagagctggaggaatacaagcggaccatcgagagaaagcaacagggactggaggagaatcatgagcttttttcaaaatctttcattagtatggaggtgcctgttatggttgtcaatggtaaagacgacatgcacgatgtcgaagatgagctggctaagcgagtatctagactctccacaagcactaccattgagaacatcgagatcacaattaagtcaccagagaagatcgaggaagtgctctccccggagggctcaccctcaaagagtccaagtaaaaagaagaagaagttcagaacccccagtttcctcaaaaagaacaagaagaaggagaaggtggaagcttag

SEQ ID NO: 107400 - DNA, 2121 bp, synthetic construct
  misc_feature 1..2121: note = Description of Artificial Sequence: Synthetic coding sequence
  source 1..2121: mol_type = other DNA
atgtctagtgatgccagccaaggcgtgattaccacaccccctcccccctcgatgcctcacaaggaacgctactttgatcgtatcaacgagaatgaccccgagtatatccgggagagaaacatgtctcctgaccttaggcaggactttaacatgatggaacagagaaagcgcgtcacccagatcctgcagtcccccgcatttcgagaggatctggagtgcctgatccaggaacagatgaaaaagggacacaatcccacaggtctgttagccctgcagcaaattgccgactacataatggccaacagcttctctgggtttagctcaccacctctttccctgggcatggtcacacccatcaacgatttacccggtgcagatacgtcttcatacgtaaagggagagaagttgacaaggtgcaaattggcaagtctttaccggcttgtcgatctttttggttgggctcacctcgccaacacctacatatctgtgcggatctctaaagagcaagatcatattatcatcattcctagaggactgagcttcagcgaggccactgcaagtaacctggtcaaggtgaacataattggcgaggtcgtggaccagggaagcaccaatctgaagatcgatcacaccggattctctccccacgccgcaatttacagcacgcggcctgatgtgaaatgtgtcattcacattcatactctggctactgcggccgtgagctcgatgaaatgcgggattctgcccatttctcaggaatccctcctcttgggcgatgttgcctattacgactatcagggttccctggaggagcaggaggaaagaatacagcttcagaaagttctggggccctcttgcaaggtgctggtgctccggaaccacggagtcgtggccttgggagaaacgctggaggaggcttttcactatatattcaatgtgcagctcgcatgcgaaatccaagtgcaggcattagccggggccggtggagtagataacctccatgtactggacttccagaaatacaaggcgttcacttacaccgtcgccgcgtcagggggcggaggtgtgaatatgggatctcaccagaagtggaaagtcggggagatagagtttgaaggtcttatgcgcactttggacaacctgggctaccgtaccggctacgcctacagacatcccctgatcagggaaaagccccgacacaagagcgacgtggagatccctgctaccgtaaccgcattctccttcgaggatgacacagtccccctgtcaccactcaaatacatggctcagaggcagcaacgagaaaagacccggtggctcaactctcccaacacatatatgaaggtcaatgtacctgaggaaagcaggaatggggaaacatcacctaggactaagatcacgtggatgaaggctgaggactcaagcaaggtgagcgggggaacacccattaaaattgaagaccctaaccagttcgtgccactgaatacaaatcctaatgaggttctcgaaaagagaaataaaatcagggagcagaaccgttacgacttaaagaccgctggaccccaatcacagctgttggcagggatcgtggttgataaaccaccctcaactatgcagtttgaagacgacgaccatggaccacctgcccctcctaaccctttcagtcacctgacagagggtgagctcgaggaatacaaacgtaccatagagaggaaacaacagggcctcgaagacgcagagcaggagttgttgtctgacgatgcttctagcgtgagccagattcagagccagactcagtctccacagaacgtgccagaaaaactcgaggagaaccatgaactgttctcaaagagcttcatctcaatggaggtccccgtcatggtggtcaatggcaaggacgacatgcacgatgtcgaagacgaactggccaaacgcgtgagtaggctcagcacgtccaccaccatagagaacatagaaattacaattaagagtccagagaagatcgaggaagtactaagccccgaaggtagtccgtccaaatcgccatccaaaaagaaaaaaaagttcaggacacccagtttcctgaagaagaacaagaagaaggaaaaggtggaagcctag

SEQ ID NO: 107401 - DNA, 2025 bp, synthetic construct
  misc_feature 1..2025: note = Description of Artificial Sequence: Synthetic coding sequence
  source 1..2025: mol_type = other DNA
atgtcgtctgacgctagccagggagtaattaccactcccccgccccccagcatgccccacaaagagaggtacttcgaccggatcaatgagaatgatcctgaatacatacgagagagaaacatgagtcccgacttgcgccaggactttaacatgatggagcagaggaagcgggtgacacagatcctccaatcccccgccttccgagaggatcttgagtgtctgattcaggagcagatgaagaaggggcacaaccccactggtctactggcattacagcagatcgccgactacataatggcaaatagtttcagcgggtttagttcccccccactatctcttggcatggttactccaatcaatgatctcccaggggcagacacttcttcgtacgtcaagggcgagaagctgaccagatgtaaactggcgtccctgtatcgccttgtggacctatttggttgggcccacctggccaatacttatatcagcgtccgcattagcaaggagcaggatcatatcataatcatcccaagagggctatccttctcagaggctaccgcgtcaaaccttgtcaaagtgaatatcatcggcgaagtggtggaccaggggagtaccaatctcaagatcgatcacaccggcttttcacctcacgctgctatttattcgactcgacccgatgttaagtgcgtgatccacatccacactctggctactgccgccgtgtccagtatgaagtgcggaattcttcctatttcacaggaaagtctccttctgggcgatgtggcttattatgactaccagggatcactggaggaacaagaggaacgcatccagcttcaaaaagtgttggggcccagctgtaaggtgctggtactgagaaaccatggtgtcgtggccctgggtgaaactctagaagaagcttttcattatatatttaatgtgcagttggcctgtgagatccaggttcaggccttggcaggcgcaggtggcgtcgacaacttgcatgtgctagatttccagaaatacaaagccttcacgtataccgtggccgcgagtggggggggcggagtcaacatggggagccaccagaagtggaaggtgggtgagatagagttcgagggactgatgaggaccctggacaacctggggtaccggacggggtacgcttataggcacccactgatcagggagaaacctcgtcataaaagtgatgtggaaatcccagccaccgttacggctttcagctttgaggatgacaccgtcccactgtcaccgctgaagtatatggcccagagacagcagcgagagaaaaccaggtggcttaatagtcctaacacgtatatgaaggtcaacgtgcccgaagaaagcaggaacggcgagaccagtccacgcactaaaatcacttggatgaaagccgaagacagttcaaaggttagtgggggtacaccaatcaagattgaggatcccaaccagtttgtcccccttaacaccaatcctaacgaggtgttggaaaagcgcaacaaaattcgggagcaaaaccgatacgacctgaagactgcaggtccacaaagccagttgctcgcaggcatcgtggtggacaagccaccaagcactatgcagtttgaggatgatgatcacggtcctcccgcccccccaaatccattcagccatttgacagaaggcgagcttgaggagtataagaggacaatcgagcggaagcagcaagggctggaagagaaccacgaactgttctccaaaagcttcatcagcatggaagtgcccgtgatggtcgtgaacggtaaagacgatatgcacgacgtggaagacgagttggccaaacgggtcagtcggctgtctacatctactaccatcgaaaatatagagattaccataaaaagtcccgagaagattgaggaagtgctctcccccgagggttccccttccaagtcaccatccaagaagaaaaagaagtttaggactccgtcatttctcaagaaaaataaaaaaaaagaaaaagtggaggcctag

SEQ ID NO: 107402 - DNA, 543 bp, synthetic construct
  misc_feature 1..543: note = Description of Artificial Sequence: Synthetic coding sequence
  source 1..543: mol_type = other DNA
atggccgatagtgagttgcaactcgtcgaacagcggatcagaagcttccctgacttccctacaccaggtgttgtattcagggatatcagccccgtcctgaaagatccagcgtccttccgggccgccatcgggctgcttgcccgccaccttaaggccactcacggggggagaatagactacatagccggactggatagcaggggatttctatttggccctagcttggctcaagagctggggttgggttgtgtgctgattcggaagaggggcaagctgcctggacccaccttgtgggccagctacagtcttgaatacgggaaggctgagttggaaatccagaaagatgcactggagccaggacaaagagtggtcgtggtggacgatttattagctaccggggggacaatgaacgcggcctgcgagctcctgggacgactgcaagcagaggtgctggagtgtgtctcactggtcgagctgacctctctgaagggacgggagaaactggctccagtccccttcttctccctactccagtacgaatag

SEQ ID NO: 107403 - DNA, 405 bp, synthetic construct
  misc_feature 1..405: note = Description of Artificial Sequence: Synthetic coding sequence
  source 1..405: mol_type = other DNA
atggccgactcagagctccagctcgtggaacagcgtatccgttcattcccagactttccgacaccgggagtggtctttcgtgacatcagcccagtgcttaaggaccctgctagctttcgggccgcaataggccttttagctcggcatcttaaggcgacacacgggggacggatcgactatatcgccggcttagattctagaggcttcctctttgggccttctctggcccaggagctagggctgggttgcgtgctgatccgcaagcggggtaagctgcccgggcctaccctgtgggccagctattcactggagtacgggaaagccgagctggagattcagaaagatgctcttgagccggggcagagagtcgtcgtggtagacgacctcctggctaccggggtctag

SEQ ID NO: 107404 - DNA, 555 bp, synthetic construct
  misc_feature 1..555: note = Description of Artificial Sequence: Synthetic coding sequence
  source 1..555: mol_type = other DNA
atggatggccttagacaacgggttgaacacttcctcgagcaacgcaacctcgttaccgaggtattaggggctcttgaggctaaaacaggcgtggaaaaacgttacttggctgcaggcgcagttacgttgttatccctgtatctgctcttcggatatggcgcatccctactctgtaacctcatcgggttcgtttatcctgcatacgcgtctataaaggccatcgaatccccatctaaagacgatgataccgtctggctaacttattgggtggtatatgccttatttgggcttgcggaattttttagcgatcttctgctctcctggtttcccttctactatgtcggtaaatgcgcattcctccttttttgtatggctccccggccatggaacggggcgctgatgctataccaacgcgtggtacgcccactatttttacgtcatcacggtgccgtggaccgcattatgaacgacctcagcggacgggctctcgacgcggctgccggcataacacgcaacgtcaagccatctcagaccccgcagccgaaagacaagtag

SEQ ID NO: 107405 - DNA, 6090 bp, synthetic construct
  misc_feature 1..6090: note = Description of Artificial Sequence: Synthetic coding sequence
  source 1..6090: mol_type = other DNA
atggccagcagtgtggctccctatgagcagctcgtccgacaggtggaggctctgaaggctgagaactcccatctgagacaggaactgagagataacagcagtcacctgagcaaattggagactgagactagcgggatgaaggaggtgttgaagcacctccaggggaagctcgagcaggaagccagagtcctggtctctagcggacagacggaagtgcttgaacagctgaaagcattacagatggacatcaccagcctgtacaacttaaaatttcaaccccctactttgggccccgagccagccgcgagaacccccgaaggttcccctgtacacgggagcggccccagcaaagacagctttggtgagctgtcaagggcgaccataagactgctggaagagttggatagggagcgctgcttcctgctgaatgagattgaaaaggaggagaaggaaaagctttggtattactctcagctacagggattgtcaaagagactagacgaacttccacatgtggattacgagatgcacaagatgacccgggaccccctaaacctggcgttgcgacggtacgctgggatgacactgaccaatttaacctttggagacgtggcaaataaggcgactctgtgtgccagacgtggatgtatggaagcaattgtcgcccagctggctagtgacagtgaggaactgcaccaggtcgttagttctatactgcgtaatctgagttggcgggcggacatcaatagcaagaaagtccttcgagaggctggatctgtgactgcacttgtccagtgcgttctgagagccactaaagaaagcactctgaaaagtgtactgtccgccctatggaatcttagcgctcattctaccgagaataaggctgctatatgtcaggtggacggagcactggggtttctagtcagcacgctgacttacaaatgccagtccaactcgttagcgattatcgagagcggaggcggcatactacgcaacgtgagcagtctcgtggccactagagaggattacaggcaggtgctccgcgatcataattgcctacagaccctactacagcacctgacctcacactcattgacaatagtctccaatgcctgcggaaccttatggaacctgagcgcaaggtcggctagagaccaggaacttctttgggacttgggtgctgttggcatgctacggaacctcgtgcattcaaagcataaaatgatcgccatggggagcgcagctgcactgagaaacctgctggctcatagaccagcaaagcatcaggcagctgcgaccgcggtgagccccggttcatgtgtcccatccttgtacgtgcgcaaacagagagcactcgaggctgagctggatgcgcggcatctggcccaggccctggagcacttggaaaaacagggccctcccgcagctgaggcagccacaaaaaaaccactgccaccattgcggcacctggacggtttggctcaggactatgcttctgatagtggctgcttcgacgacgatgatgctccaagcagtcttgccgctgcagcagcaactggtgagccggcctccccagcagctttgtctctttttttaggctcgccatttctgcagggacaggccctcgccagaaccccgcccacgcgtaggggtggtaaggaagctgaaaaggatacgtccggcgaggccgccgtcgccgcgaaggccaaagcaaagttagcactcgccgtcgcccgaatcgatcagctcgtcgaggacatcagcgcactgcatacatcaagcgacgatagcttctccttgtccagcggcgatccagggcaagaagccccgcgtgagggacgcgcacaaagctgtagtccctgcagagggcccgaaggaggtcgccgcgaagcaggatcgagggcccatccattgctccggcttaaggccgcccatgcttctctctctaatgacagtctgaatagtggatcagcatctgatggctattgtcctagagagcatatgctgccctgtccactggctgccttagccagtaggagagaagatcccagatgcggccaaccccggccgtcaaggttggatctggacctgcccggctgccaggctgaaccacctgcaagggaggcgacatcggcagatgccagggtccggacaattaagctgtctcccacttaccagcatgtgcctctcctggagggcgcgagcagagcaggggccgaacctctggcaggacctggaatttctcctggggcaaggaaacaggcgtggttacccgcggatcatctgagtaaagtgccagagaagctggctgcagccccattaagcgtggccagcaaggccctccagaagctggctgcccaggaagggccactgtccctctctaggtgcagttccctgagtagccttagtagcgccggacgacccggaccgagtgagggcggtgacctggatgatagcgactccagcctggagggcctggaggaggccggaccatctgaagctgaactcgactctacatggcgggctcctggcgccacttcacttccagtagcaatccctgccccacggcgcaaccggggcagaggtctcggcgtggaggacgccacacctagctccagcagtgagaattatgtgcaggagaccccactggtactatccagatgttcaagcgtgagcagtctcgggtcctttgagtcgccctctattgccagtagcattccttcagagccatgttccggacagggttcgggcaccatcagcccaagcgaacttcctgattcacctggtcaaaccatgccgcccagtcggagtaagactcccccactcgcgcctgccccccagggcccccctgaggctacacagtttagcctccagtgggaatcgtatgtcaagcggtttctcgacattgccgattgcagggagaggtgcagactcccctcggagcttgatgcagggtctgtgaggttcaccgttgagaagcctgacgagaactttagctgtgcaagctcactaagtgctctggcgctgcacgagcactacgttcagcaagacgtcgagcttcgactcttgccatctgcttgcccagaacgcgggggaggagccggcggtgccggtctccacttcgccggccacaggagacgggaggaggggccagcacccaccggctcccgaccccgaggcgcggccgatcaggagcttgagttgttgcgtgaatgtcttggggcagccgttccagctcggctgcgtaaagttgcatctgctctggttcctggaagaagggccctccccgtaccagtttatatgttggtccctgcacctgctccggcacaggaagacgactcttgtaccgactcggccgaagggactcccgtgaatttctcctcagcagcttccctctctgacgagactctacagggcccacctcgcgatcagccagggggtcccgccggcagacaaaggccaaccggccggcccacgagtgcgaggcaggcgatgggtcatagacacaaggcggggggagcagggaggagcgcggagcagtcacgcggcgcaggcaaaaatagagccggcctggagttaccactgggccggccgcctagcgcacccgccgacaaagatggttccaaacccgggaggaccagaggggacggtgccctgcagtccctatgcctgacgacacctacagaagaagccgtgtactgtttttatgggaatgactctgatgaagaacctccggcggccgcccccactccgacacaccggagaacaagtgctattcctagggccttcacacgggagcggcctcaaggcaggaaagaggcccctgctccatctaaagcggcacctgccgctccgccacccgcgagaacgcagccgtcacttattgcagacgagacaccaccctgctattcacttagtagcagcgcttccagcctctcagaacctgagcccagtgaacctcccgctgtccaccctagagggcgcgaacctgctgtcacgaaggatcctggacctggcggagggcgcgacagttcaccctctccccgcgccgcggaagagttgcttcagagatgcatctccagcgccctaccccgaagaaggcctcctgtctcaggcctcagacgtcggaaaccacgggccacccgactagacgagcgccccgctgagggcagccgtgagcgaggggaggaggctgcagggagcgatagggcttccgacttggactctgttgaatggagagccatccaggaaggggctaactcaattgttacttggctccatcaagcggctgctgctacaagagaggcctccagcgagagcgatagtatcttgtcattcgtgtcaggcctgtctgttggctcaacattacaaccccccaagcatcgaaagggtcgccaagcagaaggcgaaatggggtcagctagacgtcctgaaaagagaggcgccgcctcagtaaaaacgagcggctcccctcgttctccagcaggacctgagaagccccgcggaacccaaaagaccacccccggcgtgcccgccgttctccggggccggacagtaatctatgttccgagtcctgctcctcgggcgcagcccaagggcacacctggtcctcgggctacccctaggaaagtggcaccgccatgtctggcccagcctgctgcccctgcaaaggtcccctctcccggccagcagcgcagccgatcacttcatagacccgccaagacgtccgaactggccaccctgagccagcctccaaggagtgccacccctccagccagactggccaagacccctagtagcagctcgtcccagactagccccgccagccagccactgccaagaaaaaggccacccgtcacacaggccgcaggcgcactgcccggaccgggagcgtcccctgtgcctaaaacacccgctcgcacactgctggctaaacagcataaaacccaacggagtccagtgcggattccattcatgcagagacccgcgcggcggggaccgccgcctctggccagagcagtccccgagccgggccctcgaggacgcgccggcacagaggccgggcctggggctagaggaggaagactgggcttggtgcgggttgcttctgcactctcttccgggtccgagtcaagcgataggtcgggctttcgaagacagctgacctttatcaaagagagccctgggttaagacggaggcgatcagaactctcctctgctgagtccgcggccagcgccccccagggcgcttcgccccgccgcggcaggcccgcattgcctgctgtgtttctgtgtagctcccgctgtgaagagctccgtgccgccccacgccaaggccctgcccccgccaggcagaggccccccgctgcccgcccttcgccaggcgaacgacccgctagaagaactactagcgagagtcccagccggctgccagtgagagctccagcagcaaggccagagaccgtgaagcggtacgcttccctgccccacatttctgtggctcggagacccgacggagcagtgcccgccgctcccgcatctgctgacgccgcccggagatcatcagatggagagccacggcccctgccaagagtggccgccccgggcaccacttggcgccgcataagggacgaagacgttccccacattctgcggtctaccttgcctgcgaccgccctaccactgcgaggatccacacccgaggacgctcccgccggccctccccctcgcaaaacgtccgatgcagtcgtgcagacggaggaggtggcagcacccaagaccaactcctctacatctccctcactggagacccgtgaacccccaggggcccccgcaggtgggcaactgtccctgctggggtctgacgtagacggcccctccctggcgaaggctccaatatcagcgccttttgtgcacgagggcctgggtgtcgcagttggcggtttccccgcaagcagacacggtagtcctagtagatccgccagggtaccgccgtttaattatgttcctagccccatggtggtagctgccaccaccgactcagccgctgaaaaagctcctgccacggcttctgctacactgctggagtag

SEQ ID NO: 107406 - DNA, 6912 bp, synthetic construct
  misc_feature 1..6912: note = Description of Artificial Sequence: Synthetic coding sequence
  source 1..6912: mol_type = other DNA
atggcctcctctgtcgccccctatgaacagcttgtacgacaggtggaagccttgaaggcagaaaactcacatctgaggcaggagctcagggacaactctagtcacctgtccaagttagaaaccgaaacaagcgggatgaaggaggttttgaagcacctacagggcaagctggagcaggaagcacgagtcctcgtcagcagcggacagactgaagtgttggagcagctcaaggcactgcagatggatattactagcttatacaacctgaagttccaaccacctaccttggggccggaaccagcagcccgcactcctgaagggtcaccagttcatggcagcggtccatcaaaagacagctttggagagctctcacgcgcaacgatcaggctgctggaagaactggatcgcgaaaggtgcttcctcctcaatgaaatcgaaaaggaggagaaggaaaagctttggtactacagtcagctccagggtctcagcaagcggctcgatgaactgcctcatgtcgaaacacaattctctatgcagatggacctcattaggcaacagttggagttcgaagcgcaacatatcaggtccctgatggaagaacgttttgggacttccgatgagatggttcagagagcgcagatccgtgcctctaggttagaacagattgacaaggagctgctcgaggcccaggatagggtccagcaaacagagccccaggcactgctcgcggtgaagtctgtcccagtagatgaagaccctgaaacggaagtgccaacacaccccgaggatggaactccccagccaggcaactctaaggtggaagtcgtgttctggctgctatcaatgctagccaccagagatcaggaggatactgctaggactctgctcgctatgtcaagcagtcctgagtcctgtgtggccatgcgcagaagtggctgcctgcccctgctgcttcagatcctccatggaacggaggccgcagccggcggccgcgctggcgcaccgggcgcacccggcgccaaggacgcaaggatgcgagcaaacgctgccttacacaacattgtgttttctcaacctgaccagggacttgccaggaaggagatgcgggtgcttcatgttctggagcagattagagcttactgcgagacatgctgggattggctgcaagctagagatggcgggccagagggagggggagctggaagtgctccgatacccatcgagcctcagatttgtcaagccacttgtgccgtgatgaagttatcgtttgatgaggaatatcgacgggcaatgaatgagctgggcggtttgcaggccgtggccgagctcctccaagttgactacgaaatgcacaaaatgacccgtgaccctctgaatctggcactgcgccgctacgcaggaatgacactcaccaacctgaccttcggtgatgtcgccaataaggccacactttgtgcaagaagaggatgcatggaagctatcgtcgctcaactcgcttctgacagtgaagagctccatcaggtggtgtcttcaatccttaggaatctgagctggcgcgctgacatcaacagtaagaaagtgctgcgcgaggcaggatcagtgaccgcgcttgttcaatgcgtattgcgcgcaacgaaggagtcaaccctgaagagcgttctttccgccttatggaatctgtccgcccactccaccgagaataaagctgccatctgtcaagtggacggagcactgggttttctggtgtcgacgctgacatacaaatgccaaagtaacagtctggccatcattgaatccgggggcggcatattgaggaacgtgtcaagtttggtggcgactcgggaggattatcgccaggtgttaagggaccacaattgcctgcagacactgttgcagcacctcacgtctcatagcctgacaattgtctccaacgcctgtgggaccctctggaatctgtcggctcggtctgccagagaccaggaactgctgtgggatttgggagctgttggaatgctgcgtaatctcgttcactctaagcacaagatgattgctatgggcagtgccgctgccctgcgcaacctacttgcccatagacccgctaaacatcaagcagccgccacagcagtctccccggggagttgtgttcccagtctgtacgtccgtaaacagagggccctggaggccgaacttgatgcccggcacctggcacaggccctggaacatctagaaaagcaaggcccaccagccgccgaggccgcaaccaagaaacccttgccaccattacgacatctagacgggcttgcccaagactacgcctccgactctggctgtttcgacgacgacgacgctccttcttcattggccgcagctgcagccacgggagagcctgcttcccccgcggcactgtcgctgttcctcgggagccccttcttgcagggccaagccctcgcaaggacaccgcccactcggaggggtggaaaggaggccgaaaaagatacctccggagaagccgcagtggcagccaaggctaaagctaagctggccctggccgtggctagaattgatcaactggtcgaggatataagtgccctgcacactagctctgacgattccttctcacttagttccggagaccctgggcaggaggcgccacgagaggggagggctcagtcgtgtagtccatgtcgtgggcctgagggcggccgccgcgaggctggcagtcgcgcgcaccctctcctgcggttgaaagccgcacatgcttccctgagcaatgactcactgaatagcggcagcgccagtgatggttactgcccccgggaacacatgttgccatgtcccctggcagctctggcaagccgaagggaggatcccaggtgtggacagccaagaccatcacggctggacttagatttgccgggatgtcaggcagagccaccagcgagggaggcgacaagcgccgatgctcgggtgaggacaattaagttgtcccccacctatcagcacgtaccactactggagggtgcttctcgagcgggggcagagcccttagcaggtccaggtatttcccctggtgcgcgaaagcaagcttggcttccagccgatcatctctctaaggtgcctgagaaattagcggcagcccctctgagtgtcgcctcaaaggcactgcagaaactcgccgcccaggagggtcccctgagtcttagtcgctgttcctcactgtcaagtctgagcagcgcgggccgaccaggcccttctgagggaggcgatctagacgatagtgactcctcgcttgagggcctggaggaggctggacccagcgaggcagaactggacagcacatggagggcacctggtgctacgtctttaccggtagccatccctgccccaagaaggaatagggggcgagggttaggagtagaggacgcaacccctagcagcagctcagagaattatgtccaagagaccccgcttgttctgtctcgatgtagcagcgtgagttcacttggtagttttgaatccccaagcatcgccagctccattccatccgagccatgctctgggcagggatccggcaccattagccctagcgagctgcctgacagccctggccaaacgatgccaccctcacggtccaagacaccacccctggccccagccccccaggggccccccgaggctacacaatttagtttacagtgggagtcttatgtgaagcggtttctggatatcgccgactgtcgcgagcggtgccggctccccagcgagcttgacgcagggagtgtgaggttcaccgtcgagaagcccgatgaaaacttctcgtgtgctagcagcctgtcagcattggccctccacgagcactatgtgcagcaggatgtggaactgcggctactgccgtccgcctgcccggagagaggggggggagcgggtggtgctggtctgcattttgcgggacataggagaagggaggaaggaccggcacctaccggttcccgtccaaggggtgcagcagatcaggaactggagcttctgagagagtgcctgggcgccgcggtgccagccagactgagaaaggtcgcttccgctctggtgcccggtcgccgcgccctgcccgtccctgtgtatatgctcgtgccagctcccgccccagcccaggaggacgacagttgtaccgactccgcagagggcacccccgtcaatttttcatccgcagccagcctcagcgacgagacactacagggcccaccccgagaccaacctggaggccctgctggacgccagaggcctactggcaggccaacttcagctagacaagccatggggcaccgacacaaggcaggaggggcaggccggtctgccgagcagagtcgcggcgccggtaaaaatagagccggtttggaacttcctctgggccgccccccttccgctccagcggacaaggatggtagtaaacccggaagaacacgaggtgatggcgccctgcaaagcctgtgtctcaccacaccaaccgaagaggccgtctactgtttctatggcaacgacagcgatgaggagccgccggccgctgccccaaccccaacacatcgtcggacctcagcaatcccaagggccttcactagggagcgacctcaaggccggaaggaagccccagcccctagcaaggccgctcccgccgcccccccacctgcaagaactcaacccagcctgatcgctgatgagacaccgccctgctatagtctctcctccagcgcgtccagtctgtccgaacccgaaccttctgagccacctgcagtgcatcccagaggaagagaaccggctgttacgaaagatcccggacctggcgggggcagggacagttctccaagcccccgcgcagccgaggaattactgcagagatgcataagctctgcactgccgagacgccggcctccagtgagtggtctccgccgaagaaagccacgtgccactaggctggatgagagaccagccgagggcagtagagagagaggcgaagaggccgccggctctgatcgtgcctccgatctcgactcggttgaatggcgggcaattcaggagggagcaaatagcattgtaacttggctacaccaggccgcagctgccactcgggaagcatcctccgaatctgatagtatcctatcctttgtaagcggacttagcgtaggtagcacgctgcagcccccaaaacatcgcaaggggagacaggctgaaggtgaaatgggatcagcacgccggcctgaaaagagaggagccgcttctgttaaaacatccgggtcacctcgctctcctgcgggcccagagaaaccgcgtggcacacagaagactaccccaggagtccccgctgtattacgtggcaggacggtcatctatgtacccagtcccgcacctcgcgcacagccaaaaggcactcctggcccacgtgctaccccgcgaaaggttgcccccccctgcttggcacaacctgcagccccagccaaggtgccttccccaggccagcaaaggagcaggtctttgcatagacctgctaagacctccgaattggcaaccctctcacagccacccagatctgcaaccccccctgccagactggcgaagacaccatcctcaagctctagccagacctcacctgcctcccagccccttcccagaaaacgccctccagtgacgcaagccgcgggggcactgcctggtccaggtgcatcacctgtgcccaagacccctgctcggacactgttagcaaaacagcataagacgcagagaagccccgtgagaatccctttcatgcagaggcctgctagacggggccctccaccactggcgagggcagtccccgaaccaggaccgcgaggtcgtgccggcaccgaggcagggccaggggcccgcggaggacgcctgggactggtgagggtggcttccgcactaagtagtggttctgagagctccgatcgatccggcttccggcgccagctgaccttcataaaagagtcaccaggtctaaggaggcgccgctctgagctctcaagcgccgaaagtgcagcctccgcccctcagggagcatctccgagacgaggtcgacccgccctgcccgctgtatttctctgcagcagccgttgtgaagagctcagagcagccccccgccaaggcccagcacctgctcgacaaaggccaccagccgcgcgccccagtccaggcgaacgacccgcccgcagaacaacatcagagagcccttctcgcctcccggtacgggccccggcagcaaggccggagactgtcaagaggtatgccagcctcccacatattagcgttgcccggcgtcccgatggggccgtgcccgccgcccccgccagcgcagatgcggcccgtcgcagctctgatggggagccccgcccattgccccgggtggcggcccctggaaccacctggaggaggattcgcgacgaggatgtacctcatattctgagatccacactacctgcaacggccctacctctgcggggcagcacacccgaggacgcacccgcaggtcctcctcctagaaaaactagtgatgcagtggtgcagacggaggaagtggccgcacctaagacaaacagttccacatctccttccctcgaaaccagggagccacccggcgcccccgccggaggtcaactgtctctcctggggtctgatgtcgatggcccatctttggccaaagcacctatcagcgcccccttcgtacacgaagggctgggagtggccgtgggcggatttccggccagcaggcacggcagtccctccaggagtgccagggtgcctccgtttaattatgtgccttcacccatggtggtcgccgctaccacagatagtgccgctgagaaggctccagctacggctagcgccaccctgcttgagtag

SEQ ID NO: 107407 - DNA, 1545 bp, synthetic construct
  misc_feature 1..1545: note = Description of Artificial Sequence: Synthetic coding sequence
  source 1..1545: mol_type = other DNA
atgtcttggccccgccgtctcctcctgaggtacctgtttcctgctctgctgctgcatgggcttggtgaaggaagcgctctcctgcacccagacagccgctcccacccacggtccctagaaaagtctgcatggagggcgtttaaagagtcccagtgtcatcatatgctgaagcatctgcataatggggcaagaattactgtccagatgccgcccactatcgagggacattgggtgtctacaggatgtgaagtcaggagcggacctgagttcattacgagatcgtatcgcttttatcacaacaatacatttaaagcctatcagttttattatgggtccaatcgctgcaccaacccaacctacacactcattattcggggcaaaatccggttgagacaggccagttggatcattcgtggaggcacagaggctgattaccagctccacaacgttcaggtgatctgtcacacagaggctgttgcagagaaactagggcaacaggtgaaccgaacgtgccctggctttctggccgatggagggccctgggtgcaggatgtggcttatgatctttggagagaagagaacggctgcgaatgtacaaaggcggtgaattttgccatgcatgagcttcagcttatccgcgtggagaagcaatacctgcaccataatctggatcatctggttgaggaactgttcctgggcgacatccacacagacgccacgcagcgcatgttctacagaccatcttcctaccagccccctttgcaaaatgcgaagaaccacgaccacgcgtgcatcgcctgtcggataatataccggagtgatgagcaccatcctcctatcctgcctccaaaggctgacctgaccatcggactgcacggggagtgggtctctcagcggtgcgaagtcaggcccgaagtattgttcctgacccgacacttcatctttcatgacaacaataacacttgggaaggccactattatcattattcagacccagtttgcaagcacccaaccttctccatatacgccagagggagatattcaagaggcgtgctgtcctctcgggtgatgggcgggaccgaattcgtttttaaagtgaatcatatgaaagtgacacctatggacgcggcaaccgctagtctgttgaatgtcttcaatggtaacgagtgtggcgctgaaggcagttggcaggtgggcattcagcaagacgtgacccatacgaatggctgcgtggcactcggaatcaagctgccccataccgagtatgaaatctttaaaatggagcaggatgctcgggggagatacctcctgtttaatggccagagaccaagtgatgggtcgtcccctgatcgcccagagaaaagagcaacctcctatcaaatgccacttgtgcaatgcgcatccagctcacctcgggcggaagatttagccgaggactcagggtcgtcactgtatggaagggcccccggtaggcacacatggtccctgctgcttgcagcactggcatgtctggttcctttgctgcattggaatattaggcgatag

SEQ ID NO: 107408 - DNA, 1698 bp, synthetic construct
  misc_feature 1..1698: note = Description of Artificial Sequence: Synthetic coding sequence
  source 1..1698: mol_type = other DNA
atgaaacggcgctgcagctgcggggggggaggtggccattgttcaagcgagcggagaaggactaggcccgaagcagaaggcagggcgagagctcagttgccaggacaccagattggagcaagacgcgccgggggccctcgggccgggctcgagatgtcgtggcctcgaaggctgttgttgaggtatctctttccagcactacttctccacggacttggggagggctcagcgctgcttcaccctgattctcggagccacccccggagtctggagaaatctgcctggagggcgttcaaagagagccagtgtcaccacatgctaaaacacctgcacaatggtgcgcgaataacagtgcagatgccacccactatcgagggacactgggtcagcacagggtgcgaggtccgctcagggccagagttcataactcggtcctatcgtttttatcataacaatactttcaaggcctatcaattctactatggcagcaatagatgtacgaaccccacctatacattgatcatcaggggaaaaatccgacttcggcaagcgtcatggattattagaggaggcacggaagccgattatcagctccataacgtacaagtcatatgccataccgaagcggttgccgagaagctcggccagcaggtgaaccgaacgtgtcccggctttctggccgacggcggtccctgggtacaagacgttgcctacgatttatggagggaagaaaatggctgcgagtgcacgaaagcagtcaatttcgctatgcatgaattgcaactcattcgagtagaaaagcaatatcttcaccacaatctggaccatctggtggaggagctctttcttggagacatccacacagatgccacacagcgcatgttttaccgaccaagctcgtatcagcctcctttgcagaatgcaaaaaatcacgaccacgcttgtatcgcttgccggatcatttaccgctccgacgaacaccacccgcccatactcccaccaaaggctgaccttaccatcggacttcacggcgagtgggtaagtcagaggtgcgaagtgcggcccgaggtgctattcctcacccggcacttcatcttccatgataataacaacacatgggagggccattactatcactattcagacccggtgtgtaaacatccaacgttcagtatctatgctcgagggaggtacagtcgcggcgtcctctcaagccgggttatgggcggcacggagttcgtgttcaaggtcaatcatatgaaggtcacacccatggacgctgccaccgcctcactgttaaacgtttttaatggcaacgaatgcggcgccgaaggaagttggcaggtcggaatccagcaggatgtgacccatactaatgggtgcgtggccctggggatcaagctgccgcacacagagtacgaaattttcaaaatggagcaggacgcgaggggcagatacctattattcaatggccagagaccatcagatgggtcatcccctgatcggcctgagaaaagggccacatcctaccagatgcctctggtacagtgtgccagctcaagtccgagggccgaggatctggcagaggactcggggtcgagcctttatggcagggcacctggacgccacacctggtcactcctgctcgccgcgctggcttgcttggtccctctgttacactggaacattagacggtag

SEQ ID NO: 107409 - DNA, 981 bp, synthetic construct
  misc_feature 1..981: note = Description of Artificial Sequence: Synthetic coding sequence
  source 1..981: mol_type = other DNA
atgccccccagcatttccgccttccaagccgcttacattggaatcgaggtgctgatcgccttggtgtcggtccccggtaatgttctggtaatttgggccgtgaaggtgaatcaggctttgcgcgacgcaaccttttgcttcattgtgagcttggcggtggctgatgtggcagttggggctcttgtgatccccctggcaattctcattaatattgggccacagacctacttccacacttgtctgatggttgcctgccctgtgctcatacttactcagtcatctatactggcactgcttgctattgctgtggaccgttacctgcgcgtcaagattccgctaaggtacaagatggtggtgacccctaggcgtgccgctgtagcgatagcgggctgttggattctgagctttgtggtggggctgacacccatgttcggatggaataaccttagcgctgtcgagagggcatgggcagcaaatggaagcatgggggagcccgttatcaaatgcgagtttgagaaagtcatcagcatggagtatatggtttacttcaattttttcgtgtgggtcctgccgcccctgctgctgatggttctcatctatctggaagtcttctacctcatacggaagcaactgaataaaaaagtgtctgcttcaagcggcgacccacagaaatactatgggaaggaactcaagattgcgaagagcttggcgctgatcctctttctgttcgcactcagttggcttccacttcacatccttaattgtattacactgttctgcccctcctgccacaaacctagtatcctcacatacatcgcgatatttctgacgcacggaaatagtgccatgaatcccattgtctacgccttccgaatccaaaagttcagagtcacattcttgaagatctggaacgatcattttcggtgccaaccagcgcctccgatagacgaagacttgcccgaagaaaggcccgatgactag

SEQ ID NO: 107410 - DNA, 981 bp, synthetic construct
  misc_feature 1..981: note = Description of Artificial Sequence: Synthetic coding sequence
  source 1..981: mol_type = other DNA
atgccgccttctatcagcgcctttcaggccgcctatatcggcatcgaggtcctaattgcgctcgtcagcgtcccaggcaatgtcctcgtgatatgggcagtaaaagttaaccaggctctaagagatgcaacattctgtttcattgtctcccttgcagtcgctgatgtggcagttggtgcactcgtgattcctctggctatactgatcaacatcggccctcagacctacttccatacctgccttatggtggcatgcccggtgctcatattgacacagagcagcatcctcgcccttcttgcaattgccgtcgaccgctacctacgagtgaagattcctctgcgctacaagatggtggtgacgcccagaagggcagccgtcgcaatcgcaggatgctggattctgtccttcgttgtcggtttgactcccatgtttggctggaataacctgtctgccgttgaaagggcatgggcagccaatggctcaatgggagaaccagtaattaagtgcgaattcgagaaggtcatttctatggagtatatggtgtactttaacttttttgtatgggttctgcccccattgctgttaatggtgctcatctatctggaggtgttctacctcattagaaaacagcttaataaaaaagttagcgcaagcagcggggaccctcagaaatattatggtaaggaactcaagatcgcaaagtcactggcgttaattctgttcctatttgctttgtcatggctgcccttacacattctaaattgtattactctgttttgcccatcttgtcacaaaccaagcatattaacctacatagccatatttctgacgcatggcaattctgcgatgaacccaatcgtctacgccttcagaattcagaaatttagagtgaccttcctcaagatttggaacgatcatttccgatgtcagcctgcccctcccatcgacgaggatttacccgaagaaaggcccgatgattag

SEQ ID NO: 107411 - DNA, 378 bp, synthetic construct
  misc_feature 1..378: note = Description of Artificial Sequence: Synthetic coding sequence
  source 1..378: mol_type = other DNA
atgcctcctagcatcagcgccttccaggctgcttacattggcatcgaggtgcttattgcactcgtgagcgtgccaggaaatgtgctcgtcatttgggccgtgaaagttaatcaggctctgcgggatgccactttttgcttcatcgtatccttggccgtcgctgacgtggcggtaggcgcccttgttattcccctggccatactgataaacattggtccacagacatacttccatacatgtcttatggttgcgtgcccagtcctaatcttaacacagagctccatcctcgccttacttgctatcgcagtggaccgctacctgcgggtgaagattccacttcgccgaattagccagtgtatggcttccactaagtcctag

SEQ ID NO: 107412 - DNA, 981 bp, synthetic construct
  misc_feature 1..981: note = Description of Artificial Sequence: Synthetic coding sequence
  source 1..981: mol_type = other DNA
atgcctccctccattagtgcctttcaggctgcctacattggaatcgaggttcttattgccctggtgtctgtcccgggcaacgtgctggtcatttgggccgtcaaagtgaaccaggccctccgggatgccactttttgctttatcgttagcttggccgtggccgacgtggcagtgggcgctcttgtgattccgttggcaatactaataaacatcggaccccagacctactttcacacctgcctgatggtcgcttgcccagttctcatcctgacccaatcttccatccttgctctcttggccatcgccgtcgatcgatatctcagggttaaaatccctctgcgctataaaatggtggttactcctaggcgtgccgccgtggccattgcgggatgctggatcctgagctttgtagtagggctcactcccatgtttggctggaataatctgagtgctgtggagagggcctgggcagctaatgggtctatgggggaaccagtaattaagtgtgaattcgagaaagttatctctatggagtacatggtatattttaatttcttcgtctgggtgctgccgccgctgctactgatggtgctcatatacctggaggttttctaccttattcgcaagcagcttaataagaaagtgtcagcctcatctggcgatcctcagaaatattatgggaaggagctaaagattgccaagtctcttgccttaattctttttctgtttgcccttagctggctgccattgcatatccttaactgcattacgcttttttgcccatcctgccataagccaagcatccttacctatatcgccatattcctcacccacgggaattccgccatgaacccaatcgtgtacgcatttagaatccagaagttcagagtgactttcttgaagatctggaacgaccattttcggtgtcagcctgccccacccatcgatgaggatctgcccgaggagcgacccgacgactag

SEQ ID NO: 107413 - DNA, 1239 bp, synthetic construct
  misc_feature 1..1239: note = Description of Artificial Sequence: Synthetic coding sequence
  source 1..1239: mol_type = other DNA
atgcctattatgggtagcagtgtctatatcactgttgagctggccatcgctgtcttggctatattaggcaatgttttggtttgttgggccgtttggctcaactctaatcttcagaacgtaaccaattattttgtggtatcactcgctgctgctgatatcgccgtgggcgtgttggctatcccattcgccattactatcagtactgggttttgcgccgcatgccatggctgcctttttatagcttgcttcgtgttggtcctgactcagagcagcatcttttccttgctggcaattgctattgatcgatacatcgctattcgcattccgctgagatacaatggactcgtgaccggcacccgagccaaggggataatcgcaatttgttgggtgctctcttttgcgattggacttaccccgatgttagggtggaacaattgcggccagccgaaggaaggcaagaatcacagccagggctgcggagaagggcaggtagcatgtctttttgaagatgttgttccaatgaattacatggtgtacttcaactttttcgcctgtgtactggtccctctgcttcttatgttaggagtctacctgcggatatttttagcagctagacgccaactgaaacagatggagagccagccacttccgggggaacgcgcacggagcacgctccagaaagaagtccatgccgcaaagtctttggctattatagtgggtctgtttgccctgtgctggctccccttgcatatcatcaactgcttcaccttcttttgcccggattgctcacacgcaccactatggctcatgtatctagccattgtactgtcacacacgaacagcgtcgtcaacccattcatctatgcttaccgcatcagggagtttagacagaccttcaggaagataattagatcacatgtcctacgtcagcaagagccattcaaagctgctggcacatctgctagggtgctggctgcccatgggtcagatggagagcaggtcagccttcggctgaacggtcatccaccaggcgtgtgggcgaatggctctgcaccccaccctgagaggaggccaaacggctatgctctgggattggtaagcggcggtagcgcccaggaaagtcaaggtaacacgggactgccagacgtagagctgctcagtcatgaactgaaaggcgtgtgtccagagcccccaggcctagacgatccgctggcccaggacggcgccggggtgagctag

SEQ ID NO: 107414 - DNA, 1239 bp, synthetic construct
  misc_feature 1..1239: note = Description of Artificial Sequence: Synthetic coding sequence
  source 1..1239: mol_type = other DNA
atgcccattatgggatcaagcgtttatatcaccgtggaactggcgatcgcagtgcttgctattcttggaaatgtgctggtttgctgggccgtgtggctgaattccaaccttcagaatgtgacaaattacttcgtagtctctctggctgctgctgatatagccgttggcgtgctcgccatcccatttgctataacaatctcaaccggcttctgtgccgcctgtcacggatgcctttttattgcatgttttgtgctggtactgacacaatccagtatattcagcctgcttgctatagcaatcgatagatacatcgccattagaatcccactgcggtataacggccttgtgacggggacacgcgccaaaggaatcattgcgatctgttgggtgctttcctttgccattggcctcactcccatgctgggatggaataattgtggccagcctaaagaaggcaagaaccacagccaggggtgcggcgaggggcaggtcgcatgtcttttcgaggacgtcgtgcctatgaactacatggtttactttaacttttttgcctgcgtgctggtgccccttctgctgatgctgggagtgtatcttcggatcttcctcgcggcgagacgacaacttaagcaaatggagtcgcagcccttgcctggcgagcgtgctcggtcaacgttgcagaaggaggtgcacgccgcaaagtctcttgccatcatagtcggactgtttgccctgtgttggctgcccctccacattatcaattgctttactttcttctgtcccgactgttctcacgcgccactttggctgatgtatctcgctatagtcctaagtcacactaactctgttgtgaaccccttcatatatgcctatcgtatacgggagttcagacagacattcaggaagatcattagaagtcacgttcttcgccagcaggagccctttaaggccgcggggacttctgcgagggtcctggcagcccacggaagtgatggagagcaggtatcgctccggctgaacggacatcctccaggtgtgtgggctaatggaagcgctccgcacccggagaggaggccgaacgggtatgccctgggcctagtgagcggtggctccgctcaggaatcacaagggaatacgggtctaccggatgtcgagttgttgtcacacgagttaaaaggcgtgtgtccggaacccccaggactcgatgaccctttggcgcaggacggtgctggggtaagttag

SEQ ID NO: 107415 - DNA, 267 bp, synthetic construct
  misc_feature 1..267: note = Description of Artificial Sequence: Synthetic coding sequence
  source 1..267: mol_type = other DNA
atgcccatcatggggtccagtgtgtacatcaccgtcgaacttgcaatcgctgtgctggctatcctaggaaacgttctggtctgctgggcagtctggctgaactctaatttacaaaatgtcactaactatttcgtggtatccctggccgcagccgacattgctgtgggggttctggccattccctttgctattacaatttccactggcttctgtgccgcttgtcacgggtgtttattcatcgcgtgctttgtgctggtcctgacctag

SEQ ID NO: 107416 - DNA, 195 bp, synthetic construct
  misc_feature 1..195: note = Description of Artificial Sequence: Synthetic coding sequence
  source 1..195: mol_type = other DNA
atgcccattatgggttcctcagtgtacatcacggtcgaactggcaatcgccgtcttggccattctgggaaacgtgttagtatgctgggcagtctggttgaattccaatctgcagaacgtgactaactatttcgtggtgtcgctagccgcggccgatattgcagtgggagtccttgccatccctttcgccatctag

SEQ ID NO: 107417 - DNA, 231 bp, synthetic construct
  misc_feature 1..231: note = Description of Artificial Sequence: Synthetic coding sequence
  source 1..231: mol_type = other DNA
atgccaattatgggatcaagtgtttacattaccgtcgaactcgcaatcgccgtactggctattttgggaaatgtcttagtatgctgggccgtatggctcaattccaacctccagaacgtgaccaattattttgtagttagtctggccgccgcggacattgctgtgggggtcctcgcgataccattcgcgattactatttccacaggtttttgcgctgcatgccatgggtag

SEQ ID NO: 107418 - DNA, 1098 bp, synthetic construct
  misc_feature 1..1098: note = Description of Artificial Sequence: Synthetic coding sequence
  source 1..1098: mol_type = other DNA
atgcctatcatgggaagcagcgtgtatataaccgttgagttagcgattgccgtcctcgcaattctgggcaatgtactggtgtgttgggcagtatggctgaactccaatcttcagaacgtcacaaattattttgtggtgtccctagcagcggcggacatcgccgtcggcgtacttgcgattccatttgctataacaatatcgacaggcttttgtgctgcgtgccacggctgcctcttcatcgcctgcttcgtgcttgtactgacacaaagcagcatttttagtctgttagctattgccatcgacagatatatagccatacggatccccctacggtataatgggctggtgactggcacgcgggcaaagggtattatagccatctgctgggtattaagcttcgctattggactgaccccgatgctcggctggaacaactgcgggcaacccaaggaaggaaagaatcacagccaagggtgtggggagggccaggtggcctgtctatttgaagatgtagtccctatgaactacatggtatacttcaattttttcgcttgtgttctggtgccgttgttgctgatgctgggcgtgtacctgcgcattttcctagctgctaggaggcagttgaagcagatggagtcccagccacttccaggtgagcgggcgcgatcaaccttgcaaaaggaagtccacgcagccaaatccttggcaatcatcgtgggcctcttcgccctctgttggctgcctcttcacatcatcaactgttttactttcttttgccctgattgcagccatgcccctctgtggttgatgtatctcgctatagtgctgtcacatacaaatagtgtcgtgaacccatttatttacgcttacaggatcagggagtttcgacagacattccgcaaaatcatccggtctcacgtcctacggcaacaggagccgtttaaggcggctggtacatccgctagggttctggcagcccacggatcagacggcgagcaggtctctctgcgtttgaacggccaccctcctggagtctgggccaatggctcagcaccccacccagagcggagacctaatgggtacgcactcggcctctag

SEQ ID NO: 107419 - DNA, 1239 bp, synthetic construct
  misc_feature 1..1239: note = Description of Artificial Sequence: Synthetic coding sequence
  source 1..1239: mol_type = other DNA
atgcccatcatgggatcgagtgtctacattactgtagagctggctatcgctgtactcgctatactgggtaacgtcttggtctgctgggccgtgtggctaaacagcaatctccagaatgttactaattacttcgttgtgtccttagcagcagccgatattgctgttggggtgctggcaatcccgttcgccattacgatctctaccggtttttgcgccgcgtgccatgggtgcttgttcattgcttgcttcgtactcgtcctgacccagtcaagcattttctcactgcttgccattgccatcgaccgctatatagctataaggattccattaagatataatgggttagttacgggcacacgtgcaaagggaattattgccatctgctgggtcctcagctttgcgattggcctgacgcccatgcttggctggaacaactgcgggcaacctaaggaaggcaaaaaccattcacagggctgcggtgagggtcaagtggcttgtctcttcgaagacgttgtgccaatgaactacatggtttacttcaattttttcgcctgcgtgctggtcccactgctcttaatgcttggcgtgtacttgcggatcttcctggccgcccgacggcaactgaaacagatggaatcccaacccctgcccggtgagcgcgcacgctctaccttgcaaaaggaagtgcacgcagccaagagtctggcaattattgtcggcctattcgcgctgtgttggcttcctctgcacattataaattgctttaccttcttctgccctgactgcagccatgcacctctttggctcatgtatttagcaattgtcctgtcccacaccaactcagtggtcaatccattcatttacgcctacaggatccgggagtttcgccaaacatttagaaagatcatccgatcccatgtgttaaggcagcaggaacccttcaaagccgctggcacctcagcccgcgtgctggccgcccatggctccgatggcgaacaagtctcactgcggctgaacggccacccaccaggagtttgggcgaacggttcagccccacatcccgaacgacgccccaatggctatgccctcggcttggtgtcagggggctcagcccaggaaagtcagggcaacacggggcttccagatgtggagctgctgagccacgagctcaaaggtgtgtgtcctgaaccaccaggcttggatgatccgttagcccaggatggcgccggagtctcttag

SEQ ID NO: 107420 - DNA, 999 bp, synthetic construct
  misc_feature 1..999: note = Description of Artificial Sequence: Synthetic coding sequence
  source 1..999: mol_type = other DNA
atgctgcttgagacacaagatgcattatacgtggccctcgagctggtgatagccgcactgagtgttgccggaaacgttctggtgtgcgcagcagtggggaccgccaatacgctccaaactccaacaaactactttctcgttagtttggccgcagccgatgtggcagttggtctcttcgctatcccgtttgctattacaatctctctgggattttgtacagacttttacggatgtttattccttgcatgtttcgtgctcgttctcacccagtcctccatcttctctcttctggctgtggctgtggaccgatacctagctatctgtgtgcccctgaggtataagagtttagtgactggaacgcgagccagaggtgttattgctgtgttgtgggtgttggcttttggcatcggcctcactcccttcttgggttggaattcgaaggatagcgctacgaataactgtactgaaccctgggacggaaccaccaatgagagttgctgtctggtgaaatgtttatttgaaaacgttgtccccatgtcttacatggtgtactttaacttcttcgggtgtgtgctgccccctctgctgatcatgctggtcatatacattaaaatcttcttagtcgcatgtagacagctacagcggactgagctcatggatcactctcgaaccacgttacaacgagaaatccacgccgctaagtcactggcgatgatcgttggcatctttgcactgtgttggctccccgtgcacgctgttaactgcgttaccctcttccagcctgctcaaggtaagaacaagccaaaatgggctatgaatatggctatattgctctcccatgctaattccgtcgtgaaccccatcgtttatgcgtatcgaaaccgcgactttagatatacctttcacaagatcatttcaagatatctgctttgtcaagccgacgtgaaatccggtaacggacaggccggcgtccagcctgctctcggagtgggactgtag

SEQ ID NO: 107421 - DNA, 957 bp, synthetic construct
  misc_feature 1..957: note = Description of Artificial Sequence: Synthetic coding sequence
  source 1..957: mol_type = other DNA
atgccgaataatagtacagcactgtcgttggctaacgtgacttatatcactatggagatattcattggactctgcgccatagtggggaatgtactcgtcatctgtgtcgtaaaattaaacccctcactgcaaaccacaaccttctattttatcgtctccctggcacttgccgacatcgcagtgggggtgctggtcatgcctctcgccatcgtggtgagcctgggcatcacaattcacttttacagttgcttattcatgacttgcctgctacttatcttcacacatgcctcaatcatgtctctactcgcaatcgcagtggaccggtacctgagggtaaagctaacagtgcggtacaagcgcgtaaccactcatcggagaatatggctcgctttggggctctgctggcttgtgtcgtttctggtgggtctaactcctatgttcggttggaatatgaaactgacaagcgaatatcaccgaaatgtgactttcttatcatgtcaattcgtatcggtaatgcgcatggactatatggtttattttagctttctgacctggatctttatcccattagtggtgatgtgcgcaatctacctagacatcttttacatcatccgtaacaaactgagtctgaacctgagtaactccaaggagaccggcgcgttctatgggcgagagttcaagacagcgaaaagcctgttcctcgtgctctttttatttgcgctgagttggctccctctgagcattattaactgtataatttatttcaacggagaagtgccccagctcgtgctgtacatgggcattctgctgtcacatgcaaactccatgatgaatccaattgtgtatgcctataaaataaaaaagtttaaggaaacttacctactcatcctaaaagcctgtgtagtgtgccatcccagtgatagtctcgacacatcaattgagaagaacagcgagtag

SEQ ID NO: 107422 - DNA, 537 bp, synthetic construct
  misc_feature 1..537: note = Description of Artificial Sequence: Synthetic coding sequence
  source 1..537: mol_type = other DNA
atggaagggagtcctgcaggcccgattgagcaaaaggaggctcgctgggagtctagctgggaagagcagccggattggaccctaggatgccttagccctgagtcccacactaaccatgtcgccctgagggatacagggaaccagttgatagtgaccatgagctgtctgacaaaagaagacacaggctggtactggtgtggcatacagcgcgattttgctcgggacgacatggatttcacagaactgattgtcactgatgacaaaggcacgctcgctaacgatttttggtcaggcaaggacctgtccggcaataagacaaggtcttgcaaagctccaaaggttgtgagaaaagcggacagatcgaggacttctatcctgattatctgtattttgatcacaggcctgggaatcatatcagtgatatctcacttaacaaaacgccgaaggtcgcagagaaatagacgggttggaaatactttgaagccattctctagggtcctgacgcctaaggagatggcacccaccgagcagatgtag

SEQ ID NO: 107423 - DNA, 1044 bp, synthetic construct
  misc_feature 1..1044: note = Description of Artificial Sequence: Synthetic coding sequence
  source 1..1044: mol_type = other DNA
atgcccaataatagcaccgcactatcgctggcgaatgtgacctatatcaccatggaaattttcataggcctgtgcgctatagtcggcaacgtgctggttatatgcgtagttaagctgaatccttctctgcaaacgactactttctatttcatagtgagtctcgcgctcgctgacattgctgtgggcgtcctggtgatgccactcgccattgtcgtgtctctcggcattactatacacttctactcgtgcctctttatgacctgcttattactcatattcacccacgcaagcattatgtcactgctggctattgcagttgatcgatatcttcgtgtaaaactgaccgtgaggttcagaattccaggcctgcccggttgtatactgagctttcagttaaaggtatgctttctgcctgtgatgtggcttttcattcttcttagtcttgctctgatttctgatgccatggtgatggatgaaaaggtgaagagatcatttgtattagacactgcctctgcgatctgtaactataacgcccattacaagaatcacccaaagtactggtgtagagggtacttcagggattattgcaatataatcgccttcagtcctaactctactaaccacgtagccctgcgggacacgggtaatcagcttatcgttactatgtcctgtctgactaaagaggacacgggatggtactggtgcggaatccagcgggatttcgcccgcgacgacatggatttcaccgagctgatcgtgactgacgacaagggcactttagcaaacgacttttggagtggcaaggacttgtccggtaacaaaacgagaagttgtaaggctcctaaggtagtgcgtaaagccgaccggtctagaacgtcgattttaataatctgcatccttattacaggccttgggattataagcgtcatttctcaccttacaaagcgacgcaggtcccagcgcaacaggcgggtggggaataccttgaaaccattcagccgggtgctgacccccaaagaaatggcccctactgaacagatgtag

SEQ ID NO: 107424 - DNA, 801 bp, synthetic construct
  misc_feature 1..801: note = Description of Artificial Sequence: Synthetic coding sequence
  source 1..801: mol_type = other DNA
atggaggggtcgccggcggggcccattgaacagaaggaggcgcgctgggaatcttcttgggaagagcagcctgattggactctcggctgcctgagccccgaatctcagttccgcatccctggacttcccggctgtatcctttcttttcaactcaaggtgtgcttcctccctgttatgtggctgtttatcctgctgtcacttgcattgataagtgacgcaatggttatggacgagaaggtgaagagatcctttgtcttggacacagcaagtgccatctgcaattacaatgcacattataagaaccatcctaaatattggtgtcgcggttatttcagagactactgcaatatcattgcattttctccaaatagcaccaaccatgtggcccttcgtgacacggggaaccagctcattgtcacgatgtcgtgcctcaccaaagaggatacaggatggtactggtgcgggatacagagagacttcgcccgcgatgatatggactttaccgaactcatagtcactgatgacaaaggcacactcgcgaatgacttttggagcggtaaagacctctcgggaaacaaaacacggtcatgcaaagcgcccaaggtggttaggaaagctgatagatcccgcacgagcatactcatcatttgcatcttgatcacaggactgggcattatttccgttatcagccacttaactaaacgccggaggtctcagcgtaataggcgggtgggcaatacgctgaagccattttcccgggtcctgaccccaaaagagatggcgcccactgagcaaatgtag

SEQ ID NO: 107425 - DNA, 624 bp, synthetic construct
  misc_feature 1..624: note = Description of Artificial Sequence: Synthetic coding sequence
  source 1..624: mol_type = other DNA
tgaccccaagccctgcagggaccacctagctcaaacgacgccatggtgatggacgagaaggtgaaacgttcctttgtcctggacacagcaagcgctatttgtaattacaatgcgcactacaagaatcacccgaaatattggtgtagggggtacttcagggactactgtaatatcattgctttttcccctaactcaacaaaccacgtcgctcttagagacactggaaatcagctcatcgtgacaatgtcctgcctgacgaaggaagatacaggttggtattggtgtggaatccaacgtgacttcgctagagatgatatggactttacggagttaattgtgacagacgacaaggggaccttggcgaacgatttctggagcgggaaagatctgagtggcaataagacccgctcttgcaaagcccctaaagtggttaggaaggccgacagatcaaggactagtatcctaattatatgtattctcatcacaggactggggattatatctgttattagccatctcacaaaacgccgcaggtcccaaaggaacagacgcgtggggaatacactgaaaccctttagcagagttttgactcccaaagagatggcacctaccgagcaaatgtag

SEQ ID NO: 107426 - DNA, 348 bp, synthetic construct
  misc_feature 1..348: note = Description of Artificial Sequence: Synthetic coding sequence
  source 1..348: mol_type = other DNA
tagccatcctcccatgtggcactgcattccacactcctggggagccatttctccaccaatcatgttgccctgcgcgataccggcaaccagcttatagttactatgagttgcctaacaaaggaagacaccgggtggtactggtgtggaatccagagggatttcgcccgcgatgacatggattttaccgagctgattgtcacagatgataaaggtacacttgccaatgacttctggagcgggaaggacctctctggaaataagacccgaagttgcaaagcgcccaaagtcgtgagaaaagctgatcgatcccgcactagcatcctgattatctgcattcttatcacatag

SEQ ID NO: 107427 - DNA, 519 bp, synthetic construct
  misc_feature 1..519: note = Description of Artificial Sequence: Synthetic coding sequence
  source 1..519: mol_type = other DNA
ggcccgatcgagcaaaaagaggctaggtgggaatcaagttgggaggagcagccggattggacgctggggtgtctcagcccggaatcccacaccaaccacgtcgcattgcgagatactggcaaccagttgattgtaactatgtcatgtctgacaaaggaggacaccgggtggtactggtgtggcattcaaagagacttcgcccgcgatgatatggacttcacagagctgatcgtcaccgacgacaaaggcaccctggccaatgacttctggtcaggaaaagatttgtccggcaacaaaacacgatcctgtaaagcacctaaggtcgtccgaaaagcagaccgctcaaggacgagcattctgatcatctgcatcctgatcactggattaggcatcatctccgtgataagccatttgactaagcgaaggagatcacagcggaacaggcgcgtgggcaacacactgaaaccgttctcgcgagtgctcacacccaaggagatggcacctacagaacaaatgtag

SEQ ID NO: 107428 - DNA, 1092 bp, synthetic construct
  misc_feature 1..1092: note = Description of Artificial Sequence: Synthetic coding sequence
  source 1..1092: mol_type = other DNA
atggcgcaaacacctgcctttgataagccgaaagtggaattgcatgtccacctggatggcagtatcaaacctgagacaatcttgtactacggcaggcgccggggaatagccctgcccgcaaacaccgctgaaggattactcaatgtaatcggcatggacaagccactgacactgcctgacttccttgccaagtttgattattacatgcctgccatagccggctgccgcgaggcaattaagagaatagcttacgaattcgtcgaaatgaaggccaaagaaggagtcgtctatgtggaggtgcggtactcccctcacctcttggccaatagtaaggtggagcccattccatggaaccaggccgagggagacctgacacctgacgaggtggtcgctttggtggggcaaggactgcaggaaggagagagggattttggcgtgaaagcacgatcgatcctctgctgtatgcgccatcagcccaattggtcgcctaaagttgtggaactttgcaagaaatatcagcagcagactgttgttgctatcgacctcgccggtgatgagactatccccgggtcttctcttctcccgggccacgtgcaggcataccaagaagctgtgaaatctggcattcaccgcaccgtgcatgcaggagaggtgggcagcgctgaagtcgtaaaagaggcagttgatatactgaaaacggagcggctggggcacggctatcacaccctggaggaccaggccttatacaatagactccggcaggagaatatgcactttgagatctgtccttggtcctcctacctgaccggcgcctggaagccggataccgaacacgccgtgatcaggctgaagaacgaccaggcaaactacagtttaaatactgacgacccactgatatttaagagtacgctggacacagattatcaaatgaccaaacgggatatggggttcactgaagaggagttcaagagactgaacattaatgccgccaagtccagttttttgcccgaggacgaaaagcgcgaattgttggatctgctttacaaggcctatgggatgccaccgtctgccagcgccggacagaacctctag

SEQ ID NO: 107429 - DNA, 1731 bp, synthetic construct
  misc_feature 1..1731: note = Description of Artificial Sequence: Synthetic coding sequence
  source 1..1731: mol_type = other DNA
atggcttctaacaatcactggttccagagttcgcaggtccccagctttgcccagatgttgaagaagaaccttccagtgcagccagccaccaaaacaatcacaaccccaacggggtggtctagtgagtcttatggtttaagcaaaatggcgagcaaggtaactcaagtgaccgggaactttcccgaacctcttttaagcaagaatctttcatccatcagcaaccccgttttgccacccaagaagatacccaaggagttcattatgaagtacaagcgtggtgagatcaacccagtatccgcactccaccaatttgcccaaatgcagagagtccaactggacctgaaagaaactgtgacaacagggaatgtcatgggcccgtattttgctttctgcgccgttgttgacgggattcagtataaaacgggccttggtcagaataaaaaggagtcaagaagcaacgccgccaaactggccctggatgaacttcttcagctggacgagcccgagccaagaattctggaaacttcagggccacccccatttcctgcagaacctgtggtcctgtcagaactcgcctacgtcagtaaggtccattacgagggcagacacatccaatatgccaaaatcagccagattgttaaagaacgttttaaccaactgatcagtaatcggagcgaataccttaagtactccagctccctggctgcattcatcatcgagagagccgggcagcatgaagtggtcgctattggcaccggtgagtataattattctcaggatataaaaccagatggacgtgtcttgcatgatactcacgccgtagtcacagcccgccgatctctgctgcgctacttttacagacagctactattgttctactccaaaaatccagccatgatggagaaatcaatcttctgcacagaaccaaccagtaatctgttgacgttgaagcagaatatcaatatttgcctctacatgaatcagctgccaaaaggaagtgcacagatcaaatcgcagctgcggttgaatccacactctatttcagcattcgaggccaacgaagagctgtgcttgcatgtggccgttgagggcaaaatttatctgaccgtttactgtcctaaggacggtgtgaatcggatctcctcgatgtcgagttccgacaagctgacacggtgggaagtgcttggcgtccaaggcgccctgcttagccacttcatccagccagtgtatatctcctccatcctgataggagatggtaattgctcagatacaaggggtctggagatcgctatcaagcagagagtggacgacgccttaacgagcaagctgcctatgttttatttggtaaaccgcccacatatcagcctagttccttcagcctatcctctccagatgaacttggagtacaaattcctctctctgaactgggctcagggagatgtaagtttggaaatcgtggacgggctctctgggaagattaccgagagcagtccctttaagtctggcatgagcatggcttctcgactgtgcaaggctgcaatgctgtcccgattcaatctgctggcaaaagaggccaaaaaggagctgctggaggccggtacctaccatgctgccaagtgcatgagtgcttcatatcaagaagctaagtgcaagctgaagtcttatctccaacagcacggttacggttcatggatagtgaaaagtccttgcatcgaacagtttaatatgtag

SEQ ID NO: 107430 - DNA, 1698 bp, synthetic construct
  misc_feature 1..1698: note = Description of Artificial Sequence: Synthetic coding sequence
  source 1..1698: mol_type = other DNA
atggccagcaacaatcactggttccagtcttctcaggtgccctctttcgcacagatgctaaagaagaatctgccggttcagccagccacaaagaccatcactactccaactggctggtcgagtgaatcttacggcctttcgaagatggcaagcaaggtgactcaggtgaccggaaatttcccagagccattactgagcaaaaacctgagcagtatcagcaaccctgtcctacctccaaagaagatccccaaggaattcattatgaaatataaacgtggagagatcaatccggtgtctgcacttcatcagttcgcacagatgcaacgtgtgcagctggacctgaaagagaccgtaactaccggtaatgtgatgggaccctattttgctttttgcgctgtggttgacggaatccagtacaagacaggattggggcaaaacaaaaaggaatcacgatcaaacgcagcaaaattagccctcgacgaactgctccagcttgacgagcccgaaccacgcatcctcgagaccagcggtccgcctccctttcccgctgaacccgtggttctcagcgagctcgcctacgtgtctaaggttcattatgagggtaggcatatccaatacgcgaagatatcacaaatagtgaaggagaggtttaaccagctgatcagcaatcgcagtgagtatctgaaatactcctcttcacttgcggcattcatcatcgagcgggcagggcaacatgaagtcgtggcaataggaaccggagagtataattattctcaggatataaagccagatgggcgggtgcttcacgacacacacgctgttgtcaccgcccgccgaagtcttctgagtaagaaccctgctatgatggaaaagtccatattttgcactgagcccacttcaaacttgctcactctcaaacagaacatcaatatctgcttgtatatgaaccagcttcccaaaggatctgcccagattaagagtcaactccgcctgaacccacacagcatctcagctttcgaagctaacgaagaactgtgcctccatgttgccgtggaggggaagatctatctgactgtgtactgtcctaaggatggtgttaatcgtataagttctatgtcttcctcggataaactcacaagatgggaggtccttggcgtgcagggcgccctgctgagtcatttcatacagcccgtgtatatcagctcaatcctcattggcgatggaaactgttctgacactagagggctagaaattgcgataaaacagagggtcgatgacgcactgacctcaaagctaccaatgttctacctggtaaataggccacacatcagcctggtgccctcggcgtatcctctgcagatgaatctcgagtataagttcctgagccttaattgggcacagggagacgtatccctggagatcgtggacgggctgtccgggaaaattacagagagtagccctttcaaaagtggcatgtctatggcatcccggctgtgcaaagcagccatgctgtccaggttcaatctgctggcgaaggaggccaagaaggagttgcttgaggcaggtacctatcacgctgcaaagtgtatgtcggcttcctaccaagaagcgaagtgcaaactgaaatcatatttacaacaacatggctacgggagttggattgttaagagcccatgcatcgagcaattcaacatgtag

SEQ ID NO: 107431 - DNA, 726 bp, synthetic construct
  misc_feature 1..726: note = Description of Artificial Sequence: Synthetic coding sequence
  source 1..726: mol_type = other DNA
atggccagcaataatcattggttccagagcagccaggtgccttctttcgcacagatgctgaaaaagaatctgccggtgcagcccgcaactaagactattacgacaccaaccgggtggtcaagcgagtcatatggcctttctaagatggcaagcaaggtaactcaagttacaggcaactttccagagcctcttctctccaagaatctgagcagtattagcaaccctgtccttcctcctaaaaagattccaaaagagtttattatgaaatacaaacgcggcgagattaaccccgtgtccgcactgcaccagtttgcgcagatgcagcgagtgcagctcgatctcaaagaaactgtgacaactggaaatgtaatggggccctattttgcattctgcgctgttgtggatgggatacaatataagacgggactcggtcagaataagaaagaaagccgctccaacgcagcaaagcttgccctggacgagctcctgcagcttgatgagcccgaacctcgcatactggagacatccggcccgcctcctttccccgcagagcccgtggtcctttctgagctggcgtacgtttctaaggtgcattacgagggcaggcacattcagtacgccaagatctctcagatagtgaaggagcggttcaatcagctaatttccaaccgcagcgaatacttgaaatattccagttccctggcagcattcataatcgagagatag

SEQ ID NO: 107432 - DNA, 471 bp, synthetic construct
  misc_feature 1..471: note = Description of Artificial Sequence: Synthetic coding sequence
  source 1..471: mol_type = other DNA
atggcctccaataatcattggttccagtccagccaggttccaagctttgcacaaatgctaaaaaaaaatctaccagtgcagcctgccactaagaccatcactacccctaccggctggagttcagagtcttatggactctccaagatggccagtaaggtgacacaagtcacgggaaattttcccgaacctcttctctcgaagaacctgagtagcataagcaatcccgtcctcccacccaagaaaataccgaaagagttcatcatgaagtataaacgaggtgaaatcaaccccgtcagtgccctgcaccagtttgctcaaatgcagagagttcagctcgatttgaaagagactgtcaccaccgggaacgtaatgggaccatacttcgctttttgcgcagtcgtggatggcatacagtataagaccgggctcggacagaacaagaaggagtctcgatccaacgccgctaaatag

SEQ ID NO: 107433 - DNA, 1677 bp, synthetic construct
  misc_feature 1..1677: note = Description of Artificial Sequence: Synthetic coding sequence
  source 1..1677: mol_type = other DNA
atgttaaaaaagaatcttcctgtgcaacctgccaccaaaacaatcacaactccgacaggctggagttccgaatcttacggactcagtaaaatggcaagcaaggtgacccaggtgacaggcaatttcccagaaccactgctgtcgaagaatttgtcctccatctcaaatccggtgctgcctcctaagaagatccccaaagagtttatcatgaagtacaaacggggggagatcaaccccgtgtctgcgctgcaccagtttgcacagatgcagcgtgtccagttggaccttaaggagacagtgaccactgggaacgtgatgggtccttacttcgccttctgtgccgtcgtcgatggcattcagtataagactggcttgggtcagaataagaaggagtcgcggtccaatgctgctaagttggctctggatgagctgctccagctggacgagcccgaaccacgaatactagagactagcgggccgccccccttccccgccgagcctgtcgttctgtctgagctcgcatacgtgtcaaaggttcattacgaggggagacacatccagtatgctaagatctctcagatcgtgaaagaacgcttcaaccagctgattagcaaccgcagtgagtatctgaaatactccagctctcttgcggcctttatcattgaaagggcaggtcagcacgaagtggtggcaatcggtactggtgagtacaattatagccaggacatcaaacctgacggacgtgttttacatgacacccatgccgtagtaaccgctcgaagaagtctgttacgctacttctatagacagctgctcttgttctactcaaagaatcccgctatgatggagaagagcatcttttgtacggaaccgacatccaacctgttgactttgaaacagaatattaatatctgcctatacatgaaccagctgcccaagggaagcgcccagatcaagagccagttgcgccttaatccacacagcataagcgcctttgaggccaacgaggagttgtgcctgcacgtggccgtggaagggaagatataccttaccgtgtactgccctaaggatggagtgaacagaatttcttctatgagcagttccgataagttgacccgctgggaggtgctgggcgtgcagggtgctcttctctcccacttcatccagccagtctacatttcatcgatactgattggcgatggaaattgttcagatacaaggggactggagattgcgattaaacagcgggttgacgacgccttgacctcaaagctcccgatgttctacctcgtcaatagaccccacatctctctggttccttccgcctaccctctgcaaatgaacctcgagtacaagtttctgtcacttaattgggctcagggcgacgtcagcctcgagatcgtggacgggctgtcaggtaagattactgagtcttcgccgtttaagagcggaatgagtatggcctctagactgtgcaaagcggccatgctctcacgcttcaatctgttggcgaaggaggccaaaaaggagctgctagaggcagggacatatcatgccgcgaagtgcatgagcgccagctaccaggaggcaaaatgtaagctgaaatcttatctgcaacagcatgggtatgggagttggatcgtaaagagcccgtgcattgagcaattcaacatgtag

SEQ ID NO: 107434 - DNA, 3810 bp, synthetic construct
  misc_feature 1..3810: note = Description of Artificial Sequence: Synthetic coding sequence
  source 1..3810: mol_type = other DNA
atgatgagtcccatatgcgatcaaacgatcgattcccgtcttaaggttgagaaagcaacctggtggggcagggtgggcgggggctctcgacctcattggcagagcccaggcgtcagaccttgtcccgaggaagtgcaggacccaggctattctcttagcgggtactacactcatccttttcaaggatacgaacatagacagctcagatatcagcagccaggtcctggcagctccccaagctcctttctgctgaaacagattgagttccttaagggccagcttccggaggcacccgtgattggcaagcagacaccatccctgccgccttccctacccggccttcgccctaggtttcctgtgctgctggcctcctccacaaggggaagacaggtggacattcgtggcgtgcctagaggggtgcacttaagatcacaaggacttcaacggggcttccagcacccttccccaagggggagatctttacctcagagaggcgtagattgccttagctcccattttcaggagctcagcatttaccaggatcaagaacagagaattctgaagtttctggaagagttgggcgaagggaaggccacgacggcacacgatctctcagggaagctgggaacaccaaagaaggaaattaacagagtgctctattctctcgccaagaagggcaagctgcagaaggaggctggcacccctcccctctggaagattgctgtttcaacacaagcttggaaccagcacagcggcgtcgtcagacctgacggtcattctcagggcgcccctaatagcgatccaagcctggagcctgaggatcggaactcaacttccgtcagtgaagacttgcttgaaccattcatcgcggtgtccgcccaagcttggaatcagcacagtggcgtcgtgcgaccagatagccatagccagggctctcccaatagcgatcctggcctcgagccagaggattctaactctacctcagccctggaagacccactggaattcctggacatggcggagattaaggaaaaaatctgcgactacctctttaacgtatcggactctagcgcgcttaacctcgccaagaacatcggtcttactaaggccagagatattaacgctgtgctgatcgatatggaaagacagggagatgtgtatcgacaggggacaactcctccgatatggcatctcactgacaagaagagggagcgcatgcagatcaagcgcaacacaaacagcgtgcccgagaccgctcctgcagcaataccggagacgaagagaaacgcggagttcctgacatgtaatatacccactagtaacgctagcaacaacatggtcaccactgaaaaagtggaaaacggacaggagcccgtcatcaagcttgagaacaggcaagaagcaagaccagagccggcgagactcaagccgcccgttcactataatggtccgtccaaggctggatatgtcgacttcgaaaatgggcagtgggctactgacgatatccccgacgacttgaattccatcagagccgcccccggggagtttagagcgattatggagatgccaagcttttatagccacggactcccccggtgctcaccatacaaaaagctcacggagtgtcagctgaaaaatccaatctccggactcttggaatacgcccagtttgccagccagacatgcgagtttaacatgatcgagcagtcaggcccaccccacgagcctagatttaagtttcaagtcgtgataaacgggagggaattcccccctgccgaggcggggagtaagaaggtagccaagcaggacgctgccatgaaagcgatgaccatcttacttgaggaagcaaaggcaaaagactccgggaaatctgaggagagctctcattattcaacagaaaaagagtccgagaaaacggcagaatcccagacccccacaccgtccgccacgagcttcttctctggaaaaagccccgtcacaaccctcttagaatgtatgcacaagctgggcaactcatgtgagtttaggcttctttccaaggagggcccggcacatgaacctaagttccaatactgtgtggccgtcggagcccaaacatttccatccgtgtctgccccttccaagaaggtcgcgaagcagatggcggcggaggaagccatgaaagccctgcacggggaggcgacaaactccatggcctctgacaaccagcctgagggcatgatcagcgagtcactggataatcttgaatcgatgatgcccaacaaggtcaggaaaatcggtgagctggttagatacctgaataccaaccccgttggcgggctgctagagtatgctaggtctcacgggttcgccgctgagttcaaactggtggaccaaagcggcccgccacatgagccgaagtttgtgtaccaagctaaggtgggcggtagatggttccctgctgtctgtgcccactcaaaaaaacagggaaaacaggaagcagccgatgccgctttacgtgtacttataggggagaacgagaaagcagaacgaatgggatttaccgaagtgacgccagtgactggggcaagcctgagacggaccatgttgcttcttagccggtctcctgaagcacagcccaaaactcttcctctcacaggatcaaccttccacgaccagatagcaatgctgtcacatcgatgttttaatacactcacaaactccttccagccaagtctcctgggccgcaagattttggcagcgatcattatgaagaaagatagcgaggacatgggagtcgtcgtaagcctgggcaccggcaatagatgcgtcaaaggggacagtctgagccttaagggggaaactgtcaacgactgccatgcagagattatcagccgcagaggctttatcagatttctgtactctgagctcatgaagtataattcccagactgcgaaggacagcatttttgagcctgccaaaggtggtgagaaactgcaaatcaagaagacagtatcgtttcatctgtatatctccaccgcaccctgcggggacggcgctctgtttgataaaagctgtagcgatagagccatggaatcaacagaatctagacactatcccgtgttcgagaatccaaaacagggcaagctccgcacaaaagtggagaacggcgagggcacgattccagtcgagtccagcgatatcgtcccaacttgggatggcatccggctgggagaacgcttgaggaccatgtcatgttccgataaaatcttacgttggaatgtcctcgggcttcagggagccttattgacacatttcctgcaacctatctacctgaagtctgtaacccttgggtacttgtttagccagggccatctgacccgggctatctgctgcagagtgacacgagatggttccgcatttgaagacggcttgagacatccattcattgttaaccaccctaaagttgggcgggtgtctatttatgattccaaacgtcaatctggaaagacaaaggagactagcgttaattggtgtttagcagacggatatgacttggagatcctggatggcacaagaggcacagttgacgggccccggaatgagctgagtagggtgtctaagaaaaacatcttcttgcttttcaagaaattgtgctctttccggtatagaagagacttactacgactctcttacggggaggctaagaaagctgcaagagactacgaaaccgccaagaactattttaaaaaaggactcaaggacatggggtatgggaactggatctccaaaccgcaggaggagaagaatttttacctgtgccccgtttag

SEQ ID NO: 107435 - DNA, 159 bp, synthetic construct
  misc_feature 1..159: note = Description of Artificial Sequence: Synthetic coding sequence
  source 1..159: mol_type = other DNA
atggccaatgagcacactttgatccatccagcctccattgaggacccgttggaagccagacctatgagcgatgaggaccctgaggacgaggacgctttaccagcgcgttggaaaaaggaaatgggccgtaaaaggaagcgaactatcgctactctatag

SEQ ID NO: 107436 - DNA, 2106 bp, synthetic construct
  misc_feature 1..2106: note = Description of Artificial Sequence: Synthetic coding sequence
  source 1..2106: mol_type = other DNA
atggacatagaggacgaggagaatatgtcatcttcctctacagacgtcaaggagaaccgtaatctggataacgtttccccgaaggacggctcgactcccggcccgggtgagggctcacagttgtccaacggtggcggtggagggcccggtaggaagaggccactggaggagggaagtaatggacactctaaataccgacttaagaagaggagaaagactccgggacccgtcctcccaaagaatgccctgatgcagctaaacgagataaaacccggtctccagtacacactgttgtcccaaacgggaccggtacacgccccactctttgtgatgagtgtggaggtgaacggacaggtgtttgagggttcaggtccaaccaagaagaaggcaaagcttcatgctgctgagaaggcccttcgctccttcgtccagttccctaatgcctccgaagcccacttagccatgggcaggactctttcagttaacaccgattttacatccgatcaggcagacttccccgataccctttttaatggcttcgaaacgcccgacaaagcagagccaccattttatgtcggtagcaacggggacgacagctttagctctagcggagacctgtccctgtccgcttcccctgtgcctgcctccctcgcccagcctccactcccggtgctacccccattcccaccaccgagtggtaagaatcccgtcatgatactgaacgagctgaggcctggactgaagtacgactttctctccgagagcggtgaaagtcatgctaaatcattcgtcatgtctgtagttgtagatggccagttctttgaggggtctggtcgcaataaaaaacttgcaaaagcccgcgccgcacaaagcgcactggctgcaattttcaatctccatcttgaccagactccaagtcgacaacccatcccctctgagggccttcagctgcacttaccacaagtgcttgccgatgctgtatcaaggctcgtgcttggcaaattcggagacctgacagataacttctcgtctcctcatgcacgtcgcaaagttctggccggagtcgttatgacaacaggtaccgacgtgaaagatgcaaaagtcatcagcgtgagcacaggtacaaagtgcatcaacggcgaatacatgagcgaccgcgggctggccctcaacgactgccatgccgagatcatctctcgccgctccctgctacggtttctgtacacccagttggagttatatcttaataataaggacgaccagaaacgctcgatcttccagaaaagcgagagaggcggttttcgactgaaggagaatgtacaatttcacctgtatatcagcaccagtccgtgtggcgacgccagaattttctcaccgcacgaacccatactggaagaaccagccgatcgacacccaaacaggaaagcacgaggacagctacggactaagattgaaagtggtgagggaaccatcccagtgcgttccaacgcaagcatccagacctgggatggggtgctacaaggtgaaagattgctaacgatgagctgtagcgacaagatcgccaggtggaacgtggtgggaatccagggaagcttgttgtctatttttgttgaacccatttacttttcttcaattatcctaggctcactttatcacggagaccatctgtctcgcgccatgtaccagagaataagcaacattgaggacctgccccccctctataccctcaataaaccactgttgtccggaatatctaatgccgaagcccgacaaccaggcaaggccccaaatttttccgttaattggactgttggggactccgcgatcgaggtgatcaacgcaactactgggaaagatgaactgggcagagcctcacgactatgtaagcacgctctctattgtcgctggatgagggtgcacggaaaggtaccatcccatttgcttcggtccaagattactaagcctaatgtgtaccatgaaagtaagctcgcagcgaaggagtatcaggctgcaaaggctaggctgtttacagctttcatcaaagccggtctcggagcctgggtcgagaagcccacagagcaggaccagttcagcctgacgccatag

SEQ ID NO: 107437 - DNA, 2226 bp, synthetic construct
  misc_feature 1..2226: note = Description of Artificial Sequence: Synthetic coding sequence
  source 1..2226: mol_type = other DNA
atggacattgaggatgaggaaaacatgtcatcaagcagtactgacgtgaaggagaatagaaacttagacaatgtctccccgaaggatggctcgacaccaggccccggagaggggtcacaactgtccaacggaggaggaggcgggccaggccgcaagcgccctcttgaggaaggaagcaacgggcatagtaaatatcgacttaagaaaaggcgcaagacccctggcccagtgctgccaaagaacgctctgatgcaactcaacgagatcaaacccgggctgcagtatacactcttatcccagactggacctgtccacgccccactcttcgtaatgagcgtcgaagtgaatggacaggtgtttgaaggatcaggacccacaaagaagaaagctaagctgcacgctgcggagaaggcgctccgatcatttgtgcagtttcctaacgctagtgaggcccacctggcaatgggccgcaccctgagtgtcaacaccgacttcacatctgaccaggctgatttccctgataccctgttcaatggattcgaaacacctgacaaggctgagccccccttttatgtgggatcgaatggcgacgactctttcagttcttcaggcgacttaagcctgagcgcaagtccagtgcccgcttcactcgcccaaccacctctacccgttctccctccgttcccccccccttctggaaagaatccagtcatgatcctgaatgagcttcgcccgggactgaagtatgactttttgtccgaatctggagagagccatgccaaatctttcgtaatgtccgtggtggtggacgggcaattcttcgagggttcaggtcgtaataaaaagctggcaaaggcccgggccgcccagagtgccctggctgctattttcaatctccatttagaccagacgccatctaggcaaccaataccctccgagggcctgcagctgcatctccctcaggtactcgcagacgcagtgagtcgcctcgttttgggcaagttcggagatctgacagataacttctcatccccccatgcacgtaggaaggtgctggctggcgtggtgatgacgacgggcactgacgttaaggacgcaaaggtcatatcagtgtccactggcacaaaatgcattaacggagaatacatgtctgaccggggattggccctgaacgattgtcacgccgaaattatttcccgaagatcgctgctgcgatttctctatacccagttggagctgtaccttaacaacaaggatgatcaaaagcgttcaatctttcagaaaagtgagagaggtgggttccgcctgaaagagaacgttcagtttcatctttacataagcacgtccccttgcggcgatgccaggatctttagtcctcacgagccaattcttgaaggaagccgctcttacacccaagccggcgtgcagtggtgcaaccatgggagtctgcagccgaggccaccaggactgttgtcggatcccagtacctctacctttcagggagctggcaccaccgagcctgccgaccgtcacccgaacagaaaagccagggggcagctcagaacaaagatagagtctggcgagggaaccattcctgtcaggagcaacgcctctatccaaacttgggatggggtgctgcagggcgagaggctactgaccatgagctgctctgacaagattgcccgatggaatgtggtcggaatccaaggttcccttctgagcatcttcgtggaaccgatctactttagttctattattctgggctcactttatcatggtgatcacctgtccagggcaatgtaccagcgcataagcaatatcgaagatctcccacctctctatacattaaataaaccactgttaagcggcatttctaacgcggaggcccgacaacctggtaaagctcccaacttcagcgtaaactggacagtgggcgactccgcaatagaagtcatcaatgccacaacagggaaggatgagttaggccgagcctccaggctttgcaaacacgccctatactgtcggtggatgcgcgtgcatggcaaggttccatcccacttgctgcgatctaaaatcactaagcctaacgtgtatcatgaatcaaagttggccgccaaagaataccaggcagcaaaggcccggctatttaccgcttttatcaaggcaggcctgggggcctgggtggaaaaaccaaccgagcaggatcaattttctttgacaccatag

SEQ ID NO: 107438 - DNA, 2145 bp, synthetic construct
  misc_feature 1..2145: note = Description of Artificial Sequence: Synthetic coding sequence
  source 1..2145: mol_type = other DNA
atggatattgaggacgaggaaaacatgtcctctagctcgaccgacgtgaaggagaaccgcaatctggacaatgtctctccgaaagatgggagcacacccggcccgggcgaagggagccagctcagcaacggggggggcgggggcccagggagaaagcgccccttggaagaaggatctaatgggcattccaagtacaggttaaagaaacggcgcaagacacccggaccagtccttcccaagaacgcgctaatgcagttaaatgaaattaaacctggtctgcaatacacactactctctcagacaggacccgtccacgcccccctgtttgtgatgtcagtggaggtaaacggtcaggtgtttgaaggtagcggacctactaagaagaaagcaaagctgcatgccgccgagaaggcactgcgaagcttcgttcagtttccaaacgcatcagaagcacaccttgcgatgggccgaaccctttctgttaatacagatttcaccagcgatcaggcagacttccccgatacgctttttaatggttttgaaacccctgacaaagctgagccacccttctatgtcggcagcaatggggacgattctttctcttcatcaggagaccttagccttagtgcctcacctgtgcccgcctccctcgcacagcctcccctgcctgttctacccccatttcccccgccctcgggcaagaatccagtaatgatcttgaatgaactcagaccaggcctgaagtacgacttcctgtccgaatcgggagaaagtcacgccaaatccttcgtgatgtcggtcgtggtcgacggtcagttctttgagggctcaggccggaataagaaattagccaaggctcgcgccgcgcagtctgctctggccgctatattcaatctgcacctcgatcagaccccctctagacagccaattccctccgagggcctgcagctgcatctgcctcaggtgctcgctgatgccgtctcgaggcttgttctcggaaagttcggggacctgactgacaacttctcgtcccctcatgctaggcggaaagtcctggccggtgtcgtgatgacaaccggcacagacgtgaaagatgctaaagttatatctgtcagtacaggcacgaaatgtatcaacggggaatatatgtccgataggggcctcgctttgaacgactgtcatgcagaaattatcagcaggcggtctttgctgcgatttctttacacccagctggagctgtacctgaataataaggacgaccagaagaggtcaattttccagaagtccgagagggggggtttccgtctgaaagaaaatgtgcagttccacctgtacatctccacatccccctgcggagatgccaggatctttagcccccacgagcccattctggaaggtagcagatcatatacgcaggcaggagtgcagtggtgcaaccatggtagcctgcagccacgcccgcccggattgttaagcgacccaagtacatccaccttccagggcgcaggaaccacggagcctgctgatcgccacccaaatcggaaagcaagagggcagcttcggactaaaatcgagagtggcgaagggactattccggttagatccaacgctagcatccagacttgggatggagtgctccagggcgaacggttgctgacgatgagttgctccgacaagattgctcggtggaacgttgtcgggatccaagggtccttgctgtccatattcgttgaacctatttacttctcgtcgatcatactgggctccttgtatcacggggaccacctgtcacgagctatgtaccaacgcatttctaacatcgaggatctaccacctctctatacactgaataagcccctgctgtcaggcatctcaaatgctgaggctcgtcagcctggaaaagctcccaacttcagtgttaattggacagtcggtgacagcgccatcgaggtcattaatgctacaacaggaaaggacgagctggggagggcttcaagactttgtaagcatgccctgtactgtcgctggatgcgagttcatggcaaggtacctagtcacttactgcgttccaaaatcacaaagcctaatgtctatcacgaatccaagctggcagctaaggagtaccaagccgccaaggttcattag

SEQ ID NO: 107439 - DNA, 39 bp, synthetic construct
  misc_feature 1..39: note = Description of Artificial Sequence: Synthetic coding sequence
  source 1..39: mol_type = other DNA
atggatattgaggacgaggaaaatatgtccttcagttag

SEQ ID NO: 107440 - DNA, 426 bp, synthetic construct
  misc_feature 1..426: note = Description of Artificial Sequence: Synthetic coding sequence
  source 1..426: mol_type = other DNA
atggatatcgaggatgaagaaaatatgagtagctccagtacagacgtcaaagagaaccggaacttggacaatgtgtccccaaaagacggttcaacccccggccccggggaagggtctcagctgtctaacggtgggggcggcgggccagggcggaagcgacccctagaggagggcagtaacggccactccaagtataggctcaagaaaaggcgcaaaacaccaggacctgtactgcctaaaaatgctttgatgcagcttaatgaaataaagcccggcctgcagtacaccttactgtctcagaccggtccagtgcacgcgccccttttcgtcatgagcgtggaggtgaacggccaggttttcgagggatcgggccccaccaagaagaaagccaagctacacgcggccgaaaaggccttgcgatcttag

SEQ ID NO: 107441 - DNA, 2226 bp, synthetic construct
  misc_feature 1..2226: note = Description of Artificial Sequence: Synthetic coding sequence
  source 1..2226: mol_type = other DNA
atggatattgaagacgaagagaacatgagctcatcctccactgatgtgaaagagaatagaaatctggataatgtctcccctaaagacgggtcaacccctggacccggggaggggagtcagcttagtaacggcggaggagggggccccgggcggaagcggcctttagaggaagggagcaacggacacagcaagtacaggttgaaaaagcgcagaaaaactccaggtccagttttgcccaaaaacgctttaatgcagctgaatgaaatcaagccaggcttgcaatacacccttctgagccagacaggcccagtccacgcccctctgttcgtgatgagcgttgaggtgaacggccaggtctttgagggtagcggccccacgaagaaaaaggcaaagctgcacgcggccgagaaggctctgaggagtttcgtgcagtttcccaatgcgtccgaagctcatcttgcgatgggaaggaccctgtcagttaatactgattttacatcggaccaggccgactttccagacacactgttcaatgggttcgagacccccgataaggcagagcccccgttctacgtgggatccaatggtgatgactcgttcagtagttcaggcgacctctccttatcggcctcaccggtcccagctagtctggcgcaacccccccttcctgtgcttcctccattccctccaccatccggcaagaaccctgtgatgatcctaaacgagctgagaccaggcctcaaatacgactttttgtccgagtcaggcgaatcccacgccaagtccttcgtgatgtctgtcgttgtcgacggacagttctttgaaggctcagggcgtaacaagaaattagcgaaggccagagcagcccagtccgccttagctgccatcttcaacttacatcttgaccagactcctagccgacagccaattccgagcgagggtctgcagctgcatctgccccaggtgctggctgacgccgtgagccgactggtactcggtaaatttggtgaccttacggataattttagcagccctcacgcgagaaggaaggttttggccggcgtcgttatgaccaccggaaccgatgtgaaggacgctaaggtcatttccgtgagcactggcacaaagtgcataaatggagagtacatgtcggacaggggtctggctctcaacgactgccacgccgagatcatctcccgccgttccctgttaagattcttgtacactcagcttgaactctatctgaataataaagatgatcagaagaggtcaatattccagaaaagcgagcgcgggggatttagattgaaagaaaacgtgcaattccacctttacatctctaccagcccatgcggcgacgctaggatcttctcgcctcacgaaccaatcctggagggtagtcgttcttatacgcaggcaggtgttcagtggtgcaatcacgggagcctgcagccaaggcccccagggctcctcagcgacccctccacttcgacctttcagggcgccggcacaacggagccggcagacagacatcccaaccgaaaggctcggggccagttaagaaccaaaatcgagtcgggggagggcacgatcccagttagatctaacgcgtctatacagacctgggatggcgtgctgcagggggaacggctgctaacaatgtcctgttccgataaaatagccagatggaacgtcgtcggcatccagggaagtttgctgagtatttttgtggagcccatttacttttccagcatcattctagggagtctctatcatggcgaccacctgtccagagccatgtatcagcggatttccaatatcgaagatctcccgcccctttacaccttgaataagccactgctgtccgggatcagtaacgccgaggcacgccagcccggcaaagccccgaatttctcagtcaattggacggtcggcgacagcgccatcgaggtaatcaatgccacaacgggcaaagacgagctcggccgcgctagtagattatgcaaacacgcgctgtattgccgttggatgagggtgcacgggaaggttccttcccacctgctgaggtcaaagatcacgaagcccaacgtttatcacgagtcgaagctggcagccaaggagtaccaggccgctaaagcaagattattcacagcttttattaaggctggacttggtgcttgggtcgaaaaaccaactgaacaagatcagtttagcttaactccctag

SEQ ID NO: 107442 - DNA, 2226 bp, synthetic construct
  misc_feature 1..2226: note = Description of Artificial Sequence: Synthetic coding sequence
  source 1..2226: mol_type = other DNA
atggacatcgaagacgaggagaacatgtcaagcagcagtactgatgtaaaggagaaccggaatctggacaacgtgtcaccaaaagacgggtctacgcccggccccggagagggcagtcagctcagcaatggcggtggcggaggccctggtcggaaaaggcctctggaagaaggctccaatgggcacagtaagtatcgccttaagaagcgtagaaaaacccctggccctgtgctgccaaagaatgcactgatgcaactcaacgaaattaagcccgggcttcagtacacactgctctcccagaccggccccgtccatgcccccttgttcgtcatgtcagttgaggtcaatggacaggtatttgagggctcaggccccactaaaaaaaaagcgaagctgcacgcagccgaaaaggcattacgatcttttgtgcagtttcctaatgcgtcagaagcacacttggccatgggacgaaccctttctgtcaacactgacttcacatctgatcaggcggacttcccagacacactttttaatggtttcgagacccccgacaaggcagagccccctttttacgtcggtagcaatggcgatgattctttctcctccagtggggatctctccctgtccgccagtcctgtacccgcctctctcgcccagccccccctgcccgtccttccgccttttccgccgccctccgggaaaaatcccgtgatgatcttgaatgaactaaggccgggtctaaaatacgatttcctcagcgagagcggagaaagccacgccaagtccttcgtgatgtctgtcgtcgttgatggccagttttttgagggatccggacggaataagaaacttgccaaggcaagagcggctcaatcggccctggccgcaatctttaatctacacctggaccagactccaagtagacagcctattccatctgaaggcctgcaattacatttaccacaggtcctcgccgatgcagtgtccaggttggtgctgggaaagttcggcgatctgacagacaacttctcaagtccccatgctaggcggaaggtccttgctggggtggttatgacgacagggactgacgtcaaggatgccaaggtgatttccgtttccaccggcactaagtgcatcaatggagaatatatgtccgatcgcggtctagccctcaatgattgccacgctgagatcatcagccggaggtccctccttcgatttctttacacccaattggaactatatttgaataataaagatgatcagaaacgatcaatattccagaagtccgagagaggcgggtttcggctgaaggaaaatgtccagtttcacctctatatcagcacctccccttgcggtgatgcccgcatctttagcccccacgagccaattcttgaaggctctcgctcctatacccaagctggtgtgcagtggtgcaaccacggtagcttgcagccacggccgcccgggctactgtcagatccttccacctcaacattccagggcgccgggaccaccgaacccgcagaccgccaccccaacaggaaagcccgtgggcagctgaggaccaagattgagagtggcgaaggaacgatcccggtgagaagcaatgcctctattcagacatgggatggtgtgcttcaaggggaaagattgttgacaatgagttgctccgataaaatcgccagatggaacgttgtgggaatccagggtagtcttctgtcaatcttcgtggaacctatttatttctccagtatcattttggggagcctgtaccatggcgaccatttgtccagagctatgtatcagagaattagcaatatcgaagacctgcccccactgtacactctgaacaaacccctgttaagtggtatatccaatgccgaggccagacaacctggcaaagctcccaacttcagcgtaaattggaccgtaggtgatagtgccattgaggtaattaatgctacaactggaaaggatgagctagggcgggcctctaggctctgcaagcatgccctatactgtaggtggatgcgcgtccatggtaaggtgcctagccacttgctgaggtccaaaattacaaagcccaacgtttatcatgaatctaaattggctgccaaggaataccaagcagcaaaggctcggttatttactgccttcatcaaagccggactgggcgcctgggttgagaagccaactgaacaggaccagttcagcttgaccccttag

SEQ ID NO: 107443 - DNA, 2097 bp, synthetic construct
  misc_feature 1..2097: note = Description of Artificial Sequence: Synthetic coding sequence
  source 1..2097: mol_type = other DNA
atggacatcgaggatgaggaaaacatgtcaagctcgtcaaccgatgtcaaagagaatcgaaacctggacaatgtaagcccaaaggacggatccaccccgggccccggcgagggaagtcaactctccaatggaggagggggtggcccaggcagaaagagaccgttagaagaaggatcaaatggacactctaagtatagattgaagaagcgacggaagactcctgggcccgtgctgccaaagaacgccctcatgcagctgaatgaaataaagcccggtctccagtacacacttttaagtcagaccggacctgtccacgcccctctgtttgtcatgtcagtggaagttaatgggcaggttttcgaggggtctggccccacaaaaaaaaaagccaagctgcatgcggcggagaaggcactacggtcctttgttcagttccctaacgcaagcgaggctcacctagcaatgggaaggaccctctcagtgaataccgactttacgagcgaccaggccgactttccggacactctctttaatggtttcgagactcccgacaaagcggagccacccttctacgtgggatccaatggagatgactcattcagttcctcaggggacttgtctttatctgcctcaccagtacctgcttctttggcccaaccaccgctcccagtgctgcccccattcccccccccttccggcaaaaatccagtgatgatcctcaacgagctgagacccggccttaagtacgatttcctttctgaatcaggagagtctcatgcaaaaagtttcgtgatgtccgtggtcgtggacggccaatttttcgagggatcagggagaaacaagaaactcgcgaaggcacgggctgcccagtccgccttagcagccatctttaatctccaccttgaccagacacccagcaggcagccaattccatctgaaggacttcagctacacctgccccaagtgctcgctgacgctgtgagcagactcgtgctcggcaaatttggtgacttgaccgacaatttctccagtccacatgcacgccgaaaggtattagcaggcgtggtgatgactacaggaaccgatgtgaaggacgctaaggtaatcagtgtatccacagggacgaaatgcataaacggtgaatatatgtcggatagggggttagctctgaatgattgtcacgcagagatcatcagccgccgaagcctcttaagattcctgtatacgcagctggagttgtatctgaacaataaagacgatcaaaaaaggtcaattttccagaagagcgaacgcggcggcttcaggttgaaagagaacgtgcagtttcacttatatatttctacaagtccatgtggcgacgcaagaatcttcagtccgcacgaacctatcctagaaggcagccgatcgtacacacaggccggcgtgcagtggtgtaaccacgggagtctgcaaccaagaccgcctgggctacttagcgatcccagcacaagcacctttcagggtgccgggactaccgagcccgccgacagacaccccaatagaaaagctagaggccagcttaggaccaagatcgagtcaggcgaaggtacaatcccagtacggtcaaatgccagcattcagacatgggatggggtgttgcaaggtgagcgtctgctgacgatgtcttgcagtgacaagatcgcacgctggaatgttgtcggcatacagggaagcctgttatcaattttcgtggagccaatatatttttcctccataatcttggggtctctttaccatggagaccaccttagccgggcgatgtaccagaggattagcaatatagaagatctacctcctctgtatacgctaaacaaacctctgttgagcggaatcagtaacgcagaagcacgccagcctggtaaagcacccaactttagcgtgaattggaccgtgggagactccgcgattgaagttatcaacgccactactggcaaggatgagctgggccgcgcaagccgtttgtgtaaacatgctttgtactgccgatgggcatgcgcgagacaggggtcactccctctgaccactctccaggattatcaggcgcaacgggttccatag

SEQ ID NO: 107444 - DNA, 426 bp, synthetic construct
  misc_feature 1..426: note = Description of Artificial Sequence: Synthetic coding sequence
  source 1..426: mol_type = other DNA
atgtcgcataggatggaaggggtggggcaacttccggcctcgtacaggcataacagacctcttctctctggggtgagtgacgctgaggcccggcagcccgggaaatctccaccattttccatgaactgggtcgttggcagtgcagatctagagattatcaatgctacaacagggcggcgctcgtgtggaggacccagcagactttgtaaacacgtgttgagtgcccggtgggcacggctctacggtaggctcagtacaagaacaccctcccctggggacaccccttccatgtattgtgaagctaagcttggagctcatacatatcagagtgttaagcagcagctgttcaaggccttccaaaaggccggcctcggaacatgggtccggaaaccgcctgagcagcagcagttcctgctgactctctag

SEQ ID NO: 107445 - DNA, 747 bp, synthetic construct
  misc_feature 1..747: note = Description of Artificial Sequence: Synthetic coding sequence
  source 1..747: mol_type = other DNA
atggggctgtggtcaccagtgcccggtaacagcgtacctcgggcacccgtgatggcgggacttggtcttggccatagtcaaggggcccctcagggccctcacgacggtaaaacagatcgctctagcggtcctggaaggagacgcaccgaacggacacgcttgcccggattgctgggtggtgctcctctgaccgcgggctctcctcacagatggaacgttctcgggctgcagggagctctcctctcccatttcgtagaacctgtgtacttgcagtctatcgtcgtggggagtttacaccacaccggacaccttgcgagagtgatgagccatcgcatggaaggcgtcgggcagctaccagcctcctatcgccacaacagaccccttctctcaggggtgtccgatgcagaagccaggcagcctgggaagtccccgcccttttctatgaactgggttgtgggcagcgcagatctggagataataaatgcaacaactggccggcgctcctgtggcggcccaagtcggctctgcaagcacgtcctgtctgcccgctgggctagactgtacgggcgactgtcaacccgcacaccttcgccgggtgacacccccagtatgtattgtgaagcaaaactaggagcacacacgtaccagtccgtgaagcagcagctgttcaaagccttccagaaagctggcctgggcacctgggtccgcaaacccccagagcagcagcagtttctcctgacactgtag

SEQ ID NO: 107446 - DNA, 2220 bp, synthetic construct
  misc_feature 1..2220: note = Description of Artificial Sequence: Synthetic coding sequence
  source 1..2220: mol_type = other DNA
atggcgagcgtgcttgggtcgggacggggatcaggaggtctgtcctcccaactaaaatgtaaaagtaaacgaaggagaagaaggcgttccaaacgcaaagataaagtgtccatactgagcaccttcctggccccctttaagcacctaagccccggcattactaacactgaggacgacgacacattgtccacctcttccgcggaggtgaaggaaaaccgtaacgtggggaatctggctgcgaggcccccgccttcaggtgatagagcacgtgggggagctcctggcgccaagaggaagaggccattagaggaaggcaatggagggcacctctgcaagctgcagcttgtttggaagaagctctcctggtctgtagccccaaagaatgcgctggtccagctgcatgagctgcgccctggcttgcagtaccggacagtttctcaaacaggtccagttcacgcccccgtgtttgctgtggccgttgaggtaaatggtcttaccttcgagggaaccgggcctacgaaaaagaaggccaaaatgcgggcagcagaacttgcgctcaggagctttgtgcagtttcctaatgcctgccaggcgcatctagctatggggggcgggccagggcccggaacagacttcacaagcgaccaggccgatttccccgacactctgttccaggaattcgaaccgcctgcaccaagacctgggctggccggggggaggccaggcgatgccgcacttctgtctgcagcctatgggagaaggagattactctgtcgcgccttagacctagtggggcccacgccagccacccccgccgcccctggcgagcgcaatccagtggttctgctgaacagactgcgcgccggactccgctacgtgtgcctggccgagccagccgaacgacgggcacgcagtttcgttatggccgtgagcgtcgacggtcgcacattcgaagggtccggtcgttctaagaagttagcccgcggccaggcagctcaggctgctctacaggagttgtttgacatccaaatgcctggtcacgcgcctgggagggctagaagaacccctatgccccaagagttcgccgacagcatcagccagttagtcacacagaagtttagggaggtgaccacagatctaactcccatgcacgctcggcataaagccctggctgggattgtgatgacaaagggactcgacgcccggcaggcccaggttgtggctctctcgtccggaaccaaatgtatcagcggagaacacctgtctgatcagggtcttgtggtcaacgattgtcatgccgaagttgtggccaggcgggcgttcctgcacttcctgtacacacagttggaactgcacctctctaagcggcgcgaggacagtgaaagatctatctttgtgcgactgaaggagggcggttaccgcctcagggagaatattctgttccatttgtacgtttcgacctccccctgtggtgatgcacggcttcattcaccctatgagattacaaccgatttacatagcagcaagcacttggtgcgcaagttccgcggccatctgaggaccaagatcgaaagcggggagggtactgttcctgtaaggggacccagtgcagttcaaacttgggatggagtccttttaggcgagcagctgataacaatgtcatgcactgacaaaattgctcggtggaatgtgctcggccttcagggggccctcctctctcactttgtagagccggtgtatcttcaatctattgtggtggggtcattacatcacactggacacctggcacgtgtgatgagtcaccgcatggaaggcgttggtcagcttcccgctagttaccgccacaaccgtccactcctgtccggcgtgtctgacgccgaggcccgtcaaccagggaaaagccccccattttcaatgaattgggtggtcggctcagccgatttagaaataatcaatgcaacaacaggccggaggtcatgcggcggacccagcaggctgtgcaaacatgtccttagtgctaggtgggcccgcctctatggccggttatctactcgaacgccatccccaggcgatacccccagcatgtactgcgaggcgaagctgggcgcccacacttaccaatccgtcaagcagcaacttttcaaagcttttcaaaaggccggccttggcacctgggtgcggaagccccccgagcagcaacaatttctgttgaccctgtag

SEQ ID NO: 107447 - DNA, 1509 bp, synthetic construct
  misc_feature 1..1509: note = Description of Artificial Sequence: Synthetic coding sequence
  source 1..1509: mol_type = other DNA
atgtggactgcagatgagattgcgcagctctgctacgaacattacggcatacgcctgccaaaaaagggaaaaccagaacccaatcacgaatggaccttattggcagccgttgtcaaaatccagtctccggcggataaagcatgtgatactccggacaaacctgtgcaagtaaccaaggaggtcgtctctatgggaactggcacaaagtgtatcggccaatcaaaaatgaggaaaaatggagatatattaaacgactctcacgccgaggtgatagcacgaagatctttccagagatacctcctccatcaactgcagctcgccgccactctgaaagaggattcaatctttgtgccaggaacccagaaaggtgtctggaaactcagacgtgatctaatcttcgtgttcttctcgagtcacactccctgcggggatgcctctatcatccccatgctggaattcgaagatcagccttgttgtcccgtgtttcgcaattgggcccataacagctcggtcgaagcttcttctaatcttgaagcacccggcaacgagcgaaaatgcgaagatccagattcacccgtcacaaagaagatgaggctggagcctggaactgctgctcgtgaagtgactaacggggcggctcaccaccagtctttcggtaagcagaaatcaggacctatcagcccaggaatccacagttgcgaccttactgtcgagggactggccacggttacaaggatcgccccaggtagcgcaaaagtcattgatgtgtatagaaccggggcgaaatgtgtgccaggggaggcgggagactccggtaagcccggcgccgcctttcatcaggtgggcctcctgcgagttaaacctggacgtggggaccgcacacgctctatgagctgcagcgataagatggcaagatggaacgtgctcggctgccagggggccctgctgatgcatctactcgaagagccgatctatctgtccgcagtggtaattggaaaatgtccctattctcaagaggccatgcagcgggccctgatcggacgctgtcaaaatgtcagcgcactgccgaaggggtttggagtgcaggaattgaagatacttcagtctgacttacttttcgagcaatccagatctgctgtacaggctaagagggctgacagccctggcagactggtgccatgtggcgccgccatctcatggagtgccgttccagagcagcctctcgacgtcacggcgaatgggtttcctcaggggaccactaagaagacgatcggtagtctgcaggctcgaagccagatttccaaagtggaactcttccgtagctttcagaaactgctgtcaagaatcgccagagacaaatggccccacagcttgagagtccagaagctggatacttatcaggagtacaaagaggccgcatccagttaccaggaagcttggtctacattgcggaagcaggtgttcggctcatggatacggaatccaccagactaccatcagttcaaatag

SEQ ID NO: 107448 - DNA, 1422 bp, synthetic construct
  misc_feature 1..1422: note = Description of Artificial Sequence: Synthetic coding sequence
  source 1..1422: mol_type = other DNA
atgtggacactgctggctgcggttgtgaaaatccagagcccagccgataaagcctgcgacacccctgacaaaccagtgcaggttacgaaggaggtggtttccatggggacaggtaccaaatgtattggccagagtaagatgagaaagaacggtgatattcttaacgatagtcatgcggaggtgatcgctcgacggtcatttcagcgctacctgttgcaccagttgcagttagctgctacactcaaagaagattctatttttgtgcctgggactcagaaaggtgtgtggaagcttagaagagacctaatttttgttttcttcagctcccacacaccatgtggggatgcttccataattccaatgctggagttcgaagaccagccatgttgccctgtctttcgcaattgggctcacaacagttccgtggaagcaagctctaatctcgaagctcctgggaatgaacgcaagtgcgaggaccccgacagccccgtgaccaagaaaatgcgactggagcccggaactgccgctcgggaggtgacaaacggcgcagcccaccaccagtcctttggaaagcagaaatcgggacccattagccctggcatccattcatgcgacctgaccgtcgaagggctggccaccgtgacacgcattgcccctggttcggcaaaggtgatagacgtctatcggacgggagctaagtgtgtccctggtgaagctggtgactctgggaagcctggtgccgcattccatcaggtcggacttcttcgcgtgaagcctggccgcggtgaccggactcggtccatgtcatgttccgataaaatggcccggtggaatgtgcttgggtgccaaggcgccctactgatgcaccttttggaggaaccaatctatctgtctgccgtcgttatcgggaagtgtccatatagccaagaagctatgcagcgagccctgattggccggtgccagaacgtgtcggccctgccaaagggatttggtgtgcaggagctgaagattctgcagtccgatctgctgttcgagcaatctaggtccgcggtgcaggccaaaagagccgactctccaggacgtctcgtgccgtgtggtgcagccataagctggtccgctgtgcccgagcagcccctcgacgtgacagcgaatggattccctcaggggaccaccaagaagacgatcgggagcctgcaagctcgtagtcaaatttcaaaggtcgagctgttccgctcatttcaaaaactgctgtcgcgcatagccagagacaagtggccccactcgctccgggtgcaaaagctggatacttaccaggaatataaggaggccgcatcttcttatcaggaagcttggtctaccctgagaaagcaagtctttggaagttggatccgtaatccacctgactatcatcagttcaaatag

SEQ ID NO: 107449 - DNA, 1089 bp, synthetic construct
  misc_feature 1..1089: note = Description of Artificial Sequence: Synthetic coding sequence
  source 1..1089: mol_type = other DNA
atggcagctgccgaggaagagccaaagcccaaaaagctgaaagtggaagcgccacaggcgctgagggagaatatcttgttcggtatgggtaaccccttgctggacatcagtgccgtggtcgataaggattttttggataagtattcccttaagcccaacgatcagatcctggcagaagataagcataaggagctttttgatgagctagtgaagaagttcaaggtagagtatcatgctgggggatccacacaaaacagtataaaggtagcccagtggatgatacagcagccacataaggccgccacctttttcggatgcattggcattgataagttcggcgaaatcttgaagcggaaagcggccgaggcccacgttgacgctcactattatgagcagaacgagcaacctactgggacatgcgccgcatgcatcaccggagacaacaggtctttaatcgctaacctggccgcagctaactgctacaagaaggagaaacacttggacctggagaaaaattggatgctcgtagagaaagcacgtgtgtgttacatagccggcttctttctgactgtatctcccgaaagtgtcctcaaggtggcacaccatgctagtgagaataaccgtatattcaccttgaacctgtctgccccatttatttcccagttttacaaagaatctcttatgaaagtgatgccgtacgtagatatcctcttcggtaacgaaaccgaggccgcaacctttgcaagggagcaggggtttgagaccaaggacatcaaggagatagccaagaaaacccaggccctgcccaaaatgaattctaagcgacagcgcatagtcattttcactcagggcagagatgataccatcatggcgacagaaagtgaagtgaccgcttttgctgtacttgaccaggaccaaaaagagattattgatacaaatggagccggtgacgcctttgtgggcgggtttctgagccagctggttagcgataaaccactgaccgagtgtattcgggccggccactacgcggcgtcaataatcatcaggcgaactggttgtaccttccccgagaagccagatttccattag

SEQ ID NO: 107450 - DNA, 1038 bp, synthetic construct
  misc_feature 1..1038: note = Description of Artificial Sequence: Synthetic coding sequence
  source 1..1038: mol_type = other DNA
atgacaagtgtgagggagaatattctgttcggcatggggaacccccttctcgatatatctgctgtggtcgataaggatttcttagataaatacagcctcaagcccaatgaccaaattctcgccgaagacaaacacaaagaactcttcgatgagctggtcaaaaaattcaaagtagaataccatgccggcggctccacccaaaattcaatcaaagtcgctcaatggatgattcaacaacctcacaaggcggcaacctttttcggatgcattggtattgacaaattcggagagatcctgaaaagaaaggccgccgaggcccatgtggatgcgcattattacgaacagaatgagcagcctacaggaacctgcgcagcctgcatcactggcgataatcgcagtctcatcgctaatttagcggctgccaactgctacaagaaggaaaagcatctggacctagaaaaaaactggatgctcgttgagaaagccagggtgtgctacattgccggattttttctcacggtgtctcctgaatccgttctgaaggttgctcaccacgcttccgaaaacaaccgtatatttacgctgaacctgagcgccccatttatttcacaattttacaaggagagcctgatgaaagttatgccgtatgtcgacattttatttggtaatgagaccgaggctgccactttcgctcgggagcaaggtttcgaaaccaaagatatcaaggagatcgccaaaaaaactcaagcactgcccaagatgaacagtaagagacaacggatagtgatcttcacgcaagggcgagatgacacaattatggcaacggaaagtgaagtcactgcctttgccgtcctggatcaggatcagaaggagatcatcgacactaatggcgccggcgatgccttcgtgggaggttttctgtcgcagttagtaagtgacaaacccctcacggaatgcattagggcaggtcattatgctgcttcaatcattatcagacgcactggctgcactttccctgagaagccagacttccattag

SEQ ID NO: 107451 - DNA, 918 bp, synthetic construct
  misc_feature 1..918: note = Description of Artificial Sequence: Synthetic coding sequence
  source 1..918: mol_type = other DNA
atggctgcggcggaggaggagccaaaaccaaagaagctgaaggtagaggcacctcaggcactcagagaaaatatcctttttggtatgggcaaccctctgttagacatctctgcggttgttgataaggatttcctcgataagtactcattgaagccaaacgaccagatactggccgaggacaagcacaaggagctgttcgacgaactggtgaagaaatttaaggttgaataccatgcaggcggctcaacccagaatagcatcaaagtcgctcaatggatgattcaacaaccccacaaagccgcaaccttctttggatgtatcggcattgataagttcggcgaaatactcaagcgcaaggctgctgaggcccatgttgacgctcattactacgaacagaatgagcagccgaccgggacatgcgctgcttgtattaccggagataaccgcagtctgatcgcgaatctcgccgccgctaattgctataagaaagagaagcatttggacctggagaaaaattggatgcttgtcgagaaagccagggtgtgctacatcgcagaggccgccacattcgcccgcgaacaaggctttgagacaaaagatattaaggaaatcgccaaaaaaacccaggccctgccaaagatgaactccaaaaggcagaggattgtgatctttacgcagggaagagacgacaccataatggctactgagagcgaagttaccgccttcgccgttcttgatcaggatcaaaaggagataattgatacgaacggtgcaggagacgccttcgttggcggttttctgagtcagctggtttcggataagcccttgaccgagtgtattagagcaggccattatgccgccagcataattatccgacggaccggatgcacgttccccgagaaaccagattttcactag

SEQ ID NO: 107452 - DNA, 984 bp, synthetic construct
  misc_feature 1..984: note = Description of Artificial Sequence: Synthetic coding sequence
  source 1..984: mol_type = other DNA
atgacttcggtacgtgagaacatcctgtttggtatgggcaatccgctgcttgacattagcgctgttgtcgataaagacttcctggacaaattcgatgagcttgtcaaaaaatttaaggtcgagtaccacgctggcggatccacccaaaacagtattaaagtggcgcaatggatgattcagcaacctcataaggcggcaaccttctttggatgcataggcatcgataaatttggagaaatcctgaagcgcaaggcagctgaagcacatgtcgacgctcactactatgagcaaaacgaacaaccaacaggaacctgcgccgcctgcattaccggtgataacagaagtctcatcgccaacctggccgccgcgaattgttataagaaagagaagcacctggatctggagaagaattggatgctggttgagaaagctcgggtgtgctatatcgccggcttcttcttaaccgtctccccagagagtgtactgaaggtggcccatcatgccagtgagaacaacaggatcttcactcttaacctgagcgctcccttcatctcccagttttacaaggaatcactgatgaaagtaatgccttacgtggatatccttttcgggaatgaaacagaagccgcgacatttgcacgggagcaggggttcgagacaaaggacatcaaagaaatcgcaaagaaaacccaggcgctacccaaaatgaactctaagcggcaacgcattgtgatcttcacccagggtagagatgacactatcatggcgactgaatcagaagtaacggcttttgcggtgctcgaccaagatcagaaggagatcattgatacaaatggggctggggatgctttcgttggcggatttctctcacagctggtcagcgacaagccactgacagagtgtattcgtgcaggccactatgcagcttcaattatcatcagacgtaccggatgcaccttccctgagaagcctgacttccactag

SEQ ID NO: 107453 - DNA, 2244 bp, synthetic construct
  misc_feature 1..2244: note = Description of Artificial Sequence: Synthetic coding sequence
  source 1..2244: mol_type = other DNA
atgccccttttcaaactgcccgctgaagaaaagcagatcgacgatgccatgcgtaatttcgccgagaaggtgttcgcgtcagaagtcaaggacgagggtggccgacaggaaatatccccctttgacgttgatgagatttgccctatcagccatcacgaaatgcaggcccatatcttccatctggagaccctgtccacaagcaccgaggccagaaggaagaagagattccaggggcgaaagacagttaatttgagtatccctctgagcgagacttcctccacaaagttatcacacattgacgagtatataagctcgagtcccacttaccagacagtgcccgattttcagcgagttcagatcactggggattatgccagtggtgtaactgttgaggattttgaaatcgtctgcaaggggctgtatcgtgcactgtgcatcagagagaaatatatgcagaagtcttttcagagattcccaaagacaccatccaagtacttaaggaacatcgatggagaagcttgggtcgctaatgaaagcttttacccagtgttcactccccccgtgaaaaaaggagaggacccgttcagaaccgacaatctgcctgaaaatctggggtaccaccttaaaatgaaggatggcgttgtatacgtatacccaaacgaggccgcggtgtcaaaggacgagcctaagcccctcccctaccccaacctcgacacttttctggacgacatgaatttcctgctggcgcttatcgcgcaagggcccgtcaagacgtatactcaccggcggctgaaatttctttcctccaaatttcaggttcaccagatgctgaatgagatggatgaactgaaggaactgaaaaacaaccctcatcgggatttctacaactgtcgcaaggtcgacacacacatccacgcagccgcctgtatgaaccagaagcatctactcaggtttattaaaaaatcataccagatcgatgcggacagagtcgtgtattctacaaaggaaaagaatctgaccctcaaagaactgttcgcgaaactgaaaatgcatccttatgacctgactgttgacagcctggatgtccatgccggcaggcagacattccaacgcttcgacaagttcaatgataagtacaacccggtcggtgcgagcgagctgagagacctatacctcaagacagataattatatcaacggcgagtactttgcaaccattatcaaagaggtgggtgctgacctcgtggaggccaaataccagcatgcagagccaaggctcagtatctacggtagatctcctgacgagtggtcaaagctttcttcctggttcgtctgcaacagaatccactgtcctaacatgacctggatgatccaggtgccccgaatatacgatgtgtttagatcaaaaaatttcctgccccactttggcaagatgctcgagaatatctttatgccagtattcgaagcgaccataaacccacaagccgaccccgagctaagcgtgtttcttaagcacatcaccggatttgactctgtagacgatgaatccaaacactccggacacatgttttcatccaagagcccgaagccacaggagtggacccttgaaaaaaacccatcctacacatactacgcttactatatgtatgcaaacattatggtgttgaattccctgcgtaaggagcgggggatgaacaccttcttgttccggcctcattgtggcgaagccggggcactgactcacctcatgacagcctttatgatagccgatgacatctctcacgggcttaacctgaagaagagtccagttctgcagtacctgttcttcctggcacagatcccgatcgctatgtcgcccttgagcaataactccttgttcctggagtatgccaaaaacccattcctggattttttgcaaaaggggctaatgatttcactctcaacggacgatcctatgcagttccactttaccaaagagcctctcatggaagaatatgcaatcgcagctcaggtgtttaaacttagtacctgtgacatgtgcgaggtggctcgcaactccgtcctccaatgcgggatctcccacgaggagaaggtgaaattccttggtgataattatttggaggaagggcctgcagggaatgacatccggagaactaacgtggcgcagatccggatggcttataggtacgaaacctggtgctatgagttgaacctgatcgccgaaggcctgaagtccactgagtag

SEQ ID NO: 107454 - DNA, 2343 bp, synthetic construct
  misc_feature 1..2343: note = Description of Artificial Sequence: Synthetic coding sequence
  source 1..2343: mol_type = other DNA
atgaatgtgaggattttctactctgtttcacagtctcctcatagcctactgagcctgctgttctattgtgcgatcctggagtccagaatttcggccacaatgccccttttcaagctgccagcagaggagaagcaaatagatgacgccatgcgaaattttgcagagaaggtattcgccagtgaggtcaaggacgaaggtggacgccaggaaatttcaccttttgacgtggacgaaatttgtcccatttctcatcatgaaatgcaagctcacatcttccaccttgagacgctgagtacatccaccgaagctcgtagaaagaaaagatttcagggccggaagacagtgaacctgtccattcctctgtcagagacctcctcaaccaaactgtcccacatcgatgaatacatttccagcagccccacctaccagaccgtgccagactttcagcgtgtgcaaatcactggtgactatgcatctggtgtcaccgtggaggacttcgagatcgtatgcaaaggcctctatcgcgcactctgcatacgcgaaaaatacatgcagaagtcattccagaggtttccaaaaacacctagcaaatacctgcggaatatcgacggcgaggcgtgggtggccaacgagagtttttaccctgtctttaccccccctgttaagaagggggaagaccccttcaggaccgataatttgccggaaaacctgggctaccacctgaagatgaaagatggcgtcgtgtatgtctacccgaacgaagctgctgtcagcaaagatgagccgaaacctttgccatatccgaatctggatactttcctagatgacatgaattttttattagcgctaatcgcccaggggcctgtcaagacatacacccatagacgcctgaagttcctcagctctaagttccaggtccaccagatgctgaacgagatggacgagttaaaagagcttaagaacaatcctcatcgggacttctacaactgccgaaaggtagatactcatatccacgccgccgcctgcatgaaccagaagcatttactgaggttcatcaaaaaatcatatcagatcgacgctgaccgagttgtgtacagcacgaaggagaaaaaccttactctcaaggagctctttgctaaattgaagatgcacccatacgatcttactgtcgactctctggacgtacacgccggccgccaaacttttcagcgcttcgataaatttaacgataagtataatcccgtgggcgcgtccgaactgcgcgacctgtatctaaagacagataattacatcaatggcgaatacttcgctaccatcatcaaggaggtgggagcagacctggtagaggctaaataccaacacgccgaacccaggttgagcatctatggacgaagtcctgatgagtggtctaaattgtcctcttggtttgtgtgtaatcgtattcactgccccaacatgacctggatgatccaggtgccaaggatttatgatgtgttccgaagcaaaaactttctgccacactttggaaaaatgctcgagaacatcttcatgcccgttttcgaggcgacgattaacccccaggcagacccagaactcagcgttttcctgaagcacatcacaggcttcgactctgtggacgatgagtccaagcattccggtcacatgttctcgagcaagagcccaaaacctcaggaatggaccctggagaagaatccctcatatacatattatgcctactacatgtatgccaatataatggtgttgaactcactccgaaaagaaagaggcatgaacactttcctgtttaggccacactgcggcgaagctggcgcccttacccacctcatgactgctttcatgattgccgatgatatctcacacgggctcaacctgaagaagtcccctgtgctccaatacttgttctttctggcccagattccgattgccatgtcacccttgtctaataattctttgttcctggaatatgccaaaaatccattcctcgactttctgcaaaagggccttatgatttccttgagcaccgatgatcctatgcagtttcacttcacaaaagagcctctgatggaagagtacgcgatcgccgctcaagtgtttaaactctctacatgcgatatgtgtgaggtggccaggaattctgtgctgcagtgcggtatatcacacgaggagaaggtcaaattcctgggtgataattatctagaggagggtccagccggtaatgatatacgccggaccaacgtggctcagatccgtatggcttatcgatacgaaacctggtgctatgagttgaatcttatcgccgaaggcttgaagagcactgaatag

SEQ ID NO: 107455 - DNA, 2331 bp, synthetic construct
  misc_feature 1..2331: note = Description of Artificial Sequence: Synthetic coding sequence
  source 1..2331: mol_type = other DNA
atgaatgtgcggatcttctacagcgtgagccagagcccccacagcctcctgtcattgctcttctactgtgccatattggaatctaggatttccgccactatgcctttgttcaaactgcccgagatagacgacgccatgaggaacttcgccgagaaagtgttcgcttcagaagtgaaggacgagggcgggcgccaagaaatctctccatttgatgtagacgaaatttgtcctatctcgcatcatgaaatgcaggctcatatcttccacctggagactctgtcaacttcaacggaggcccgccgcaaaaaaagattccagggacggaaaacagttaatctgtcgatacccctgtccgaaacttccagtacaaaactctcgcacatcgatgagtatattagctcatcacccacataccagactgttccagattttcagagagtccaaatcactggcgactatgccagcggcgtgaccgtagaggatttcgaaatagtatgtaagggcttgtatagggcgctgtgcatcagggagaagtatatgcagaaatcgtttcaacgttttcctaaaaccccctcgaagtacttacgaaacatcgatggcgaagcatgggtcgcaaatgagagtttttaccctgtgtttacacctccagtgaagaaaggtgaggacccctttaggacagataacctccctgaaaacctgggctaccacctgaagatgaaggatggcgttgtctacgtgtacccgaacgaagctgccgtatctaaagacgagccaaaacctctgccctatccaaacctggacacattccttgatgacatgaattttcttctagcattgatcgcgcaagggccagttaagacttacacacatcgccgcctgaagttcctgagctccaagttccaagtacaccagatgctcaacgagatggacgaattgaaggagctaaagaacaaccctcaccgcgatttttacaattgtcggaaggttgatacccacatccatgcagccgcttgcatgaaccagaaacatcttcttcggtttatcaaaaaatcgtaccagattgacgccgaccgcgtggtgtacagtaccaaggaaaagaaccttacactcaaggaactgttcgctaagctgaaaatgcatccatacgatctgacagtggacagcttagacgtgcacgctggcaggcagacctttcaaagatttgataaattcaacgacaagtataacccggtgggtgcctccgaacttcgcgatttgtacctgaagactgataactacattaatggagagtacttcgccacgatcataaaggaagtcggggcggatctggtggaggcaaagtatcaacatgccgagccacgactgtccatttacggaagatctccagatgaatggtctaagttgagcagctggtttgtgtgtaataggattcactgcccaaacatgacttggatgatccaggtaccacggatttacgacgtcttccgcagtaagaactttctcccacactttggcaaaatgctggagaacattttcatgccagtgtttgaggccacaataaatccacaggccgaccctgaactatctgtgtttctgaagcatattactggttttgactcggtggacgacgaatcaaaacattccgggcacatgttttctagcaagagtcctaaacctcaggagtggacgcttgagaagaatccctcttatacctactacgcctactacatgtacgccaatatcatggtgcttaattccctgaggaaagagcgtggtatgaacacattcttgtttcggccccattgcggggaggcaggcgcacttacacacctcatgaccgcctttatgatcgcagatgatatctcccatggcttgaatctgaaaaaatccccagtgcttcagtatctgttcttcttggcccagattccaatcgccatgagcccacttagtaacaactcattattcctggagtatgccaaaaatccttttcttgatttcttgcaaaagggcctgatgatttcactgagcacagatgatccgatgcagttccacttcaccaaggagccgctgatggaggagtacgctattgctgcacaggtgttcaaattgagcacctgcgacatgtgcgaggtcgccagaaactccgtcctgcagtgcggtatctcacatgaggagaaggtcaagttccttggagataattatctcgaggagggaccagcaggaaacgacatccgccgcacgaatgtcgcacagatcagaatggcatatagatacgaaacgtggtgctatgagttgaatctgattgcagaaggacttaaatctacagagtag

SEQ ID NO: 107456 - DNA, 2640 bp, synthetic construct
  misc_feature 1..2640: note = Description of Artificial Sequence: Synthetic coding sequence
  source 1..2640: mol_type = other DNA
atgaggaatagagggcagggcctgtttcgcctgaggtcccgttgtttcctgcatcagagcttgccacttggcgccgggagaagaaagggcttggacgtagctgaaccaggcccatcacgttgcaggtcagattcccctgcggttgctgccgtggtgccagcaatggcctcttatccttcaggcagtgggaagcctaaagcgaagtatcccttcaaaaagcgggccagtctgcaggcctccaccgctgcaccagaagctcgcggcggcctgggtgccccccccctgcagagtgcacgttctcttcctggacccgctccctgtcttaaacacttcccgctcgatctgcgaacttcaatggacggcaaatgcaaggaaatcgccgaggagcttttcacgcgctccttggccgaatctgagctgcgctctgccccttacgagtttcctgaagagagtcccatagagcaactggaggagcgacgccagcgcctggaacgacagataagtcaggacgtgaaacttgagcctgacattttactccgggcaaaacaagactttttgaagacggactctgactctgatctgcagctttacaaggaacagggagagggtcagggagacagaagcctccgcgagcgtgatgttctggagcgggagtttcagagggtcaccattagtggggaggaaaagtgcggagtcccattcaccgatctacttgatgctgctaagagtgtggtccgggccctgtttattagggaaaaatacatggcactatccttacaatccttttgcccaacgaccagaaggtatcttcaacaacttgccgaaaagcctttggaaacccggacatatgaacagggacccgatacccctgtgtctgccgacgccccggtgcaccctccagccctcgagcagcacccctatgaacactgcgaaccttcaaccatgccaggcgacttgggcctgggattgcgcatggtgcgcggtgtcgtgcacgtatacacaaggagggagcccgatgagcactgttccgaggtggaattaccctatcccgacctccaggagtttgtagccgacgttaacgtgctgatggccctgatcattaatggcccgattaagtccttttgctataggcgcctgcagtacttgtcatctaagttccagatgcacgtcctattgaatgagatgaaagaactggcggcccagaagaaggtgcctcatcgggacttctataacatccgtaaggtggacactcacatccacgcctcctcctgtatgaatcagaaacatctgctgagatttattaaacgtgccatgaaaaggcaccttgaagaaatcgtgcatgtggaacagggacgcgaacagactctgagggaggtgttcgagagcatgaacctaaccgcttacgatctgagtgttgatactctagacgtgcatgctgatagaaacacgtttcatcggttcgataagttcaacgcaaagtacaacccaatcggtgagagcgtgcttagagagatattcatcaagacagataatagagttagcgggaaatactttgcacacatcatcaaggaggtcatgtcagatctcgaagaatcaaaataccagaacgccgagcttagattgtccatctatggtcgctccagagacgaatgggacaagctggcaagatgggccgtgatgcatcgtgtgcactcccccaacgtacggtggctggttcaagtccccaggctgttcgatgtatacaggactaagggacagctagctaacttccaggagatgcttgagaacatattcctgccgttgttcgaagctaccgttcaccccgcatctcaccccgagctgcatcttttcctggagcatgtggacggtttcgactcggtagatgatgaatccaaaccagaaaaccatgtcttcaacttggagtcccccctgcccgaggcatgggtggaggaagataaccccccgtacgcctactacctctactacaccttcgccaacatggctatgttaaaccacctccgccggcaacgaggctttcacacattcgtgcttcgtcctcactgtggggaggccggccctattcaccatttggtctccgctttcatgctagctgagaatattagccatggcctcctgctgaggaaggcccccgttctccagtatctgtattatctggctcagatcggaatcgcaatgagcccactttccaataacagcttattcttgagttaccaccggaacccacttccggagtacctatcaaggggactgatggtgagcctgagcaccgatgatcccttgcagtttcacttcacaaaggagccactcatggaggaatattccatagctacccaggtctggaagttaagctcatgtgatatgtgcgaactggccaggaatagcgtgctaatgagcggattctcccacaaggtcaaaagtcactggctggggcctaactataccaaagaagggcctgaagggaacgacatccggagaacaaatgttccggacattcgagtaggatacaggtatgagaccctgtgtcaggagctggctctgatcacccaggcagttcaaagtgagatgttagaaacaatccctgaagaggccggcatcaccatgtcgcccggccctcagtag

SEQ ID NO: 107457 - DNA, 2397 bp, synthetic construct
  misc_feature 1..2397: note = Description of Artificial Sequence: Synthetic coding sequence
  source 1..2397: mol_type = other DNA
atggccagcgaagcgcggggcggtctcggcgcccctcctttacagagtgccagatcccttcctggccctgcaccttgcctaaagcactttccactggacctacggacctcaatggacggaaagtgtaaagaaatcgcagaggaactgttcactcgctctctcgctgagtccgaactgcggtccgcaccatacgagttccctgaggagtcccctattgagcagcttgaggagaggaggcaacgactggagcgacagataagccaagatgtcaagctcgagcccgacatcctgcttcgagcaaaacaggattttctgaagactgattccgactctgatctccaactctataaggagcagggcgagggtcagggggaccggtcactgcgcgagcgggatgtgcttgagcgcgagttccagagggtcacaatttccggcgaggagaagtgcggcgtcccttttacagatctgctcgacgcagccaaatcagtcgtgagggccctcttcatccgtgaaaagtacatggccctgagccttcaaagtttttgcccgacgacacgaagatatttgcagcaactcgctgagaagcctcttgagacaagaacttacgaacaaggccctgatacacccgtctcagctgatgctccagtacaccctcctgccctggaacagcacccttatgagcactgcgagccaagcaccatgcctggtgatctgggactgggcctgcgtatggtccgtggggttgtgcatgtgtatacacgccgggaacccgatgaacactgttccgaggtggaactcccatacccagacctgcaggaatttgtggcggatgtaaatgttcttatggccctcataataaatgggccgataaaatctttttgctataggcggctccagtatctctctagtaagtttcagatgcatgttcttcttaacgagatgaaggaattggcagcacagaagaaagtcccgcatcgcgacttttacaatatccgcaaggtggatacccatattcacgcatccagctgtatgaatcagaagcatttgttgcgctttattaaaagggcaatgaaacggcacctggaagagatcgttcacgtggagcaaggcagagagcagacactgcgggaggtgttcgaatccatgaacctgaccgcgtatgatctgtcagtggataccttagacgttcatgccgaccgtaacacatttcaccgcttcgacaagttcaacgccaagtataaccccataggagagtcagtcttgcgagagattttcattaaaactgataacagggtctccgggaaatattttgcccatataatcaaggaagtcatgtcagacctggaagaaagcaaatatcagaacgccgaactgcgtctgtctatctacggcagatcccgggatgaatgggataagctagcccggtgggctgtcatgcaccgcgttcacagcccaaatgtacggtggctggtacaagtcccccgtcttttcgatgtctaccgaacaaagggacagcttgctaacttccaggaaatgctggaaaatatctttttacctctttttgaggcaactgtgcaccctgcgagtcaccccgagcttcatttgtttctggagcacgtggatggtttcgacagcgtcgacgacgagagtaaacctgaaaatcacgtctttaaccttgagtcaccattaccggaagcttgggtcgaggaggataacccaccgtatgcctactacttgtactatacatttgctaacatggctatgctgaaccatttaaggcggcaacggggcttccacaccttcgttttgaggccccactgcggtgaggctggccctatacaccatttggtatcggcctttatgttggcggagaacattagtcatgggcttcttctgaggaaggcccccgtgctccagtatctttactaccttgcgcagatcgggatcgctatgtcccccctctctaacaattccctgtttcttagctatcatcggaacccactccccgaatacctgagtcgaggcttgatggtaagcctgagcacagacgacccgctgcaattccattttaccaaggagccgctgatggaagagtactccatcgccactcaagtttggaagctctcttcttgtgacatgtgtgagctggcccgcaatagcgtactcatgagcggtttctctcacaaggtcaagtctcactggttaggaccaaattacaccaaggagggaccagaggggaacgacattcgaagaacaaacgtgcctgacattagagttgggtatcgctacgaaacactctgtcaggagctagccctcattacgcaggcagtgcaatcagagatgttggaaaccattccagaggaggctggcataaccatgtcacccggcccacagtag

SEQ ID NO: 107458 - DNA, 2415 bp, synthetic construct
  misc_feature 1..2415: note = Description of Artificial Sequence: Synthetic coding sequence
  source 1..2415: mol_type = other DNA
atgtggcagtctcaagcacccgccggagcagctcagacacctccgcttagcccaccttggtctcagccttggcaccctatccacctcgctttagcgtctccgcgcccaaatatcccccttcgctcgggccccgcttgcaggcctcccctgcagctccaagaattgttcacccggagtcttgcagaatccgagctgaggtcagccccgtatgaatttccggaggaatcaccaatcgagcagttggaggaacgacgccaacggttggagaggcagattagccaggacgtgaaactggaacccgacatcctgttacgcgctaagcaggacttcttaaagactgactccgactcagatctgcagctgtataaggagcagggggaagggcagggcgataggtccttgcgggaacgagacgtgctggaaagggagtttcagcgagtgacaatttctggtgaggaaaaatgcggagtgcctttcactgatctgctcgatgccgccaagtctgttgtcagggccctgttcattagggagaaatatatggcactgtcacttcaatcattttgccctaccactcgtcggtacttacagcaactggcagagaagccactcgagacccgcacatacgaacagggccccgacactccagtatcagctgacgcccctgtccacccaccagcactagaacaacatccatacgagcactgtgagcccagtactatgcccggcgacctgggcttgggcctccggatggtgagaggtgtggttcacgtgtatactaggcgcgaaccggatgaacattgcagcgaggtcgaactgccttacccagatctgcaggaatttgtggctgacgtgaatgtgctcatggcactcatcatcaacgggcctatcaaatctttttgttacaggcggttgcaatatttgtctagcaaatttcagatgcacgtcctgttaaatgagatgaaggaactcgccgcacagaaaaaggtgccacaccgcgacttttataatatcaggaaggtggacacccacattcacgccagttcttgcatgaaccagaaacacctgcttaggtttatcaagcgcgctatgaagcgacaccttgaagaaatcgtgcacgttgagcagggacgtgaacagacactgcgggaggtatttgagagcatgaacctgacggcctacgacctttccgttgacacactggacgtgcacgccgacagaaatacatttcacaggttcgacaaatttaacgctaagtataatccgatcggcgagagcgtgctaagagaaatttttatcaaaaccgacaatagggtgagtgggaaatattttgctcatattatcaaggaggttatgagcgatttggaagaaagtaagtatcagaatgcagagctaaggctgagcatatatgggcgctcaagggacgagtgggataaactggctaggtgggccgtgatgcatcgagttcacagtcctaacgtcagatggctcgttcaggtccctcgtctgttcgatgtgtatcgaaccaagggccaactcgcaaactttcaggagatgttagagaacatctttctgcccctgtttgaggcgaccgtgcatccggcatcgcaccccgaacttcaccttttccttgaacacgtggatgggtttgatagtgtcgacgatgagagcaagcccgaaaaccacgtgttcaatttagagagcccccttccagaggcctgggttgaagaagataaccccccttatgcttattacctttactacaccttcgcaaatatggcaatgttgaaccatttacgccgtcagagaggcttccacaccttcgtgctgcggccgcattgtggcgaagcgggtccaatccatcatttagtgagcgccttcatgttggccgaaaacatctctcatggtctgctactgaggaaggcccccgtgctgcagtacctctactacttggcccaaattggaattgctatgagccccctgagcaataactccctgtttctgagctaccatcggaatcccttgccagagtacctgtcaaggggcttgatggtgtctctgtctactgacgatcctctgcagttccactttacgaaggaacccttgatggaggagtacagcatcgccacacaggtctggaaactatcaagttgcgacatgtgtgaacttgctcggaactcagtgctgatgtcaggattttcacataaagtgaaatcacactggctcggacccaattacaccaaggagggacccgaggggaatgacataagacgtacaaacgtccctgatattcgggtaggttatcgatacgagactctgtgccaggagctggctttgatcacccaggctgtgcagtctgaaatgctcgagaccatcccagaagaggcaggtatcacaatgtcgccagggccgcagtag

SEQ ID NO: 107459 - DNA, 2283 bp, synthetic construct
  misc_feature 1..2283: note = Description of Artificial Sequence: Synthetic coding sequence
  source 1..2283: mol_type = other DNA
atgctgacattcctgccctcccctcaggaactgtttaccagaagcctagctgagtctgagctgcgatccgcaccatacgagttccccgaagaatctccgatcgaacaactggaagaacggcggcaacgcctggaacgccagatctctcaggacgtcaaactggagcctgacatcttgcttcgcgcaaaacaagacttcctaaagaccgattccgactcggatttgcagctttacaaggagcagggtgaaggccaaggagaccgcagcttgagggagagggatgtacttgaacgcgaatttcagcgcgtgacaatcagcggggaggagaaatgtggtgtcccatttacagatcttctagatgccgctaaatctgtcgttagggcgctctttattcgcgagaaatatatggccctgtctctgcagtccttttgccccacaaccaggagatatctgcagcagcttgccgaaaagccactggagactcggacctacgagcaagggcccgatacaccggtgtccgctgatgctcccgtgcaccctccagcccttgagcagcacccttatgagcattgtgagccctctactatgcctggagacctggggcttggactgcggatggtccgtggtgtggtgcacgtatacacacgccgggaaccagacgagcactgctccgaggtggagttaccctatccggacctccaggagttcgttgccgatgtgaacgtgttaatggccctgataattaatggacctataaagtccttttgttatcgaagactccagtatctcagctccaagtttcagatgcacgtcctcctcaacgagatgaaggaactcgccgctcaaaaaaaggttcctcacagggatttttacaatatacggaaggttgatacccacattcacgcaagctcctgtatgaatcagaaacacctgctaaggtttattaaacgcgctatgaagagacaccttgaggagatcgtgcatgtggaacagggtcgggagcagacactgcgggaggtgtttgaatcaatgaacctgaccgcctacgacctttctgtggatacccttgacgtgcacgccgacagaaatacctttcatcggtttgacaaattcaatgctaagtataaccccattggagagagcgtgcttcgagagatcttcattaaaaccgacaaccgcgtgtcaggaaagtatttcgcacacataatcaaagaggtcatgagcgacctcgaggagtccaagtatcagaatgctgagctgaggctcagcatctacggcaggtcccgggatgagtgggacaagctggcacgatgggccgtgatgcaccgggtccattcacctaacgtcaggtggctagtgcaggtgcccaggctttttgacgtgtacagaacaaagggtcagttggcgaattttcaggaaatgttagagaacattttcttacctctgttcgaggcaacggttcaccccgcgagccaccctgagctacatctgttcttggagcatgttgacgggtttgacagcgtggatgacgagtctaaacctgaaaaccatgtcttcaatttggagtccccacttcccgaggcctgggtggaagaggacaatccgccctatgcctactatctgtattataccttcgccaatatggctatgctgaaccatttgagacggcaaagagggttccataccttcgtgctgaggcctcattgcggagaggctggacctattcaccacttggtctccgcattcatgttggctgaaaatatttcacatggcctgctgctgagaaaggcgcccgttttacagtatctgtactacctagcgcagattggaattgctatgtccccattgagcaacaacagtctgtttctcagttaccacagaaacccactacctgagtacctcagccgtggactcatggtgtccctgtcaacggatgatcccttgcagttccactttaccaaggagcccttgatggaggaatacagtattgcaacccaggtatggaagttgagcagctgcgatatgtgtgagctggcccgaaactccgtgctgatgtcaggttttagtcataaagtcaagagccattggctgggtcccaactacaccaaggagggcccagagggaaacgatatcaggcgcactaatgtgccagacatccgagtcgggtaccgctatgagactttgtgccaagagcttgccctgataactcaggccgtgcagtctgagatgctcgagaccattccggaggaagcagggattaccatgagcccaggccctcagtag

SEQ ID NO: 107460 - skipped

SEQ ID NO: 107461 - DNA, 2640 bp, synthetic construct
  misc_feature 1..2640: note = Description of Artificial Sequence: Synthetic coding sequence
  source 1..2640: mol_type = other DNA
atgcggaatcgaggacagggactgtttaggctcaggagccgatgtttcctgcatcaatcattgccgctaggagcaggacgtcgaaagggcttggacgtggctgagcctggaccttcgagatgccgctccgactccccggctgtggcagccgtcgtgcctgcaatggccagttacccgtctggatcaggcaaaccaaaggcaaagtacccttttaaaaagagggcctctctgcaggcctcgaccgcggcaccggaagctagaggtggcttgggcgcccctcctttgcagtcagcccggagcttgcccgggcccgcaccctgtctaaagcactttcctttggatctgcgcacctctatggacggcaaatgtaaggaaatcgcggaagaactcttcacgaggagcttggccgaatctgaactcaggtcagctccttatgaatttcctgaagagtcgccaattgagcaactggaggagaggagacagaggcttgaacgacaaatctcccaggacgtgaagcttgagcctgatatcctactgcgtgccaagcaggatttcttaaagactgatagcgactctgacttacagttgtataaagaacagggcgaaggacaaggggaccgcagcttgagggagagggacgttctcgagagggaatttcagcgcgtgacaatctcaggcgaggaaaagtgcggggtgccctttactgatctgctggacgccgccaagtcagttgtgagagccttattcatccgtgagaagtatatggccctgtcacttcagtccttttgtcccactacacgcagataccttcaacagctggccgaaaagcccctggagactagaacgtacgaacagggccccgacactcccgtctccgctgacgccccagtgcaccctccagcccttgaacaacacccatacgaacactgcgaacccagcaccatgcctggcgacctgggtctggggctgcggatggtgaggggggtggtccacgtctacaccagaagagagccagatgaacactgtagtgaggtcgagcttccctatcccgacctgcaggagttcgtggccgacgtgaacgtgctcatggctcttataattaacgggccaattaagtcattttgctacaggcggctgcaatacctctcgtcaaaattccaaatgcacgttctgctgaatgagatgaaagagctggcagcgcagaaaaaagtaccccatcgcgacttctacaacataaggaaagtggacacgcacattcacgctagttcctgtatgaatcagaaacatcttctgcggtttataaaaagggcaatgaagagacacctggaagagattgtgcacgtggagcaggggcgcgaacagacactccgcgaagtcttcgagtcgatgaacctcaccgcctacgatcttagcgttgatacattagatgtacatgcagacaggaacacattccacaggttcgacaaattcaacgccaaatacaatcctatcggggagtccgtgctgcgggagatatttatcaagaccgataatcgggtgtctggcaaatatttcgcacacataatcaaggaggtcatgtctgatctggaggagagcaaatatcagaacgcagaactccggctgtctatctacggaaggtcccgagatgagtgggacaagctggcccggtgggctgttatgcatagagtgcactcgcctaacgtcaggtggctggtgcaggtgccacgcctgttcgatgtatacaggacaaaaggccagctggcaaactttcaagagatgttggagaatatcttcctcccactgtttgaggccaccgtccaccccgcttcacatcccgagcttcacctgttccttgaacacgtggacggcttcgatagcgttgacgatgaatcaaagccagaaaatcacgtgtttaacctagaaagtccactgcccgaggcatgggtggaggaggataatcctccgtatgcgtactacttatactatacgtttgcaaatatggccatgcttaaccatctaaggcgtcagcggggttttcacaccttcgtgctccgaccccactgcggcgaagcaggacctatccaccatctcgtatcagccttcatgctggccgagaatatatctcacgggttgctcctccgaaaagcccccgtacttcaatatctatactatttggctcaaatcgggattgctatgagccccctctccaataattccctctttctgtcgtatcatcgcaaccccctccctgaatacctctcccggggacttatggtgagcctttcaaccgacgaccctctgcaatttcatttcaccaaggagcccttaatggaggaatattcaatcgctacacaagtgtggaagctcagctcatgtgacatgtgtgagctggcgcggaacagtgtcctcatgagcggattttcccataaagtgaagagccattggctaggtccaaactacaccaaagagggtccagagggtaacgacatccgccgcaccaacgttcctgatattcgagtgggctatcggtatgaaacactgtgccaggaacttgctttaatcactcaggcagtgcagtcagaaatgcttgagaccatccctgaggaagcgggaatcaccatgagccctggacctcagtag

SEQ ID NO: 107462 - DNA, 312 bp, synthetic construct
  misc_feature 1..312: note = Description of Artificial Sequence: Synthetic coding sequence
  source 1..312: mol_type = other DNA
atggcctcagaggctaggggtgggttaggcgcacctccgctgcaaagcgctcgctctctcccggggcctgccccttgtcttaaacattttcctctggacctgcggactagcatggatggaaaatgcaaggaaattgctgaagagctgttcaccaggagtttagccgagtccgagctgaggagtgcgccgtacgagttccctgaggagagcccgatcgagcaactggaggagcgcagacagcgcctggaaagacagatctcacaggacgtgaagctggagccggatatcctactgcgggccaagcaggactag

SEQ ID NO: 107463 - DNA, 2304 bp, synthetic construct
  misc_feature 1..2304: note = Description of Artificial Sequence: Synthetic coding sequence
  source 1..2304: mol_type = other DNA
atgcccaggcagtttcctaagctcaacatcagcgaggtcgacgagcaagtgcgccttctggcggaaaaggtcttcgccaaagtcttaagagaggaagattccaaggacgctttaagcttgttcacagtgcctgaagactgccccatagggcaaaaggaggccaaagagagagagcttcagaaagaactcgcggagcagaagtcggttgagaccgcaaagcggaaaaagagctttaaaatgattcgctcccagtctctgtcgctgcagatgccaccacagcaagactggaagggccccccggctgcctcaccggcaatgtctcctactacacccgtggtgactggcgccaccagtctgcccacgcctgccccttatgcaatgcccgagtttcagcgggtcactatctcgggcgactactgcgctggtatcacgctggaggattatgagcaggctgcgaagagcctcgcgaaggcattgatgattcgggaaaagtatgctcggctggcttaccacagattcccacgtattacctctcagtatctcggccacccacgcgccgacaccgcgccacctgaggaaggactccctgattttcacccccctccgctaccacaggaagacccgtattgcctggacgatgccccaccaaacctggattaccttgtgcacatgcaggggggtatacttttcgtatacgataataagaaaatgcttgaacatcaagagcctcacagcttgccctatcctgatctcgaaacgtataccgtagacatgtctcatattttagcactaatcaccgacggtcccacaaaaacctactgccaccggaggctgaacttcctggaaagtaagttttccctccatgaaatgttaaatgagatgtccgagtttaaggagctcaaaagtaatccccacagagatttttacaatgtccggaaggtggatacgcacatccatgccgctgcctgcatgaaccaaaaacacctgttaagattcataaaacatacttaccagactgaaccagaccggaccgtcgctgagaaacgtggcaggaagattacgctacgacaggtatttgatggcttacatatggacccctacgacctgacagtggacagtttagatgtccacgcaggcaggcagacttttcaccgctttgacaagttcaattccaagtataatccagtgggtgcttctgagctccgggacctgtacctcaagacagagaactatctcggaggagaatatttcgccaggatggtgaaggaggtggccagggagctggaagagtctaaataccaatatagcgaacctcgcctgtctatctacggcagatcacccgaagagtggccaaacctggcatattggtttatccaacacaaggtgtactcccctaacatgcgatggataatccaagtgccccgaatctacgatatttttcggagtaagaaattgctgcccaactttgggaaaatgctggagaatattttcctgcccctgttcaaagcgacgatcaatcctcaagatcaccgcgaactccatctttttctgaagtacgtgaccgggtttgatagcgtagatgacgagtcaaaacactctgatcatatgttctccgacaaatccccgaatcccgacgtctggacaagcgaacagaatccgccatactcttattacttgtactacatgtacgccaacataatggtgctcaataacctgagaagggaacgcggcctctctacgttcttgtttagacctcactgcggagaagctggctctattacacaccttgtgtctgcctttcttacagctgacaatatctcacacggcttacttctcaagaagagtccagtcctccaatacttatattaccttgctcagatccctatcgccatgagccctctgtcaaataactcgctgttcctggaatatagtaaaaaccccctacgtgagttccttcataagggattacacgtgtctctatctacagacgaccctatgcaattccactacacaaaggaggccctgatggaagaatatgccatagccgcacaggtgtggaagttgtccacatgcgatctttgcgagatagctagaaactcggtacttcagtctggactcagccaccaggaaaaacagaaatttcttgggcaaaattattataaggaggggccggagggcaacgatatcaggaaaacaaatgttgctcagatcagaatggcatttcgttacgaaactctgtgcaatgaattgtcatttctgtctgatgctatgaagagcgaggagatcactgcactgaccaactag

SEQ ID NO: 107464 - DNA, 2331 bp, synthetic construct
  misc_feature 1..2331: note = Description of Artificial Sequence: Synthetic coding sequence
  source 1..2331: mol_type = other DNA
atggctttgtcttcagaacccgccgagatgccacgccagttccccaagctcaacatctccgaagtggatgaacaggtacggctgctggctgaaaaagtctttgccaaagtcctgagagaggaggactctaaagatgctctctccttatttacagtgcccgaggactgcccaattggacagaaagaggccaaagagcgggagttgcaaaaagagctggcagaacagaagtccgtggaaaccgctaagagaaaaaagtctttcaagatgatcaggagtcagtcgctgagtctacagatgcctcctcagcaagactggaagggtcccccagccgccagcccagcgatgtctcccacaactcctgtggttactggcgccactagccttcccacccctgccccttacgccatgccagaatttcagagagtcaccatctctggggactactgcgccggcataaccttggaggattatgaacaagccgccaaaagtctggccaaagcactcatgatcagagagaaatacgctaggctggcttaccacaggttccctcggattactagccagtatctgggtcatccccgcgcagataccgctccaccagaagaaggcctgcctgacttccatcctccaccgcttccacaagaggatccctattgcctagatgacgctccccccaatctggattacctggtgcacatgcagggcgggattctgttcgtgtacgataataaaaagatgctcgagcatcaagagccacattcgctcccctatccggacctcgagacttatactgtggatatgtcccatatcctcgcactgattaccgacggtcccaccaaaacgtattgtcacagaagacttaactttttggagtcaaagttttcactgcacgaaatgctgaacgagatgtctgaatttaaggagctcaaaagtaacccccacagggatttctataatgtccgtaaagtggacacccatatacacgctgccgcctgcatgaatcagaaacacttacttaggttcatcaaacatacttaccaaaccgagccagatagaacagtcgcggaaaaaaggggaaggaaaatcactctccggcaggtatttgacgggctgcacatggatccctacgacctgaccgttgattcccttgatgtccatgcgggacgtcagacgttccacagattcgacaagtttaacagtaagtataatccagtaggtgcctctgaattacgcgacctatacctgaaaactgaaaactatctcggaggcgagtatttcgcccgcatggtgaaagaggtggcccgcgagctggaggaatctaaataccagtacagcgagcctaggctgtcaatttacggccgatcacccgaagaatggcctaacttggcttactggttcatccaacataaggtgtacagccccaacatgaggtggataattcaggtaccgagaatttatgatattttcaggtccaagaaactgttacccaacttcgggaaaatgttggaaaatattttcctccccttgtttaaggccacgataaatccgcaggaccaccgcgaattgcatctgttccttaagtatgtcaccggttttgattctgtggatgatgaatccaaacattcagatcatatgttctcagataagagtcccaaccccgatgtatggacttccgaacagaatccaccttactcctattacctttactacatgtacgctaacattatggtactgaacaacctccgccgtgaaagagggctttcaacttttctgtttcgaccgcattgtggcgaggcaggctctataacacacctggtgagcgcgttcctcacagccgacaacatctcccatggtctgcttctgaagaagagtcccgtgctgcagtatttgtattacctggcccagatacctatcgctatgtccccactgtccaataatagcctgttcctagaatacagcaagaaccctctaagagaatttttgcacaaaggcctgcacgttagcctgagcaccgatgatcccatgcagtttcattatacaaaggaagccctgatggaggagtatgccatcgccgcccaggtgtggaaactgtcaacctgcgacctctgcgagatcgcaagaaattctgtgctgcagtccggcctctcacatcaggagaaacagaagttcctaggacagaattactacaaagagggcccagagggcaacgacattcgcaaaacaaatgtagcccaaattagaatggccttccggtacgagactttgtgcaacgaactgagcttcctctctgacgctatgaagagcgaggaaataacagcccttacaaactag

SEQ ID NO: 107465 - DNA, 1827 bp, synthetic construct
  misc_feature 1..1827: note = Description of Artificial Sequence: Synthetic coding sequence
  source 1..1827: mol_type = other DNA
atgattcgggagaaatatgccaggctagcataccacagatttcctcggatcacatcacagtacctggggcatccccgggccgataccgcaccacctgaagagggcctgcctgacttccaccccccgcccctcccacaggaagatccctattgtctcgacgacgctccccctaaccttgattacttggtccacatgcaagggggtatcttgtttgtctatgacaacaagaagatgctagagcatcaagaaccccatagtctaccttatcctgatcttgaaacatacaccgtggatatgtctcatatcctggctcttatcactgacggacccaccaaaacctattgccatcgacggctcaacttcctcgagtcaaagtttagcctgcacgaaatgctgaatgaaatgtctgaatttaaagaactcaagagtaatcctcatagagatttttacaacgtcagaaaggtggacacacacatccacgccgccgcatgtatgaaccagaagcacctgctcagatttatcaaacatacatatcaaaccgaaccagaccggacggtcgctgagaaaagagggcgaaaaatcaccctgcgacaggtcttcgacgggctgcacatggatccttatgacctcaccgttgatagcctggacgtgcacgcaggtcggcagacattccatcggtttgataagttcaatagcaagtacaaccctgtaggagccagtgagctcagagatctgtacctgaaaactgaaaactacctgggcggtgaatactttgctcgcatggtgaaggaggtcgccagggagctagaagaaagcaaataccagtactcagagcctcgtctctctatttacggcagatctcctgaggagtggcctaatctcgcctactggttcattcaacacaaggtttactcgcccaacatgcggtggatcatccaggtgccacggatttatgatattttccgctcaaaaaagctgcttcctaatttcgggaagatgttagagaacatcttcctgccgctgtttaaagctacaatcaatccacaggaccatcgagagttgcacctgttcctgaaatacgtgacaggctttgatagcgttgatgatgagtccaagcacagcgaccatatgttctcagacaagagtcctaacccagacgtatggacctccgaacaaaaccctccctattcctactatctctattacatgtacgccaacattatggtgctgaacaacttgagacgtgagagaggcctcagcaccttcttgttccgtcctcattgcggagaggccggctctattacccacttggtcagcgcattcttgaccgcagacaacatttcccacggtctgctccttaaaaagtccccagtgctccaatacctatactacctcgcacagatcccaatagcgatgtctcctctgtctaacaattccttattcctggagtacagcaagaacccactgcgcgagtttctgcacaaaggtctgcacgtgtccctttccaccgatgaccctatgcagtttcactatacgaaagaggcactcatggaggagtacgctatcgccgctcaggtgtggaagcttagcacctgtgacctgtgtgagatagctagaaattcagtcctgcagtccggcctgagtcaccaggagaaacagaagttcctcggacagaactattataaagaaggcccagaaggaaacgatataaggaaaacaaacgtcgcacagatacgtatggcgtttagatacgagaccctatgtaatgagctgtcgtttctttccgatgctatgaagtccgaagagattactgctcttacgaattag

SEQ ID NO: 107466 - DNA, 804 bp, synthetic construct
  misc_feature 1..804: note = Description of Artificial Sequence: Synthetic coding sequence
  source 1..804: mol_type = other DNA
atgccaaggcaatttcctaaactgaacatatcagaagttgacgaacaggtgcggcttttggctgagaaggttttcgctaaagtgttacgcgaggaggacagcaaggacgcactctctctctttaccgttcccgaggactgcccgattggacaaaaagaggcgaaggagcgggaactgcagaaagagctcgccgaacagaaatccgtggagacagcaaaacgcaaaaagtcctttaaaatgatccgctctcagtccctctctctgcagatgcccccacaacaggactggaaaggtccgccagccgcctcccccgccatgtcccccacaacccctgtggtgaccggagccaccagcttacccacgcctgcaccctatgctatgcctgaatttcaaagggtaactattagcggcgactattgtgctggtatcaccttggaagactacgagcaagcagcaaagtccctcgcaaaagcgttgatgatcagggaaaaatacgctagactcgcctatcacagattccctcgtattacttcgcagtacttaggtcacccacgtgccgacaccgcccctcctgaggaaggcctcccagatttccaccctcctccccttccgcaggaggatccgtactgtttagacgacgcaccacccaacttggattatttagtgcacatgcagggtggcatactcttcgtatacgataacaagaagatgcttgagcatcaggagcctcattcattgccctaccccgatctcgaaacgtatacagtcgacatgtcccatattctggcattgatcacggattag

SEQ ID NO: 107467 - DNA, 2325 bp, synthetic construct
  misc_feature 1..2325: note = Description of Artificial Sequence: Synthetic coding sequence
  source 1..2325: mol_type = other DNA
atggagcccggctccgcagagatgccccggcagttcccgaagttaaacatttctgaagtagacgaacaggtccgacttttagctgagaaagtgttcgccaaagtgcttagggaggaggatagcaaggatgccctctcactgttcactgtgcctgaagattgtcctatcggccaaaaggaggccaaggagagagaactgcaaaaggagttggctgagcagaagagcgtggagaccgctaagcgaaagaagtcttttaaaatgatcagaagccagagcttgtctcttcaaatgcctccgcaacaggactggaaaggcccccctgctgcctcaccggctatgtctcctacgacacccgtcgtgaccggtgccacatccctgccaactcctgccccttatgcgatgcctgagttccaacgcgtaacaatttcaggagattactgtgctggtatcactctcgaggactacgagcaggcagccaagtcactggcaaaagccctgatgattcgagagaagtacgcccgactggcttaccacaggttccccaggatcacttctcaatatttgggccatccacgagccgatacagcaccgcccgaagaggggctacccgattttcatccgcctcctttgcctcaggaggatccctactgccttgacgatgcccctccaaacctcgactacctggtgcacatgcaaggggggattctgttcgtttatgataataaaaaaatgctggagcaccaagaacctcacagcctgccataccctgacctggaaacctatacagtagatatgtctcacattctggcactgatcaccgacggcccaaccaagacatattgtcaccgccggctcaattttttagaatctaagttttccctgcacgagatgctgaatgagatgagcgagttcaaggagctgaagagtaacccgcaccgggacttttacaatgtccggaaagtggatacgcacatccacgccgccgcctgcatgaatcagaagcacttgctgcgcttcatcaaacatacttaccagactgaacccgacaggactgtcgcagagaagagagggaggaagatcactcttagacaggtgtttgacggcttacacatggatccatatgacctgactgtggacagtttggacgtccacgccggccgccaaactttccacagatttgacaaatttaatagtaaatataaccccgtgggcgcctccgaactaagagatttatatctgaaaaccgagaactacctgggcggcgaatattttgctcgaatggtgaaggaggttgcaagagaattggaagagtcaaagtaccagtacagcgaaccgaggctgtcaatttatggtaggagtcccgaagagtggccaaatctggcgtactggtttatccaacacaaggtgtatagccccaatatgcgatggatcatccaggttccgcgaatctacgatattttccggtcaaagaaactccttcctaattttggtaagatgcttgagaacatcttcctgcctttgtttaaggcgaccattaaccctcaggaccatcgggaactccacttgtttctgaagtacgtcacgggctttgactctgttgacgacgaaagcaaacatagcgaccacatgttcagtgacaagtcccctaacccagacgtgtggacctcagaacaaaatcctccctattcatactacttatactacatgtatgccaacattatggttctgaacaacctgaggagggaacggggtctgagcacgttcttgttccgccctcactgcggcgaggccgggtctattacacaccttgtgagcgctttcctgacagctgacaacataagtcacgggctgctgctaaagaagagtcccgtgctgcagtatctgtactatctggctcagatcccaatagcaatgtctccactctcaaacaatagcctgtttttagagtacagtaagaatcctcttagggaatttttgcataaaggtctccacgtgagcttgtccacagatgaccccatgcagttccactataccaaagaagcacttatggaggaatacgctatcgctgcccaggtgtggaagttgtcgacctgtgatctgtgtgagattgcccgaaactccgtgctgcaatctggtctttcccatcaagagaagcagaaattcctgggtcaaaattactataaggaggggccagaaggcaatgacatcaggaaaaccaatgtggcccaaatccgcatggcattccggtacgaaactttatgtaatgaactctccttccttagtgacgctatgaagagtgaagagatcacagctttaaccaattag

SEQ ID NO: 107468 - DNA, 2304 bp, synthetic construct
  misc_feature 1..2304: note = Description of Artificial Sequence: Synthetic coding sequence
  source 1..2304: mol_type = other DNA
atgcccaggcagtttcctaagctgaatatctcagaggtggatgagcaagttagattgctggctgaaaaggtatttgctaaagtgctgcgggaagaagacagtaaagatgccctatctctgtttacggtaccagaggattgccctatcggccagaaggaagctaaagagagggagctgcaaaaggagttagcagaacaaaaatcagtagagacagccaaaaggaaaaagagcttcaagatgatccgctcacagtccctgtcgctgcagatgcctccacagcaagactggaagggcccccctgccgcctcacccgccatgagccctacaaccccagttgttacaggggccacatccttgcccactcctgccccctacgcgatgcccgaattccaacgcgttaccataagcggggattattgtgcaggcataactttggaagattacgaacaagccgccaaaagtttagcaaaggccttgatgatcagagaaaagtacgccaggctggcctaccaccgttttcctagaattacctcacagtacctcggtcacccccgcgctgacaccgcgccccctgaggagggcctcccagacttccacccgccacccctaccgcaagaggacccatactgtctggacgacgctcctcctaatctggattacctggtccatatgcagggaggaatcctcttcgtgtacgacaataaaaagatgctcgaacaccaggaacctcacagcttgccttacccagatctggagacatatactgtggacatgtcccatatcctggcactgatcaccgatggccccacaaagacctactgtcaccgccgcctgaactttctggagtccaagttttctctgcacgagatgctcaatgaaatgtctgagtttaaggaattaaaatccaatcctcacagggatttctacaacgtgagaaaagtcgacacacacatccatgccgccgcctgcatgaaccagaagcacctcttgcgttttattaaacatacttatcagacagagcccgaccgaacagtagccgagaagagaggccggaagatcactctgcgccaagtctttgatggcctgcatatggacccctacgacctgactgtggatagcctcgacgtccatgctggtcgtcaaacatttcacaggtttgataaattcaacagtaagtacaaccctgtgggggccagcgagctcagggacctctatctaaaaactgagaactatctcgggggagaatatttcgcccggatggttaaggaggtcgccagagaactggaagagagtaagtaccagtacagcgagccacgcttatccatttatggaagaagcccggaagagtggcctaatctggcctattggtttatccagcataaggtttactcacccaatatgagatggatcattcaagtgccacgaatatacgatatttttcgcagtaagaaactcttgcccaattttggaaaaatgttagagaacatctttttgcccctctttaaggccaccataaatcctcaggatcaccgggaactccacttatttttgaagtatgtgaccgggttcgactctgtggacgatgaatctaagcactctgaccatatgttcagcgacaagtccccaaatccagatgtttggactagcgagcagaacccaccgtactcgtattacctgtactatatgtacgccaacattatggtcttgaacaacttaaggagggagcgcggcctgtcaacttttttgttcagacctcattgcggagaggctggctccatcactcacctagtaagcgcctttcttactgctgataatatttctcatggcttgctcctcaaaaaaagccccgtgctgcagtacttatattacctagcccagattccgattgccatgtctccactctcgaataactcactgtttttggagtattcgaagaacccgctgagagaattcctgcacaaaggtctacatgtgagcctgagtacagacgatcccatgcagttccactacactaaagaggcactcatggaggagtatgcgatcgcggcacaggtctggaagctgtcaacctgtgacctgtgtgaaattgctcggaactccgtgctgcaatctggactttcccaccaggaaaaacaaaaatttctcgggcagaattattacaaagagggacctgaagggaatgatatccggaaaactaacgtcgcccagatacgtatggcatttcgttatgagaccctctgcaatgagttgtctttcctttcagacgctatgaagtcagaggagatcacagctctgacgaactag

SEQ ID NO: 107469 - DNA, 336 bp, synthetic construct
  misc_feature 1..336: note = Description of Artificial Sequence: Synthetic coding sequence
  source 1..336: mol_type = other DNA
atgcctagacagtttccaaaattaaacatatccgaagtggacgaacaggttcggctgctggccgagaaggtgttcgccaaagtcttacgcgaggaggattcaaaggacgccctgagcctgtttaccgtccctgaggactgccccattggccaaaaagaggccaaagaacgggaactgcaaaaggaactggctgaacagaaatccgtcgagactgctaagagaaaaaaatctttcaaaatgatacgaagccaatcactgtctctgcagatgcccccacagcaggactggaagggtccgccggccgcaagccccgctatgtctccaactacaccttag

SEQ ID NO: 107470 - DNA, 426 bp, synthetic construct
  misc_feature 1..426: note = Description of Artificial Sequence: Synthetic coding sequence
  source 1..426: mol_type = other DNA
atggcccgccctctgtgcaccctgctcctgctcatggccaccttagcgggagccctagctagctccagcaaggaagagaataggataattcctggcgggatctatgacgccgacctcaacgacgagtgggtacaaagggcactgcatttcgcgatctcagagtataacaaggccacagaagacgagtattatcggaggcccctgcaggtactgcgagctcgggagcagacctttgggggagtgaattactttttcgacgtcgaggttggccgtaccatatgcacaaaatcacagcctaacctggatacatgcgccttccacgagcaaccagagttgcagaaaaaacagctatgttcttttgagatatacgaagtgccctgggaagaccggatgagcttggtaaacagtcggtgtcaggaggcatag

SEQ ID NO: 107471 - DNA, 1215 bp, synthetic construct
  misc_feature 1..1215: note = Description of Artificial Sequence: Synthetic coding sequence
  source 1..1215: mol_type = other DNA
atgcccggcttaatgcgcatgcgagaacgctattccgccagcaagcctctaaagggcgctcggattgcaggctgcctgcatatgaccgtggagacggctgtactgatcgagactctggtaactttgggagctgaagtgcagtggtcaagttgtaatatcttcagcacccaggaccatgctgcagcggctatcgcaaaagcaggaatcccagtgtatgcatggaaaggggagacagacgaagagtacttatggtgcatcgaacagacactgtacttcaaagatggacccctcaatatgatcctagacgatgggggggacctgactaatctgattcacacgaaatacccacagttactgccaggaatcaggggaatctccgaagagactacaactggagtacataacttatataagatgatggcgaacggtatattaaaggtgccagctatcaacgttaacgactctgtcaccaaatcaaaatttgataatctttacggctgtcgggaatctcttatcgatgggatcaagcgggctacagatgtgatgatcgctggcaaagttgcagtcgtggctggctacggcgatgtaggtaagggctgtgcccaggccctgcggggtttcggcgccagggttatcattaccgagatcgacccgatcaatgctctccaggccgcaatggagggctatgaggtcacaacgatggacgaagcctgtcaggaggggaacatcttcgtcaccacaaccggctgcattgatatcatcctcggacggcatttcgaacagatgaaagatgatgctatagtctgcaatattggacacttcgatgttgagattgatgttaagtggctgaacgagaacgcagtggagaaagtgaatatcaagccgcaggttgatcgatacaggctgaaaaacggacggcgcattatcctgttggccgagggccgcttggtgaacctgggctgtgccatgggtcacccaagctttgtgatgtctaattcattcactaatcaggtgatggcccaaattgagttgtggactcacccagacaaatatccagtcggagtccactttctcccaaaaaaactcgacgaagctgtggcagaagcacacctggggaagctgaacgtgaagctgacgaagctgacagagaagcaggcccaatacctagggatgtcttgtgacgggccattcaaaccggaccattaccggtactag

SEQ ID NO: 107472 - DNA, 798 bp, synthetic construct
  misc_feature 1..798: note = Description of Artificial Sequence: Synthetic coding sequence
  source 1..798: mol_type = other DNA
atgttcgtgtccaagcggagatttatcctcaagacctgcggtactacacttctactcaaggctctggtgcctttgctgaagctggccagggattactctgggtttgattcgatccagtcattcttctactctcgcaaaaattttatgaaaccttcccatcaggggtaccctcatcggaattttcaggaagaaatagagtttctgaacgcaatattccctaacggggctgcctactgtatgggacgtatgaattcagattgttggtacttatacacccttgacttccccgagtctcgcgtcatcagtcagcccgaccagacgctggagatactgatgagcgaactcgatccagccgtgatggatcagttttacatgaaggacggagtaaccgcgaaggatgtgaccagggagtccggcattagagacctaatacctggttcagttatcgacgctacaatgttcaatccttgtgggtatagcatgaacgggatgaaaagtgacgggacatactggacaatacatattacacccgaacctgagtttagctacgtgtccttcgaaaccaatctcagccaaacaagctacgacgacctcattcggaaggttgtggaggtgttcaagcccggaaaattcgtaaccacattgttcgttaaccagtcatctaaatgcagaaccgtgttggcatccccacagaagattgagggcttcaagcgactggattgtcaatcggctatgttcaacgattacaacttcgtgttcacatcgttcgctaaaaaacagcaacagcaacaatcgtag

SEQ ID NO: 107473 - DNA, 918 bp, synthetic construct
  misc_feature 1..918: note = Description of Artificial Sequence: Synthetic coding sequence
  source 1..918: mol_type = other DNA
atggaagcagcccacttcttcgagggaactgagaagctgctcgaggtttggttctctaggcaacagccagacgcgaaccagggttctggagacctccgtacaatcccatcggagagttccatgtttgtgtctaagcgtcgctttattcttaaaacctgtggtaccactctgctgctcaaggccctggtgccactcctgaagctggcgagagactattctggcttcgattctatccaatcattcttttactccagaaaaaattttatgaagccttcacaccagggctacccgcatagaaatttccaggaggagattgagttcctaaacgccatctttccaaacggcgccgcctattgcatgggacgaatgaattccgactgctggtacctgtacactttagactttccagaaagtagggttattagccaaccagatcagactttggagattctgatgagcgagctcgaccccgctgtgatggatcagttctacatgaaggacggtgtcacagcaaaggatgtcacacgagagtccgggatccgggatctgattccgggaagtgtcatcgacgcaaccatgttcaacccatgcggatattccatgaatgggatgaaatccgacggcacctactggacaatccacattacgccggagcctgaatttagctacgtgtccttcgagaccaacctatcccaaacttcatacgatgacttaatcaggaaggtcgtggaagtattcaagcctgggaagttcgtgactaccctttttgttaaccagtctagcaaatgccgcaccgtgcttgcttccccccagaaaattgagggatttaagaggctcgactgccagtccgcgatgttcaatgactataatttcgtgttcacttcttttgcaaaaaaacagcagcagcaacagtcatag

SEQ ID NO: 107474 - DNA, 561 bp, synthetic construct
  misc_feature 1..561: note = Description of Artificial Sequence: Synthetic coding sequence
  source 1..561: mol_type = other DNA
atggggcgcatgaattccgactgctggtacctctacaccctggacttcccggaatctagggtcatctcccagccggatcagaccctggagatactgatgagtgagctggaccctgctgtaatggaccagttttatatgaaagacggcgtgacagccaaagatgttactagggaatctggcataagggatctcatccccgggagtgtcattgatgccaccatgttcaacccctgcggctattctatgaatggcatgaaatcggatggcacttactggaccattcacatcacccctgagccagagtttagttacgtgagctttgagactaatctgagtcagacctcttacgacgatcttatccgtaaggtggtggaagtcttcaaaccggggaagtttgtgaccacgttgttcgtgaatcaatcaagcaaatgtcggactgtactcgcctctccacaaaaaatcgagggtttcaagaggctggactgccagtctgccatgttcaacgactataactttgtttttacgagttttgctaagaaacagcagcaacagcagagctag

SEQ ID NO: 107475 - DNA, 1005 bp, synthetic construct
  misc_feature 1..1005: note = Description of Artificial Sequence: Synthetic coding sequence
  source 1..1005: mol_type = other DNA
atggaagctgcccatttttttgagggcacggagaaattgctcgaggtttggttttcccggcagcaaccagatgcaaatcagggcagcggtgatctgcgtacaatcccccgaagcgagtgggacattttgctcaaggacgtccagtgcagtatcataagcgttacaaaaacagacaaacaggaagcctatgtgctttctgagagctccatgtttgtaagtaaacggcggttcatcctaaaaacttgtggaacgacgctgttgttgaaggctctagtgcccctcctgaagcttgctcgggattattccgggttcgattctattcaatcctttttctactcaagaaagaattttatgaagccaagccaccaaggctatccccacagaaactttcaggaagagatcgagttcctgaacgccatctttccgaacggggcagcttactgcatgggccggatgaatagcgactgctggtacctgtacaccctggattttcccgagtcccgtgtaatttctcagcccgaccagaccctggagattttaatgagtgagttagaccccgccgtcatggatcaattttacatgaaagatggcgtcactgccaaagatgtgacccgggaaagtggcattagggatctgattccaggaagtgtgatcgacgctacaatgttcaacccctgtggttacagcatgaatggaatgaagagtgatggcacctattggaccatacatattacacccgaaccagagttttcttatgtgtcgttcgagactaacttgtcccagacttcctacgacgacctcatcaggaaggtggtcgaggtgtttaagccgggaaagttcgtgacaacactgtttgttaatcagagttccaagtgccggacagttttggcttcgccccagaagatcgaagggtttaaacggcttgattgccagtctgctatgttcaatgactacaattttgtcttcacatcattcgccaagaagcagcagcagcaacagtcctag

SEQ ID NO: 107476 - DNA, 645 bp, synthetic construct
  misc_feature 1..645: note = Description of Artificial Sequence: Synthetic coding sequence
  source 1..645: mol_type = other DNA
atggaagcagctcacttctttgagggaactgaaaagttactcgaagtttggttttcgcgccagcaacccgatgcaaatcagggttcaggagacttacgcacaattcctagatatttatacactctggatttcccagaaagccgcgtcatcagccagccagatcaaacgcttgaaatcctgatgtccgagctcgatcctgccgttatggaccagttttatatgaaagacggagtgacagccaaggacgtgacaagagaaagtgggatccgagacctgattcccgggtccgttatagatgcaaccatgtttaacccctgtgggtattccatgaacggaatgaagagcgatggcacatattggactatacacattacccctgaaccagaattctcatatgtgtccttcgaaaccaacctcagtcaaacaagctacgatgatttgattagaaaagtggtggaagtctttaaaccgggtaagttcgtaacgaccctgttcgttaatcagtcttcaaaatgccgtacggtcctggctagccctcaaaaaatcgagggctttaagaggctggactgccagtctgccatgttcaatgactataattttgttttcacatcttttgctaaaaagcagcagcagcagcagtcctag

SEQ ID NO: 107477 - DNA, 3360 bp, synthetic construct
  misc_feature 1..3360: note = Description of Artificial Sequence: Synthetic coding sequence
  source 1..3360: mol_type = other DNA
atggccggggctccccgcggcggaggtgggggaggagggggtgcaggcgagccaggaggtgctgagcgtgccgcaggtacctctcgccgcagaggattgcgcgcatgcgacgaagaatttgcgtgtccggagctagaagcactgtttcgagggtacactcttagattggagcaagcagccacacttaaggccctcgccgttctctcactgttggccggcgccctggccttggcagaactgctcggtgctccaggtcccgcacctgggctcgctaaggggtcgcaccccgtccactgtgtcctctttctggcccttctggtagtgacaaacgtcagaagtctgcaggtcccacagctccagcaggtgggacagctggctctgctgtttagcctcacattcgcactcttgtgctgcccctttgcactcgggggccctgccagaggctcagccggggctgctggggggcccgccaccgctgaacagggcgtctggcagctacttctggtcacattcgttagttatgcactcctgccggtgcggtctctcctggcaatcggctttgggcttgttgtggccgcctctcacctgctcgtcacagcaacactggttcccgcaaagagaccgcggctatggaggacacttggggctaatgccctgctgttcgtgggggttaacatgtatggtgtattcgtcaggattctgacagagaggagccagcggaaggcattcctgcaggcccgctcctgcatagaagaccggctacggctcgaagacgagaatgagaagcaggagaggttattgatgtcacttctcccgaggaatgtagccatggagatgaaggaggacttcctgaagccacccgagcgcattttccataaaatctatattcagcggcatgacaacgtgtcaatcctgttcgctgacattgtgggctttaccggactcgcgagtcagtgcacagcacaggaactcgtcaaactgctgaatgaactgtttgggaagtttgacgagttggccacggaaaaccattgtagacggatcaagattctgggagactgctactattgcgtgtcaggtttaacgcagcctaagacagaccatgcccactgttgtgtggaaatgggactggatatgatcgacactattacttccgtcgccgaagccactgaagtggacctgaacatgcgtgtaggactccatacaggcagagtcctgtgtggagtgttgggattgcggaagtggcagtacgatgtttggtctaatgatgtcacccttgcaaatgtgatggaggctgcgggactccctggtaaggttcacatcacaaagacgaccctggcttgtctcaacggggactatgaggtggagccaggttacggacatgagaggaactccttcctcaaaacacacaacattgaaacctttttcatagttccctctcatagacgaaagatatttcccggcctcattctatctgacatcaagcctgcgaaaaggatgaaatttaaaaccgtctgctatctgcttgtgcaacttatgcactgcagaaaaatgtttaaagctgaaatccccttctccaacgtcatgacatgcgaggatgacgataagcgaagagcgttgaggaccgcctcggaaaaactccggaaccgaagcagcttctctactaacgtggtctataccactcccggcacgcgggtgaaccggtacataagtaggcttctggaagcaaggcagacagaactcgaaatggcagatctaaatttctttacactgaagtacaagcatgtcgaaagggaacaaaagtatcaccaattacaggatgagtactttacaagtgccgttgtgctaacgcttatactggcagcccttttcgggcttgtctatcttctcatctttccccagtcggtcgtcgtcctgctgctgctggtcttctgtatctgtttcttagttgcctgtgtattatacttgcacattacaagagtccaatgttttcccgggtgcctcactattcaaatccgtacagttctgtgcatttttattgtcgtgctcatttattccgtggcccagggatgcgtggtgggctgcctgccttgggcctggtctagtaagccaaactccagccttgtggtcctgagttccggcggacagagaaccgcgttgcctacactaccctgtgagtctacccatcacgccctgctctgctgtctggtgggtactctgcccctggccatcttcttccgtgtctcaagtctcccaaagatgatcttactgtctggactgacaacttcatacatcctggttcttgagctgtctggatacaccagaaccggcgggggagcagtgagcggtagatcctacgaaccaatcgtggcaatccttcttttttcatgcgcactcgctttgcacgcacggcaagtggacatcagactgcggctcgactacctgtgggctgctcaggccgaggaggagcgcgaagacatggaaaaagtgaagttggacaatcgccggattctcttcaacttgcttcccgcccacgtcgcccagcacttccttatgtccaatccccgcaatatggatctgtattaccaatcctacagtcaggtgggcgtgatgttcgcgtcaatcccgaatttcaacgatttctatatcgaacttgacgggaacaacatgggcgtggagtgtttgcggctgctgaatgagatcatcgcggatttcgacgagctgatggaaaaagatttctataaagacatcgagaagatcaaaaccatcggaagcacctacatggctgccgtaggcctggctccgaccagcggcaccaaagccaaaaagagtatctccagccacctctcgaccctggccgactttgccattgaaatgttcgatgtgctcgacgagattaactatcagtcatataatgacttcgtcctgcgtgtgggaataaacgtcgggcctgtagtggccggcgttatcggagctaggcgcccccagtatgacatctggggaaacaccgtgaatgtcgctagcagaatggactcgactggtgtacaaggtcgcatacaggtgactgaggaggtgcataggttgcttagacgctgtccgtatcactttgtctgtaggggtaaagtttccgttaagggtaagggggagatgctcacctacttcctggaaggcagaaccgacggcaatgggagtcaaatccggagtctgggccttgatcggaagatgtgcccattcggccgcgcaggcctgcagggacggcgcccgcccgtatgtcccatgccaggagtgtctgttcgtgctggattgccgccacactcccccggacagtacctcccatctgccgctgccgggaaagaggcatag

SEQ ID NO: 107478 - DNA, 3174 bp, synthetic construct
  misc_feature 1..3174: note = Description of Artificial Sequence: Synthetic coding sequence
  source 1..3174: mol_type = other DNA
atggcgggcgcccccaggggaggggggggaggtggcggaggggctggcgagcccgggggtgctgagagagccgctgggacgagcaggaggcgggggttgcgcgcatgtgacgaagaatttgcctgccccgaactcgaggccctgtttcggggttatactttacgattagagcaggccgcaaccctgaaagcgttagccgtgctcagtctgctggcaggagccctggcccttgcagaattactcggtgcacctggcccagcaccaggactggctaaggggtcccatcccgtgcactgcgtcctgttcctggctctgctagtcgttaccaacgtccggagcttacaggtgccccagcttcagcaggtgggacaactggccctattgttcagcttgactttcgccttgctttgctgcccttttgccctgggcgggccagcccgagggagcgcaggcgctgccggaggccccgccaccgcagaacaaggtgtctggcagttgctgctggtcaccttcgtcagctatgcactcctgccagtgcggtcgctcttggcaataggtttcgggcttgtggtggcagcgtcccatttactcgtaactgcaaccctcgtaccggctaagagacccaggctgtggaggaccctgggagcgaatgctctcttgttcgtgggcgtcaatatgtacggagtcttcgtgcgcattctaacggagcgcagccagcgaaaagcctttctgcaagctcgttcctgtatcgaggatcgcctgcgactggaagacgaaaatgagaaacaggagcgcctgttgatgtctctgctgcctcgtaacgtcgccatggagatgaaggaagacttcctgaagccccccgaacgcattttccataagatttacattcagcgacatgataacgtgtccatacttttcgcagatatagtcgggtttactgggctggcctcgcagtgtaccgcgcaggagctggtgaaacttctgaacgaactgttcgggaagttcgatgaactggccaccgaaaatcactgcaggcgcattaaaattctaggagactgctattattgtgtcagtggcctgactcagccgaaaacagaccacgcgcactgctgcgtggaaatgggactagacatgatagacactatcacctcagtggccgaagctaccgaagttgatttaaacatgcgtgttggactgcacaccgggcgggtactgtgcggggtccttggcctaagaaaatggcagtatgatgtgtggtctaacgatgttaccctggcaaatgtcatggaggccgcaggcttgcctggcaaagtgcacatcacaaagaccactttagcctgccttaacggggactacgaggttgaacctgggtacggccacgagagaaacagctttctgaaaacccacaatattgagacttttttcatcgtgcctagccacagacgaaaaatctttcccggtctgatactgtccgatatcaaacctgcaaagcgaatgaagtttaagactgtctgctacctcctggtacaattgatgcactgtaggaaaatgtttaaggctgagatccctttttctaatgtaatgacctgcgaggacgacgacaagaggcgagccctacgcactgcctccgaaaagttacgcaatagatcgtctttcagcacaaatgtggtatacaccacgccaggaacccgggtaaaccgttatatctctaggctgctggaggccagacagacggagctcgaaatggcagacttgaacttttttaccctgaaatacaagcatgtggaacgagagcagaaataccaccagctccaggatgaatacttcacctctgccgttgttctgacactcatcctggctgcattgtttggcctggtttacctcctgattttcccacagagtgtagttgtgctgcttttactcgtcttctgtatctgctttttagtcgcctgtgtgctgtatctgcatattaccagggtccagtgtttccctgggtgtctgacaatccagatcagaacggttctatgtatcttcatcgtggtcctgatctacagtgtagcgcaaggatgcgtggttgggtgtctgccttgggcctggtcctccaagcccaatagtagccttgtggtcctgtcaagtggagggcagcgaacagccctgcctactctgccttgtgagagcacacaccatgcactcctctgttgtctggtgggcacactgccattagccattttcttccgggtgtcatccctgcctaaaatgatactgttatccggcctgacaacctcgtatatcctagtgctggagctgtccggctatacacggacaggggggggtgctgtttctgggcgctcctacgaacccattgtggccatcctgcttttctcttgcgcgctcgccttgcatgcaaggcaagtcgatatacggctccggctggattacctgtgggccgcccaggctgaagaagaaagggaggacatggagaaagtgaaactcgataataggaggattctctttaacctcttaccggcccatgtcgcgcagcactttttgatgtctaatccaagaaacatggacctgtactaccagtcatattctcaggtgggtgtaatgttcgctagcatacccaacttcaacgacttttacattgagctcgacggtaacaacatgggtgtagaatgtctgagactacttaatgagataatcgctgacttcgacgagctgatggaaaaagacttttacaaggacatcgagaagatcaaaaccattggatccacttacatggcggccgtggggctggccccaacttctggcacaaaagccaagaagagtattagcagccacctctcaactctggcagacttcgccatcgagatgttcgacgttctggacgagataaactaccaaagctataatgactttgtattgagagtcggcatcaacgttggccctgttgtcgcaggggtcatcggggccaggcgccctcagtacgacatctggggcaacacggtcaacgtcgcatcgaggatggactccactggagtccaaggacgcattcaagtaactgaagaagtacaccgcctactgcggaggtgcccgcctctctgtgtacccagacaatctcagtgccagggtcagaggagagatgtggacatcctttcacgcagacaagattag

SEQ ID NO: 107479 - DNA, 3276 bp, synthetic construct
  misc_feature 1..3276: note = Description of Artificial Sequence: Synthetic coding sequence
  source 1..3276: mol_type = other DNA
atgtggcaggaggctatgagaagacggagatacctccgcgatcgcagcgaagaagccgccggcggcggcgatggactgccacggagtagagattggctttatgagagctattactgtatgagccagcaacaccctctgattgtttttctgctccttattgtgatggggagctgtctggcactgcttgctgtattttttgcattagggctcgaagtagaagaccatgtcgcattcctgataactgtgccaaccgcgctggccatcttcttcgctatcttcatactggtgtgcattgaatctgtgttcaagaaactgctgcgcctattctctctggtgatatggatctgccttgtagccatgggatatctgttcatgtgcttcggcgggactgtgagcccctgggatcaggtatcttttttcctgttcatcatcttcgtggtctacactatgctaccttttaatatgcgggacgccatcatcgcctcagtgctcacatccagttcacataccatcgtgctgagcgtgtgtctttccgctacgccggggggaaaagagcatctggtgtggcagattctggctaacgttataatattcatttgcggcaatctagctggggcctaccataagcatctgatggagcttgcattgcagcaaacctaccaggatacatgcaattgtattaaaagcaggatcaagctcgaatttgagaagaggcaacaggagaggttactcttgagcctgctcccggctcatatcgcgatggagatgaaagctgagatcatccagcgactacaaggccccaaggctgggcagatggagaacacaaacaacttccacaacttatacgtcaaacggcatacaaacgtgtccatcctgtacgctgacatagtggggttcacaaggctggctagcgactgtagtcctggggaacttgtacatatgttaaacgagctcttcgggaagtttgaccagatcgccaaagagaatgagtgcatgcggattaaaatactgggggactgttattattgcgtgtctgggctcccgatttctcttcccaaccacgcaaagaactgcgtgaagatgggtcttgatatgtgtgaggcaattaagaaagtgagagacgccactggggtcgacatcaatatgcgggtgggcgtgcattccggaaacgtcctgtgcggggtgatcgggctgcagaaatggcaatatgacgtctggtctcatgacgttacactggccaaccacatggaggctggcggggtgccagggcgtgtccatatctcgtccgtaaccctggagcatctaaatggcgcatacaaagtggaggagggagatggtgatataagagacccctacctgaaacagcatttggtgaaaacatattttgtgatcaaccccaaaggcgagcggcgctccccccagcatctcttcagacctagacacaccctggatggcgcaaagatgcgggcctccgtccggatgacccgatatctggagtcttggggcgctgccaaacctttcgcccatttacaccaccgggactctatgacgaccgaaaacggcaaaatttctaccaccgacgtgcccatggggcagcataactttcagaatagaactctgcggacaaaaagtcagaagaagcggttcgaggaagagttgaatgaacgcatgatacaggctatcgatggaattaatgctcaaaaacaatggttaaagtctgaggatatccagagaatttcactcttgttctataacaaggtgctggagaaggaataccgcgccaccgcacttccggcattcaaatactatgtgacctgcgcctgcctcattttcttctgcattttcattgtccaaatccttgtgctaccgaagacctccgtactgggaatttcctttggcgccgcttttctgcttctggcctttatcttgtttgtctgctttgctggtcaacttctgcagtgcagtaaaaaggcctcgcctctgttgatgtggcttctgaaatcctccggcatcattgccaatcgcccttggccacgcatttcactgactatcattactactgcaatcattctgatgatggccgtattcaatatgttcttcctatccgacagcgaagaaaccatacctccgacagctaataccacaaacacaagttttagtgcgtctaataaccaggtcgcaatactgcgagctcagaatctgttttttttaccatatttcatctatagctgcattctgggccttataagctgtagtgtctttctgcgggtgaactatgagctcaaaatgctgataatgatggtcgcactggtgggttataacacaatactgttacatacccatgctcatgtcctcggagactacagtcaggttctgttcgaaaggcccggcatctggaaggacctcaagacaatgggaagcgtttccctgagcattttcttcattacgttgctggtgctgggaaggcaaaacgagtactattgtcgcttggattttctttggaagaataaatttaagaaggagagagaagaaatcgaaaccatggagaatctgaaccgggtgctgctggagaacgttctgccagctcacgttgccgagcactttcttgcacgcagtctgaaaaacgaagagctgtaccatcagtcctacgattgtgtctgcgtgatgttcgctagtattccagattttaaggaattctataccgaaagcgatgtcaataaggaagggttggaatgcttacggttattgaatgaaatcatcgcagacttcgacgatctcttgtcgaagcctaagttcagcggcgttgaaaagatcaagactattggctccacctatatggccgccactgggctgagtgctgtacccagtcaggagcactctcaagagcccgaaagacagtacatgcacataggtacgatggttgaattcgcttttgcgctggtgggcaagttggatgcaattaataaacactcttttaacgacttcaagctgcgcgtggggatcaaccatggcccagtcatagcaggagtgatcggggcccagaaaccacaatacgatatatggggcaacactgttaacgttgcctccagaatggacagtacaggtgtgctagacaagattcaggtcactgaggaaaccagtctagtgctgcagacattgggttacacttgcacgtgccgcgggattatcaacgtgaaaggcaaaggagatctgaagacatattttgtgaacactgagatgagccgttccctgtcacagagcaacgtggcatcttag

SEQ ID NO: 107480 - DNA, 612 bp, synthetic construct
  misc_feature 1..612: note = Description of Artificial Sequence: Synthetic coding sequence
  source 1..612: mol_type = other DNA
atggagaacctcaaccgcgtgttgctggagaacgtcctccccgcccacgtggctgagcacttcctcgcgagaagcctgaagaacgaggaattgtaccaccagtcttacgattgcgtgtgtgttatgtttgcctccattcccgacttcaaagagttctatacagagtctgacgttaacaaagaaggcctcgaatgcttacgccttcttaatgagattattgccgacttcgacgacctgctgtcgaagcccaagtttagtggggtggaaaagatcaaaaccatcgggtcgacctatatggccgctaccggactgtcggccgtgccgtcccaggagcattctcaggagcccgagagacagtatatgcatattggtactatggtggagttcgctttcgccctggtgggaaagcttgatgcaatcaacaagcacagcttcaatgattttaaactgcgagtcggggttaccgaagagacttcactcgtgctgcaaactctgggttatacctgcacctgtagaggaattatcaacgtgaaaggcaaaggagacttgaagacttacttcgtcaataccgaaatgtcccgcagcctatcacagagtaacgtagcttcctag

SEQ ID NO: 107481 - DNA, 2736 bp, synthetic construct
  misc_feature 1..2736: note = Description of Artificial Sequence: Synthetic coding sequence
  source 1..2736: mol_type = other DNA
atggacctgcgatgggcaagagatttgcatcttcgtgaagcgagccgttctgtcgcattcacaacactgcgcttgggtgctgtcaccaccggcttgctgacttttcgggagccaggtgacaaagaaaagtcagggaagggactgggcaaacgctggcggatccaacgcgaagaaagccaggaacgcctgctcttgtctctacttcccgcccatatagccatggagatgaaagcagaaataatacagagactgcagggcccaaaagcggggcagatggaaaacacaaataacttccataatctctacgtaaagcgccatacaaatgtcagtattctttatgcagatatcgtcggctttacacgcctggcttccgattgtagcccaggtgagttggtgcatatgctgaacgagcttttcgggaaatttgaccaaatcgccaaggaaaatgaatgtatgcggatcaaaattctcggggattgttattattgtgtgtcgggccttcctatatccctccccaatcacgctaagaactgcgtcaaaatgggcctggatatgtgtgaggctatcaaaaaagtgagagatgccaccggggtggatattaacatgcgcgtgggcgtgcacagcgggaatgtgctgtgtggcgtcatcggactgcagaagtggcaatacgacgtctggtctcacgatgtgactttggctaaccatatggaggccggcggggtcccaggccgggtgcacatcagcagcgttacgctggaacacctgaatggcgcctataaggtggaagagggggatggagacatccgcgacccttacctcaaacagcacctggttaagacttatttcgtaattaatcctaaaggcgaaagacgctcaccccaacatctgtttcgcccacgtcataccttggacggcgctaaaatgcgagcctctgttaggatgacaaggtacctggagtcctggggagccgccaagcccttcgcccatctgcaccatagagactctatgaccacagagaatggtaaaattagcacgaccgacgtccctatggggcagcacaacttccagaaccggactttgaggactaagtcccagaaaaagcggtttgaagaagagctgaacgagcggatgatccaagctattgacggcataaatgcacagaaacaatggctgaaaagtgaggatatccaacgtattagcctgctgttttataataaagtgcttgagaaagagtaccgggctaccgcacttccagcatttaagtactacgtgacctgtgcatgccttatcttcttctgcatctttattgtgcagatccttgttcttcctaaaacaagcgtgctgggtatctcgtttggcgccgcatttctcctgcttgcattcattctgtttgtatgtttcgccggccaactcttgcagtgctccaagaaggcgtctccattgcttatgtggctactaaagagtagcggaattatcgccaaccgcccctggcctcggattagtcttaccatcattacgactgctattattctgatgatggctgtctttaatatgtttttcctctccgattcagaggaaacaataccacctaccgctaatacaacgaacacatcatttagtgcatccaataaccaggtggcaatcctgcgggcacagaacttgttctttctaccttatttcatttattcctgcattctcggcttaattagctgcagcgtgttcctcagagtgaactacgaactgaaaatgcttataatgatggtcgcactagtgggctataataccatcctgctccatacccacgcacacgtcctaggagattatagccaagtgctgttcgaaaggccgggcatttggaaagatctgaagacgatgggctcagtgtccctgagcatattcttcatcaccctcttagtcctgggacggcaaaatgagtactattgtcggctcgactttctctggaagaacaagttcaaaaaggaaagggaggagattgagacaatggaaaacttgaacagagtgctgctggaaaatgtcctccccgcccacgtcgcagagcattttctagcccgatccctgaagaatgaggaattgtaccaccagtcctatgattgcgtgtgcgtcatgttcgcctctatacctgacttcaaggaattctacaccgaatccgatgtcaataaggaggggttagagtgccttcggctcttgaacgagatcatagctgacttcgatgacctgctttccaagcccaaattttctggagtagagaaaatcaaaacaataggaagcacctatatggccgccacaggattatctgccgtgccttcccaagaacactcacaggaaccagaaagacagtatatgcatatcggcaccatggtggagttcgcgtttgccttggtcggtaaattggatgccattaacaagcactccttcaatgactttaagcttcgggtgggcattaatcatggccccgtcattgcaggggttattggcgcccagaaacctcagtacgatatatgggggaatactgtgaacgtggctagccgaatggactcaacgggcgtgctggacaaaatccaggtgactgaggagacttctctggttctgcagacgctgggatacacctgtacttgcagaggaatcatcaacgtgaagggcaagggcgacctcaaaacctacttcgttaacacagagatgagtaggagtctgtcgcagtctaacgttgcttcttag

SEQ ID NO: 107482 - DNA, 2775 bp, synthetic construct
  misc_feature 1..2775: note = Description of Artificial Sequence: Synthetic coding sequence
  source 1..2775: mol_type = other DNA
atgctgcctttcaacatgcgcgatgctatcatcgcatccgttcttaccagcagctctcacacaatcgtgttgtctgtgtgtctttcagccacacctggagggaaggagcaccttgtgtggcagatcctcgccaatgtgattatattcatctgtggtaatttggcaggcgcgtaccacaagcatctcatggagcttgcactacagcagacatatcaggatacctgcaattgtatcaaaagtcggataaagcttgaatttgagaagaggcagcaagaacggttgctgctcagtctcctccccgcccacattgctatggaaatgaaggccgagatcatccagcggctgcagggccccaaggccggccagatggaaaataccaataattttcataatttgtatgtgaagcgacatactaacgtctctatcctgtatgcagatatagtcggcttcacccgattagcttccgactgctctcccggagagctggtccacatgttgaacgaactctttgggaaattcgatcagatcgccaaggaaaatgagtgcatgcgcattaaaatcctgggggactgttactactgcgtatctgggcttcccattagcctgccaaaccacgcgaagaattgcgtgaagatgggtctggacatgtgcgaagctatcaagaaggtgcgggatgctacaggagttgacattaatatgcgtgtgggagtgcacagcggaaatgtactgtgcggcgtgatagggctccaaaagtggcagtacgatgtgtggagccacgacgtcactcttgccaatcatatggaagcgggcggtgtgccaggtcgcgttcatatctccagtgtcacactagagcacttaaacggtgcatacaaggtcgaggagggcgacggcgatatccgagacccgtatctcaagcagcaccttgtcaagacctactttgtgatcaaccctaaaggggagcgcagatcaccccagcatctcttcagaccacgacatacgcttgatggcgccaagccttttgcacaccttcatcaccgcgacagcatgacaacagaaaacggtaagatttccacgacggatgttcctatgggccagcacaattttcagaaccgaacactgcggactaagtctcaaaaaaaacgcttcgaggaggaattgaatgagaggatgatccaggccattgatgggattaacgcacaaaaacagtggctcaaatctgaggatatacagaggatctcacttcttttctataataaggtactcgagaaagagtatcgcgcaacagctctgccggcgtttaagtactacgtgacatgcgcctgtctgatcttcttttgcatctttatcgtgcaaattctggttctcccaaagacatcagttttagggattagtttcggcgccgcttttctgctgctcgctttcatcctgtttgtgtgcttcgctgggcagctccttcaatgctcaaaaaaagccagtcccttattgatgtggctgcttaagtcaagcggcataatagccaacagaccttggccccggatctctcttaccattatcacaacagctatcatactgatgatggctgtttttaatatgttttttctgtctgactccgaagagaccatccctcccacagctaatacgacgaacacaagtttcagcgcctctaacaatcaggtggccatcctgagagctcagaacctattcttcctcccctacttcatttatagttgcattcttggactcatttcttgtagtgttttcctaagagtgaattatgagctgaaaatgctcattatgatggttgccctggttggatataatactatcctgctacacactcacgcccacgtgctaggggattactcgcaggttcttttcgagagacccggcatatggaaagatctaaagactatgggcagtgtgagtctgtctatcttcttcatcactttgcttgtgttagggagacagaacgagtactattgtagattggatttcctgtggaagaacaaattcaagaaggagagagaggaaatcgagactatggagaacctgaatagagtgcttctggaaaatgtcctcccagcccatgttgccgagcattttctcgctcggtccctcaagaacgaggaactgtatcatcagagctatgactgtgtgtgcgtcatgtttgcttccatccccgacttcaaagagttttataccgagtctgatgtaaataaggaagggctggaatgtctaagattgcttaatgagatcatagccgatttcgacgacttattgtcgaagccgaagttctccggagtggagaaaatcaagacgattgggtccacatatatggcagccaccgggttaagtgccgtgccaagccaggagcattctcaggaacctgagagacagtatatgcacataggaactatggtggaattcgcctttgccttagtaggtaaactagatgccattaataagcattccttcaacgatttcaagctgcgtgtgggaattaatcacgggccagtcatcgcgggggtgatcggggcccagaagcctcagtatgacatttgggggaacaccgtcaatgtggccagcaggatggacagcaccggcgtcctcgacaagattcaggtgaccgaagagacaagtctagtgctgcagacgctcgggtacacctgcacttgcaggggaatcatcaatgtgaaagggaagggcgatctgaaaacatatttcgtgaacacagaaatgagcaggagtctctctcagagtaacgtggctagttag

SEQ ID NO: 107483 - DNA, 3435 bp, synthetic construct
  misc_feature 1..3435: note = Description of Artificial Sequence: Synthetic coding sequence
  source 1..3435: mol_type = other DNA
atgccacgaaatcaggggtttagcgaacctgagtacagcgccgagtactccgctgaatatagcgtttctctgccctctgatcctgatagaggagtggggagaactcacgagatcagtgttcggaatagcggcagctgcctatgtctgccacgattcatgcgactgactttcgttcctgaaagcctcgagaatctgtaccagacttactttaagagacagcgacacgaaaccctgctagtgctggtggtattcgcagctctgttcgactgctatgtagttgtgatgtgtgctgttgtcttttcctcagataagctcgcctctttagcggtggccggcattgggctcgtgctggatatcatcctgttcgtattatgcaagaaggggctcctccccgaccgagtgaccaggcgagtgctgccttacgttctgtggctgctgatcactgcccagatttttagctaccttggtttgaactttgctcgggcacatgctgcatctgacaccgttgggtggcaagtattcttcgtcttttctttctttataacgctcccccttagcctgtcacccattgtcattatttctgtagtgagttgcgtcgtacacacccttgtactgggggtgacggtcgcgcaacagcagcaggaggaactgaagggtatgcagctcctgcgcgagatcctggccaacgtgttcctatacttatgcgccattgctgtcggaatcatgagctattacatggccgacagaaagcaccgtaaggccttcctggaagcccgacagtctttagaggtcaagatgaacctcgaagagcagagccaacagcaggaaaatctgatgctgtcaattttgcccaaacatgtggccgatgagatgctgaaagatatgaaaaaagatgaaagccaaaaggatcagcagcagttcaacacgatgtatatgtatagacacgaaaacgtatcaattctctttgcagatatagtaggctttacccaactttcttcggcatgcagcgcccaggaattggtgaaattgttgaacgagctgttcgctcggttcgacaaactagccgctaaataccaccagctgagaattaaaattctgggagattgctattactgcatatgtggacttccagattaccgcgaagaccacgcagtgtgctccatcctgatgggccttgcaatggttgaagccatttcttatgtcagggaaaaaaccaagactggagttgatatgagagtaggggtccacacagggaccgtcctgggtggcgtgttggggcagaagaggtggcagtacgacgtgtggtctactgatgtgaccgttgccaacaagatggaggcaggaggcattcctggaagagtccatatcagtcaatctactatggattgcctgaagggagaatttgacgtcgagccgggggatggcgggtctcgttgcgactacctggaggagaagggcattgagacttatcttatcattgcatcaaagccagaagtaaaaaaaactgccacacagaatggactcaacgggagcgctctgcccaatggcgcccctgccagcagcaaatcaagcagtcccgccctcattgagaccaaggaaccgaatgggagtgcccattccagcggcagcacaagcgaaaagcccgaggaacaagatgcacaggccgacaatccatccttcccgaatcccagacggagactcagactgcaggaccttgccgaccgcgtggtggacgcctccgaagatgagcacgaacttaatcagctcctgaacgaagctcttctggagagagagtcggcacaggtggtgaaaaaaaggaataccttcttgctgtctatgagattcatggaccctgagatggagactaggtactctgtggagaaggagaaacagtccggagcggcctttagctgctcgtgcgttgtgctgctgtgtaccgcgctcgtggagatactcatcgatccttggcttatgacaaattatgtgacctttatggtgggcgaaatcctcctcctaattctaacaatttgttcactggccgccatctttcccagagctttccctaagaagctggtggcctttagcacatggatcgatcgcacaaggtgggccagaaatacttgggcaatgttggcaatcttcattcttgtcatggccaacgtcgtcgatatgctatcctgtctgcagtattataccggcccgtctaatgccaccgccggaatggaaaccgagggttcttgcctcgaaaaccctaaatattataactacgtggccgtgctctctctgattgccactattatgttagtgcaggtgagccatatggttaagttgacccttatgctcttagttgccggggctgtagccaccattaacctgtatgcctggagaccagtgttcgacgaatacgatcataagagattccgtgaacacgatttgcccatggtggctttggaacagatgcaggggttcaatcccggacttaacgggaccgatcgcctcccgttggtgccctctaaatacagcatgaccgtaatggtgtttctcatgatgttgtctttctactatttcagccgccacgtcgagaagctcgcccgcacgctgttcctgtggaaaattgaggtgcacgatcagaaagagcgggtatacgagatgaggcgttggaacgaagctctcgtgaccaatatgcttcctgagcacgtggcgcgacactttctgggctctaagaaaagagatgaagaactgtacagtcagacctatgacgaaataggtgttatgtttgcctcgctgcctaattttgcggatttctataccgaggagtctatcaacaatggtggtatcgagtgtctccgcttcctaaacgaaatcatctccgactttgatagtctgctggataaccctaagttcagagtcattactaaaattaagacaatcggaagcacttatatggccgcatcaggggtgaccccagacgtcaataccaatgggtttgcttccagcaataaagaggacaaatccgagagagagcgctggcaacatctcgccgacttagctgattttgccctggccatgaaggacacgctcacaaatatcaacaaccagtcgttcaacaactttatgcttagaataggcatgaacaaaggaggcgtcctcgccggggtgatcggggcgagaaagccccattatgatatttggggcaatactgtgaacgtggctagtcgcatggaatccaccggagtaatgggcaacatccaggtagtcgaggagacacaagtcatactgagggaatatggcttccgatttgtgcgaaggggcccaatcttcgtgaaaggaaagggcgagctgttaaccttttttctcaaaggaagggacaagttagccacctttcctaacggcccgagtgtgacactaccccatcaggtggtcgacaactcctag

SEQ ID NO: 107484 - DNA, 3360 bp, synthetic construct
  misc_feature 1..3360: note = Description of Artificial Sequence: Synthetic coding sequence
  source 1..3360: mol_type = other DNA
atgccgagaaatcaaggcttctctgaacccgagtattccgccgaatattcggcagaatactcagtctctctcccgcgattcatgcggctcacctttgtaccagaatctctcgagaatctttaccagacatacttcaagaggcagcggcacgaaaccctccttgttctggtcgtgtttgcagcgctatttgactgttatgtggtggtgatgtgtgcagtcgtattctcgagcgataaactggcgtcccttgccgtggccgggatagggctggtgctggatatcatattgtttgttctttgcaagaaaggtctgcttccggatcgagttacccgacgtgtgctgccatacgttctttggttattgataacagcccagatcttttcatacctgggcctgaatttcgctcgtgcccatgctgcaagtgacactgtgggctggcaggtgttctttgtgttttccttcttcattacgctgcctctcagtctgtcaccaattgtgatcatatccgtggtgagttgcgtagttcatacactcgttctcggtgttacggtggcacaacaacaacaggaagaattgaaaggcatgcagctgctacgggaaatcttggctaatgttttcctgtacctgtgcgcaattgctgttgggatcatgagttattatatggcagacaggaaacatcgcaaagcttttctggaagccagacaatctctagaagtaaagatgaacctggaggagcaaagtcagcagcaagaaaatttgatgctgagtatcctacctaagcatgtggccgacgagatgctcaaagatatgaagaaagacgagtctcagaaagatcagcagcaattcaacaccatgtacatgtacaggcatgaaaacgtgtcaattctctttgcagacatcgtcgggtttacccagctctcaagtgcgtgttcagcacaagagcttgtgaagctattaaacgagctgttcgctcgcttcgacaagctcgctgccaagtatcaccagctgagaatcaagattcttggagactgttactactgcatttgtggcttgccagattatcgagaggatcacgcagtttgctccatcttaatgggcctggctatggtggaggctatttcctatgttagggaaaagacgaaaacgggcgtcgacatgcgtgtcggcgtgcacacggggactgtgcttggcggtgtgctgggccaaaagcgttggcaatacgatgtctggtcaaccgatgtaacagtggccaataagatggaggccggaggaatccctggacgggtgcatatcagccagagcactatggactgtctgaagggcgagtttgatgtcgagcccggtgacggcggctcaaggtgcgactatttggaggagaaagggattgagacgtatttgattatagcttcaaaacctgaggtgaagaaaactgctactcagaatggcctgaacggatccgccctgcccaatggagcaccagcctcatccaaaagtagctccccagcgctcatcgagaccaaagagccgaatggctctgcgcattcttccggcagcacaagcgagaagcccgaggagcaagatgcgcaggcggataacccctcctttcctaaccctcggaggcgcttgcgactccaagatctggcggacagggtcgttgatgcatctgaggacgaacacgagctcaaccagctgctgaatgaagctctgcttgaacgcgaaagcgcacaggtcgttaaaaaaagaaacacattcctgttatccatgaggttcatggatcccgaaatggaaactcgatattctgtagaaaaggagaaacagagcggcgcagcatttagctgctcatgtgtggtattactatgcactgcactggtcgagatcctgattgacccgtggctgatgactaattacgtcacctttatggtcggagaaatcctgctattgatccttacaatctgctctctggccgctatatttccacgcgcctttccaaaaaagctggtcgcttttagcacctggattgatcgcacacgctgggcccgcaacacatgggccatgttggcgatctttatccttgtgatggccaacgttgttgatatgctcagttgcctgcagtattacacagggccgtctaatgccactgccggaatggagaccgaagggtcttgcctggaaaatccgaagtactacaattacgtcgctgtactttccctcatcgctaccatcatgctcgtccaggtgtctcacatggtgaagctcacgctcatgttactagtggctggcgccgtcgctactattaacctgtacgcttggagacccgtttttgatgagtacgatcacaaacggtttcgggagcacgatcttccaatggttgcgttggaacagatgcagggcttcaatcccgggttaaatggtaccgacagattacctctggtaccttccaaatatagtatgaccgtcatggtgttcctcatgatgctgagtttttactacttctcccgccatgttgaaaaacttgcaagaaccctgttcctgtggaagatagaagttcatgaccagaaggagcgcgtctatgagatgcggcggtggaacgaggctcttgtgactaatatgctgcctgaacatgttgcccgacattttctgggctcaaagaaacgggacgaggagctgtacagccagacttatgacgagattggtgtaatgttcgcatctctgcccaattttgccgacttctataccgaggagtccattaataacgggggtattgaatgcctccgctttctgaacgaaattatttctgactttgacagcttgctcgacaaccccaagttccgagtgatcaccaaaataaagacgatcgggtcaacatacatggctgcatccggtgtcactccagacgtaaacactaatgggttcgccagctctaataaggaggataaatccgagcgggagaggtggcagcacctcgctgacctggccgacttcgcgctggcaatgaaggacaccctgactaatattaataatcagagctttaataactttatgctgaggatcggcatgaacaagggcggggtacttgccggagtgataggcgcccggaagccccactacgatatttggggtaacaccgttaacgttgcatcccgcatggaatccaccggagtgatggggaatatccaggtggtcgaagaaacacaggtcatcctcagggagtacggttttcggttcgttcgcagggggcccatttttgtcaaaggcaaaggtgagctgctgaccttcttcctgaaaggccgagataagctcgctacctttcccaacggtccaagcgtcaccctcccccaccaagtagtcgacaatagttag

SEQ ID NO: 107485 - DNA, 339 bp, synthetic construct
  misc_feature 1..339: note = Description of Artificial Sequence: Synthetic coding sequence
  source 1..339: mol_type = other DNA
atgccgagaaaccagggattttcagaacccgagtactctgccgaatactcggccgaatattccgtctccctgccttctgatccggaccgtggagtgggccgcacacatgagatcagtgtgcggaatagtggctcttgcctttgtttgccacgctttatgagactaactttcgttccagaatccttagagaatctctaccagacttacttcaaacgccagcgacacgagactcttctcgtgctggtcgtgttcgccgctctgtttgattgttacgttgttgtgatgtgcgccgtggtcttcagtagcgacaaactggccagcctggccgtcgccggatag

SEQ ID NO: 107486 - DNA, 3234 bp, synthetic construct
  misc_feature 1..3234: note = Description of Artificial Sequence: Synthetic coding sequence
  source 1..3234: mol_type = other DNA
atggcaagactgttcagtccaagacctccaccctccgaggatctcttctacgagacctactacagtctctctcagcagtaccccttacttctgcttctgctgggcattgtgttgtgtgcgttagcagccctgctcgccgtcgcgtgggcatcaggccgagagctgacctctgacccatccttcctcaccactgtactgtgcgccttggggggtttctctctcctcctaggcctagcatccagggaacaacgacttcagaggtggacacggcccttatctggtctggtctgggttgccctgctggccttaggacacgccttcctctttactggcggtgtggtgtctgcctgggatcaggtgtcttactttctttttgtaattttcaccgcatatgcaatgctaccgttgggaatgcgcgatgcagcagttgctgggctggcttcctccttgagtcacctcttggtactgggcctgtacctggggccccaaccggatagtaggccggctctcttaccacaactggctgcaaatgctgtgctgtttctttgcggaaacgtggccggcgtgtatcataaggcattaatggaacgcgcactcagagcaaccttccgcgaagcgctgtcctctcttcacagtcgacgacgactggacactgagaagaagcatcaggagcatctgctactttcgattctgcctgcttatcttgcccgggagatgaaagcagagattatggcacggctccaggccggtcagggctctcgccccgaatccaccaacaacttccactccctgtacgtcaaacgccatcagggcgtctctgtactctatgctgacatcgtaggctttactagactggcctctgagtgttcccccaaagaactggtcctaatgttaaatgagctgtttggaaaatttgaccaaattgctaaagaacatgaatgtatgagaataaagatcttaggtgattgttactactgtgtgtcagggctgcctctaagtctgccagatcacgcaataaactgcgtgagaatgggactggacatgtgcagagcaattagaaagctcagggcagctacaggagttgacatcaacatgcgtgtcggcgtgcactcggggtctgttctctgtggggtaataggactgcaaaaatggcagtacgacgtttggtcgcacgacgttacactagccaatcacatggaagctgggggggtgccaggtcgggttcatataacgggcgccaccttagctctgctcgcaggggcctacgccgtggaagacgccggaatggaacatagggatccctatttgagagagttgggggagcctacatacttggttatcgatccccgcgccgaagaggaggatgagaaggggactgccggcggtttactttcatcacttgagggattgaagatgcgcccaagcctccttatgaccaggtacctggagtcttggggagccgctaaaccctttgctcatttaagtcacggcgactccccagtctccaccagcacacctctgccggagaagacacttgcctctttctccactcaatggtcacttgatcggtcaagaaccccacgtggcttggacgatgagctcgacaccggggatgctaaattcttccaggttatcgaacagctcaacagccagaagcagtggaagcagtcaaaggacttcaaccctctgacactatactttagggaaaaggaaatggaaaaagagtaccggttgagtgcgatcccagcttttaaatattacgaggcttgtactttcctggtgttcctttccaattttataattcaaatgctcgttactaaccgacccccagcgctcgcgattacatatagcatcaccttcctactgttcctcctgatcctcttcgtgtgcttttcagaggaccttatgaggtgtgtgcttaagggccccaaaatgctgcactggttacccgctctttcaggtctggtggcaacgcgcccagggctgagaattgccttgggaaccgccaccatccttctggtgttcgccatggccatcacctctttgtttttctttcctacgagctcggattgtccgttccaggcccccaacgtctcatctatgatctcgaacctgtcatgggagctgcccggcagtctgccgctgatctccgtaccctacagcatgcactgttgtaccctcgggttcctgagctgttcccttttcctgcacatgagctttgagctcaaactgttgttactgcttctgtggctagcggccagctgtagcctgttcctgcattctcatgcttggctgagcgagtgcttaatcgttcggctgtacttgggacctctggacagtcgacccggagtgctcaaggaaccaaagctcatgggggcgatctcattcttcattttctttttcactctactggtgctggctcggcaaaacgagtattattgtagactcgatttcctatggaagaagaaacttaggcaggagagggaagagacggaaactatggaaaatttgaccaggctgcttctcgaaaatgtgctgccagctcacgtcgcaccccagttcatcggacagaatagaagaaatgaggatctgtatcatcagagttacgaatgcgtgtgtgtgctatttgctagcgtaccagactttaaagaattctacagtgaatcaaacataaaccatgaaggattagaatgcttgcggttgctgaatgagattatcgccgacttcgacgaactgttgtcgaagccaaaatttagcggggttgagaaaatcaaaactattggctctacttacatggctgctacaggactgaacgcgacgtccggtcaagatgcgcaacaagacgcagaaagatcttgttcacaccttggaacaatggtggaatttgccgtcgcattaggatcaaaactcgatgtgattaataagcatagcttcaacaacttcagactgagagtcgggctcaatcatggacctgttgtggcaggtgtaatcggagcccagaagccgcagtacgatatctggggaaatacagtgaacgtcgccagtaggatggagagcacgggagtgctcggcaaaatccaggttacagaggagacggcatgggcactgcagtccctaggatacacttgctatagccgcggcgttatcaaggtcaagggcaaagggcagctttgtacatactttctcaacaccgatctcactaggacaggtccaccatcagccactctcggctag

SEQ ID NO: 107487 - DNA, 1260 bp, synthetic construct
  misc_feature 1..1260: note = Description of Artificial Sequence: Synthetic coding sequence
  source 1..1260: mol_type = other DNA
atgtctcgcggaactagagaatcagcgtgttgcatgctgacctcatgggcgagcagaggctggcccgccagtgtgcctttgaggagttggtgcagttgttccatgtctagcctggcttcatctaccagactgccccgaaaattgcgcgctgcaaccggcgtggatatcaatatgagggtgggggtccattctggctctgtgttgtgtggagtgatcggactgcaaaaatggcagtacgacgtgtggtcgcacgatgtgaccctggccaatcacatggaggctggaggggtcccgggtcgcgtgcatatcacgggtgcaacactggcactgctcgcaggggcttacgcggtcgaggatgccggtatggagcacagggatccttatcttcgcgaacttggagaaccaacctacctcgtgattgacccccgcgcggaagaggaagacgagaaaggcactgccggcggcctattatctagcctggaaggactcaaaatgagacctagcctccttatgacccgatacctcgagtcgtggggcgcagcaaaacccttcgcccacctctcccatggagatagccctgtgtccacctccaccccacttcccgagaagactttggcgtctttctcgacccagtggagtttagatcgttctaggacccccaggggacttgacgacgagttggacaccggagacgccaaattttttcaggtcatagaacaactgaatagccagaaacagtggaagcagtcaaaggactttaatcctctcacattgtacttccgggagaaagagatggaaaaggagtatagactcagcgctatccctgcctttaagtactacgaagcctgcaccttcctcgtcttcctctcaaactttattattcagatgctggtgacgaatcgaccaccagccctagcaattacctactcaatcacgttcctgctctttctattaatacttttcgtctgttttagcgaggatttaatgcgctgtgtactgaaagggcctaagatgttgcactggctaccagcactgtcgggccttgtggctactcgccccgggttacgcatcgcgctcggaactgcaaccatccttcttgtattcgcaatggccatcacgtctctctttttttttccaacctcttcagattgccccttccaagcccccaatgtgagtagtatgattagcaatctgtcttgggaattacccggttcattacccctgatatccgtgccggtgtctgtaccgacctgtccctag

SEQ ID NO: 107488 - DNA, 3234 bp, synthetic construct
  misc_feature 1..3234: note = Description of Artificial Sequence: Synthetic coding sequence
  source 1..3234: mol_type = other DNA
atggcaaggctgtttagccctcggccccctccatcggaagacttattctatgaaacttattactccctctcacagcagtaccctctgctgctgctgctcctcggtatcgtcctttgtgcccttgccgccctgctcgctgtggcatgggcatccggaagagaactcacatccgatccttctttcttgacaacagtgctctgcgctttgggcggttttagcttgttgctcgggctggcaagccgggagcagaggttgcagcgctggacaaggccactttcaggtctggtatgggtcgccctgctggcccttggacacgcgtttttatttactgggggtgttgtgagtgcttgggatcaggtgtcatacttcctgttcgtgatttttaccgcctatgccatgttgcccctcggcatgcgagacgctgctgtagcgggcctagccagcagcctcagccacctgctggtgctgggactctatttggggccccagcccgactcgagacccgcgcttcttcctcaacttgccgccaacgcagtacttttcctttgtggtaatgtggctggcgtgtatcacaaggccttgatggagcgtgccctgagagccacctttcgtgaggccctgtcctcccttcattccagaagacgtttggataccgagaaaaaacaccaggagcatctactcctgagtatcttgcctgcctacttagcgcgagagatgaaggccgaaatcatggccaggttgcaggctggacaaggttcaaggcctgagtcgacaaacaatttccacagcctgtatgtcaaacgccatcagggcgtttccgtcctctatgcagacatagtcggattcacccgtctggctagcgaatgtagcccaaaagaactggtcctgatgttaaacgaactgtttggaaagtttgaccagattgcgaaagaacacgagtgtatgcgaatcaagatcctgggtgactgctactactgtgtgagcggccttccgttgtcgttacccgaccacgcgataaattgcgtccggatggggctggatatgtgccgggccatcagaaagctgagagctgctacgggagtggatattaacatgagagtgggagtgcatagtggctccgtgctttgcggagttattggtctccagaagtggcagtacgatgtgtggagccacgacgtgacactagcaaatcatatggaggcaggcggcgtgcctgggcgcgtccatatcacaggagctacactggctttactggcaggggcttacgctgtggaggacgccggtatggagcaccgcgatccctaccttcgtgagctgggcgaacctacctacttagtgatcgatccccgggcagaggaggaagatgaaaagggcaccgctggggggttactgagttctttggagggcctaaaaatgcgtccgagcctcctgatgaccaggtacctcgaatcctggggtgccgccaagccattcgcgcacctgtctcacggagactccccggtatctaccagcactccacttcccgaaaagaccctggcctcctttagtacccaatggtcgcttgatcgctctcggactccgcggggcctagatgacgagttggataccggagatgcaaagttttttcaggtcatcgagcagctgaacagccaaaaacagtggaagcagtctaaagactttaacccccttacactctacttccgcgagaaggagatggaaaaagagtaccgcctgagtgctattccggcatttaagtattatgaggcttgcacatttttggtatttctgtcaaatttcataattcagatgttggtcacgaaccggccccccgcgctagccattacttatagtatcacattcctgctgtttctgctgatcctattcgtgtgcttcagtgaagatctgatgaggtgtgtgctgaaaggccccaagatgctgcactggctcccggctttaagcggattggtagcaacaagacccggactacgcatcgcgttagggacagctacaatcttgctagtctttgcaatggccatcacgagcctcttcttttttcctacatcttcagattgcccctttcaagcacctaacgtctcctccatgatttctaatctttcttgggaactgccagggtctctgcccctcatatccgtgccatattcaatgcactgctgtacccttggattcttgtcatgcagcctttttctgcacatgagcttcgaacttaaactgttactgctcttgctgtggctggccgcaagctgctctctgttcctgcatagccacgcatggctcagtgaatgcctcatcgtccgactgtacttaggcccacttgattctcgtcctggtgtgttaaaagagccaaagcttatgggtgcgataagctttttcatttttttctttactttgctggtgcttgcccgccagaatgaatactactgcagactggactttctctggaagaagaagttaaggcaggagagagaggaaacagagactatggaaaacctaacccggctcctgcttgaaaacgtactccccgcccatgtggcaccacagttcatcggacaaaatcgccgaaacgaagatttgtaccatcagtcatacgagtgtgtctgtgtactgtttgctagtgtcccagatttcaaggagttttatagtgagagtaacatcaaccacgagggcctagagtgcctacgactgctgaatgagattatcgcggacttcgatgagttgttgtccaagcctaaattctcaggcgtggaaaagattaaaacaatcgggtctacatatatggctgcaactggacttaatgctacttccggacaggacgcccaacaggatgcagagaggagttgttctcatcttgggacgatggttgaatttgcagttgcgctggggagtaagctagatgtgataaacaaacactctttcaataactttcggctacgggtggggctgaatcatggacccgtggtagctggtgtgataggcgcgcaaaagcctcaatacgacatttgggggaataccgtgaacgttgcatccagaatggagagtaccggagttctggggaagatccaagtgaccgaggagacagcttgggccctccagtcactgggctacacctgttatagcagaggggtcatcaaagtgaaaggcaagggtcagctttgtacttacttcctcaacaccgatctgacacgaacaggacctccaagcgcaactctggggtag

SEQ ID NO: 107489 - DNA, 3234 bp, synthetic construct
  misc_feature 1..3234: note = Description of Artificial Sequence: Synthetic coding sequence
  source 1..3234: mol_type = other DNA
atggcgagactgttttctcccagacctcccccctcggaagatctgttttatgagacatactacagcctctcacagcagtatccccttttgttgctgcttctgggaatagtgttgtgcgcccttgctgctctattagctgtggcctgggccagcggccgggaactaacatcagatccaagcttcctgactaccgtgctgtgtgccttggggggcttctcactcctgctcggcctcgcatcccgggagcagcggctgcagaggtggacccggcccctgagcgggttggtgtgggtggctctcctcgcactggggcacgcatttttatttactgggggcgtggtcagtgcctgggatcaggtatcctacttcttgtttgttatctttactgcctacgccatgctgcctctgggaatgcgcgacgccgcagtggctggactggcttcctctctgagtcaccttctggtcctcggtctgtatttgggaccacagcctgacagccggcccgctctgttgccccagctggcggcaaatgctgtgctctttctgtgtggaaacgtggccggagtgtatcacaaagcccttatggaacgggcgctgcgcgccactttccgcgaggccctatcctcgttacactcgcggcgcagactggatactgagaagaaacaccaggaacatctcctactgtccattcttccagcctacctggcgagagaaatgaaggcggagatcatggccagattgcaagcggggcaaggttctcgtcctgagtctacgaataatttccactctttgtacgtcaagaggcaccaaggggtgagcgtgctgtatgctgatatcgtcggattcacacggttagccagtgaatgctcgccgaaggaattggtgttaatgctcaatgagttgttcggcaaattcgatcaaattgccaaagagcacgaatgtatgagaattaagatcttgggggactgctattattgtgtttccgggttgccattgtcattgccagaccacgctattaactgtgttagaatgggcctagatatgtgtagggctattcgaaaactgagggctgctacaggagttgatatcaacatgagagtcggagtgcattccgggtcggtcctgtgcggcgtgattggcctccagaagtggcaatacgacgtgtggtctcatgacgtaacccttgctaaccatatggaggcaggtggagtgccgggtcgagtgcacatcactggggctacccttgccctgctcgccggcgcctatgccgtagaagacgcaggtatggaacatagagacccttatcttagggagttaggggagccgacataccttgtcatagatccgcgtgcagaggaggaggatgaaaagggtaccgccggcggtctgttgtccagtctcgagggccttaaaatgaggcccagtctgttgatgacgaggtacctggaatcctggggtgcggcgaaaccgtttgcccatttgagtcacggagactcccctgttagcacaagcactcctttacctgagaagaccctcgcctcttttagcactcaatggtcattggacaggagcagaactccgaggggtctggacgatgagctggacaccggcgatgctaaattcttccaggtgatcgaacagttgaacagccaaaagcaatggaagcagtcaaaagactttaatccactcaccctgtatttcagggagaaggagatggaaaaagagtatcgcttgagtgcaattccagcatttaagtactacgaagcgtgcacctttctggtgttcctgtccaatttcatcatccagatgctcgttaccaataggcccccagcgcttgcgatcacttatagtattaccttccttctgttcttacttattctcttcgtctgcttcagtgaagaccttatgaggtgcgtgcttaagggccccaaaatgcttcattggctgccggccctcagtggccttgttgccacccggcccgggcttcgcatcgccctcggcacagcgaccattttactggtgtttgccatggccattacatctctattcttctttcctacatctagtgactgcccattccaagcacccaacgttagctcaatgataagcaacctttcatgggaattgcccggaagcctcccccttattagtgtcccttattcaatgcactgttgtacgctgggcttcctgtcatgttcactgtttcttcacatgagctttgagctaaagctgctcctactcttgctgtggttggcggctagctgcagcctgtttcttcatagccacgcctggttaagcgagtgtctcatcgtaagattgtatctcgggccactggactctaggcccggcgtcttaaaggaacctaaactgatgggagccatctcgtttttcatctttttctttaccctgctggtgctggccagacagaacgaatattattgcaggctggactttctgtggaagaagaagctcagacaagaacgagaggagacagaaactatggaaaatttgacacggctccttcttgagaatgttcttcctgctcacgtggctccccagttcatcggccaaaatcgacggaacgaagatttgtaccatcaatcttatgagtgcgtctgtgtactctttgccagcgtaccagattttaaagagttctattctgaaagtaatattaaccatgagggcctggagtgccttcggctcctgaatgagataattgcagattttgatgagctgctaagcaagcctaaattctccggcgtggaaaagattaaaacaatcggatcaacttacatggcagcaactgggttaaacgcaaccagtgggcaggatgcgcagcaagatgccgaacggtcatgctctcatcttgggacaatggttgagttcgccgtggccctgggatccaagttggacgtcattaataagcacagcttcaataactttagactgagagtcggcctgaatcatggccccgtggtggccggcgtgattggcgctcagaagccgcagtatgatatttggggtaacaccgtgaacgtggccagccggatggaaagtactggggttctggggaagattcaggtgactgaggagacagcatgggccttgcagagcctaggatatacatgctattccagaggggtgataaaggtgaaaggtaagggccagctttgtacttatttcttgaatacagatcttactcgaacaggaccacctagcgccacgctggggtag

SEQ ID NO: 107490 - DNA, 348 bp, synthetic construct
  misc_feature 1..348: note = Description of Artificial Sequence: Synthetic coding sequence
  source 1..348: mol_type = other DNA
atggctcggcttttcagtcctcgccccccccccagcgaagacctgttttatgagacctactatagcctgagccagcagtatcctctgctgctgctgcttctgggcatcgttctgtgcgccctcgctgcgctcctggccgtggcctgggccagtggcagagagctaactagcgaccctagtttcttgactacggtcctgtgtgccttgggcgggtttagcttgctcttggggctggcctcacgtgagcagcggctacagcgctggacacggccactgtcaggtctggtgtgggtggcgcttctagccctgggtcacgcattcctgttcactggtggagtcgtgagttag

SEQ ID NO: 107491 - DNA, 2736 bp, synthetic construct
  misc_feature 1..2736: note = Description of Artificial Sequence: Synthetic coding sequence
  source 1..2736: mol_type = other DNA
atgaagtcccagaaggaaggctgttgttctcgcggcgacctgtccatccagaccggacctggaggcgagtgggcaccaaggcgcctggtgtccaatgtcctgattttctcttgcaccaacattgtgggagtgtgtactcattatccagcagaagtatcgcagcggcaagcctttcaagagacccgggaatgcatccaggcccggctccactctcaacgagagaatcaacaacaggagcgactgcttctgagtgttcttccgcggcatgtagccatggagatgaaggcagacataaatgccaaacaagaggacatgatgttccataagatctacatacagaaacatgataacgtctccatcctatttgcagacatagaaggatttacctccctggcatcgcagtgtaccgcccaggagttggttatgacgttgaacgagctctttgcccgcttcgacaaactcgcagccgagaatcactgtctgaggatcaaaatattgggcgattgttactattgtgtttctgggttaccagaagcccgggcagaccacgctcactgttgtgtagaaatgggtatggacatgatcgaggccatctcattagtgcgggaagtcactggggtgaacgtgaacatgcgggtggggatccattcaggaagagtgcactgcggcgttttgggcctgagaaagtggcagtttgacgtatggagcaatgacgtcactctcgcaaatcatatggaggctggtggcaaggctgggagaatacatattaccaaggccacactgaactacctcaacggagactatgaggtcgagcctggatgtggtggcgagagaaatgcctacttaaaggaacacagcatcgagacgtttctgattctccgttgcacacagaagagaaaggaagagaaggccatgatcgctaagatgaaccgccagcggacaaactccatcgggcacaatcccccacactggggtgcagaaagaccattttacaaccatctggggggaaatcaagtttctaaagagatgaagcgaatgggttttgaagacccaaaagataagaatgctcaggaaagcgcaaaccccgaggacgaggtggatgaatttctgggcagggccatcgacgcgcgctccattgaccggcttcgctccgagcatgtcaggaagttccttctgacgttccgcgagccggacctcgagaagaaatacagtaagcaggtggatgatcgattcggagcctacgtggcatgtgcgagtctcgtgttcttgtttatctgtttcgtccaaatcaccattgtgccccattctatcttcatgctaagtttctacctcacgtgttccttgctgctcaccctcgtcgtgttcgtgagcgtgatttactcttgtgtgaaactgtttcctagccccttgcagactctcagtcgcaagatcgtgcggtccaagatgaacagcaccctagtcggcgtgtttacaatcacactggtctttctggccgcctttgttaacatgttcacatgtaactctagagacctcctaggctgcctggctcaggaacataatatctctgcatctcaggtcaacgcatgtcacgtggctgagagcgctgtcaattactctctgggagacgaacaaggcttctgcgggagcccatggcccaattgcaatttcccagagtacttcacctattctgtattgctttctctactagcttgctcggtgttccttcagatctcatgtatcggcaagctggtcctcatgctagctatcgagctgatttacgtcctgatagtggaagtccctggagtgacattattcgacaacgccgacctgctggttaccgcaaatgccattgatttcttcaacaatggcacttctcagtgccctgagcatgcgactaaggtcgctctgaaggtggtcaccccaatcattatctctgtctttgtgttggcactgtacttgcatgcacagcaggtggaatctaccgcccggcttgacttcctctggaagctgcaagccactgaggaaaaggaggaaatggaggagcttcaggcttataacaggagactgctgcataatatcctgcctaaagacgtggcagctcacttcctcgctcgggagagaaggaatgacgagctctactatcaaagttgtgagtgcgtggccgtcatgtttgcgtctatagccaatttctcagagttctacgtggagctggaggcaaataatgaaggcgtagaatgcctgaggctgttgaatgaaatcattgctgacttcgatgaaattattagcgaagaccgatttaggcagttagagaagatcaagacaatcggttcaacatatatggccgctagcggcctaaatgattcaacatacgacaaggtcgggaaaactcacattaaagcactggccgattttgctatgaagctgatggaccagatgaagtacattaatgagcatagctttaacaacttccaaatgaaaattggtctcaacatcggtccggtggtcgccggtgtaataggggctcggaaaccccagtacgatatttggggaaacactgtcaacgtagcgtcacgtatggactccacaggagtacccgataggatccaggtcacgactgatatgtatcaggtgctcgctgcgaatacctaccagctggagtgtagaggagtagtaaaggtgaagggcaagggggagatgatgacctactttctaaatgggggaccaccgctatcgtag

SEQ ID NO: 107492 - DNA, 3786 bp, synthetic construct
  misc_feature 1..3786: note = Description of Artificial Sequence: Synthetic coding sequence
  source 1..3786: mol_type = other DNA
atgagcgggtctaagtcggtgagccccccaggctacgctgcgcaaaagacagccgccccggctccacgcggaggtcccgagcatcggtcagcatggggcgaggccgattcgagagcgaacgggtatccccacgctcccggggggtcagccagggggagtactaaaaaacccggcggcgcagttactcctcagcagcagcaacgactggcctcccggtggaggagtgacgatgacgatgatcctccactctccggggacgaccctctcgcaggcgggtttggcttttccttccgtagcaagtctgcgtggcaggaaagaggaggagatgattgtggtcgtggtagtagacgtcaacgccggggcgctgcctccggaggatctacgcgcgcccccccagctggaggcggcggaggatccgccgcagcggccgcctccgctggtggtacggaagtgagaccccgttccgtagaggtcggactcgaagaacggagaggaaagggacgggctgcagatgagctggaagcaggggccgttgagggcggagagggatcaggcgacggcggctcaagcgctgatagcggaagcggcgccggccctggggcagtgctctccctgggagcctgttgtctggcactgctccaaatattccgtagtaagaaattcccctccgacaaactggagagactttatcagaggtacttcttcagactgaatcagtcttctctgaccatgttgatggctgtgctagtgctggtctgtctggtgatgttggccttccatgctgcaagacccccactacagctcccttatctcgctgttctggcagccgcggtgggcgtgatcctcatcatggctgtgctatgcaaccgggccgcattccatcaagaccacatgggcctggcctgctacgccttaatcgcagtggttttggccgtgcaggtcgtcggcctgctgctcccgcaaccccgatccgcttctgaaggaatctggtggacggtgttctttatctacaccatctacacattgctgccagtgaggatgagagctgcggtcttatctggcgtgttactgtcagctttgcaccttgcaatcgcccttagaactaatgcacaggaccagtttctcctgaaacagctggtcagcaacgtgctcatattcagttgcactaacattgttggagtctgcactcactatccagccgaggttagccagcgccaggcctttcaggaaacccgtgagtgcattcaggcgaggttgcactctcagcgtgaaaaccagcaacaggagcggcttctgctcagcgtgctgccaagacatgtagcaatggaaatgaaggctgatattaatgccaagcaggaggacatgatgtttcacaagatatacatccaaaaacatgacaatgtgagtatcctgttcgccgatattgagggattcaccagtttagcatctcagtgtaccgcccaggagctcgtcatgaccctgaacgagttattcgctagattcgacaaactggcggccgagaaccactgcctcagaataaagatactgggggactgctattactgtgtttcagggctcccggaggcacgtgccgatcacgcccactgttgcgtggagatggggatggacatgatagaggccatctccctggtcagggaggtcaccggagtcaatgttaatatgcgggtcgggatccacagcggtcgggtccactgcggagtgttgggcctacgtaaatggcaattcgatgtgtggagcaacgatgtcaccctcgctaatcatatggaggctggagggaaagcggggcgcatacatatcaccaaagcaaccctcaattatctaaatggagattacgaggtggagcctgggtgcggaggagaacgaaacgcctatttaaaagaacactccatcgaaacattcctgattctccgttgtacccagaagagaaaggaggaaaaagccatgattgctaagatgaaccggcagcgtacaaattccatcggtcataaccctcctcactggggagccgaaaggcctttctataaccatctcgggggcaaccaggtcagcaaagaaatgaagcgcatgggttttgaagatccaaaggacaaaaacgcacaggaaagtgccaatcccgaggacgaagtggacgagtttctggggagggccattgacgctcggtccatcgacaggctgagaagtgagcatgtaagaaagttcctgctgacgttccgagaacctgatcttgagaagaaatatagcaagcaggtggatgatcgattcggcgcatacgtagcttgcgcgtctctggtgttccttttcatttgctttgtccagatcacgatcgtgccacacagcatcttcatgcttagcttctacctcacttgctccctccttttgacactggtggtgtttgtctcagtcatatactcatgcgtgaaactcttcccaagtcccctccaaacactcagcaggaaaatcgtgagatcaaaaatgaattctaccctggtgggggtgttcaccataacccttgtgttcttggctgcctttgtcaacatgttcacttgtaatagccgggacctgttagggtgcttagcgcaggaacacaatattagcgcttctcaggtcaatgcatgtcacgtggcagaatctgccgtaaattatagcttaggagacgagcaaggcttctgcggctctccttggcccaactgcaacttccccgaatactttacttacagcgtcctgttgtccttgctggcatgctctgtgttcctacaaatctcgtgcattggtaagctggtactgatgcttgccattgaacttatctacgtcttaatagtcgaggtgccaggcgtcacgttgttcgataatgctgatctactcgtgacagctaatgcaattgacttcttcaacaacgggacaagccagtgccccgaacatgccaccaaggtcgctttaaaggttgtgactcccattattatttcagtgttcgtgttagcgttatacctgcacgcccagcaagttgagagcacagcgaggttggattttttgtggaagctgcaggccacagaggagaaggaagaaatggaggagctgcaggcgtataacagaaggttgctccacaacatcctgcctaaagacgttgcggcccacttccttgcccgtgagcggagaaacgacgaactttactaccagtcttgtgagtgtgtagccgtgatgtttgcatctatagccaacttctccgaattttatgtggagttggaggctaacaatgaaggggtggaatgtctccggctgctgaatgagataatagctgacttcgatgagattattagcgaagaccgcttcaggcaattggagaaaataaaaaccataggatcaacctatatggcggcatctggtctcaatgacagcacttacgacaaagtggggaaaacccacataaaggccctggccgactttgccatgaagttaatggaccagatgaaatacattaacgagcacagctttaataatttccagatgaagataggcctgaatatcggtcccgtcgtcgcaggcgtgatcggcgcacggaagccgcagtacgatatctggggcaacaccgtgaatgttgcgtcaaggatggatagcacaggcgttccagaccggatccaagtcacgaccgacatgtatcaagtgcttgcagctaacacataccagctggaatgtaggggagtcgtcaaagtgaaaggcaagggcgagatgatgacatacttccttaatggtgggcctccccttagttag

SEQ ID NO: 107493 - DNA, 2760 bp, synthetic construct
  misc_feature 1..2760: note = Description of Artificial Sequence: Synthetic coding sequence
  source 1..2760: mol_type = other DNA
atggcaccgtctaggttccgcactcaactggagttagtgtccaacgtgctgatattttcctgcacgaatattgtcggggtgtgtacacactatccagcagaagtgagtcagcgccaagccttccaggaaacgagagagtgcatccaggctagactacattctcagcgagagaaccagcaacaggagcggcttcttctttctgtgctgccgaggcatgtcgccatggaaatgaaggccgacatcaatgccaaacaagaagacatgatgtttcataagatttacatccagaagcatgacaacgtctcaatcctcttcgccgacatcgaggggttcacatccctcgcctcccagtgcaccgctcaagagctcgtgatgactctgaacgaattgtttgctagattcgacaagctcgccgccgagaaccactgtcttcgcatcaaaattttaggggattgttactattgtgtgtcagggctcccggaagctcgagccgaccacgcacactgttgtgtggagatgggcatggatatgattgaggccatttcactcgtgagagaggtgacgggagttaatgtgaacatgagagtgggcatccacagcgggcgggtgcattgtggagtgcttgggctgcggaaatggcagtttgatgtatggtcaaacgatgttactttggccaaccatatggaagcaggaggcaaagcagggcggattcatatcacgaaggcaacactcaattatctgaatggcgattatgaagtggaacccggatgtggcggggaacgcaatgcatatctgaaggagcattctatcgagacctttctcatccttagatgcactcagaagcgtaaagaagaaaaggccatgatcgccaagatgaatcgacagcgaaccaattccattggacataacccaccccactggggggcggagcgccccttctacaaccacctgggcggaaatcaggtgagcaaggaaatgaaacggatggggttcgaggatccaaaagataagaacgcgcaggaatcagcaaatccggaagacgaagtggatgagttcctcggacgggctattgacgccagaagcatcgaccgactccggtcggagcatgtacggaagttcctgctgacgtttagggagcctgatcttgagaagaaatattccaaacaagtcgatgatcgcttcggagcctacgttgcttgcgcgtcactggttttcctgtttatctgtttcgttcaaatcactatcgtgccccatagcatatttatgctaagtttttacctgacctgcagccttcttttgacacttgtagtgttcgtcagcgtgatttactcgtgcgttaaattattccccagtccgttgcaaacactcagccgcaagatcgtgaggtcaaaaatgaactctacattggtaggtgtgttcacaatcacccttgtctttctcgccgccttcgtgaacatgtttacgtgcaacagtagagatctgctaggctgcttggcccaggaacacaacatcagtgcaagccaagtaaacgcctgccacgtagctgaatccgccgtcaattactccttgggtgacgaacagggcttctgtggcagcccctggcccaactgcaattttccggagtattttacctacagcgtgctcctgagcctgctggcttgttccgtgtttctccagatttcatgcattgggaaattggtgctgatgttggcaatagaattaatctatgtgctcattgtcgaggttccaggtgtgaccttgttcgataatgcagatcttctggtaaccgccaacgccatagattttttcaataacggcacctcacaatggtccctatgcgaaaacctgaggcaccgacgtatggaagccggcacctattttccatcaggagtgaaggagcagtccccagagcatgccacgaaggtggctctgaaggttgtcacacccatcattatatccgttttcgtgttagctctttatctgcacgctcagcaagttgagtccacggctcggctagactttttgtggaaattgcaggccacagaggaaaaggaagaaatggaggagttgcaggcctataaccggaggcttctgcacaacattctccccaaggacgtagccgcccattttctggcacgggagcggcgcaatgacgagctctactaccagagctgtgaatgcgtggccgtcatgtttgcctccatcgctaacttctcggagttttacgtggagctcgaggctaataatgaaggagtggaatgtctccggctcttaaatgaaatcatcgcagatttcgacgaaattatcagcgaggatcgcttcaggcagttggagaagatcaagacgatcgggtccacttatatggccgcttcaggtctcaacgattcaacctacgacaaagtggggaagacccatataaaggcgctggccgacttcgccatgaaactgatggaccaaatgaaatatattaatgaacactcattcaataactttcagatgaagattggactcaacattggccccgtcgtggcaggtgttatcggggcccgcaagcctcaatacgatatctgggggaacacggtgaacgtagcctcaagaatggactctacaggggttcccgaccggattcaggtgacaacagatatgtatcaggtgttagccgctaacacctaccagttggagtgccgtggtgtcgtcaaagtgaagggtaaaggcgagatgatgacatactttctgaatggcgggccacctctgtcgtag

SEQ ID NO: 107494 - DNA, 3507 bp, synthetic construct
  misc_feature 1..3507: note = Description of Artificial Sequence: Synthetic coding sequence
  source 1..3507: mol_type = other DNA
atgtcgtggttttccggcctcctggttcctaaggtcgatgagcgtaagacagcttggggagaacgcaatggccagaagcggtccagacggaggggaacacgcgctggcggcttctgcactccaagatacatgagctgcctaagagacgcagagccaccttccccgacaccagccggccctccaaggtgcccatggcaggatgacgccttcattcggagaggtggcccaggcaaaggcaaggagctgggcctgagagcagttgcccttggctttgaggacaccgaagtgacgacaacagccggcggaaccgctgaagtggcccctgacgccgtcccaagatcaggtagatcttgttggcggagactggtgcaagtatttcaatcgaaacagttccggtcagccaagctggagcgtctctaccagcggtatttctttcagatgaatcaaagctccctcaccctgttaatggcagtcctggtgctgctgaccgccgtccttctggcttttcacgctgcacccgcacgcccacagccagcttacgtcgcactgctcgcctgtgccgctgctctgtttgtaggacttatggtagtgtgcaatagacactcgtttcggcaggactccatgtgggttgtaagctacgtggtactgggcatcctcgccgccgtgcaggtgggtggcgccctggccgccgatccccgctcccccagcgcgggcctgtggtgtccagtcttctttgtatatatcgcctatactctgctacctatcaggatgagagcagccgtgctcagcggcctgggcctcagcacccttcatctcatacttgcctggcagcttaatcgaggggacgccttcctgtggaaacagctcggcgctaacgtcctgctgtttctgtgcaccaacgtgattgggatctgtactcattacccagccgaggtgtcccagcgccaggcatttcaagagacgagggggtatatccaggctcgactgcacctccagcatgagaatcgtcagcaagagaggctgcttttgagtgtactgccccagcatgtggcgatggagatgaaggaggatatcaacacaaaaaaagaggatatgatgtttcataaaatctatattcaaaaacacgacaatgtgtcaatcttattcgccgacattgagggcttcaccagcttggccagccagtgcaccgctcaagaacttgtaatgacgctgaacgagctgttcgctcggtttgataagctggccgcggagaaccattgtttgcgcattaagatacttggggattgctattactgcgttagtggattaccagaggcgcgggcagatcatgcccactgctgcgtagagatgggagtggatatgattgaggctatctccctcgtgcgcgaagtcactggggtaaacgtgaacatgagagtgggtatccactcagggcgagtccactgtggagttctcgggctccgcaagtggcagttcgacgtttggtccaacgacgtaactcttgccaaccatatggaggcaggcggacgggccggtagaatccatataacgagggctactttgcagtatctgaatggagactacgaagttgagccgggtcgcggaggcgaacgtaacgcctacctgaaagagcaacacatcgagaccttcctgatcttaggcgcctctcagaagcggaaagaggagaaggctatgctggctaagttacagcgaaccagagccaacagtatggagggcctcatgccacgttgggtgcctgatagggcattctcccgaaccaaagactctaaggcatttcggcagatggggatagacgacagcagcaaggacaatcgcggcacacaggacgcactgaatccagaggatgaagtggatgagttcctgtcaagagctatcgatgcacggtccatcgatcaactgaggaaggaccatgtgcggcggttcttgctaacatttcagcgagaggatctggagaaaaagtacagtcggaaggtcgaccctcgcttcggagcatacgtggcatgtgcattgctggtcttctgttttatctgtttcatccagctcttgatatttccacactcaactctgatgcttgggatctacgcctcgatatttctgctgttactgatcactgtgctcatatgtgccgtgtacagctgcggctctctcttcccaaaagccctacaacgactctcccgttctatagtgaggagccgggcacatagcaccgcagtggggatattcagtgtgctgctcgtttttactagcgcgattgcaaatatgtttacttgtaaccacacaccaattaggtcatgcgctgccaggatgcttaacctcacccccgccgacatcaccgcctgccatttgcagcagctgaattactccttgggtctggacgcacccctgtgtgaaggaactatgcccacctgcagcttccctgagtacttcattggcaacatgctattaagcctacttgcatcaagtgtgttccttcatatcagcagcatcggtaagctcgcgatgatatttgtgctaggcctaatctatctggttctgctcctcctcggcccacccgcaaccatctttgacaattatgacctgctcctaggcgtgcacggcctggcatcctctaacgaaacatttgacggcctcgattgcccggccgccggaagggtcgccctgaaatacatgaccccagttattctgctcgtgtttgctttggctctctatctgcacgctcaacaggtggaaagcacggctaggcttgacttcttatggaaactgcaggctacaggagaaaaggaagagatggaagaattacaggcttataatcgcaggctgctccacaacatcctccctaaagacgtggcagcgcattttctggcgagggagagacgcaatgacgagttgtattatcagtcgtgcgaatgcgttgctgtcatgtttgcctccatcgccaatttttcagaattttatgtggaactggaggctaacaatgaaggagtggagtgtttgcggcttctcaatgagataattgcagattttgacgagattatctcagaggagcggttcaggcagcttgaaaaaatcaagactatcggcagcacatacatggccgcttccggcttgaacgcctctacctacgaccaggtgggtagaagccatattacagccctagcagactacgccatgagacttatggagcaaatgaagcatatcaacgaacactcttttaacaatttccaaatgaagatagggctgaacatgggccctgtggtagctggagttataggggcacgtaaacctcaatatgatatctggggaaacactgttaacgtatcgagtaggatggacagcactggtgttcccgatagaattcaggttacaacggatctttaccaggttctagctgccaaagggtaccaactagaatgtcggggcgtggtgaaagtgaaagggaaaggcgaaatgactacctatttcttaaacggaggcccctcctcatag

SEQ ID NO: 107495 - DNA, 3348 bp, synthetic construct
  misc_feature 1..3348: note = Description of Artificial Sequence: Synthetic coding sequence
  source 1..3348: mol_type = other DNA
atgagctggttctcaggactattggtccccaaggtcgacgaacgaaaaaccgcgtggggcgagcggaatggacagaagcgaagtagaaggagaggaactcgagctgggggattctgcaccccccggtatatgtcctgcctaagagatgctgagccaccgtctccgacaccagcaggtcctcctagatgcccctggcaagacgacgccttcatacggcgtgggggaccgggcaaaggcaaggagttgggactccgggctgtggcgctgggtttcgaagatacagaggttaccacaacagccgggggcacggccgaggtggcccccgatgcagtccctagatctggccgctcctgttggcgtagactggtgcaggtcttccagtccaaacagttccggagcgctaaactggagcgcttatatcaaagatatttcttccagatgaatcaaagctctctgactttactgatggccgtgctcgtcctactgacagccgttctgctggccttccacgctgctccagcaagaccccaacccgcgtatgtggcccttttggcttgtgctgccgccttgttcgtgggtttaatggtggtatgtaataggcatagtttcagacaggactcgatgtgggtagtttcatatgtggtccttggcattctagccgccgtccaggtcgggggcgccctggccgccgaccctcggtccccttcagccggcctgtggtgtccggtgtttttcgtctacatagcctacacgttacttccaatccgcatgagagcagccgtcctgagtggcctgggccttagcactttgcatctgattctcgcctggcagcttaatagaggagacgcatttctctggaaacagctgggtgctaatgtgctgctgtttctgtgtacaaatgttatcggtatttgcacacactaccctgctgaagttagccagcggcaggcctttcaggagacacgcggatacattcaggcacgactacatctgcaacacgaaaataggcagcaagaacgcttattgttgagtgtcctacctcagcatgtcgctatggaaatgaaagaggatataaatacaaaaaaagaggatatgatgtttcacaaaatctacattcagaaacatgataatgtctcaattctattcgcagacatcgagggtttcacctccttagcaagccagtgcacggctcaggagttggtaatgactttgaacgaactctttgctcggttcgacaaactcgctgccgaaaaccattgccttaggatcaagattctaggcgactgttactattgcgtgtctgggctccccgaagcacgcgccgatcacgctcactgttgcgtggagatgggagtcgatatgattgaagccattagcctggtgagagaagtgaccggggtcaatgtcaatatgcgggtgggtattcactcgggtagggttcattgcggagttttggggctccggaagtggcagttcgatgtctggagtaacgacgttacactggcaaaccacatggaggctgggggcagggcaggcaggattcacattacgcgggcaactctccagtacctcaatggagactacgaagtagaaccaggtcgggggggtgagcgcaacgcctatctgaaggaacagcatatcgagacgttcttgatcctcggcgcttctcagaaaagaaaggaggagaaggccatgctagcaaaactacagcggacccgcgccaatagcatggaggggcttatgccgagatgggtgcctgatcgcgccttctccaggacaaaagactcaaaggccttcagacagatgggcatcgatgattcctccaaagacaatcgcggaacacaagacgcccttaacccagaggacgaggtcgacgaattcttatcaagagccattgatgccagatccatagaccaattacgaaaggatcatgtccggcggttcctgctcactttccagcgagaggatcttgagaagaaatattctaggaaggtggatccacgtttcggggcgtacgtcgcctgcgctttgctggtattctgcttcatctgcttcattcaactgctcatctttccccattcaactctgatgttagggatctatgcatcaatttttcttctgttactgattacggtactaatttgcgcggtgtatagttgcgggtccctgttcccaaaagccttgcaacggctgagccggtctatagttcgctccagggcacacagcactgcagtgggcattttttccgtactgctcgtgttcacttcagccatagcaaacatgtatttcattggcaacatgcttcttagcctcctggcctccagtgtgttccttcacattagcagcatcggcaagctcgccatgattttcgtcttaggcttgatctatttggttctactccttctcgggccgcccgcaactatctttgataactacgatctcctattaggagtccacgggcttgcctcctctaacgagacattcgacggacttgattgtccggctgccggacgtgtggccttgaagtacatgaccccagtgatactgctcgtgtttgcactggctctgtacctgcacgcccagcaggtcgaaagcactgctagacttgactttctgtggaagctgcaagcaaccggtgaaaaagaggagatggaagaactccaagcctataaccgccggcttctccacaacattttgcctaaggacgtggccgcacactttctcgctagagagaggcgcaacgacgaattatattatcagtcgtgcgaatgtgtagctgtcatgtttgcttcaatcgcaaatttttccgagttttatgtggagctggaggccaataatgagggcgtcgagtgtctgcggttgctgaacgaaatcatcgccgactttgatgagatcatctccgaggaacggtttagacagttggaaaaaataaagacgattggatctacatatatggcagccagcgggctcaatgcctctacatacgaccaggtgggccggagtcatattacggccctcgcagactatgcaatgaggttgatggagcagatgaaacatattaacgagcactccttcaataatttccaaatgaagattggattaaacatggggcctgtcgtcgccggtgtaataggtgcaaggaaaccccagtacgatatttgggggaacactgttaacgtgtctagccgcatggacagtacaggcgtgcctgacagaattcaggtgacaaccgatttgtatcaggtccttgccgccaagggttatcagctggaatgccggggagtagtgaaagtcaagggcaagggggagatgaccacgtacttcttgaacggcgggccttcatcctag

SEQ ID NO: 107496 - DNA, 3348 bp, synthetic construct
  misc_feature 1..3348: note = Description of Artificial Sequence: Synthetic coding sequence
  source 1..3348: mol_type = other DNA
atgagttggttttccggactcttggtgcctaaggtggacgaaaggaaaacagcctggggggaacgaaatggacaaaagcgttcaagaaggcgcggcacacgtgcaggcggattttgtacgcctagatacatgagctgtctgagggatgccgagccgccttcccctacgccggccgggccgccaagatgcccttggcaggacgacgccttcattcggcgagggggtcccgggaagggcaaggaattaggcttacgagcggttgccctcggctttgaagatactgaagtgaccactactgccggtggcactgccgaagtcgcccctgatgcagttccaaggtcaggcagaagctgctggcgaaggctggtgcaggtcttccagagcaagcagtttagaagcgccaaattagagcgtttatatcaacgatacttcttccagatgaaccaatccagtctgacgttattgatggccgtgctcgtgctgcttactgcagtcctgctcgcttttcacgcagcgcctgccagacctcaaccggcgtacgtggccctgctggcctgtgccgccgctctgtttgtgggattaatggtggtttgcaatcggcatagcttcaggcaggattccatgtgggtcgtgtcctacgttgtcctgggcatcttggcagccgtgcaagtgggtggcgccctagccgccgacccccggagtccctcagctgggctgtggtgccccgtgttcttcgtgtatattgcttacacccttctgccaatcaggatgagagccgcggtactgagtggtctgggattgtcaacactccaccttatcctggcatggcaactcaacagaggagacgcctttttgtggaaacaattgggtgctaatgtactgcttttcttgtgtactaacgttattgggatatgtacgcattaccccgccgaggtctctcagaggcaggcctttcaggaaacgcggggctacattcaggctcggctccaccttcagcacgagaacagacagcaggagcgtttgctgctttctgttctgccacagcacgtcgccatggaaatgaaggaagatatcaacaccaagaaggaggatatgatgtttcacaagatctacatccagaaacatgacaatgtgagcattttattcgctgacattgaaggcttcacatcccttgcctcccagtgcaccgctcaagagctggttatgacattgaatgagctattcgcccgtttcgacaagctggctgccgaaaatcactgcctgcgaataaaaatcctcggagactgctactattgcgtgtcgggccttcccgaggccagagccgaccacgcacactgctgtgtggagatgggcgttgatatgattgaggctatctcacttgtgcgggaagtgaccggcgttaatgtgaacatgcgggtggggatccactctggcagagtccattgcggcgtgctggggcttaggaaatggcagttcgacgtctggtccaatgatgtaacattggctaaccacatggaggcaggcgggagggccggaagaattcacatcactcgggccacactccagtatctgaatggcgattatgaagtagagccaggacggggcggggagcggaatgcatatcttaaggaacagcacattgagacgttcctgatcctgggtgcatcccagaagaggaaggaagaaaaggccatgctggctaagctccaacggaccagagccaactccatggaaggcctgatgccccgctgggtgcccgatcgcgcttttagcagaacaaaagactctaaggcattccgccaaatgggcattgatgactcctctaaggacaatcgggggactcaggatgccctcaacccagaggacgaggtagatgagtttctcagcagggctatcgacgcacgctcaatagaccaattgcgcaaagaccatgtccggagatttctccttacattccagagggaagacctcgagaagaagtactctcggaaggtggatcctcgttttggggcctatgtggcatgcgcactccttgtgttttgctttatctgcttcatacagctgctcattttcccgcactcaacactcatgctgggaatctacgccagcattttcctgctgctgttgatcactgtgctgatttgcgccgtatatagctgcgggtctctgttccctaaggctctgcagagactaagtcgctctatcgtgcggagcagggcccactccacagccgttggaatcttttctgtcctcctagtctttacctccgcaatcgccaacatgtatttcattggtaatatgcttctaagcttgctcgcgtcttctgtctttttacacatatcttcaatcggcaagttagctatgatcttcgttctgggcctgatctatctggtcctgttactcctcggaccacctgcaacaatatttgacaactatgatctgctgctcggtgttcacggactggcatccagtaatgagacctttgatggcctagattgcccggccgcggggagggtggcactgaagtacatgaccccggtcatcctgctggtctttgcactggcactatacctgcacgcccagcaggtcgagagcacggctcgactggacttcctctggaaattacaagccactggcgaaaaagaggagatggaggagctccaggcttacaatagacggctcctccataatattctcccaaaagatgtcgccgcccactttctggcgagagagcggcggaacgatgaactgtattaccaatcttgcgagtgtgttgctgtgatgtttgctagtatagctaacttttccgagttttatgtggagctggaagctaacaacgagggcgtggaatgcctgcgcctgctgaatgaaattatcgcagatttcgacgagatcatcagcgaagagagattcagacagttggaaaaaatcaaaactatcggctcgacctacatggctgccagcggccttaatgctagcacgtacgaccaggtggggcggtcacatattacagccttagccgattacgcgatgcgcttaatggagcagatgaagcacattaatgagcactcttttaacaacttccaaatgaagataggactgaatatggggcctgtagtcgcaggcgtgatcggcgccaggaaaccccagtacgacatttggggtaacactgtaaacgttagtagtaggatggatagtaccggcgtgcccgatcggatccaggttacaaccgatctgtaccaggtcctggccgccaaagggtatcagttggagtgccgtggtgtggtgaaagttaagggcaaaggagagatgaccacttattttctgaacggaggaccttcaagttag

SEQ ID NO: 107497 - DNA, 3243 bp, synthetic construct
  misc_feature 1..3243: note = Description of Artificial Sequence: Synthetic coding sequence
  source 1..3243: mol_type = other DNA
atgcctgctaaaggcaggtacttcctgaatgagggcgaggagggcccagatcaagacgcactgtacgagaagtaccagctgactagccagcacggacccctcctcctgactctgttgttggtggccgcaaccgcctgcgtggctctgatcattatcgcattctcacagggagatccttccaggcaccaagccatattaggcatggccttcctcgtgctagcagtctttgcggccttgagtgtgctgatgtacgttgagtgcttgctcaggcgctggctgcgagccttagctttgctcacctgggcttgtcttgttgcgctgggctatgtgcttgtgtttgatgcgtggacaaaagctgcttgcgcttgggaacaggtacctttcttcctttttatcgtgttcgtcgtttatacactgctgccgtttagtatgcgaggagcagttgccgtgggggccgtgagcactgcatctcatctcctcgtcctgggcagcttgatgggcggatttaccacaccatccgtaagggtcggcttgcaattactggcaaacgccgtcatcttcctgtgtgggaatctaacgggcgcgttccacaagcatcagatgcaggatgctagcagggatctcttcacatatactgtcaagtgtatccaaattcgtcgcaagctgcggattgagaagcgtcagcaggaaaacctgctgctatcagtgctgcccgcccacatcagtatggggatgaagttggcaattattgagagactgaaggaacacggcgataggcgctgcatgccggacaacaactttcatagcctgtatgtgaagaggcatcagaacgtgtctatcctatacgccgatattgtgggattcacacaactggccagcgactgttcccctaaagagctggtcgtagtgctaaatgaattattcggcaagttcgaccaaatcgccaaagctaatgaatgtatgcgaatcaaaatccttggcgactgttattactgtgtgagtggcttgcccgtcagcctgcccacacacgcccggaattgtgtgaaaatggggctcgatatgtgtcaggctattaaacaggttcgagaggccaccggagtggatatcaacatgcgcgttgggattcactcgggaaacgtactttgtggggtgatcggcctgcgtaaatggcagtatgacgtgtggtctcacgatgtctccctggctaacagaatggaggcagccggggtaccagggcgggtccacatcaccgaagccaccctgaaacacctggataaagcatatgaggtggaagacggccacggacagcaaagggacccctacctgaaggagatgaacatcaggacttatcttgtgatagatccaagatcccagcagccacctccgccctctcagcacctccctcggccaaagggcgacgcagcattaaagatgagggcatcagttaggatgacgcgttatctggagtcctggggcgctgccaggccattcgcccatctgaatcacagggaatccgtgtccagtggggagacccatgtccctaatggccggaggcctaaaagcgtacctcagcgacacagaagaacacccgaccgctctatgagtcccaagggacggtccgaggatgacagctatgacgacgaaatgctgtccgccatcgaagggctgtcaagcacccgcccgtgctgttctaagagtgacgacttctacacattcggttccatattcctggagaaagggttcgagagagagtataggctggctccaattcctagagccagacacgattttgcttgcgcatcactgatcttcgtgtgcattttgctcgtgcacgtgctgctgatgccacgcaccgcggcgctgggcgtgtctttcggactagtggcatgcgttctcggattagttctcgggctttgcttcgctacaaaattctctaggtgctgtccagcgcgcgggacgctgtgtactatctctgagcgggttgaaactcaaccactccttcgtcttaccctggctgtgttgaccataggctcactgcttaccgttgcaattattaatctccctctcatgccctttcaggtcccagagctgccggtgggcaacgagaccggattgttagctgcaagcagcaagacgagggcactgtgcgaacccctgccctattatacctgctcttgtgtcttaggctttattgcatgtagtgtgttcctgagaatgtctctcgagccaaaggttgtcctgttgacagtggcgctagttgcctacttggtactgtttaacttgtcaccctgctggcaatgggattgctgcgggcaaggactcggcaatctgaccaagcctaatgggaccacttccggcactccatcttgcagctggaaagacctcaagacaatgaccaatttttacctagtgttgttttatatcaccctgctgaccttgagtcgtcaaatagattactactgtagacttgattgcctctggaagaaaaagttcaaaaaggagcacgaagaatttgaaacgatggaaaacgtgaaccgattgctcctcgagaatgttctgccggcgcacgtcgctgcacacttcatcggtgacaagctgaacgaggactggtaccatcaatcctacgattgcgtttgcgtgatgtttgccagtgtaccggatttcaaggtcttctataccgagtgtgacgtaaataaggaggggctggaatgcctccgactgttgaatgagatcattgcagacttcgacgagctcttactgaagcccaagttttccggggtagaaaaaatcaaaaccatagggtcaacttatatggcagccgccgggctgagcgtggcaagtggtcacgagaaccaggagctggagcggcaacatgcccacatcggagtgatggttgaatttagcatagccctgatgagtaagctggacggaatcaatcggcattcattcaactccttcaggcttagagtcggcatcaaccatggtccggtgattgccggtgtcataggggctcgcaaaccccaatacgatatctggggtaacactgtgaacgtggcttccagaatggagtccacaggggaactgggcaagatccaggtcactgaagaaacatgcactattctccagggcctgggctactcctgtgagtgccgagggttaatcaacgtaaagggaaaaggcgagttgcggacatatttcgtctgcaccgacactgccaaatttcagggcttggggctgaattag

SEQ ID NO: 107498 - DNA, 3243 bp, synthetic construct
  misc_feature 1..3243: note = Description of Artificial Sequence: Synthetic coding sequence
  source 1..3243: mol_type = other DNA
atgcctgcaaagggccgttattttcttaacgaaggcgaggaaggcccggaccaggacgccctgtacgaaaagtatcagctcacatctcaacatggtccattactgctcacacttctgcttgtggcagccactgcgtgtgtagccctcatcattattgctttctcgcagggcgacccttccaggcaccaggcaatcctcggcatggccttcctcgttctggccgtttttgccgccctctctgtcttgatgtatgtggagtgtctcctgagaaggtggctcagggccttggccctgctcacttgggcttgcctggtggccttaggttatgtgctggtcttcgacgcctggaccaaagcagcgtgtgcctgggaacaggtgcccttcttcctgttcatcgtctttgtagtttatactcttctccccttttccatgcggggagccgtggctgtgggagcagtgtcgacggccagccacctgttagtcctgggctcacttatgggaggattcacaacacctagtgtgagggtaggccttcagctgctggcgaacgcagtcatctttctgtgtggtaacttaaccggagccttccacaagcaccagatgcaggatgcatctcgagacctattcacttacacagtgaagtgcattcagatccggcgaaaacttcgcatcgagaagagacagcaggagaatctcttactctcagttttacccgcccatatcagtatggggatgaagttggcaataattgagcggcttaaggaacacggcgacagacgatgtatgcctgacaataattttcacagcctttatgtcaagagacaccagaacgtgagcattctctacgccgatattgtgggatttacgcagctggcgtccgattgtagccccaaggagctggtggttgttctgaatgagctgttcggaaagttcgaccagatcgcgaaggctaacgagtgcatgcgcattaaaatactgggggactgctactattgtgtaagcggattgcctgtgtcactgcccacccacgccagaaactgcgtcaagatgggcttagacatgtgtcaagccatcaagcaggtgagggaggccacgggggtcgatattaacatgagagtgggcatccatagtgggaacgtcctttgtggcgtcatcggcctgcgaaagtggcaatacgatgtctggtcccacgatgtgtcactcgctaacaggatggaagcggccggtgtaccaggccgagtgcacattaccgaagcaaccctcaagcacctggacaaagcttacgaggttgaagatggacacggacagcagcgcgatccatacctgaaggaaatgaacattcgcacatacctggtgatcgatccaagatcacaacagccgcccccccccagccagcacctgcccaggcctaaaggcgacgcagctttgaagatgcgcgcgagtgtgagaatgactagatatctggaaagctggggagctgcccgcccgtttgcccacctcaatcatagagagagtgtctcctcgggcgagacccacgttcctaatggccggcgccccaagagcgtgcctcagaggcatcgccggacccccgaccgtagtatgtcccctaagggccggtctgaggacgattcctacgatgacgagatgctaagcgccattgaaggactgtcgtcgacaaggccttgttgctctaaaagtgacgatttctacacttttgggagcattttcctcgagaaagggtttgaaagggaatatagactggctccaatcccaagagcacgtcacgacttcgcttgtgcatcactgatattcgtgtgtattctgcttgttcatgtacttctgatgcctcgtaccgctgcgctaggagtgtctttcggcctggtggcttgtgtcctgggtctcgttctgggcttgtgcttcgcaactaagttttcacgatgttgtcccgctagggggacactctgtactatatctgagcgggtcgagactcagcctctcctacggctgacactcgccgtgctgaccattgggtctttgcttacagtcgccatcatcaatctaccgctcatgccatttcaggttcctgagctaccagtggggaacgaaaccgggcttttggctgcatctagcaagacaagagctctctgcgagcccctgccttactatacttgctcttgcgtcctggggttcattgcttgctcagttttcctgagaatgagcttagaacccaaggtcgtattgctaaccgtggctttggtggcttatctcgtgctctttaacctgagtccttgctggcagtgggactgctgcggacaggggcttgggaatctcaccaagccaaacggtacaacctccggcaccccttcctgctcttggaaggacctcaaaaccatgaccaacttttatctcgtgctcttttacatcacactgctgacacttagtagacagattgattattactgcagattggactgtctgtggaagaagaaatttaagaaggaacacgaagagttcgagacaatggagaatgttaatagactattactagagaatgtgctgccagcccacgtcgccgcacacttcattggtgacaaacttaacgaagactggtaccaccagtcttatgattgcgtgtgtgtgatgttcgctagcgtccctgatttcaaagtcttctacacagagtgcgacgtgaacaaagaaggtttagagtgtttgcgtctgctgaatgaaatcatcgccgacttcgacgaactcttgctgaagcctaaattttctggagtcgagaaaatcaagacaatcggtagcacttatatggctgcagccggcctctctgtggcttccggtcatgaaaaccaagagctagagaggcagcacgcccacattggggtgatggtggagttctccattgctcttatgagcaagctggatgggattaaccggcatagcttcaatagttttcggctcagggtcggaattaaccatggtcccgtcatcgcaggcgttatcggggctagaaagcctcagtatgacatctggggtaatacagttaacgttgcgtcccgaatggaaagcactggcgaactcggaaaaatccaggtgacggaggagacatgtacaattctccagggattgggatactcatgtgaatgtcgggggctgattaacgtaaagggcaagggagaactcaggacgtatttcgtttgtacagacacagcgaagtttcagggcctgggcttgaactag

SEQ ID NO: 107499 - DNA, 1302 bp, synthetic construct
  misc_feature 1..1302: note = Description of Artificial Sequence: Synthetic coding sequence
  source 1..1302: mol_type = other DNA
atgccagctaagggacgttatttccttaacgagggcgaggagggacctgatcaggatgcactatacgagaagtatcagcttacgtctcagcacgggcccctcttgctgactcttcttctggtggcagccaccgcgtgtgtggcactgataattatcgccttcagtcaaggtgacccgtcacggcaccaggctatcctcgggatggctttcttagttctggccgtgttcgcggccctctctgtgctcatgtatgtcgaatgcctgctcagacggtggctccgagcattagctctcttaacctgggcctgtttggttgctctggggtacgttttggtgtttgacgcctggactaaagcagcctgcgcctgggagcaggtgccattcttcttgttcatagtgttcgtcgtctacactctcttgccttttagcatgaggggagcggtagcagtcggggctgtcagcaccgcatctcacctgttggtgcttggctctctcatggggggctttacaaccccaagcgttcgcgtgggcctgcaacttttagccaatgcagttatcttcctgtgcggaaatttgacgggagcatttcataagcaccagatgcaggatgcatctagggacctatttacatacaccgttaagtgcattcaaattcggaggaagctgcgtatcgagaagcgacaacaggaaaacctgcttctcagcgtcctgccagcccacatatctatgggaatgaagcttgctataattgaacgactgaaggaacacggggaccgccggtgcatgcccgataataacttccactcactttatgtcaaacggcaccaaaacgttagcatcctctatgctgacattgttgggttcacccaacttgcctctgactgctcccctaaagagttggttgtggtgcttaacgagctcttcgggaagtttgaccagattgcaaaggccaacgagtgtatgcgaatcaagatactgggagactgctattattgcgtgagtgggctgcctgtttctttgccaacccacgctcgaaactgtgtaaagatgggcctggatatgtgccaggctataaaacaggtgagagaagccaccggggttgatattaacatgcgcgtgggtatacattctggcaatgtcctttgcggcgtgatcggactccggaaatggcagtatgacgtctggtcccatgacgtgtcacttgccaaccgcatggaagccgccggagtgcccggaagggttcatatcactgaggctactctaaaacatctagacaaggcactgctcctccaggtaaggtag

SEQ ID NO: 107500 - DNA, 2205 bp, synthetic construct
  misc_feature 1..2205: note = Description of Artificial Sequence: Synthetic coding sequence
  source 1..2205: mol_type = other DNA
atgccggcgaagggcagatattttctgaatgaaggcgaggaggggcctgaccaagacgccctatacgaaaagtaccagctgacctcacagcacgggccactcctcctcacgctcttacttgtggccgcaaccgcttgtgtcgccttaatcataatagcctttagtcagggggacccatcccggcaccaggccatccttggaatggcgttcctggtgctcgcagtctttgccgcgctgagcgttctgatgtacgtcgagtgtttattaagaagatggcttcgggcgctcgctctactgacctgggcctgcttggttgcactggggtatgtcctcgttttcgacgcatggactaaagccgcctgtgcctgggaacaggtcccgtttttcctttttatcgttttcgtcgtgtacaccctgctgcccttcagcatgaggggcgccgtggccgtgggagccgtctcgaccgcctcacacctgcttgtccttggcagcctcatgggtggcttcactacccccagcgtcagagtaggtttacagctgctagcaaacgctgtgatatttctctgtggcaacctcacaggtgcgttccacaagcatcaaatgcaggatgcctctcgggacctattcacatataccgtgaagtgcatccagatccgtcgaaaactccggatcgaaaaaaggcaacaagagaacctactgcttagcgtgcttcctgcccacatttcaatgggcatgaaactcgccatcattgaaaggctgaaagaacacggcgaccggaggtgcatgcccgataataatttccacagcctgtacgttaagcgccaccagaatgtgtcaattctgtacgccgacattgttgggttcacccagctcgcgtcggattgctcaccaaaggagctggtcgtggtcttaaatgaactatttggcaagtttgatcagatcgccaaggccaacgaatgcatgcggataaagatcctgggcgactgctattattgcgtgagcggattacccgttagcctgcccacacatgcgaggaattgcgtcaagatggggctcgacatgtgccaggcaataaagcaggtgagggaggcaacgggtgtggatatcaatatgagggttggaatacattctggtaatgtactgtgtggcgtaattgggttaaggaagtggcagtacgatgtttggtcgcacgatgtttcactcgccaaccgaatggaggcagctggtgtaccgggccgggtccacataacagaagctactctgaagcacctggataaagcctacgaagtggaggacgggcatggccagcaaagggacccttatctcaaagaaatgaacatccggacttatctggtcattgatccccgtagccagcaacccccaccaccgagccagcacttaccccggcccaaaggcgatgcggctctgaaaatgcgcgcatcagttcgaatgacccggtatctggagtcctggggggctgctaggccttttgcccatctcaaccaccgagagtctgtttcgagcggtgagacacacgttccaaatgggcgaaggcccaagtccgtgccccagcggcacaggaggaccccggatcgatctatgtcccctaagggccgcagcgaggacgattcctatgatgatgagatgctctctgcaattgaggggctctctagcacccggccatgttgtagcaaatctgatgatttctacacatttggctccatctttttggaaaaggggttcgaacgcgaataccgcttggcacccatcccgagagcccggcacgatttcgcttgcgcttctttgattttcgtgtgcatactgcttgttcatgtcttgctaatgccgaggacagccgccctgggagtttcttttggcttggtggcttgtgtgcttggcctggtgctgggtctatgtttcgccacaaagttctcacgatgttgccccgctaggggaaccctgtgcaccataagcgaaagagtggagacacagccattgctgagactgaccctcgccgtgcttactattggtagtctgctgaccgtggcaattatcaacctgcccttaatgcccttccaggttccggaacttcctgtgggcaatgagacaggccttctggctgcatccagtaagacgcgggcactttgtgagcctctgccccacttgcacactgtcttctcccggctgaacgagctgacatcctag

SEQ ID NO: 107501 - DNA, 3756 bp, synthetic construct
  misc_feature 1..3756: note = Description of Artificial Sequence: Synthetic coding sequence
  source 1..3756: mol_type = other DNA
atggaactgtctgatgtgaggtgtctgactggctccgaggagttgtatacaatacatcctacccctccagctggagacggcaggagtgcttcgagaccacagaggctgctctggcagacggctgtacgccatatcacagaacagcggtttatacacggtcatcgcggcgggagtgggtcaggatccggtggtagtgggaaggccagtgatcctgcaggcggagggccaaaccatcatgccccccaactctctggggacagcgcactgccactttattctcttgggccaggcgaacgggctcactctacttgtgggactaaggtattcccagagcgatccggaagcggctccgcctctggttccggaggaggtggtgacctcgggttcttgcatctggactgcgccccctctaattctgacttttttctgaacgggggatatagctacaggggcgtgatattccctactttgagaaacagttttaaatccagagatttggaaaggctttaccagagatacttcttgggacagcggaggaaatccgaagtagttatgaacgtactcgatgtcctgaccaagcttacgttgctggtgctccatctcagtctggcgagcgcccccatggaccctctgaagggtatcctgctgggtttttttaccggaattgaggtggttatctgtgcactcgtggtagttaggaaggacactacatctcatacgtacctccagtattctggcgtggtaacctgggtggcaatgactacccaaatactggccgcagggctgggatatgggctcctgggggacggtatcggctacgttctgtttacgctctttgcaacatactccatgctgcccttacctcttacctgggcgatcctggccgggttgggtactagcttgcttcaagtaatcctccaagtcgtgatcccccgccttgcggtgatttcgattaatcaagttgtagcccaggcagtcttattcatgtgtatgaataccgcgggtattttcatttcgtatctctccgatcgggctcaacggcaggccttcctagaaacacgtagatgcgttgaagcaagactgagacttgaaacggaaaaccagcgccaagaaaggttggtcctgtcagtacttcctcgatttgttgtgcttgagatgatcaatgacatgacaaatgttgaagatgagcatctccagcatcagtttcacagaatttacatccatcggtatgagaatgtcagcattctgttcgcagatgtcaaagggtttacgaatctttcaactaccttaagcgcacaagagctcgttaggatgcttaacgaacttttcgcccggtttgataggttagcccacgagcaccattgcttgagaattaagatcctgggggactgctactactgtgtttccgggttacctgaaccacgccaggatcacgcccactgttgcgtggaaatgggactatctatgatcaaaacaatccgttatgtcagaagccgaaccaagcacgatgtggacatgcgcatcggcatccattcaggtagcgtgctgtgcggggtgctaggcctgaggaaatggcagttcgacgtctggtcatgggatgtcgacatcgctaataagcttgaatccgggggtattcctggtcggatccacatctctaaggcaaccctcgattgcttgaatggcgactacaatgtggaagaggggcatggcaaggagagaaatgaatttttaagaaaacataacattgaaacctatttgatcaaacagccagaggacagcctattgagtctccctgaagatatcgtgaaagagtcggtatcttctagcgataggagaaactctggcgcaacctttaccgaggggagctggagccccgaattacccttcgacaatatcgtggggaagcagaacacattagcagcactcacacgaaactcaataaacctgctgccgaaccacctggcgcaagctcttcacgtgcagtctggacctgaggaaatcaacaagaggatcgaacacactatcgatctgaggtctggcgacaaactgagaagggagcacattaaaccgtttagtctcatgttcaaggattccagcctcgaacacaaatacagccagatgcgggacgaggtgtttaagagcaacttggtctgcgctttcatcgtgctcctctttataaccgcaatacagtctctccttccatccagccgggtaatgccaatgacgattcagttttccatactgatcatgctgcattccgccctcgtgttaattacaaccgcggaggactataagtgtctgcctctgatactccgcaaaacctgctgttggattaacgagacatacctcgcacgcaacgtgataattttcgcctcaatactgataaacttcctgggggctatcctgaacatcctgtggtgcgacttcgataagagtattcctcttaagaatctaactttcaattcctctgccgtattcactgatatctgttcttacccagaatactttgtgtttaccggggtgctcgctatggtgacttgcgccgtgttcttgagactaaactcggtgctcaagctggcggtactgcttattatgatcgccatatacgccttattgacggaaaccgtgtacgcgggactattcctgaggtacgataacttaaaccactccggagaggacttcctcggcaccaaggaagttagtctactgctgatggctatgttcctactagccgttttctaccatggacaacagcttgagtatacggcccggttggattttctgtggcgggtacaggccaaggaagaaattaacgaaatgaaggagctgcgtgagcataatgagaacatgctgcgaaatatcctgccgagtcacgtggccagacactttctggagaaggaccgggacaacgaagaattatattctcagagctatgatgccgtgggtgtcatgttcgctagtatacctggattcgccgatttctattcgcagaccgaaatgaacaaccagggcgtggagtgcttgaggttgcttaatgaaatcatcgcggattttgatgagctgctaggtgaggatcggtttcaagacattgaaaagatcaagactattgggagcacatatatggcagtctctggtctgagcccggaaaaacagcaatgcgaggataagtggggtcacctatgtgctcttgccgactttagcctcgctctgaccgagtcaatccaggaaattaacaagcacagcttcaataactttgaactgaggatcggtatcagtcatggctcagtggtggcgggggtgattggggccaagaaacctcaatacgacatctggggcaagacagttaacctggcatctagaatggactcaacgggagttagcggcagaattcaggtgccagaggagacgtacctcatcctgaaggaccagggtttcgcgttcgactacaggggagaaatttacgttaaaggaatctccgagcaggagggcaagattaaaacatatttcctgctgggacgggtccagccaaatcctttcatcttgcccccgcgtaggttaccggggcagtattctttggcagctgtcgttttaggcttggttcagtcgctgaaccgccaaagacagaaacaattgcttaacgaaaataataataccgggatcattaagggccactacaaccgtagaacgctcctatcaccgtccggcaccgaaccgggagcccaggcagaaggtactgacaagtctgacttgccttag

SEQ ID NO: 107502 - DNA, 4062 bp, synthetic construct
  misc_feature 1..4062: note = Description of Artificial Sequence: Synthetic coding sequence
  source 1..4062: mol_type = other DNA
atggccagcccaccccatcaacaactactgcaccaccactccactgaagtctcctgtgacagctctggcgactctaattccgttcgcgtgaaaatcaaccccaaacagctcagttctaacagccatcctaaacattgtaagtatagtattagctcctcttgttcaagtagtggggattccggcggagtgcccaggcgggttgggggtggaggacgcttgagaaggcagaagaagctgccacagctgtttgagagagcgagttcaagatggtgggatcctaagttcgattctgtcaatctggaagaggcatgtctggagcggtgcttcccccagacacagcgccggttccgctacgctctgttttatatcggtttcgcttgtctgttgtggtctatctattttgcagtacacatgcgcagtcggttaatcgtgatggtggcccctgccctctgtttcctgctcgtgtgtgtgggcttttttctgtttacatttacgaagctgtatgcaagacattacgcatggaccagcctagcactgactctgttagtctttgccctcacactggccgcacagttccaagtgctgactccggtgtctggcaggggggatagtagtaatctcactgcaaccgcaaggcccaccgacacatgtctgagccaagttggctctttttctatgtgcatcgaggtgctgttcctgttgtacactgttatgcacctgccactatatctgtcactctgcttgggtgtcgcatactcagtgctttttgaaacttttggttaccatttccgggatgaggcctgcttcccctccccaggtgcaggcgcccttcactgggaattgctctctcgcggcctgctccatgggtgtattcacgcgatcggtgtgcacttgtttgtgatgtcacaggtgaggagccggagcactttcctcaaggtgggccaatctattatgcacggcaaggacttagaggtggagaaagccctcaaggaacgcatgattcactctgtgatgccaaggatcatcgcggatgacctgatgaaacagggggacgaagaaagtgaaaactccgtaaaacgtcacgccacttctagcccaaagaacaggaagaaaaaatccagcatccagaaggcgccgattgcgtttagaccattcaagatgcaacagattgaggaggtcagtatcctgtttgcagacattgtcggcttcacgaagatgtcagccaataagagcgcccacgcattggtcggacttctgaacgatttattcggcaggttcgaccggttatgtgaagaaacaaagtgcgaaaaaatttccacccttggtgattgttattactgcgttgccggctgtcccgagcctcgcgccgatcatgcatattgttgcattgagatggggctggggatgattaaggctattgaacagttctgtcaggaaaagaaagagatggtgaatatgcgcgtcggcgttcatacaggcacagtgctgtgcggaattctgggaatgcgtagatttaagtttgatgtgtggtccaatgatgtcaacttggcgaacctgatggagcagttgggtgtggctggcaaggtgcacataagtgaggccacggctaagtatttagacgacagatatgagatggaggatggcaaagtgattgagaggctcggccaaagcgttgtcgccgatcaactaaagggcctgaaaacctaccttatcagtggtcagcgcgccaaggagagccgatgttcgtgcgcagaggcactactgagtggcttcgaggtcattgatgggtctcaggtaagctcaggcccccggggccagggaaccgcgtcatcaggcaatgtgtccgacctggcacaaactgtgaaaactttcgataatctgaaaacatgcccttcgtgtggtatcacattcgcacctaagagtgaggccggtgcagagggaggggccccccagaacggctgccaagacgagcataagaactcgactaaggcaagtgggggaccaaaccccaagactcagaatggactgctgagcccaccacaagaggaaaagctgactaacagccagacctccctctgcgaaatactgcaagagaagggtcgatgggccggcgtgtctctagaccagtcggccctcctccccctcaggtttaaaaatatacgagaaaagaccgatgcccattttgtcgacgtgattaaggaagactctctgatgaaggactacttctttaaacctccaatcaaccagttctccctgaacttcctcgatcaggaattggagaggtcgtacaggacttcctatcaggaggaggtcataaaaaactccccagtgaaaacattcgcttcacccacatttagttccctgttggacgtgttcttgagtacaaccgtgtttctaacattgagcaccacttgtttcctgaaatacgaggccgccacggtgccccctcctcccgctgcattggcggtcttcagcgctgccctgctgttggaagtgttgtctttggctgtatccatcaggatggtctttttcttggaagacgttatggcttgtacaaagagactcctagagtggatcgccggttggctgcctcggcactgtataggcgctatcctagtttcgcttcctgctctggcagtttattctcatgtgaccagcgaatacgagactaacatacacttcccagtgttcaccgggtccgccgcgctcatcgcagtcgtgcactactgtaacttttgtcagttatcttcttggatgaggtcaagcctcgccacagttgttggtgctggtcccctcctgctgctgtacgtctcactgtgcccagactcttctgttctcacatcgccactcgacgccgtgcaaaatttcagcagcgaacgcaacccatgcaatagctccgtcccgagagatctcagaaggcctgccagtctcattgggcaggaggttgtgctcgtattcttcttgctgctcctcctggtatggttcctgaatcgagaatttgaagttagctacaggctgcattaccatggcgacgtagaggccgacttacatagaaccaagatccagagtatgagagaccaagcagattggctcctacggaatatcataccctaccacgtggcagagcagctcaaggtgtcacaaacctattccaaaaatcatgacagtggcggagtgatattcgccagcattgtgaatttctccgaattttacgaagaaaactatgagggaggtaaggagtgttaccgcgtcctgaatgaattgatcggcgattttgatgagttgttatcgaaacccgattactctagtatcgagaaaataaaaacaatcggggcgacatatatggccgcctccggactgaacacagcacaggcgcaggacggaagccaccctcaggaacacctccagatcctgttcgagttcgccaaggaaatgatgcgggtggtggatgactttaataataacatgctttggttcaactttaaactgagggtgggtttcaatcatgggcctctgacagcaggggtaatcggtacaactaagctcctgtacgacatctggggggacacggtgaatatagcttcgagaatggacacaactggcgtagaatgtcgcatccaggtgagcgaggagtcctatcgcgtactctctaagatggggtacgatttcgattacagagggaccgtgaacgtgaagggaaaaggacagatgaaaacgtatctgtatcctaagtgcaccgaccacagagtgattccccagcaccagctttctatctcacccgacatccgggttcaagtggacggtagcataggtcggagccctacggatgagatagccaacctcgtaccaagcgtccagtacgtcgacaagactagcctaggctcagatagtagcacccaggcaaaggatgcccacctttcccctaagaggccctggaaggagccagttaaggcagaagagcggggaaggtttggcaaagctatcgagaaagacgattgtgacgaaactggtatcgaagaggcaaatgagctgacaaagctgaacgtctcaaaaagtgtgtag

SEQ ID NO: 107503 - DNA, 531 bp, synthetic construct
  misc_feature 1..531: note = Description of Artificial Sequence: Synthetic coding sequence
  source 1..531: mol_type = other DNA
atgaccatgtgctcaggagcccgactagccctgctcgtatatggcatcattatgcatagtagtgtctactcctcacccgccgctgctggccttagatttcccggaattaggccagaagaggaagcttacggtgaggacgggaacccactgcccgattttgatggaagcgaaccacctggcgcaggctcccccgcctctgcaccaagagccgccgccgcgtggtaccgtccagcgggtcgaagggatgtggcccacgggatcctgaacgaagcctacagaaaggtcttggaccaactgtctgcgggaaaacacctgcagagcctcgtagctcggggggttggggggtccttgggggggggggctggagacgatgccgaacctctgtccaagcgccatagcgacggcatcttcaccgatagctacagccggtataggaagcagatggctgtgaaaaagtacctggccgcggttctggggaaacgttataagcagcgtgttaagaataaaggacggcgaattgcctacctttag

SEQ ID NO: 107504 - DNA, 531 bp, synthetic construct
  misc_feature 1..531: note = Description of Artificial Sequence: Synthetic coding sequence
  source 1..531: mol_type = other DNA
atgacaatgtgttccggtgcccgcctcgcactgctggtgtacgggatcattatgcattcatctgtatattcttctccagctgccgccgggctcagatttccgggcattcggccagaagaggaggcttatggcgaagacggcaatcccttgcctgacttcgatggctccgagccgcctggcgcaggttcaccagcctccgcccctagggcagctgcagcctggtacagaccggcaggaagaagggacgtggcccatggaatcctcaatgaagcatacagaaaagtcctggaccagctgtctgccgggaaacacctgcagtctctcgtggcccggggcgtggggggttcactgggcgggggagctggggatgacgcggaacccctctccaagaggcatagcgacggcatattcaccgatagttacagtaggtaccggaagcaaatggcagtgaagaagtacctcgcagccgtgctcggaaagcgctacaaacagagggtgaaaaacaagggacgcaggattgcttatttgtag

SEQ ID NO: 107505 - DNA, 948 bp, synthetic construct
  misc_feature 1..948: note = Description of Artificial Sequence: Synthetic coding sequence
  source 1..948: mol_type = other DNA
atgctgactaagcgcgctttgcaaaagccctgctccgaccgattcctgcgcaccgcacagataaacagaagccgaagaccagtgacttccgtgacctcaggctcttcttcccgaagtcgtgctagtccccatagaccattattcctctcttcagccagcttatctgcacctccgagtcttcgggtcacgctgccccctggctctgcccgcctgcagacttttgaacaaaacacgagtctaggaaagagggttccccagctgctactccttctgcccctggtgccggctgcctccgcccagactcctacacctgacggcgacgcatcccgagtagtgacaccagctcaagagctggaggaggccttgtgtccacctagttatcttgctgcactgctcgcagccggcggagttgagggcatgaccatgtgcagcggcgcccgattggccctcttggtgtacggaattatcatgcattccagtgtttactccagtccagctgcggcgggcctgcggtttcccggcatacggccggaagaagaagcttatggagaggacggcaatcccctacctgattttgacggaagtgagccgcccggtgccggatcccccgctagcgccccacgcgcagccgctgcttggtaccggcccgctgggaggcgggacgtagcccacggtattttgaacgaggcctatcgcaaggtcctggaccagctgtctgcggggaaacaccttcagtcgctggttgccaggggcgtgggtggaagcctaggcggaggcgctggggacgatgccgagccacttagtaaacgccattcggatggtattttcacagactcctacagcaggtataggaagcaaatggccgtcaagaagtacttagccgcagtcctcggaaagcggtacaagcagagagtcaaaaataagggaaggagaattgcgtacctctag

SEQ ID NO: 107506 - DNA, 531 bp, synthetic construct
  misc_feature 1..531: note = Description of Artificial Sequence: Synthetic coding sequence
  source 1..531: mol_type = other DNA
atgactatgtgcagcggagccaggctcgcactgttggtgtacgggattattatgcactcctctgtgtacagctcgccggctgctgccggtctcagattccccggtattcggccggaagaagaggcatacggcgaagacggcaaccccctgccagattttgatggctctgagccccctggggctgggtcacctgcgtccgctcctcgggcagcagccgcctggtaccgccccgcagggcggcgagatgtagcacacggaattctcaatgaggcctataggaaggtgctggatcagttgtctgctggcaagcacctgcagagtctggttgccagaggcgtaggcggttctctgggcggcggtgctggagacgatgccgaaccgctatccaagcgccactccgatggaattttcactgactcctattcccggtacagaaagcagatggccgttaaaaagtacctcgccgccgtgctaggcaaacggtacaaacaaagggtgaagaataaggggcgaagaatagcttatctttag

SEQ ID NO: 107507 - DNA, 1407 bp, synthetic construct
  misc_feature 1..1407: note = Description of Artificial Sequence: Synthetic coding sequence
  source 1..1407: mol_type = other DNA
atggcaggggtagtgcacgtgtctctagctgctctgcttctcctgccgatggctccagccatgcacagcgattgtatctttaaaaaggaacaggcgatgtgcctggaaaagatccagcgtgcgaatgagctgatgggcttcaatgactcaagtccaggttgccccgggatgtgggacaatatcacctgctggaagcccgctcacgtcggtgagatggtgctcgtgagctgtccggagctatttcgaatttttaaccccgatcaggtgtgggagactgagacgatcggggagtctgacttcggcgacagcaatagtctagatttgagtgacatgggcgtggtctcacgcaactgcacggaggatggttggagcgaaccttttcctcattattttgatgcatgtggcttcgatgagtacgaatctgaaaccggggaccaagattactactatctcagtgtcaaggctctctatacagtagggtacagtacatccctcgttacattgactaccgcaatggtgattctttgcagatttcggaagctccactgcacccggaactttattcacatgaatttgtttgtatcttttatgctgcgtgctatcagtgttttcatcaaggactggatcctctatgcggaacaagacagcaatcactgtttcatatcaaccgttgagtgcaaggctgttatggtcttctttcattactgtgtggtgtctaattacttttggctcttcatcgaaggcttgtatctgttcacattgttagtggagacattttttccggagcgaaggtatttttattggtatactatcattggatgggggacaccaacagtttgcgtgactgtctgggcaactctgcgactgtacttcgatgatactggatgttgggacatgaacgactctactgccctttggtgggtgattaaaggacctgttgtcgggtccatcatggtgaacttcgtcctcttcattgggataattgtaatattggtgcaaaaactgcagagtccagatatgggtggaaatgagagctcaatttatctgagacttgcaagaagtacattgctattaattcctctgttcggaatccattataccgtgtttgctttctcaccagagaacgtgtcaaaaagggaacgactggtttttgagctcggcctcggctcattccaggggttcgtagtcgcagtgctgtactgtttcctcaatggtgaggttcaagcggaaatcaaacggaaatggcggtcatggaaggttaatcgatattttgctgttgattttaaacacagacacccatccctcgctagcagcggtgtgaacgggggaacgcaacttagcatacttagcaagtcaagctcccagatccggatgtccggtcttcctgcggataacctggccacatag

SEQ ID NO: 107508 - DNA, 594 bp, synthetic construct
  misc_feature 1..594: note = Description of Artificial Sequence: Synthetic coding sequence
  source 1..594: mol_type = other DNA
atggtattctttcactactgtgtagtctccaattacttctggctgtttattgagggactgtatctgttcactctactggtcgaaacttttttccctgagagacggtatttctactggtatacgattattggatggggtacacccacggtctgcgtgaccgtgtgggcaactctgcgcctctatttcgatgatactggatgttgggatatgaatgactctaccgccttgtggtgggtgatcaaggggcccgtggtgggctccatcatggttaactttgtgctctttatcggcatcatcgttatcttagttcagaagctgcagagcccagatatgggcggcaatgagtctagcatctatctgactaacctcagccccagagtgcccaagaaggcaagggaggatcccttgccagttccctctgatcaacacagtcttccttttctttcctgcgtacagaagtgctactgcaaaccacaaagggcacaacaacacagttgtaaaatgtctgagctgagcacgatcaccctgcgcctggctaggagcactctgttgctgatcccccttttcgggatacactacacggtttttgcctag

SEQ ID NO: 107509 - DNA, 1491 bp, synthetic construct
  misc_feature 1..1491: note = Description of Artificial Sequence: Synthetic coding sequence
  source 1..1491: mol_type = other DNA
atggcaggcgtggttcacgtgagtctggccgccctcctcctgctgcccatggcccccgcgatgcattcggattgtattttcaagaaagagcaagctatgtgtttggaaaagattcagcgcgccaatgagctgatgggtttcaacgactcctcccccgggtgcccaggaatgtgggataacattacctgctggaaaccagctcacgtaggcgagatggtgctggtctcatgcccagagctctttaggattttcaatcctgatcaggtgtgggagaccgagactattggcgagtccgatttcggagatagtaattctctcgatctttcggacatgggcgtcgtaagtcgcaattgcactgaggacggctggtcagagccttttccccactatttcgatgcttgcggctttgacgagtacgagtcagaaacgggcgaccaagattactactacctgagtgtgaaagccctgtacaccgtggggtactccacctctctagtaacactgactacagccatggttatcttgtgcaggttccggaagctccactgtacgagaaacttcattcacatgaatctctttgtctcgtttatgctcagagcaatatcggtgttcataaaagactggattctctatgccgagcaagacagcaaccactgcttcatatcaacagtggaatgcaaggctgtgatggttttcttccattactgtgtggtgagtaactacttttggttgtttatcgagggcctctacctgtttacactgttggtggaaacctttttccccgagaggcgctacttctattggtatactattatagggtggggcacgcctacggtatgcgtgacagtgtgggccaccttacggctctactttgatgataccgggtgttgggatatgaatgactccaccgccctgtggtgggtgattaaagggcctgtggtgggatccatcatggtcaacttcgtcctgtttattgggatcatagtaattctggtccaaaagctgcagagtcctgatatgggaggcaacgaatcgtccatatatttctcctgtgtgcagaagtgttattgtaagcctcagagagctcagcagcattcatgcaaaatgtcggagctttccacgattaccctgagactggcacgctcgactttactcctgatccccctgttcggcatccactacacagtttttgctttctcacccgagaacgtctctaaaagggagaggcttgtgtttgagttgggattgggcagcttccaagggtttgttgtcgcagtgctctactgttttctaaacggagaagtacaggcggagatcaaacgaaagtggcggagttggaaggtgaaccggtattttgcagtcgattttaagcatagacatcctagtctggccagctccggggtgaacggggggacacagctaagcatactctcaaagtccagcagccagatccggatgtcaggcctcccagccgataacctggctacttag

SEQ ID NO: 107510 - DNA, 1575 bp, synthetic construct
  misc_feature 1..1575: note = Description of Artificial Sequence: Synthetic coding sequence
  source 1..1575: mol_type = other DNA
atggctggtgtggtccacgtttccttggcagctctgcttctgctgcctatggcgcccgcaatgcactccgattgtatttttaagaaggaacaagcaatgtgtctagagaagatccagcgggccaatgaactcatgggattcaatgactctagccccggctgccctggcatgtgggacaatatcacctgttggaaaccagcgcacgtaggcgagatggtcctggtgtcatgcccagagttgtttcggatctttaacccagatcaggtctgggaaactgaaacaataggagagtcagattttggcgacagcaattccttggacctctctgatatgggagttgtgtcccgtaactgcactgaggatggttggtctgagccctttccccactattttgatgcatgcggattcgatgaatatgagagcgaaaccggcgaccaggattattattacttatctgtgaaggccctgtacacagtcgggtactccactagcttagtgactctgaccacagcaatggttatcctgtgcagatttcggaagcttcattgtacaagaaattttattcatatgaatctgttcgtgtctttcatgcttcgcgccatcagtgtattcatcaaggactggatcttgtacgctgaacaagacagtaaccactgctttatctcaaccgtagaatgcaaggctgtgatggtattcttccattattgtgtagtgagcaactatttttggctattcattgagggattatatctctttaccttactggttgaaactttcttccctgaacggaggtatttttactggtatacaatcattggatggggcaccccaaccgtgtgtgtgactgtgtgggcaaccctgaggctctatttcgacgatactggctgctgggacatgaatgattcaacagccttgtggtgggtaataaaaggaccagttgtaggaagcatcatggtgaatttcgtgctgttcattggaatcatagtaattctggtgcaaaaacttcaaagtccagacatggggggcaacgagtcatcaatttaccttactaatctgtcacccagagttcctaagaaggccagggaagatcccctgccagtgccctcggatcagcacagtcttcctttcctcagctgcgtgcagaaatgctattgcaagccgcagcgtgcccagcagcattcctgcaagatgagtgaactgtcaaccattaccttgagacttgcgcgctctacactcttgctgataccactgttcgggattcactacactgtctttgcattttccccagagaatgtctctaagagagagcgattggtgtttgaattaggactggggtcctttcaggggtttgtcgtcgccgttctttactgctttttgaatggcgaagtgcaggctgagattaagcggaagtggaggagctggaaggtcaacagatactttgcagtggactttaagcaccggcacccatcactggcttcaagcggagtcaacggcggtacccagttatccatcctgtccaaatcttcaagtcagatccgcatgagcggcctgcccgccgataacctcgctacatag

SEQ ID NO: 107511 - DNA, 225 bp, synthetic construct
  misc_feature 1..225: note = Description of Artificial Sequence: Synthetic coding sequence
  source 1..225: mol_type = other DNA
atggccggtgtggtgcatgtaagcctcgctgccctcctactgctccccatggcacctgcaatgcatagtgactgtatcttcaagaaggagcaagcaatgtgcttggaaaagattcagagggcaaatgagcttatgggctttaacgattcatcacctggttgccccggcatgtgggataacataacctgttggaaaccagcccacgttggggaaatggtactgtag

SEQ ID NO: 107512 - DNA, 447 bp, synthetic construct
  misc_feature 1..447: note = Description of Artificial Sequence: Synthetic coding sequence
  source 1..447: mol_type = other DNA
taggcaacgttaagactctatttcgatgacactggatgttgggacatgaatgattccactgccctctggtgggtcatcaaaggaccggttgtaggtagcatcatggtgaattttgtcctcttcatcgggatcatagtgattctggtgcaaaaactgcagtcacctgacatgggcggcaatgagagttccatctaccttacaaacctcagcccgcgtgtgcccaaaaaggcacgggaggatcctttgcctgtgccatccgaccagcacagtcttccatttttacgtttagctcgcagcactctgctgctcatccccctgttcgggatccactacaccgtgttcgcattttccccagagaatgtatcaaaacgggagcgattggtattcgaactgggtctcgggtcctttcaaggtttcgtggttgctgtcctgtactgttttctgtag

SEQ ID NO: 107513 - DNA, 1344 bp, synthetic construct
  misc_feature 1..1344: note = Description of Artificial Sequence: Synthetic coding sequence
  source 1..1344: mol_type = other DNA
atggcaggcgtggtccatgtgtcactggctgccttgctgctgctgcccatggccccagcaatgcactctgattgcatcttcaaaaaggagcaggccatgtgccttgagaaaatccaacgagccaacgaactcatgggttttaacgattcctccccaggctgtcctggaatgtgggacaacataacatgctggaaaccggcacatgtgggagagatggtcttggtgtcgtgccccgaactgtttagaatattcaatccagatcaggatatgggagtcgtatcaaggaattgcacggaggatggctggtccgagccattccctcattactttgatgcttgcgggtttgacgagtatgaaagtgagacaggagaccaagattattactacctttccgtcaaggcactatataccgtgggctacagcaccagcctggtcacactgacgaccgccatggtcatcctttgtcggttccggaaactgcattgcacgaggaactttattcacatgaacctgttcgtctcgtttatgctgcgcgcaattagcgtgtttataaaggactggattttatatgccgagcaagactctaaccattgctttatctcaaccgttgagtgtaaggccgtaatggttttcttccattactgtgtggtgtcaaactacttctggctgtttatcgaaggcctttatctgttcacactgctggtggagacattcttcccagagaggagatacttttactggtatacaatcataggctggggaactcccacagtatgtgtcactgtctgggccacactcaggctctacttcgatgataccgggtgctgggatatgaatgacagtacagctttatggtgggtgatcaagggacccgtggtgggctcgatcatggtcaactttgtcctctttattggcatcattgtgatcctcgtccagaagctgcagtcccccgatatggggggtaatgagtcttctatatacctcagactggcccgatcaactcttttgctgatcccgctgttcgggattcactataccgtgttcgccttcagccccgagaatgtgagtaaaagagaaaggcttgtctttgaactgggacttggcagcttccagggctttgtggttgccgtgctctactgcttccttaacggagaagttcaggccgaaattaagaggaaatggcgcagttggaaggtgaaccgctacttcgcagttgatttcaagcacagacatccgagcctggctagtagcggtgtgaacgggggtacacagctatctatccttagtaagtcatccagccaaatccggatgtctggtctaccggcagacaacctggccacctag

SEQ ID NO: 107514 - DNA, 705 bp, synthetic construct
  misc_feature 1..705: note = Description of Artificial Sequence: Synthetic coding sequence
  source 1..705: mol_type = other DNA
atggatcccggactgcagcaggctctcaacgggatggcccccccgggtgatactgcaatgcacgtgcccgctggcagcgtggcttcccacctggggaccacctccaggtcttatttctatttaacgacagccacgttagcgctctgcctggtgtttactgttgcgacgattatggtacttgtagtccagcgtacagatagtataccgaacagtccggacaatgtccccctgaagggaggcaactgttcagaggatctactctgtattctgaaaagggccccctttaaaaagagttgggcatatctgcaggtggctaaacacctgaacaagacaaagctgtcatggaataaagatggcatactgcacggcgtgaggtatcaagacggcaacctggtaatccagtttccaggcctgtattttattatctgccagctgcaattcctcgttcaatgcccaaacaactccgttgacttaaagctggagcttctgatcaacaaacacattaagaagcaggccctggtgaccgtgtgtgagtcgggcatgcagactaagcacgtctatcagaacctgtcccaatttcttctcgactatctccaggtgaatacgaccattagcgtgaatgttgacacgtttcagtacattgacacgagtacatttccattagaaaatgtgctgtcaatctttctgtactccaacagcgattag

SEQ ID NO: 107515 - DNA, 585 bp, synthetic construct
  misc_feature 1..585: note = Description of Artificial Sequence: Synthetic coding sequence
  source 1..585: mol_type = other DNA
atggaagagaaactgaaaaagactaagataattttcgtggtcggtggccccggatcaggcaagggcactcagtgcgaaaaaatcgtccagaagtacgggtacacgcatctttccacaggggatctgctgaggtccgaggtcagctccggctctgcccgcggaaaaaagctgagtgagattatggaaaagggccagcttgtgccgctggaaaccgtgctggacatgctgcgtgatgccatggtggctaaggtgaatactagcaaggggttcttgattgacgggtacccccgagaggtccaacagggtgaagaatttgagaggcgtatcgggcagcccacgttgctgctctacgttgatgcagggcccgagacaatgacccagaggctactcaaaagaggggaaaccagcggaagagtcgacgataatgaggagaccatcaaaaaaaggctagaaacttattataaggccaccgagccagtcatcgctttttacgaaaagcgcggcattgtccgcaaggttaacgccgagggaagtgtggattccgtattttcacaagtttgtacgcacttagacgcactcaagtag

SEQ ID NO: 107516 - DNA, 585 bp, synthetic construct
  misc_feature 1..585: note = Description of Artificial Sequence: Synthetic coding sequence
  source 1..585: mol_type = other DNA
atggaagaaaagctgaaaaagaccaagatcatatttgtggtcggcgggcctgggtccggcaaaggcacacaatgtgagaagatcgtgcaaaagtatggctacacccacctcagcacaggcgacctgctgagaagtgaggttagcagcggatccgcacgagggaaaaagttgagcgagatcatggagaaaggccagcttgtacccctcgaaacggtgctggatatgctgcgcgatgccatggtggcaaaagtgaatacttctaaagggtttcttattgatggttaccccagggaggttcaacagggggaggaatttgaacggagaatcgggcagcccacgctgctcctatatgtggatgccgggccagagaccatgacccagaggctacttaaacggggcgaaacttctggaagggttgacgacaacgaggagacaatcaagaagcggttggaaacctactataaggcaactgaacccgtgatagcattctacgagaagcgcgggatagttcggaaggtgaacgctgaaggcagcgtggactctgtctttagtcaggtgtgtactcaccttgatgcattgaaatag

SEQ ID NO: 107517 - DNA, 720 bp, synthetic construct
  misc_feature 1..720: note = Description of Artificial Sequence: Synthetic coding sequence
  source 1..720: mol_type = other DNA
atggcccccagcgtgccggccgccgaacccgaatacccgaaaggtatccgggccgtgttgctcggccccccaggagctggaaaaggaacccaggcgccaaggctggcagagaatttttgtgtctgccatctggccacaggagatatgctgagggccatggtggcttcaggatcagagttaggcaagaaattgaaagctacaatggacgccggtaaattagtaagcgatgagatggtagtcgaactgattgaaaagaacctggagacaccgctgtgcaaaaacgggttcttgctggacggtttccctcgtactgtccggcaggccgagatgcttgacgatttgatggaaaaacggaaggaaaaactggattctgtcatcgaattctcaatccctgacagtctgctcatccgacgcatcaccggtagactcatccatcccaaaagcggtagatcataccatgaagagttcaaccctcccaaagagccgatgaaggacgatataaccggcgagcccctcattcgcagatctgacgacaatgagaaagcactaaaaattcggcttcaagcctatcatacacagacaacaccacttattgaatactaccgcaagcgcggcatccacagtgccatagacgcaagtcaaactccagacgtggtgttcgccagcatccttgccgccttctccaaagcaacatgcaaggacctggtcatgtttatttag

SEQ ID NO: 107518 - DNA, 699 bp, synthetic construct
  misc_feature 1..699: note = Description of Artificial Sequence: Synthetic coding sequence
  source 1..699: mol_type = other DNA
atggctccctcggttcctgccgcggaacccgaatatccaaagggtattcgggcagtgctcctgggacctcctggcgccggcaagggaacccaggctcccaggcttgcggagaacttctgcgtgtgccatttggccacaggtgatatgctcagagccatggtggcatccggcagcgagctgggcaagaaattaaaagcaaccatggatgccggtaaacttgtaagcgacgagatggtggttgaactgatcgaaaagaatctggaaactcccctctgcaagaacggttttctgctggatggcttcccacgaactgtcagacaggctgagatgctcgacgacctcatggagaagagaaaagaaaaattggacagtgttattgagtttagcattcctgatagtctgttaattcggcgcatcactgggcgcctgatccacccgaaatctggacggtcctatcatgaggagtttaatcccccgaaagaacccatgaaagacgacattacaggcgagccactgataagacgatccgatgacaacgagaaggcactgaagattcggcttcaggcatatcatacacagactaccccactcatagagtattaccggaagcggggcatccattccgctatcgacgcctcgcagacacctgacgtggtttttgctagtatcctggcagctttctcgaaggcaacctcttag

SEQ ID NO: 107519 - DNA, 609 bp, synthetic construct
  misc_feature 1..609: note = Description of Artificial Sequence: Synthetic coding sequence
  source 1..609: mol_type = other DNA
atggctccgagcgtgccagcagctgagcccgagtatccaaagggcatccgggctgtgctgctcgggccccccggggccggaaagggtacacaggccccacggcttgccgagaacttttgcgtatgtcatttagcaacaggcgatatgttgcgggcaatggttgcatcaggttccgaactgggaaagaaacttaaggccacaatggacgcgggcaaattagtatccgacgagatggttgtcgaactaatcgaaaagaatttggagactcctctttgcaagaacggctttctgttagatggattccctcgcactgtaaggcaggcggaaatgctcgacgatctgatggaaaaaaggaaggagaagctggacagcgtcattgagttcagcatcccagacagtctgcttatccgccggatcaccggaagactcattcatcctaaatcagggcgttcctaccacgaagaattcaatccaccgaaagagcccatgaaagacgacattacgggagaacctttgattaggcgcagcgtgattggtcaagccaaaagaagcttcctccgcctggccaaaatcagtttcgatgtgctcattaaaaaggccctggcttag

SEQ ID NO: 107520 - DNA, 474 bp, synthetic construct
  misc_feature 1..474: note = Description of Artificial Sequence: Synthetic coding sequence
  source 1..474: mol_type = other DNA
atgactaggcttgcactgcacgagcttaaaaatcttacccagtactcttggctgctcgatggctttccccggacccttccacaggcagaagcccttgacagggcataccaaatcgatacagttatcaacctcaacgttcctttcgaggtgattaagcaacgcttaactgctcgttggattcaccccgctagtgggcgagtctacaacatcgagttcaatcccccaaagactgtgggaattgacgacttgacaggcgaacccctgatccagagagaggatgacaagcctgagacagtaattaaacgcctgaaggcttacgaagatcagacgaaacctgtcctggaatattatcagaaaaaaggcgtgctcgaaacctttagtggcacggagaccaacaagatctggccgtacgtttatgcctttctgcagaccaaagtgccacaacgcagccagaaggcctccgtaactccatag

SEQ ID NO: 107521 - DNA, 684 bp, synthetic construct
  misc_feature 1..684: note = Description of Artificial Sequence: Synthetic coding sequence
  source 1..684: mol_type = other DNA
atgggagcctcagcccgcctcctgcgtgctgtcattatgggggctccagggtccggaaagggcactgtctcttctcgaatcacaacacactttgaacttaagcacctcagcagcggcgatttgttgcgcgacaacatgctgcgcggcaccgagattggcgttctggccaaggcttttatcgaccagggaaagttaattccagatgacgtgatgacaaggttggcactgcacgaactgaagaaccttacccagtattcctggctgcttgacggctttcccaggacactgccgcaggccgaggcactggacagggcttaccagatcgacaccgttatcaatttgaatgttccttttgaagtcattaagcagaggctcaccgcacgctggattcatccagcctccggcagggtgtacaacatcgaattcaatcctccaaagactgtagggatcgatgacctgacaggagaaccactgattcaaagggaggacgataagccagagacggtgataaaacgccttaaagcctacgaggaccagacaaaacccgtgctcgagtattaccagaagaagggtgtcctggaaacctttagcgggaccgagacgaacaaaatctggccgtacgtctacgcctttctccaaaccaaggtgccccagcgctcacagaaggcctccgtaaccccttag

SEQ ID NO: 107522 - DNA, 564 bp, synthetic construct
  misc_feature 1..564: note = Description of Artificial Sequence: Synthetic coding sequence
  source 1..564: mol_type = other DNA
atgggcgcttctgcccggctcctgcgagctgttatcatgggggctcccgggagcggaaagggcaccgtgtcgtcaaggatcactacccatttcgagttgaaacacttgagtagcggtgatttgctgagagacaatatgctcagaggaaccggctttcccaggaccctccctcaggccgaggctcttgatcgggcctatcagatcgacactgtgattaatttgaatgtgccatttgaagtgatcaaacagcggctgacagctaggtggatccatccggcctctggccgcgtttacaacattgagtttaatcccccgaaaactgtggggatcgatgaccttacgggtgaacccctgattcagcgggaggatgacaagcctgagacagtgatcaaacggctgaaagcttatgaggatcagaccaaaccagtgttggagtactatcagaagaagggggtgcttgagaccttcagcggtacagagacgaacaaaatatggccttacgtttatgcgtttctgcagaccaaagtaccacagagatcccagaaagcctccgtcaccccctag

SEQ ID NO: 107523 - DNA, 474 bp, synthetic construct
  misc_feature 1..474: note = Description of Artificial Sequence: Synthetic coding sequence
  source 1..474: mol_type = other DNA
atgacacgactggcactgcacgagctgaaaaaccttacccagtattcttggcttctagacggatttccacggacactgccccaggccgaagcattggacagggcctatcagattgacacagtgatcaacttaaacgtaccatttgaggtgatcaaacagcgacttacagcacgttggattcacccagccagcggcagagtgtacaacatcgaattcaacccaccaaagactgttggcattgacgatttgaccggcgagcccttgattcaacgcgaagacgataagcctgagaccgttatcaaaagactcaaagcatacgaggaccagaccaaacccgtgctcgaatactatcagaagaaaggtgtgcttgagacattttccggcaccgagaccaataaaatttggccctacgtgtatgccttcttacagacgaaagttccccagcgcagccagaaggcctcagttacaccatag

SEQ ID NO: 107524 - DNA, 1611 bp, synthetic construct
  misc_feature 1..1611: note = Description of Artificial Sequence: Synthetic coding sequence
  source 1..1611: mol_type = other DNA
atgtgctcgaagccagaggaccctgtagaatatttagagtcatgtctccagaaggtgaaagagctgggtgggtgtgataaggtgaagtgggatacctttgtatcccaggagaagaaaacactgcctcctctaaatgggggccagtcccggaggagttttttgaggaatgtcatgcccgaaaattctaattttccttaccgccgctatgataggcttccaccgattcaccaatttagcatcgagtctgatacagatctgtcggagaccgcggagctgattgaggaatacgaggtgttcgaccccacacgcccacggcccaaaattatcctcgttattggaggccctggatctggtaagggcacacagtcattgaagatcgcagaaaggtacggtttccagtatatttctgtgggggagctgctcaggaaaaaaatacacagcacctcatccaatcgtaagtggtcattaatcgccaaaattatcacaaccggcgaactcgcccctcaagagaccaccattacagagataaagcagaagctgatgcagatcccagatgaggagggaatcgtgatcgacggcttcccccgcgacgttgcacaagccctgagctttgaagatcagatctgtacccctgacctcgtagtttttctggcgtgtgcaaatcagcgcctgaaggaaagactgctgaaacgcgcagaacagcagggaagacctgacgataacgtgaaggctacacagaggagactcatgaacttcaagcagaacgccgccccgctggtgaagtacttccaggagaaaggtctgattatgaccttcgatgctgaccgggatgaggacgaagtgttttatgacatcagtatggcagtcgataacaagctgttccccaataaggaggccgctgcagggtcttcagatctggacccttctatgatcctcgataccggcgagattatcgacaccgggtccgattacgaagatcagggggatgatcaactcaacgtgtttggtgaagatactatgggcggcttcatggaagatcttcgcaagtgtaaaatcatatttatcatcgggggacctggatcggggaagggaactcagtgcgagaagctcgtggaaaaatatggcttcacccacctctccactggtgagctgcttcgcgaggaactagcctcagaatctgagagaagtaagctcattagagacatcatggagaggggggacctggttccttctggcattgttctggaattgctgaaagaggctatggtggcttcattgggtgatactcgtgggtttctgatcgacggatatcctagggaggtgaaacagggagaggagttcgggcgcagaattggagacccgcagctggtgatttgtatggactgctccgccgacacaatgacaaacagactgcttcagcggagccggtcttccctgcccgtggacgatacaaccaagactattgccaagcggcttgaggcttattatcgtgccagcatcccagtaattgcctactacgagactaagacccaactccataaaatcaatgcagagggaacacccgaagatgttttcttacagctgtgtactgcaatcgactccatattctag

SEQ ID NO: 107525 - DNA, 1689 bp, synthetic construct
  misc_feature 1..1689: note = Description of Artificial Sequence: Synthetic coding sequence
  source 1..1689: mol_type = other DNA
atgaacactaatgacgccaaggagtaccttgcacgccgggagatcccccagttgtttgagtccctgttgaatggtctcatgtgcagcaagcccgaggatcctgtggaatatctggaatcatgccttcagaaagtcaaggaactcggagggtgtgacaaagtgaagtgggacacatttgtatcccaggaaaagaagactctgcctcctctgaatggcggccaaagcaggcgctcattcctgaggaacgtcatgcctgaaaactcaaactttccataccggcgctacgaccggttgcctcctatacaccaattctccattgaatcagacacagacctctctgaaactgcagagctaattgaagaatatgaagttttcgaccctacccggccgaggcctaagataatcctggttatcgggggccccggtagtggaaaaggcacgcaatctcttaaaatcgctgaaaggtatggcttccagtacatctcagtgggagaattgctgcggaaaaagatccattcaacatcatcaaatagaaaatggtctctgatcgccaaaatcattacgacaggcgaactggcaccccaagagacaacgatcacggaaatcaagcagaagctgatgcagatccccgacgaagaggggattgtgattgacgggtttcctcgggatgtcgcccaagcgctgagctttgaagaccaaatatgcacccccgacctggtggtgttcctggcttgcgccaaccagcgcttgaaagagcgactgttgaagagggcagagcagcagggtaggccggatgataacgtgaaggccacacagaggagactgatgaatttcaagcagaacgcagcccccttggtgaaatatttccaagagaagggtttgatcatgacattcgacgccgatcgagacgaagacgaggtgttttatgacatttccatggctgtagacaacaagctattccccaacaaagaggccgctgctgggtcctcagatttggatccttctatgatactggacacgggcgagatcattgacaccggcagcgactatgaggaccaaggcgacgatcaattaaacgtttttggcgaggacacaatggggggttttatggaggacttgagaaagtgcaaaataatttttattattgggggtccagggagcggaaagggaacgcagtgcgaaaagttggttgagaagtatggctttacacacttgagcactggagagttactgcgagaagaattagccagcgagagcgaaagaagtaaactgatcagagatattatggaacggggtgatttagtgcccagcgggatcgtgctggaactccttaaggaggcaatggtagccagcctcggtgatacaaggggtttcctaatcgatggttatcccagagaagtgaagcagggcgaggagttcgggcgccggatcggagaccctcaactcgtcatctgtatggattgctccgcggacacaatgaccaaccgtctgcttcaacggtctaggtcatctctgcccgttgatgacaccaccaaaaccatcgcaaagcggcttgaagcctattaccgggcctccatccccgtaatcgcctactatgagaccaaaacacagctccacaagattaacgcagaggggacccctgaggacgtctttcttcagctttgcacagccatcgattcaatcttctag

SEQ ID NO: 107526 - DNA, 531 bp, synthetic construct
  misc_feature 1..531: note = Description of Artificial Sequence: Synthetic coding sequence
  source 1..531: mol_type = other DNA
atgtgttccaagcccgaagaccccgtcgaatacctcgagtcttgtctacagaaggtcaaagaactgggcggttgcgacaaggtgaaatgggatactttcgtgagccaggagaagaaaacacttcccccgctaaatggaggacaatcacggcgaagttttctgagaaatgtgatgcctgaaaactccaacttcccttaccggaggtacgataggctgcctcctatccaccagttctctattgaatcggacaccgatctgagcgagaccgcggagctgattgaggagtacgaggtgtttgatcccacacggccacgtcccaagatcatactggtaattggcgggcctggcagcgggaagggcacccagagcctcaagatagccgagaggtatggcttccagtatatctctgttggcgagcttctgcgcaaaaaaatacactctacttcatcaaatcgcaagtggagcctcattgccaagatcatcacaacaggagagctcgctccccaagaaactacaattacagagatttag

SEQ ID NO: 107527 - DNA, 1647 bp, synthetic construct
  misc_feature 1..1647: note = Description of Artificial Sequence: Synthetic coding sequence
  source 1..1647: mol_type = other DNA
atggccaaattcatgacccccgtgatccaggacaatccctcagggtggggcccttgtgcggtgccagaacagttcagggacatgccctatcaacctttcagtaaaggggataggcttggaaaggtggcagattggaccggtgccacctatcaagataagcgctatacaaacaagtattcatcacagttcggcggaggctctcagtacgcatatttccatgaggaagacgagagttccttccagctggtggatacagcacgtactcagaaaaccgcttaccaaaggaaccggatgcgattcgcccagcgcaacctacgaagggataaggacaggaggaatatgctccagttcaaccttcagattctgcccaagtctgccaagcagaaggagagagagagaatcagattacagaagaagttccagaagcagtttggagtacgccagaaatgggatcagaagagccaaaaacctcgggactcttccgtagaggtccggtccgattgggaagtgaaagaagaaatggattttccccagttgatgaaaatgaggtatctggaggtgtctgaaccgcaggatattgagtgctgcggcgctctcgagtactacgacaaagcttttgaccgaattactacgaggtccgagaagcccctcagatctatcaaacgaatattccacactgtgacaacgacagacgaccccgtaatcagaaaactggccaagacccaggggaatgtgtttgccacagacgcaatcttggccacgctgatgtcatgtacccggagtgtctactcgtgggacattgtggttcaaagagtgggatctaaacttttcttcgacaaacgcgataattcagatttcgacctgctcactgtctctgaaaccgctaacgagcctccacaggatgaaggcaactcatttaactctcctcgaaatctggccatggaggcaacctacataaatcacaatttctcccagcaatgcttgagaatgggaaaagaaaggtacaatttccctaacccgaaccctttcgtggaggatgacatggataagaacgagatagcatcggtagcttaccggtatagacgatggaagctgggagacgatatcgatctgatcgttagatgcgaacacgatggggtgatgactggggcgaacggggaggtgagctttatcaatatcaaaactctaaacgaatgggattcccggcattgcaacggcgtggattggagacagaaattggactctcagcggggtgccgtgatcgcaactgagctcaagaacaactcgtacaagttagcaaggtggacatgctgcgcccttctggccggcagtgaatatctgaagttggggtacgtgtctcgctatcacgttaaggacagttcgcgccacgtcatcttgggtacgcagcagtttaagccaaacgaatttgctagccagatcaacttgtctgttgagaatgcatgggggatcttgcggtgtgtgatagacatctgcatgaagctcgaggagggcaagtacctgatcctgaaagaccccaataagcaggtgatcagagtgtattccctgccggatgggaccttcagtagcgacgaggacgaagaagaggaagaggaagaggaagaggaagaggaagaggaggagacctag

SEQ ID NO: 107528 - DNA, 1278 bp, synthetic construct
  misc_feature 1..1278: note = Description of Artificial Sequence: Synthetic coding sequence
  source 1..1278: mol_type = other DNA
atggctgctggaggcgatcacggctctccggactcctatcgatcacccctcgcgagccgatatgcaagcccagagatgtgttttgtttttagcgacagatataaattccgaacatggagacagctttggttgtggctggccgaagctgagcagacactgggacttcccattactgatgagcaaatacaggaaatgaagtcgaacttagagaacatcgactttaagatggctgcagaggaagaaaagcgcctcaggcatgatgtcatggcccatgtccatacattcggacactgctgcccaaaggccgctggaattatacatctcggggccactagctgctatgtaggagacaacacagacctcattatcttgcggaacgctcttgacctcctcctccctaaattggcaagagtgattagcagactggcagattttgcaaaggaaagggcctcactgcccacactagggtttacccattttcagccagcacagctgactacagtcggaaagaggtgctgcctgtggatacaggacctgtgtatggatctgcagaatctgaaaagagtacgggatgacctgagattcaggggtgtcaagggcactacagggactcaggccagctttctacaattgtttgagggtgacgatcacaaggtggagcagttggacaagatggtcacagagaaggctgggttcaagagggccttcattatcaccgggcagacatatacaagaaaagtggacatcgaagtcctgagcgtgctggctagcctgggcgccagtgtacataagatatgtactgacatccggctgctggcaaatctgaaagaaatggaagagccattcgaaaaacagcagatcggctccagtgccatgccttataaaagaaaccctatgagatctgagagatgctgttcgctggcccgtcatcttatgaccctggttatggaccctctgcaaacagcaagcgtgcaatggttcgaaaggaccctggacgattctgcgaatcgcaggatttgtttggccgaagcctttctgaccgctgacaccatactgaacacattacagaacatctcagagggcctcgtggtttatcctaaggttatcgaaagaagaatccgtcaagaactgcctttcatggcgacagagaatatcataatggccatggtgaaggcaggaggatcccggcaggttcaacggtttctcgaggaagaggtgtaccccctgctgaaaccatatgaaagcgtaatgaaggtcaaagctgaactttgcctctag

SEQ ID NO: 107529 - DNA, 1497 bp, synthetic construct
  misc_feature 1..1497: note = Description of Artificial Sequence: Synthetic coding sequence
  source 1..1497: mol_type = other DNA
atggccgcaggaggagatcacggatctccggattcttatcggtccccactggcttcaagatacgcttcacccgaaatgtgttttgtattttcagatcgctacaagtttcgaacgtggcggcagctgtggttgtggctggccgaagcggagcagactctcggactccctattaccgatgaacagatacaggaaatgaaatccaatctcgagaacatcgattttaaaatggccgcggaggaggagaagcgtctgcgtcacgatgtcatggcgcacgttcataccttcggccattgttgcccaaaggccgcaggaattattcacctgggggctacctcctgctatgtgggggataacacttcactgatcctgtctaggggagtgattaaggcttactgcaacctgcgcctccctggctctgacagcagccctgttagtgtctctcagctggctagagtcattagcagattagcagactttgctaaggagagggcaagcctccctaccctgggcttcacacactttcagcctgctcagctcacgacggtgggaaagaggtgttgtctctggattcaggacttatgtatggacttgcagaacctgaaacgcgttagagatgaccttcggttcaggggtgttaaagggactactgggacacaggcctcttttctccaactttttgaaggcgacgatcacaaggtagaacagcttgacaaaatggtaaccgagaaggcggggttcaaacgcgcattcattatcacaggccagacttacaccaggaaggtggacatcgaagtcctgagcgtgctcgcatccctcggagcctcggtccataagatctgtacagacatcagactcctagcaaaccttaaggaaatggaagagccgtttgagaagcaacagatcggaagcagcgcaatgccatacaaacgcaaccctatgcgatctgaacgatgctgctctctggctcgacacctgatgaccctggtcatggaccccctgcaaactgcttccgtgcaatggttcgaacgtaccctggatgactccgcaaataggcggatttgtctagcagaggccttcttaacagctgatacaatccttaataccctgcagaatatctcagagggattggtcgtgtacccaaaagttatagagcggagaatacgtcaggagttgccattcatggctactgagaacataatcatggccatggtgaaggcaggtgggtcgcgacaggactgccacgagaagatccgagtcctctcccagcaggcagccagcgtggtcaagcaagagggtggagataacgatttgatcgaaagaattcaggtggacgcttatttctctccgattcatagccagcttgaccacttactcgatccctcaagcttcactggtcgagcctctcagcaggtccagcggtttctggaggaagaggtgtaccccctgctcaaaccttatgagagcgtcatgaaggtgaaggccgagctttgcctgtag

SEQ ID NO: 107530 - DNA, 915 bp, synthetic construct
  misc_feature 1..915: note = Description of Artificial Sequence: Synthetic coding sequence
  source 1..915: mol_type = other DNA
atggacttacagaatttgaagcgagtgcgcgacgatctgagatttaggggcgtcaaaggtacaacgggcacccaagcatcctttctgcaactgttcgagggagatgaccacaaagtggaacaactggacaagatggtcactgagaaggccgggttcaagagagcctttatcatcactgggcaaacctataccaggaaggttgacatagaggtactgagcgtgttggcaagcctgggggcctcagtccataagatttgcacagacatccggcttcttgccaatctgaaagagatggaggaaccattcgaaaagcagcagatcggtagcagcgccatgccgtataagaggaatcctatgcgctcagagcgttgctgtagtttggctcggcatttgatgaccctggttatggaccctctccagacagcctccgtgcagtggttcgagcggacacttgacgatagcgcaaatagaaggatctgcctggctgaggcatttctgactgcggacacaattctgaacactttgcaaaacatcagcgaggggttggtggtttatcctaaagtcatagaacgtaggatcaggcaggagctgccctttatggccaccgagaacattataatggccatggtgaaagccggcggctcaagacaggactgccacgagaaaattcgggtgctatctcagcaggctgctagcgtcgttaagcaggaagggggagacaacgaccttattgagcgaatacaagtggatgcctatttttcaccgatccactcccagctggatcatttgctggacccctccagcttcacgggacgggccagtcagcaggtgcaaaggtttctggaggaggaggtgtatccgctgctgaagccctacgaaagcgtcatgaaagtgaaagccgagctctgtctgtag

SEQ ID NO: 107531 - DNA, 384 bp, synthetic construct
  misc_feature 1..384: note = Description of Artificial Sequence: Synthetic coding sequence
  source 1..384: mol_type = other DNA
atggcagctggaggcgatcatggcagccctgatagttacagatcaccattagcttcaagatacgcaagccccgagatgtgtttcgtgtttagtgacagatacaagttccggacatggcgtcagctgtggctgtggctggccgaggctgagcagacacttggactccctattactgatgagcagatccaggagatgaagagcaacctggaaaatatagattttaaaatggccgccgaggaggaaaaaagactccggcacgatgtaatggcacacgtccatacatttggccattgctgtcctaaggcagccgggatcatccatttgggggcgacatcctgctacgttggtgacaacacagtcggagcctgtgtcgtgtacacctag

SEQ ID NO: 107532 - DNA, 1371 bp, synthetic construct
  misc_feature 1..1371: note = Description of Artificial Sequence: Synthetic coding sequence
  source 1..1371: mol_type = other DNA
atggccttcgccgagacttaccccgcagccagcagcctgccgaatggggattgtggaaggcctcgggcgagacctggcggaaatagggtgacggtggtcctaggtgcgcagtggggtgacgaagggaaagggaaggtggtcgacctacttgcacaggacgccgacatagtgtgcaggtgccagggggggaacaatgccgggcatacagtcgtagtggatagtgtagagtatgattttcatctgcttccctccgggatcataaaccctaatgtcaccgcattcattggtaacggtgtggttatccacctccctggcctttttgaggaagctgagaagaatgttcagaagggtaaggggttggagggttgggaaaagcgtctgatcataagcgacagagcgcacatcgtctttgactttcatcaggctgcggatggaatacaggaacagcagcggcaggaacaggccggcaagaacttgggaaccacaaaaaagggtatcggccctgtctactcttccaaggccgcaaggagcggactcagaatgtgcgatttggtgagcgacttcgacggcttttccgagcgctttaaagtgctggctaaccagtacaagagtatataccctaccttggaaatagatattgaaggcgaactccaaaaactcaagggttatatggagaagatcaagccaatggtacgggatggagtctacttcttgtacgaggccctgcacggtccccctaagaagattctagtcgagggggccaacgccgcactgctggatatcgattttggaacttacccttttgtcacatctagcaactgtacagtcggcggcgtttgcactggactcgggatgccacctcaaaatgtaggggaggtctatggggtggtcaaggcctacaccacaagagttggcatcggcgcattccccactgaacaggacaatgaaatcggcgaactattgcaaacccgtggtcgagagtttggtgttaccacggggagaaaaagaagatgcggttggctggacctggtgctgcttaaatatgcccatatgattaacgggttcaccgccctcgccctcacaaagctcgacatattagatatgtttaccgaaataaaggtgggggtggcttacaagctggacggcgaaatcattcctcacatccctgcaaatcaggaggtgctgaacaaagtggaggtccagtacaaaaccctgccaggatggaatactgacattagcaacgcgagggcattcaaggagctgcctgtgaatgcacagaattatgtaagatttatcgaggatgagctccaaatccctgtgaagtggattggtgtggggaaatcccgggagagtatgattcagttgttctag

SEQ ID NO: 107533 - DNA, 1308 bp, synthetic construct
  misc_feature 1..1308: note = Description of Artificial Sequence: Synthetic coding sequence
  source 1..1308: mol_type = other DNA
atggcctttgccgagacgtatccagcagcctcgagcctccctaatggggattgcgatgagggcaaagggaaagtcgtggatctcctggctcaagatgccgacatcgtatgccggtgtcagggtgggaacaacgccggacacaccgtggtcgtcgactcagtcgagtatgatttccacctactgccctctggtattataaatcctaacgttacagccttcataggcaacggcgtggtcattcatctgcctggactttttgaggaggctgagaagaacgtacagaaaggaaaaggactggagggatgggaaaagaggctgattatctccgatcgagcccatattgtctttgattttcatcaagctgctgacggaattcaagaacaacaaaggcaggagcaagcaggcaagaatttggggacaacaaaaaagggcattggccccgtgtactccagcaaggccgccaggagcgggctgaggatgtgcgatctggtgagcgacttcgatggtttcagcgagcgcttcaaagtactcgccaatcagtacaaaagtatctatccaaccctggagatcgacatcgaaggggaactacagaagcttaaaggctatatggagaaaatcaaacccatggtgagggatggggtgtattttctgtacgaagcgctgcatgggcccccgaagaagattctggttgaaggagctaacgcagcgttattggatatcgatttcggcacatacccttttgtgacctcatctaattgcacagtcgggggcgtgtgtacagggcttggcatgccccctcagaacgtgggagaggtttatggagtggtgaaagcctataccacccgcgtgggtattggcgcattccccacagaacaagataatgagattggggagctcctgcaaacaaggggacgggagtttggggttaccaccggcagaaagaggcgttgtggctggctggacttggttctcttaaagtacgcccatatgatcaatggtttcaccgcactcgccttgacgaaattggatatccttgacatgtttactgaaatcaaggtcggagtggcgtataagctggacggcgagattatcccccacatcccagcgaaccaggaagtgctgaacaaggtcgaagtgcaatataaaacactgccaggatggaacactgacataagtaacgcccgggccttcaaggagctcccagttaatgcccagaactatgtgcggtttatcgaggatgaattgcagatccccgtgaagtggatcggcgtcggcaagtcaagagaatcaatgatccaactattctag

SEQ ID NO: 107534 - DNA, 1236 bp, synthetic construct
  misc_feature 1..1236: note = Description of Artificial Sequence: Synthetic coding sequence
  source 1..1236: mol_type = other DNA
atgtggatccagcaattactgggcctcagcagcatgtcaatcagatggccgggaaggcccttaggaagccacgcatggatactcatcgcgatgttccagctggccgtcgacctgcctgcctgcgaggctttggggccaggcccagaattttggttattacctaggagcccaccccgtccaccgagactgtggtcatttcggtctgggcagcctgccagggtgcccgcacccgtgtggagccctaggccaccccgcgtggagagaattcatggccaaatgcagatgcctcgagctagaagagcccatcggcctagagaccaggcggccgccctggtgcctaaggcagggctagccaaacctcctgcggctgcaaagagtagcccatccctggcaagttctagcagttcgtcatcctcagcggttgccggcggcgcgcccgaacagcaggctttactgcgaagaggaaaacggcatttacaaggcgatggtctgagttcattcgacagccgtggctcacggcccactactgagactgaattcatcgcctggggccccaccggcgatgaagaagccttagaatctaatacttttcctggcgtatatggtcccacaacagtcagcatactgcagaccagaaaaacgaccgtggcggcaaccacaacaaccacaaccaccgctactccaatgaccctccagacaaaaggatttaccgagtctcttgatcctaggcggaggatcccagggggcgttagcacaacggaacccagcacgagtccttccaacaatggcgaggtgactcaaccccctcggattttgggagaggcgagcgggctcgctgtccatcagattataacaataactgtttccctgatcatggtgatcgcggcattgatcacgacactcgtgctcaagaattgttgcgcacagtcgggaaacacaagacgcaattcacaccagcgcaaaactaaccagcaggaagaatcctgtcagaacttgaccgacttcccttctgcgcgcgttccttcctcgctcgatatcttcaccgcatacaacgagacactccagtgttcacacgaatgcgtgcgcgccagtgtacctgtctataccgatgaaactttgcactccactactggagagtacaagtccaccttcaatggtaaccgcccaagttcctctgaccgccacttgattcctgttgccttcgtgagcgagaagtggtttgagattagttgctag

SEQ ID NO: 107535 - DNA, 1236 bp, synthetic construct
  misc_feature 1..1236: note = Description of Artificial Sequence: Synthetic coding sequence
  source 1..1236: mol_type = other DNA
atgtggatacagcagttgctaggactctcatctatgtccattaggtggccaggccgcccattaggatctcacgcttggattttgatagcaatgttccagctcgccgtggatcttcccgcttgcgaagctttaggtcccgggcctgagttttggctgttgccgagatcccccccccggcccccccgtctgtggagttttcggagcggccagcctgctcgggtgccggcaccagtctggtccccccgtcccccaagagtcgaacgaatccacggccagatgcagatgccgcgagcccggagggcccatagaccgcgcgatcaggcagcggccctggtccctaaggcaggcctggccaaaccacctgccgctgccaaatcttctccctcattggcgtccagctcttcaagtagcagctccgctgtggcaggaggggcaccggaacagcaggcgctgttacgccgcggaaagagacacctgcagggtgacggattgtccagttttgactcacggggaagccgccccaccacagagaccgagtttatcgcgtgggggccgaccggcgacgaggaggcactggagagcaataccttcccaggtgtgtatggaccaaccacagtgtccatcttgcagacaagaaaaacaactgtggctgcgacaactacaacaaccacgactgctacgcctatgacgcttcagacaaagggattcaccgaaagcctggacccaaggagacggattcctggaggagtgagcacaactgagccaagtacctcacctagtaataacggagaggtcacacagcccccacggatcctgggtgaggcttctgggctggccgtgcatcagatcattactatcacagttagcctgataatggtgatagccgcactgattaccacgctcgtcctcaaaaattgctgcgcccaatcagggaataccagaagaaattcccaccagagaaagactaatcagcaggaagagagctgtcagaacctaactgattttccttcagcgcgagttcccagcagtctggatatttttacggcatacaatgaaaccctccagtgcagccatgaatgtgttagagccagtgtacccgtgtacactgatgagacgctgcatagcactaccggcgagtacaagtctacattcaacgggaatcgaccgtcctcctcagaccggcacctcatacctgttgcgttcgtatcagagaagtggtttgagatatcttgttag

SEQ ID NO: 107536 - DNA, 1155 bp, synthetic construct
  misc_feature 1..1155: note = Description of Artificial Sequence: Synthetic coding sequence
  source 1..1155: mol_type = other DNA
atggtctctggcgattacagtctaggcctcaatgacctgaatgtgtcaccgcctgaactgactgttcacgttggtgattctgccctcatgggctgtgttttccagagcacagaggacaaatgtatatttaaaatagattggacactatctcctggggagcacgctaaagatgagtacgtattgtattactactcaaatttaagtgtgcctatcgggcgcttccagaaccgcgtccacctaatgggggatattttatgtaatgacggatcccttcttctgcaggatgtccaggaggccgaccaagggacgtatatctgcgaaattcgcctcaaaggcgaatctcaagttttcaagaaagctgtggttctgcacgtgttaccagaggagcctaaagaattaatggttcacgtgggcggcctcatccagatgggctgtgtgtttcagtctacagaggtcaagcatgttactaaagtagagtggatcttttccggccggcgggcaaaggaagagatagtatttagatattaccacaagctcaggatgtccgttgaatattcccagagctggggacacttccagaatagggtcaacctcgtcggggatatcttcagaaacgacggatcaatcatgctgcaaggcgtgcgtgagtctgatggagggaattacacttgcagcatccacctcggcaatctggtattcaagaagaccattgttctgcacgtgtccccagaggaaccacgcactctagtgacccccgctgcattgcgtcctctagtgctgggaggcaatcagcttgtcatcatcgtcggcattgtatgtgctaccatactgctgttgcccgtgctaatacttattgtcaaaaagacatgtggtaataagagctctgtgaatagcaccgtgttggttaagaatacaaagaaaaccaaccctgaaattaaagaaaaaccatgtcactttgaaaggtgcgagggcgagaagcacatctactcccccatcattgttcgtgaagtgatcgaggaagaggaaccatcagagaagtcagaagctacatacatgaccatgcatcctgtctggccatcactgcggagcgaccggaacaattctcttgagaaaaagtccggaggcggaatgcccaaaacacagcaggctttttag

SEQ ID NO: 107537 - DNA, 1185 bp, synthetic construct
  misc_feature 1..1185: note = Description of Artificial Sequence: Synthetic coding sequence
  source 1..1185: mol_type = other DNA
atgttttgccccctgaaactcattctgctcccagtgctgctggactatagcctcggactcaacgacctgaatgtcagcccacccgaactgactgtacacgtcggagatagcgcactaatgggctgtgtcttccaatctactgaagataaatgtatattcaagattgactggactttgagtccgggtgagcacgcaaaagacgaatacgtgctatattactatagcaacctgtcggttcccatcggtaggttccagaaccgagtccatctcatgggtgatatcctctgtaatgacggatctctcctactgcaagatgtgcaagaggccgatcagggaacctacatctgcgagattaggctgaagggagagtctcaggtctttaaaaaggcagtggtactccacgtcttgccagaggagccaaaagagttaatggtccacgtgggagggcttattcagatgggatgcgtttttcagagcactgaagtaaagcatgtgacaaaagtggaatggatattttctgggcggagggcaaaggaagagattgtcttccgttactatcacaagttgagaatgtctgtcgagtactctcagagctggggccatttccaaaacagagttaacttagtgggggacatctttagaaatgatggttctattatgttgcagggcgtgcgggaatccgatggagggaactacacgtgctccatacacttgggcaatctagtgtttaaaaagacaatcgtcctgcatgtcagtcccgaagagccacggacgttagtgacccctgctgcccttaggcctctcgtcttgggtggcaatcagctagtcattattgtgggtatcgtgtgtgccacgatcctgctcctgcccgtcctgattctcatcgtcaaaaaaacttgtggaaacaagtcaagtgtgaatagcacagtgctggtgaaaaataccaagaagacgaacccagagattaaggaaaaaccctgccattttgaacgctgcgaaggggaaaaacatatttactctcccataatagtgagggaggtgattgaagaggaggaacctagcgaaaagtccgaagccacctacatgacgatgcaccccgtgtggccatcccttagaagcgaccggaacaactcgttggaaaaaaagagtggaggtgggatgcccaagactcaacaggccttttag

SEQ ID NO: 107538 - DNA, 468 bp, synthetic construct
  misc_feature 1..468: note = Description of Artificial Sequence: Synthetic coding sequence
  source 1..468: mol_type = other DNA
atgttttgtccccttaaactgatccttctgcctgtgctcctcgactacagcctcggtctgaacgatctgaacgtgtcacctccagaactaacggttcacgtcggagattcagcattgatggggtgtgtcttccaatccacggaggataaatgtattttcaagatcgattggactttgtcccctggcgagcatgcaaaggacgaatacgtcctctactattattctaatttatctgtccctatcggaagattccagaaccgcgttcacctgatgggggatatcctgtgcaatgacgggtcccttcttctacaggacgttcaggaagccgaccagggaacttacatatgcgagattagattaaaaggcgagtctcaggtgtttaagaaggccgtggtactgcatgtgctgcctgaggaaccaaaagagctgatggtgcacgtgggggggctgattcagatgggatgttag

SEQ ID NO: 107539 - DNA, 663 bp, synthetic construct
  misc_feature 1..663: note = Description of Artificial Sequence: Synthetic coding sequence
  source 1..663: mol_type = other DNA
atgggctgcgtattccagtccacagaagataagtgtattttcaagatcgactggaccctgagtcctggggagcatgccaaagatgaatacgtgctctattattactcaaatttgagtgttcctattggcagatttcagaaccgtgtgcacctcatgggtgatatactgtgtaatgatggctctttactcctgcaagacgttcaagaggcggatcaaggaacatacatctgcgagatcagactgaagggcgagtcccaggtttttaaaaaggcggtagtcctgcacgtgctgcctgaggagccgaaagagctcatggtccacgtgggcgggctgatacaaatgggctgtgtttttcagagtaccgaagtgaagcatgtcacaaaagtagagtggattttctccggccggagagctaaggaggaaattgtctttagatactatcacaaactacggatgtcggtggaatattcacagtcgtgggggcacttccagaacagggtcaatttggttggcgatatcttcaggaatgatggatcaattatgctgcaaggtgttcgcgagtccgatggcggcaactacacctgcagtatccacctaggtaacttagtcttcaaaaaaactatcgtccttcacgtgagccctgaggagcctaggaagtggtag

SEQ ID NO: 107540 - DNA, 1128 bp, synthetic construct
  misc_feature 1..1128: note = Description of Artificial Sequence: Synthetic coding sequence
  source 1..1128: mol_type = other DNA
atgagcagtcataaaggcagtgtggtggcgcaggggaacggggctcctgccagcaaccgagaagccgacaccgtggaattggcagaactgggtccacttctcgaagaaaaaggcaagcgggtgatcgctaaccctcctaaagctgaagaggaacaaacctgcccagttcctcaggaggaggaggaggaagtccgagtcttgaccctccccctgcaagctcatcatgccatggagaagatggaagagttcgtttacaaggtttgggagggtaggtggcgcgtcataccttacgatgttctccctgactggcttaaggataatgactatttgctgcacggacatcgcccccctatgccatcattcagagcctgtttcaagtctattttcaggatccatacggaaaccgggaatatctggacgcacctcctcgggtttgtgttgttcctcttcctgggaatcctgacaatgctgcggccgaacatgtactttatggctccactccaagaaaaagtggtgttcgggatgttctttttaggggcagtgttatgcctgtcctttagttggctttttcacacagtgtactgtcacagtgaaaaagtcagtcgcactttttctaagttagactattcagggattgccctattgattatggggtcgtttgtgccgtggctgtactatagtttttactgctcccctcagccccggctaatttacctctcaatcgtatgtgtactgggcatctcagccattatcgtcgcccagtgggacagatttgccaccccaaaacatcgacagactcgggccggggtgtttctcgggctgggactgtcgggagtcgtgcccacaatgcacttcactatcgccgagggctttgtaaaggctacaaccgtgggacaaatggggtggttttttctgatggccgttatgtatataacgggagcagggttatatgcagcacggataccggagagattcttcccaggcaaattcgacatctggtttcagtcccaccagattttccacgtgctggtggtcgcggccgcattcgtacatttctacggcgtgtctaatctgcaagagtttcggtatggcctggagggggggtgcacagacgacacactgctgtag

SEQ ID NO: 107541 - DNA, 516 bp, synthetic construct
  misc_feature 1..516: note = Description of Artificial Sequence: Synthetic coding sequence
  source 1..516: mol_type = other DNA
atgtcatctcacaaggggtcagtagtagcccagggtaatggtgcccccgcctccaatcgtgaggccgacaccgtagagctcgcagagctcgggccattattagaggaaaagggcaaaagggttatagcgaacccacctaaagcggaagaagaacaaacttgccccgtgccccaggaagaagaagaagaggtgagggtactaactttaccactgcaagctcatcatgcaatggagaagatggaggagtttgtgtacaaggtgtgggaggggcgatggcgcgtgattccctacgacgtccttccggactggttgaaggataacgattatctactgcatggacataggccgcctatgcccagctttcgagcctgctttaagtcaattttcagaatccacacggagaccgggaatatttggactcatctgctcgctaccgcgcatctgccgcttcatagactgtgccccggtcacttctgccaccattgtggcgcggtcggacccgtgtgtcattcttag

SEQ ID NO: 107542 - DNA, 801 bp, synthetic construct
  misc_feature 1..801: note = Description of Artificial Sequence: Synthetic coding sequence
  source 1..801: mol_type = other DNA
atgtccagtcacaaggggtccgtcgtggcccagggcaacggggcccctgctagcaatcgcgaagccgacaccgtagaactggcagaactgggaccacttctggaagagaagggaaagagggtaattgccaatcctcccaaggctgaggaggaacagacatgccctgtgcctcaagaagaagaggaggaggtaagggtcctgactttaccactccaagcgcatcacgcgatggagaagatggaggagttcgtttataaggtctgggaggggaggtggagagtcatcccatatgatgttttgccggactggctcaaagataacgattatcttcttcacggacatcgcccccccatgccctcttttagagcctgttttaagagcatattcagaattcataccgaaacgggaaacatatggacacacctgctgggcttcgtgctgttcctcttcctcggaatacttacgatgctgcggcccaatatgtacttcatggctcctctgcaggagaaagtggtctttggcatgttttttttaggcgccgtcctgtgcctttccttttcttggctcttccatactgtatattgtcactccgaaaaggtttcacggaccttcagtaagcttgactattcaggcattgctttgcttatcatgggcagctttgtcccttggctgtactactctttttactgttcccctcaaccgcggttgatatacctgtcgattgtttgcgtgttaggcattagtgcgataatcgtggctcagtgggaccggtttgcgacccctaagcacagacaaacttag

SEQ ID NO: 107543 - DNA, 618 bp, synthetic construct
  misc_feature 1..618: note = Description of Artificial Sequence: Synthetic coding sequence
  source 1..618: mol_type = other DNA
atgagctcccataaaggttctgtcgtcgctcagggtaatggtgccccagccagtaatagagaggcagataccgtggaacttgcagaattaggtcctctccttgaggaaaagggtaaacgagtcattgccaatcccccgaaggctgaggaggagcagacctgtcccgttcctcaggaagaggaagaggaagttcgagtcctgaccctccccttacaggcgcaccacgctatggagaagatggaggaatttgtttacaaggtgtgggaaggcaggtggagagtgatcccatacgatgtgcttccagattggctcaaagacaatgactacctgttacatggccaccggcccccaatgccaagctttcgtgcctgctttaagtccatctttaggattcatactgaaactgggaatatttggactcacctgttaggcttcgtactgtttctatttctgggcatcctcactatgctacggcctaatatgtactttatggcccctctacaagagaaagtagtcttcgggatgtttttcctgggggctgtgctgtgtctcagcttcagctggctgttccatactgtctactgccactccgaaaaagtatcacggaccttttcttag

SEQ ID NO: 107544 - DNA, 1128 bp, synthetic construct
  misc_feature 1..1128: note = Description of Artificial Sequence: Synthetic coding sequence
  source 1..1128: mol_type = other DNA
atgagttctcacaagggctctgtcgtggcacaagggaacggggccccggcatccaatagagaggctgacacagtggaactcgctgagttgggcccactgctggaggaaaagggaaaaagggttatcgctaacccccctaaggcggaagaggaacagacgtgtcctgtgcctcaggaagaggaggaggaggttcgcgtgcttactttacctctgcaggcccatcatgccatggaaaagatggaagaatttgtgtataaggtttgggaaggccgctggagggtgatcccttacgatgtgctccccgattggcttaaggataacgattacctgctccacggccacagaccgcctatgcctagctttcgggcctgctttaagagcattttcagaattcatacagagacggggaacatctggacccacctcctagggttcgtcctattcctcttcctgggaattctcaccatgcttcggccaaatatgtacttcatggctcccctccaagaaaaagtcgtgttcggcatgttttttcttggtgctgtgctgtgcctcagtttctcttggctttttcacactgtgtattgtcacagcgaaaaagttagtcgcaccttctccaaactggactatagcgggattgccttactgattatgggatctttcgtgccttggttgtactattccttctattgttcgcctcagccacggctcatttacctgtcaattgtgtgtgttcttgggatatcggctattattgtggcacagtgggatcgttttgcaacacctaagcataggcaaacacgcgcaggagtttttttgggcctgggcctcagcggagtcgtccccactatgcactttactattgccgagggcttcgtgaaagcgaccacagtcgggcagatgggctggttcttcctcatggctgttatgtacatcacaggggccgggctgtatgcagcaaggatacccgaaaggttttttccgggcaagtttgacatttggttccaaagccatcagatttttcatgtgctggtggtggcagcagccttcgtccatttttacggcgtgtctaacctgcaggagtttcgatacggcttagagggcgggtgcacagatgatacattgctgtag

SEQ ID NO: 107545 - DNA, 1161 bp, synthetic construct
  misc_feature 1..1161: note = Description of Artificial Sequence: Synthetic coding sequence
  source 1..1161: mol_type = other DNA
atgaacgagcctaccgaaaaccggctcggttgcagcagaacacccgagccggacattcggctgcgaaaagggcatcagttagatgggacacgacgcggcgacaacgattcccaccagggtgacctggagccaatcctcgaggcatctgtgttatccagccaccacaagaagtcttctgaggaacatgaatactccgatgaggccccccaggaagatgagggctttatgggcatgtctccgctcttgcaggcccatcatgctatggaaaagatggaagaatttgtgtgtaaagtttgggagggtcgctggagggtcatcccacacgatgtgctgcccgattggctaaaggacaatgactttctgctgcacggtcaccgacctcctatgccaagcttccgcgcctgcttcaagagtatttttagaatccacactgagaccgggaatatttggacccacctgttgggttgtgtatttttcttgtgtctgggcatcttttacatgtttcggccaaacatcagctttgtggcgcctctacaggaaaaagtcgtttttggcctgtttttcctcggcgctattctctgcctttcattttcctggctgttccacaccgtgtactgtcacagtgagggcgtgtctcgtctcttctctaagttggattacagcggcatcgctctgttgatcatgggctcctttgtcccatggctttactattccttctactgtaacccccagccatgttttatttacctgatcgttatttgtgtactgggcatcgccgctatcatcgtgagccagtgggatatgtttgcaactccccagtacaggggtgtgcgtgctggagttttcctggggctcggcctaagtgggattatcccaaccctgcactacgtcatctccgaagggtttctgaaagctgcaaccattgggcagatcggctggcttatgcttatggcctcattgtacattaccggcgctgcgctctatgctgctaggatccccgaacggttctttccgggtaaatgtgacatttggtttcactcacatcagctgttccacatatttgtggtggccggggcattcgtccacttccacggcgtgtccaatctccaggagttcaggttcatgataggtgggggctgctccgaggaagatgccctttag

SEQ ID NO: 107546 - DNA, 735 bp, synthetic construct
  misc_feature 1..735: note = Description of Artificial Sequence: Synthetic coding sequence
  source 1..735: mol_type = other DNA
atgcttctgctgggcgccgtccttctgctgctcgccttgcctggacacgaccaggagaccaccacacagggcccaggagtcctgctgccactgcctaaaggagcctgtactgggtggatggccggcattcctgggcacccaggtcacaatggcgcaccaggccgcgacggccgtgacggcactccaggcgagaagggagaaaagggagaccctggcctaatcggacccaaaggggatatcggggaaaccggtgtccctggcgccgagggtccgcggggttttccaggaatccaaggcaggaagggcgagccaggtgagggtgcttacgtctatcgctccgcctttagcgtgggcctggaaacctatgtgacgatccccaacatgcccatccgtttcaccaagatcttctataaccagcagaatcactatgatgggtctaccgggaagtttcattgcaacatcccggggctttattactttgcttaccacattacagtctatatgaaggacgtgaaggtgtctctcttcaagaaagataaagcaatgcttttcacttacgaccagtaccaggaaaacaatgtagaccaagcttccggcagtgtcttgctgcatcttgaggttggagatcaggtctggctccaagtgtacggagaaggagagaggaatggactttacgctgacaacgacaacgatagcaccttcaccgggttcctgctctaccacgacaccaattag

SEQ ID NO: 107547 - DNA, 735 bp, synthetic construct
  misc_feature 1..735: note = Description of Artificial Sequence: Synthetic coding sequence
  source 1..735: mol_type = other DNA
atgttgctcttgggcgccgtactcctgctactggcgctgcccgggcatgaccaagagacaaccacccaggggcccggggtgctacttccgctccctaaaggtgcatgcacaggatggatggccggcataccaggacacccaggccacaacggagcaccaggacgtgatgggcgggatggcacccctggtgaaaaaggagagaagggcgaccctggcttgatcgggccgaaaggggatatcggtgaaactggggtgccgggtgctgaaggccctaggggcttcccgggaatccaggggagaaaaggggagcccggcgagggcgcttatgtctatcgcagtgctttttccgtagggctcgagacctatgtgacaatccctaacatgccaataagattcacaaaaattttttataaccaacagaatcattacgacggctccacagggaaattccactgcaatatccccggtctgtattacttcgcctatcacattaccgtctatatgaaggatgttaaagtgtctctattcaagaaggataaagccatgctcttcacttatgaccagtatcaagagaacaatgtggaccaggcctctggatctgtgctgcttcatctggaggtcggcgaccaggtctggctccaggtgtatggtgaaggtgagagaaatggcctgtacgctgacaacgataatgacagtacctttaccggctttctgctgtatcatgacactaactag

SEQ ID NO: 107548 - DNA, 735 bp, synthetic construct
  misc_feature 1..735: note = Description of Artificial Sequence: Synthetic coding sequence
  source 1..735: mol_type = other DNA
atgttactgctgggggccgtactgctcctgctcgccctgcccggacatgaccaagagaccaccacgcagggtcctggggttctcctgcccctccccaaaggggcctgtactgggtggatggccggcattcctggacatcccggtcacaatggggctccggggcgtgacgggcgcgacggcactcctggagagaaaggagaaaaaggcgaccccggcctcatcggaccaaagggggatatcggggagacgggggtacccggggcggagggaccacgggggtttcctggaatccagggcaggaagggtgaaccaggtgagggagcctacgtgtataggtcagcgttctccgtgggcctggagacatatgtaacgatacccaatatgcccattaggttcactaagatcttctataatcagcagaatcattacgacggcagtacaggaaagttccactgcaatataccagggttgtactattttgcataccatataacagtatatatgaaagatgttaaggtcagtctgtttaagaaagacaaagccatgctcttcacttatgatcaatatcaggaaaataacgtggaccaagcaagcggtagtgtgctgttacaccttgaggtgggggaccaggtgtggttgcaggtctacggagagggagagaggaacggactgtacgcagataacgataacgactcgacatttacgggattccttctgtaccatgacacaaattag

SEQ ID NO: 107549 - DNA, 1491 bp, synthetic construct
  misc_feature 1..1491: note = Description of Artificial Sequence: Synthetic coding sequence
  source 1..1491: mol_type = other DNA
atggcattgtggagagggtcagcatacgcaggatttttagcactggctgtaggatgcgtgtttctgcttgaacccgagcttcctggctccgccttgcgctcgctctggtcttctttgtgtctcggaccagcgcctgccccccctgggcccgtgtcccctgagggacggctggctgcagcttgggacgctctgatcgttaggccagtacgaagatggaggcgggtggcagtgggggtaaatgcctgtgttgatgtggtactctctggagtgaaactgctgcaggcactcgggctcagtcccggcaatgggaaggaccactctattctccactcacggaacgacctggaggaggcctttattcatttcatgggtaaaggtgctgccgcagagcggttctttagtgacaaggaaacttttcacgacatcgcacaagtcgcctccgagttccctggagcccaacactacgtgggcgggaacgcggcactgattggacagaaattcgctgccaactccgacctgaaggttctgctatgtggccctgttggccccaagcttcacgaactgctggacgataacgttttcgtccccccagagtctctccaggaagtcgatgaattccacctgattctcgaataccaggctggggaagaatggggccagctcaaggccccacatgccaaccgcttcatctttagccacgatttgagcaacggcgctatgaacatgttagaggtctttgtttcatctctcgaagagtttcaaccagacctggtagtgctgagcggattgcatatgatggaagggcagagtaaggaactccaacgcaagcgcttattggaagtagtcactagcattagcgatatccctaccggcattcccgttcatctagaactggcttccatgaccaatagggaactgatgagcagcatcgttcaccaggtcttccccgcagtcacgtccctaggcctgaatgagcaggaattgttgttcctgacgcagtccgcatccggcccccattcttccctgagctcctggaatggcgttccagacgtcgggatggtctcagatatcctattctggattcttaaggagcacggccgctccaagtctagggcatccgatctcaccagaatccacttccataccttggtttatcacattctcgccaccgttgacgggcactgggctaaccagctggcagccgtcgcggccggcgccagagtggccggcacccaggcctgcgctaccgaaacaatcgatacaagccgggtatctctacgtgccccccaggaattcatgacctcacactctgaggccggttctagaatcgtcttgaatcccaataagccagtggtcgaatggcaccgcgagggcatttcctttcacttcactccagtcctcgtctgcaaggacccgattcggacggtgggcctgggcgatgccatttcagcagaaggactcttttacagtgaagtacatccacattattag

SEQ ID NO: 107550 - DNA, 1041 bp, synthetic construct
  misc_feature 1..1041: note = Description of Artificial Sequence: Synthetic coding sequence
  source 1..1041: mol_type = other DNA
atgggtaagggagcggctgctgagcgtttcttttcagacaaagagacctttcacgatattgcacaagtggctagtgaatttcccggtgcccagcactatgtgggagggaatgcagcgctgataggccagaagttcgccgcgaacagcgacctgaaggtcctgctgtgcgggcccgtgggacctaaattgcacgaactactggacgacaacgtatttgtgccccctgagtccctccaggaggttgatgagtttcatctgatcctggaatatcaagctggagaagaatggggacagctcaaggcgccccacgcaaatcggttcatcttcagccacgacttaagcaatggagccatgaatatgctcgaggtttttgtgtcttccctggaagagtttcaaccagacctcgtggttctctccggactgcacatgatggaaggccagagtaaagaactgcagcgaaagaggttgttggaggtggtgaccagcatcagcgacatccctaccggtatccctgtacacctggagttagcttctatgacaaatcgagaattgatgtcttcaattgttcatcaacaagtcttccctgcagttactagcttggggttgaacgaacaagagcttctcttcctgacccaatctgccagcgggccacattcctccttgtccagctggaacggcgtgcccgatgtgggtatggtttcagatatcctattttggattctcaaagaacacgggaggagcaagagcagagcaagtgatctgactagaattcactttcataccttagtctaccatatcctggccactgtggacgggcactgggccaatcagctcgcagctgtggcttcttcctgcgggtgggacaccggtctacggcaccggaaccaccgacaccagccctctgtgtcagagggcacaccgagggttcacgacttcccatttggcggccgtctccaggattgtatcaagcctaagcaggcgagcagtcgcatggcacaacgtgggaatatattacccttgcatacctccattggagtctag

SEQ ID NO: 107551 - DNA, 1251 bp, synthetic construct
  misc_feature 1..1251: note = Description of Artificial Sequence: Synthetic coding sequence
  source 1..1251: mol_type = other DNA
atggccctgtggaggggctccgcgtacgccggctttcttgcgttgggattatccccagggaacggaaaggaccacagtatcctgcattccaggaatgacctggaagaagcttttatccatttcatggggaagggcgctgccgcagaaaggtttttctccgacaaggagacttttcatgacattgctcaggtcgcgagtgagtttccaggagcccagcattacgtcggaggcaacgccgcccttatagggcaaaagttcgcagccaactccgacctgaaagtcctgctttgtggccccgttggcccgaaactgcatgagcttcttgacgacaacgtcttcgtccccccagagtcactgcaagaggtggacgaatttcacctaattctcgaataccaggccggggaggaatggggacaattgaaagccccccacgccaacagattcattttctcccatgacctcagcaacggagccatgaatatgctagaagtcttcgtttcgtcattggaggaatttcaaccggatctggtggttctcagcgggctgcacatgatggagggtcaatccaaagagctccagaggaagagattactcgaagtggtaacatccatcagcgatatcccaactggaatcccagtgcacctggagctcgcttctatgaccaaccgggagctgatgtcctcaatcgtccaccaacaggtgtttcctgctgttacctctctgggactgaacgaacaggaactcctgtttttaacacagtccgcatccgggccacatagcagcttgtctagctggaacggggtgcccgacgtcggcatggtgagtgatatccttttttggattctcaaagagcacgggaggtccaagagccgtgcgagcgatctgaccaggattcattttcacacactcgtttaccacatcctggctacagtggacggccactgggccaaccagctggccgctgtcgctgcaggagcaagggtcgccggcactcaagcttgtgccacagaaaccatcgatacatcacgcgtcagcctccgtgccccccaggagttcatgacgtcccatagcgaagccggttcaagaattgtgttgaatcccaataaacctgtagtcgaatggcatagagaaggaatcagcttccatttcaccccagtgctggtatgcaaagacccaattcgcactgtgggactgggtgacgcaatcagtgcagaaggcctcttttattccgaagttcatccccattattag

SEQ ID NO: 107552 - DNA, 669 bp, synthetic construct
  misc_feature 1..669: note = Description of Artificial Sequence: Synthetic coding sequence
  source 1..669: mol_type = other DNA
atggccgctagttgtagagtggtcacttctatttcagatattcccaccggcattcccgtacacctggaattagcttcgatgactaatagagagctcatgtctagtatcgtgcaccaggtgtttcctgcagtcacgtctctcggactgaatgaacaggagttactgttcctgacccaaagcgcatcaggcccacatagcagcctgtctagctggaatggcgtgcctgatgtaggcatggtgagcgatattcttttctggatcctgaaagaacacggcagatctaagagccgagcttctgatctgacccggatccacttccacactctggtatatcatatcctagctaccgtggacggccattgggctaaccagctcgccgcagtcgccgccggcgccagggtcgccgggacacaggcctgtgctacggagactatcgacacctctagagtctctcttcgagccccccaggaatttatgactagccactctgaagccggctccagaatagtgttgaatccaaacaagcctgtggtggagtggcaccgggaaggcattagcttccactttactcctgtactggtgtgcaaggatcctattcggaccgtgggcctgggggacgctatcagcgctgaagggctcttttacagcgaagtgcatccgcactattag

SEQ ID NO: 107553 - DNA, 546 bp, synthetic construct
  misc_feature 1..546: note = Description of Artificial Sequence: Synthetic coding sequence
  source 1..546: mol_type = other DNA
atgggcaatattttcgctaatctgtttaaaggactttttggcaagaaggagatgcgcatcctcatggttggtctcgacgcggctggtaagactacgatcctgtacaaactgaagctgggcgagatagtcactacaatcccaaccataggattcaatgtagagactgtagagtacaaaaacatctccttcaccgtgtgggatgtgggcggacaggacaagatacgaccgctgtggcgacactatttccagaatacccagggtttaatctttgttgtagattctaacgaccgcgaaagagtcaacgaggcacgcgaagaactcatgcggatgttagcagaggatgagctgagggacgcggtgttactagtgtttgctaataagcaggatttgcccaatgctatgaacgccgccgaaattacagacaagcttggcctgcactctctgcgacaccgaaactggtacatacaggctacatgcgcaacaagcggggacgggctgtacgagggactggattggctgtctaaccagctgcggaaccagaaatag

SEQ ID NO: 107554 - DNA, 546 bp, synthetic construct
  misc_feature 1..546: note = Description of Artificial Sequence: Synthetic coding sequence
  source 1..546: mol_type = other DNA
atggggaatatttttgccaacctgtttaagggccttttcggaaaaaaagaaatgcggattttaatggtgggattagatgcagccggtaagaccacgatcctgtacaagctcaagctgggcgagatcgttaccacgatccccactatcgggttcaatgtagagaccgtggaatacaagaatattagcttcaccgtgtgggacgtcggggggcaggataaaattaggcccctctggcgccattattttcagaacacgcagggcctgatttttgtggtcgactctaacgatcgagagagggtaaacgaagctcgcgaggagcttatgcgcatgttagctgaagacgagctgcgggatgccgtcctgttagtcttcgccaacaaacaagatcttcctaacgccatgaatgccgcggagatcacggacaagctgggacttcactcgctccgccaccgaaattggtacatccaagctacatgcgccacatccggcgacggactttacgagggattggactggctgtctaaccagctgagaaaccaaaaatag

SEQ ID NO: 107555 - DNA, 546 bp, synthetic construct
  misc_feature 1..546: note = Description of Artificial Sequence: Synthetic coding sequence
  source 1..546: mol_type = other DNA
atgggcaacatctttgctaatttgtttaaaggcctctttggaaagaaagagatgcggattcttatggttgggttggacgctgctgggaaaacaacaatcctttacaagctcaagctgggcgaaatcgtcactacaataccaacaatagggttcaatgtcgaaaccgtggagtacaagaacatttccttcacggtctgggatgtcggcggacaggacaagatccgtcccctgtggaggcattattttcagaacacacaggggctgatctttgtggtggactctaacgaccgagagagagtgaatgaggcgagagaggaattgatgagaatgcttgctgaggatgaacttcgagacgctgtgctgctggtgttcgcaaataagcaggatcttcctaacgcaatgaacgcagcggaaatcaccgacaaactcggactgcatagtttacgacatcgcaactggtatatacaagctacgtgtgccaccagcggagatggactgtatgagggtttggactggctaagtaaccagctccggaatcagaagtag

SEQ ID NO: 107556 - DNA, 519 bp, synthetic construct
  misc_feature 1..519: note = Description of Artificial Sequence: Synthetic coding sequence
  source 1..519: mol_type = other DNA
atgggcaacattttcgccaatctgttcaaagggttattcggcaagaaggaaatgagaattctgatggtgggcctagatgccgccggaaaaacaaccattctctacaaattgaaactaggggaaattgttacgacgatccctaccatcggttttaacgtggaaacagtagagtacaaaaacatctccttcactgtgtgggacgttggcgggcaggacaaaattcgtcctttatggcggcattatttccagaatacccaggggcttattttcgtggtcgacagcaatgatagggagcgggtgaacgaggctcaagacgagcttcgcgacgcggtgctgctggtgttcgcaaataaacaggatctgccaaatgcaatgaatgccgcggaaattacagataagctgggtttgcatagcctccgacatcggaactggtatatccaggctacatgcgcaacatcgggcgatggcctgtacgaaggactggactggctctctaaccagcttcggaaccagaaatag

SEQ ID NO: 107557 - DNA, 546 bp, synthetic construct
  misc_feature 1..546: note = Description of Artificial Sequence: Synthetic coding sequence
  source 1..546: mol_type = other DNA
atggggaacatctttggcaacctgctgaaatccctaattgggaaaaaggagatgaggattcttatggttggtctcgatgccgccgggaagacaactatactttataagctgaagttaggagagattgtcacaactatcccgacaataggcttcaacgtagaaacagtagagtacaaaaacatctcattcacagtatgggacgtgggcggtcaagacaaaattcggccattatggcgacattattttcaaaacactcagggccttatcttcgtcgtggacagtaacgaccgggagagggttaatgaagcccgtgaggaactcatgcgtatgcttgcagaggatgaactcagagacgctgttctgttggtgtttgctaataagcaggacctccccaacgcgatgaatgccgcagaaattactgacaagctcgggctgcacagcctgcgacatagaaactggtacatacaagccacatgtgccacaagcggagacgggctgtatgaaggtctcgactggttggctaatcagttgaagaacaaaaagtag

SEQ ID NO: 107558 - DNA, 435 bp, synthetic construct
  misc_feature 1..435: note = Description of Artificial Sequence: Synthetic coding sequence
  source 1..435: mol_type = other DNA
atggggaatatctttgggaacctcctgaagagcttaattggtaagaaggaaatgcggatacttatggtgggcctcgatgctgccggcaaaaccacaatcctgtacaagctgaagctgggcgagatcgtaaccacaattccaacaattgggctgattttcgtggtggactctaacgaccgggagcgggtgaatgaagccagggaggagctcatgcgcatgctggccgaagatgagttgcgcgacgcggtcctgctcgtattcgcgaataaacaggatctcccaaatgcaatgaatgctgcagaaataacggacaaactaggcctgcacagcctgcgtcacaggaactggtacatccaggccacttgcgcaaccagtggtgatggcctttatgagggactggattggttggccaaccagctgaagaataaaaagtag

SEQ ID NO: 107559 - DNA, 153 bp, synthetic construct
  misc_feature 1..153: note = Description of Artificial Sequence: Synthetic coding sequence
  source 1..153: mol_type = other DNA
atggggaacatcttcggcaatctgctcaagtccttgattggaaaaaaggagatgaggattttgatggttgggctcgacgcagcagggaagaccaccatactctacaaactaaagctcggcgagatcgtgactaccatccctactatcggttag

SEQ ID NO: 107560 - DNA, 309 bp, synthetic construct
  misc_feature 1..309: note = Description of Artificial Sequence: Synthetic coding sequence
  source 1..309: mol_type = other DNA
atgggtaacattttcggcaacctgctcaagagccttattggtaagaaggagatgcgaatcctgatggtcggcctcgatgccgcgggaaagactacaatcctgtacaaactgaagctgggggagatcgtcacgaccatccccaccatcgggtttaatgtggaaacagtggaatacaagaatatttcgttcacagtttgggatgttggagggcaggataaaatcagacccctatggcgtcattactttcaaaacacacagggactgatttttgtcgtcgactccaatgaccgggaacgagtgaacgagtag

SEQ ID NO: 107561 - DNA, 546 bp, synthetic construct
  misc_feature 1..546: note = Description of Artificial Sequence: Synthetic coding sequence
  source 1..546: mol_type = other DNA
atgggaaacatctttggaaacctgttaaagagccttatcggcaaaaaggagatgagaatcctgatggtcggcttagacgccgctgggaagactaccatactatacaaactcaagttgggggaaatagtgacaaccatcccgacgatcggatttaatgtcgagacagtggagtataaaaacataagctttactgtatgggacgtgggcggacaagacaagataagaccgttgtggagacactatttccagaacacccagggcctgatttttgtcgtcgattcaaacgatcgcgaacgtgtgaatgaagcacgggaagagctaatgcgcatgcttgcagaggacgagctcagagacgctgtattgctggtgtttgcaaacaaacaggaccttcccaacgcaatgaacgccgctgaaatcaccgataagttgggactccactctctccgtcatcggaactggtacatacaggcaacctgcgccacaagcggcgatgggttgtatgagggacttgattggctggccaatcagctgaagaacaaaaagtag

SEQ ID NO: 107562 - DNA, 123 bp, synthetic construct
  misc_feature 1..123: note = Description of Artificial Sequence: Synthetic coding sequence
  source 1..123: mol_type = other DNA
atgggcaatatttttggaaaccttctgaagtccctcatcggaaagaaggaaatgcgcattctcatggtgggcctcgatgcagccgggaaaaccacaatcctgtacaagctgaagttgggctag

SEQ ID NO: 107563 - DNA, 543 bp, synthetic construct
  misc_feature 1..543: note = Description of Artificial Sequence: Synthetic coding sequence
  source 1..543: mol_type = other DNA
atgggcctcactatttcttctcttttcagcaggctcttcggcaagaagcagatgagaatcctgatggtcggtctggatgctgccggtaagactactatactatacaagctcaagctgggggagatagtgactactattcccacgattggcttcaatgtcgaaaccgttgaatataagaacatttgtttcaccgtgtgggacgtcggtggccaggatcgtattagaccactttggaaacactacttccagaacacccagggcctgatattcgtcgtggatagcaacgatagagaacggattcaggaggtggcggatgaactgcaaaaaatgttgctggtcgacgagctgcgggacgccgtgcttctgctgttcgcaaacaagcaggatctcccgaacgccatggcgatcagcgagatgactgacaagctgggcctgcaatcactgaggaacagaacatggtatgtgcaggccacctgtgcaacacagggtactgggctatacgagggcctggattggttatccaatgagctcagcaaacgctag

SEQ ID NO: 107564 - DNA, 384 bp, synthetic construct
  misc_feature 1..384: note = Description of Artificial Sequence: Synthetic coding sequence
  source 1..384: mol_type = other DNA
atgggcctgaccatctcatctctgttctcacgcctgtttggtaaaaagcagatgcgaattctgatggtcgggttagacgctgcaggcaaaacgacgattctgtataaattgaaactaggggagattgtaaccacaataccaactattgggttcaatgttgaaactgtggagtataaaaacatatgcttcacagtctgggacgtgggcggacaagatcggatacggcctctgtggaagcattactttcagaacactcagggcctgattttcgtggtggattcaaatgacagggagcgcattcaggaggtcgccgatgagctgcaaaaaatgctgctggtcgacgagttgcgtgatgcagtcctgttgcttttcgcaaacaagtag

SEQ ID NO: 107565 - DNA, 69 bp, synthetic construct
  misc_feature 1..69: note = Description of Artificial Sequence: Synthetic coding sequence
  source 1..69: mol_type = other DNA
atgggactaactatcagttcgctctttagcagactctttggaaagaagcagatgagaatccttatgtag

SEQ ID NO: 107566 - DNA, 543 bp, synthetic construct
  misc_feature 1..543: note = Description of Artificial Sequence: Synthetic coding sequence
  source 1..543: mol_type = other DNA
atgggcctcaccgtgtctgcgctcttcagccgcatatttgggaaaaaacagatgcggatcctgatggtgggactcgatgccgcaggaaagactaccattttatacaaattaaagctcggcgagatcgtgacaactatcccaacaatcggctttaacgtcgagacagtcgagtataagaacatctgctttacagtttgggacgttggaggacaagacaaaatcagaccgctgtggaggcattacttccagaatacccagggtctcatcttcgtggtcgattctaacgatagggagcgggtccaagagtctgctgacgagctgcagaaaatgcttcaggaagatgagctgagagatgctgtcctcctggtgttcgccaataagcaggatatgcccaacgccatgcctgtgagtgaactgaccgataagctgggcctacaacacctgcggtcgagaacctggtatgtccaagccacctgcgccactcaaggcaccggcctctatgacggcctcgactggctgtctcacgagctgtcaaaaagatag

SEQ ID NO: 107567 - DNA, 1245 bp, synthetic construct
  misc_feature 1..1245: note = Description of Artificial Sequence: Synthetic coding sequence
  source 1..1245: mol_type = other DNA
atggcgtctccccgcacgaggaaagtcctgaaggaggtgagagttcaagacgagaataatgtctgcttcgaatgtggcgcctttaacccccaatgggtctctgtgacatacgggatctggatttgtctcgagtgctccggtcgacatcgcggcctcggcgtccacctatcttttgttcgatcagtcacaatggataaatggaaggacattgagttggagaaaatgaaggcaggcggcaacgcaaaatttcgtgagttcctagaatcccaggaagactatgacccgtgctggtccttgcaggagaagtacaactcccgagccgcagcgctgttccgggacaaagttgtggcgctggccgagggccgtgaatggtctcttgagagttcacccgctcagaattggaccccaccacagccccggactcttccttccatggttcatcgcgtgagcggccaaccacagagtgtcaccgctagttctgacaaggcttttgaagactggctgaatgatgacctcggatcctatcagggcgcccagggcaaccgatacgtgggcttcgggaacaccccaccgccgcagaaaaaagaagatgacttcttaaacaatgccatgagctctctgtattccggttggtcatcttttacaactggagcatccaggttcgcatcggccgccaaggaaggagctactaagttcggaagccaagcttcacagaagttctggggccacaaacaacagcccgaaccagctagtgagcttgggcactcactgaatgagaacgtgctaaagcctgcccaggaaaaggtgaaggaaggtaaaattttcgatgacgtcagctcaggggtgagtcagttggcgtccaaaggagtggggagcaaggggtggagagacgtgaccacattcttcagcgggaaggccgaaggaccgcttgactcacctagcgaggggcacagctaccagaattccgggctggaccacttccaaaattcaaacatcgatcagagcttttgggaaacctttgggtccgccgaacccacaaagacacggaaatccccttcatctgattcatggacttgtgctgacacaagcacagagcgcaggtcctccgatagctgggaggtgtggggctccgctagtaccaataggaacagcaactccgatgggggcgaggggggtgagggtacaaaaaaggcagttcctcccgccgtgcccacagatgatggttgggacaatcagaactggtag

SEQ ID NO: 107568 - DNA, 1212 bp, synthetic construct
  misc_feature 1..1212: note = Description of Artificial Sequence: Synthetic coding sequence
  source 1..1212: mol_type = other DNA
atggcctctcccagaacacggaaggtgttgaaagaggttagagtgcaggatgaaaataacgtttgctttgagtgtggggcgtttaaccctcagtgggtatccgtcacttacggaatctggatttgcctcgaatgttcaggtcgccacaggggcctgggcgtgcatctcagctttgtgaggtcggttacgatggacaaatggaaggacatcgagctggaaaagatgaaagccggcggaaacgccaagttcagagagttccttgagtcgcaggaagactatgatccatgttggtccctccaagagaagtacaatagtagggccgccgccctgttccgagacaaggttgtcgccctcgccgaagggagagagtggagtctggaatcttcccccgcgcagaactggactcccccacaacctcgcactctgcctagcatggtacaccgggtatcgggccaaccacagtcggtgacagcatcctcagacaaagcttttgaggattggctgaacgatgacttgggtagctatcagggggctcaagggaaccgctatgtgggctttgggaacaccccacctcctcagaagaaggaagacgacttcctcaataacgctatgtcctccctgtactctggatggagctctttcacaacgggggctagccggtttgcctctgctgccaaggagggagctacaaagtttggatcgcaagcctctcagaaggcaagcgagctgggccactctcttaacgagaacgtcctaaaaccggcacaagagaaggtcaaggaaggtaagatttttgatgatgtgtcttctggcgtgtcccagctggcctcaaaatgccaacggcgcctttgttgtcatcaaagtcattgcagcgcgggacatttggggagggcattctgccccgtctcttggcacgaggccctctgcggacagacaggcagagaagagcaggcttcactgctgccgcctaagcacgtggtcggtgcactggaggtttgcgcacgcggctgccccagatgccacgtcccacacacccctggtacagcggctgagtggcccggcaggctgtgcctgtcccgcgaatccgttgttcgcgacggagggaccagccctccattcttccggggtaagcagcgggccccgtggacagctcctcgtagggccacagttataagaacagcagtgtggaccacttctaaaactgctacatag

SEQ ID NO: 107569 - DNA, 1221 bp, synthetic construct
  misc_feature 1..1221: note = Description of Artificial Sequence: Synthetic coding sequence
  source 1..1221: mol_type = other DNA
atggcatctcccagaacgcggaaggtgttgaaagaagtgagggtacaggatgaaaataacgtgtgcttcgagtgcggagctttcaacccccagtgggtaagcgtaacctacggtatttggatttgcctggagtgcagtggaaggcaccggggtctaggcgtgcatctcagctttgtgaggtccgtgacgatggataaatggaaagatatagaattggagaaaatgaaggccggcggcaatgcgaagtttagagagttcctggaatcccaggaagattatgacccttgttggtctttgcaggagaagtacaattctagagcagctgctttattccgtgataaggtggtggctcttgcagagggcagggaatggagtctcgaatctagtcctgcacaaaactggactcccccgcaaccccggactctacctagcatggtgcatagggtctcaggccagccacagtccgtgacagccagcagcgataaagcgttcgaggattggctaaacgatgatcttggctcgtatcaaggggcacagggaaaccgctacgttgggttcgggaacacaccgcctccgcagaaaaaggaagatgactttctgaacaatgccatgtcatctctttatagcggatggagttcctttactacaggggcttctagattcgcctctgccgccaaggagggagctacgaaatttggctcccaggcatcacagaaggcctcggaacttgggcactcactgaacgagaatgttctgaagccggcgcaggaaaaagtgaaagagggaaaaatctttgatgacgtttcatcaggcgtttcccagctggcttccaaggtgcagggagtaggctctaaaggatggcgtgatgtcactacttttttctcaggtaaggccgagggcccccttgactctccttcagaggggcattcatatcagaactcaggactggatcactttcagaatagcaacattgaccagagcttctgggagacttttggcagtgctgaaccaactaaaacaagaaagtccccaagtagtgacagctggacgtgcgctgacacttcgacggagcgccgcagctctgactcctgggaagtttgggggtcggctagtaccaatcgcaattccaatagtgatgggggagagggcggtgaagggaccaaaaaggcagttccccccgcggtgcctacagatgacggatgggacaaccagaattggtag

SEQ ID NO: 107570 - DNA, 882 bp, synthetic construct
  misc_feature 1..882: note = Description of Artificial Sequence: Synthetic coding sequence
  source 1..882: mol_type = other DNA
atgcttagctctgaatccagctggtccctgaggaggataaccattcttgcaggcccttgtaggcgatctacaaccgccgagcctcgcccttccttaggcatcagagtgagcggacaacctcaaagcgtgactgcctcctctgataaggctttcgaagactggctgaacgacgacctcgggagttatcaaggggcccagggtaacaggtacgtgggattcggaaacacaccaccaccgcaaaaaaaggaagatgactttctgaataatgctatgagcagcctttactcagggtggagttctttcactactggagccagtcgatttgcctcagccgctaaggagggggccactaaatttggctcacaggcttcgcaaaaggcatcagagctggggcactcactgaacgaaaatgtcctcaagcctgcgcaggaaaaggtgaaagagggtaagatattcgacgatgtgagcagcggcgtctcccaacttgctagtaaggtgcaaggggtggggtctaaggggtggagggacgtgacaaccttctttagcggaaaagcagaaggtccattagactccccaagtgaaggacattcataccagaatagtggtctggaccacttccagaattcaaacattgaccagtccttttgggaaacgtttggttctgcagagcccactaagacccgcaagtcacccagctcggattcatggacgtgtgcagataccagcaccgaacggcggagcagtgattcttgggaggtctggggaagcgcatcaaccaaccgcaactccaattcagacggcggagaggggggggagggtaccaaaaaagccgtaccgcccgccgtgcctactgatgacgggtgggacaaccagaactggtag

SEQ ID NO: 107571 - DNA, 1086 bp, synthetic construct
  misc_feature 1..1086: note = Description of Artificial Sequence: Synthetic coding sequence
  source 1..1086: mol_type = other DNA
atgaggacaaccttcgtgcgctctgtaacaatggataagtggaaggacattgagttggaaaagatgaaagctggcggaaacgcaaagttccgtgagttcctcgagtcccaagaggattatgatccgtgctggtctctccaggaaaaatataatagcagggctgccgccctgttccgtgacaaagtggtggcacttgcagagggccgagagtggtcactggagtctagtccggcacagaactggaccccgccgcaacctcgaaccttgcctagcatggtacatcgcgtctccggacaaccacagagcgtcaccgcgagctccgacaaggcgtttgaggactggctaaacgacgacttggggtcttatcagggggctcagggtaatagatacgtcggtttcggaaacacaccccccccacagaagaaagaagatgactttttaaacaatgcgatgtccagtctgtattctggttggtcatcattcaccaccggtgcctcgcgttttgcttccgcagccaaggagggggcgacaaaatttgggtctcaggcctcccagaagttttggggccacaagcagcagccagagccagcttcagagctggggcactctctcaatgagaatgtcctgaagcctgcacaggaaaaggtgaaagaaggcaaaatttttgacgacgtgtccagtggagtgtctcagctggcatccaaaggcgtcgggtcaaaaggatggagggatgtgacaaccttcttcagcgggaaggcagagggccctctcgattctccttccgagggtcactcttatcagaatagtgggctggaccactttcagaacagcaacatcgatcagagtttttgggagacctttggcagcgccgaaccaactaaaaccaggaaatcaccctcatccgatagttggacttgcgcggacaccagcaccgagcgccgatcctccgactcctgggaagtgtggggcagtgcctccaccaacaggaacagcaatagtgacggcggagaaggcggcgaaggcaccaaaaaagctgtgccaccagccgttccgaccgatgacggatgggacaaccaaaactggtag

SEQ ID NO: 107572 - DNA, 786 bp, synthetic construct
  misc_feature 1..786: note = Description of Artificial Sequence: Synthetic coding sequence
  source 1..786: mol_type = other DNA
atggccagcccccggacacggaaggtcctcaaagaagtgagagtgcaggacgagaataatgtttgtttcgagtgtggcgcctttaacccacaatgggttagtgtcacttacggaatatggatttgtctggaatgttctggtcgccacagggggctgggagtgcatctgagctttgtgagatcagtcacgatggacaaatggaaagacatagagctcgaaaaaatgaaagcaggcggcaatgctaagtttagggaatttctggaatctcaagaagactacgacccatgctggtccctgcaggagaaatacaacagtcgcgcggcagctctgttcagagataaggtcgtcgctttggcagagggcagagaatggtcactggagagcagccctgcacagaactggacaccgccgcaacctcgtaccttacctagtatggtacatagagtgagcggccagccccagagcgttactgcatcctccgataaagcatttgaagactggctcaacgatgacctcggaagctaccagggagcacagggtaatcgctacgtcgggttcggaaacacgcccccaccccaaaaaaaagaggacgatttccttaacaacgctatgtcttctctctactccggttggtcctcatttaccaccggcgcaagccggttcgcaagcgcagctaaagaaggcgccactaaattcggatctcaggcatcccaaaaggcaagcgaactaggccacagcctgaatgagaacgttctgaaaccggcccaggagaaagttaaagagtag

SEQ ID NO: 107573 - DNA, 240 bp, synthetic construct
  misc_feature 1..240: note = Description of Artificial Sequence: Synthetic coding sequence
  source 1..240: mol_type = other DNA
atggccagccctcgcacccggaaggtgttaaaggaggttcgcgtgcaagatgaaaataatgtgtgtttcgagtgcggggcgttcaacccccagtgggtgtcagtcacttacggcatctggatttgtctcgaatgtagtggaagacatcggggattaggcgtccatctcagtttcgtaaggagcgtgacaatggacaagtggaaggacatcgagctagagaaaatgaaggccggcggctag

SEQ ID NO: 107574 - DNA, 369 bp, synthetic construct
  misc_feature 1..369: note = Description of Artificial Sequence: Synthetic coding sequence
  source 1..369: mol_type = other DNA
atggctagtccccgaacgaggaaagttctgaaagaggtgcgagtgcaggacgaaaataacgtgtgtttcgagtgcggggcctttaacccacagtgggtgtcagtgacctatggcatttggatctgcctagagtgttccggccggcaccgggggttaggcgtacatctttcatttgtacgtagcgttaccatggacaagtggaaggatatcgaattagagaaaatgaaagccggcggaaatgcaaaatttcgcgagttccttgagtcccaggaggattacgacccgtgttggtctcttcaggaaaaatacaattctagggccgctgcactgtttcgtgataaagtggtcgcccttgccgagggccggtag

SEQ ID NO: 107575 - DNA, 759 bp, synthetic construct
  misc_feature 1..759: note = Description of Artificial Sequence: Synthetic coding sequence
  source 1..759: mol_type = other DNA
atggtggccagcatgagactggcttaccaagaactgcaaatagatagaaaaaaggaagaaaagaagctgcagaatctggagggaaagaaacgggagcaggccgagaggctggggatgggcctggtcagcagatcttctgtgagtcacagcgttctgagcgaaatgcaggttatcgagcaggaaacacccgtgtcagcaaagtctagtagatctcagttggacctgttcgatgatgtcggaacattcgcaagcggcccgccgaagtacaaggataaccccttttcacttggagaaagctttgggagccgctgggacaccgatgcggcatggggaatggatagggtggaggagaaagaacccgaagttaccatctctagcataaggccaatatccgagcgcgccactaaccgcagagaagtggaatctagatcatctggacttgaatcttccgaggctagacagaagttcgcaggtgcaaaagccatatcaagcgatatgtttttcggcagagaggtagacgccgagtacgaggcccgcagtcgtttgcagcaactgtctggctcgtctgcaatcagttcttcagatctctttggtgatatggatggggcgcatggagcaggatctgtgagtttaggtaacgtattacctacagcagacattgcccagttcaaacaaggcgtcaaatccgtggccggaaaaatggccgtgctcgccaatggcgtgatgaacagtcttcaggaccgctacgggtcctactag

SEQ ID NO: 107576 - DNA, 1245 bp, synthetic construct
  misc_feature 1..1245: note = Description of Artificial Sequence: Synthetic coding sequence
  source 1..1245: mol_type = other DNA
atgcaagttggtgggaacgccaacgccaccgcttttttcaggcaacacgggtgtaccgcaaatgacgctaacaccaaatacaattcgagagccgcccagatgtaccgggagaagatcaggcagctgggctctgccgccttggccaggcacggtacggatcccccggcatgggacgccccagccactgagccttccggtacacaacaacctgccccctccactgagtcaagtggcctggcacagcccgaacacggaccaaacaccgacctgttagggacaagtcccaaggcttcattagaacttaagagcagtatcatcggaaaaaaaaaaccggccgctgcaaagaagggactcggcgcaaagaagggcctgggggcccagaaagtgagctcacagtctttctcggaaatagaacgccaggcccaagttgccgaaaaattgcgcgagcagcaggcggctgatgccaaaaagcaggccgaagagtctatggtggccagtatgcgtctggcttaccaagaactgcagatcgatcgcaagaaggaagaaaaaaaactccagaatctggagggtaaaaaacgggagcaggctgaacggctaggcatgggcctggtgtcccgaagctctgtgagccactcagtcctctccgagatgcaggtcatcgagcaggaaacaccagtgtctgccaagtcatcacggtcacaactggacctatttgacgatgttggtacttttgcatcaggcccacccaagtataaggataatcccttcagcttgggcgagtcctttggctctcgctgggataccgatgctgcgtgggggatggaccgcgtcgaagagaaagagcccgaggtgaccatcagtagtattaggcctatatctgagcgggcaacaaatcggagggaagtggagtcccggtccagcggcttggagagcagcgaagcccgccagaagtttgcaggagcgaaggcaatctcttccgatatgttttttggccgcgaggtggacgccgagtacgaggcgcgttccaggctgcagcaactgagcggaagcagtgccatttcatcctccgatctatttggcgacatggacggtgcacacggagccgggagcgtaagtctcggcaatgttctccctacagccgacattgcacaattcaagcagggggtgaagtccgtggccggtaaaatggccgtactggccaatggtgtgatgaacagtctccaagaccgatatggatcttattag

SEQ ID NO: 107577 - DNA, 1158 bp, synthetic construct
  misc_feature 1..1158: note = Description of Artificial Sequence: Synthetic coding sequence
  source 1..1158: mol_type = other DNA
atggctgcagagcccaacaaaaccgaaatccagactctctttaagaggctaagggccgtccccactaataaggcatgttttgattgtggagctaaaaatccttcatgggcatccataacatatggagtcttcttgtgtatcgactgctccggggtgcacagaagtctaggcgtgcatttgagcttcataaggtctacagaacttgactccaattggaactggttccagctccggtgcatgcaggtcggcggcaatgctaacgctttaggcgcaaaaaagggattaggagcacagaaagtgtcatctcaatccttctccgaaattgagcgtcaggcccaggttgctgagaaactgagggagcagcaggctgctgacgcaaaaaaacaagctgaggaaagtatggttgctagcatgaggctggcttaccaggagctacagatcgataggaaaaaagaagaaaagaaacttcagaacctggagggcaagaagcgggagcaggccgagagactgggcatgggcctcgtgtcacgttcttcagtgtcccactccgtgctgtccgaaatgcaggtaatcgaacaggaaactccagtgagtgccaagtcgagccgctctcagctggatctgttcgacgacgtcggaacatttgccagcgggccacctaagtacaaggataaccccttcagcctgggagaatccttcggatccagatgggacaccgatgccgcatggggaatggatagagtcgaggagaaggagcccgaggtcaccatatctagcattaggccaatcagtgagagagccaccaataggagggaggtggagagtcgttctagcgggctggagtcttctgaggctagacagaaatttgccggggcaaaggctattagctcagacatgtttttcggacgagaggtggatgctgaatatgaggcccgatcaagactgcaacaactctccggcagttccgccatttctagttccgacttgttcggggatatggacggtgcacatggggctggatccgtctctctggggaatgtcctaccaacagcagatatagcccagtttaagcagggagtgaaaagcgtggctgggaaaatggccgtactggcaaacggcgtgatgaactctcttcaagacaggtacgggagctattag

SEQ ID NO: 107578 - DNA, 1566 bp, synthetic construct
  misc_feature 1..1566: note = Description of Artificial Sequence: Synthetic coding sequence
  source 1..1566: mol_type = other DNA
atggcggccgagcctaacaagacggaaattcagaccctctttaagcgtctacgtgccgtccccaccaacaaggcctgctttgactgcggggcaaagaacccctcgtgggcctctatcacctatggcgtttttctatgtatcgattgttcaggagtccatcgctcacttggggttcacttgagctttattcgctcgacggagctcgattcgaactggaactggtttcagctgaggtgcatgcaggttggtgggaatgctaacgctaccgctttttttcgccagcatggatgtaccgcaaatgatgcgaatactaaatacaacagtcgcgcagctcaaatgtatcgggagaagattcggcaactggggagtgcagctctggcccgccacggcacagatctctggatagataatatgagctcagcagtacctaaccattctcctgagaaaaaggattcagacttcttcaccgagcacacccagccgcccgcctgggatgcacccgcaacggagcctagtggaactcagcagccagcgccatcaaccgagtcctctggtttggcacaacctgaacacgggccaaacacagatctcctaggtacctcccccaaggcctccctggagctgaaatcatcaatcataggaaagaagaagccagccgcagctaaaaagggcctgggcgccaagaagggcctcggagctcagaaggtttcctcacagtcgttctcggagatcgaaaggcaggctcaggtcgctgaaaagctacgggagcagcaggccgccgatgctaaaaagcaggcagaagagtcaatggtggctagcatgaggctcgcatatcaagagctgcaaatcgatcgtaaaaaagaagagaaaaagctgcaaaacctggaaggcaagaagagagagcaggcggaaaggttgggaatgggcctggtgagcaggtccagtgttagccattccgtcctaagtgaaatgcaggtaatcgaacaggaaacccccgtgtctgccaaatcatcccgctcccaactggatctttttgatgacgtcgggactttcgcctcgggaccccccaagtacaaagacaacccattctccctcggagaatcatttggatcccgatgggataccgacgccgcttggggaatggatagagtagaagagaaagaacccgaggtaacaatttcaagcataagacctatctcagagcgggctacaaataggagggaggtggaaagtcgctcttctggccttgaatcttccgaagcaagacagaaattcgcaggcgcaaaagcaatttctagcgacatgttctttggtcgcgaagtggacgccgagtatgaggcacgctctcgacttcagcagttgagtggatcatctgccatttcatctagcgacctgttcggcgacatggacggagctcatggtgcggggtccgtgagcctcggcaacgtgctgcccaccgcggatattgctcagtttaaacagggcgtaaagtctgttgcaggcaagatggcagttttggcaaatggagttatgaacagtttgcaggaccgatatgggagttattag

SEQ ID NO: 107579 - DNA, 1551 bp, synthetic construct
  misc_feature 1..1551: note = Description of Artificial Sequence: Synthetic coding sequence
  source 1..1551: mol_type = other DNA
atgggggatccatcgaaacaggacatcctcactatcttcaaacgcctgcgatccgttcctacaaacaaggtgtgcttcgattgtggagcgaagaacccaagttgggcatcaattacctatggcgtgtttctatgcatagactgctctgggtcccaccgctcactgggagtccacctgagtttcatcagatccacagaactagactctaattggtcttggttccagcttaggtgcatgcaggttgggggcaacgcgtctgctagcagttttttccatcagcacgggtgttcgactaatgacacaaacgcgaagtacaactctagggccgcacagctgtacagagaaaaaattaaatcattggcaagtcaggcgacacgcaagcatggtactgacctctggctggatagctgcgtcgtgccccccctaagtcctccccctaaggaagaggacttcttcgcatcccatgtgagccccgaggtgagcgataccgcctgggcttcggctattgccgagccctcctctctcacctctcgtcctgttgagactaccctggaaaacaacgaaggaggccaggaacagggacccagtgtagaaggcttgaatgtgcccacaaaagctaccctggaagtgagtagcattatcaagaagaaacccaatcaggccaaaaagggactgggagccaaaaagggcagcctgggtgcacaaaagttagctaacacctgtttcaatgaaattgagaagcaggcccaagccgctgataagatgaaagaacaggaggacctggcaaaggtggtttctaaagaagaaagcattgtgtctagcttgcgccttgcttacaaagacctcgagatccagatgaaaaaggacgaaaagatgaatattagcggcaagaaaaacgttgatagtgacagacttggaatgggttttggcaattgcaggtcagtgatctcacactcagtcactagcgacatgcagacaatcgagcaggaatctccgattatggctaagccccgcaagaagtataatgatgatagtgacgactcttactttacatccagtagttcctacttcgacgagccagttgagctccgctcgagtagctttagctcatgggatgatagctccgactcttattggaaaaaagaaacatctaaggacaccgaaacagtcttgaagacaaccgggtacagcgacaggccgacagcaaggaggaagccagattatgagcctgttgaaaatacagatgaggcccagaagaagttcggcaacgtgaaagctatcagttcagatatgtacttcggtaggcaaagccaggcggactacgaaacccgcgcccggctagaaagactttcggccagttcaagtattagttccgccgatctgttcgaggagcctcggaagcaaccggccgggaattactccctctcctctgtgctgcccaacgccccagatatggcgcagtttaaacagggcgtccgttccgtcgcaggaaaactgtcagtcttcgctaacggggtggtgacctccatccaggataggtacggcagctag

SEQ ID NO: 107580 - DNA, 1335 bp, synthetic construct
  misc_feature 1..1335: note = Description of Artificial Sequence: Synthetic coding sequence
  source 1..1335: mol_type = other DNA
atgggtgacccgtccaagcaggacattttgacgattttcaagagactccgcagtgtgcctacaaacaaggtctgcttcgattgcggagccaagaacccgagctgggcctctattacatatggagttttcttgtgcatcgattgctccgggtctcaccgctctctcggggttcacctttctttcattaggagtaccgagctcgacagtaattggtcctggttccagcttcgctgcatgcaggttggagggaacgcatccgccgttagcgacaccgcgtgggcctctgcaattgccgagccctcctctctgacctccaggcccgttgagactactcttgagaacaatgagggtgggcaagaacagggaccttccgtagaaggcttgaacgtacctaccaaggccaccctagaggtgtcgagtattattaagaagaaaccaaaccaggcaaagaagggcctcggggcgaagaagggctctcttggagcccagaagttggcgaatacctgttttaacgagatcgaaaaacaagcacaagccgcagacaagatgaaggaacaagaagatctcgcaaaggtggtttcaaaggaagaatcaatcgttagttcacttcgcttagcttacaaagacctagagatccaaatgaagaaggacgaaaagatgaacatatccggaaaaaaaaacgttgacagcgatcggctggggatggggtttggcaattgccgaagtgtgataagtcactccgtcacctccgacatgcaaactatcgagcaggaatcccccatcatggcaaaacctaggaaaaagtataacgatgactctgacgattcttacttcacgtcaagttctagctactttgatgaacctgtggaacttagatcctcctctttttcttcctgggacgatagttcggacagctattggaaaaaggaaacttccaaggatactgagacggtgctgaaaacaacaggctactccgatcggccaacggccagaagaaagcccgattatgagcctgtggagaataccgatgaggcccagaagaagttcgggaacgtgaaagctatctcaagcgacatgtacttcggtcgacagtcacaggccgactatgagacaagggcccgacttgagaggttgagcgctagttcctccattagctcagcagatctcttcgaggagccaagaaagcagccagccggtaattattccctgtccagcgtgctgcccaacgctcccgatatggcccagttcaaacagggtgtgcgatcagtggcgggcaaactgagcgtctttgccaatggggtcgttacgagtattcaggatcggtatgggtcctag

SEQ ID NO: 107581 - DNA, 1419 bp, synthetic construct
  misc_feature 1..1419: note = Description of Artificial Sequence: Synthetic coding sequence
  source 1..1419: mol_type = other DNA
atgggggacccaagcaaacaggatatactcaccatattcaagcgcctgcgaagcgttcctaccaataaagtgtgttttgattgtggagctaagaatccaagctgggcgtctataacatacggggtgttcctgtgcatcgattgtagtggaagtcatcgatctctgggagtgcacctgtcatttatccgaagcaccgaactagatagcaattggtcctggttccaattgcgttgtatgcaagtcggaggcaatgctagtgccctgtggttagattcttgcgtagtacctcctctgagcccccccccaaaagaggaagactttttcgcaagccacgttagccctgaagtgtctgatactgcgtgggcctccgccatcgcagaaccttcctctcttacctccagacctgtcgagaccactctggagaataatgaaggagggcaagaacagggacctagcgtcgagggactgaacgtccccactaaggccacccttgaagtttccagcatcatcaaaaagaagcctaaccaagcaaaaaaaggtttaggagcaaaaaagggcagtcttggggctcagaaactggccaacacttgcttcaatgagattgagaagcaggcgcaggctgccgataagatgaaagaacaggaagacctggcgaaggttgtgagcaaggaggaaagtattgtgtcttctcttaggctcgcttacaaagatctcgaaatccagatgaaaaaggatgaaaaaatgaatatctccggcaagaagaacgtagatagcgacaggttgggaatgggcttcggcaactgccgctccgtgatttctcacagtgtcaccagcgacatgcaaaccattgaacaggagtctcctattatggccaaacctagaaagaagtacaatgacgactcagacgacagttactttaccagctccagctcttactttgacgaaccagtcgaactccgcagtagctcatttagcagctgggatgatagctcagattcatattggaagaaggaaactagcaaggacacagagactgtgctgaagaccacaggttatagtgatcggccaacagctagaaggaagccagactatgagccagtcgagaacacagacgaggcccagaagaagtttgggaatgtgaaagccattagttccgacatgtactttggccggcagagtcaggctgactatgagacccgggcacgactggagcggctgagtgcttcatccagcataagctccgctgacctgttcgaggagcccaggaaacaaccggctgggaattactcccttagctccgtactgccaaacgcccctgacatggcacagttcaagcagggcgtcagatcagtggcaggcaaattatccgtcttcgcgaatggagtagtgacatccatacaggaccggtacggttcttag

SEQ ID NO: 107582 - DNA, 822 bp, synthetic construct
  misc_feature 1..822: note = Description of Artificial Sequence: Synthetic coding sequence
  source 1..822: mol_type = other DNA
tgacttgcacttttccaggtgtctgatactgcctgggctagtgccatcgccgagccctcatccctcacttcacgtccagtggaaacaacattggaaaataacgagggcggacaggaacaggggcccagcgtggaagggcttaacgtgcctacaaaggccactctggaggtatcctcgattattaaaaaaaaaccgaatcaggccaagaagggtttgggggcaaaaaaaggctctttaggggcacagaagttagccaatacctgcttcaatgaaatcgagaaacaagcgcaggctgcagacaagatgaaagagcaagaggacctggccaaagtggttagcaaagaagagtctatagtttctagtctgagactggcatacaaggatctcgagattcaaatgaagaaggatgagaagatgaatatcagcggaaaaaagaatgtcgactctgaccggttgggcatgggctttggtaattgtagaagtgtcatcagccactccgttacatctgacatgcagacaatcgagcaggagtctcccatcatggcgaagccaagaaaaaagtataacgacgattctgatgacagctacttcacaagttcgtctcgccctaccgcacggcgtaaaccagactatgagcccgtggaaaataccgatgaggcacaaaagaaattcggaaacgtcaaggctatttctagtgacatgtactttgggcgacagtctcaggccgactacgaaacccgagcccgattggagagactaagcgcgtcctcctctatcagctcggctgacctcttcgaagagccgcgcaaacaacccgcgtag

SEQ ID NO: 107583 - DNA, 459 bp, synthetic construct
  misc_feature 1..459: note = Description of Artificial Sequence: Synthetic coding sequence
  source 1..459: mol_type = other DNA
atgggcgacccatctaagcaggatattctgaccatatttaagcgactgcgctcagtccccacaaacaaggtatgcttcgactgcggagccaaaaatccttcatgggcgagcatcacgtatggcgttttcttgtgcattgactgttccggcagccatagaagcctgggcgtgcacttgagttttatccgcagcacagaacttgacagcaattggtcatggtttcagctccggtgtatgcaggtcggaggcaacgcttctgctgtgtcagatacagcatgggcctcagctattgccgagccgagcagtctgacgtccagacctgtcgagaccacactggaaaacaatgagggcggccaagagcagggcccttcagtcgagggtctcaatgttccaaccaaggccaccctcgaagtgtcatctattattaagaaaaaacccaatcaagctaagaagggctag

SEQ ID NO: 107584 - DNA, 5550 bp, synthetic construct
  misc_feature 1..5550: note = Description of Artificial Sequence: Synthetic coding sequence
  source 1..5550: mol_type = other DNA
atgtatgagggcaagaagaccaaaaacatgtttcttacacgggcactggagaagatcttggccgacaaagaggttaagaaggcccaccatagtcagctccgcaaagcctgtgaagtggctctggaagaaattaaggctgaaacagaaaagcagtctcccccacacggagaagcaaaggctgggagcagcactctgccccccgttaaatccaagaccaacttcattgaggctgacaagtacttcttgccgtttgaactggcatgtcagagtaagtgtccacggatcgtttctacaagtctggactgccttcaaaagcttatcgcctatggacacctcaccggcaacgcgccagattccacgaccccaggtaagaaacttatagaccgcatcattgaaactatttgtgggtgttttcagggccctcagaccgacgagggagttcagcttcagatcattaaagctctgctgaccgccgtaacttcacagcacattgaaatccatgaagggaccgttctgcaggctgtgagaacctgttataacatttatttggcctctaaaaacctgattaatcagactacggcaaaggcgacattaacacagatgctcaacgttatcttcgcccgcatggaaaatcaggcactccaagaggcaaagcagatggaaaaggagcgacatagacagcaccatcacctcctccaatcgcctgtgagtcatcatgaacctgagtcgcctcagctgagatacctgcccccacagacggtggatcacatttctcaggagcatgaaggcgatctggatcttcacaccaacgatgtggataaatctttgcaggatgatacagagccagagaatggcagtgatattagttccgcagagaatgaacagacagaggctgaccaagccacggcagccgaaaccctgagtaaaaatgaagtactgtacgatggcgaaaatcatgactgtgaagagaaaccccaggatatcgtccaaaatattgtggaagaaatggttaatatcgttgtaggagatatgggcgaaggcacaactatcaacgcatcagcagacgggaacattggcacgattgaggacggatccgattctgaaaatatccaggccaacgggatcccaggtacccccatttctgtggcctacaccccaagcctgcctgacgatcgactttctgttagctccaacgacactcaggagtcagggaactcaagcggtccatctcccggcgctaagttctcccacattctccagaaagacgccttcttggtgttccgctcactctgcaagctgtctatgaagcccctctcggacggaccacccgatcccaagtctcacgagctgcggtccaagattttgtcacttcaactgctgctatccatcctccagaatgccggtcctatcttcagaactaacgagatgttcataaacgctataaagcagtacttatgcgtagccctgtctaagaatggggtatcgagcgtgccagaggttttcgagctgtctctgagcatttttcttacgcttctgagcaatttcaagactcatttgaagatgcaaattgaagtcttttttaaggagatatttctatacatcctggaaaccagcaccagctcgttcgaccacaaatggatggttatacaaaccctgacacggatctgcgcagatgcgcaaagtgtcgtggatatttacgtgaactacgattgtgatcttaacgcagcaaacattttcgagaggctggtgaatgacctgtctaaaatcgcccaggggagaggcagtcaagagctgggcatgtccaacgtccaggagctaagccttagaaagaagggtctggaatgcctggtgtccattcttaaatgtatggttgaatggtccaaggaccaatacgtcaacccgaatagccagaccacacttggccaggagaagccatctgagcaggagatgtctgagatcaagcaccccgaaacgattaaccgctatggtagtcttaattcccttgagagcacgagctcttccggcattggatcatattctacacagatgtctggaaccgataatccagagcagtttgaggtgctgaagcagcagaaggagattatcgagcaggggattgaccttttcaacaagaagccaaaacgggggattcagtatctgcaggaacagggtatgctgggaactacccctgaggatatagcccagtttcttcatcaagaggaacggctcgattctacgcaggtcggagagtttctgggcgacaatgataagttcaacaaagaagttatgtatgcttatgtggaccaacacgacttcagcggtaaagacttcgtgagcgccctgaggatgttcctggaaggattccgcctgcccggggaggcccagaagatagacaggctgatggagaaattcgccgcaagatatctggaatgtaaccaggggcagacattgttcgcatcggccgacacagcctatgtactggcgtatagcatcattatgctgactacagatcttcactcacctcaggtgaagaacaaaatgacaaaggagcagtatattaagatgaaccgcggcattaacgatagtaaagatctgcccgaggaatacctgtccgccatctacaatgagatcgctggtaaaaaaatctcaatgaaggagactaaagagttgacaatccccacaaagagttcaaaacagaacgtggcttcggagaaacagcggcgcctgctttataacctcgagatggagcagatggcaaaaactgcgaaggctcttatggaggctgttagccacgtccaggccccatttacctcggccactcacctggaacacgtgcgacccatgttcaagttggcctggactccttttctggctgctttctcagtgggcctgcaagactgcgacgatactgaggttgcctctctctgccttgagggcattcggtgcgctatccggattgcgtgtatttttagcatacagttggagagggacgcttatgtacaggctctggcacggtttacgttgctgacagttagctctggtattactgaaatgaagcagaaaaacattgacacaataaagacgctgataactgtggcccacaccgatgggaattacctaggtaattcttggcacgaaattctgaagtgcatcagtcagctggagctagcgcagttaattggtactggtgttaagcccagatacatctcaggcaccgtccgcggaagagaggggagcctcactggcaccaaagatcaagcacctgatgagtttgtgggattaggactagtggggggcaacgtcgattggaaacagatagcctctattcaggagtccatcggcgagacttcctctcagagcgtggtggtagctgtggatagaatctttacaggcagtacgcgtctggacggaaatgccattgtagatttcgtgagatggctctgtgctgtgagtatggatgagcttctgtcaacgacacacccgagaatgtttagcctgcaaaagattgtcgaaatcagctattacaatatgggaaggatcagactccaatggtcacgcatttgggaggtgatcggtgatcacttcaacaaggttggctgtaatccaaatgaggatgtggcaatctttgccgttgattcactgaggcaactgagtatgaagtttctggagaagggagagttggccaacttccggtttcagaaagatttcctacgccccttcgaacacatcatgaagagaaacaggagtcccactattcgggatatggtagtccggtgcatagcccaaatggttaattctcaagccgccaacattcggtccggttggaaaaatattttctccgtgtttcatctggcggctagcgaccaggacgagtctatcgtagagctcgccttccagacaacaggccacatcgtaactcttgtatttgagaagcattttccagctaccatcgactcgtttcaggacgcggtcaaatgtctcagtgagttcgcgtgcaatgctgcgttcccagacacatctatggaggccatacgactcatccgtcattgcgcaaaatacgtcagtgatcgcccacaggcctttaaggagtatacaagcgatgatatgaacgtggctccagaggatcgggtttgggtcagagggtggtttccaatactgtttgaactcagctgcatcatcaacagatgcaagttggatgtgcggacacgcgggctgactgtaatgtttgaaatcatgaaaacttatggacacacctacgagaagcattggtggcaggatctgttcaggattgtctttcgtatttttgataatatgaagctgccagagcagcagaccgagaaggctgagtggatgaccaccacctgcaaccacgccctgtatgcaatttgcgatgtgtttacccaatatctcgaagtgctgtccgacgtgctgctcgacgatatctttgcccagctttactggtgcgtccagcaagacaatgaacagctcgctaggtccggcactaattgcctggaaaatgtcgtgatcctgaatggcgagaagttcaccctggaaatttgggataaaacttgcaattgtactcttgatatattcaaaactacaatccctcacgcactgttgacctggaggccaaacagtggagaaaccgcgccgccccctccaagcccagtaagtgaaaaacctctggacactatctcacagaagagcgttgacatccacgacagcatccagcctagatccgtagacaacagacctcaggcccccttggtctccgcctcagcagtgaatgaggaggtatcaaagatcaagagcactgctaagttccctgaacagaagttgtttgctgccttgctgatcaagtgcgtcgtgcaacttgagctgatccagactattgataatatagtcttctttccggccaccagcaagaaagaagatgccgagaacctggccgccgctcagcgtgacgctgtcgacttcgatgttagagtggatacccaggaccagggcatgtaccgcttcctcaccagccagcagcttttcaagctcctggactgcctgctggaatcacaccgctttgctaaggcgttcaattccaataatgaacaacgaaccgcgctgtggaaggctggctttaagggcaaaagcaaacctaacctgctgaaacaggaaacaagttccctggcatgcggccttagaattctgttcaggatgtacatggacgagtcaagagttagcgcttgggaggaggtgcagcagcgcctccttaacgtgtgttccgaagcactgagctattttcttactctcaccagcgaaagtcatcgcgaggcatggacgaatcttttgctcttgttccttacgaaagtgttgaagatctcagacaatcgtttcaaagctcacgcatccttttattacccactgctgtgtgaaataatgcagtttgaccttattcctgagctgagggccgtgttgcgaagattctttctgagaataggagtcgtctttcagattagtcaaccacccgaacaagagcttggaatcaacaaacagtag

SEQ ID NO: 107585 - DNA, 5358 bp, synthetic construct
  misc_feature 1..5358: note = Description of Artificial Sequence: Synthetic coding sequence
  source 1..5358: mol_type = other DNA
atgcaggaaagccagacaaaaagcatgttcgtgtccagggccctcgagaagatccttgctgataaggaagtgaagcgtcctcagcactctcagctcagaagagcatgccaagttgcccttgacgagataaaggcagaaatcgagaagcagcggctaggcacagccgctccaccgaaagcgaattttattgaggctgacaagtacttcctgcctttcgagctagcctgccagtcgaagtctccgcgcgtcgtgagtaccagcttagactgcttgcaaaaattaatcgcatatggtcacattaccggcaatgcccctgactcaggcgcacccggcaaaagactcatcgatagaattgtggaaactatttgtagttgctttcaaggcccacagactgacgagggcgtgcagctgcagatcataaaggccctgcttacagccgttacctctccccacatcgagatccatgaaggtacaattttacagaccgtgcggacatgttataacatttatctggcttctaagaatttgattaatcagactaccgctaaagccacactgacccagatgctcaatgtgatcttcacccggatggaaaaccaggtgcttcaagaagccagagaattagaaaaacccatccagtccaaacctcaatcacccgtcatccaggccgccgccgtatcccccaagtttgtgcggctcaaacattcgcaagcccaaagcaagcctaccacacctgagaagaccgatctaaccaacggagaacatgcaaggtcagattccgggaaggtctccacagagaatggcgatgctccacgcgagcgcggctcaagcctgagtggcactgatgatggcgcgcaggaggtcgtcaaggacattctggaggatgtggtgacctctgctatcaaggaagctgccgaaaaacatggactgaccgaacccgaaagagttcttggagaattggagtgtcaggagtgcgcgatccccccaggagtggacgaaaattcccaaacaaacgggatcgccgatgatcgacagagcttaagttctgctgacaacctagaatccgatgcgcagggacaccaggtcgccgcaaggttttctcatgttctccagaaagacgcatttctcgttttccggagcctttgcaagctgagcatgaaaccattaggggagggtcctccagatccaaagtcacatgaattgaggtctaaagttgtctcacttcagttgctgctctcagtcctgcagaacgccggccccgtttttaggactcacgagatgtttatcaacgctattaagcagtatctttgtgtcgccctgagcaaaaatggagtgtctagtgtgcccgatgtgtttgagctcagcttggccatctttttaaccttactcagtaacttcaagatgcacctgaagatgcagattgaagtcttttttaaagaaatttttctgaacatccttgaaacttccaccagctccttcgagcaccggtggatggtgatccagacgttaacaaggatatgcgcagacgcgcaatgcgtggttgacatctacgtgaactacgattgtgacttgaacgctgccaacattttcgagagactggtgaacgacttgagcaagatcgcccagggtaggtcagggcatgaactcggcatgacaccgctgcaagaactatctcttcgaaagaagggcctggagtgtttggtttccatccttaaatgtatggtcgaatggtctaaagatctgtacgttaaccctaatcaccagacttccttgggacaggaacgccttacggaccaagagattggggacggaaaagggctcgacatggctcggcgatgcagcgtaacgtcgatggagagcactgtgtcctcaggcactcaaacgaccgtgcaggatgatcccgagcagttcgaggtgataaagcaacagaaagagatcattgaacacggtattgagctgttcaataagaaacctaaacgtgggatccagtttctacaggagcagggcatgctggggacgtcagtcgaagacatagcacagttcctgcatcaggaagaaaggctagatagcacacaggttggcgatttcctaggggacagcgcgcgctttaataaggaggtgatgtatgcttatgtggaccaattggacttctgcgagaaagaattcgtcagtgccctgcgcaccttcttagagggatttcgtctgcccggagaagcccagaagatagacagactgatggaaaagttcgctgcccggtacatcgaatgtaaccagggacaaactctgtttgctagtgctgataccgcttatgtactcgcgtacagcatcatcatgttaaccactgacctgcatagccctcaagtgaagaataaaatgactaaagaacagtacataaagatgaaccgagggatcaatgactccaaagacctgcccgaagagtacctctcttctatttacgaagagatcgaaggcaagaagatcgccatgaaggagacaaaggagcttaccatcgcaaccaagtcaaccaaacagaatgttgcgtccgagaagcagagaaggcttttgtacaatcttgagatggaacagatggctaagacagcaaaggccttgatggaagcagtgagtcatgcaaaagccccatttacaagtgccacgcatctggaccatgtccgcccaatgtttaagctagtttggactccccttctagcggcctattccattgggttgcagaactgcgatgacaccgaagtggcctctctatgtcttgaggggatacgatgtgctatccgcatcgcttgcatttttggtatgcaactcgagagagatgcctatgtgcaggcgttggcacgcttcagcctcctaacggcctcttcaagtattaccgaaatgaagcagaagaatatcgataccatcaagacactgatcaccgtagctcacaccgacggtaattacctgggaaatagctggcacgaaattttaaagtgcatatcacagttggaacttgctcagctcattggtacgggagttaagactagatacctttctggaagcgggagagaacgggaaggcagtttgaagggtcatactctagctggtgaggaatttatgggtctcgggttggggaacctagtaagtggaggagtggacaagcgacagatggccagcttccaggagtcagtgggcgagacctcaagtcagtcagtggtggtggctgtcgatagaattttcactggatcaacaagattggacggaaatgccatcgtggatttcgttagatggctgtgcgccgtgtctatggatgaattggcatccccccatcatccccggatgttcagcctgcaaaagattgtagaaatctcatattataacatgaacagaatccgccttcagtggtcccgaatttggcacgtcataggggaccactttaataaagtagggtgtaatcctaatgaagatgtcgcaattttcgctgtcgattcattgcgacagcttagtatgaagtttctcgaaaagggagagctggcgaactttagattccaaaaagattttctccggcccttcgagcacatcatgaagaagaaccgctctcccactatccgagatatggccatcagatgtatcgctcagatggttaacagtcaagccgccaatattcgcagtggttggaaaaacattttcgcagtatttcatcaggcagcctctgaccacgacgggaatatcgtagagcttgcatttcagacgacctgtcatatcgtgacgacgatttttcaacatcactttccggcagctattgactcattccaggacgcagtcaagtgtttatctgagtttgcctgtaacgcagcgttccctgacacctccatggaagctatacgccttatccgcttctgtgggaagtatgtgagtgaacggccgcgtgttttacaggagtacacttccgacgacatgaatgtagcacccggggatcgagtatgggtacgtgggtggttccccatcctgtttgagttgagttgtatcatcaatcgatgcaagctggatgtccgcacccgcggactgactgtaatgtttgagatcatgaagagctacggacacactttcgagaaacactggtggcaagatctgtttcgaattgttttcaggatctttgacaacatgaagttgccggaacagctgtcagagaaaagcgaatggatgaccaccacctgcaaccacgctctgtacgccatctgtgatgtattcactcaattctatgaggcactgaacgaggttctgctatcagacgtatttgcgcaactgcagtggtgtgtgaagcaggacaatgaacaactggcacgttccggcacgaattgtctcgaaaacctggtgatttccaatggcgagaagttctcccctgaggtgtgggacgagacatgcaactgtatgctggacatctttaaaacaaccatcccgcatgtcctgctcacatggcggccagttggtatggaggaggactcttctgagaagcacttggatgtggatcttgatcgccagtccctgtcttcaatcgacaagaacccgagcgagcgcggtcagagtcaactgagtaatccgacagatgactcctggaagggccgcccatatgccaaccagaagctgtttgccagcctactgattaaatgcgtagtgcaattagagctgattcagacgatcgacaacattgtcttttatcctgcaactagcaaaaaagaagacgccgagcacatggtagccgcccagcaagatacattagacgccgatatccatattgaaaccgaggatcagggaatgtacaagtacatgtcctctcagcatctgttcaagctgcttgactgcttgcaggaatcccactctttttcgaaagcctttaactctaactatgagcaacgaaccgtgctttggagggcagggtttaaggggaagagcaagccaaaccttcttaaacaagagacctctagtctcgcatgttgtttgcgcattctgttccgcatgtacgtcgatgaaaataggcgcgattcatgggaagagatacagcagcgtctcctgaccgtgtgctcagaagccctggcttacttcattacagtgaactcagagagtcaccgagaggcctggacctcactgttactcctgctgctgactaagacactgaaaattaacgacgagaagttcaaggcccacgcctcaatgtattatccctatttgtgcgaaatcatgcagttcgatctaatcccagagcttagagccgtccttagaaagtttttcctgcgtatcggagttgtgtacaagatctggattcccgaagaacctagtcaggtgcctgctgctctctcacccgtgtggtag

SEQ ID NO: 107586 - DNA, 2499 bp, synthetic construct
  misc_feature 1..2499: note = Description of Artificial Sequence: Synthetic coding sequence
  source 1..2499: mol_type = other DNA
atgcaggaaagccagacgaaaagcatgttcgtctctagggcactggagaaaatcctagccgacaaggaagtgaagcggccacagcactcccaactgaggcgggcctgccaggttgccctcgatgaaatcaaggccgaaatagagaagcagcgtttagggaccgccgcccctcctaaggccaactttatcgaggcggacaaatacttcctgccatttgagctggcctgccagagcaaatcgccgcgggtcgtatccacaagcttggactgtttgcagaagcttatagcttatggccacatcaccggaaatgcccctgatagcggcgcccccggcaagaggctgattgatagaattgtggaaacaatttgctcttgcttccagggtccgcagaccgatgagggtgtccagctgcagatcattaaagccctgctgaccgctgtgaccagcccccacatcgagattcacgaagggaccattctccagacagtgcgaacatgttataacatctacctggcatctaagaatctgatcaaccagaccacagccaaagcaactctgacccaaatgctgaacgtcatattcactaggatggaaaatcaagtgttgcaggaagctcgggagctcgagaagcctattcagagtaagccccagagtcctgtcatccaggcggccgcagtaagtccaaagttcgtgaggctgaaacactcgcaagcacaatctaaacctacgacgcctgaaaagacggatttgaccaacggtgagcatgcccggtccgactccggaaaagtaagcactgagaacggagatgcgccacgggagcgggggagctcactgtctggaaccgatgatggtgcccaggaggtggtaaaggatattctggaagatgttgtgacgagtgcaatcaaagaggccgcagaaaagcacggactaactgagcctgaacgagtcctgggcgagctggagtgccaggagtgcgcaatccccccaggggtagacgagaacagccagaccaacggcattgcggacgataggcagtcactgtcatctgcagataatttagaatctgacgctcaaggccatcaggttgcggctaggttctcgcacgttctgcagaaagacgcttttttggtgtttcgatctctgtgcaaactgagtatgaagcctttgggagagggacctccagatcctaagtcacacgaactccggagcaaggtcgtgtccctgcagttgctgttatccgtcctccaaaatgcgggacccgtcttccgtactcacgaaatgttcatcaacgcgattaagcagtatctgtgcgtggcgctatcaaaaaacggggtctcaagcgtgcccgacgtgtttgaactgtccttggccatatttctgacactgttgagcaactttaagatgcatcttaagatgcagatcgaagttttttttaaggagatctttcttaatatcttggaaacctctacaagttcctttgagcaccgttggatggtgatccaaacactcactcgcatatgtgcggatgcacagtgcgtggtggatatttacgtaaactacgactgcgacctcaatgctgcgaacatttttgagcgactcgtcaacgacctatccaaaatagcccaaggacgctctggacacgagctgggcatgacccctctgcaggaactctctctcagaaaaaagggcttagagtgccttgtgagtatattgaagtgcatggtggaatggtctaaggacctgtatgtgaaccctaaccaccaaactagcctggggcaggaacgccttaccgatcaggaaattggggacggcaagggtctagacatggccagacgatgctccgttacatctatggaaagtactgttagctccggtacgcagacaacggtccaagacgacccagaacaattcgaggtgatcaagcagcagaaggaaatcatcgagcatggaattgaactgttcaataagaagcccaagaggggcatccagtttttgcaagaacagggaatgctggggacctccgtcgaggacattgcccagtttctacatcaagaagaacgcctggattccacccaggtgggtgacttcttgggagattcagctcgttttaataaagaggtaatgtacgcatacgtggaccagctggacttctgcgagaaggaattcgtttccgccctccgaacctttcttgaaggattccgcctgcccggcgaagcccagaagattgacagactgatggaaaaatttgcggcaaggtatatcgagtgtaaccagggtcagactctcttcgctagcgcggataccgcatatgtgttagcctactccatcatcatgctaactactgaccttcactccccccaggtaaagaataaaatgacaaaagaacagtacattaaaatgaacaggggaataaacgattcgaaggatctgcccgaggagtatttatcatcaatctatgaggaaatcgagggtaaaaagattgccattaaaaagaattag

SEQ ID NO: 107587 - DNA, 591 bp, synthetic construct
  misc_feature 1..591: note = Description of Artificial Sequence: Synthetic coding sequence
  source 1..591: mol_type = other DNA
atgggatctgtcaattcacgcggccacaaagcagaggcccaggtggtgatgatgggattagattcagccggcaaaacaaccctgctgtataaacttaaaggtcaccagcttgtcgagaccctcccaaccgtgggcttcaatgttgaaccactcaaggcacctggtcatgtaagcctgacattgtgggatgtcggcggacaggcacccttgcgcgctagctggaaggattatctggagggaacagacattttggtttacgtgctggactccaccgacgaagcccggctcccggaaagtgcagctgaattgacggaagtacttaatgatcctaatatggcaggtgtgccattcctggtgctggccaataaacaggaagctccggacgctttacctttactcaagatcaggaacaggctatccttagaaaggttccaggatcattgctgggagcttagagggtgttccgcattgacaggcgaaggcctgccagaggctctccagtccctttggagtcttcttaaaagtcgctcttgcatgtgcctgcaggcacgggcccatggcgccgagagaggggactctaaacgctcgtag

SEQ ID NO: 107588 - DNA, 966 bp, synthetic construct
  misc_feature 1..966: note = Description of Artificial Sequence: Synthetic coding sequence
  source 1..966: mol_type = other DNA
atgttttcgttaatggccagttgctgcgggtggtttaaacgctggcgggagccagtgcggttggccaacaagcaggataaagaaggcgcccttggcgaagcagacgtgatagagtgtctcagtcttgagaaattggttaatgaacataagtgcctctgccaaatcgagccatgctccgcaatatccgggtatggaaagaagatagataagagtatcaagaaagggttatattggttgctccacgtgatcgcaagagacttcgatgctcttaacgaaagaattcagaaggagacgaccgagcaaagggctttggaggagcaggaaaagcaagagagggccgaaagggttaggaagctacgagaagagcgcaagcagaacgaacaggaacaggctgagctcgatgggacttctggactcgccgagctggaccctgagcccacaaaccccttccagccaatcgcctcagtgattatcgaaaatgagggcaagctcgaaagagagaaaaaaaaccagaaaatggagaaagactcagatggctgccaccttaaacacaagatggagcacgagcagattgagacccagggacaggtgaatcataacggtcagaagaacaacgaatttggactcgtcgagaactacaaggaggcgctgacacagcagctgaaaaacgaggacgagaccgaccgccctagtctggaatctgccaatggcaagaaaaagacgaaaaagctgaggatgaaacggaaccatcgagtcgaacctctcaatattgatgactgtgcgcccgaatccccaacgcccccacctccccccccaccggtggggtggggtacacccaaagtgactagattgccgaagctagagcctctaggagagactcatcacaatgatttctacagaaagccattgccaccccttgccgtccctcagcgccccaatagtgacgcgcacgacgttatctcctag

SEQ ID NO: 107589 - DNA, 1287 bp, synthetic construct
  misc_feature 1..1287: note = Description of Artificial Sequence: Synthetic coding sequence
  source 1..1287: mol_type = other DNA
atgttctcactcatggctagctgttgtggctggttcaaacgatggcgcgagcctgttcgtaaagtcactttactgatggtaggcctcgataacgcaggcaagacagccacagctaaagggatacaaggagaataccccgaagatgtggcacccacggtgggattttcaaaaataaatcttaggcagggaaaattcgaggtgacgattttcgatttaggtgggggcattagaatccgaggaatctggaaaaattactacgctgagagctacggcgtgattttcgtagtcgactccagtgatgaagagaggatggaggagacaaaagaagcaatgtctgagatgctgaggcaccccaggataagcgggaaacctatcttggtgctcgccaataagcaggacaaagagggggctctcggcgaggcagatgttatcgagtgcctgagtctagaaaagctcgtgaacgagcacaaatgcctgtgccagatcgaaccttgttccgctatttctgggtacggcaagaagattgacaagtcgatcaaaaagggcttgtactggcttttgcatgtgatcgctagagactttgacgctcttaacgaaaggattcaaaaggagaccacagagcaaagggccctggaggaacaagagaaacaggagcgagcagagcgggtgaggaaattgagagaagagaggaaacaaaacgaacaggagcaagccgaacttgatggtacatccgggctcgcagaactcgatcccgagccgacgaacccatttcagccgattgctagtgtgattatcgaaaatgaaggcaagctcgagcgcgaaaaaaagaaccagaaaatggagaaagactcagacggctgccacctcaagcataagatggaacatgaacagatcgaaacacagggtcaggtcaaccacaacgggcaaaaaaacaacgagtttggtttagtagaaaattacaaggaggccttgacccagcagcttaagaatgaggacgaaacagaccggccctcgctggaatctgccaatggtaagaaaaagacaaagaaacttaggatgaaacgcaaccatagggtagaaccacttaatattgatgactgtgccccagaaagccctacaccaccaccgcctccacccccagtcggctgggggacccctaaggtaactcgcctgcctaagctcgagcccttgggcgagacccaccataatgacttttacaggaagcctcttccccccctggcagtcccacagcggcctaacagcgacgcacatgatgtgatatcatag

SEQ ID NO: 107590 - DNA, 1287 bp, synthetic construct
  misc_feature 1..1287: note = Description of Artificial Sequence: Synthetic coding sequence
  source 1..1287: mol_type = other DNA
atgttctcattgatggcgagctgctgtggatggtttaagcgatggcgcgaaccagtgaggaaggtgaccctattaatggtgggactcgacaatgccggcaaaaccgcgaccgcaaaaggcattcaaggagaataccctgaggatgtggcacctactgttggattttccaagatcaatctccggcaggggaaatttgaagtcacgatttttgatctcggcggcggtatcaggatcagaggtatctggaagaactattacgcagagtcatatggtgtcatatttgtggtcgatagctcagacgaagagcgtatggaagagaccaaggaagccatgtcagaaatgctgaggcacccaaggatttcaggtaaacctatcttagttctggccaacaagcaggataaagagggagccctcggagaggcggacgtcatcgaatgtctgtcacttgagaagctagtgaatgagcacaagtgtctctgccagattgaaccttgtagcgctatttctggctatggaaagaaaatcgacaaaagcatcaagaaagggctctactggctgctgcacgtgatcgcccgtgattttgacgccctaaacgaacgaatacagaaagagacgaccgagcagcgagcattggaggaacaggagaagcaggagagagccgagagagtgcgtaagctcagagaagaacgaaagcagaacgaacaagaacaggcagagctcgacgggacctccgggttggccgagctggaccctgagcctaccaacccatttcagccaatcgcatcagtgatcatcgagaatgagggaaagcttgagcgggaaaaaaagaatcagaagatggaaaaagatagtgacggctgccatcttaaacataaaatggagcatgaacagatagagacacagggacaggtgaatcataacggccagaagaacaatgagtttgggcttgttgaaaactataaggaagccctcacccagcagttgaagaatgaggacgagacagaccgtccgtctctagagtctgccaacggcaaaaagaaaactaaaaagttgcgaatgaaaagaaaccatagggtggaaccactcaatattgacgactgcgccccagagagccctacccctcccccccctccccctccagtggggtggggaacaccaaaagtaacgaggcttcctaagcttgagcccctaggcgagacacatcataatgacttttacagaaagccgctgcccccgctggccgtgccccagcgcccaaacagcgatgctcacgatgtaatcagttag

SEQ ID NO: 107591 - DNA, 978 bp, synthetic construct
  misc_feature 1..978: note = Description of Artificial Sequence: Synthetic coding sequence
  source 1..978: mol_type = other DNA
atggaagagaccaaggaggcgatgtccgaaatgctcagacacccacgcattagcggaaagcctattctcgttctcgccaataaacaagataaggagggagcgctcggtgaagctgatgttattgaatgtctgagccttgaaaaactggtgaatgagcacaagtgcctgtgccagattgaaccctgctccgccatttctgggtacgggaagaaaattgacaagtcaatcaaaaagggactgtactggctgttgcatgttatcgcccgggatttcgacgcactgaatgaacggattcaaaaagagacaacagaacagagggctctggaggagcaggaaaaacaagaacgcgccgagagggtaagaaaacttcgggaggaacgcaaacagaatgagcaggaacaggcagagctggatggtacaagtggcctggctgagttagacccggagccaaccaaccccttccagcccatcgcatctgtgatcattgagaatgagggtaaattggagagggaaaagaagaaccagaaaatggaaaaggattcagacggctgtcacctgaagcacaagatggaacacgagcaaattgagacccagggacaagtgaatcacaatggccagaaaaacaacgagtttggtctagtcgagaactacaaagaagcattgacgcagcagctgaagaacgaggatgagacagacagaccgtcgctggagtctgccaacgggaagaaaaagaccaagaagctgcgcatgaagcgtaaccacagggtagaaccgcttaatatcgatgactgtgccccagagagcccaacgcctccaccccctcctccccctgtcggatgggggacccccaaagtcacccgcctgcccaaactcgagcccctgggtgagactcaccacaatgatttttataggaagccactgccccccctggccgtgcctcagcggcccaactcagacgcccatgatgttatctcatag

SEQ ID NO: 107592 - DNA, 450 bp, synthetic construct
  misc_feature 1..450: note = Description of Artificial Sequence: Synthetic coding sequence
  source 1..450: mol_type = other DNA
atggagaaagattctgatggttgtcacttgaagcataagatggagcacgagcagattgagacgcaagggcaagtcaaccacaacggccaaaagaacaacgagttcggtctggtcgagaactacaaggaagctctgacacagcagttgaagaatgaagacgaaaccgacaggccctcccttgagagcgcaaatggtaagaaaaaaactaaaaaattgcggatgaagagaaaccacagagtcgagcccctcaatattgatgactgcgcacccgagagtcctacacccccccctccacctccaccagtgggatgggggacgccaaaagtgacaaggttgcctaagctagagccacttggtgaaacacatcacaatgacttctacaggaagccactgccacctttggcagtgccccaacggcctaatagtgatgcacatgacgtgatctcttag

SEQ ID NO: 107593 - DNA, 579 bp, synthetic construct
  misc_feature 1..579: note = Description of Artificial Sequence: Synthetic coding sequence
  source 1..579: mol_type = other DNA
atgggcagcctgggttccaagaacccacagacaaagcaagcccaggtcctgctgctgggactggacagcgccggcaaaagcacgctgctgtataagttaaaactggcaaaagacatcacaaccattccaacaataggttttaacgtggagatgatagaattggaacgaaatctctcactgactgtttgggatgtcggcggtcaggagaagatgaggactgtgtggggatgctactgtgaaaatactgacgggctggtgtatgtggttgattccaccgataaacagaggctggaagaatcccagaggcaatttgaacatattcttaaaaatgagcatattaaaaatgtgccagtggtgctactcgccaataagcaggatatgccgggcgccctgacggcagaagacatcaccaggatgttcaaggtcaagaagttatgcagcgataggaactggtacgttcagccatgttgcgcccttaccggtgaaggactcgcacaaggatttcggaaactaaccggtttcgtcaagagccatatgaagagtaggggtgatactctcgccttctttaagcagaactag

SEQ ID NO: 107594 - DNA, 555 bp, synthetic construct
  misc_feature 1..555: note = Description of Artificial Sequence: Synthetic coding sequence
  source 1..555: mol_type = other DNA
atgggcctgctcaccatccttaaaaagatgaaacagaaggagcgggagctacggctgctaatgttggggctcgacaatgctggcaagacgaccattcttaagaagttcaatggagaagatatagacacaatttcaccgactctgggcttcaacatcaaaactctcgaacaccgcggctttaagctcaatatctgggatgtgggaggacaaaaatccttgcgttcctactggcgcaactactttgaaagtacggacggtttaatttgggtggtagactccgccgacagacagagaatgcaagattgccagagggagctccagtctttattggttgaggagcgcctcgctggtgccaccttgctgatcttcgcaaataagcaggacctgcccggcgccctgagttcaaacgccatcagagaggtcctcgaactcgactctatccgatcacatcactggtgtatccaggggtgttcggccgtgaccggagaaaatctgctcccaggaatagattggctgttggatgacatctccagccgaatttttacggcagattag

SEQ ID NO: 107595 - DNA, 555 bp, synthetic construct
  misc_feature 1..555: note = Description of Artificial Sequence: Synthetic coding sequence
  source 1..555: mol_type = other DNA
atgggcttacttactattctcaagaagatgaagcagaaagagcgtgagctgcggttgctgatgttgggcctcgacaacgcggggaagactacaattctgaagaagtttaacggagaggatatcgacaccatctcccccacactgggctttaacattaagactctcgagcaccgtgggttcaaactcaacatctgggacgtggggggtcagaaatcgcttcgctcatactggcgcaattacttcgaaagtactgacggattgatttgggtcgtggactctgctgatcggcagcggatgcaggattgtcagcgggaactgcagtctctgctcgtggaagagaggctggccggcgccactttattgatcttcgccaataaacaggatctccctggcgcactgtccagcaacgctatccgagaagtactcgagctggactctatccgaagtcaccactggtgcatacaggggtgctcagccgtgacaggagaaaacctgctcccaggtatcgattggctgctggatgacatatcctcccggattttcacagccgattag

SEQ ID NO: 107596 - DNA, 474 bp, synthetic construct
  misc_feature 1..474: note = Description of Artificial Sequence: Synthetic coding sequence
  source 1..474: mol_type = other DNA
atggggctgctgacaattcttaaaaaaatgaagcaaaaagaacgggagctcaggctgctgatgcttggattagataacgcagggaaaacaaccattttgaagaaatttaatggagaagatatcgatacaattagcccaaccctgggtttcaatattaagaccctggagcaccggggcttcaagctcaatatctgggacgtgggcggacagaaatcactcagaagctactggaggaattacttcgagtctaccgacggcctgatatgggtcgtcgattcagctgaccgacaacgaatgcaggattgccaacgggagttgcaaagcctgctggtggaagaggtgcttgaactcgactcaatccggagccaccattggtgcatccagggatgctctgcagtgactggcgaaaatctgctccctggcatcgactggctcctggatgacatctcttcgagaatcttcacagctgattag

SEQ ID NO: 107597 - DNA, 549 bp, synthetic construct
  misc_feature 1..549: note = Description of Artificial Sequence: Synthetic coding sequence
  source 1..549: mol_type = other DNA
atgggcttgctcagcattctgcgcaagctgaagagcgctcctgaccaggaagttaggatcctactccttggactggataacgcaggcaagactacacttctcaaacagttggctagtgaagacatcagccacattactccaacacagggttttaacattaagtccgttcagtcccagggatttaagctgaacgtttgggatatcggtggtcagaggaaaatccggccttactggaaaaactacttcgaaaacaccgatattttaatttacgtgatcgacagcgctgatcgaaaaaggtttgaggaaacaggccaggaactggcagagctgttggaggaggagaaactttcgtgtgtgcccgtcctcattttcgcaaataagcaagacctgttaactgcagctcccgcctccgagatcgcagagggactgaatctacacactatccgggatagagtttggcagattcagtcctgctccgccctcactggcgagggtgtgcaagatggtatgaactgggtttgcaagaacgttaacgcgaagaagaaatag

SEQ ID NO: 107598 - DNA, 606 bp, synthetic construct
  misc_feature 1..606: note = Description of Artificial Sequence: Synthetic coding sequence
  source 1..606: mol_type = other DNA
atggggaaccatctgactgagatggctcccacagcaagctcatttctccctcacttccaggctcttcacgtggtggtcattggattggactcggccggcaagacctccctgctatataggctcaagtttaaagaattcgtgcaaagtgtgccaaccaaaggcttcaataccgagaagattagggtgcctctgggtggctctcgcgggataacttttcaagtgtgggacgtgggcggacaggagaaactgcggccgctgtggaggtcgtacactcgcaggaccgacggccttgtgttcgtcgtggatgcagcagaagctgaaaggctggaagaagccaaggtggaactgcaccgcattagccgggcaagcgataatcagggggttccagtgctggtgcttgcgaacaagcaggaccagccaggggccctgagcgctgccgaggtcgaaaagcggttagccgtacgtgagctcgcagctgccaccctgacacatgtacagggatgttccgccgtggatggcctcggcttacagcaaggtctcgagaggctatatgaaatgattcttaagaggaagaaagccgccaggggcggcaagaaaagacgctag

SEQ ID NO: 107599 - DNA, 561 bp, synthetic construct
  misc_feature 1..561: note = Description of Artificial Sequence: Synthetic coding sequence
  source 1..561: mol_type = other DNA
atgggcctactggaccggctctcagtgctgcttgggctgaaaaagaaggaggtgcacgtgctctgtctgggactggataatagcggaaaaaccaccatcatcaacaagttgaagccatcaaacgctcagagtcagaacatccttcctaccataggattcagtattgaaaaatttaaatctagcagcttaagttttaccgtgttcgatatgagcggccagggcaggtatcggaacctgtgggagcattactataaagagggccaggccatcatcttcgtcatcgatagctcagaccgtttgcgaatggtggttgccaaggaagagctggacaccctgctcaaccatcccgatatcaagcatagacgcattccgattctcttcttcgccaacaagatggacctgagagacgctgtgaccagcgtgaaagtctcccagctcctgtgcctagaaaatattaaagacaagccgtggcacatttgcgcctccgacgccatcaaaggtgagggcctgcaagagggggtggactggctgcaagaccaaattcagactgttaagacttag

SEQ ID NO: 107600 - DNA, 561 bp, synthetic construct
  misc_feature 1..561: note = Description of Artificial Sequence: Synthetic coding sequence
  source 1..561: mol_type = other DNA
atgggcctgcttgataggctgagcgtactcctgggactgaagaagaaagaagtgcacgtcttgtgtttggggctggataactcgggcaaaacaacaatcatcaacaaactcaagccttccaatgctcagtcgcagaacatcttacccaccataggcttttcaattgagaagttcaaaagcagctccctttccttcaccgtattcgacatgtctggtcaaggtcggtacagaaacctgtgggagcactactataaagaaggccaagccatcatcttcgtcatcgattctagcgacagactccggatggttgtagctaaggaagaactggatacactgctaaatcacccagatatcaagcaccgccggattcctatcctctttttcgcaaataagatggatctgagggacgctgtcacaagtgtaaaagtaagtcaactgctgtgcttggagaacatcaaggacaagccctggcatatttgcgcgtccgatgctatcaaaggcgagggcttacaggaaggggtggattggctccaagatcaaattcaaactgttaagacatag

SEQ ID NO: 107601 - DNA, 366 bp, synthetic construct
  misc_feature 1..366: note = Description of Artificial Sequence: Synthetic coding sequence
  source 1..366: mol_type = other DNA
atgggcttgcttgatagactatccgtattgctggggctgaagaaaaaagaggtgcatgttctctgcctggggctcgacaactcaggtaagaccactattattaataaactcaaacctagcaatgcgcagtcacagaatattttgccaaccattggattttctattgaaaagtttaagtcgtcttcactcagctttactgtcttcgatatgtccggccaaggtcgttatcggaatttgtgggagcattattataaagaaggacaagcaatcattttcgtgatcgattcatctgacaggctgagaatggtggttgcaaaggaggagctggataccttacttaaccaccctgatatcaaacacaggtag

SEQ ID NO: 107602 - DNA, 561 bp, synthetic construct
  misc_feature 1..561: note = Description of Artificial Sequence: Synthetic coding sequence
  source 1..561: mol_type = other DNA
atgggcctcttagacaggctgagcgtacttttgggactcaaaaaaaaggaggtccacgtgttgtgcctgggtctggacaatagcggcaagaccaccattattaataagctgaagccttcaaacgcccagtcccagaacatcctccccactatcggcttcagcatcgagaaatttaagagtagctccctgagtttcacagtgttcgatatgagtggccaggggcgatatagaaacctttgggagcactattacaaggaggggcaggcaattatctttgtgattgactcctcggataggctccggatggtggtcgccaaagaggagcttgacacactcctcaatcacccggacatcaaacaccgacggattcctattctgttcttcgccaataaaatggacctgcgcgatgcagtgacttcagttaaagtgtctcagctgctgtgtcttgagaacattaaagataagccttggcacatctgcgctagcgacgcaatcaaaggcgagggtctgcaggaaggcgtcgactggctccaggatcagatacagacggtgaagacctag

SEQ ID NO: 107603 - DNA, 561 bp, synthetic construct
  misc_feature 1..561: note = Description of Artificial Sequence: Synthetic coding sequence
  source 1..561: mol_type = other DNA
atgggacttctggacaggctgtctgtgttgctgggccttaaaaagaaggaggtacatgtcctgtgtcttggcctggataattcaggtaaaactaccataattaacaaactgaaaccatctaatgctcaatcgcaaaatatccttcctactatcggctttagcattgagaaattcaaatccagcagcttgagttttactgtatttgacatgtctggacaggggcgatacaggaacctctgggaacactattacaaagagggacaggcaatcatttttgtcatcgattctagcgatcggctcaggatggtcgtggcgaaagaggaattggatacccttctcaaccacccggacattaagcaccgccggataccaattctattcttcgctaacaaaatggatctcagggatgctgtaacaagcgtcaaggtgtcccaactgctgtgccttgaaaatatcaaagacaaaccctggcacatctgtgccagcgacgcgataaaaggagagggactccaagagggggtggattggctgcaggaccagatccagacagtgaagacctag

SEQ ID NO: 107604 - DNA, 564 bp, synthetic construct
  misc_feature 1..564: note = Description of Artificial Sequence: Synthetic coding sequence
  source 1..564: mol_type = other DNA
ctcagacctacatggaaggctctgtcgcatcccgcttggccggaagagaagaataagcagatcctcgttttgggcttagacggggcaggaaagacctccgtgttgcattcactcgccagtaatcgagtacagcattccgtcgcccctacccagggattccacgctgtgtgtatcaatacggaggacagccagatggaatttctggagattgggggcagcaagccttttcggagctactgggaaatgtatctcagcaaaggccttctgctaatctttgtggtggacagcgctgatcacagtaggttgcctgaggcgaaaaagtaccttcaccagctgattgcagcaaatccagtattgcctctggtggtcttcgcgaacaagcaagatcttgaagcagcctaccacatcacagatatccatgaagctcttgcactttcagaagttggaaacgatcgtaagatgtttctctttggaacttatctgactaaaaacggatctgaaatcccaagtactatgcaggacgcaaaagacttgatagcccagctcgcggccgacgttcagtag

SEQ ID NO: 107605 - DNA, 1083 bp, synthetic construct
  misc_feature 1..1083: note = Description of Artificial Sequence: Synthetic coding sequence
  source 1..1083: mol_type = other DNA
atggaaagagctggccccgcaggtgaagaaggtggagctcgggagggccgcctgctcccaagggcccccggagcctgggtgctacgtgcttgcgctgagcgggccgcccttgaggtgggagccgcatccgccgacacaggggtacgcggctgtggagcccgcggcccagcccccttgctggctagcgcggggggtggtcgagcacgcgatgggacctggggcgtaagaactaaggggtccggcgcagcccttcctagcaggccagcctcgcgcgcagcaccaagacccgaagcctcttctcctccattaccactggagaaggcaaggggcggtttatccggaccacaaggaggacgcgcgcggggtgctatggcgcacgttggctccaggaagcgatctcgctccagatctcgaagtcgaggccggggttcagagaaaagaaagaagaagtcccgaaaggatacgtcaagaaattgcagcgcctctacatctcagggacgcaaagcctctactgctcctggggccgaagcgtcaccgtctccctgtattacagagagatccaaacagaaggcccgcagaagaacacggtcgtcctcttcaagctcaagttcaagcagtagctcttctagttcaagcagcagctctagcagttcaagttcatctgacggccgaaagaagagaggcaagtacaaggacaagaggaggaagaaaaagaaaaagaggaagaagctgaagaagaaggggaaagagaaggctgaagctcagcaggtggaggctctacctggtcccagtcttgaccagtggcacagatcggcaggagaagaggaggatggaccagtcttgaccgacgagcaaaagtcccggatccaggctatgaagcccatgactaaggaagagtgggatgccagacagtcgataatcagaaaagtcgtggatccagaaaccgggcgtactcgattgatcaagggcgacggtgaggtgctcgaggaaatcgtgaccaaggagcgccatcgggaaattaacaagcaggccaccagaggcgattgtctcgcgtttcagatgagggccgggctgctcccgtag

SEQ ID NO: 107606 - DNA, 1017 bp, synthetic construct
  misc_feature 1..1017: note = Description of Artificial Sequence: Synthetic coding sequence
  source 1..1017: mol_type = other DNA
atggagcgggctggaccagctggggaggaggggggcgccagagagggccgcctgctcccacgcgcgcccggggcttgggtactacgcgcctgtgccgagagagcggcactagaggttggggcggcgagtgccgacactggggtgcgtgggtgcggtgctaggggccctgctcctttactcgcgtcagcaggtggaggtcgagcgagggacggcacttggggggttcggaccaaaggcagcggagccgccttgccctccaggccagcctccagagcagctccccgacctgaagcttcatcaccccccttacctctcgagaaggcaaggggtggcctgtcggggcctcaagggggtcgggctagaggcgccatggcccacgtcggatcaaggaagcggagcagatcacgaagcaggtcccgcggcaggggatctgaaaagagaaagaagaaaagcaggaaggacacttcacggaactgtagtgcaagcacttctcaggaaaggtccaagcaaaaggccaggcgtcgaacacgctccagctcctcttcaagttcgtcatcctcatctagctcatcctcatcaagtagcagctcttcgagcagttccagcgacgggcgcaaaaagcgcggtaagtataaagacaaaagacgcaaaaaaaaaaagaagcgcaagaagctcaaaaaaaagggcaaggaaaaagcagaggcacagcaggttgaagccctgccaggtcctagcttggatcagtggcatcgaagcgcgggagaagaagaggacggacccgtactgactgatgaacagaaaagccggattcaggcaatgaagccaatgacaaaggaagagtgggacgctcgccagagcatcatccgcaaagttgtggatccagagacgggccggaccagattgataaagggagatggcgaggttcttgaagagattgtaaccaaagagcggcatcgggagatcaataaggtgggagtggcaccactacctgccatcaggccccagttatgtctctag

SEQ ID NO: 107607 - DNA, 1059 bp, synthetic construct
  misc_feature 1..1059: note = Description of Artificial Sequence: Synthetic coding sequence
  source 1..1059: mol_type = other DNA
atggagcgcgcaggtccagctggcgaggagggtggcgcgagagaaggccggctgcttccacgcgccccaggggcctgggtactgagagcatgcgctgaaagggccgcactggaggtgggcgccgcctcagctgatacgggggtaagaggctgtggggctagaggcccagcaccattgctggcatctgccggtggggggagagcaagagatggcacatggggggtccggactaagggatcaggtgccgcactgccttcccggcccgcttcccgggccgcgccccgtcccgaagcctcctcacctccactgcctctggagaaagcccgcggaggactctcgggccctcagggcggaagagcgaggggcgctatggcacacgtagggagtagaaaacgctcccgctcacgctcccgctccaggggaaggggttcagaaaaaaggaaaaaaaagtcccgtaaggacacctctcgcaactgctccgcttcaacatcacagggaagaaaggctagtactgctccgggcgccgaggaaaggtccaagcagaaggcacggaggagaacacggagttcgtcctcaagctcatcttcgtcttcctcgtcatcctcaagttcaagctcatccagctcctccagttcttctgacggacggaaaaaacggggaaagtacaaggataagaggcggaaaaaaaagaaaaaaaggaaaaagttgaaaaaaaaaggaaaagagaaggctgaagcgcagcaagtagaggcactgcccggccctagcctggatcagtggcatcgcagtgcaggagaagaagaggatggccccgtgctgactgatgagcagaaaagtcgcatccaggcaatgaagcccatgacgaaggaggagtgggacgcaagacagagcatcattcgcaaagtcgtggatcccgagaccggacgaacacgcttgattaagggggacggcgaggtccttgaagaaatcgtgactaaagagaggcatagggagatcaacaaacaggcaactcgcggcgactgtctcgctttccagatgcgcgctggcttacttccatag

SEQ ID NO: 107608 - DNA, 1026 bp, synthetic construct
  misc_feature 1..1026: note = Description of Artificial Sequence: Synthetic coding sequence
  source 1..1026: mol_type = other DNA
atggaaagggcagggcctgctggggaagaaggaggcgcaagagaaggtcgcctgctcccacgtgccccaggagcgtgggtactccgagcatgcgccgaacgggccgctcttgaggtgggcgccgcctcggccgatacgggagtgcgtgggtgcggtgcccgcgggcctgctcccttgttggcctccgctgggggaggaagagctagagatggcacgtggggggtcagaactaagggctccggagctgccctgccgagccgcccggcctcgcgagctgcaccccgacctgaagcctccagtccacccctgccactggagaaggcgaggggcggcttaagcgggcctcagggggggcgcgccagaggagccatggcccacgttggtagtcgcaagcggagtcgctcccgatcgcgctccagggggcgtggtagcgagaaacgtaagaaaaaaagcaggaaggatacttcgaggaactgttctgctagcacctcccaggagcgtagcaaacagaaggcccgaagacggactcgctccagcagctcttccagctcatcatcttctagtagctcatcctcctcttccagcagcagtagcagcagctccagcgatggaagaaagaaacggggaaagtataaggacaagagacgcaaaaagaaaaagaagcgcaagaagttaaaaaaaaagggcaaggagaaggctgaggcccagcaggttgaggccctgcccggacccagcctcgatcaatggcatagaagtgcaggggaggaggaagatggacctgttcttactgatgagcagaagtctcgtattcaggcgatgaagccaatgactaaggaggaatgggacgccagacagagtattatcaggaaagtagtggaccccgagactggtcgaaccagactgattaaaggagacggcgaggtgctggaggagatcgtaaccaaggagcgacaccgtgagatcaacaagcaggccacaagaggcgactgtctggcgttccagatgagagccgggctgttgccctag

SEQ ID NO: 107609 - DNA, 567 bp, synthetic construct
  misc_feature 1..567: note = Description of Artificial Sequence: Synthetic coding sequence
  source 1..567: mol_type = other DNA
atggacgttaatatagctcccctgcgcgcctgggacgactttttcccaggcagtgataggttcgcacgccctgacttccgggacataagcaagtggaacaatagggtggtaagcaacctgttgtactatcaaacaaactatctagttgtcgccgcaatgatgatttccatcgtggggtttctatccccatttaatatgatcttaggcgggattgtggttgtcctcgtgttcaccgggttcgtgtgggccgcgcacaacaaggacgtactccgacgcatgaagaagcgctatccaaccaccttcgtgatggtcgttatgctggctagctactttctgattagcatgtttggcggcgtgatggtgttcgtgtttgggatcacttttcctctcctgctgatgttcatccatgctagcctccgcttgaggaacctgaaaaataaactggaaaataagatggaggggattggcttgaagcgaacaccaatggggattgttctcgatgcactggaacagcaggaggaagggattaaccgtctgacagattacatctccaaagtaaaagaatag

SEQ ID NO: 107610 - DNA, 411 bp, synthetic construct
  misc_feature 1..411: note = Description of Artificial Sequence: Synthetic coding sequence
  source 1..411: mol_type = other DNA
atggacgtaaatattgctccgctgagggcttgggatgatttcttccccggcagcgaccgtttcgccagaccagacttcagggacatcagtaagtggaacaaccgggttgtctcaaacctcttatactatcagacgaattatctggttgtggccgccatgatgatatctattgtggggttcctcagtccatttaacatgatcctcggggggatagtggtggtgctcgtctttactggatttgtgtgggccgcacacgacgtgcgctatggcgggcacgtgggcgagctgtttccctatttgcacgtgtggagaagccacgggctgtgcgtctggcattacttcagttttgccgtggacgtgtacccatgcatcgtcgagacctcggaaccccaggaacagactggggaatag

SEQ ID NO: 107611 - DNA, 819 bp, synthetic construct
  misc_feature 1..819: note = Description of Artificial Sequence: Synthetic coding sequence
  source 1..819: mol_type = other DNA
atggtgcgatgttacgtggaaattgttgaaaagctccctgagcggcgccccgatccagcaacaatcgaaggatgcgcccagttgaagcccaacaactacttactggcctggcatacgcctttcaacgaaaaagggagcggcttcggtgctgctactaaagccatgtgtatcggactgaggtattggaagcccgagagattagagaccctgattgaagtttcggtggagtgcgggagaatgacccacaaccacccgactggctttttggggtccctgtgtaccgccctatttgtgagttttgctgcacaggggaagccgcttgtccagtgggggcgcgacatgctgcgggctgtgccgctggccgaagagtattgtcgcaagactattaggcacactgccgagtatcaagagcattggttttacttcgaagccaaatggcagttttaccttgaagagcgcaagatcagtaaggactcagagaacaaggcaatcttccctgataattacgacgctgaagaacgggagaaaacctaccggaagtggtctagtgagggaagaggggggcgcagagggcacgacgccccaatgatcgcatacgacgcactgctggctgccggcaattcttggaccgaactctgtcaccgcgcgatgtttcacgggggagagtcagcagcaaccggcacaattgccggctgtttgtttggacttctttatggactggatcttgtgccgaaagggctgtaccaagatctggaggataaggagaagctggaagaccttggggcggctctatatcggctcagcaccgaggagaaatag

SEQ ID NO: 107612 - DNA, 1065 bp, synthetic construct
  misc_feature 1..1065: note = Description of Artificial Sequence: Synthetic coding sequence
  source 1..1065: mol_type = other DNA
atggagaagtttaaggcggcaatgctgctggggagcgtgggcgacgccctgggctatcgcaacgtgtgtaaggagaattctaccgtcggcatgaaaattcaggaggagcttcagcggtctggagggctggaccatttagtgctctcgcctggggaatggccagttagcgataacaccattatgcacattgccaccgccgaggcgctcacaaccgactattggtgcctagatgacctgtatcgcgagatggtgcgctgctacgttgaaatcgtggagaagctccctgaaagaaggcccgaccccgccactatcgagggctgtgcccaactcaaacctaacaactatttgttagcttggcatacaccctttaacgaaaaaggcagcggattcggcgctgccaccaaagcaatgtgcatagggctgaggtattggaagcccgagaggctggaaaccctaatagaggtttcagtggagtgcggcaggatgacacacaatcaccccaccggatttttaggcagcctatgtacggctcttttcgtatccttcgctgctcagggaaaaccattggtccaatggggcagggatatgttacgggccgtccccttggcagaggaatactgcagaaagaccatccggcacacagccgagtaccaggagcattggttttacttcgaagcaaagtggcagttctacctggaggaaagaaaaatctcaaaggacagcgagaataaagccatattcccagacaattacgacgccgaggagcgcgaaaaaacatacagaaaatggtctagcgaaggtcgggggggtcggcgcggtcacgatgcccctatgatcgcttacgacgccctgttggctgccgggaactcctggacggagctctgtcatcgggccatgttccatgggggcgaaagcgcagcaactggaaccattgctggatgccttttcggcctgttatatgggttggatcttgtgccaaaaggcctgtatcaggatctcgaggacaaagagaagctggaggacttaggtgcggcactctaccggctctccactgaagagaagtag

SEQ ID NO: 107613 - DNA, 531 bp, synthetic construct
  misc_feature 1..531: note = Description of Artificial Sequence: Synthetic coding sequence
  source 1..531: mol_type = other DNA
atggtgaggtgttacgtcgagatcgtggagaaactccccgaacgccggccagacccagctaccatcgagggatgcgcccagttaaaaccaaataactatctcctggcctggcatacacccttcaacgagaagggtagcgggtttggtgccgccaccaaggctatgtgtatcggcctaagatattggaaacctgagcggttggaaaccttaatagaagtgtctgtcgagtgcgggaggatgacgcacaaccaccccacaggtttcttgggcagcctttgtaccgccctctttgtttccttcgccgcacagggtaagcctctggttcaatgggggcgggatatgctcagagccgttcccctcgccgaagaatattgccgcaagaccatccggcacaccgcagaataccaggagcactggttctacttcgaggcgaaatggcagttttaccttgaagaaagaaagatttccaaagatagcgagaataaggcaatttttcctgacaattacgacgcggaggagagggaaaaatag

SEQ ID NO: 107614 - DNA, 1092 bp, synthetic construct
  misc_feature 1..1092: note = Description of Artificial Sequence: Synthetic coding sequence
  source 1..1092: mol_type = other DNA
atggcagcggcagcgatggctgccgccgcagggggaggagcaggcgcagcaaggtctctttctcggtttcgtgggtgtctggcaggtgcactgcttggggattgcgtggggagtttttacgaggctcatgatactgtggatcttacttccgtgctgagacacgtgcagtcactggagcctgaccctggaactccagggtcagaacggactgaggctctttattatactgatgataccgctatggccagagcccttgtgcagtctttactggccaaagaggccttcgacgaggtagacatggctcatcgcttcgcccaggagtataaaaaggatcccgatcggggttacggagccggcgtggtcaccgtgtttaagaaactgctcaatcccaaatgcagggacgttttcgagcccgcgcgggcccagttcaatgggaaggggagttatgggaacggcggcgcaatgcgggtggcaggaatatcattagcatactcttccgtacaggacgtccagaagtttgctcgtctgtcagcacagttgactcacgcaagttcactggggtacaacggggccatcctgcaagccctcgctgtgcatctggctttgcagggggaatcctcatctgaacatttcctcaagcagctgcttggccacatggaggacctagagggggacgcgcagagcgtcctcgacgcccgggagctcggtatggaagagagaccctactcctcgcgcttaaagaaaattggagagcttctggatcaagcctcagtgactagggaagaggtagtttctgagctgggaaacggaattgccgcatttgagagtgtccccaccgcaatttactgttttttacgctgtatggaacccgaccccgagattccgagcgccttcaacagtctacagagaacattaatctactcaatctctttggggggcgatacagacacgattgccacgatggcaggtgccattgcaggcgcttattacggaatggatcaggtgcccgaatcatggcagcaatcttgcgaagggtatgaagaaaccgatatattggctcagtcccttcatagggtcttccagaaatcctag

SEQ ID NO: 107615 - DNA, 852 bp, synthetic construct
  misc_feature 1..852: note = Description of Artificial Sequence: Synthetic coding sequence
  source 1..852: mol_type = other DNA
atggctagggcgctcgtgcagagtttacttgccaaggaagcatttgacgaggtggacatggcgcacagattcgcccaggaatacaaaaaagatccagacagaggctatggggccggagtggtcaccgttttcaagaaactgttgaacccaaagtgtagagacgtgtttgaaccggctcgcgcccagttcaacggaaaagggtcttatggtaacgggggtgctatgcgcgtggcaggcatcagtctagcatattcaagtgtccaggacgtgcagaagtttgcgcggctttcggcacagctgacccatgcctcgtctctcggttacaacggggcaatactgcaggctctcgccgtgcacctggctctgcagggcgagtcatcaagcgaacatttccttaagcaactgttgggacacatggaggatcttgaaggcgatgctcagtctgtgttagacgccagggagttaggaatggaggagcgaccatatagctctcggctaaaaaagatcggcgaactgctagatcaggcctctgtgacacgagaagaggttgtgtccgagttagggaacggtatagccgcattcgagtctgtccctacggccatctactgcttcctgcgctgtatggagccggatcctgaaataccttcagctttcaactcactccaaaggaccctcatttattcaatctccctcggaggcgacaccgataccattgcaacgatggccggcgccatcgctggtgcatactatggtatggatcaggtacctgagagttggcagcagtcttgtgagggctacgaagagaccgacatactcgcccagagtcttcatcgcgttttccagaagtcttag

SEQ ID NO: 107616 - DNA, 630 bp, synthetic construct
  misc_feature 1..630: note = Description of Artificial Sequence: Synthetic coding sequence
  source 1..630: mol_type = other DNA
atgagggttgccggtatatcgcttgcgtactctagtgtgcaagatgtgcagaagttcgcacgacttagtgcccagctaacccacgcctctagcctcggttataatggagcgattttgcaggcattggcagtccatctcgcccttcagggagaaagctcttcagagcacttccttaaacaactgctgggccatatggaggaccttgagggcgacgcacaatcagtgttggatgcccgcgagctgggcatggaggaacgaccctatagtagtcggctgaaaaagattggagagttgttagaccaggcgtctgttacaagggaggaagtagtcagcgagctggggaacggcatcgctgcctttgagagcgtacctaccgccatttattgttttcttaggtgcatggaacccgatcccgagattccctcagcctttaattccttacagaggactctgatttattccatctctctaggaggggacacggacacaatagccaccatggctggagccattgccggcgcctattatgggatggatcaggtccctgaatcatggcaacagtcctgcgagggctatgaagagaccgacattcttgctcagtcacttcaccgcgtctttcagaagagctag

SEQ ID NO: 107617 - DNA, 984 bp, synthetic construct
  misc_feature 1..984: note = Description of Artificial Sequence: Synthetic coding sequence
  source 1..984: mol_type = other DNA
atgcagatgcccgccatgatgagcttactgttagtgtctgttggtttaatggaggcactgcaggcccagagtcaccctatcacccgcagggatctcttctcccaggagatccagctggacatggccttagcctcatttgatgatcaatatgccgggtgcgctgccgccatgactgccgcattgcccgacttaaatcataccgagttccaggccaatcaagtttacgcggacagttggaccctcgcttctagtcagtggcaggaacgacaggctaggtggccggagtggagtctgagccctaccagaccctctccccccccgttgggctttcgggatgagcatggcgtcgcattgctagcttacacagcaaactcccctctgcataaggagtttaatgcagcggtgagagaggccggcaggtccagggcacattatttgcaccatttttcctttaagacactgcacttcctgttgacagaagctctgcaactgctcggatcaggccagcgcccgcctcggtgccaccaggtcttcagaggcgttcatggactcagattccgacctgcgggcccacgagcaacagtgaggttgggggggttcgcatcagcttcgctgaagcacgtggctgcccaacagttcggggaagatacattctttggcatttggacatgtctgggagcaccgattaagggatactcattttttcccggggaagaggaggtcctcattccaccctttgagacctttcaggtgattaacgccagccggctggcgcaggggcctgcccgcatttacctacgggcccttggcaagcacagcacttacaactgtgagtacattaaagacaagaagtgtaagtcagggccctgccacttggacaactctgctatgggccagtcacctctctcagcagtctggtcactcctgttactgctgtggtttctcgtggtgcgcgcgtttcccgatggacccgggcttttatag

SEQ ID NO: 107618 - DNA, 1104 bp, synthetic construct
  misc_feature 1..1104: note = Description of Artificial Sequence: Synthetic coding sequence
  source 1..1104: mol_type = other DNA
atgaagacgggccatttcgaaattgtgacaatgcttcttgccaccatgatcctggtcgacatatttcaggtgaaggccgaagtgttggacatggccgacaacgcattcgacgatgaatacctgaagtgcactgatagaatggagattaaatatgtcccccagttgctgaaggaggagaaggctagccatcagcagctcgatactgtatgggagaacgctaaggccaagtgggcagcaagaaagactcagatcttcctccctatgaattttaaagacaaccacgggattgctcttatggcttacatcagcgaagcccaggaacagacgcctttctatcacctattcagcgaggctgtgaagatggccggccagtcacgggaagattacatatatggttttcagtttaaggctttccatttctacttgacccgagctctgcagctgttgcgaaagccctgtgaggcctctagtaagaccgtggtatatcgaaccagtcagggaacttcattcacgtttggaggcctcaaccaggccaggtttggacactttaccttagcatacagtgccaagccacaggctgccaacgaccaacttaccgtgctgagtatttatacgtgcttaggagtcgacatcgaaaacttcctagataaggagtccgaacgtattacactcattcccctgaacgaggtcttccaagtctcccaagagggtgccggcaacaatttgattctgcagtccattaataagacatgcagtcactatgaatgtgcattcttaggcgggctgaagaccgagaactgtattgagaacctggaatacttccagcctatatacgtgtacaatcctggagagaaaaaccaaaaactcgaggatcacagcgagaaaaattggaaactcgaggatcatggagaaaaaaatcagaaactagaggaccacggagtgaaaatcctggaaccaacgcagatacctgccccagggccagtcccagtccctggtccaaagtcccacccgtctgcctcctccggcaagctcctgttaccacagttcggaatggtgattatcctgatttccgtgtccgctattaacctgtttgtcgcactttag

SEQ ID NO: 107619 - DNA, 1137 bp, synthetic construct
  misc_feature 1..1137: note = Description of Artificial Sequence: Synthetic coding sequence
  source 1..1137: mol_type = other DNA
atgaaaaccggccactttgagatcgtaactatgctgctggcaactatgatcctcgtcgacatcttccaggtgaaggcggaggtgcttgatatggccgataatgccttcgacgacgaatatctcaagtgcaccgaccggatggagataaaatatgttccacagttactcaaggaagaaaaggcctcccatcaacaactggatactgtttgggagaatgccaaggctaagtgggccgcccggaagacccagatcttcctgcctatgaatttcaaagacaatcatggtatcgccctcatggcctacattagtgaggcccaggagcaaaccccattctatcacttattttccgaggctgtgaagatggcaggtcagtcgagagaggactacatctacgggttccaattcaaggcctttcatttctatctgactcgcgctctgcagctattgaggaaaccctgtgaagcttcctcaaagaccgtggtttaccggacatcacagggcactagctttacttttggagggctgaatcaagctcgtttcggacattttactctggcctattcagctaagccgcaggcagccaatgatcaattgacagtactgagcatctatacttgtctgggcgtggacatcgagaactttttggacaaagagagcgagcggataacgttaatcccgctgaacgaggttttccaagtctcacaggaaggagccggcaataatctaatcctacaatccataaataagacatgtagtcattatgaatgcgccttcctggggggcctgaaaacggagaactgcatcgagaatcttgagtatttccagcctatctacgtgtataacccaggcgagaagaaccaaaaactggaagatcacagtgaaaaaaactggaaactggaggaccacggcgagaaaaatcagaaacttgaagatcatggtgtgaagatactcgagcctactcagatccctgaagataagagtcaaggcaacatcaacaatcccacaccaggtcctgtgcccgtgcccggtccaaaatctcatccaagtgctagctctggcaaactgctcctgcctcagtttggcatggtgattattctgatttcagtcagtgcaattaacctctttgtggccctgtag

SEQ ID NO: 107620 - DNA, 1170 bp, synthetic construct
  misc_feature 1..1170: note = Description of Artificial Sequence: Synthetic coding sequence
  source 1..1170: mol_type = other DNA
atgaagacagggcacttcgaaatcgtgaccatgctcttagctacgatgatccttgtcgatattttccaggtgaaggcggaggtccttgacatggcagataatgcgttcgacgatgagtatctcaagtgcactgaccggatggagatcaagtacgtgccgcagctcctcaaggaggagaaggcatcccatcagcaactggacactgtgtgggagaatgctaaagctaagtgggcagccagaaaaactcagatctttctcccaatgaactttaaggataatcacggaatcgccctcatggcttatatctcagaggctcaggagcaaactcccttctatcatctgttcagcgaggccgtgaagatggccggtcagagtagggaagactacatctatggattccagttcaaggccttccacttttacttgacgagggccttacagttactccgtaagccttgtgaggctagctccaaaaccgtggtgtaccggacatctcagggcacatcctttacttttggcggccttaatcaggctcgctttggacattttaccctggcttactcagccaagccgcaggcagccaatgaccaattgactgtcctgagcatatatacatgccttggggttgatattgaaaacttcttggataaagagagcgagaggattactctcatccccttgaacgaagtgttccaggtgtcacaagaaggcgccggcaacaatttgatcctccagtcaatcaataaaacctgttcccactacgagtgtgcatttctgggtgggctcaaaaccgagaattgcatcgagaacttggagtactttcaaccaatctacgtgtacaacccgggagaaaaaaatcagaaattggaggaccacagtgaaaaaaactggaagttggaggaccacggtgaaaaaaaccaaaagctcgaggaccacggggttaagattctcgaacctacccaaatcccagggatgaagatcccagaaccctttcctctgccagaggacaagagtcaaggtaatatcaacaacccaaccccaggacccgtgcctgtgccaggccctaaatcccaccctagcgcttccagcggaaaattgttgctccctcaattcggaatggtcattattctgattagcgtgagcgccattaatctgtttgtggccctgtag

SEQ ID NO: 107621 - DNA, 390 bp, synthetic construct
  misc_feature 1..390: note = Description of Artificial Sequence: Synthetic coding sequence
  source 1..390: mol_type = other DNA
atgaaaaccggacattttgagatcgtgaccatgctgctggccacgatgatcctggtagatatcttccaggtgaaagcagaagtcctagatatggccgacaacgcctttgacgatgaatacttaaagtgcactgacaggatggagattaagtatgtgcctcagcttctcaaagaggagaaggcctcccatcagcagcttgacacagtatgggagaacgccaaggccaagtgggcggcccgcaagacccagattttcctgcccatgaattttaaggataatcacggcatcgctctgatggcttacataagcgaggcccaggagcagaccccattttaccacctcttcagtgaagcagtgaaaatggccgggcaaagccgagaagactattag

SEQ ID NO: 107622 - DNA, 528 bp, synthetic construct
  misc_feature 1..528: note = Description of Artificial Sequence: Synthetic coding sequence
  source 1..528: mol_type = other DNA
atgaagaccggccatttcgagatagtgactatgctgcttgcaaccatgattttggtggacatttttcaggtcaaagcagaagtcttggacatggcagacaacgccttcgatgatgaataccttaaatgtactgaccgcatggaaatcaaatatgttccccagctgctgaaggaggaaaaagcaagccatcaacagctggatacagtatgggagaatgcaaaggccaaatgggccgcaaggaagacccagatattcttgcccatgaacttcaaggacaatcacggaattgcacttatggcgtacatctctgaagcccaagaacagacaccattctaccatctcttttccgaagctgtgaaaatggcgggtcagagccgggaggactacatttatggatttcaattcaaggcttttcacttctacctgactcgggccctgcaactcctgcgaaaaccctgcgaggcctcaagcaagactgttgtgtacaggactagccaagggacgtcatttacatttggcgggttgtag

SEQ ID NO: 107623 - DNA, 609 bp, synthetic construct
  misc_feature 1..609: note = Description of Artificial Sequence: Synthetic coding sequence
  source 1..609: mol_type = other DNA
atgaagacaggccacttcgagattgttacaatgcttctggccacaatgatattggtggacattttccaagtgaaggcagaagtcctggacatggctgacaatgcattcgatgatgaatacctaaaatgtactgatcggatggaaatcaagtacgtgcctcagctgctaaaggaggagaaagcctcgcatcagcagctggacactgtatgggaaaatgcaaaagccaagtgggcggctcgcaagactcagatctttctccctatgaactttaaagataaccacggcatagctttgatggcatacatctcggaggcccaagagcagaccccattttaccacctattctctgaagccgttaagatggctgggcagagtcgcgaggattacatctacggcttccagtttaaggcctttcacttctacctgactcgagctttacagctgttacggaagccttgtgaagcttcttctaaaacagttgtgtaccgaacatcccaggggacatcctttacattcggcggattgaaccaggccaggtttgggcactttacgctcgcctactcggcaaagccacaggcggcaaacgatcaactgacggtgctgtcttag

SEQ ID NO: 107624 - DNA, 324 bp, synthetic construct
  misc_feature 1..324: note = Description of Artificial Sequence: Synthetic coding sequence
  source 1..324: mol_type = other DNA
atgaaaacgggccactttgaaattgttaccatgctgttggctaccatgatcctcgtagacatcttccaagttaaggccgaggtgctggatatggctgacaatgcattcgacgacgaatatctgaagtgcactgatcgcatggagataaaatacgtgcctcagctgctgaaggaggaaaaggctagccatcagcagctcgacacggtctgggagaatgctaaagcaaagtgggctgccagaaagacacagatatttctcccaatgaattttaaggacaaccacgggatcgcgcttatggcttacatttcagaggcccaggaatag

SEQ ID NO: 107625 - DNA, 456 bp, synthetic construct
  misc_feature 1..456: note = Description of Artificial Sequence: Synthetic coding sequence
  source 1..456: mol_type = other DNA
atgtctggcagaggcaagcagggagggaaggtcagagctaaggccaaaagccggagcagtcgggccggcttacaattccctgtcggtcgggtgcaccgcctgcttcggaagggcaattacgctgagcgagtgggagcaggcgccccagtttatctcgcagctgtcttggagtatctcacagccgagattctggaattggcgggaaatgccgccagagacaacaaaaaaaccaggatcattccaagacacctgcagttggccataaggaacgacgaggagctgaataaacttctggggaaggtgacgattgcccagggtggcgtgctaccaaacattcaagcggtgctactcccaatttgcgagcacagtgggccaagctccggaaaaatcccttcagatcgcgccgaattaggtgcaggtagcgtctgcggtcacatcttccaaaaagtcgaatag

SEQ ID NO: 107626 - DNA, 177 bp, synthetic construct
  misc_feature 1..177: note = Description of Artificial Sequence: Synthetic coding sequence
  source 1..177: mol_type = other DNA
atgggccccttgataaaccggtgcaaaaaaatccttctaccaacgaccgtcccaccagctaccatgagaatatggcttctcggcggccttcttccattcctacttctgctttccggcctccagcgtcctactgagggtagcgaattgcctgcccgcaacgcaagcctgatcctgtag

SEQ ID NO: 107627 - DNA, 876 bp, synthetic construct
  misc_feature 1..876: note = Description of Artificial Sequence: Synthetic coding sequence
  source 1..876: mol_type = other DNA
atggcgttggccgcactgatgattgctctgggaagcctgggccttcacacctggcaagcacaggcggtccccatcctacctcttggcctggctcctgacaccttcgacgatacctacgttggctgtgctgaagagatggaggaaaaagcagctcccctgctgaaggaggaaatggcacaccacgctctgctgagggaatcctgggaagctgcccaggagacatgggaagacaagagacggggccttactctcccccctggattcaaagctcagaacggcatcgccattatggtatacactaattccagcaacacgctgtattgggaactcaaccaggctgtcagaacaggcggcggaagccgcgaactatacatgaggcattttccttttaaggcccttcacttttacttaatccgtgcattacaactcctcaggggcagcggaggatgctcaaggggccccggcgaggtggtcttccggggagttggcagcctccgttttgaacccaagcggcttggggattctgtgaggctgggacaattcgcctccagtagcctcgacaaggcggtggcacaccgcttcgggaacgcgacactatttagtctcacaacgtgtttcggcgctccgatccaagccttttcagtcttccctaaagagcgggaggtcctaatccctcctcatgaagtattccttgtgactagatttagccaagacggggcccaatctctcgtaaccctttggagttacaaccagacatgctcacacttcaactgcgcgtacctggggggcgaaaagcgtcggggatgtgtgagcgctcctggagcccttgggacaggagatctgcatatgaccaaacgccatctccagcaaccatag

SEQ ID NO: 107628 - DNA, 720 bp, synthetic construct
  misc_feature 1..720: note = Description of Artificial Sequence: Synthetic coding sequence
  source 1..720: mol_type = other DNA
atggctctggccgccctcatgattgccctgggatccctgggcctgcatacctggcaggctcaggccgtgcccatccttcctctcggacttgcccctgacacgttcgatgatacatacgttggatgtgccgaagaaatggaggaaaaagcggcccctcttttgaaggaggaaatggctcaccacgctctactaagagagagctgggaggctgcacaggaaacctgggaagacaagcgtcgagggcttaccctgccaccagggttcaaagcccagaatggaatcgccatcatggtctacaccaactcaagcaatacactgtactgggagctgaatcaggctgtgaggacaggcggaggaagtagggagctgtatatgaggcactttccctttaaagcgttacatttctacttaattagggcactgcagcttctgcggggaagcgggggttgcagccgaggccccggcgaggtagtattcaggggcgttggtagccttagatttgaaccaaaaagactgggagactcagtcaggctcggccagttcgcttctagctcattagataaggcggtcgcccacagattcggagaaaaaaggcggggctgtgtcagtgcccctggtgtacagttagggtcccagtccgagggtgctagcagcctccccccatggaaaacgcttctactggcgcctggggaatttcaattgtccggcgttggtccttag

SEQ ID NO: 107629 - DNA, 876 bp, synthetic construct
  misc_feature 1..876: note = Description of Artificial Sequence: Synthetic coding sequence
  source 1..876: mol_type = other DNA
atggctctggccgctctgatgatcgctctcggatctcttgggctccacacgtggcaggcacaagcagtccccattttgcctctcgggctggcacccgacacatttgatgacacatacgtggggtgcgctgaggagatggaagagaaggccgctcctctgttgaaggaagagatggcccatcatgccctgcttagggaatcctgggaggctgcccaggaaacctgggaggataaacgaaggggcctgacattaccgccaggatttaaggcccagaacggcatagctattatggtatataccaacagtagcaataccctgtattgggagctgaaccaggcggtgcgtaccggaggcggatcacgggagctctacatgcgtcactttccatttaaggccctacatttttatctgattagagctctgcagctcctccgagggtctggtggatgtagccgaggaccaggcgaggttgtcttcagaggcgtggggagtttaagatttgaaccaaaaagactcggggactctgtacggctggggcaatttgccagcagtagccttgataaggctgttgcgcacaggtttggcaacgccacactgttcagtttaaccacatgcttcggtgctcccattcaagcctttagcgtgtttcccaaagagagggaggttctgattcctccacatgaggtttttctggtcaccaggttttcacaggacggcgctcagtccttagttaccctgtggagctacaaccaaacatgctcacacttcaattgcgcgtacctgggaggtgagaagcggcgggggtgcgtaagtgcccccggagcgttagggactggagacttgcacatgacgaagcgccacctccaacagccatag

SEQ ID NO: 107630 - DNA, 1401 bp, synthetic construct
  misc_feature 1..1401: note = Description of Artificial Sequence: Synthetic coding sequence
  source 1..1401: mol_type = other DNA
atggtgtttctttctggaaatgctagtgatagcagtaactgcacacagcccccggcacccgtgaatatcagcaaagcaatcctgctaggggtcatattgggaggacttattctgtttggcgtgcttggcaacattctagtaattctgtcagtcgcctgccatcgtcatctgcactccgtgacccactattatatcgttaatctcgccgtggctgacctgctcttaactagcaccgtccttcctttcagcgctatcttcgaggtgctgggctactgggcatttgggcgcgtgttctgcaatatctgggccgccgtagatgtgctttgctgcacagcatctatcatgggtctgtgcatcatctccattgaccggtacatcggggtttcttatcctctccgctacccaaccatcgtcactcagcgacggggcttgatggcgctgctctgcgtgtgggcattatcactggtgattagtattgggcccctgttcgggtggcgccagcccgcaccagaggatgaaacgatatgccagataaacgaggagcctggatatgtgttgttttcagccctgggctccttttaccttcccctggcgatcatactggtgatgtactgccgggtatatgtagtagccaagcgtgaaagtcggggcttgaaaagcggcctcaaaactgataagagcgactctgaacaggtaactcttcgtattcatcgtaaaaacgctccagctggcggttcagggatggctagcgcgaaaactaagacacatttcagcgttcgcctactgaagtttagtcgcgaaaagaaggctgctaagaccctgggaattgtggtcgggtgcttcgtgctgtgctggctcccattttttttagtgatgccaatcggttcgttcttcccagacttcaaaccctccgaaacggtctttaagattgtcttttggctcggatatcttaatagttgtataaaccctatcatttacccgtgctcgagtcaggagttcaagaaagcattccagaacgtgctgcggattcaatgtttgtgccgtaagcagtcctctaagcatgccttgggctacacactgcaccccccttcgcaggcagttgaaggacagcataaagacatggtacggatacccgttggatcaagagagaccttttaccgtatttctaaaactgacggagtttgtgaatggaaattcttttctagtatgccaaggggctcagcaaggataactgtgagcaaggaccagtcctcctgtaccaccgcccgcgtaaggtcgaagtccttcctgcaggtctgctgctgcgtggggccttccaccccctctcttgataagaaccatcaagtgccgaccattaaagtgcacactatcagcctctctgagaacggagaagaggtgtag

SEQ ID NO: 107631 - DNA, 1368 bp, synthetic construct
  misc_feature 1..1368: note = Description of Artificial Sequence: Synthetic coding sequence
  source 1..1368: mol_type = other DNA
atggtcttcctctccggtaatgcatccgactcaagtaattgtacccagccccccgcgcctgtaaatatttccaaggcaattctgttgggcgtgatcctgggaggactaattttgttcggagttctgggaaacatactcgtcattctttctgttgcatgccacaggcatcttcactctgttactcactattacattgtgaacctcgcggttgccgatctcttgctgacatctaccgtgctcccattcagtgcaatcttcgaagtgctgggttactgggcgtttgggcgcgtgttttgcaatatctgggccgcagtcgatgttttatgctgcactgcttcaatcatggggctctgtattatttctatcgaccggtatatcggggtaagctaccctctgcgttatcctactatcgttacgcagagaagggggctgatggcgctcctatgcgtctgggcattaagcctcgtcatctctatcgggccactgtttggttggcggcagcctgctcctgaggacgaaaccatttgccagattaacgaggagccgggttatgtgttattttccgccctcggcagcttttatttgccactcgcaattatcctggtaatgtattgcagagtgtatgtagtggctaagcgagaaagcaggggcctgaagagtgggttgaagactgacaagagcgactctgagcaggtcaccctccgaattcacagaaagaatgcgccggcaggcggatccgggatggcctcagcgaaaactaagacacatttctcagtcagacttttaaaattttcgcgagaaaagaaggccgctaagactttaggtatagtcgtgggatgtttcgttctttgttggcttccatttttcctggtgatgccaattgggtccttctttcctgattttaaaccctcggaaacggtttttaagattgtcttctggcttggctatcttaacagctgtattaatcctatcatctatccatgcagtagccaggagttcaagaaggcattccagaatgttctgcggatccaatgcctttgtcggaaacagtcttccaaacatgctctgggatatacactgcacccgccatcccaagcagttgaaggacaacacaaggacatggtcagaattcccgtgggatcacgggaaaccttttaccgcattagcaagaccgacggagtttgcgaatggaaattcttttcaagcatgcctcgcggcagtgccaggattaccgtgagcaaagatcagtcttcctgtacaacagcgcgtagagggatggattgtcggtattttaccaagaactgccgggaacacattaaacacgtaaatttcatgatgcctccttggaggaaggggagtgaatgctag

SEQ ID NO: 107632 - DNA, 975 bp, synthetic construct
  misc_feature 1..975: note = Description of Artificial Sequence: Synthetic coding sequence
  source 1..975: mol_type = other DNA
atggtgtttctgtccgggaacgcctctgatagtagcaactgcactcaaccccccgcccctgtgaacatcagtaaggccatcttacttggcgtgattctgggcggcctgatcctctttggggtcttggggaacatcttggtaattttatccgtcgcctgtcatcgccatctacactctgtgactcactactatatcgtgaaccttgctgtggccgatctgctcttgacatcaactgttttacctttcagtgctatcttcgaagttcttggttactgggcatttggccgagtgttctgcaacatctgggccgccgttgacgtcctatgttgcactgctagtattatgggactttgcattatctctatcgaccggtacataggcgtgagttaccccctgcgctacccaacaatcgtcacacagcgtagggggctgatggcactgctttgtgtgtgggctttgagcctggtaatctccatcggacccctgtttgggtggcgacaaccagcacccgaggacgagaccatatgccagattaacgaggaacccggctacgttctcttcagcgccctggggtcattttaccttcccctcgccatcattctcgtcatgtactgtagagtctacgtagtggctaagagagaatctcgggggttgaaatctggacttaagacagataaatctgattctgagcaggtcacactaaggatccatcgaaaaaacgcgcctgcaggcggctctgggatggcatccgcgaagaccaagacacactttagtgtgagactactgaaattctctcgcgagaagaaggccgcaaaaactcttggcatcgttgtcgggtgtttcgttttatgttggttaccattctttctagtaatgcctattgggacctatatcttgaagtacgacgtgctattctggagaaaagggctatctgtgtgtacaaggctgcgcgaaagaaaggagatcaagaactag

SEQ ID NO: 107633 - DNA, 1029 bp, synthetic construct
  misc_feature 1..1029: note = Description of Artificial Sequence: Synthetic coding sequence
  source 1..1029: mol_type = other DNA
atggtgtttttaagcggaaatgcatcagattcctcaaattgcacacagccacctgctcccgttaacatctcaaaagcaatccttcttggtgtaatcttagggggattgattctcttcggggtgttggggaacattctggtgatcctctctgttgcgtgtcatcgccacctccactcggtcacacactattacatcgttaatcttgccgtggctgatctgctcctgaccagtactgtactgccattctccgctatatttgaggtgttaggttactgggcctttgggcgggttttctgtaatatatgggccgcagtcgatgttctctgctgtactgcaagcattatgggactgtgcataatctcaatcgacaggtatattggtgtgtcatacccactccgataccctacaatagtcacacagaggagaggattgatggcattactttgcgtttgggcgctgtctctggtgatctctattggccccctgttcggctggcgccaacccgcacctgaggacgagacaatttgtcagatcaatgaggagcctggctacgttttgttttcagctctcgggtccttttaccttcctctagccattatactggtaatgtactgcagagtttacgtggtggctaagcgggaaagtcgcgggctcaaatcagggcttaagacagacaaatcagatagcgaacaagtgacgctgcggattcatagaaaaaatgcacccgcggggggatccggcatggctagcgcgaaaaccaaaacccacttttcggtcagactgctcaaattttcccgtgaaaagaaggcagctaagactttaggcatcgtcgttgggtgcttcgtgctttgttggctgccctttttcctggtgatgccaatcgatgaagaaacagaagcccaagagggcaagaatgacagcccttcgttcaagcaacctgtgcaccacgcggctgtgctgggcttggaggtgatggaaaaagagaatctggagggtgtgtcacgcaaagacacgtgcggcgtgtggtag

SEQ ID NO: 107634 - DNA, 1401 bp, synthetic construct
  misc_feature 1..1401: note = Description of Artificial Sequence: Synthetic coding sequence
  source 1..1401: mol_type = other DNA
atggtgttcctttctggaaatgcctctgatagttccaattgtacccaacctcccgcgccagtcaacataagtaaggccatactcctgggagtgatcttaggaggcctgatcctcttcggcgtgcttggaaatatcttggtaatcctgagcgtcgcttgccatcggcacctgcattctgtaacccattattacatcgttaatctggccgtggctgacttactgctgacttcaaccgtccttcccttcagcgcaattttcgaggttttgggctattgggccttcggacgtgtgttctgtaatatctgggccgccgtggacgtgttatgttgtactgcatcgatcatgggtttatgcattatctccattgacaggtacatcggcgtcagctatcccttgcgatacccaactattgtcacccagaggcgcggattaatggctctcctctgtgtgtgggctttaagcctcgtcatttctattggtcctttgtttggatggcgccagccagctcccgaggacgaaaccatttgccagattaacgaagaaccgggatacgtattgttttccgctctcggttccttctacctgcctctcgccataatcttggtgatgtattgtagagtgtacgtggttgctaagcgggaatccagaggccttaagagcgggctaaagacggacaaatccgacagcgaacaggtcacactcagaatccatcggaagaatgcccctgccgggggaagtggaatggcttccgccaagacaaagacacacttcagcgtcagacttctcaagttctctcgcgagaaaaaagctgctaaaacactgggcattgtggtcggatgttttgttctatgttggctgcctttttttttagtaatgcccattggttcctttttccccgatttcaaacccagcgaaacagtcttcaaaatcgtattttggctaggctacctcaattcctgtatcaaccccattatttatccatgctctagtcaggagtttaagaaagcgttccagaacgtgctgagaatccagtgtctttgtagaaagcagagctcaaagcatgcacttggttacacattgcatcctcccagccaggctgtggaagggcagcacaaagatatggtgagaattcctgtggggagccgtgagaccttctatcgcatcagtaagactgacggggtctgcgagtggaaattcttctcatctatgccacggggctcggccaggataactgtgagtaaggaccagagtagctgcaccaccgcgcgggtgagaagtaaatcatttctccaggtgtgctgttgtgttggtccctctacgcctagtttggacaaaaatcatcaagtcccaactatcaaggtgcacactatcagcttgagtgagaacggagaagaggtgtag

SEQ ID NO: 107635 - DNA, 1119 bp, synthetic construct
  misc_feature 1..1119: note = Description of Artificial Sequence: Synthetic coding sequence
  source 1..1119: mol_type = other DNA
atggtgttcctgtccggaaacgcctcagatagttcgaactgcacacagcctcctgcgccagtgaacatatccaaggccatcctccttggcgtaatcctgggcggcctcatcctgttcggcgtgctggggaacattctggtgattttgtctgtcgcttgtcaccgtcaccttcacagtgtgactcattattacatagtcaatctcgcggttgctgatttgctgttgacaagcaccgtcctgcccttctctgctattttcgaagtactaggatattgggccttcgggagagtattctgcaatatttgggcagctgtggatgtgctgtgttgtaccgcctcgataatgggcctttgtattatctctatagataggtatataggcgtgagttaccctttaaggtatcccactatcgtcacccagagaagggggctgatggcgttactctgtgtatgggccttaagtcttgttatcagcataggcccgctgttcggctggagacagccagcccctgaggatgaaacaatatgccagatcaacgaagagcccgggtacgtattgttctcggcgcttggatctttctacctgcctctggcaataattctggtgatgtattgccgtgtatacgtcgttgccaaaagggaatcccgcggtctgaaatcaggcctgaagaccgacaaatcggacagcgagcaggttactttgcgcatccatcggaagaacgcgcctgctggtggatccggcatggcgtctgctaaaacaaaaacccatttcagcgtgaggcttctgaagtttagccgtgaaaaaaaggccgctaagacactcgggattgtggtcggatgtttcgtcttgtgctggttgccctttttcctagtgatgccaatcggcacacacacccacgatatgaaacccgcgtcaagacctcggctgctgtccctgctcccaaaggagggcgagcacgaaacacatcactggagctgcgatcctctgtctctggagagtacgcctggagcccaggagccatgtctcacgctgggatttacaagcttgtcttccatccatctgaccaaggcccagattcagcacgtgaccgtaacagatacgggcaagacagtgacctag

SEQ ID NO: 107636 - DNA, 1290 bp, synthetic construct
  misc_feature 1..1290: note = Description of Artificial Sequence: Synthetic coding sequence
  source 1..1290: mol_type = other DNA
atggtgtttctatcaggcaatgcctccgatagcagtaattgtactcagccacctgctcctgtgaatataagcaaggccatcctgctgggcgtgatccttggtggcttgatactgttcggggtcttaggaaatatcctcgtgatcctgtctgtggcgtgccaccggcatcttcacagcgtaacacattattatatcgtcaatcttgcagttgctgatcttctgttgaccagcaccgtgctacccttctccgccattttcgaggtgttgggctattgggccttcgggagggtattttgtaatatctgggcggctgtggacgtgctatgctgcaccgctagtatcatgggactctgtataatatccatcgatagatacattggagtcagttatccgctgagataccctaccatcgtgacacagaggaggggactgatggcattactttgcgtatgggccctgagtttagtgatcagcatcggcccgctattcggttggagacagcccgctccagaggacgagacaatctgtcagattaatgaggaaccaggctacgtgctgttctccgcactcggtagtttctacttacccctcgccatcattctagtgatgtactgccgcgtatacgtcgtggccaaacgcgagtcgaggggcctcaagagcgggcttaaaactgacaaatctgacagcgagcaagttaccctccgcatccaccggaagaacgccccagctgggggctctggaatggccagcgccaaaaccaagacacatttttccgttcgtctgttgaaattctcacgggaaaaaaaggcagccaaaaccctgggcattgtcgttggctgctttgtcctttgctggctgccattctttcttgtgatgcccatcggttccttttttcccgactttaagccaagcgaaacggtgttcaagattgtgttttggcttggatatctgaactcttgcattaaccccattatatacccatgctccagccaggaattcaagaaggcattccagaacgtgctgcgtatccagtgcttatgccggaaacagagttctaaacatgccctggggtacacgttgcacccgccctcgcaggccgtggaaggacagcataaagacatggtccgtatacctgtgggtagccgtgagactttctaccgaataagtaagactgatggtgtatgtgagtggaagtttttctcttccatgccaagagggagcgcacggattactgttagtaaagaccagtcatcgtgtacaaccgcaagaggtcacactcccatgacttag

SEQ ID NO: 107637 - DNA, 1428 bp, synthetic construct
  misc_feature 1..1428: note = Description of Artificial Sequence: Synthetic coding sequence
  source 1..1428: mol_type = other DNA
atggtgttcctgtccgggaatgccagtgattcatcaaattgcacgcaacctccagcaccagtgaacatcagtaaagctatcctcttgggcgtgatcctgggcggattaatcttgttcggtgtactagggaatatcctagtgatactgagcgtggcatgccacaggcaccttcattctgtgactcattattatatcgtgaaccttgctgtggctgacctgctgctgacgagcacagttctccctttctcagcgattttcgaggtcctgggctactgggccttcggacgcgtcttttgcaatatctgggcagccgtggacgtgctatgttgcacagctagcattatgggcctgtgcattatatccattgaccggtacatcggggtgagttatcctctgcgttaccccacaatcgtaactcagagacgcggacttatggcactgctgtgtgtatgggctcttagcctcgttatctcaatcggtccactattcggctggcggcagccagctccagaggacgagacaatttgccaaattaatgaggagcccggctacgtactgtttagcgccttgggtagcttctatcttcctctcgccattattctggtgatgtactgtcgggtttacgtggtcgccaagcgagaatcacggggcctcaaaagtggactgaaaactgacaagtctgatagtgagcaggtcactcttcgcattcataggaagaatgcccccgccggcggttcggggatggcttccgccaagacgaagacacatttctccgtaaggctactcaagttctcgcgagagaagaaggccgccaagacactcggcatcgtggtagggtgctttgttctgtgctggctgcctttttttctggtaatgcccattggatcatttttccccgacttcaagccatccgagaccgtgtttaagattgttttttggctgggctatctgaacagctgcattaaccctataatctacccctgtagtagccaggagtttaaaaaagccttccagaacgtactgcggatccagtgcctgtgcaggaagcagtcttccaaacatgccctgggttatactctgcacccccctagccaagcagtggaggggcagcataaagacatggttaggatccctgtcggctctcgggaaacgttctatcgaatcagcaaaacagacggcgtgtgcgaatggaaattctttagttccatgccaaggggatctgcacgaattactgtttctaaagaccagtccagctgcaccactgctcggaccaaatccaggagcgttacacgcttagagtgcagtggaatgattctagcgcactgcaacttacggctccctgggtccagggattcacccgccagcgcctctcaggcggctggcaccacaggtatgtgtcaccaggccgatgcaacaaggccgtcctag

SEQ ID NO: 107638 - DNA, 1113 bp, synthetic construct
  misc_feature 1..1113: note = Description of Artificial Sequence: Synthetic coding sequence
  source 1..1113: mol_type = other DNA
atggtttttctgtccgggaatgcatccgactcctcaaactgtacacagcccccagcacccgttaatatcagcaaggcgattcttctgggagtcatcctcggcggccttatactattcggcgtactgggcaacatcttggtgattctctccgtggcttgccataggcacctgcattcagttacccactactatattgttaacctcgccgttgccgatcttcttctcacgtctactgttttgccattttccgcaattttcgaggtgctcggctattgggcgttcgggcgggtgttctgtaatatttgggccgcggtcgacgtcctgtgctgtaccgcctccatcatgggcctgtgcatcatcagcatcgaccggtacataggagtgtcctaccctttgcgataccccaccatcgtcacccagagacgcggtctgatggcactgttgtgcgtttgggcgctgtctttggtaatctctatcgggccattgtttggatggaggcaacctgcccctgaggatgagaccatatgccagattaacgaagaacccggttacgtcctgttctctgctctgggctcattttacttgcccttggcgatcatcctggtgatgtattgtcgcgtgtatgtagtcgccaaaagagaaagccgaggcttaaagtcaggcttgaaaaccgataaatccgacagtgaacaggtcactttgcgcatccatcgtaaaaatgccccagctggtggatcagggatggccagcgccaaaacgaaaacccacttctctgttagactcctaaagttttcgagagaaaagaaggctgctaaaaccctggggattgtggtgggctgctttgtactttgctggctgccttttttcctggtgatgcccattgacgaagtcagcctttgccatcaggctggcgtgcagtggcacgatctaggctcactccagcctcccccccccggctttaagcgattcagttgtttgtcgctcccctcttcgtgggattatcgggatgtgccgcctgggagaaggcaccaggcccagctgatattcgtgtttcttgtcgagaccggattccaccatgttggccaagacgacttagatttactaacgtcttag

SEQ ID NO: 107639 - DNA, 1284 bp, synthetic construct
  misc_feature 1..1284: note = Description of Artificial Sequence: Synthetic coding sequence
  source 1..1284: mol_type = other DNA
atggtgttcctgtccggaaatgccagcgattcatccaattgtacccagcccccagcccccgtaaacatctcgaaggctatcttgctcggggtcatccttggaggcctaattttgttcggggtcttgggcaatatccttgtgattctgtctgtggcttgtcacaggcacctgcactcagtgacgcactattacatcgtgaatctcgccgtggccgatctgcttcttaccagcaccgtgctgcctttttctgccatcttcgaggtacttggctactgggcgttcgggagagtcttctgcaacatctgggccgcagtcgacgtactttgttgtactgccagcataatgggattatgcatcatttccattgacaggtatattggagtatcctacccccttcggtacccaacgattgtaacgcaacgccgcggtcttatggccctgttgtgcgtgtgggccctgtccctggtgattagcataggccctctctttgggtggcgccaaccagccccagaggatgaaaccatatgtcaaataaacgaagagcctgggtacgttctcttctcagccctaggcagtttctatcttcccctggctatcattttagtgatgtattgtagagtgtatgtggtggccaagagagagtctcgaggactgaagagcggcctcaagaccgacaagtccgactcagagcaggtaacccttaggatccacagaaaaaacgccccagctggcggatccggtatggcaagcgccaagaccaagacacacttttcagtccgactcttgaagttcagtcgcgagaaaaaggcagcaaagacactgggaatcgtggtggggtgcttcgtactgtgctggcttcctttcttcctcgtcatgccaatcggcagtttttttcctgattttaagccctccgaaactgtcttcaagatcgtgttctggctggggtacctcaacagctgtataaatccaataatttatccatgctccagccaggagttcaagaaggccttccagaatgttcttagaatacaatgtctgtgtcggaagcagtccagtaaacatgccctgggctacaccttgcatcccccaagccaggctgtcgagggccaacacaaagatatggtgcgtatccccgtgggcagccgggaaactttttaccgaattagcaagacagacggtgtgtgtgagtggaagtttttttcatccatgccacgtggttctgcgcgcatcaccgtgtctaaagaccagtcttcatgcacaaccgcccggtcgtccggtttctag

SEQ ID NO: 107640 - DNA, 1563 bp, synthetic construct
  misc_feature 1..1563: note = Description of Artificial Sequence: Synthetic coding sequence
  source 1..1563: mol_type = other DNA
atgaatcccgacctcgacacaggacacaatacatctgcaccagcccactggggtgagcttaagaacgcaaattttaccgggcccaaccagacttcatcaaactccacgctgccacagctcgatattaccagggctatcagcgtgggtcttgtgcttggcgctttcatactgttcgccatagtaggcaatatactcgtgatcctgagtgttgcctgcaaccgacatcttcgtactcccaccaactacttcattgtgaacctcgccatggctgatttactgctttctttcacagtcctgccattcagcgcagccttagaggttctcgggtattgggtgctcggtcgcattttctgcgacatttgggccgccgtggacgtgttgtgctgtactgcttctatcctgagcctgtgcgctatctcaatcgaccgctacataggagtcagatactccctgcagtatccgactctggtcacaaggcgcaaggccatcctagctttgctcagtgtgtgggtgttgtccacagttatttctatcggtccactacttgggtggaaggagccggccccaaacgatgataaagaatgtggcgtcacagaagagcccttttacgctctcttcagcagtctgggctccttttatatccctctcgccgtaattcttgtaatgtactgcagagtgtacatcgtggccaaacggacaacaaagaatttagaagcaggggttatgaaggagatgtctaacagcaaggagctcacacttaggatccactctaaaaacttccacgaggacacgcttagcagtacgaaagcaaagggccacaaccctagaagctctatcgccgtgaagctctttaagtttagtcgagagaagaaggctgccaagaccctgggtattgtcgttggcatgtttatcctgtgttggctgcctttttttattgctctgcctttgggttctctgttctccactttgaagcctccagatgcggtatttaaggtcgtcttttggttgggatacttcaattcctgccttaatccaatcatttatccttgcagttcaaaagaattcaaaagggcctttgtccggattctcggatgtcagtgtcgtggaagaggaagacgccgccggcgcaggaggaggaggctaggcggctgtgcatatacctatagaccttggacgcgagggggatctctggagcggtcccagtcacgtaaagactctctggacgacagcggctcctgcctatccgggtcccagcgaacattgccatcagccagccctagccctggctacctggggaggggcgccccaccaccggtcgagctctgtgcctttccagaatggaaagcccctggggccctgttgtcgctccccgcacccgagcctcctgggagacggggccggcatgacagtgggccactgtttaccttcaaattattgaccgaacctgagagtccagggaccgacgggggggcttctaatggagggtgcgaagctgctgctgatgtcgctaatggacagcccgggtttaagtccaatatgcccttggcgccaggccagttttag

SEQ ID NO: 107641 - DNA, 1719 bp, synthetic construct
  misc_feature 1..1719: note = Description of Artificial Sequence: Synthetic coding sequence
  source 1..1719: mol_type = other DNA
atgactttccgcgacctactcagcgtctccttcgagggccccagacccgactcctctgctgggggctctagtgcaggggggggcggagggtccgctggcggagctgcgccatcagaagggccagccgtcggtggagtccctggcggcgccggcggtggaggaggtgtggtgggggcaggaagtggagaagacaaccggtcttccgccggtgagccagggtccgctggggcagggggagatgtgaatgggactgctgcggtcggggggctggtcgtaagtgcccagggggtgggcgttggggtcttcctggctgcatttatcttgatggctgtggctgggaatctcctcgtgatcctcagtgttgcatgcaatagacatctgcagactgtcactaactatttcatagtgaacctggcggtggctgatttgctgctgtctgcaacagtgctccccttctccgccaccatggaggtgctggggttttgggcttttggacgagcattctgcgatgtttgggcagcagtggacgtgctctgctgcaccgcgtccatcttgagtctgtgtactatatcagtggaccgttacgtaggagtcaggcacagcctcaaatacccagccataatgacagaaagaaaggcggcggccatcctggccttactttgggtcgtcgctcttgtggtctccgtgggcccactcctgggctggaaggaacccgtccctccagacgaacggttttgtgggataactgaggaagctggatatgcggttttttcaagcgtttgcagcttttacttgcccatggcggtgattgtggtgatgtactgccgcgtgtacgtggtcgcgagatctaccacgcgtagcctggaagctggtgttaagcgcgaacgcggcaaagcatcagaggtagtgctgcgtattcactgtagaggagctgccacaggggcagacggcgctcacgggatgaggagcgccaagggtcatacatttcggtccagtctgtctgtacgcctgttaaagttttcgcgcgagaaaaaggcagccaagacactagccattgtagtgggcgtgtttgtgctttgctggttcccattcttttttgtgttgcccctgggatcgctatttccccaactgaaaccaagtgaaggggtgttcaaggtaattttttggctcggctatttcaactcctgcgtgaatccgttgatatatccgtgtagtagccgcgaattcaagagagcttttctgaggttgctcaggtgccagtgccggaggaggcgtcgccgtaggccactgtggagggtttacggacatcactggcgggcctctacctcaggtttacggcaggattgtgcaccgtcgtcaggtgacgcacccccgggagctccactggcattgacagccctgccagatccagatcctgaaccacctggtactcctgagatgcaggctccggtggcctctagacgaaagccaccaagtgcattccgtgagtggcgcctgctgggcccttttaggcgcccaaccacccagctgcgggcgaaggtaagctcactgtcacacaaaatacgcgccggtggcgctcagagggcagaagccgcgtgcgcacaaagaagtgaagttgaggctgtctcactcggtgtgccccatgaggtggctgaaggcgcgacctgtcaagcttatgaattggcggactatagcaacctcagagagaccgacatctag

SEQ ID NO: 107642 - DNA, 1344 bp, synthetic construct
  misc_feature 1..1344: note = Description of Artificial Sequence: Synthetic coding sequence
  source 1..1344: mol_type = other DNA
atggaccatcaggatccctatagcgttcaggccaccgccgctatcgctgcagccattacattcctgattctgttcaccatcttcggcaatgccctggtaatcctcgcagtgctgacttcacgcagcttgcgcgctccacagaatttgttcctcgtgagtttggcagccgccgacattctagtagccaccctgataatccctttcagcctggccaatgaattgttaggatactggtactttaggcggacatggtgtgaagtgtacctcgccttggatgtactcttctgcacttcttctattgttcatctttgcgccattagtttggatcgctactgggccgtctcccgagccctggagtacaatagcaagcgtacccctcggcggattaaatgtatcatcctgaccgtgtggcttatcgccgcagtgatctctctccctcctttaatttataaaggtgatcaggggccgcaacccagggggagacctcaatgtaaactgaaccaagaggcatggtatatcctcgcctcttccatcggtagcttctttgccccctgtctgatcatgattctagtgtacctgaggatttacctgattgcaaagcgatcaaacaggaggggtccccgtgctaagggcggccccggccagggggaatccaagcagccaaggcccgaccatggtggggcactggcatctgctaagctccccgcgctcgcaagcgtggcatccgcccgggaggtgaacggccattctaagtctacaggggaaaaagaagagggcgagacacccgaagatacgggcaccagagccctgccgccatcctgggccgccctccctaatagcggccaaggccagaaggagggggtgtgcggagcctcccccgaagatgaggccgaggaggaggaagaagaggaggaggagtgtgagcctcaggccgtccccgtgagcccggcttcagcctgctcccctccattgcagcagcctcagggctctcgcgttctagctaccctgagagggcaagttcttctggggaggggggtgggcgcaattggggggcagtggtggcggcgcagagcgcagttaacacgagagaagcggtttacttttgtgctggctgttgtgattggagtgttcgtactatgttggtttcccttcttctttagctacagcttgggcgccatctgccccaaacattgcaaggtgccacacggcctgtttcagtttttcttctggattggttactgcaattcctctctgaatcctgtgatctacaccatctttaatcaagactttcgtcgggcctttaggagaattctctgccggccctggacccaaaccgcgtggtag

SEQ ID NO: 107643 - DNA, 1389 bp, synthetic construct
  misc_feature 1..1389: note = Description of Artificial Sequence: Synthetic coding sequence
  source 1..1389: mol_type = other DNA
atggcctcccctgccctagcagccgccttagctgttgctgccgcagccgggcccaatgccagcggcgccggggaaagggggagcggtggtgttgcaaatgcgagcggagcctcatggggcccaccgcgaggccaatactcagctggagcggtcgccggtcttgctgcggtggtgggcttcctgattgtgttcaccgtcgtgggaaatgtgctggtggtgattgctgttctgacttccagggccctgcgcgccccccagaatctctttctggtgagtttggcatccgccgatattctagtggccacgcttgtgatgccctttagcctggcgaacgagttgatggcatactggtatttcggtcaggtgtggtgcggagtgtatcttgccctggatgtgctgttctgtacctcctctatcgtgcacttgtgtgctatatcattggacagatactggtccgtcacacaagcggtcgaatacaatctgaagcggacacccaggcgcgtgaaggccaccattgtcgccgtgtggctgatttccgccgtgattagtttccctcctttggtgtccctttacagacagcctgacggcgccgcttacccacagtgtggattgaacgatgagacatggtacatactaagcagttgcataggatcattcttcgcaccctgcctgattatgggcctggtttacgctcggatataccgcgtggctaagctgagaacacggacactctccgaaaagcgcgctcctgtgggacccgacggcgcttctcctactaccgagaatgggctgggggctgcagccggagcaggggagaacgggcattgcgccccaccaccggctgacgtcgagccagacgagtcctcagccgccgctgagagacggcgacgacggggcgctctcaggagggggggccggcgccgggccggtgcagagggcggtgcggggggcgctgatggacaaggcgcaggaccaggggcagcagaaagcggagcactgacagctagtaggtcaccaggcccaggggggaggctgagcagggcttcttcacggtctgtcgaattttttctgtccagacggaggcgggcccgttctagtgtgtgccggcgtaaagtggcgcaagcaagggaaaagcgtttcacctttgtgcttgccgtggtgatgggcgtgtttgtgctgtgttggtttccatttttttttagttattctctatatgggatttgtagggaagcctgtcaggtgcccggtccactgtttaaatttttcttctggatcgggtattgtaatagctcactcaatcctgtaatatacactgtgttcaaccaggatttccggcgtagtttcaaacatatcctgtttcgcaggaggaggcggggattcaggcagtag

SEQ ID NO: 107644 - DNA, 2070 bp, synthetic construct
  misc_feature 1..2070: note = Description of Artificial Sequence: Synthetic coding sequence
  source 1..2070: mol_type = other DNA
atggcagatctggaggccgtattggcggacgtttcttatctgatggctatggagaagtccaaggctacgccagcagcgcgcgccagcaaaaaaatacttctgcccgagcccagcattcggtccgtgatgcaaaaatacctcgaagatagaggtgaggttacctttgagaagatcttctcccaaaagctgggttatctgttgtttagagacttctgcctcaaccacttagaagaggctcgccctctggtcgaattctacgaggagatcaaaaagtacgagaagttagaaactgaggaggagcgggtggcaagatctagggagatattcgacagctatataatgaaagaacttctcgcctgttcacatcccttctctaagtcagccacagaacatgtgcaagggcacctggggaaaaagcaagtgccccccgacctcttccagccgtatatcgaagagatctgccaaaacctccgcggcgacgtttttcagaagttcatcgaatctgataagttcaccaggttctgccagtggaagaacgtagagctaaacattcacctgacgatgaatgacttcagcgtccataggattatcggcagagggggctttggtgaagtgtatggctgccggaaagccgatacgggtaaaatgtacgccatgaagtgccttgataagaagagaattaaaatgaagcagggggaaaccctggctctgaacgagagaatcatgctaagcctggtaagcacaggcgattgtccctttatcgtgtgcatgagctatgctttccacacacctgataagctgtcatttatactcgatctgatgaacggaggtgacctacactaccacctgtcccagcacggcgtttttagtgaggcagatatgcgcttttacgctgctgagatcatcttgggcctggagcatatgcataataggtttgtggtgtaccgcgatctcaagccagctaacattctgctggacgaacatgggcacgttaggatttccgacctcggattggcctgcgatttctcaaaaaagaagccacacgctagtgtcggcacgcatggctacatggctccagaagtcctgcagaagggagtcgcttatgactcttcagctgattggttttcccttggctgcatgctgttcaaattgcttcggggacatagcccctttagacagcacaagactaaggataaacacgaaatcgaccgcatgacactgaccatggccgtggaattaccggatagtttctccccggagctccggagcttgctggagggattgctgcagcgtgatgttaacagaaggctagggtgtctgggacgaggcgctcaagaagtgaaggagagcccatttttcagatctctcgactggcagatggtatttttgcagaaatacccacctcccctgataccacctcgtggggaggtaaacgcggcagacgcctttgacataggcagtttcgacgaagaggataccaaaggtataaaactgctagattcggatcaagagctgtaccggaatttccctctgactatttctgagaggtggcaacaggaggtggctgagaccgtgttcgacacaataaacgcagagactgacaggctggaggcgcgcaaaaaagccaagaacaaacaactgggccatgaagaagactatgcactcggcaaagactgcattatgcacggttatatgtccaaaatggggaatccttttcttacgcagtggcagcggcgttacttttatctatttcctaaccgactcgagtggcggggcgagggagaagctccccaaagtctgttaacaatggaagagattcagtccgtggaagaaacacagatcaaggaacggaaatgtttactgcttaagatacggggcgggaaacagttcatattgcagtgtgattctgacccagagctggttcagtggaagaaggaactgcgcgacgcttaccgggaagcccagcagctggttcagcgagtgcctaaaatgaagaataaacctagatcacccgttgtggagctctctaaagtgccactcgttcagagaggaagcgccaacgggctgtag

SEQ ID NO: 107645 - DNA, 2067 bp, synthetic construct
  misc_feature 1..2067: note = Description of Artificial Sequence: Synthetic coding sequence
  source 1..2067: mol_type = other DNA
atggccgatcttgaggcagtactcgccgatgtttcctacctgatggcaatggagaagtcaaaggctactcctgctgcacgggcctctaagcgcattgtgttgcctgagccctctatacggagtgtgatgcaaaaatacctggcagagagaaacgaaattacattcgataaaatatttaaccagaagatcggctttctgctgtttaaagacttttgcctgaatgagatcaatgaagcagtaccccaggtgaagttctatgaagagatcaaggagtatgagaagctcgacaatgaagaggacaggttatgtagaagcagacagatttacgatgcttacataatgaaggagctccttagttgcagccatccattttcaaaacaggcggtagagcatgtacagagtcacctttcaaagaagcaagtgacctcgaccctgttccaaccatatatcgaagaaatatgcgaaagtctacgcggcgatatcttccagaaattcatggaaagtgacaagtttacacggttctgccaatggaagaacgtggaactcaatatacacctcacaatgaacgagttctccgtgcacaggataattggtcgcggaggctttggcgaggtgtacggatgtcgaaaggctgacaccggcaagatgtacgccatgaaatgtctcgacaagaagcgtatcaagatgaaacagggagaaaccctcgctctgaatgagagaattatgctcagtctggtctccaccggagattgtcccttcatagtttgcatgacatatgcattccatactcccgataaactgtgtttcatcctggatttgatgaatgggggagatttgcattaccacctctcacaacatggagtgttttctgagaaggagatgcgcttctacgcgactgaaatcattctaggtctggagcacatgcataatcgatttgtggtttaccgggatcttaaaccagccaacatccttttggatgaacacggacatgcccggatatctgacctgggtttggcttgtgacttcagcaagaagaaaccccacgcctcagtgggcactcacgggtacatggcgcccgaggtgctgcagaaagggactgcctacgactctagcgccgactggttcagcttaggctgcatgctattcaaactgctccggggtcacagtccatttcgccagcataagactaaggacaaacacgagatcgaccgtatgaccctgaccgtgaacgttgagctccccgatacattctctcctgagctgaaaagtctgctggagggacttctacaacgcgacgtgtcgaagcgcctcggatgccatggaggaggatcccaggaagtaaaagaacactcctttttcaagggggtggactggcagcatgtgtacctccagaagtatcctccaccattgattccacctagaggagaggtcaatgcagcggacgccttcgatatcggtagtttcgacgaggaggatactaagggcattaagctactggattgtgatcaggagctgtataagaactttcccttagtgatctctgagaggtggcagcaggaggtcactgagactgtgtacgaagctgttaacgcggacacagacaaaattgaggcacgaaaaagagcaaagaataaacaactggggcacgaagaagattacgcccttggtaaggactgcataatgcacgggtacatgctaaaacttggtaacccgtttttaactcagtggcagcggcgctatttttatctcttcccaaatcggctagaatggagaggggagggcgagagtcgccaaaatttgctgactatggaacaaatactgagcgtagaagagacccaaataaaggataaaaaatgcattttgtttcggatcaagggaggaaaacaatttgtgctgcagtgtgagtcggatcccgagtttgtccagtggaaaaaggaactgaatgagaccttcaaggaggctcaacggttgctgcgacgcgctcctaagtttttgaataagccacgcagtgggacggttgagctgcccaagccaagcttgtgccacagaaattcgaatggtctatag

SEQ ID NO: 107646 - DNA, 1164 bp, synthetic construct
  misc_feature 1..1164: note = Description of Artificial Sequence: Synthetic coding sequence
  source 1..1164: mol_type = other DNA
atggcagacctcgaagctgtactggcagatgtgtcttatctgatggccatggaaaaatctaaagcgactccagctgcgcgcgcgtctaagaggatcgtgctccccgaaccctcaatcaggagcgtcatgcagaagtatctggccgagagaaatgagatcacatttgacaaaatctttaatcaaaaaattggctttctcctgttcaaagacttttgcctgaatgagattaacgaggccgtgccccaggtgaagttctacgaagagatcaaagagtacgagaaactggataacgaggaggaccgactatgccgatctaggcagatctacgacgcttacataatgaaagaattactttcctgcagtcatccattcagcaaacaggcagtcgagcatgtccaaagtcatctgagcaaaaaacaagtcacaagcactctgtttcagccctatatcgaggaaatatgcgagagtctcagaggcgatatattccagaagttcatggagtccgacaagtttactaggttttgccagtggaagaatgtcgaacttaatatccacttgacgatgaacgagttcagcgtccacaggattataggccgcggagggttcggcgaagtgtacgggtgtcgaaaggctgacaccggcaagatgtatgccatgaagtgcttggataagaagcgcattaaaatgaagcagggggaaacgttggctctgaacgaacggataatgttgagcctggtgagcaccggcgattgcccctttattgtgtgcatgacttatgcattccatacccccgacaagctttgcttcatcctggaccttatgaatgggggggaccttcactaccatctgtctcaacatggggttttctcagaaaaggaaatgagattttacgccactgaaatcatactgggcttggaacatatgcataacaggttcgtagtatatcgggaccttaaacctgctaacatcctgcttgatgaacacggacatgctaggatctccgacctcgggcttgcctgcgacttctccaagaaaaaacctcacgccagcgtgggcactcacggatatatggcaccggaggtgctgcagaaaggaacggcctacgattcttctgccgactggttctcactgggctgtatgctcttcaagctgttgagaggctag

SEQ ID NO: 107647 - DNA, 1434 bp, synthetic construct
  misc_feature 1..1434: note = Description of Artificial Sequence: Synthetic coding sequence
  source 1..1434: mol_type = other DNA
atgggcgcgggagtgctcgtgttgggcgccagtgaaccaggaaacctgagctcagcagcccccttaccagatggagccgccactgccgcacggttattggtgcccgcttctccccctgccagtctcctgccgccagccagcgaaagtcccgagccgttgagtcagcaatggacagccggcatgggtttactcatggccttaattgtgctcctgattgtggctggtaatgtcctcgtgatcgtggcgatagcgaagactccaagactacagactctgacaaaccttttcataatgagtctggcatctgccgatctggttatgggtttgctagtggtgccattcggagcgacaatagtcgtttggggccggtgggagtatggatcatttttttgcgagctgtggacgtctgtggacgtgctttgcgtcactgctagtatagagacactttgcgttattgctctcgaccgatacttggctattacctctccattccgctaccaatcccttttgaccagggcacgggcaaggggcctcgtatgtaccgtgtgggccatttctgctttggtgtccttcctgcccatcctcatgcactggtggcgcgccgaatctgacgaggcaaggaggtgctataacgatcccaaatgttgcgattttgttactaatagagcatacgccatcgcgagttccgtagtatccttttatgtgcctttgtgtattatggcatttgtgtatcttagagtttttagagaagcacagaaacaggtcaagaagatagactcctgcgagcgacgatttctgggcggccctgctagacctccgtctcccagcccttcgccagtccccgcgcccgcccctccgcctggaccgcccagacccgccgctgccgccgcaactgccccactggccaacggtagagccggaaaaagaagacccagccgactcgtggctctgcgcgaacagaaagcactgaagactctgggtattattatgggtgtgttcaccctgtgctggttgccattcttccttgcaaacgtagttaaggcattccaccgggaactcgtccccgatcgactgtttgttttcttcaactggttgggctatgccaactctgctttcaatcccattatctactgccgatcccccgatttccggaaagccttccaggggcttctgtgctgcgcccgcagggccgccagaaggagacacgcaacgcacggagatagacccagagcttctggatgcctagctagaccaggtcctccaccttcgccaggcgctgctagcgacgatgacgatgatgatgtagtgggagccacccctccagctcgcctgctggaaccatgggctggatgtaacggtggcgccgccgcagacagcgacagtagtctggacgagccatgtcgccccggctttgcctccgaatcaaaagtatag

SEQ ID NO: 107648 - DNA, 1242 bp, synthetic construct
  misc_feature 1..1242: note = Description of Artificial Sequence: Synthetic coding sequence
  source 1..1242: mol_type = other DNA
atggggcagcctggcaatggtagcgcttttctcttggctcccaacggaagccacgctccggatcacgacgtgactcaagagcgagacgaggtttgggttgtaggcatgggaattgttatgagcctgatcgtgctcgccatcgtcttcggcaacgtgcttgtgattaccgctatcgctaaattcgagagattacaaactgtgacaaactactttataacctctttggcttgtgcagatcttgtgatggggctggctgttgtgccctttggggccgcccacatcctgatgaagatgtggacattcgggaatttctggtgcgaattctggacttctattgatgtgttgtgcgtgacagcctccattgagacactgtgtgtaattgctgtagaccgatattttgccatcacgtctcctttcaagtaccagtcgctgctcaccaagaataaagcgcgggtaatcatacttatggtgtggattgtcagcggtttgacctcctttcttccaatccaaatgcattggtatcgggcaacccaccaggaggccataaattgctacgctaatgagacctgttgtgatttcttcaccaaccaggcttatgccattgctagcagtattgtaagtttttacgttccactggtgatcatggtgtttgtctattctagggtgtttcaggaggccaaacgacagttgcagaaaatcgacaagagcgagggcagatttcacgtacagaatttgtcgcaggtggagcaggatggccgaacgggccatggactccggcgctcgtcaaagttttgcctgaaggaacataaagctttgaagactctcggtattatcatgggaacgttcacactgtgctggcttccctttttcatcgtgaatatcgtccatgtcatccaagataatctcattcgaaaagaagtatacatcctgctgaactggatcggatatgtgaacagcgggttcaatcccttaatctactgtagaagcccagacttccgaattgctttccaagagctgttgtgtctacgacgatccagcctgaaggcttacggcaatggatattcctctaacggaaataccggagagcagtctggatatcacgtcgagcaagagaaagaaaacaagcttttatgcgaggatctccccggtactgaagacttcgtgggacaccaaggaactgtgccttctgacaacatcgattcccagggcaggaactgcagcacaaatgactccctgctgtag

SEQ ID NO: 107649 - DNA, 1227 bp, synthetic construct
  misc_feature 1..1227: note = Description of Artificial Sequence: Synthetic coding sequence
  source 1..1227: mol_type = other DNA
atggccccgtggcctcacgagaattccagtctggccccttggcccgaccttcccacgctggcacctaatactgcaaatacgagcggattaccaggtgtcccatgggaggccgccttagctggagcgttgctagcccttgcagtgctggcgaccgtggggggcaatttactggtgatagtggctatcgcatggacaccacgcttacagactatgacaaatgtctttgtcaccagtttagccgccgccgatctggttatgggtttgctagtagtgcctcctgctgctacactggccctgaccggccactggcccctgggggccacgggctgcgaactttggacatctgtggatgtgctgtgtgttaccgcctccatcgagacgctatgcgcactggccgttgaccggtatctggctgttacgaatcccttgcggtatggcgccttagttacgaaaagatgcgcccgtacggccgtggttttggtgtgggttgtgtccgctgccgtctcctttgcccctatcatgtcccagtggtggcgggtgggtgccgacgccgaggcacagcgttgtcattcaaaccctcgctgctgtgcgtttgccagcaatatgccctatgtgttgctaagctcttctgtctctttctacttgcctctcctagtaatgctttttgtgtacgcccgagtttttgtggtggctacacgacaacttaggctactgcgcggcgaactgggacggttccctcccgaagaatcacccccggcccctagtcgttctctcgcacccgctccggtgggcacctgcgctccccccgagggcgttccagcctgcggtcgccgccctgcgcgcctccttcctctcagggagcaccgcgcactgtgcacattaggtttaatcatgggaacttttactctctgctggttgcctttctttctcgccaatgtgttgagggccctgggaggcccatcactggtgcccggcccagcctttctcgccttgaattggcttggatacgcaaatagcgcctttaatccccttatttactgcaggtctcctgatttccggtccgcttttcgccggttgctgtgccgttgtggcagaaggctcccccctgaaccgtgtgccgcagctcgtccagccttatttccgtcaggggtcccagcagccagatcttcgccagcacagccacgcctgtgtcaacgcttagacggtgcttcatggggcgtgagttag

SEQ ID NO: 107650 - DNA, 1044 bp, synthetic construct
  misc_feature 1..1044: note = Description of Artificial Sequence: Synthetic coding sequence
  source 1..1044: mol_type = other DNA
atggctgctggaaccgccgtgggcgcgtgggtgcttgtcctgagtctgtggggtgccgtggttggagcacagaacatcactgcgagaatcggagaacctctggtgttgaagtgtaaaggcgcccctaagaaaccccctcagcgactggaatggaaactcaacactggcagaacggaggcatggaaggttctatccccccagggtggcggcccgtgggactcagtagctcgggtcctgccaaacggctccctgttccttcctgccgtgggcatacaggacgaaggaatcttccgctgccaggctatgaaccggaacgggaaggagacaaagtctaactatcgtgtacgggtctatcagatacctgggaagcctgaaattgtagattctgcatctgagcttactgccggcgtccccaataaggttggcacatgcgtttctgaagggtcctatcctgcgggaacactcagctggcacttggacggtaaacccctcgtgccaaacgaaaaaggagttagcgtgaaagagcagacccggaggcatcctgagaccgggctctttaccctccagtcagagctgatggtgactcctgcccggggcggtgacccaaggcccactttttcgtgttcattctctcccggactgcctagacacagggcgttacgcaccgcacccatccaaccccgggtgtgggagccagtgcccctagaagaagtacagttggttgtcgagcccgagggaggagcggtggcccctggaggcaccgtgacgcttacctgtgaagtccctgcccaaccgagccctcagattcactggatgaaggatggcgtgccgttgccacttccaccaagtcctgtgctgatcctaccagaaatcggcccacaggatcagggtacctattcctgtgtcgcgactcattcctcacatgggccacaagagagtcgagcagtgagcattagcattattgagccaggggaagaagggccaacagcgggagaggggttcgacaaggtgagggaagcagaagatagccctcagcacatgtag

SEQ ID NO: 107651 - DNA, 702 bp, synthetic construct
  misc_feature 1..702: note = Description of Artificial Sequence: Synthetic coding sequence
  source 1..702: mol_type = other DNA
atggccgccggcaccgccgtgggtgcctgggtactagtgcttagcctatggggcgcagtggtaggggcccagaacatcactgcaagaatcggcgaacccctcgtgcttaagtgcaagggtgccccaaagaagcccccccagcgactcgaatggaagttaaatactggtcgtacggaagcctggaaggtattaagtccgcaaggggggggtccttgggactccgtggctagggtgcttccaaatggaagcctgtttctgcccgctgtcggtatccaggatgaaggaatctttcgctgtcaggcaatgaacaggaatggtaaggaaacaaagagtaattaccgagtgagagtgtaccagatccctggaaagcccgaaatagtcgatagtgcttcggagctcacggccggcgtgcctaacaaagtcgtggaggagtcacgaaggtcacgaaaacggccttgcgagcaggaggtggggacctgtgtgagcgaaggaagttatcccgcagggactctctcatggcacttggacggcaagcctcttgtgcctaatgagaaaggcgtttctgtgaaggagcagactcggcgccaccccgaaacaggactgtttactctccagtcagaacttatggtgacacccgcccgcggaggcgacccaaggccaactttttcatgtagttttagccctggactgcctaggcattag

SEQ ID NO: 107652 - DNA, 402 bp, synthetic construct
  misc_feature 1..402: note = Description of Artificial Sequence: Synthetic coding sequence
  source 1..402: mol_type = other DNA
atgaaagacggagtccccttgcccctgcccccatccccagtgctgatccttccggaaattggaccccaggatcaaggtacttattcttgcgtagcgacacacagttcccacggtccacaagagtcccgtgccgtcagcatcagcatcatcgagcctggcgaggagggccccaccgctggttcagtgggtggttctgggctgggtaccctcgctctagccttagggatcctggggggtctcgggacggccgcgcttctgatcggggtgattctgtggcagcggagacagcgtagaggggaagagcggaaagcccctgagaatcaagaggaggaagaagaaagggctgagctgaatcagagcgaggagccggaggcaggggaatccagcactggcggcccatag

SEQ ID NO: 107653 - DNA, 366 bp, synthetic construct
  misc_feature 1..366: note = Description of Artificial Sequence: Synthetic coding sequence
  source 1..366: mol_type = other DNA
atggctgcaggaacagctgtaggcgcatgggtgctggtgctgagcctttggggcgccgttgtgggagctcagaatatcactgcccgcataggcgaacccctggtgctcaagtgtaaaggggctccgaaaaaacccccacagcgccttgagtggaaactcaatacaggaagaactgaagcatggaaggtgctgagtcctcagggaggcggcccatgggattccgtcgctagggttctgccaaatggaagcctgttcctgcccgcggtgggcattcaagatgagggaatctttcgctgtcaggccatgaataggaatggcaaggaaaccaaatcaaactggtggtggtctcaaaaggttgagcagtag

SEQ ID NO: 107654 - DNA, 1029 bp, synthetic construct
  misc_feature 1..1029: note = Description of Artificial Sequence: Synthetic coding sequence
  source 1..1029: mol_type = other DNA
atggcagcgggtactgccgtgggcgcatgggtgcttgtcctttccttgtggggcgccgtggtgggggctcagaacataactgcaaggataggcgagccactggtgctgaaatgtaaaggcgccccgaagaagccaccccaacgattagagtggaagctgggagggggaccttgggatagcgtggcgagggtgttgccaaatgggtccctgtttctgccagctgttggcattcaggacgagggaatctttcgatgtcaagccatgaaccggaacggtaaagaaactaaatcaaactatcgcgtgcgagtttaccagatcccagggaagcccgaaatagttgacagcgctagcgagctgaccgccggagtgcctaataaggttgggacttgtgtgtctgagggcagttatccagccgggaccctgagctggcacttggacggcaagcctctggtaccaaatgagaaaggagtatccgtaaaggaacagacccgccgacaccctgagacaggtttgtttaccttacagtccgaactgatggtaaccccagctaggggcggagaccctagacccaccttcagttgctccttttcaccagggttgcctagacatagggctctccgaacagccccgatccagcctcgcgtctgggaaccagtgccccttgaggaggtacaattggttgtcgagcccgagggcggagcagtggccccagggggcaccgtgaccctgacttgtgaggtacccgctcagccctcaccccagatacactggatgaaggatgtttcggatttagaacgcggggctggccgcactagacgcgggggtgctaactgccggctctgcgggaggataagagcaggcaactcgagcccggggcctggagatcccggtagacccggcgatagccgacccgcccactgggggcacttggtagcaaaggccgcaactccaaggaggggcgaagagggcccccggaaacccggcggccgggggggcgcatgccgtactgaaagtgtggggggcacttag

SEQ ID NO: 107655 - DNA, 885 bp, synthetic construct
  misc_feature 1..885: note = Description of Artificial Sequence: Synthetic coding sequence
  source 1..885: mol_type = other DNA
atgaacagaaacggaaaggagactaagtccaattaccgcgtccgggtatatcagatcccaggaaaacctgagatcgtcgattcagcgtcggagctgaccgcgggagtcccaaacaaagtaggaacctgcgtttcagaaggctcataccccgccggtacactgagctggcatttggacggcaagcctctggtccccaatgagaaaggggtaagtgtgaaagaacaaactaggcgacaccctgagactggccttttcaccctacagagcgaactgatggtgacccccgcacgaggaggggatcctaggccaacatttagctgttctttctccccaggactgccccggcatcgcgccctgcgtaccgccccaattcagccaagggtgtgggagcctgtacccctggaagaggtccagctggtcgttgaacctgaagggggagctgtggcacctggcggtacagtcacacttacatgtgaggtgccagcccaaccaagcccgcagattcattggatgaaagacggagtaccattgcctctcccaccatccccagtgcttatccttcctgagattggcccacaggatcaagggacctatagctgtgtggccactcattcaagccatgggccccaggagagcagggctgtatcaatcagcataatcgggtcggttgggggcagcggccttggcaccctagctttggccttagggattctcggagggctcggcacagctgccttgctcattggggttatcctgtggcagaggcgacagcggcgcggagaggagcgcaaagctcccgagaatcaagaagaggaggaggagcgtgctgagctcaaccagtcagaagaaccggaggctggagaatcaagtaccggcggaccttag

SEQ ID NO: 107656 - DNA, 1308 bp, synthetic construct
  misc_feature 1..1308: note = Description of Artificial Sequence: Synthetic coding sequence
  source 1..1308: mol_type = other DNA
atgggggcaggcgaacgggtgcaggcccccccgagagctgaggctaccgctggccggggtgctgatagagcccggacgttggagggcagcaggatggcagctgggacagccgtcggcgcctgggtgctcgttttaagcctttggggggctgtcgtcggggcccagaatatcaccgcccgcattggtgagccactggtgcttaagtgtaaaggcgcccccaagaagcccccccagaggctggagtggaagctaaatacaggacgaactgaagcttggaaggtgctgtcccctcaggggggagggccatgggactctgttgccagggtgctgcctaatggttctctgtttcttcctgccgtggggattcaggacgaaggcatctttagatgccaggcaatgaaccgcaacggaaaggagacaaagtctaactatcgcgtgagggtgtatcaaattcctgggaaacctgaaattgtggatagcgctagcgagctgaccgctggcgtgccaaataaggtggggacttgtgtgagtgaaggctcatacccagcgggaaccttgagttggcatctggacgggaagccccttgtccctaatgaaaagggtgtctcagttaaggagcaaactcgcaggcatcctgaaacggggctttttactttgcagtcagagctgatggtaactcctgctcgcggtggtgaccctcgtcctaccttcagctgtagtttctctcctggcctgcccaggcatcgagctctcagaaccgccccgattcaaccacgcgtgtgggaacctgtgcccctggaggaggtgcagcttgtggttgagcccgagggcggagctgtggccccaggcgggaccgtgacactcacatgtgaagttcccgcgcagcctagcccccagatccattggatgaaggacggcgtacccctcccacttcccccctcccccgtcttgatccttcctgagattggacctcaagaccaaggtacttatagttgtgttgctactcattcttcacacgggcctcaggagtcacgagcagtctcgatttcaatcatcgaacccggcgaggagggcccgaccgcgggatcagtaggtgggtctggtctgggcacactggccttggccctcggcattctgggaggtctaggcacggctgcgctgctgattggggtaatcttatggcaaaggcgccagcgacgtggagaggagcggaaggcccctgaaaatcaggaggaagaagaggagagagcagaacttaaccagtcagaggaaccggaagcaggggaaagtagcactggggggccttag

SEQ ID NO: 107657 - DNA, 1215 bp, synthetic construct
  misc_feature 1..1215: note = Description of Artificial Sequence: Synthetic coding sequence
  source 1..1215: mol_type = other DNA
atggccgccggaaccgccgtcggcgcttgggtcctggttttgagcctctggggagccgtggttggtgcccagaacatcacagcacggatcggcgagccccttgttcttaaatgcaaaggcgccccaaagaaacctccacagcgcctagagtggaagctgaatacaggcaggaccgaggcttggaaggtcctgtccccgcagggcgggggaccgtgggactcagtcgcaagggtgctgcccaacggatcactgttcttgcccgcggtgggcatacaagacgagggcatctttcgctgccaggccatgaaccgcaatggcaaggaaaccaagtcaaattaccgcgtacgggtctatcagatccctggtaagccagaaatcgtggactccgcaagtgaactaacagccggcgttccgaataaagtcggtacttgcgttagcgaaggctcctatcctgcggggaccctgagttggcacctcgacggtaaaccattagtcccgaacgaaaaaggcgtatcagtaaaagagcaaaccagaagacaccccgagacaggtctatttaccctacagagcgaactcatggtgacacccgcgagaggcggcgaccctcgaccaacattctcctgctcttttagtccagggctgcctaggcatcgtgccctgcggacagctcccattcagcctcgcgtctgggagccagtgccccttgaggaagtgcagttggttgtggaacccgaggggggcgccgtcgccccaggtggtactgtgaccttgacctgcgaggtcccagctcagccctccccgcaaatacattggatgaaagacggggtgcctctgcctttgcccccttccccagtccttattctgccagagattgggcctcaggatcagggcacatatagttgtgtcgctacccactctagccacggccctcaggagtcaagagcagtgtcaatttccatcatcgagcccggagaggaggggccaactgccggcagtgttggtggctcgggtttggggacgctggcacttgcactcggcatcctggggggactggggactgcggctcttctgatcggtgtaatcctgtggcagcgacgacagcgccgcggggaagagcggaaagctcccgagaaccaagaagaagaggaggaacgggccgagctgaatcaatcggaggagccagaagccggggagagctctactggggggccctag

SEQ ID NO: 107658 - DNA, 1044 bp, synthetic construct
  misc_feature 1..1044: note = Description of Artificial Sequence: Synthetic coding sequence
  source 1..1044: mol_type = other DNA
atggccgccggcactgccgtcggcgcctgggtcttggtactgtccctgtggggagctgttgtcggggctcagaacattacagcgcgtattggggaaccactggttctgaagtgcaagggagcccctaagaagcccccacaaagactcgaatggaagctgaataccggcaggacggaggcttggaaggttctgtccccccagggcggcggcccatgggattctgtggccagagtgctcccaaacggctctttgttcttacctgccgtgggtatacaggacgagggcatcttccgttgccaggccatgaacaggaatggcaaggagacaaagtcaaactatcgcgttagggtgtatcagattcccggcaagccggaaatcgttgactccgcatccgagcttacagccggtgtcccaaacaaggtaggcacctgcgtctctgaaggctcatatcccgccggcactctaagctggcaccttgatggcaaacctctggtgcccaacgagaagggggtgtctgtgaaagagcagacgaggcgtcatccggagactggcctgttcacacttcaatccgaactcatggtgacaccggccaggggcggggatccccgccccacgttcagctgctccttctcgccgggcctgcctaggcatcgcgccctaaggacagctcctatccagccacgcgtgtgggagcctgtaccactggaagaagtccagctggtagtcgagcccgagggcggcgccgtcgcccctgggggcaccgtcaccctgacatgcgaagtgcccgcgcagccatctcctcagatccactggatgaaagacggtgtgccattgcctctcccgccctctccggtgttgatcctgcccgaaatagggccacaagaccaagggacatacagctgcgtggcgacccactcctcgcacggcccacaggagtctcgcgcagtgtccatttcaattattgagccaggtgaggagggaccgaccgccggggaagggttcgataaagtgcgtgaagctgaagatagccctcagcacatgtag

SEQ ID NO: 107659 - DNA, 1029 bp, synthetic construct
  misc_feature 1..1029: note = Description of Artificial Sequence: Synthetic coding sequence
  source 1..1029: mol_type = other DNA
atggctgcagggaccgccgttggagcctgggtgcttgtcttgtcactctggggagcagtcgtgggggcacagaatatcaccgcccgaatcggggaaccactcgtcctgaaatgtaagggggcacccaaaaaacccccacaacgactcgaatggaaactgggtggcggaccatgggactcagtggccagagtcctgcctaatggatcactcttcctgccagccgtcggcatccaggatgaaggcatcttccgatgccaagccatgaacaggaacggaaaggagaccaagtccaactatcgcgttcgcgtctaccagattcccgggaaaccagaaatcgtagactcagcttccgagcttacagcaggagtccccaacaaagttgggacgtgcgttagtgaaggctcttacccagcagggaccctgagttggcatctggacggcaagccactggtaccgaacgaaaaaggggtgtctgtgaaggagcagactcggcgccacccggagaccgggctctttactcttcagtccgagctcatggtgacgcctgccagaggaggcgatccacggcctaccttcagctgcagtttttcccctggactccctcgacatcgtgcactgcggacagcgcccattcaaccacgagtatgggagccggttcctctggaagaagttcaactcgtcgtagagcccgagggaggagctgttgcccctggcggcactgtgacactaacgtgtgaagtgcccgcacagccaagtccacagattcattggatgaaggatgtcagcgatctggaacgaggcgctggccgcaccaggcggggcggcgccaactgcagattgtgcggacgaatacgggccggcaacagcagtcctggacctggcgatcccgggaggcctggtgattcccgcccggcgcattggggtcacctggttgcaaaggcggccacccctagacgcggcgaggaggggcctaggaagcccggtggtcgcggcggtgcatgtaggacagagtccgtgggtggcacctag

SEQ ID NO: 107660 - DNA, 1029 bp, synthetic construct
  misc_feature 1..1029: note = Description of Artificial Sequence: Synthetic coding sequence
  source 1..1029: mol_type = other DNA
atggccgctgggactgccgtgggggcctgggtgttggtactgagcctctggggtgccgtggttggagcccagaacataacagcgaggataggtgaaccattggtactaaaatgcaaaggagcccccaaaaaaccacctcaacggctggaatggaagcttggtgggggaccctgggattccgtagccagagttctgccgaatgggtccctgttcttacccgccgtcggtattcaggacgagggtatattccgctgtcaggcaatgaatcgcaatgggaaagagacaaaatccaattaccgagtgcgggtgtatcaaatcccaggcaaaccggagattgtcgactccgccagcgagcttacagccggcgtgcctaacaaggtgggaacatgtgtttcagagggctcttatcccgccgggactctgtcctggcacctggacggaaagccccttgttcccaatgaaaagggagtgagcgtcaaagagcaaacccgtcggcacccagagaccggcttatttacacttcagagcgaactaatggttactcctgctcggggtggggaccctcgccccaccttcagttgtagctttagtccaggattgccgcgacaccgagctctgcggactgcccctattcagccgcgggtctgggaaccagtgcccctcgaagaggtccagcttgttgtagagcccgagggcggggccgtcgctccgggcggaacggttacgctaacatgcgaagtgcccgctcagccctctccacagatccactggatgaaggatgtgtctgacctcgagcgcggtgctggcagaacaaggcgaggcggcgcaaattgccggctttgtgggaggatcagggccggtaattccagtcctggaccaggcgatcctggtcgacccggagactcaagaccagcccactggggccatttagtggccaaagccgccacacctcgtcgtggcgaagagggtcccagaaagcccgggggaagggggggagcatgtcgcacagaaagcgtgggaggcacatag

SEQ ID NO: 107661 - DNA, 702 bp, synthetic construct
  misc_feature 1..702: note = Description of Artificial Sequence: Synthetic coding sequence
  source 1..702: mol_type = other DNA
atggctgcaggtacagcggtgggagcttgggtgctggttctgagcttgtggggagctgtggtcggtgctcaaaacataacggctcgcataggagaacccctggtactcaaatgcaagggcgctccaaagaaaccccctcagagacttgagtggaaacttaatacaggaagaacggaggcctggaaagtcctctccccacagggaggcggcccttgggactccgtggcccgcgttctgccaaactctagtctttttctacctgctgtggggatccaggacgaaggcatcttcagatgtcaagcaatgaatagaaacggcaaagaaacgaaatccaactacagggtacgggtttatcagattccgggcaagccagagatcgtggactccgcgtctgaactgacagcaggagtgcccaacaaagtggtggaagagagccggcgttcgcggaagcgcccttgcgaacaggaggtcggcacctgcgtgtctgaaggctcatatcccgccggtaccttaagctggcacctggatggtaagcctctggtgccgaatgagaagggcgtcagtgtgaaggagcagactcgaaggcaccccgagaccggactttttactctccaatcagagttgatggtgacacccgcacgcggtggggaccctcggccaacgttttcctgctccttttcacccgggctcccacgtcattag

SEQ ID NO: 107662 - DNA, 705 bp, synthetic construct
  misc_feature 1..705: note = Description of Artificial Sequence: Synthetic coding sequence
  source 1..705: mol_type = other DNA
atggccgcagggactgctgtaggggcttgggttttggttttgagcctctggggagcagtggtgggggctcagaatatcactgcgaggatcggagagcctctcgtgttgaaatgcaaaggcgctcctaagaagcccccgcaaagacttgagtggaaactcaataccgggaggaccgaggcctggaaggtgctgagcccccagggcggagggccatgggattctgttgcaagagtgctgccgaacggcagcctgttcttgccagcagtaggaattcaagatgaaggaatttttagatgtcaggcaatgaatcggaacgggaaggagaccaaaagtaactaccggtcactccgtacctttaccattactgcatctgactggatttttccgccatccgaaatacccgggaagcctgaaattgttgatagtgcctccgagctgacagctggggtgcccaacaaggttggcacatgtgtatccgaaggaagctacccagcgggaaccctgagttggcacctggatgggaagcctttagtgcctaatgaaaagggagtgtccgtcaaggagcagactcgccgccatccagagacaggtctgttcactctgcaatcggaactgatggtaactcctgcacggggaggcgatcctaggcccaccttctcatgctcatttagccctgggttaccacgccaccgagctctgcgctag

SEQ ID NO: 107663 - DNA, 705 bp, synthetic construct
  misc_feature 1..705: note = Description of Artificial Sequence: Synthetic coding sequence
  source 1..705: mol_type = other DNA
atggccgctgggacggccgtgggggcttgggtgctcgtcctgtcactttggggtgccgttgtcggggcacagaatattacagccaggataggcgagccgctggtgctgaagtgcaagggcgccccgaagaagccaccccaacgtctggagtggaagctgaatacaggaagaacggaagcctggaaggtcctgtccccacagggcggggggccctgggacagcgtggcccgcgttttacccaacgggtcactgtttctgccagcagtaggaatccaagatgaaggcattttcagatgtcaggctatgaataggaatggaaaggagacaaagagcaactaccgcagcctgcgaaccttcaccatcacggcctccgactggattttccccccctccgaaatccccggaaaaccagagatcgtcgattccgcatctgagcttaccgcaggcgttccaaataaggtggggacttgcgtatctgaaggatcgtacccggcaggaactctgtcctggcacctcgacggtaagcccctcgtgcctaatgaaaagggagtttcagtgaaggaacaaaccaggagacatcccgaaactggcttgttcaccctgcagtctgaactcatggtgactcccgcacgaggaggcgaccccaggccgacgttctcctgttccttctcacctggactccctagacatagagctctccggtag

SEQ ID NO: 107664 - DNA, 702 bp, synthetic construct
  misc_feature 1..702: note = Description of Artificial Sequence: Synthetic coding sequence
  source 1..702: mol_type = other DNA
atggctgctgggaccgcggtgggggcttgggtcttagtcctatctctgtggggcgccgtcgtcggtgcacagaacatcacggcacgcataggcgagcctctggtcctgaaatgtaagggggctcccaagaaacctccccagcgcctggagtggaagcttaacacaggaagaaccgaggcctggaaagtactttctccgcagggggggggtccatgggattctgtcgctagggtgctaccgaatggctctctgttcctgcctgccgtagggatccaggatgagggcattttccgctgccaggccatgaatagaaatgggaaagagactaaaagcaactatagggtcagggtgtaccagatacctgggaagcctgaaatcgtggactctgcctcagagctcacggctggagtccctaataaagtcgtggaggagtccaggcgcagcagaaaaagaccctgcgagcaggaggtgggcacctgcgtctcggaaggtagttatccagcggggactctctcttggcatctggatggtaagccactagtaccaaatgagaaaggggtcagcgtcaaggagcagacacggagacatcccgagacagggctcttcacattacaaagtgaattaatggttaccccggctcgcggaggtgacccaagacccacattctcctgttcattctctcctgggctgccccgccactag

SEQ ID NO: 107665 - DNA, 1215 bp, synthetic construct
  misc_feature 1..1215: note = Description of Artificial Sequence: Synthetic coding sequence
  source 1..1215: mol_type = other DNA
atggccgctggcaccgcagtcggcgcctgggtactggtactcagcctatggggcgcggtggtgggcgcccagaacataacagctagaataggtgaacccctggtcctgaagtgcaaaggcgcaccgaagaaaccacctcagaggctggaatggaaactgaataccggcaggaccgaggcctggaaagtgctaagtcctcagggcggaggaccctgggatagtgtcgctcgcgtcctcccgaattcatcgctctttctgcctgctgtcggaatacaggacgaagggatttttaggtgtcaggccatgaaccgcaacggtaaagaaaccaaatctaactacagggtccgcgtctatcagatacctgggaaacccgaaatcgtagattccgcgtctgaattaaccgccggagtgcccaacaaggtaggtacgtgcgtgtcagagggatcctaccctgcagggacactctcttggcacctcgatggcaagccactggtgccaaacgaaaaaggcgttagtgttaaagagcagactcgcaggcaccccgaaacagggctgtttaccctacagtcagagctgatggtgacccccgcccgcgggggagatcctaggccgacgtttagttgctccttctcccccggcctccccaggcaccgcgccctaagaacggctcctatccagcctcgcgtgtgggagccagttcctctcgaggaagtgcagctcgttgtggaaccagagggcggggcagtggcgcccggcggcacggtgacactgacctgcgaggtgcccgcccagcctagtcctcaaatccactggatgaaagacggagtgccgttaccactgccaccctctcccgtgctgattctgcccgagatcggtccccaggatcaagggacttattcctgtgtagccacccactctagtcatggaccccaggagagccgagctgtgtccatctctatcatcgaacctggcgaggaagggccgaccgccgggtctgtcggcggcagcgggcttggtactttggcactggcccttggcattctcggcggactggggacagccgcgctgctgatcggggttattctatggcaaagacggcaacgacggggagaggagcgtaaagccccagaaaaccaggaggaggaggaggagagagccgagctcaatcagtctgaagaacccgaagccggagagtcctccactggcggcccatag

SEQ ID NO: 107666 - DNA, 1044 bp, synthetic construct
  misc_feature 1..1044: note = Description of Artificial Sequence: Synthetic coding sequence
  source 1..1044: mol_type = other DNA
atggccgccggcaccgctgtaggtgcttgggtcttagtactcagcctgtggggagcggtggtgggcgcacaaaatattactgcccggataggagagcctctcgtccttaaatgcaaaggcgccccaaagaagccaccacagcgactggaatggaagcttaatacagggagaacagaggcctggaaggtcctgagcccacaaggtggtggaccctgggactccgtggcccgcgttctcccgaacgggtcgttgtttctcccagccgtgggtattcaggatgaaggcatatttcgctgccaagctatgaaccgtaatgggaaagaaacaaagtcgaattacagggtaagagtgtaccaaatccccggaaagccggagatagttgatagcgcctcagaactgactgctggggtgcctaataaggtagggacttgcgtgagcgagggctcttatcctgcagggactctgtcttggcaccttgatgggaagccattagtcccaaacgagaaaggagtctcagtaaaggagcagactaggaggcaccctgaaacaggactctttaccctacagtctgaattaatggtgaccccggctcggggaggagaccctcggcctactttctcatgttcgttttctcccggtcttcccagacatcgtgcattgcgcactgcaccgattcaaccaagggtgtgggagccagttcctcttgaggaagtccagctggtcgtcgagcccgagggcggggctgtcgctcccgggggcactgtcacgctgacttgtgaggtgccagcccagcctagcccccagatacactggatgaaagatggcgtccctctcccgcttccccccagccccgttctgattctgccggaaatcggcccacaggaccaaggaacctatagctgcgtcgcgacgcattctagccacgggcctcaggagtcgcgagcagtaagtatttcgatcattgaacccggcgaggaagggccaacagccggcgagggcttcgataaagtacgcgaggcagaggactcaccccagcacatgtag

SEQ ID NO: 107667 - DNA, 702 bp, synthetic construct
  misc_feature 1..702: note = Description of Artificial Sequence: Synthetic coding sequence
  source 1..702: mol_type = other DNA
atggcggccggcaccgcagtgggtgcgtgggtgctggtgcttagcttgtggggagccgtcgtgggcgcccagaacataacagctcgcatcggcgaacccctggtgcttaagtgcaagggtgctcccaagaagccgccccaacggctagagtggaagctgaatacgggccggacggaagcgtggaaagtactctctccacaaggtggggggccttgggacagcgtggccagagtgctacccaacggctcactgtttctgcccgccgtgggtatccaagatgagggcattttccgatgccaagcaatgaatagaaacgggaaggaaactaaaagtaattaccgcgttcgtgtctatcaaattcctgggaagcctgagatcgtggacagcgcatcagaactgacagcaggagtgccaaacaaggtggtagaggagtcaaggcggtctagaaagagaccatgcgagcaggaagtgggcacctgcgtgtccgaggggtcctatcctgctggcaccctttcttggcacctcgatggaaagcccctggtgccgaatgaaaagggcgttagcgtgaaagagcagacacgtaggcaccccgagacaggtctattcaccctgcagtctgagcttatggttactcccgccagaggtggggacccaaggcccactttctcttgttccttttcccccggcttaccccgccattag

SEQ ID NO: 107668 - DNA, 1215 bp, synthetic construct
  misc_feature 1..1215: note = Description of Artificial Sequence: Synthetic coding sequence
  source 1..1215: mol_type = other DNA
atggccgccggcacagctgtgggcgcctgggtactagtcctatctctttggggtgcagttgtgggagcacagaacattacggccagaatcggagagccccttgtcttgaagtgtaagggggcgccgaagaagccccctcagaggctcgagtggaaactcaatacaggccgtactgaggcctggaaagtcctgtctccccaggggggagggccttgggactccgtagcacgcgtactaccaaatggatccttgtttttaccagcagtaggtatacaggacgagggaatcttccggtgtcaggccatgaatcgcaacgggaaggagacaaagtccaattacagagtaagggtgtatcagatcccagggaagccagagatcgtcgactcagcttccgagctgaccgcgggggttccaaataaggtggggacctgcgtgtcagagggcagttaccctgcaggtactttgagctggcacctggatggtaagcccctcgttcccaatgaaaaaggggttagcgtgaaagagcagactagacgccaccccgaaaccggcctgttcacactacagtctgagctgatggtgaccccggcccgcggaggcgatccccgtccaaccttcagctgttcatttagcccaggattgcctaggcacagagccttacgaacagccccaatccagcctcgcgtctgggagcccgtccccctggaggaggtgcagcttgtcgtggagcctgagggcggcgccgtcgccccaggcggaaccgtgactctcacctgtgaggtccctgcccagccctctccccagatacattggatgaaagatggagtgccactccctctgccccccagtcctgttttaattctaccagaaataggaccccaggaccagggcacttattcatgcgtggcaacccactcaagtcacggtcctcaggaaagtcgcgccgtgtctatctctatcattgagcctggggaggagggacccacggctggatctgtggggggtagcggcctggggaccctcgctctggccctgggaatcctgggaggtctcggtacggcagccctgctgataggtgtgatcctctggcagagacgtcagcgccgcggtgaagagcgaaaggcgcctgaaaaccaggaggaggaggaggaaagggccgaattgaatcagtctgaagaaccggaagctggcgaatcatcaactggcgggccttag

SEQ ID NO: 107669 - DNA, 705 bp, synthetic construct
  misc_feature 1..705: note = Description of Artificial Sequence: Synthetic coding sequence
  source 1..705: mol_type = other DNA
atggctgccggcactgcagtgggggcgtgggtacttgtgttaagcctatggggcgccgtggtgggggcgcagaatattaccgctagaattggagagccattagtgcttaaatgtaagggggcccccaaaaaaccccctcagcgccttgagtggaaactcaataccggccggaccgaagcctggaaagttttatccccacaaggaggcggaccttgggacagtgtggccagggtccttccaaacagctcactgtttctccccgctgtcggcatccaggatgagggcatttttcggtgccaggcaatgaatcgtaatggaaaagaaaccaaatcgaactatcggtccctgagaactttcaccattacagcatctgactggattttcccaccgtctgagatccccgggaagccagaaattgtggattcagccagtgagctaaccgcaggagtcccaaataaggtcggaacttgtgtatccgaaggatcataccctgctggcaccctgtcgtggcatttagatggaaaacctctggttcctaatgaaaagggggtgtcggtcaaagagcaaactcgcaggcaccccgaaacagggctatttacactgcagtcagagctgatggtgacccccgcccgggggggtgaccctcgacctacattctcctgcagcttctcaccagggcttccccggcacagggctctgagatag

SEQ ID NO: 107670 - DNA, 1092 bp, synthetic construct
  misc_feature 1..1092: note = Description of Artificial Sequence: Synthetic coding sequence
  source 1..1092: mol_type = other DNA
atggctgctgggaccgcagtgggcgcttgggtgctcgtgcttagcctctggggggcagttgttggcgcacagaatatcacagcccgcataggagagcctcttgtgctcaagtgtaagggcgcacctaagaaacccccacagcggctggagtggaagcttaacactggcagaactgaggcctggaaggtcctctcacctcagggcgggggtccctgggacagcgttgcgcgcgtgctgcccaatggcagcctgttcctgccagcagtgggcatacaggatgaaggcattttcagatgtcaggctatgaatagaaacggcaaggaaactaaatcgaattatagggtcagggtctaccaaatccccggcaaaccagagatcgtcgactccgcttctgaattgactgctggtgttcccaataaagtggttgaagaaagtcgtaggtctcgcaaaaggccctgcgagcaggaggtggggacatgcgtgagtgagggttcctacccggccggaaccttgtcctggcacctagatggcaagccactcgtccctaatgaaaaaggtgtttccgtgaaagagcagactcgtcgacacccagaaaccggccttttcactctccagtccgagttaatggtgacccctgcacggggcggcgacccccggccgaccttctcctgctcctttagcccagggcttcctcggcatagagctttgcgcaccgcccctattcagccacgggtgtgggagcctgttccattggaggaagtgcaactcgttgttgaaccagagggtggcgccgtcgcgcctggcggtaccgtgacgttaacatgtgaagtgcccgcccagccaagcccccagatccactggatgaaagacggcgtaccattgcctttacctccaagtcccgtacttatcttaccagaaattggcccacaggatcaggggacttactcgtgcgttgccactcactctagtcacgggccccaagagtcccgagctgtgtccatcagcataatcgagccaggcgaagaggggcccacggccggagagggcttcgacaaagttcgcgaggctgaggactcccctcagcacatgtag

SEQ ID NO: 107671 - DNA, 1029 bp, synthetic construct
  misc_feature 1..1029: note = Description of Artificial Sequence: Synthetic coding sequence
  source 1..1029: mol_type = other DNA
atggccgccgggaccgcagtgggcgcatgggttctagtactgagcctgtggggagccgtagttggcgcacaaaacattacagcacgcatcggtgagccgttagttctcaagtgtaaaggcgccccaaagaaaccacctcagaggttagagtggaagctgggtggcgggccttgggactcagtggctagagtcttgcctaacggtagcctgtttctgcccgccgtaggcattcaggatgagggcattttccgttgccaggctatgaaccgtaatggaaaggagaccaaaagcaactatagggtgagggtctaccaaattcctggaaagccagaaattgtcgatagcgcatctgaactgaccgccggggtgcctaacaaggtcggcacgtgcgtttcggaaggtagttaccccgcaggcaccctctcttggcatctagatggcaagccactggtgccaaacgagaagggggtatcggtcaaagaacaaacaagacgccatcctgaaacagggctcttcacgctgcagagcgagctcatggtgacccccgccagaggtggagatcctcgccctaccttcagttgttctttttctcctggccttccaagacaccgtgctctcaggaccgccccaattcagccgcgcgtttgggagccagtgccgctggaggaggtccagctcgtggtggagcccgaggggggcgctgtggcccccgggggaacagtcactctgacttgcgaagttccagctcagccaagccctcagatccattggatgaaagacgtgagcgatctagaaagaggcgccggacggacacgtcgcgggggggctaattgtagactctgcggtcgcatcagggctggcaattccagtcccgggcctggagaccctggaagaccaggtgacagccgccctgcacattgggggcacctcgtcgccaaggcagctactcctcgaaggggggaagagggcccccgtaaacctggcggccgaggcggggcatgccgcacagagtccgtcggtggcacttag

SEQ ID NO: 107672 - DNA, 702 bp, synthetic construct
  misc_feature 1..702: note = Description of Artificial Sequence: Synthetic coding sequence
  source 1..702: mol_type = other DNA
atggccgcaggtaccgccgtcggagcatgggtcttagtgctcagcctctggggggcggtcgtgggtgctcagaacattaccgctagaatcggggaacctctggtgctaaagtgcaagggggcacctaagaaacccccccaacggcttgagtggaaattgaatacggggcgaaccgaggcttggaaggtgttaagcccccagggcgggggcccttgggacagcgtcgctcgcgtactccctaacgggagtctgtttctgcccgccgtgggtattcaggacgaggggatcttccgatgccaggctatgaacaggaacgggaaggagacaaagtcaaattaccgagtgagagtgtaccagatacccgggaagcccgagatcgtagacagtgcctcagagttaacggccggagtgccaaacaaggtggttgaggaatctcgaaggagtcggaaacggccctgcgagcaagaggtgggaacgtgtgtgagcgagggatcttatcctgccggcacactttcctggcacctggacgggaagccactcgtgccaaatgagaagggagtgtctgtcaaagaacagactagacgacatccagagaccggacttttcaccctgcagagcgagttgatggttacacctgccagggggggtgacccaagaccaaccttctcttgttcattctcaccagggctgccgcgccactag

SEQ ID NO: 107673 - DNA, 1029 bp, synthetic construct
  misc_feature 1..1029: note = Description of Artificial Sequence: Synthetic coding sequence
  source 1..1029: mol_type = other DNA
atggctgcaggcacagctgtaggagcatgggtgttggtcttgtccctgtggggagcagtcgtgggtgcccaaaatatcaccgctagaatcggcgagcctctggttctaaagtgcaagggagcgcctaagaagccgcctcagcgtttggagtggaaactgggaggtggcccctgggactccgtcgcacgggtgttacctaacggaagcctctttctcccggccgtcggcatccaggacgaagggattttcagatgccaggcgatgaaccgtaatgggaaggaaacaaaatctaactacagggttagggtctaccagatacccggcaagcctgaaattgttgattccgcatccgagctgaccgccggcgtgccaaacaaagtggggacgtgtgtctcagagggaagctatcctgctgggaccctgtcctggcatctggacggaaagcccctcgtccccaacgagaagggtgtgtctgtaaaggaacagacccggcggcacccagagaccggcctttttacactccaatccgaattgatggtcactccagcaagaggtggcgacccaaggcccactttcagctgttctttctccccaggcctgcctaggcatcgcgcactgcgcacagcacccatccaacctagagtttgggaacccgtgcctttagaagaagttcaactggtggtagaacctgagggcggtgctgttgcccccggcggcaccgttacattgacatgcgaggtgccagcccagccgtctccccagatccattggatgaaagacgtgtccgatttggaacggggggcgggcagaactaggcgcggtggagcaaattgccgcctctgcggccgtatccgtgccggaaactcctctcctggccctggagatcccggacggcctggggattccaggcctgctcattggggtcatttggtggctaaggctgccaccccgcggcgcggagaagagggcccccgcaaacccggcggccgcgggggcgcctgtcgaacagaaagcgtcggtggaacctag

SEQ ID NO: 107674 - DNA, 705 bp, synthetic construct
  misc_feature 1..705: note = Description of Artificial Sequence: Synthetic coding sequence
  source 1..705: mol_type = other DNA
atggctgcgggcaccgccgtcggcgcctgggtgctggtactatccctgtggggcgccgtagtcggcgcccagaatataaccgctcgaataggcgagcccctcgttctaaaatgcaagggtgcacctaaaaagcctccacagcgtctggagtggaaattgaatactggccgtactgaagcatggaaggtcctctcccctcaaggaggtggaccctgggacagcgtcgcgagagtcctgccaaatggttctctctttctgcctgccgtgggaatccaagacgagggaattttccgctgtcaagctatgaatcgaaacggcaaagagacaaaaagcaactacaggtcgctgcgcactttcactattaccgccagcgattggatatttccgccctcagagatacctggaaagcctgagatcgtagactcagcaagcgagcttacggctggcgtcccaaataaagtaggtacttgcgtcagcgaggggtcttacccagcaggcactctctcgtggcacctggatgggaaaccgctggtcccgaacgagaaaggcgtgtccgtgaaggagcagacacggcggcatcctgagaccggattattcaccctgcaatcagagttaatggtcactccagccagggggggcgatcctcggccaaccttctcatgctcatttagtcctggcctcccgagacaccgggctttaagatag

SEQ ID NO: 107675 - DNA, 1215 bp, synthetic construct
  misc_feature 1..1215: note = Description of Artificial Sequence: Synthetic coding sequence
  source 1..1215: mol_type = other DNA
atggccgccggaacagcagtgggggcctgggtactcgtcctttcactgtggggggccgtggtgggtgcccagaatataacagctagaatcggtgaaccactcgttttaaagtgcaaaggcgcgccgaagaaacccccacaacggctggagtggaagctgaacactggacgcaccgaggcctggaaggtgctctcccctcagggtgggggtccatgggacagcgtggccagagttcttcctaatggaagccttttcctacccgccgttggtatccaggatgaggggatatttcgttgccaagcaatgaataggaacgggaaagagaccaagagtaattatcgggtgcgagtgtaccagattcccgggaagccggaaatcgtggactccgctagtgagctcacagccggcgtccccaataaggtcggcacctgcgtgagcgaaggttcctatcccgccggaaccctgagttggcacctcgacgggaagccgctcgtgcccaatgagaagggcgtgtccgtgaaagagcagacacgaaggcatcctgaaacagggctctttactttacaatccgagctgatggtgacccctgcacgcgggggagatccccggcctacattttcatgctctttcagccccggcctgcccagacacagagcactaagaaccgcgccgatacagcctcgggtgtgggaacccgtccccctagaggaggttcagcttgttgttgaacctgaaggtggcgcggttgcaccgggagggacagtgaccttgacttgtgaggttcccgctcagccttcgcctcagatccactggatgaaagatggtgtgccacttcctcttcccccctcccccgtgctcatcctgcccgagattggtccccaggatcagggcacctactcatgtgtcgctacacactctagtcacggcccccaggaaagtagggctgtgtctatcagcatcatcgaacctggggaggaggggcctacggccggcagcgtgggtggaagcggtcttggtacattagccttggctttggggattctgggcggcctggggaccgcagctctgctgatcggcgtgatcctttggcaacgccgtcagagacgcggggaggagcgcaaggcccccgaaaaccaggaggaggaggaggagcgagccgagctaaaccaaagcgaagagccagaggccggcgagagctcaacaggagggccctag

SEQ ID NO: 107676 - DNA, 1029 bp, synthetic construct
  misc_feature 1..1029: note = Description of Artificial Sequence: Synthetic coding sequence
  source 1..1029: mol_type = other DNA
atggccgctggaacagccgttggagcttgggtcctggttctgtccctttggggagccgtggttggagctcagaacattacagcaagaataggagaaccactggtgctgaaatgcaagggagcccccaagaagcctccacagcggcttgagtggaaacttggcggcggtccctgggatagtgttgctagggttctcccaaatagcagcctgtttcttcccgctgtggggatacaggatgaggggatctttcgttgccaagccatgaataggaatggcaaggaaacaaagtcaaactaccgggttcgggtgtatcagatccccggcaagccagaaatcgtggattccgcatcagaactcacagcgggagtccccaataaggtaggaacttgtgtttcggaaggttcatatccagccggtacattaagttggcacctagatgggaagccattagtgcctaatgagaagggtgtgagcgtcaaggaacagacgaggcggcaccctgaaactggactattcaccctacagtcagaactgatggtgacaccggccaggggtggagaccccaggcctacattttcttgctctttttcgcccgggctccctagacatagggcattgcgcactgctccaatccagcctcgagtttgggagccggtcccacttgaggaagtgcagctagtggtagagcccgaggggggagctgttgcgccgggcggtacggtgactctcacgtgtgaggttcctgctcagcctagcccacagatccattggatgaaggacgtctcggacttggagcgaggcgcaggtagaacgcgccggggcggagccaactgtcgcttgtgtggacggattagggccggaaattcatctcccggacccggcgaccccggtcgccctggggatagccgtcccgcgcattggggacatctagtggcaaaggctgcgactccccgccggggagaagaaggacctcggaaacccggaggcagaggaggagcatgcaggacagaatccgtgggcggcacctag

SEQ ID NO: 107677 - DNA, 1044 bp, synthetic construct
  misc_feature 1..1044: note = Description of Artificial Sequence: Synthetic coding sequence
  source 1..1044: mol_type = other DNA
atggccgccggaacggctgtaggagcttgggtgcttgttctttctttatggggcgcagtggtaggcgcccagaatattactgctagaataggtgagcctttggtcttgaagtgtaagggcgcccccaagaagcctccccaacgcctggagtggaagctgaatactggcagaacagaagcttggaaagtgctttccccccagggaggtggtccttgggatagcgttgccagagtgctccccaatggatccttatttttgcctgctgtgggaatccaggatgaaggtatctttaggtgtcaggcgatgaaccgtaatggcaaagagaccaagtcaaactaccgcgtaagggtttaccagatccccggaaagcctgaaatcgtcgattccgcctcagaacttaccgccggagtgcctaacaaggtaggcacctgcgtcagcgagggctcatatcccgccgggactctgtcttggcacctggatggaaagccccttgttccaaatgaaaaaggggtgagtgtcaaagaacagacccgacggcaccctgagacagggctcttcactctccaatccgagctgatggtcacaccggcccgcggaggggaccctaggccaacattcagctgttctttcagccccggactgcctaggcatagagcgctccggaccgccccaatccagcctcgcgtgtgggagcccgtgcccctggaggaagtgcaactggtcgtcgagcctgagggcggcgctgtagccccaggtggaaccgtgactcttacatgtgaggtgcccgcacagccgtcgccacagattcattggatgaaggatggcgtgccactcccattgcctccaagcccagttcttattttacctgagataggtccacaggaccagggcacttactcctgtgtcgctacacatagcagtcacggaccacaggaatctcgtgctgttagtatatcgatcatcgagccaggcgaagagggccccactgctggggaggggtttgataaggttcgagaggccgaagattctcctcagcacatgtag

SEQ ID NO: 107678 - DNA, 705 bp, synthetic construct
  misc_feature 1..705: note = Description of Artificial Sequence: Synthetic coding sequence
  source 1..705: mol_type = other DNA
atggcagcaggcaccgcggtaggggcatgggtgcttgtcctttccttgtggggggctgtggttggagcgcagaatattaccgcgcgcattggcgagccactggtgctgaaatgtaagggcgcccctaagaaacctcctcagcggttggaatggaaactgaacactgggcggaccgaggcctggaaagtgctctctccacagggcggagggccctgggactccgtggctcgcgtcttacccaatgggagtcttttcttgcccgctgtgggcatccaggatgaggggattttccgctgtcaggcgatgaatcgtaacggtaaggagaccaaatctaattataggtcccttcggactttcaccattactgcttcagattggatatttccaccttctgagatccctggaaaacccgagattgtcgactcggcttccgagctgaccgctggcgttcctaacaaagtgggaacatgtgttagcgagggatcatacccagccggcacactctcctggcatctggacgggaaacctcttgttcctaacgagaagggagtatcggtgaaagagcagactcggagacatccagaaacaggcctgtttactttgcagtccgaactcatggtgacgcccgctcggggtggcgatcccagacccacattctcttgctccttttcaccgggactgccacgccaccgtgcattgcgatag

SEQ ID NO: 107679 - DNA, 1215 bp, synthetic construct
  misc_feature 1..1215: note = Description of Artificial Sequence: Synthetic coding sequence
  source 1..1215: mol_type = other DNA
atggccgcggggacggctgtcggggcatgggttttggtcctcagcctgtggggggcagtagtgggcgcccagaacatcaccgcccgcatcggcgagccgttggtcctgaagtgcaagggagccccaaagaagccaccacagcggttggaatggaaactgaacacaggcaggaccgaggcctggaaagtgttaagtccacagggggggggaccctgggactctgtggccagagtgctgcccaacggttctttgttcctcccggcagttgggattcaggatgagggcatcttccggtgccaagccatgaatagaaatggcaaagaaaccaagagtaactaccgcgttcgtgtttaccagattccgggtaagcccgagatagtagattccgcaagtgagttaacagccggagtacctaacaaggtgggcacatgcgtctccgaaggaagctatccagcaggcaccttaagttggcatctcgacggcaaacctctggtccctaatgagaagggcgtttccgtcaaagagcagaccaggcgtcatcccgaaacggggctgtttacattgcagagtgagctcatggtcacccctgcacgcggtggagacccacggcctacgttctcgtgcagtttcagtcccgggttgcctaggcatagggccctgcggaccgcacctattcagccaagggtctgggagcctgtacctctcgaggaggtgcagttagtcgtggagcccgaaggcggggcagtcgctcccgggggaacggtcactttaacttgtgaagtgccagcacagccttccccacagatccattggatgaaggacggcgtcccattgccactgccaccgtcacctgtgctaattctgcctgaaatcggacctcaggatcaaggcacttacagttgtgtggccacacactcgtcccacgggccccaggagtcccgcgccgtctccatctccattattgaaccaggcgaagagggccccaccgccggaagcgtcgggggctctggcctcggtacactggcattagctctaggcatccttggcggtctgggcactgctgcgctgttgattggtgtcatcctgtggcagcggaggcagagacgaggagaggagagaaaagctcctgagaatcaggaagaggaagaggagcgggccgagctgaatcagagcgaggaacccgaggccggggaatctagcaccgggggaccttag

SEQ ID NO: 107680 - DNA, 1044 bp, synthetic construct
  misc_feature 1..1044: note = Description of Artificial Sequence: Synthetic coding sequence
  source 1..1044: mol_type = other DNA
atggccgctgggactgctgtcggtgcctgggtgttggtgctctcattatggggggcagtcgtcggcgcgcagaacatcaccgcaaggatcggggaaccactggtgctgaaatgtaagggcgcaccgaagaagccaccacagcgcctcgaatggaagctgaataccggacgcaccgaagcttggaaggtgttgtcaccgcaaggcggcggtccctgggactcagttgcaagagtcctcccgaatagctccttgtttctacctgcagtgggaatccaggatgagggcatcttccgctgtcaggctatgaacagaaacggtaaagagactaaaagcaactaccgggtgagggtgtatcagatccccggaaaaccggagatcgtggattcagcctcagagctgactgccggggtgcccaacaaggttggaacctgtgtgtcagagggaagttaccccgccggaaccctctcttggcatcttgacgggaaacctctagtgcctaatgaaaagggcgtgagcgttaaggagcagacccgtcgccatccagagaccgggttgttcacactccagtctgagcttatggtaaccccagcccgagggggcgatccacgtcctaccttctcgtgctcattcagccctggcctccctagacaccgtgccctgaggactgcacccatccagccacgtgtgtgggagccggtccctctagaagaggtacagctggtcgtggaacccgagggcggggctgtggcccccggcggtaccgttactttgacatgcgaggtgcccgcacagccttccccacagattcactggatgaaagacggcgtgcctttaccgctaccgcccagccctgtcttgatactgcccgaaatcggtccccaggatcagggtacctactcatgcgtcgccacccatagtagtcacggcccacaggagtcgcgtgccgtttctatcagcattattgagccaggcgaggagggccctactgctggtgaggggttcgataaggtacgggaagctgaagacagtcctcagcacatgtag

SEQ ID NO: 107681 - DNA, 702 bp, synthetic construct
  misc_feature 1..702: note = Description of Artificial Sequence: Synthetic coding sequence
  source 1..702: mol_type = other DNA
atggctgcaggcaccgcagtgggagcgtgggtgctggtcctgtccttgtggggggctgtcgtcggcgcgcagaatattactgcacggatcggcgagcctctggtcttaaaatgtaagggggccccaaaaaagcctccccagcgcctcgaatggaagctcaacacaggcagaaccgaggcctggaaggtgttgtcccctcaggggggaggtccatgggattcagtagcccgtgttttgcccaacggcagcctctttctgcctgccgtgggcatccaggatgagggaattttccggtgccaggcaatgaacaggaacgggaaggaaacaaaatcaaattatcgggttcgggtgtatcagattccgggaaagccagaaatcgtggactctgcatcagaactgaccgcgggcgtccctaataaggtggttgaggagagtagacgcagtcgcaaacgtccttgcgaacaggaagtagggacatgtgttagtgaagggtcttaccccgcagggaccctgtcctggcacctcgatggcaaaccattggtgccaaatgaaaagggcgttagtgtcaaggaacagacacgacgacatccagagacgggtctgtttacactccaatccgaactgatggtcaccccagctcggggcggagatccaaggcccactttctcttgtagcttttccccaggactgccacgacattag

SEQ ID NO: 107682 - DNA, 1044 bp, synthetic construct
  misc_feature 1..1044: note = Description of Artificial Sequence: Synthetic coding sequence
  source 1..1044: mol_type = other DNA
atggctgccggcactgctgtgggcgcctgggtgctggtgctgtccctgtggggagccgtggtgggcgcccagaacattacggcacgtatcggggaaccactcgtcctcaaatgtaagggagcgcccaaaaagcctcctcaacggctcgagtggaaactgaacaccggacgcactgaagcctggaaggtactatctccccagggcgggggtccttgggattcagtggcacgggtcttaccgaacggcagcctgttcctgccagctgtgggcattcaggatgaggggatctttcgctgtcaggctatgaataggaacggtaaggaaaccaagagtaactatcgtgtcagagtgtatcagatcccaggtaagccagaaattgttgactcagcatccgaattgaccgccggggtacccaacaaagtcgggacctgtgttagcgagggatcataccctgccgggaccctttcttggcaccttgatggaaagcctctcgtgcccaatgaaaagggcgtgtctgttaaggagcagacacggagacatcccgaaactgggctgtttactctgcaaagtgaattgatggtgacacccgccaggggaggagacccaaggccgacgtttagctgctcattcagccctggactgcctagacacagggccttgcggaccgctcccatccagccccgcgtctgggaacccgttcctcttgaagaggttcagctggtggtggagccagaggggggggctgttgccccaggaggcacagtcacactcacgtgcgaggttcctgcacagccatccccccaaattcactggatgaaggatggcgttcctctccctctcccaccttcccccgtgttaatccttcctgagatcgggccacaggaccagggcacatactcttgcgtcgctacccactcctcacatggcccccaggaatcccgtgccgttagcattagcataatcgagcctggggaggaaggtcctactgcaggggaaggatttgataaggtacgggaggcagaagacagtccccagcacatgtag

SEQ ID NO: 107683 - DNA, 705 bp, synthetic construct
  misc_feature 1..705: note = Description of Artificial Sequence: Synthetic coding sequence
  source 1..705: mol_type = other DNA
atggcagctggtacggctgtgggcgcatgggtgctggtgttgtctctatggggcgccgttgttggcgcccagaatatcacagcgcgaattggagaaccattggtgctgaagtgcaaaggcgctccaaagaaacccccacaaaggctcgaatggaaactcaacacaggccggaccgaggcctggaaggtactttcacctcaggggggtggaccctgggactccgtggcacgagtgttacccaacggtagtctctttctgccggcagtgggcatccaggatgagggcatatttagatgccaggctatgaatcgcaatgggaaggaaacgaaatcgaactatcggagtctgcgcacctttacgatcactgcaagtgactggatattccccccctcagagattcccggaaaacctgaaatcgtcgatagcgcatcggagttgacagccggggtgcccaataaggtgggcacatgtgttagcgaggggagctacccagcaggaaccctgtcttggcatctcgatggtaagcctctcgttccgaacgagaaaggcgtatcagtgaaggaacaaactcgacgccatcccgaaactggcttgtttactctacagtcagaacttatggtgactcctgctcgggggggcgatccaaggccgactttctcttgtagctttagccccggactacctaggcatcgggccctcaggtag

SEQ ID NO: 107684 - DNA, 1215 bp, synthetic construct
  misc_feature 1..1215: note = Description of Artificial Sequence: Synthetic coding sequence
  source 1..1215: mol_type = other DNA
atggctgccgggactgccgtgggggcatgggtgctggtgctgagtctctggggcgctgtcgtaggggcccaaaatattacagcaagaattggggaacccctggtgctgaagtgcaagggtgccccaaaaaaacccccacagcggcttgagtggaaactgaatactggcagaacagaagcctggaaagtcctctcaccacaggggggcggcccctgggacagtgtggcaagggtactgccgaacggcagcctctttctgcccgccgtgggcatccaggacgagggaatattccggtgccaagcaatgaaccgcaatggaaaggaaaccaagtcgaactaccgggttcgcgtgtatcagatcccaggcaagccagaaatcgtggactcggcctccgaactgactgctggagtaccgaataaggtcggtacttgtgtaagtgagggaagctatcccgcaggaactctgtcttggcacttggacggcaagccccttgttccaaacgagaaaggcgtcagtgtgaaagagcagacccgacgccaccctgagactggcctattcacactgcaatccgaactgatggtcacccctgcccgcggcggcgaccctcgccccaccttttcttgttctttcagtccaggcctgcctaggcatagggctctccgtaccgctcctatacagcctagagtgtgggagccggtcccattggaagaggtgcagctcgtggttgaacctgagggcggagccgtcgcacctggcggcactgtgacactgacctgtgaggtgcctgcccaaccgagcccccaaattcattggatgaaggacggggttccactcccactgcccccatcgcccgtacttatccttcccgaaattggcccacaggaccagggaacttacagctgcgttgcaacacactcctctcatggaccccaggaaagtcgagcagtgtctataagtattatcgagcctggagaagaaggccctaccgctgggtccgtgggtggtagcggcttggggactcttgccctggccctggggattctgggcggcctgggcaccgccgccctgctgatcggggtaatcctgtggcagcggcgccagcgccgcggggaggaacgtaaagcaccagagaaccaagaagaggaagaagaaagggccgagcttaaccagagcgaggagcccgaggcgggcgagtcttccactggaggtccttag

SEQ ID NO: 107685 - DNA, 387 bp, synthetic construct
  misc_feature 1..387: note = Description of Artificial Sequence: Synthetic coding sequence
  source 1..387: mol_type = other DNA
atggctgctggcactgccgtcggtgcgtgggtgcttgtgctgtccctttggggggctgtcgtcggcgcccagaatataaccgcacggatcggggaacccctggttcttaagtgtaaaggggcaccaaaaaagcccccacagagactggaatggaagctcaacacagggcggacggaggcctggaaagtgctgagcccacagggaggaggtccatgggatagtgttgcacgggtgctccccaatgggagcctgtttctgcctgcagtgggtatccaggatgagggcatctttcggtgccaggcgatgaacagaaatggaaaagagacaaagtctaattatagggtgcgcgtgtaccagttcgagaacctccacaattatagcttgtag

SEQ ID NO: 107686 - DNA, 462 bp, synthetic construct
  misc_feature 1..462: note = Description of Artificial Sequence: Synthetic coding sequence
  source 1..462: mol_type = other DNA
atggcagccggaacggccgtcggagcatgggtcttggtgctgagcctgtggggagccgtggtgggggcacagaatatcaccgcaaggatcggagaacctctggtcctgaaatgcaaaggggcccctaagaaacctccgcaacgcctggaatggaaactgaacaccggcagaaccgaagcctggaaagtcctgtccccccaggggggcgggccttgggactctgtcgcacgagttctgccaaacggcagcctgttcctgccagcagtaggaatccaagatgagggcatcctcggcggccttggaacagcagccctgctgatcggcgtgatactctggcagaggcgtcaaagaaggggcgaggagaggaaggctcctgaaaatcaggaagaagaggaggaacgtgccgagctgaatcagtcggaggaacccgaggcaggggagtcatccacgggcggcccttag

SEQ ID NO: 107687 - DNA, 885 bp, synthetic construct
  misc_feature 1..885: note = Description of Artificial Sequence: Synthetic coding sequence
  source 1..885: mol_type = other DNA
atgaatcgcaacggtaaagaaactaaatcaaactacagggtacgcgtctatcagattcctgggaagcctgagatcgtagactccgcatccgaacttacagctggggtgccaaacaaagtgggcacctgtgtcagtgagggatcctatcctgccggaactctctcatggcatctcgatggcaaaccattagttccaaacgaaaaaggtgtatccgtgaaggagcagactcgaaggcaccccgagacaggcctgtttaccctgcagtctgagctcatggtcactccagcccgggggggggatccacggcccacattcagctgttctttcagtcccggcctaccccgccatcgggccctgagaacagctccaattcagccaagggtatgggaaccagtgccactggaggaggtacagcttgtggtggaaccggagggcggtgcagtcgctcctggaggtacagtaactctgacctgcgaagttcccgcccagccctcaccccaaattcactggatgaaggatggggttcctctccccttgccgccgagcccagtcctaatcctccccgagattgggcctcaggaccagggtacatatagctgtgtggcaacacatagctcacatgggccgcaggaaagccgggcagtttctatcagtattataggatccgtgggcggatctggtctgggcacactggctttagccttgggaatccttggggggctcgggaccgccgctttgctgattggcgtcatcctctggcagcgaaggcaaagaagaggtgaggaacgcaaagcacccgagaaccaagaagaagaagaggagagagccgagcttaaccaatccgaggaaccagaggctggggagagttcgacaggaggcccttag

SEQ ID NO: 107688 - DNA, 885 bp, synthetic construct
  misc_feature 1..885: note = Description of Artificial Sequence: Synthetic coding sequence
  source 1..885: mol_type = other DNA
atgaacagaaacgggaaggagaccaagtccaactatcgcgtgagagtgtaccagatccccggcaaaccagaaatcgtggactctgctagtgagctaacagccggcgtgcccaataaggtcggcacatgcgtgtccgagggaagctatcccgccggcacactttcctggcatctggatgggaaacccctagtgccaaacgaaaaaggcgtgtccgtgaaagagcagacccgacggcatcccgagactggcctctttaccctgcaatctgaactaatggtaacaccagcccgcggcggtgacccaagacctaccttctcttgttcttttagtcccgggctgccaaggcacagagccctgcggaccgcccccattcaaccaagggtttgggaacccgtgcctcttgaggaggtgcagcttgtagtcgaacctgaaggaggtgcggtcgccccggggggaactgtgacacttacctgcgaggttccggcccaaccttcaccccagattcactggatgaaagacggcgtgcctctgccactgcctcctagcccagttctgatcctgccagagataggcccgcaggaccaaggaacatacagctgtgtagctactcattcgtcccatggtccgcaggaatctagagccgtctcaataagtattatcgggtctgtgggggggtccgggctgggcacccttgctctggccctcggtatccttgggggtcttgggacagcggctctcctgatcggagtcatcctctggcaacggcgccagcgaaggggagaagaaaggaaggcccctgaaaatcaggaagaagaagaggaaagagctgaactgaatcaatccgaggaacccgaagccggggaaagcagtactggcggtccctag

SEQ ID NO: 107689 - DNA, 366 bp, synthetic construct
  misc_feature 1..366: note = Description of Artificial Sequence: Synthetic coding sequence
  source 1..366: mol_type = other DNA
atggccgccgggactgctgtgggggcatgggtgctggtgctatccctctggggcgctgtggtgggtgcccagaatattacagcgcgcattggagaaccactagttttgaaatgtaaaggcgcccccaagaaacccccgcagcggctagagtggaagctgaacaccggaagaacagaggcctggaaagtgctgagccctcaggggggcgggccatgggactcggtcgcaagagtcctgccaaatggaagcctgttcctgcccgcagtggggatccaggatgagggcatttttcgttgccaggccatgaacaggaatggtaaggaaaccaagagtaattggtggtggtcgcagaaagtggaacaatag

SEQ ID NO: 107690 - DNA, 1308 bp, synthetic construct
  misc_feature 1..1308: note = Description of Artificial Sequence: Synthetic coding sequence
  source 1..1308: mol_type = other DNA
atgggtgccggagaacgggtgcaagctcccccacgggcggaggctacggctggacgcggggccgacagggctcgtactctggaagggagcaggatggctgccggcaccgctgtgggcgcctgggtgctggtgctttctctttggggagccgtggtgggtgcacagaacataaccgcaaggatcggcgaaccactggttttaaaatgcaagggagccccgaagaaacccccccagaggctggaatggaagctgaataccgggcgcaccgaggcttggaaagttctgtccccccagggaggcggaccctgggactccgtggcaagggtgctgccaaacggctctctgttcctgccagccgtaggcattcaagacgaggggattttcaggtgtcaggcaatgaatcgtaatggaaaggagaccaaaagcaactatcgagtgagggtataccagatcccgggaaaacccgaaattgtcgattccgcttccgagctcacagcgggcgtcccaaacaaagtcgggacatgcgtgagcgaggggtcataccccgccggcacactttcgtggcaccttgatgggaagcccctggtccctaatgagaaaggagtatccgtgaaggagcagacccgcaggcatcctgagacagggctctttactctgcaatccgagctaatggtcactcctgctagggggggcgacccgcgcccaacattctcctgttccttttcccctggactgcctagacacagagccctgagaaccgctccaatccaaccccgagtttgggagccagtcccccttgaggaggttcagctcgtcgtcgagcccgagggcggagcggtggcccccggagggaccgtcacgctcacttgcgaggtacccgcacagccatcaccgcagatccactggatgaaggacggagtccctctccccctccccccttctcccgtgctgatcctgccagaaattggccctcaggaccaaggcacctactcatgcgtggcaacccactcatcacacggcccccaggaatctcgggctgttagtatcagcattattgaacccggagaggaggggcctacagccggctcagtgggaggatctggacttggaaccctcgcactcgcacttggtatcctcggcggtcttggaactgctgccctccttatcggagtgattttatggcagcgccgccaaaggagaggtgaggagagaaaagcccccgagaaccaggaggaggaagaggagagggccgagctgaatcaatccgaggaacccgaagccggggagagttctaccggagggccttag

SEQ ID NO: 107691 - DNA, 1092 bp, synthetic construct
  misc_feature 1..1092: note = Description of Artificial Sequence: Synthetic coding sequence
  source 1..1092: mol_type = other DNA
atggcagccggcaccgccgtaggggcatgggtcttggttctgtctctgtggggcgcagtagtgggcgctcagaatatcaccgcccgcatcggagaacctcttgtccttaagtgtaagggagcccccaaaaaacccccgcaacgtttggaatggaaattgaacaccggacgtaccgaggcctggaaggtgctaagcccccagggtggagggccatgggactcagtcgctcgagtacttccaaatggatcactctttctgcccgccgtcggcattcaggatgaggggatctttcgctgccaagcaatgaacagaaatggcaaagaaacaaagagcaactatagagtgcgggtctaccagattccgggtaaaccagagattgttgacagtgccagcgagttaaccgctggagttcccaataaagtggtcgaagaatctaggcggtccaggaaacgtccatgcgagcaggaggtcggcacctgcgtcagcgagggaagctaccccgccggaactctgtcctggcatctggatggcaagccactcgtccccaacgaaaagggtgtatcagtgaaggagcagacacggcgacatccggagaccgggttatttaccctacagagtgagctgatggttaccccagcccgcggtggcgatccaagacctactttctcgtgctctttcagccctggtctgccccgtcaccgtgccctgcgtactgctccaatccagcctagagtctgggagccagtgccactggaagaagtccagttagtagttgaacccgagggcggggctgtggcgcctggcggaactgtcaccctgacctgcgaagttccggcacagccttcgccccagatccattggatgaaggacggtgtgccactgccattaccaccttctccagtcttgattctgccagaaattgggccccaagatcagggaacttatagctgcgtggctacgcactcaagtcatggaccccaagagtctcgcgccgtgagcatcagcataatagagcctggagaagagggcccaacagccggcgagggatttgataaggtgcgggaagccgaggactccccgcagcatatgtag

SEQ ID NO: 107692 - DNA, 402 bp, synthetic construct
  misc_feature 1..402: note = Description of Artificial Sequence: Synthetic coding sequence
  source 1..402: mol_type = other DNA
atgaaagacggggtaccgctgcctctgcccccatctccggttctcattctcccggaaataggtccgcaggatcagggcacgtatagctgcgtggctacacactcttcccacgggccgcaggagtcccgggcagtgtccatatctatcatcgaaccaggggaggaaggccctacggccggcagtgtggggggctcaggactgggcaccctggctctagcactgggcatcctcggcggattggggacagcagccttgctgatcggtgttatcctgtggcaaaggcggcagcgtaggggagaggaacgtaaggcccctgaaaatcaggaggaggaagaggagcgagctgagcttaaccagagcgaagagccagaagctggagagtccagcactggagggccatag

SEQ ID NO: 107693 - DNA, 387 bp, synthetic construct
  misc_feature 1..387: note = Description of Artificial Sequence: Synthetic coding sequence
  source 1..387: mol_type = other DNA
atggctgctggaaccgctgtcggagcctgggtgctggtgttgagcctatggggggccgttgtgggggctcagaatataacagcacgcatcggggaacccttggtcctgaagtgtaaaggagcccctaagaagcctccacagaggctagagtggaaacttaacactggacggacagaggcgtggaaggtgctgagtcctcagggaggcggaccttgggattcagtggcaagagtgctccctaactcctccttatttttgcccgccgtgggaattcaagatgagggaattttcaggtgccaagccatgaaccgaaatggaaaggagactaagtcgaactatcgcgtgcgagtctaccagtttgagaacctccataattattcgttatag

SEQ ID NO: 107694 - DNA, 462 bp, synthetic construct
  misc_feature 1..462: note = Description of Artificial Sequence: Synthetic coding sequence
  source 1..462: mol_type = other DNA
atggcagccgggaccgcagtgggagcttgggtgctggtgttatccctttggggagcggtcgtgggggcccaaaatatcaccgctagaataggcgaacctctggtcctgaaatgcaagggagctcccaaaaagccgccacagaggctggagtggaaactgaataccggacggaccgaagcatggaaagtcctcagtcctcagggtggcggaccttgggatagcgtggccagagtgctgcctaatggttcattgttcctgcccgccgtgggaattcaggacgaggggatcctgggaggattaggcaccgccgctcttctgatcggcgtgattttatggcaacgcaggcagagacgtggcgaagaacggaaagctcctgagaaccaagaagaagaagaggagcgcgccgaacttaatcagtcagaggaaccggaggcaggagaaagttcaactgggggcccgtag

SEQ ID NO: 107695 - DNA, 1308 bp, synthetic construct
  misc_feature 1..1308: note = Description of Artificial Sequence: Synthetic coding sequence
  source 1..1308: mol_type = other DNA
atgggcgctggtgagagagttcaagctccgccaagagccgaggccaccgccggccgaggggccgatcgtgccagaaccctggagggctcacgcatggccgctggaacggccgtaggagcctgggtactcgtgttatcattgtggggggcggttgtgggtgcccagaatatcacagcccgaataggggagcctctcgtgctaaaatgcaaaggtgcaccgaaaaagccgccacagcggcttgagtggaaacttaataccggcagaacggaggcttggaaagtgctgtcaccccagggggggggaccttgggactccgttgcccgggtgctgcctaatggcagtctattcctccccgcggtaggtattcaggatgagggcatattccggtgccaggccatgaaccgtaacggtaaggagacaaagagtaactatcgagtgagagtttatcaaatcccagggaaacccgaaattgtggatagcgcgtctgagctaaccgcgggcgtcccaaacaaagtggggacgtgtgtttcagagggaagctatcccgcaggaactctcagctggcacttagatggtaaacctcttgtgcccaatgagaagggagtcagtgttaaggagcagactcgtcggcacccagagactggactgttcaccctccagtcagagctgatggtcaccccagcccgtggcggagacccgcgccctactttttcctgctcttttagcccaggccttcctcggcatcgcgctttgaggacagcccctattcaaccccgcgtctgggagcctgtccccttagaagaagtacagctggtcgtcgagccggagggcggcgctgttgcccccggcggaacagtgacgctgacatgtgaggtgcctgcccagcccagtcctcagattcattggatgaaggatggcgttccactgcccctgcccccttcacccgttcttatacttcctgagataggccctcaggatcagggtacctattcttgcgtggccactcattcctcccacggacctcaggaaagtcgggccgtcagcatctctattatagagcctggtgaggagggtccaactgctggatccgtgggcggaagcggcctgggaactctcgccctcgctcttggtattctggggggtcttgggactgcggcccttcttataggggtcatattatggcaaagacggcaacggcggggtgaagagcgcaaggccccagagaaccaagaggaagaggaagagcgcgccgagctcaaccaatctgaggaacctgaagcgggcgagagtagtaccgggggcccatag

SEQ ID NO: 107696 - DNA, 366 bp, synthetic construct
  misc_feature 1..366: note = Description of Artificial Sequence: Synthetic coding sequence
  source 1..366: mol_type = other DNA
atggcagctggtaccgcggttggggcctgggtccttgtgctatccctctggggagctgtggtgggagcgcagaacatcacagcaagaatcggggagcccttggtcctgaagtgtaaaggggcaccgaagaagcctcctcaaagacttgagtggaaactgaacacgggaaggacggaggcgtggaaggtgctctcgcctcagggcggtgggccatgggattccgtggcccgcgtgttacccaatggcagcttgtttctgccagccgtggggatacaggacgaggggatcttccgctgtcaagcgatgaaccgcaacgggaaggaaactaaatcgaactggtggtggtcccaaaaggttgagcaatag

SEQ ID NO: 107697 - DNA, 387 bp, synthetic construct
  misc_feature 1..387: note = Description of Artificial Sequence: Synthetic coding sequence
  source 1..387: mol_type = other DNA
atggccgcaggaactgccgtgggcgcatgggtgctggtgctctccctgtggggagctgtggtcggggctcagaatattacagcacgcattggagagcctctggtgcttaagtgtaagggggcccctaagaaacccccacagaggctagagtggaagctgaacaccggccggaccgaggcctggaaagtcctgagtccccagggtgggggcccctgggacagtgtagcacgggtcctgcccaatggttctctgttcctccctgccgtgggaatacaggatgaggggatattcaggtgccaagccatgaaccggaatgggaaggagacaaaatccaactaccgtgttagagtgtaccagttcgagaacctccacaattacagtctgtag

SEQ ID NO: 107698 - DNA, 885 bp, synthetic construct
  misc_feature 1..885: note = Description of Artificial Sequence: Synthetic coding sequence
  source 1..885: mol_type = other DNA
atgaaccgcaacggtaaagagaccaaaagtaattaccgagtacgtgtgtatcagatccccggcaagccggagatcgtcgactctgctagtgaactcacggccggtgtccccaacaaagttggtacctgcgtatccgaaggaagttaccccgcagggactttaagctggcaccttgatggaaagcccctggtgccaaatgagaaaggagtgtctgtgaaggagcagacacgtcgacacccagaaactgggctgttcacccttcaatcagaactaatggtgacgcccgcaagaggcggtgacccccgtcctaccttctcctgttcattcagtcccggcctgcctaggcatcgggctctaaggacggctcctatccagcccagagtgtgggaacccgtccctctcgaggaggttcagctcgttgtggaaccggagggcggtgccgttgccccagggggcaccgtgacactcacctgtgaggttcccgcccagccaagcccacagatacactggatgaaggatggcgttcccctcccacttccacccagcccggtcctcattttacccgaaatcggccctcaggaccaggggacctattcctgtgtggctacacattcgtcccatggaccacaggaaagccgtgcagtctccatctccatcatcggttccgtcggcggaagtggtctagggacgctagcactggccctgggtattctgggaggcctggggacggccgcactgctaatcggtgtgatcctctggcagcgcaggcagcgtagaggtgaggaaaggaaggcccccgagaaccaggaagaggaggaagaaagggccgagctaaaccagagtgaggaacccgaggcaggtgaaagcagcacaggcggcccatag

SEQ ID NO: 107699 - DNA, 366 bp, synthetic construct
  misc_feature 1..366: note = Description of Artificial Sequence: Synthetic coding sequence
  source 1..366: mol_type = other DNA
atggctgcaggtactgctgtgggagcatgggttctggttcttagcctctggggcgccgttgtcggggcacaaaatatcactgctaggattggagagcctctagtgttgaagtgcaagggtgcacctaaaaagcccccacagcgcctcgaatggaaattgaacacaggtagaacagaggcatggaaagtactgtcaccccagggaggcggaccgtgggattctgtagcacgagtccttcctaacagctccctcttcctcccggccgtgggcatccaagacgagggtatctttcgttgtcaggcaatgaatcgaaacggcaaagagacaaagagtaactggtggtggagtcaaaaagttgaacaatag

SEQ ID NO: 107700 - DNA, 462 bp, synthetic construct
  misc_feature 1..462: note = Description of Artificial Sequence: Synthetic coding sequence
  source 1..462: mol_type = other DNA
atggcggcagggacggccgtgggggcatgggtcctagttctcagcctttggggcgccgtcgtcggcgcccagaacattacagctcgcatcggcgagcctttagtcctgaagtgcaaaggtgctcctaaaaagccgccccagcgactggaatggaagctgaacaccgggcgaacagaggcgtggaaagtgcttagccctcagggggggggtccctgggactcagtagcccgggtgcttccgaatggatctctgttcctccccgctgtggggattcaagacgaaggaatcctcgggggcctgggaacggctgccttactgattggagtaattctgtggcagcgacggcagaggcgtggtgaggagcgcaaagctcccgagaatcaggaagaggaggaagagcgggccgagttgaatcagagcgaagagcccgaggcaggagaaagttcaacaggggggccttag

SEQ ID NO: 107701 - DNA, 1308 bp, synthetic construct
  misc_feature 1..1308: note = Description of Artificial Sequence: Synthetic coding sequence
  source 1..1308: mol_type = other DNA
atgggggctggagagcgcgtccaggcacccccgcgtgcggaagccaccgctggccggggcgccgaccgggcacgtaccctagaagggagcagaatggccgcaggcaccgctgtgggcgcgtgggtactcgtcctgtcactgtggggcgccgtagtcggagcgcaaaacataaccgccagaattggcgaacccctggtgctaaaatgtaaaggggcaccgaagaaacctccgcagcgtctggaatggaagctcaacaccggcaggacggaagcctggaaagtcttgtccccccaggggggaggtccgtgggactctgttgccagggttctgcctaacggttcgctgttcttgccagcggtcggaatccaagacgaggggatttttaggtgtcaggcaatgaataggaatggaaaggaaactaagagtaactacagggtgcgggtctatcagatccccgggaagcccgaaattgtggactccgcctcggaactgaccgccggtgtcccgaataaagtgggaacctgtgtctccgagggtagttatccagcgggcacccttagctggcatctggatgggaagccactggtccccaatgaaaaaggtgtttccgttaaggagcagactcgaaggcacccagagaccggactctttacactgcagagcgagctcatggtcacgcccgcccgcggtggggaccctagacctacattcagttgtagcttttcacctggcctccctcgccacagagccctcagaaccgcacctatacagccgagagtctgggaaccggtccccttagaagaggtgcagttggtggtggagcccgagggcggtgccgttgctcctggcggaactgttaccttgacatgcgaggtaccagcacagccatctccccagatccactggatgaaggacggagtaccactgcccctgcccccttcccctgtactgatcctgccagaaatcggtcctcaggatcagggaacgtattcttgtgtagccacccattcgtcccacggtccacaggaatctcgagcagtatctatcagcataatcgaaccgggcgaagaggggccaacggccggaagcgttgggggatcggggctggggaccctggctctggcgttgggcatcttgggagggctgggcaccgcagcattacttataggcgtgatactgtggcagcggaggcagagacgaggagaggaacggaaggccccagagaaccaggaggaagaagaagaaagagccgagcttaatcagagcgaggagcccgaagccggcgagtcatcaactggcggtccttag

SEQ ID NO: 107702 - DNA, 366 bp, synthetic construct
  misc_feature 1..366: note = Description of Artificial Sequence: Synthetic coding sequence
  source 1..366: mol_type = other DNA
atggctgcgggcactgccgtgggcgcgtgggtgctcgtactgtccctgtggggcgctgttgttggtgcgcagaacattactgcccgcataggcgaacccctggtgttgaagtgcaaaggagcaccaaagaaacctccccagaggctggagtggaaactcaatacaggcaggactgaagcctggaaagtactatccccgcagggcggaggcccctgggatagcgttgctagggttctacccaacggaagcttatttcttcctgctgtcggaatccaggacgagggtatctttaggtgccaggctatgaacaggaatggaaaggagacaaaaagcaattggtggtggtcacagaaggtggaacagtag

SEQ ID NO: 107703 - DNA, 402 bp, synthetic construct
  misc_feature 1..402: note = Description of Artificial Sequence: Synthetic coding sequence
  source 1..402: mol_type = other DNA
atgaaggatggggtccctctcccactgcctcctagtcctgtcttaattcttccagagattggtccccaggatcagggcacctattcgtgtgtagcaactcactcctctcacggcccgcaggagagtagagccgtgagcattagcatcattgagccaggggaggaaggacccactgctgggtccgtgggcggtagtggcttggggaccttggccttggccctgggaatcctcgggggactggggactgccgccctgctcatcggggttattctgtggcagcggagacagaggcgtggagaggaacgtaaagcccccgagaaccaggaagaggaagaggagcgtgccgagttgaatcagagcgaagagccagaagcaggtgagtcttctactggcggaccatag

SEQ ID NO: 107704 - DNA, 885 bp, synthetic construct
  misc_feature 1..885: note = Description of Artificial Sequence: Synthetic coding sequence
  source 1..885: mol_type = other DNA
atgaaccggaacgggaaagagaccaaatcgaactaccgtgtcagagtttaccaaattcctggtaaaccggaaatagtggactctgcctccgaactgactgcgggcgtgccaaataaagtgggcacttgcgttagcgaaggatcctaccctgcaggcactctatcttggcatcttgatggtaagccactggtgcccaatgaaaagggagtgagtgtgaaggaacagacacggcgtcatccagagaccggcctgtttacgttacagtccgaactaatggttactcctgcgaggggaggggacccacggcctaccttcagctgctccttcagtcctggtctgccgcggcatcgcgcattgagaaccgccccaattcaacccagggtttgggaaccggtgcctctcgaagaagttcagctagttgtggagcccgagggcggggcggtagccccaggtgggactgtgactctgacgtgtgaggtgccggcccaaccatctccccagattcactggatgaaggatggcgtgcccttaccgctccctcccagccccgtcctcatcctgccagaaatcgggccccaggaccagggaacatactcatgcgtggccacgcacagcagtcacggtccacaagagtctagagctgtgagcatctccatcataggctcagtcggggggagtggcctgggcacacttgcgcttgcacttggcattctcggggggttgggcaccgctgctctcttgatcggcgtgatcctgtggcagcgccggcagcgaagaggcgaagaacgaaaagcgcctgagaatcaagaagaggaggaggagagggccgaacttaatcagagtgaggaacctgaagccggggagtcaagtacaggtggaccatag

SEQ ID NO: 107705 - DNA, 402 bp, synthetic construct
  misc_feature 1..402: note = Description of Artificial Sequence: Synthetic coding sequence
  source 1..402: mol_type = other DNA
atgaaggacggggttccgttgcctctgccaccttcccccgtgctgatcctgcctgagatcggcccacaggatcagggaacgtacagctgtgtggccactcattcatcccatggccctcaggagagccgggctgtgagtatttccatcatcgaaccaggagaagaaggaccgacagccggaagtgtgggcgggtcagggctgggtaccctcgccctcgctcttggcattttaggagggctgggcacggccgcactgctcattggggtcattctgtggcagcggagacagcggaggggtgaggaaaggaaggccccagagaaccaagaagaggaagaggaacgggcagagctcaaccagagtgaagagcctgaggctggagagagttcaactggcggcccctag

SEQ ID NO: 107706 - DNA, 1092 bp, synthetic construct
  misc_feature 1..1092: note = Description of Artificial Sequence: Synthetic coding sequence
  source 1..1092: mol_type = other DNA
atggctgcgggcacagccgtcggcgcctgggtgttggtcttgtctctgtggggagccgtggtcggggcccagaacatcaccgcacgaattggggagccgctcgtcctaaagtgcaagggggcgcccaagaagccaccgcaaagactggaatggaaattgaacactgggcggactgaggcctggaaagttcttagtcctcaaggtggcggtccatgggactcagtggcaagggtgttaccaaatgggtccctttttcttcctgcagtcggcatccaggacgagggaatcttccgttgccaagctatgaacagaaacggtaaagagaccaagagcaactaccgagttcgggtgtatcagatccccggaaagcctgagattgtggactctgctagcgaacttaccgctggggtgccaaataaggtggtcgaggagagtcggcgctcccgtaaacgaccgtgtgagcaagaagtgggcacctgcgttagtgaaggcagttatcctgcaggaactctaagctggcatcttgacgggaaacccctggtcccgaatgagaaaggcgtgagcgttaaggaacagacccgccggcaccctgagactggtctgtttacactacagtcggagctaatggttacaccagcccgaggaggagatccgcgacccaccttctcttgcagtttttcacccggcctcccaagacatagagccctcagaaccgcgcctatacagccccgggtgtgggaaccagtcccactggaggaagtccagctagtcgtagaaccagaaggcggcgcagtggcaccaggagggaccgtgaccctaacctgcgaggtaccagcccagccctcacctcagattcactggatgaaggacggggtgcctctacctctgccgccctcacccgttttgatcctccctgagataggcccacaggaccaaggaacttactcatgtgtggctacacactcttcccacgggccccaagagtctagagctgtgagcatttcaatcattgagcctggggaggaaggtcccactgccggcgaaggatttgacaaggttagggaggcagaagacagccctcagcatatgtag

SEQ ID NO: 107707 - DNA, 1308 bp, synthetic construct
  misc_feature 1..1308: note = Description of Artificial Sequence: Synthetic coding sequence
  source 1..1308: mol_type = other DNA
atgggggcaggcgaaagagtccaggcacctcctcgtgcagaagcaacagcaggtcgaggggctgaccgcgcccggaccttggaggggtcgcgtatggccgcagggacagctgtgggggcttgggtattggtgctctctctgtggggcgccgtggtcggggcccagaacatcacagcccggattggcgaaccgttggttctgaagtgtaagggcgcacccaaaaagcctcctcagcgcttggaatggaagttgaacactggacggacggaagcctggaaagtactgtccccgcagggaggaggtccatgggacagcgttgccagagtgctacctaactcttccctcttcttgccagctgtgggaatccaggacgaaggcatatttaggtgtcaagcgatgaaccggaacgggaaggaaactaaatctaactaccgagttcgtgtgtaccagataccagggaagcctgagatcgtggacagcgccagtgagctgacagccggcgtcccaaataaggtcggaacgtgcgtgtccgagggaagctacccagccggcacgctcagctggcacctggacgggaagcctctggtaccaaacgagaagggcgttagcgtgaaggagcagacccggcgacatcccgagacaggtctgtttaccctacagagtgagctgatggtcacacctgcacggggaggagaccccaggccaacgttcagctgttccttttcccctggcctaccacgacaccgcgccctgaggacggctcctatacagccgagagtctgggagcctgtgcccctggaggaagtgcagcttgtcgttgaacctgaagggggtgctgtcgctcccggcgggaccgtcacccttacatgcgaggtcccagcacagcctagtccacagattcactggatgaaagacggagtcccgctgcctctgccacctagtccagtccttattctgcccgaaatcggcccacaggatcagggtacttactcctgcgttgcaacgcatagcagtcacggtcctcaagagtcacgggccgtgagtatatctattatagaaccaggagaagaggggcctactgctggaagtgtgggaggtagcggattaggtactttggcgctcgcgctgggaatcctggggggcttgggaacagccgcactcctgattggcgttattctgtggcaacgtcgccagcgacggggtgaggagcggaaggccccagagaaccaggaggaagaagaagagcgcgcagagctgaatcaatcagaagaaccagaggctggtgagagtagtaccggtggtccatag

SEQ ID NO: 107708 - DNA, 387 bp, synthetic construct
  misc_feature 1..387: note = Description of Artificial Sequence: Synthetic coding sequence
  source 1..387: mol_type = other DNA
atggccgccgggactgcagtaggcgcctgggtgctcgtgctctccctgtggggtgctgtggtgggtgctcagaacatcacagccagaataggggagccccttgtgctgaaatgcaaaggtgctcctaaaaaacctccacagagactggagtggaaacttaacaccggtcggaccgaggcctggaaggtcttgagcccacaagggggcggaccttgggattccgtggcacgagtattaccaaacggttctctgttcctccctgcagtcggcatccaggacgaaggtatctttagatgtcaagccatgaaccgcaacggtaaagaaaccaaatcaaattaccgggtgagggtctatcagtttgaaaatctgcataactacagtctctag

SEQ ID NO: 107709 - DNA, 462 bp, synthetic construct
  misc_feature 1..462: note = Description of Artificial Sequence: Synthetic coding sequence
  source 1..462: mol_type = other DNA
atggcagctggcaccgctgtcggagcctgggtcctcgtactttctctttggggtgccgtggtcggtgcccagaacataactgcccgcatcggtgaacctctggtgctcaagtgtaaaggtgccccaaagaagcctccgcaacgcctggaatggaagctgaacacagggcggactgaggcctggaaagtcctatccccacaagggggcggcccatgggatagtgttgcgagggtgctgccaaacgggagcctgttccttcccgccgttgggattcaggacgagggaatactggggggtctgggcaccgctgctctgttgatcggggtcatcttgtggcagaggaggcaaaggcgaggagaggagagaaaggctcctgagaaccaggaggaggaggaagagcgggccgagctgaatcagtcggaggagccagaggccggagaatccagcactggcgggccttag

SEQ ID NO: 107710 - DNA, 1092 bp, synthetic construct
  misc_feature 1..1092: note = Description of Artificial Sequence: Synthetic coding sequence
  source 1..1092: mol_type = other DNA
atggccgcgggaacagccgtcggagcctgggtcctggtgctgtccctttggggcgcagtcgtcggggcccaaaatataactgcccgtattggagaacccctggtccttaagtgtaaaggcgccccaaaaaaacccccacaaaggcttgaatggaagctaaacaccggaagaacagaagcctggaaggttctctctccccaaggcgggggaccctgggatagtgtagcacgggtcctcccaaacggcagcctctttctaccagctgttggaatccaggacgagggtatctttaggtgccaggctatgaatcgcaacggtaaggagaccaaaagcaactatagggtacgggtttatcagatccctgggaaaccagagatagtggattcggcgtcagaattaaccgcaggtgtaccaaataaggtagtggaggaaagtcgccgcagtcgtaagcggccttgcgagcaggaagtcggcacatgtgtctcagaagggtcctatcctgcaggcacactgagttggcacctggatggaaaacctctcgtccccaacgagaagggggtgtccgtcaaggagcagacaagaagacaccctgagaccgggctgttcactctccagtctgagctgatggtgacgcccgcgcggggaggcgacccacgtccaacattttcatgtagcttctctccgggactgcccagacatcgggctctgcgaaccgctcctatacagcccagggtgtgggaaccagttcctctggaggaggttcaacttgtcgtggagcctgagggcggcgccgttgcccctgggggtaccgtgacactgacttgcgaagtgccggcacaaccaagccctcagattcactggatgaaggatggagtgccactgcctctgcccccctccccagttctaatccttcctgagatcgggcctcaggatcaggggacctacagttgcgtggcgacccattccagccacgggcctcaggagagccgcgccgtctcgattagcatcatagagccaggggaagagggacccaccgcaggcgaggggttcgacaaagtgagagaagccgaggactcgccacaacacatgtag

SEQ ID NO: 107711 - DNA, 366 bp, synthetic construct
  misc_feature 1..366: note = Description of Artificial Sequence: Synthetic coding sequence
  source 1..366: mol_type = other DNA
atggccgcaggaactgccgtgggggcatgggtactcgtcctttccctgtggggcgccgtagttggagcacaaaacatcacagccagaatcggcgagccgctggtcctcaagtgcaagggagctccgaaaaagcccccacagcggttagagtggaaactgaatacgggacggactgaagcatggaaagtactgagtccacaggggggaggtccatgggacagtgtggctcgagtgcttcccaatgggagcctttttctgccagcagtcggaatccaggatgaaggcatctttaggtgtcaagctatgaaccgaaatggcaaggagacaaagtccaattggtggtggagccagaaagtcgagcagtag

SEQ ID NO: 107712 - DNA, 402 bp, synthetic construct
  misc_feature 1..402: note = Description of Artificial Sequence: Synthetic coding sequence
  source 1..402: mol_type = other DNA
atgaaggacggcgtccccctcccattgcctccttctcctgttctcattctgcccgagatcggaccgcaagatcagggaacttattcatgtgtggccacacatagctctcatggtccacaggagtctcgagctgtgagtatctccatcatcgaacccggagaggaaggcccaaccgcgggatccgtcggtggcagcggccttggcactctcgccttagccctgggaattctgggagggcttgggaccgctgccctcttaatcggtgtcatcctgtggcagagacgccaacgaaggggcgaagagcgcaaggcacctgaaaatcaggaggaagaagaggaacgagcggagttaaatcagtctgaggagcccgaagcgggggagagttcaaccgggggcccatag

SEQ ID NO: 107713 - DNA, 387 bp, synthetic construct
  misc_feature 1..387: note = Description of Artificial Sequence: Synthetic coding sequence
  source 1..387: mol_type = other DNA
atggctgcaggtaccgccgtaggcgcctgggttcttgtcctgtctctgtggggagccgtggtcggcgcacagaatattaccgcacggatcggagaaccactggtcttaaagtgtaaaggggcacccaaaaagccaccccagagactggagtggaagctgaacaccgggaggactgaggcgtggaaggtactgtctcctcaaggcgggggcccatgggactctgtcgctcgcgttctccccaacggttccctgtttttacctgctgtcggcattcaggatgagggcatatttaggtgccaggctatgaaccgaaacggtaaagaaacaaagtcgaattaccgcgtcagagtgtaccagttcgagaaccttcataattactctttatag

SEQ ID NO: 107714 - DNA, 1092 bp, synthetic construct
  misc_feature 1..1092: note = Description of Artificial Sequence: Synthetic coding sequence
  source 1..1092: mol_type = other DNA
atggccgctggcaccgctgtgggtgcttgggtgctggtcctcagcctctggggggcggtggtaggagcacagaatatcaccgccaggattggagaaccactagtgctcaaatgtaaaggggcacctaaaaaacccccacagagactggaatggaagctcaataccggcagaacagaagcctggaaagtcctgtccccccagggaggaggcccctgggactccgtggcccgggtgttgcctaatggcagtctcttcttgccagcagtggggatacaggacgagggaatttttcgttgtcaagccatgaaccgcaatgggaaggagacaaaatccaactacagggtgagagtctaccagatccctggaaagccagaaattgtggattcagcgagcgaacttaccgcgggagtgcccaacaaggtcgtcgaggaatctcgacgttcccgaaagcgcccgtgcgagcaggaggtgggcacatgcgtgtctgagggttcataccctgccgggaccctaagctggcaccttgacgggaagccactggtgccaaatgagaaaggcgttagcgtaaaagaacagaccagaaggcaccccgagacaggtctgttcactttgcaatccgagctcatggttacccccgctaggggtggtgatcctcgccctaccttttcttgcagcttctcacccgggttgccacgtcacagagctctcagaactgctccgatccagccaagagtttgggagcccgtacctcttgaggaggtgcagctggtcgtggagcccgagggaggagctgtggcccccggagggactgtgacgttgacctgtgaagtgccagcccagcccagccctcaaatccattggatgaaggatggtgttccgctgcctctgcccccgtctccagtgttaatcctccctgaaatagggcctcaagaccaggggacttattcttgtgtcgccacccattcctcgcacggccctcaggagtcccgagccgtgtccatttccattatcgaaccaggagaggagggacccacagccggcgagggctttgataaggtgcgggaagccgaagactccccgcaacatatgtag

SEQ ID NO: 107715 - DNA, 1308 bp, synthetic construct
  misc_feature 1..1308: note = Description of Artificial Sequence: Synthetic coding sequence
  source 1..1308: mol_type = other DNA
atgggagccggggagagggtacaggcaccaccacgggcggaggcaacggcaggaagaggggccgacagggcacgcaccttggaagggtctcgcatggccgcgggaacagctgtgggcgcgtgggttctggtgctctcgctgtggggcgcagtcgttggagcccagaatatcaccgccaggatcggtgaacctttagtgttaaagtgcaagggagcaccaaaaaagcccccgcagcgcctggaatggaaactcaataccgggcgcaccgaggcctggaaagtgctctccccgcaaggcgggggaccttgggactcagtggcccgcgttctgcccaacggctctctgttcctgcctgccgtcgggatccaggacgagggtatcttccggtgtcaggcaatgaatcgaaatggcaaagaaacaaaaagcaattacagggtgcgcgtctaccagatacctggcaagcctgaaattgtggactcagcctcggagctcactgccggtgtgcccaacaaagtcggcacctgcgtgtctgaaggatcttatccagcggggaccctaagctggcatctggacgggaaaccccttgtgccaaacgaaaaaggggtgagcgtcaaagagcaaaccagacggcaccccgagaccgggctgtttactctacagagtgagctgatggtgactcctgcacgtggcggtgacccaaggcctacattttcctgtagcttctcccctggactgcctcggcatcgcgccttacgaaccgctcctattcagccaagggtgtgggagcccgtccctctcgaggaggtccaactcgtggtggagcctgaaggaggcgccgtagcaccaggaggtactgtgaccctcacgtgcgaggtcccggcccaacccagtccgcagattcattggatgaaagacggtgttccactgcctctgccaccctctccagtcttaattctgcccgagattggcccgcaggaccagggaacatatagttgcgtcgccacacattccagtcacggtcctcaggaatctcgagccgtgtctatttctattatagaacccggggaggaggggccgacggccggcagcgtcggtgggagtggacttggcacactcgccctggccttaggaattttggggggtctgggaaccgccgcccttttgataggagttatcctttggcagaggcggcagcgccgtggcgaggagcgaaaggctcctgagaaccaagaggaagaagaagagcgtgccgagctcaaccagagtgaagaacctgaggctggcgagagctcgacaggcggtccatag

SEQ ID NO: 107716 - DNA, 462 bp, synthetic construct
  misc_feature 1..462: note = Description of Artificial Sequence: Synthetic coding sequence
  source 1..462: mol_type = other DNA
atggccgccggaacagccgtcggggcttgggttttggtgctcagtctgtggggagctgtggtcggcgctcagaacataaccgcccggattggagagcccctggtcctcaagtgcaagggggcacctaagaagccacctcaaaggctggagtggaagctgaatacggggagaaccgaggcctggaaagtattgtccccacagggaggaggtccatgggattctgttgcccgagtgctccccaattcctccctattcttgcccgctgtcggcatacaggacgaaggtattctgggtggcctcggcactgccgcgttgttaattggtgttatcttgtggcagcgacgccagcggaggggagaggaacggaaagctccagaaaaccaggaggaggaggaagagcgcgctgaactgaatcagtccgaggagcccgaggctggcgagtcatccactggcggaccttag

SEQ ID NO: 107717 - DNA, 402 bp, synthetic construct
  misc_feature 1..402: note = Description of Artificial Sequence: Synthetic coding sequence
  source 1..402: mol_type = other DNA
atgaaagatggagtcccgttaccactgccgccttcccccgtgctgattctccccgaaatcggacctcaggaccagggtacgtatagctgcgtggcaactcactcgtcccacggaccgcaagagagccgcgccgtgtcaatcagcataattgagccaggggaggagggtcccacggccggatcagtaggcggctccggtctgggaacattggcactggcccttggaatccttggcggcctggggacagctgcactactcataggggtcatcttatggcagcggaggcagaggcggggggaggaaaggaaagcacccgagaaccaagaggaagaagaggagcgcgctgaactcaatcagagcgaagagccagaggccggcgagagctcaactggtggcccgtag

SEQ ID NO: 107718 - DNA, 885 bp, synthetic construct
  misc_feature 1..885: note = Description of Artificial Sequence: Synthetic coding sequence
  source 1..885: mol_type = other DNA
atgaatcggaatggcaaagagaccaaatcgaattatcgcgtcagagtctaccagattcccggaaagccagagatcgtagattctgccagcgagctgactgccggcgtgcctaacaaagtgggcacctgcgtctctgagggctcatacccagcgggtaccctctcctggcacctagatggcaagccactggtaccaaacgaaaaaggcgtgtctgttaaagaacagactcggagacaccccgagaccggtctctttacacttcagagtgagctgatggtgactccagcacggggaggcgacccccgacccactttcagttgcagcttctctcccgggctgcccaggcacagggcattgaggactgcacctatccagccccgagtctgggagcctgtccccctggaggaagtacagctggttgtcgagccggaaggcggcgctgtggccccagggggaaccgtgacccttacatgcgaggtgccagcacagccatcacctcagatccattggatgaaggatggagtgccactccccctccctccttctccggttcttatacttccagagattggtccccaagaccaggggacttactcttgtgtcgccacccattctagtcatggacctcaggaatcacgcgctgtctctatctctatcattggaagcgtcggcggttccggactgggaactctggctctagctctcggaattctaggaggacttgggactgctgcgctgctaattggcgtgatcttatggcagcggcgccaacgccgtggggaagaaaggaaagcacccgagaatcaggaggaagaggaggaacgagctgagctaaatcagtcagaggagccggaggcaggcgagagctcaacaggcggaccgtag

SEQ ID NO: 107719 - DNA, 1092 bp, synthetic construct
  misc_feature 1..1092: note = Description of Artificial Sequence: Synthetic coding sequence
  source 1..1092: mol_type = other DNA
atggctgccggcacagccgttggcgcttgggtgcttgtgctgtcactgtggggtgccgttgtgggcgctcagaacatcacagcgagaataggcgaaccgctagtgctgaaatgtaagggggccccgaaaaaaccaccccaacgtctcgagtggaagctcaatacaggacgcacagaggcctggaaggtgctgtctccccagggagggggcccatgggatagtgtcgctcgagtcttacctaacagctctttgttcctgcctgccgtaggaattcaggatgagggcatctttcgctgccaggctatgaacaggaacggcaaagaaacgaagtccaactatcgggtgcgcgtctatcagattcctgggaaacctgagatcgtggacagcgccagcgagctcaccgctggtgttcctaacaaggtggtcgaagaaagccggaggagccggaaacgtccctgcgagcaggaggtgggcacatgcgtgagcgaaggttcctacccggctggcaccctgagctggcatctcgacggcaagcctctggtgcctaacgagaaaggtgtatctgtgaaggagcagactaggagacatcccgagacaggcctattcactttacagtccgaactgatggtcacccctgctagaggaggtgacccacgacccactttcagctgctcgtttagtccgggtctgccccgccaccgggcgcttagaacagctcctatacagcctcgcgtctgggaacccgtccccctggaagaggtccaactggtggtagaaccggagggcggggccgtcgccccaggtgggaccgttaccttgacttgcgaggtccctgctcaacccagccctcagattcattggatgaaggatggcgtgcctctgcctctacccccttcccctgtcctgatcctccccgagatcggtccacaagaccagggcacatactcttgcgttgccacccactcttcccatggccctcaggagtccagggccgtttccatctccatcattgaaccgggagaggaaggtcccactgctggagaaggttttgataaagtaagagaggcagaggacagtcctcaacacatgtag

SEQ ID NO: 107720 - DNA, 462 bp, synthetic construct
  misc_feature 1..462: note = Description of Artificial Sequence: Synthetic coding sequence
  source 1..462: mol_type = other DNA
atggctgcgggaaccgccgtgggcgcgtgggtactggtgctctcattatggggcgccgtggtaggtgcccagaatattacggctcggatcggcgagcctctggtgttaaaatgcaagggggctcctaagaaaccacctcaacggctggaatggaaattgaacaccgggcgtaccgaggcctggaaggtgctttcgccccagggtggcggaccatgggatagtgtggcacgagtgttacctaacggtagcctgtttttgccagccgtcgggattcaagacgagggcattctgggagggctgggtaccgcggccctattaataggggtaatactctggcagcggcgccagcgacgcggtgaggagagaaaagcacccgagaaccaggaagaggaggaggagagggcagagctgaaccagagtgaggagcccgaggcaggtgagagtagcactggtggtccctag

SEQ ID NO: 107721 - DNA, 387 bp, synthetic construct
  misc_feature 1..387: note = Description of Artificial Sequence: Synthetic coding sequence
  source 1..387: mol_type = other DNA
atggccgccgggaccgctgtgggagcctgggtcttggtgttgtccctgtggggagctgttgtgggggctcagaacatcacagctagaattggagagccactggtgctgaagtgcaagggggctcccaaaaagcctccacaaagactggagtggaagctgaacaccggccgaactgaggcttggaaggtactgtccccacagggaggcggcccatgggacagtgtcgcccgggtcttaccaaatggctcactttttctgcccgccgtgggcatccaagatgaggggattttcaggtgtcaagccatgaaccgcaacggaaaagagaccaagagtaattatcgagtacgagtgtaccagtttgaaaacctccacaattatagcctgtag

SEQ ID NO: 107722 - DNA, 2460 bp, synthetic construct
  misc_feature 1..2460: note = Description of Artificial Sequence: Synthetic coding sequence
  source 1..2460: mol_type = other DNA
atgcctcttacatcagcattccgggccgtggacaatgaccctggaattatcgtgtggaggatcgagaaaatggagctggccctggtgccagttagcgcgcatggcaacttctacgagggtgactgttacgtaatcctaagcaccaggcgcgtcgcctctctcttgtcccaggacatacacttttggatagggaaggactcatcccaggacgaacagtcctgtgcggccatatacactacccagctggacgattacctcggaggtagccctgtgcagcacagggaggtccagtaccacgagagcgacacctttcgcggatactttaaacagggaattatttataagcagggcggggtggccagtggtatgaaacacgtggaaacaaacacatacgacgttaagcgacttctccatgtgaagggcaagaggaatatccgtgctacagaggtggagatgagctgggattcctttaacagaggcgacgtcttcctgctcgatctggggaaggtgattattcagtggaatggccctgagtcaaattctggcgagagactgaaggccatgctgctggctaaggacattcgggacagagagcgaggcggccgggcgaagatcggagtgatcgaaggggataaggaagctgcaagtccagaactgatgaaggtgctgcaggacactctgggacgcaggtctatcataaagcctaccgtgcctgacgagatcatagaccagaagcagaaatcaacaatcatgttgtatcatattagcgattccgcaggccagctcgctgtgactgaagtagctacacgccccctggtacaggatctgctgaatcacgacgactgttacatcctagatcagagtggcactaagatctacgtgtggaaggggaaaggagcgacaaaagcagagaaacaggccgctatgtccaaagccttgggtttcatcaagatgaaatcttatccttcttcgacgaatgtagagaccgttaatgatggcgcagagtccgccatgtttaaacagctctttcagaagtggagcgttaaggatcagacaatgggactcgggaaaactttcagcattgggaaaatagccaaagtgttccaggacaagtttgacgtgacactgctgcacaccaaacccgaggtcgcggcacaagaacggatggtggatgacgggaacggtaaagtagaggtttggaggatcgaaaacctggagctcgtcccagtagagtatcagtggtacggctttttctatggcggagattgttacttagtgctgtacacctatgaagtgaatggcaaacctcaccatatactgtacatctggcaaggccgacatgcatctcaagacgagctcgccgccagtgcctaccaagccgtagaggtggaccgtcaatttgatggggccgccgtgcaggtcagggtgcggatggggaccgaaccacgtcacttcatggcaatctttaagggcaagctggtcatcttcgagggaggcacctcgagaaaaggtaacgcagaaccggaccccccggtacggctcttccagatccatggcaatgataagagcaatacaaaggcagttgaggttcctgcctttgcatcatcacttaactcaaacgatgtttttcttctgagaacacaggcggaacactacctgtggtatggtaagggatccagcggagatgaacgggccatggcgaaagagctggctagcctactgtgcgacgggagcgagaacacggtcgcggaaggtcaagaacctgccgagttttgggatttgctcggtggaaagaccccatacgcgaatgacaaacggctgcagcaggagatactggacgtgcagagcaggctgttcgagtgctccaataaaaccggacagttcgtggtcactgaaatcactgatttcacacaggatgatttgaacccaacggacgttatgcttcttgatacctgggatcaagtgttcctgtggataggcgctgaggccaacgctactgagaaagagtctgcactcgcaactgcccagcaatatttgcatactcacccttcagggagggatcccgatactccaatactaatcattaagcagggttttgaaccccccatctttaccggttggttcctggcctgggatcctaatatctggtcagcagggaaaacctacgagcagcttaaagaagaactaggcgacgccgcagccatcatgaggatcaccgctgacatgaagaacgctacactcagtcttaactctaatgactccgagccgaagtattatcctatagccgtgctgctcaagaaccagaatcaggagttaccagaggacgtcaatcccgcaaaaaaagaaaactacctttcagagcaagactttgtgagcgtctttggtattacacgaggccagtttgccgcactccccgggtggaaacagctgcagatgaagaaggaaaaaggcctgttttag

SEQ ID NO: 107723 - DNA, 2439 bp, synthetic construct
  misc_feature 1..2439: note = Description of Artificial Sequence: Synthetic coding sequence
  source 1..2439: mol_type = other DNA
atgagttctaccggtcatcctggatcctataaaatctggggtgagaagatggaattggcgctggtccctgtctcagcacacggcaatttctacgagggtgactgttatgtgatcctcagtacccgccgggtggccagtttgcttagccaggatattcacttctggatcggtaaagactcctcacaagacgagcagtcgtgcgcagctatttacactacgcaattggatgactatctgggcggatctccagtgcagcacagagaagtgcagtatcacgaaagcgacacctttaggggatacttcaagcagggcattatctacaaacagggtggagttgccagcgggatgaagcacgtagaaaccaacacctatgacgtaaaacgcttgcttcacgttaagggaaagcgcaatatccgggcaacagaggttgagatgtcctgggactcattcaacagaggagatgtattcctcctcgacctcggaaaagtcattatccagtggaacggcccagaatctaactcaggcgaacggctcaaagctatgcttttggccaaggacattcgggaccgcgaaaggggtggcagggccaagatcggcgtcatcgaaggggacaaggaggccgctagcccggagctgatgaaggtcctacaggacactctgggacggcggagcataatcaagccgactgtaccagacgaaataattgaccagaaacagaagtcaaccatcatgctataccacatatccgacagcgccggacagctggctgtgactgaagtggcaacccgcccccttgtccaggatttattaaatcacgacgactgttatatcctcgatcagagcggaacgaaaatttatgtgtggaaaggaaaaggtgcaactaaagccgaaaagcaggccgcaatgagcaaagcccttggcttcatcaaaatgaagagctacccctcatccactaacgttgaaaccgtgaacgatggagccgaaagtgccatgtttaagcagctatttcagaagtggagtgttaaggaccaaaccatgggcttgggtaagacatttagtatcggaaaaatcgccaaggttttccaggacaaatttgatgtcacacttcttcacaccaagcccgaggtcgccgcccaggaacggatggtggacgatggaaacgggaaggtggaagtgtggagaatcgagaatttggagttagtgccggtcgagtatcagtggtacgggtttttttatgggggtgactgttacttagtcctgtacacctatgaagttaatggaaagccacaccacatattgtacatctggcaaggccgacacgcctctcaagacgagctggctgcttccgcctaccaggcagtggaagtggacagacagttcgacggcgctgccgtgcaggttagggtccgtatggggacggagcctcgtcattttatggctatcttcaaggggaagctggttatttttgaaggaggtacctctagaaagggcaacgctgagccagaccctccagttaggctctttcagatccacgggaatgataagagtaatacaaaggccgtggaagtacccgcattcgcgagtagcctcaattcgaacgacgtcttcctactccgcacgcaagccgagcactatctgtggtacggcaaggggtcttccggagatgaacgggcaatggctaaagaactggccagtcttctgtgcgacggttcggagaataccgttgccgaggggcaagagcctgcagaattttgggatctgttgggcgggaaaacaccctatgcgaacgacaagcggctgcagcaagaaattcttgacgtgcagtcgcggctatttgagtgttcaaataaaaccggccagtttgttgtgactgagatcacagactttacacaagatgatcttaatccgactgacgtgatgttgctggatacttgggatcaagttttcttgtggataggtgcagaggctaatgctacggaaaaagagtccgcgctagccacagcccagcaatacctccacacacatccatctggccgcgacccagacacaccaattttgattataaaacaaggtttcgaaccccccatctttactggatggtttctcgcctgggaccctaatatctggtccgccgggaagacttatgaacagcttaaggaagagctgggagatgccgctgctatcatgcgcataacagccgacatgaaaaacgcgaccctttcccttaatagcaatgatagtgagcctaagtactaccctatagccgtcctcctaaagaatcagaaccaggagttgccagaggacgtgaaccctgcaaagaaggagaattacttgagtgagcaggactttgtctccgtgttcggcatcacaagaggccaatttgccgctttacctggctggaagcaactccagatgaaaaaggaaaagggcttgttttag

SEQ ID NO: 107724 - DNA, 474 bp, synthetic construct
  misc_feature 1..474: note = Description of Artificial Sequence: Synthetic coding sequence
  source 1..474: mol_type = other DNA
atgccgctcacatctgctttcagggccgtagataatgatccgggaatcattgtttggcgaattgagaaaatggaactcgcacttgtgcctgtgtccgcccatggcaacttttacgaaggcgattgctacgtgatcctgtctacccgcagagtcgctagcctgctttcccaagacattcacttttggataggcaaggacagctctcaggatgagcaaagttgcgctgccatttataccacccagctggatgattacctgggcggctctcctgtgcaacacagggaggttcaataccatgagtcggatacattcaggggatatttcaagcagggcatcatctacaagcaaggaggtgtcgccagcggaatgaaacatgtggaaactaatacatacgatgtcaaacgtctgctccacgtgaaagggaagagaaacatccgcgccacagaagttgagatgtcttgggactccttttag

SEQ ID NO: 107725 - DNA, 2859 bp, synthetic construct
  misc_feature 1..2859: note = Description of Artificial Sequence: Synthetic coding sequence
  source 1..2859: mol_type = other DNA
atgaaatttaagaggcgccatcaggcttttccaagcttctttaaaatgaaagtcagcctgcccagcgacccgagttgcgtggaggagatccttcgggaaagccagcacttgaccccaggcttcactttgcagaagtggaacgaccccacaacccgggccagtacaaaaagtgtttcctttaagtctatgttagaggacgatctcaaactgtcgtcagacgaggatgatctggaaccagtcaagactttaacaacgcagtgtaccgcaaccgagctgtatcaggcagtggaaaaagctaagcccaggaacaaccccgttaacccccccttggccactccccagcccccaccggccgtacaggcctccgggggctcaggatcatcaagcgaaagcgaatcttccagcgagagtgacagcgatacagagtctagcacaaccgactcggagagtaatgaggctccccgagttgctacaccagaaccagaacctccctctaccaacaagtggcagttggacaagtggctgaacaaggtaacatcccagaacaaatctttcatttgcggccagaatgagacgccgatggaaacaatttctctgccccctcctataatacagccaatggaggttcagatgaaagttaagaccaatgccagccaagtaccggcagagcccaaggaacggccactgctctcactgatcagggagaaggcccgccccagacccactcaaaagatcccagagaccaaggcactcaagcacaaactgtcgacgacctccgaaaccgtgtctcagcgcacaattggaaagaaacagccgaagaaggtggaaaagaacaccagcaccgacgagttcacatggcccaagccaaatataacgagtagcaccccaaaagagaaagaaagcgtagagctgcatgatccccctcgtggccgaaacaaagcaaccgcgcataaacccgcacctaggaaggaaccaagacctaatatccctctggcaccagagaaaaagaagtacaggggacctggaaaaatcgttccgaaaagcagggagttcatcgagaccgattcgtccacatccgacagcaacaccgaccaagaagagacattgcagattaaggtactccccccatgcatcatttctggtggtaacaccgctaagtcaaaggagatctgcggagcaagcctgactttatccactcttatgtcctcgagcggctctaataataatttaagtatttcaaacgaagagcccaccttcagccccatccccgtgatgcagacggagatcctgtcgcccctgcgagatcatgagaacctcaaaaatctatgggtgaagatcgatctggacctactaagtagagtgcccggccattcctcactgcacgcagccccagccaaacccgatcacaaggaaactgctacaaaaccaaaaaggcaaactgccgtcactgctgtggaaaagcctgccccaaaaggaaaacgcaagcataagcctatcgaggtggccgagaagattcccgagaagaaacagcggctcgaagaggcaacgaccatttgcctcttgccaccttgtatatcccctgccccgcctcataaacctccaaacacgcgtgaaaacaacagcagtagaagagccaaccggcgcaaagaggagaagctctttcccccccccctttcccccttaccagaagaccccccccgcaggcgcaatgtttccggtaacaatggcccttttgggcaggataaaaacatcgcgatgacggggcagataacaagtaccaagccgaaacggactgaaggaaaattttgtgcgactttcaaaggtatcagcgtcaacgagggtgatacacccaagaaagcttcctctgcaacaatcactgtcacaaatacagccatcgccacagctacggtaacagctacagcaatagttactactacagtcaccgcaacagctacagcgacagctaccacaactacgactacaactacaatcagtacaatcacatcgacaattactacaggcttgatggattcttcccatcttgaaatgacttcttgggccgctctgcctctgctaagcagctccagcaccaatgtgcgccggcccaagctgactttcgatgattccgttcataacgccgattattacatgcaggaagccaagaagctgaagcataaggcagacgctctgttcgaaaagttcggcaaggcggtgaattatgctgacgctgccctgagtttcactgagtgcggcaatgcaatggagagagatcccctggaggcgaagtccccctatactatgtattcagagaccgttgaactactgcgctatgcaatgcgcctcaagaatttcgcatcacctttggccagcgacggtgataaaaaattagccgttttgtgctacagatgtctctctctcctgtacttgcggatgtttaaacttaagaaagatcacgccatgaaatacagtcggtccctcatggagtactttaaacagaatgctagcaaggtcgcccagatcccttcaccatgggtatccaacgggaagaataccccttcaccagtgtccctgaacaacgtgagtcccataaatgcaatgggcaattgtaataatgggccagtcactattccacagcgcatccaccatatggcagcctctcatgtaaacatcacgagcaatgttctccgaggctacgaacattgggacatggcagacaaactgacaagagagaacaaggaattttttggcgaccttgacacattaatggggcccctcacccagcatagctcgatgacaaacctggtgagatatgtgagacagggcttgtgctggttgaggattgatgcccacttgctctag

SEQ ID NO: 107726 - DNA, 3837 bp, synthetic construct
  misc_feature 1..3837: note = Description of Artificial Sequence: Synthetic coding sequence
  source 1..3837: mol_type = other DNA
atggacctctttgacttctttagggattgggatctggagcagcaatgtcattacgagcaggacagatcggctctcaagaagagagaatgggagcgccgcaaccaagaggtgcaacaggaggatgaccttttttctagcggctttgacttgttcggagagccatataaaaccaacaaaggcgatgctctagcgaatagggtccagaacactcttggaaattacgatgaaatgaaaaacctgctcaccaatcatagtaatcaaaaccacttagtgggtatccccaaaaattccgttcctcagaacccaaataacaagaatgaaccttcatttttcccagagcagaagaatcgcatcatcccaccccaccaggacaatacacacccttctgcccccatgccaccaccatcggtcgtgattctcaatagcactctgattcactccaatcggaaaagcaagcccgagtggtctagagattcacataatccctcaaccgtattagcatcacaagcaagcggccagccaaataagatgcagaccctaacacaggaccaatcgcaggccaagctggaagacttctttgtctatcctgccgagcagccccagatcggggaggtggaagaatcaaatccatctgccaaggaagattcaaacccaaattcgtctggcgaagacgccttcaaagagatctttcaatcaaacagcccagaggagtcagagtttgccgtgcaggctcctggatcacccctggttgcttcttcactgctggcaccttccagcggactcagtgtgcagaatttcccaccgggcctatattgtaagaccagcatgggccagcagaaaccaaccgcatacgtaagaccgatggacggtcaggaccaggcccccgatatctcccctaccctcaaacccagtatcgagttcgaaaattcgtttggaaatttaagcttcggaactctgttagatgggaaaccctcagctgcgtctagcaaaacaaaacttcccaaattcactatcctgcagacaagtgaggtaagcctcccgagcgatccctcatgtgtcgaggagattttgagggagagtcagcacttgacacccgggttcactctgcagaaatggaatgaccctacgaccagggcttctaccaaatctgtaagctttaaatcaatgcttgaagatgatctaaaactttcgtctgatgaggatgacctggaaccagtcaagactctgacgacccagtgcactgcgaccgagctgtatcaggctgtggagaaagctaaaccacgcaataatcccgtgaacccgcctttggctacgccccagccccctcctgctgtccaggcaagtgggggctcagggtcctcttctgaatccgaatcaagcagcgagagcgactcggacacagagtctagcaccaccgattctgaatcgaacgaggccccccgcgtggccacccctgagcccgagccgccctccacaaacaagtggcagctggacaagtggttgaataaggtaacttcccagaacaaaagctttatctgcggacagaatgagacccctatggagacaattagcctcccacccccaatcatacaacctatggaggtccagatgaaggtgaagacaaatgcaagtcaggtgcccgctgagcctaaggagagacctcttttgtctctgataagagaaaaagccagacctcgaccaacacagaagatccctgagactaaagctctcaaacataaactcagcaccacgagcgagacggtttctcagcggacaattggcaagaaacaacccaaaaaggtcgagaaaaatacttcaaccgatgagttcacttggcccaaacctaatatcacaagtagtacaccaaaggaaaaagagtctgtggaactgcatgacccgccccgcggaagaaacaaggccactgcacacaaacctgcaccgagaaaggagccacgccccaatattccactggccccagagaagaaaaagtaccggggcccaggtaaaatcgtgccaaagtccagagagttcatcgaaacggactcaagcactagcgattcaaacacggaccaggaagaaacacttcaaataaaggtcctgcccccctgcatcataagtgggggaaatactgctaagagtaaagaaatttgcggtgctagtctgacactgagcactctgatgagctcctccgggagtaataataacctgagcatctccaacgaagaaccaaccttctcccctatcccagtaatgcagacggaaattttgagccctctgcgggaccacgaaaacctgaaaaacctctgggttaaaatagatctggatctcctgtcaagggtgccagggcacagtagtctccacgctgctcctgccaaaccagatcataaggagacagcaacaaagcctaagcgccagacggctgtgacagccgttgaaaagccagcacctaaaggaaagcggaagcataaacccattgaagttgccgaaaaaatcccagagaaaaagcagcgcctggaggaagccaccacaatctgtctcttaccgccatgcataagtcccgccccacctcataaaccgcccaatacaagagagaacaactcctcccgccgagccaacagacgtaaggaggagaagctctttccacctcccctcagccctctccctgaggacccccctagacgcaggaacgtgtccggcaacaatgggccgtttggccaggacaaaaatattgctatgactggccaaataacttccacaaagcccaaacgcacggagggcaaattctgtgcaacctttaaaggcatctctgttaacgagggcgacacacccaagaaggctagcagcgctaccatcaccgttaccaataccgccatagccacagccacagttaccgccacagccatcgttaccactacagtgacagctacggctaccgcaacagccactaccactactactaccacgactatttctacgataacctctacaattactaccggcctgatggacagttcccaccttgagatgacatcctgggccgctctgcccctgctaagttcgtcatccacgaatgtccggcgtccgaagctgaccttcgatgattcggtgcacaatgccgactactacatgcaggaagctaaaaaactgaaacacaaagccgacgctctcttcgaaaagtttgggaaagccgtaaattatgccgacgctgccctctcctttaccgagtgtggcaacgctatggagagggaccccctggaagccaaatccccctacaccatgtattcagaaaccgtagaactcttacgctatgccatgcgcctgaagaattttgctagccccctggcatcggatggtgataaaaagcttgcagttctctgctatagatgtctgagcctgctgtacctgcgaatgttcaagctgaaaaaggaccatgcaatgaaatatagccgtagcctgatggagtacttcaagcagaatgctagtaaggtggctcaaattccttccccttgggtatctaatggaaagaacacaccttcaccggtctcattaaacaacgtgagtccgataaacgccatggggaactgcaacaacggccctgtgacgatcccacagagaatccaccacatggcggcatctcatgtgaatatcacttcgaatgttcttcgagggtatgagcactgggatatggcggataagctgacacgtgaaaacaaggagttttttggagacctggataccttgatggggccgctgacccagcactcctctatgaccaatctggtccggtatgtcagacagggactgtgctggctgcgcatcgacgcgcacttactgtag

SEQ ID NO: 107727 - DNA, 3831 bp, synthetic construct
  misc_feature 1..3831: note = Description of Artificial Sequence: Synthetic coding sequence
  source 1..3831: mol_type = other DNA
atggatctttttgacttcttccgggattgggatctggagcagcagtgtcactatgagcaggacagatctgctctgaaaaagcgagaatgggagaggcggaatcaggaggttcagcaggaagatgatctttttagtagtggttttgacttattcggtgaaccatacaagacaaacaaaggcgatgccctggcaaaccgggtccagaacaccctcggcaactatgacgagatgaagaatctgctcacaaaccattcaaatcaaaatcacctggttggtatcccaaaaaatagcgtgccacaaaaccccaataataaaaatgaaccaagcttctttcctgagcagaaaaacaggataatccctccacaccaggacaacacccatcccagtgcaccaatgccacccccctctgtagttatcctcaacagtaccctaattcactccaatcgcaagtctaaacctgagtggagtagggacagccacaacccgtcgactgtgctcgccagccaagcctccggccagccaaataaaatgcagacgctcacacaggatcagagccaggccaaactggaggacttcttcgtctatcccgcggagcagccgcagatcggagaggttgaagaatcgaatcctagcgcgaaggaggacagcaaccctaatagctccggcgaggatgcctttaaggaaatcttccagtcgaattcccctgaggaatctgagttcgccgtgcaggctccagggagtcccctggttgcctcctcccttctcgccccctcatccggcctgtctgtacagaattttccccctgggctgtattgcaaaacctccatgggacaacaaaagccaaccgcatacgtgaggccgatggacggacaggatcaggcgccggatatctctccaaccctaaaaccctccatcgagttcgaaaattcattcgggaatctctccttcggcactctgctcgacgggaaaccatccgctgcctcctcgaagactaagctccccaaattcactattttacagacatccgaggtgagtctcccttccgacccaagctgtgtggaggagattctgcgcgaatcacagcatctgacaccaggattcactctgcagaagtggaacgaccctactactcgcgcaagtacaaagtccgtgtcgtttaagagcatgttggaggatgacctaaagttgtcatctgatgaggatgatttggaaccagtcaaaaccctgaccacacagtgcaccgcaacggaactgtaccaggctgtcgaaaaagccaagccacgtaacaatcctgtgaaccccccactggcgaccccacagccaccacccgccgtgcaagcttcaggaggatcaggaagcagctctgagagcgagtctagcagcgagagcgactccgatactgagagctccacaacagactctgaatctaatgaagcaccccgggtggctacacccgaacccgagccaccgagcaccaacaaatggcagcttgataagtggctcaacaaagtgacttcccagaataaatcgtttatctgtgggcagaatgagacccctatggaaaccatttcattacctccacccatcatccagcccatggaggttcaaatgaaggttaaaactaacgcctcacaggtccctgccgaacccaaggagcgcccactgctgtcactaatccgggagaaggcacggcccagacctacccagaaaattcccgaaaccaaagcactcaaacacaagctctccactacatcggagaccgtctctcagcgaacaatcggcaagaagcagcccaaaaaagtggagaagaacacgtctactgacgaatttacgtggcctaaaccaaatataacaagtagtacccccaaggagaaagaaagcgtcgagctccacgatcctccaagagggagaaacaaagcaactgcccacaaaccagcccctagaaaggagcctcggcccaatatccccctggcaccggagaaaaagaaatataggggtcccggcaaaatcgtgcctaaatctagagaatttatcgaaacagactcatccacatcagactccaacacagaccaggaggaaactctgcaaattaaagtgctgccaccctgcatcattagcgggggcaatactgccaaatctaaagaaatctgtggcgcatcattaaccttgtccacgctgatgtccagctctggctccaacaacaatctaagtatcagtaacgaggaacccacattctcccctatccctgtaatgcaaactgaaatactgagtcccctgcgagaccacgagaatctgaagaatctatgggtaaagatagatctcgacttgctgtcccgggtgcccgggcatagctccctccacgctgccccagccaagccggatcacaaggagaccgccaccaaacctaaacgccagacagctgtgaccgcagtggagaaacccgcaccaaagggcaaacggaagcacaaaccaatagaggttgccgaaaaaatacctgagaagaaacagagactggaggaggcgacgacaatctgtctcctcccgccctgcatatccccagctcctccacataagccaccaaacacacgggagaacaactcaagccgcagagccaacagaaggaaggaagaaaaactttttccccctcctctgagccctctccccgaggatccccctaggagaagaaatgtgagcggcaacaacgggccttttggtcaggacaaaaacatcgcaatgacagggcagataacatcaaccaaacccaagcgcacggagggaaagttttgtgctacgttcaagggaatatctgagggagacaccccaaaaaaagcgtccagtgctaccatcacggttacgaacaccgccatcgccacagcgacggtaaccgcgactgctattgtaactacaaccgtgacagctacggcgaccgccacagccaccactactacaacgacaacaaccatctcaaccatcaccagcaccatcactactggtctgatggattcatcccaccttgagatgaccagctgggctgcacttcccctcctgagttcctcctccactaatgtccgccgccccaaactgacatttgacgattccgtccacaatgctgattattacatgcaggaggccaagaagcttaagcataaggccgacgctcttttcgaaaagtttggaaaagctgtcaactatgccgacgctgccctgagctttaccgagtgtggaaacgccatggagagggatcccctagaggccaaaagtccatacacaatgtacagcgagaccgttgaattacttagatatgccatgcgcctcaagaatttcgcaagcccgctggctagcgacggagacaagaagttagcagtactctgctacagatgcctgtccctgctctaccttcgtatgtttaagctgaagaaggatcacgctatgaagtatagtaggtcactaatggagtactttaaacaaaacgcctccaaagtggcgcagattccatccccatgggtctccaacggaaagaacacacctagtcccgtttctttgaacaatgtctctccaatcaacgccatgggaaactgtaataacggacccgtgactatcccacagcggatccaccacatggcagcctctcacgtcaacatcacttcaaatgtgctgagaggatacgaacactgggacatggcagacaaactgacccgggagaacaaggaattctttggagatctcgacacactgatgggaccacttactcagcactccagtatgacaaacctcgtacgatacgttcgtcagggactgtgctggcttagaatcgatgcccacctgctgtag

SEQ ID NO: 107728 - DNA, 1284 bp, synthetic construct
  misc_feature 1..1284: note = Description of Artificial Sequence: Synthetic coding sequence
  source 1..1284: mol_type = other DNA
atggacctgtttgacttctttcgcgactgggacctggaacagcagtgccactatgaacaggataggtcagccctgaagaaaagagagtgggaacgccgcaatcaggaggtccagcaggaggatgacttgttttctagtggattcgacttgttcggagaaccttacaagaccaataagggagatgcactggcaaatagagtgcaaaatactctgggtaattacgacgaaatgaagaacctgttgacaaaccacagtaaccaaaatcacctggtaggaatcccaaaaaattcagtgccacaaaatcctaataacaagaatgagccttcatttttccccgaacaaaaaaaccgaattattcccccacaccaggataatacacacccatctgccccaatgccgccgccctcagtggtgattctgaactccaccctgatccattctaatcggaaatccaagcccgaatggtccagagactcacacaacccatccaccgtcctggccagccaggcgagtggccagcctaataaaatgcagactcttacacaagatcagtcccaggccaaactggaggattttttcgtatacccggccgagcagccccagattggcgaggtcgaggaatccaacccatcagccaaagaagattccaatcccaatagctcaggagaagacgcttttaaagaaatatttcagtccaattccccagaggaatcagagtttgctgtgcaggcgccagggtctcccctggtggcaagcagcctgctagccccctcatcagggctcagcgttcagaatttccctccgggcctgtactgtaagacctcaatgggtcagcagaaaccaaccgcctacgttaggcccatggacggacaggatcaggcgccagatattagccccactctgaagccgtccatagaattcgaaaactcttttggcaaccttagtttcgggactctgctggatggcaagccttccgccgcctccagtaaaaccaaactcccgaaatttaccatcctgcagacctctgaggtatcactaccctccgatccgagttgtgtcgaggagattcttcgtgaatctcagcacttaactcctgggtttactctgcagaaatggaatgatcccacaacccgggcctcgacaaaaatgctggaggacgacctgaagttgtcctccgatgaggatgatctggagccagtcaagaccttgactactcagtgcacagcgactgaattgtaccaggcagtcgagaaagccaaaccaaggaacaaccccgtcaaatag

SEQ ID NO: 107729 - DNA, 3936 bp, synthetic construct
  misc_feature 1..3936: note = Description of Artificial Sequence: Synthetic coding sequence
  source 1..3936: mol_type = other DNA
atggacttattcgacttcttccgggattgggatctggagcaacagtgtcattatgaacaggatcgctccgcactgaagaagagagagtgggagagacgaaaccaggaagtgcagcaggaggacgatctgttctctagcgggttcgatctgtttggcgaaccgtacaaggttgccgaatataccaacaagggtgatgcccttgcaaacagagtccagaacacactaggaaattacgacgaaatgaaaaatctacttacaaaccactcaaaccagaatcacctagtaggcattcccaagaactctgtaccacaaaatccaaacaacaagaatgaaccctcattttttccagagcagaagaatcgcattattcctcctcaccaagataatacccatccttcagccccaatgcccccacctagcgtggtgattttaaatagcacactgattcatagcaatcgaaagtctaaacccgagtggtcccgggactcccacaaccccagcactgtgctagcatctcaggcttcagggcagccaaataagatgcagactcttactcaggaccagtcacaggcaaagttggaagacttttttgtgtatcccgccgaacaacctcagataggtgaagtggaggaatctaacccttcagcaaaggaagatagcaatcctaatagcagtggcgaggatgcgtttaaggaaatctttcagagcaatagcccagaggagtccgagtttgctgtccaggctcccggttcccccctggtcgccagtagcctgctcgctccttcttctggcctttctgtgcagaatttcccaccagggttgtattgtaaaacaagcatggggcagcaaaaacccacagcgtacgtgaggcccatggacggacaggaccaggcgcccgatatttctccgacgctaaaacccagcatcgagtttgaaaactccttcggcaatctgtcctttggcactctcctggatggaaagccttcagctgccagtagtaaaaccaagcttccaaaatttactatcctgcagacttctgaagtcagcctgcccagcgacccctcgtgcgtagaggaaatccttagagaaatgacccactcttggcctaccccactcaccagtatgcatacagcaggccattctgaacaatcaacttttagcattccgggacaggagagccaacacttgacccctggctttactcttcagaagtggaacgatccgacaactagagctagtacgaaatcagtttcctttaaaagtatgctggaggatgatctcaagctgagtagcgacgaggacgacctcgaaccagtgaagactcttacaacccaatgtaccgccacggaactgtatcaggcagtcgagaaggctaaaccacggaacaaccccgtgaatcctcccttagcaacaccccagccccctccggcagttcaggccagtggaggaagcggcagttcgtccgagagcgaatcttcatccgagtctgacagcgatactgagagttctaccaccgacagtgaaagcaatgaagctccaagagtggctacaccagagccagaaccccccagcaccaataagtggcagttagataaatggctgaataaggttacaagccaaaataagtcgttcatatgcggtcagaatgagactccaatggaaacgatcagtctcccgcctccaatcatccagcctatggaagtacaaatgaaggttaaaacaaatgccagccaagtccctgctgagcctaaagagagacccctgctttcgctgatccgtgaaaaagcacgccctcgcccaacccagaagatcccagaaaccaaggcactcaagcacaagctctccactacctccgagacagtgtcccaacggaccattgggaaaaagcagccaaaaaaagtggaaaaaaacactagtaccgatgagtttacatggcctaagcctaatatcactagtagtacccctaaagagaaagagtctgtggaattacacgacccgccacgtggtaggaacaaagcaaccgctcataaaccggcacctagaaaggagcctcgaccaaatatccccctggcaccggagaaaaagaaatacagaggcccaggaaagattgtgcccaaatctcgagagttcatagagactgactctagtactagcgacagcaacaccgaccaggaggagactctgcagatcaaagtgctgcctccttgtattatctccgggggcaatacggcaaagagtaaagagatctgtggagcaagcctgactttatctacgttaatgtcaagtagtggatccaataacaatttgagtattagtaacgaggaacctacatttagtcccattccagtgatgcagactgagatcttgtcccccctgagggaccacgagaatcttaagaacttatgggtcaaaatagacttggacctgctgagccgtgtccccggtcactcttcattacatgctgcccctgctaagcctgatcacaaggaaacggccaccaaacctaagcgccagacagctgtaactgcagtggagaagcctgctcccaaaggcaaacgtaaacataagcccatcgaggtcgccgagaagataccagaaaaaaagcagcgcctggaggaggccacaactatatgtcttttgccgccttgcattagtcctgcacccccacacaagcctccaaatacacgcgagaataattcttcacgccgggccaaccgaaggaaggaagagaagcttttcccgccccccctcagccccttacccgaggacccccccaggaggcgtaacgtttcagggaacaatggaccctttggtcaggataaaaatatcgcaatgacaggccagatcacatcaacaaagccaaagcggactgagggaaaattctgcgcaacctttaaaggcatttccgtcaacgaaggtgacactcctaagaaggcatcaagtgccactattacagtaaccaatactgctattgccacggccactgtgacagccaccgccatcgtgaccacaaccgtgactgcgaccgccacagcaaccgctactaccacgactacgaccacgactatcagcaccatcaccagcactataacgactgggctgatggactccagccacctggagatgacaagttgggcagcgttgcccctgctttctagctccagtactaacgtcaggagacctaagctcaccttcgacgacagcgtgcacaacgctgactactacatgcaggaggctaagaagctgaagcacaaagcagatgcactttttgaaaaattcggcaaggccgtcaactatgccgacgccgctctgtcctttactgagtgcggtaatgcaatggagcgggaccccttagaagcgaagtctccttacaccatgtattcagagactgtggaactgcttcgctacgctatgagattgaaaaactttgccagtcctctggcctctgacggggataagaaacttgccgtgctttgttacagatgtttaagcctgctgtatcttagaatgtttaaacttaaaaaagatcatgcaatgaagtattccaggagcctcatggagtacttcaagcagaacgcttcaaaggtcgcccagataccttctccttgggtcagtaatgggaagaatactccaagtcctgtctcgttgaataatgtgtcaccaataaacgcaatggggaattgcaataacgggcctgttacaatcccacagcggatccaccacatggccgctagtcatgtcaacatcacctccaatgtcctgcggggctatgagcattgggatatggccgacaagcttacacgggagaacaaagagttctttggggacctcgacacattgatgggacccctcactcagcacagctcaatgactaatctcgtgaggtacgtacgccaaggactatgttggctgaggattgatgcccatcttctctag

SEQ ID NO: 107730 - DNA, 1410 bp, synthetic construct
  misc_feature 1..1410: note = Description of Artificial Sequence: Synthetic coding sequence
  source 1..1410: mol_type = other DNA
atgtccgccctcacacctccaacagatatgccaacaccgacaacagataaaatcacacaggccgcaatggagaccatttacctgtgtaaatttagggtgtccatggatggcgagtggctatgtcttagggagctagatgatatctccctgacgccagatcccgagcccactcacgaggatcccaattacttgatggccaacgaacgcatgaacctgatgaacatggcgaaactgtccatcaaaggcctgatcgaatcagctctcaatctaggaagaaccttagactccgattacgctccactccaacagttctttgtagtgatggagcactgtctgaagcacggcctcaaagccaaaaagacctttctggggcagaacaaaagcttttggggtcccctggagctggtggaaaaactggtgcctgaggctgccgaaataaccgcttccgtcaaggacctacccgggctgaaaacccctgtcggaaggggccgggcatggctgcgtctggctctaatgcagaagaagctcagcgagtatatgaaggctctgatcaataagaaggaattactgtcagaattttacgaacctaacgcgctcatgatggaggaggagggggccattattgcgggcttgttggtgggacttaacgtgatcgacgcaaacttttgcatgaagggggaagacctcgactcccaggtgggcgttattgacttttccatgtatctcaaggacggaaattcctccaagggcaccgaaggggatggacagatcaccgccatccttgaccaaaagaattacgttgaagagctgaatcgtcacctgaacgccaccgtgaataatctgcaggctaaggttgacgctctcgagaaatccaacactaagttgaccgaggaactagccgtcgcaaataatcgcattatcacactccaggaggagatggaacgggtgaaggaagaaagttcctacattttagaatctaacagaaagggaccaaaacaggaccgaactgcagaaggccaagcactctccgaggctaggaaacatctgaaggaagagacccagttgcgcctggacgtagagaaagagctcgaaatgcagatttcaatgcggcaggagatggagctggcaatgaagatgctcgaaaaggatgtgtgcgagaaacaggacgcgctcgttagtctacgtcaacagttagatgaccttagagctctaaagcacgagctggctttcaaattgcagtcctccgacctcggtgttaaacagaagagtgagttaaacagcagactcgaggaaaaaaccaaccagatggctgccactataaagcagcttgaacaaagcgaaaaagatctggtcaagcaggctaagacactcaattctgcagccaataagctcatcccgaaacatcactag

SEQ ID NO: 107731 - DNA, 2394 bp, synthetic construct
  misc_feature 1..2394: note = Description of Artificial Sequence: Synthetic coding sequence
  source 1..2394: mol_type = other DNA
atggcccacagatgcctgcggctgtggggccgaggtggctgttggcctaggggactccagcagttattagtgcccggcggggtggggccgggtgagcagccttgtcttcgcaccttgtatcgcttcgttaccacccaggcccgcgctagccgcaatagcctgcttaccgacataatagccgcttatcagaggttctgctctcgaccccctaagggctttgagaagtacttccccaatgggaaaaatggcaagaaggcctctgagccaaaggaggtcatgggagaaaagaaagagtcaaaacccgctgccaccactcggagttctggcggtggcggtggtgggggggggaaaagaggggggaagaaggatgattcccattggtggtctagattccagaagggagacatcccatgggacgacaaggacttccgcatgtttttcctctggacggccctcttctggggcggggtgatgttttacttgcttcttaagcgttccggtagagagattacatggaaggattttgtgaataactacctgtcaaaaggagtggtggaccgcctcgaggttgttaataaacggttcgtaagggtaacatttacgcctggtaagactcctgtcgacgggcagtacgtttggttcaacattggcagtgttgacacctttgagaggaatctggagacgctccagcaggaactggggatcgaaggggaaaatcgcgtgccagtcgtgtatattgccgaatcggacgggtcttttctgctgagcatgctgcccacggtgctgatcatcgcgtttctcctgtacactatccgcagaggccctgctgggatcgggcgtactggcaggggcatgggcggcctgttctcggtgggggaaacgacagctaaagtgcttaaggatgagatagacgtgaagtttaaggacgttgctggatgcgaagaagctaagctcgaaataatggagtttgtgaatttcctcaagaaccctaaacagtaccaagatttgggagcaaagatcccgaagggtgctattctaacagggcctcctgggaccgggaagaccctgttggccaaagccactgccggtgaggcgaatgtgccctttatcactgttagtggatcggagttcctggagatgtttgtgggagtgggacctgctagagtacgtgacctctttgcgctggcaaggaagaatgccccgtgcatcttatttatcgacgagatcgatgccgtcggcaggaagcggggccgtggcaattttggaggacaaagcgagcaggagaatactctgaatcagctgctggtggagatggacggctttaatactaccactaatgtggtgattctcgccggcactaaccggccggacatcctggacccagcccttctgcgaccgggccgtttcgaccgacagatcttcatcgggccaccagatatcaaaggccgcgcctccattttcaaggttcatctgcggcccctgaagctagattccacactggaaaaagataagctcgctcgtaaactggcaagtcttactccaggtttctctggagcagatgtggcgaacgtgtgtaacgaagccgcgctgatcgccgctcgacatctgtcagacagcattaaccaaaagcacttcgagcaagcaatcgagcgcgttatcggaggcctggagaaaaagacccaagttctccagcctgaggagaaaaagacagtcgcttaccacgaagccggacatgcagttgcaggttggtaccttgaacacgcagatccattactcaaggtgagcattatcccaagggggaaaggtctgggctatgctcaatatctgcccaaagaacaatacctctacaccaaagagcaactcctcgataggatgtgtatgacacttgggggtcgtgtctctgaagagattttcttcggcagaattactacaggggctcaggatgatctgcgcaaagtcacacagagtgcctatgcacagatcgtgcagtttggcatgaacgaaaaggtgggtcaaatctcatttgatttacctaggcagggagacatggtcctcgagaaaccctactcggaagctacggctcggttaattgatgatgaagttcggattctcattaacgatgcatacaaacgcaccgtagccttgctcacagagaaaaaggctgacgtggagaaggtggcattactcttgctagagaaagaggttctcgacaagaacgacatggtggagctgctcggacccagacccttcgccgagaaatccacatatgaggagttcgttgagggcaccgggtccctcgacgaggatacgagtttgcctgaaggcctgaaagattggaacaaagagcgggaaaaagaaaaggaagagccccccggagaaaaggtggccaactag

SEQ ID NO: 107732 - DNA, 2439 bp, synthetic construct
  misc_feature 1..2439: note = Description of Artificial Sequence: Synthetic coding sequence
  source 1..2439: mol_type = other DNA
ggtgcaggcggtaggcgccgcagagttgaatctctgggctcaagtgtatcacggaggcgcgcctctcttccagggggactctccccgagccgcgctcgcttcccccggcccccagttgtcgcctgtccgaggctgcgcgagcagccatgcttgaggaccctgtacaggttcgtgactacccaggccagagcaagccgaaactcactcctgacggatataatcgcagcctaccagaggttctgctcccggcctccgaagggtttcgaaaagtacttccctaacgggaaaaacgggaaaaaggctagcgagcccaaggaggtgatgggggagaagaaagaatctaagccggccgccaccaccagaagcagcggggggggcggcggcggcggcggaaagcgaggaggaaagaaagacgacagtcattggtggtcccgcttccagaagggagatatcccttgggatgataaggattttaggatgtttttcctctggacagctcttttctggggcggtgtgatgttctatttgctacttaaacggtctggcagagaaattacctggaaagactttgtcaacaactacctgagtaagggagtcgtggatcgtctcgaggtcgtgaacaaacgttttgtgcgcgtgacctttacgcctggaaagaccccagttgacggccagtatgtctggttcaacattgggagcgtggacactttcgagaggaatttggaaacgctccagcaagaattgggcatcgaaggtgagaaccgggtgcctgtggtctacatcgccgagtccgacgggtccttccttctctccatgctgccaaccgtgctgataatcgctttccttctgtacactatacgtaggggacctgccggcattggcaggacaggtcgaggcatgggagggctcttcagcgtcggtgaaactaccgccaaagtactgaaggatgaaatcgatgtaaaattcaaggacgtcgcaggttgtgaggaggccaagttggagatcatggaattcgtgaatttcttaaaaaatcccaagcagtaccaagacctgggagcaaagattcccaagggcgcaatattaaccggcccacctggcacgggaaaaactctattagctaaagcaacggcaggggaggcaaacgtaccatttattactgtgagcggcagcgagtttcttgagatgtttgttggggttggacccgcaagagtccgggatctttttgccctggccaggaagaatgcaccctgtatcctgttcatcgacgaaatcgatgctgttgggagaaagcgtggtagaggcaacttcggtgggcagtcagaacaggagaacacgctcaatcagttattggttgagatggacggtttcaacacaacaacaaacgtagtgattttggcggggacaaaccgccctgatatcctcgatccagccttattgcgtccaggccgcttcgatcgacaaatattcatcggaccccctgacatcaaaggaagggcaagcatctttaaagtgcacctgcgccccctgaagctggatagcactctggagaaggataaactggccagaaaactagcttcactcacacccggcttcagtggagccgacgtcgctaatgtctgtaacgaggccgcccttatcgccgcaaggcacctttcagactctattaatcagaagcatttcgagcaagcgatcgagagggttatcggaggtcttgagaagaaaacgcaggtcctgcaaccagaagaaaaaaagacagtcgcatatcatgaggcgggtcatgccgtggcaggctggtatttggaacacgctgaccccctcctgaaggttagcatcatccctcgcggcaagggcttggggtatgctcaatatctgccaaaggagcagtacctgtacactaaagaacagctgctggatagaatgtgtatgacactgggcgggcgggtgtccgaggagatctttttcgggcggatcactacaggggctcaagacgacctgagaaaggttacccaatcagcttatgcacaaatcgtgcagttcggcatgaatgagaaggtgggacagatttctttcgacttgcctcgtcagggagacatggttcttgagaaaccatactccgaagctaccgcccgactcattgacgatgaggtccgcatattgattaatgatgcgtataagagaacagtggccctcttgaccgagaaaaaggcagacgttgagaaggtggctttgctgctgctcgagaaggaggtgttagataagaatgatatggtggaattgctgggtccaagaccatttgccgaaaagagtacctatgaagagttcgtcgaaggtacaggaagtctcgacgaagatacgtccctccccgaaggtctgaaagattggaataaggagcgtgaaaaagagaaggaggagcctcctggtgagaaggtggccaactag

SEQ ID NO: 107733 - DNA, 7251 bp, synthetic construct
  misc_feature 1..7251: note = Description of Artificial Sequence: Synthetic coding sequence
  source 1..7251: mol_type = other DNA
atgacaacactcctctgggtgtttgttactctccgagtcatcactgctgcggtgaccgttgagacgtccgaccacgacaatagtctctcagtttccatcccacagccctcaccactgcgcgtgctgctgggcacctctttgacaatcccttgttatttcattgatcccatgcaccccgtgactaccgctccgtccacagcgcccctggccccaagaattaagtggagtcgggtgtcgaaggagaaggaagttgttctgttagtggccaccgagggcagggtgcgggttaactcagcgtatcaggacaaagttagcctgcctaattacccggccatcccaagtgacgccaccctcgaagttcagagcctccgtagcaatgactctggggtgtatcgctgcgaagtgatgcacgggattgaagattctgaagcgactctggaggtggtggtaaaagggattgtgttccattaccgggctatctctacaaggtacaccctggatttcgacagagcccagagggcctgccttcagaactccgcaattatcgcaactccagagcagcttcaagccgcttatgaagacggtttccaccaatgtgacgcaggctggctcgcagaccaaaccgtgcggtatccaattcatacaccccgcgaaggctgttacggagataaggatgagtttcccggagtcagaacttatggtatcagggacaccaatgaaacttacgatgtgtactgttttgctgaggagatggagggagaagtgttctatgccacatctccggagaagttcacatttcaggaagcggcaaacgaatgcagacgcctgggagctcgattagcaacaacagggcagctgtatctagcctggcaggccggaatggatatgtgctctgcaggttggctcgccgatagatccgtcaggtaccctattagcaaggctcgacccaactgcggcgggaatctgctcggagtgaggactgtgtacgtgcatgccaaccagacgggctatccagacccctcaagcaggtacgatgcaatctgctacacgggcgaggatttcgtggatataccagaaaattttttcggtgtcggcggggaggaggacataactgtacagacagtgacgtggccagacatggaactgcccctgcctaggaacataaccgagggggaggcccgtggttccgtgattctcaccgttaaacctattttcgaggtatctcccagtccactggaacctgaagagcctttcactttcgcacctgaaatcggtgctacagccttcgccgaagtggaaaacgagaccggagaagccacgaggccctggggctttcctacgcctgggctggggccagctaccgctttcactagcgaggacctagttgttcaggtgactgcagttcctggacagcctcatctccccggcggcgtggttttccactatcggcctggaccaacccggtacagtcttacattcgaagaagctcagcaggcatgcctgaggacgggagccgtgattgcctcacctgagcagttgcaggccgcttatgaggcaggctacgaacagtgcgatgctggctggctccgcgaccagaccgtcagatacccaatcgtctcccccagaacgccatgcgtcggagataaagattccagccccggtgttcgcacatatggcgttcgtccttcaaccgaaacttacgacgtttactgctttgtcgaccgattggagggagaggtcttttttgccacccggttggagcagttcaccttccaagaagcgttggaattttgcgaatcacacaatgctaccctggctaccactggccagctctacgcagcctggtctagagggctggataagtgctatgccgggtggctggctgacggcagtttgaggtatcccatcgtcacaccccgacctgcctgcggaggcgataagcccggggtgaggacagtctatctgtatccaaaccaaactggactgccagaccccctgtctcgccatcatgccttctgttttagggggatctccgccgttccttccccgggggaggaagagggcggaacccctacatccccaagtggtgtggaggaatggatagtcacacaggtggtgccgggggtggctgcggtgcctgtcgaggaagaaactacagctgtgccaagcggcgagaccactgctatcctagaatttacaaccgaacctgaaaatcagaccgagtgggagcctgcctacacacccgtgggcaccagcccgctgcccgggatcctgcctacttggccccctactggggccgcaaccgaggagtctacagagggtccgagcgccactgaagtcccatctgcctcggaggagccctcaccttctgaggtgcctttcccttctgaggaaccctcaccatccgaggaacctttcccctcagttaggcctttcccatccgtggaattatttccttccgaggaacctttcccctccaaggagccgtcaccatcagaagagccatcagcatccgaagagccttacacaccgtcccccccggtgccatcttggacagagctgccgtcctctggtgaggaatcaggggcccctgatgtgtccggcgacttcactggctctggggacgtgtccggacacttggacttcagcggccagctcagcggcgaccgcgcatctggattaccctccggggatctcgactcaagcggcctgactagtactgtcggatctgggctgccagttgagtcaggactgccctcgggcgacgaagagcggatcgaatggccatctacccctaccgtcggcgaactcccttcaggcgccgagatcctggaggggtcggccagcggcgtgggtgacctctcgggtctgccgagcggcgaagtgctggagacatctgcaagcggagtcggtgacctttcaggcctgccctccggagaagtgctagagactaccgcccctggcgtagaggacatatccggcctccctagtggggaggttttggagacaacagcccctggcgtagaagatatcagtggcttgccatccggcgaagtccttgaaaccacagcaccaggtgttgaagatatctctggactgccatccggagaggtgctcgaaacaacggcaccaggcgtggaggatatctccggcctgcccagcggtgaagtacttgagaccacagctcccggcgtcgaggatatcagcggactgccctctggagaagtgctcgagaccgcagctcccggagtggaggacatcagcgggctcccgtcaggtgaggtgctggagaccgctgccccaggggttgaagatatttccgggttgccaagtggagaagtattagaaacggccgcacccggcgtcgaagatatctctgggctcccgtcaggagaggtactggaaacagcagccccaggggtggaagacatcagcggattaccaagtggtgaggtgctggaaaccgccgctccaggcgtagaggatattagcggcctaccctcgggcgaggtgttagagaccgcggcaccgggggtcgaagatatatctgggcttccctctggggaggtgctggagaccgccgctcccggagtggaggacatctccgggctgccctctggcgaggtgctcgagaccgccgcaccgggtgttgaggacatctctggtctgccttctggagaggtactggaaacggctgctcccggcgtggaggatatcagtggattgcctagcggagaggtgcttgaaaccgccgcacctggcgtcgaggacatcagcggattaccgagcggcgaagtgctggagacggctgcaccaggagtcgaggatattagcggcttaccctccggggaggtgctcgaaacaactgcaccaggcgtcgaggaaattagtggcctacctagtggggaagtgctggagaccaccgctcccggggttgacgaaatctccggactaccctccggcgaggtcctggaaacgacagcccccggcgtggaggaaatctctggcctgccttctggcgaagtactggaaaccagtacttctgcggtcggcgatctgtctgggctgccgagcggaggagaggtgctggagatctccgtttccggggtggaggacatttcggggctcccctcgggggaggtcgttgagacctccgcctcaggaatcgaggatgtttctgaactcccttccggtgaggggctggagaccagtgcatcgggtgtggaggatctgtcccggttgcctagtggtgaagaggttctggaaatcagtgccagtggtttcggagacctgtccggcctgccctcgggcggtgaaggcctggaaacaagtgcatctgaggtgggaacagacttgtccggcctcccttcagggcgagagggcctggaaacgtcggccagtggggccgaggacctcagcggcctgccctcaggaaaggaggaccttgttggatctgcatccggcgatctggatcttgggaaattgccatcaggcaccttgggctcaggccaagccccggaaacaagcggcctcccttccgggttcagcggcgagtactctggcgtcgatctagggagcggaccaccttctggactgccagatttctctggcctcccctcagggtttcctactgtatcgttagtcgacagtacattagtggaggtcgtaactgcttctactgcctctgagctggagggtaggggcacaattgggattagtggcgctggtgagatctccggtcttccatccagtgagctggacatctcaggacgcgcatcagggctgccaagcggcaccgaactgtccggccaagcctctggctcccccgacgtatccggcgaaataccaggactttttggggtatccggtcagccctctggtttcccagatacatcgggcgagactagcggagtgactgaactcagcggcctgagctccggccagcctgggatcagcggagaagcttcaggcgtgctgtacgggacctctcagccttttgggatcactgatctgtctggcgagacctcaggagtacctgatctgagtgggcagccatctggcctcccaggcttttcgggcgctactagtggcgttccagatttagtgtccggcaccacatctggctctggggagagttcagggatcacattcgtcgatacttccctggttgaggtggcgcccactacttttaaggaggaagaaggattggggtctgtggagctgtccggcctcccttctggcgaagccgacttaagcgggaagagtggcatggtagatgtctccggacagttctccggtaccgtggacagttcaggtttcacgtcccagacaccagaatttagcggcctgccttcgggcatagcagaggtgtcaggtgaaagctcgcgagctgagatcggctcctcacttccctctggggcctattatggctcaggaactcccagctcgttccccacagtctcgctggtcgacagaactctcgtggagtccgtgacccaagcccccaccgcacaagaggctggggaagggccatccggcattcttgaactgagcggggcccacagcggcgcacctgatatgagtggtgagcacagtggcttcctggatttgtccggcctgcagtcgggtctgatcgagccatctggcgagccgcccggtacgccatacttttctggggatttcgcatccaccaccaatgtgtctggcgagagttcggtggccatggggactagcggggaagccagtggtctgccagaagtgaccctgataacaagcgaattcgttgaaggcgtaactgaaccaaccattagtcaagagttggggcaacgaccacccgtcacacacaccccccagctattcgagtcctccgggaaagtcagcaccgccggggacattagcggcgccactccagtgctcccaggatctggggtcgaagtcagctcagtgcccgaaagtagcagtgaaacttccgcgtaccccgaagcgggatttggtgccagcgctgcacccgaggcctcgcgcgaggatagtggaagtccggatctgtccgagacgacaagcgcatttcatgaggccaatctcgagaggtctagtggcctcggagtttccggatctactctgacattccaggagggagaggcttctgcggcacccgaagtgagcggcgagagcactaccacctcagacgtaggtacagaagcacctggactgccaagtgccacccccaccgcatccggggaccgaactgaaatttcaggtgatctatcgggacacacctcccagctgggcgtggtcatctccacatctatacctgaaagtgaatggacgcagcagacacagcgtccggccgagacacacctggaaatcgagtcctcctcattgctctacagtggcgaggagacccacaccgtggagaccgcaacttccccaactgatgcaagtatccctgcatctcccgagtggaagagggaaagcgagtctaccgctgctgcccctgcccgatcctgcgcagaggagccttgtggtgccggaacctgtaaggaaacagaaggacatgtcatatgcctctgtcctcccggttatactggggaacattgcaacatagatcaagaggtgtgcgaagaagggtggaataaataccaggggcattgctaccggcacttccccgatcgagagacatgggtcgatgctgaacgtcgttgcagggaacagcagtctcacttaagcagtatcgtgacacccgaagagcaggagttcgttaataataacgctcaggactatcaatggataggcctcaatgaccgaactattgaaggtgattttcgttggtctgatggccacccaatgcagttcgagaactggcgccccaaccagcccgataacttcttcgcggccggcgaggattgcgtggtgatgatctggcacgagaaaggggagtggaacgatgttccctgtaactatcatttgccattcacatgcaagaaagggactgttgcgtgtggagaaccacctgtcgtcgagcatgccagaacatttgggcagaaaaaagatcgatacgagatcaatagtctagttcggtaccagtgcacggaggggtttgtccagcgacacatgcccactatccgctgtcaaccatctggccattgggaagagcctcagatcacgtgtacagatcccacgacttataaacggcgtttgcagaaaagaagctctaggcatcccagaagatcccggcctagcactgcccattag

SEQ ID NO: 107734 - DNA, 7296 bp, synthetic construct
  misc_feature 1..7296: note = Description of Artificial Sequence: Synthetic coding sequence
  source 1..7296: mol_type = other DNA
atgactacattgctgtgggtgtttgtaacactccgcgtgatcaccgctgccgttaccgttgaaacttctgaccatgacaacagcctgtcggtgagtattccacagcccagccccttgagggttctgctgggaactagtttgactattccttgctactttattgatccaatgcatcccgttacaacggcgccttctaccgcccctctagcccctagaatcaaatggtccagagtgagtaaggaaaaagaggtggtgctgcttgtggctactgaggggcgcgtgagggttaacagcgcttaccaggataaagtgtctctccccaattatccagccatcccgtcggatgcaactttagaggtgcaatctctgcgctcaaacgacagcggcgtatatcggtgtgaagtcatgcatggcattgaagactccgaggccaccctggaagtggttgttaaaggcatcgtatttcattacagggctatctccacaaggtacactctggacttcgatcgcgcccagagagcttgcctccaaaattcagctattatcgcaacacctgagcagctccaagctgcctatgaagacgggttccaccagtgtgatgccggctggcttgccgatcagaccgttcgctacccaatccatacgccccgcgaaggctgctatggcgacaaggacgagttcccaggcgtccgcacctacggcattagggatacaaacgagacctacgatgtttactgcttcgctgaggagatggaaggcgaagttttctatgccacctctccagaaaagttcacgttccaggaggcggcgaatgaatgcaggcgtctcggagccaggctcgcgacgacgggtcagctctacttggcctggcaagctggcatggacatgtgtagcgccgggtggctggccgatagatcagttcggtaccccattagcaaagcccgccccaactgtgggggcaacctgttaggcgtcagaacggtgtatgtgcatgccaaccagaccgggtacccggacccttcaagtcgatatgatgcaatctgttacaccggtgaggacttcgtcgacatcccagagaatttctttggggtaggcggcgaagaagatattactgtgcaaacggtgacttggccagatatggagctgcccttgccacgcaacattaccgaaggcgaggcccgaggatccgtgatcttgactgtgaaaccaattttcgaggtgagcccttcacctctggaacccgaggagccctttacattcgctcccgaaattggggctaccgctttcgctgaagtggagaacgaaacgggcgaagccacccgaccttggggatttcccacaccaggcctgggacctgcaactgcttttactagtgaagacctcgttgttcaggttacagctgttcctgggcagccgcacctgcccggaggtgtcgtgttccactatcgtcccgggcccacacgatactccctgacttttgaagaagctcagcaggcttgcctccgcacaggcgcggtcattgcatccccagaacagctgcaggccgcgtatgaagccggttatgagcagtgcgatgccggctggctacgagaccagactgttaggtacccgatagtgtcacctagaacaccatgtgtaggcgacaaggattctagccctggcgtcaggacatacggcgtgcgacccagcacagagacctacgacgtatactgcttcgttgacagactggaaggagaggtctttttcgctaccagacttgaacaattcacattccaggaagctcttgaattttgtgaatcccacaacgcgaccctggctaccaccggccagctatatgctgcttggtcaagagggcttgataaatgttacgctgggtggctggcggacggttcccttcgctatcctatcgtcactcctaggccagcatgcggaggggacaaaccgggtgtgcgtaccgtgtacctttatcctaaccagaccggactccccgatcctctgagcaggcaccacgcattttgtttcagaggcattagcgccgtcccttctccaggcgaggaagagggaggcacacccacctcgccgtctggagttgaggaatggatcgtaacccaagtcgtccccggagtggcagcggtcccagtggaggaggagacaaccgcagtgccgtccggggagacaacagccatcctggagttcacaaccgaacccgagaaccagacggaatgggaacctgcctacactcctgtcggaacaagcccactgcctggcatcctgcctacgtggccccctaccggggcagcaaccgaggagtcgacagagggcccttcagccactgaggtcccctcagcatcagaagagccaagcccttctgaagtgcctttcccctccgaggagcccagcccttctgaagagcccttccccagtgtaaggccgtttccttctgtggaattgttcccatctgaggagcccttcccctcaaaggaaccatctccctcagaggagcccagcgcgtccgaagaaccttatacacccagtcctcctgtccccagttggacagagctaccctcgagtggtgaagagagcggtgctcctgacgtatcaggcgacttcacaggatcaggagacgtctctggccatctcgacttctctggacaactgtccggcgatagggcctccggcctgccatctggtgacctcgatagcagcggtctaacatccactgtgggctctgggctccctgttgagagcggcctccccagcggagacgaagaaagaattgagtggcccagtacccccacagtcggcgaacttccttcaggagcagagatcctcgagggaagtgcttcaggcgtcggggacctcagcgggctccctagcggagaggtactggagacttcagccagtggagtgggggacctctctggcctgccatcaggggaggtccttgaaaccactgcgcccggcgtggaagatatcagcggtttaccatccggagaagtcttagagaccacagccccgggagtggaagatatttcggggcttccgagcggagaagtgctggaaactacggcgcccggggtggaggatatatctggactccccagcggggaggtgctcgagacaacagcccccggtgtggaggacatctccggcctacctagtggggaggtcctggagactactgctccgggtgtcgaggatatctcaggcctgcccagcggcgaggtgctggagaccacggcacccggcgtagaggacatcagcggactgcctagcggagaagtcttagagactgcagcccccggtgtggaggacatttctgggctcccttccggagaggttcttgagacagccgccccgggcgtcgaggacatcagcggactcccttcaggggaggtgctcgagaccgctgcgcctggcgtagaagatatctctggcctgccttctggtgaagtgctggaaacagccgctcccggagttgaggatatctccggcctgccttccggtgaagtgcttgagaccgccgcccccggcgtagaggacatatctggtctaccttcaggtgaggtgctagagaccgcagccccaggcgtagaagatatctccggtctgccttccggggaagtactggaaacagccgctcccggtgttgaagatatttcaggtcttccttctggtgaagtgctcgagactgccgcccctggcgtagaagacatcagcggactgccctccggggaagtactggaaaccgccgctccaggtgttgaggatatcagcggccttccttctggagaggtgctggagacagctgcgcctggagtggaggatatttccggactgccttctggcgaggtcttagagacagcagcccctggtgttgaggacatttctggtttgcccagtggggaggtcttggagactgccgccccgggggttgaagacatctctggactccccagtggagaagtgttggaaaccgcagcccccggtgtggaagacatttcagggttgcctagtggcgaggtattagaaacagctgctcccggggtcgaagatatcagcggtttgccttctggagaggtcctcgaaaccgccgccccaggtgtggaggacatatcagggctcccctcaggcgaagtactggaaaccgccgcccctggagtcgaggatattagcggacttccatccggagaggttctggaaactaccgcccccggagtggaggaaatttcagggcttccttccggcgaggtactcgagacaacggcacccggggtggacgagataagcggcctgccttccggtgaggtcctggagacgacagccccaggggttgaggaaataagtggtctgcctagcggggaagtcctggagacctccacgtccgccgtgggcgacttgtccgggctcccctctggcggagaggtcctagaaatttctgtgtctggagtcgaggacatctcaggactgccatctggagaggtagtggagactagcgcctccgggattgaggacgttagcgagttgcccagtggtgaaggactcgaaacttcagcgtctggcgtcgaagacttgtctagactcccctccggcgaagaagtgctggagatttctgcttctgggtttggcgatctgagcggtctgccgagcggcggcgaaggactcgagacttccgccagtgaagtgggtaccgatctcagcggcctcccttccggccgagaagggctggaaacctcagcttctggagcggaggacctttcaggccttccttcagggaaagaagatctcgtggggtccgccagcggagatctcgatctcggaaagctgcctagcggtacactgggaagcggacaggcccctgaaacctcaggactgccatctggattctcaggcgagtatagtggggttgatctaggatcaggtcccccgtcagggctccctgatttcagtgggttaccgagcggatttcccacagtgagtctcgttgatagcaccctggtcgaagttgttactgcatctactgccagcgagcttgagggtaggggaactattgggatcagtggggccggtgagatcagcgggctgcctagctcagaactggacatctccggaagagcaagcggtctgccctctggcactgagttatccggccaagcaagtggctctcctgatgtgagcggcgagatccctgggctatttggggttagtggccagccttctggcttccccgatacctctggtgaaacaagtggcgtcacagagttgtctgggcttagtagcggccagcctggaatatcaggggaagcctctggcgtgctatatgggacatcccagccattcggcataaccgatctgtcgggcgagacttccggggtccccgacctcagtggccagccatccggcttgcccggtttttctggggccacctctggcgttccagatctggtgtccggtactacctcaggaagcggtgaaagttctggcataacgtttgtcgatacttccttagtggaagtggccccaactacttttaaagaagaagaaggcctcggcagcgtggaattgagcggtctcccatcgggagaggccgacctgtctgggaagtccggcatggtcgatgtgtccggccagttctctggcaccgtggacagtagcgggttcactagccagaccccagagttctcaggtctgcctagtggcatcgccgaggtgagtggagagtctagtcgggccgagataggctcttccctgccttccggtgcatactatggatccgggactcctagcagtttcccaacggtaagccttgttgaccgcactttggtggaatctgttacccaagccccaactgcccaggaggccggcgaagggccaagcggaatcctcgagctttcgggcgcgcattcaggagcccccgacatgagcggtgagcatagcggttttctcgatttgtctgggctgcaatctggcctgatcgagccatctggcgagccgcctggcacaccttatttcagcggagatttcgcatccacgaccaacgtgtctggcgaatcaagcgtggcaatgggcacttccggcgaagcttctggattgccggaagtaacactgatcacaagtgagttcgtggagggtgtgaccgagccaaccatttcccaagagttgggccagcgccctccagtgacccacactccgcagttgttcgaaagttctggaaaggtttcgacagcaggggacatctctggcgctacccccgtgctccctggaagtggggtggaggtaagttctgtgcccgagagcagctctgaaacatcggcataccctgaagccggctttggtgcatctgccgcgcccgaggcatcaagagaagattctggctctcctgatttaagcgagactacttccgccttccacgaagccaacctggagagatcctcaggcttgggcgtatcaggttctactctgactttccaggagggggaagcatccgccgctccagaggtgtctggtgagagcacaactacatcagacgtgggcaccgaagcccccggcttgccttcagctaccccaacagcttccggcgaccgcacagaaatttccggggatttaagcggtcacacaagccagctcggagtggttatctcaacctccataccagagtccgaatggactcagcaaacacagcggcccgccgagacacatctggaaatagagtcatcttccctgttatactcaggagaggaaactcacaccgtggagaccgctacatcgccaactgatgcatctatacccgcaagcccagagtggaagcgggagagcgagtccactgccgcagaccaggaggtttgcgaagagggctggaataagtaccagggtcattgttatcggcacttcccggaccgcgagacttgggtcgatgctgagcgccggtgccgagagcaacaatcccatctttcatccatcgtcacacctgaggagcaggagttcgtgaacaataatgcgcaggattatcagtggattggactgaacgacagaacaatcgagggcgattttcgctggagtgacggccaccccatgcagttcgagaactggcgaccaaatcagcctgacaatttctttgcagccggggaagattgcgttgtgatgatctggcatgagaagggtgagtggaacgacgtcccatgcaactatcacctgcccttcacctgcaagaagggaacggctacaacatacaagcggaggctgcagaagaggtcctcccgccatccaagacgttccaggcctagtacagcccattag

SEQ ID NO: 107735 - DNA, 7593 bp, synthetic construct
  misc_feature 1..7593: note = Description of Artificial Sequence: Synthetic coding sequence
  source 1..7593: mol_type = other DNA
atgacgactctcctgtgggtgtttgtcactctgcgtgtcatcacggcagcagtaaccgtggaaactagcgatcacgataattcattgagtgtgtccatccctcaaccatcccctctgcgagtgctactcggaacatcgttaaccattccctgttacttcattgatcccatgcatcctgttacaacagcccccagcactgcacctctcgctcctcgcatcaagtggagcagagtctccaaggagaaagaagtggtcctgctggtcgcaacagagggacgcgtgagagtgaatagtgcctatcaggacaaggtgtcgctcccaaattatcccgccatccccagcgatgccacactggaggtgcagtctctgaggagtaacgactctggcgtttacagatgtgaagtgatgcacggaatagaagatagtgaagccacgctcgaagtagtcgttaaagggatcgtgttccattatagggccatatcgacccgctacacactggacttcgaccgcgcccagagggcttgcctgcagaattcagccatcattgccaccccagagcagcttcaggccgcatacgaagacggttttcatcaatgtgatgccggctggctggctgatcagaccgtgaggtatcccattcacacacccagagagggttgctatggagacaaagacgagttcccaggggtacgtacctatggtatccgggataccaatgagacatatgacgtgtactgcttcgcagaggagatggaaggcgaggtgttctacgctacttcccctgaaaagtttaccttccaggaggctgcaaacgaatgtcggcgcctcggcgcccggctagcgacgaccggacagctatatctggcctggcaggcgggaatggacatgtgtagcgctggatggctcgccgaccgctcggtgcgctaccccatctcaaaagcccgacctaactgcggtggtaacttgctcggtgtaagaacagtttacgtgcacgctaaccagactggatatccggaccctagttcacgatatgacgcaatttgctataccggggaagactttgtggatatccctgaaaatttttttggtgtgggcggtgaggaggacatcacagtgcaaaccgttacctggccagacatggaactgcctctgccccggaatatcaccgagggcgaggcgcgcggtagtgtgattctgaccgttaaaccaatttttgaggtgtcacctagcccactcgagccggaggaaccgttcaccttcgcccccgagatcggcgcaaccgcttttgccgaagtggagaacgagaccggcgaggcaactagaccctgggggtttcccacacccggcttaggacctgccacagcctttacttcagaagatctagtcgtgcaggtcaccgcagtgccaggacagcctcatttaccaggcggggtggtgtttcactaccgccccggccccactcggtattctttgacattcgaggaggcacaacaggcctgtctccggactggagctgttatcgcctctccagaacagctgcaagcagcttacgaggccggttacgagcagtgcgacgccgggtggctccgcgaccaaaccgtgcgctacccaatcgtgtctccacgcactccttgtgttggggacaaagactcgtcacctggtgtccgcacctacggtgttcggccgagcacggagacctacgacgtgtactgttttgtcgacaggttagagggcgaggtgttcttcgcaactcggctagagcagttcacctttcaagaagcactcgaattctgtgaatcacataacgccacgctggccacaacgggccagctctacgccgcttggtcacgcggcctcgataaatgctacgcaggatggttggctgatgggagtctccgttaccctatcgttactcctcggccggcttgcggaggggataagcctggtgtgaggaccgtatacctctatcccaaccagaccggactgcccgatcctctgtctagacatcacgctttttgttttcgcggaatttccgccgttcctagtccaggcgaagaggagggagggacccctacgtccccctccggagtcgaggaatggattgtgacacaagtggtgcctggggtcgcagccgtgcctgtggaggaggagacgactgctgtcccctctggagaaactacagccatcttggaattcacgactgagccggagaaccagacagagtgggagcctgcttacaccccagtagggactagcccgcttccaggaattctgcccacctggcctcctactggggcagccaccgaggagtccacagagggcccgtccgctacagaggtgccctccgcatctgaagagccatcccccagtgaggttccttttccatctgaggaaccaagcccgtcagaggaaccatttccctccgtgcgcccattcccaagcgtggaactgtttccatcggaagagcctttcccatctaaggaaccaagcccaagtgaagagccaagtgcgtccgaggagccatataccccttctccccccgttcccagctggactgaacttccaagcagcggcgaggaatctggcgcaccagatgtcagtggggattttaccggcagcggcgatgtgtccggacatctggattttagtggccaattgtcaggggatcgtgcgagcggcttaccttctggcgatttggactcgtctgggttaacttcaaccgttgggagcggccttccagtcgaaagtggactgccgtcaggagacgaagagcgtatcgaatggccaagcactccaaccgtaggggaactaccatctggcgccgaaattctggagggatcagcctcaggtgttggggacttgtctggcctaccctcaggagaagtgctcgagacttctgcttcaggcgtgggagacttgtctgggctaccgtccggcgaagttttggagacaacagcccccggtgtggaggatatcagtggactgccttccggtgaggttttggagactaccgcacctggcgtcgaggacatctcaggcttgccttccggcgaagttctggagaccacagcacccggggtcgaagatatttccgggctccctagcggcgaagtcctggagaccactgcccccggcgtcgaagatatcagcggactgcctagcggggaggtgttagagactacagcaccaggggtggaagatatctcaggtttaccctccggtgaagtgttggaaacaacagctcccggcgtggaagacattagcggtctgccgtctggcgaagttctcgaaacagccgcaccaggcgtcgaagatatctcaggtctgcctagtggcgaggtactggagacagccgccccaggggtggaggatatttccggacttcccagcggagaagtcctggagacagcagcacctggagtggaagatatttctggccttccttcaggtgaggtgttagaaaccgcggccccaggagtggaggacatctcggggttaccatcaggcgaagttttagagaccgcagcacctggggtggaggacatcagtggtctaccctctggagaggtgctagaaaccgcagccccaggggttgaggatatctctggacttcccagtggcgaggtattggagacggccgctcccggagtggaggatatatccgggctcccctccggagaggtgttggaaaccgctgctcctggagtcgaggacatctccgggctcccctccggagaagtactggaaacagcagcacccggtgtcgaagacatctctggcctccccagcggcgaggtgctcgagacggcggctcctggcgtcgaggacatctctgggctaccgtccggagaggttctagagacggccgcacccggtgttgaagatatcagcggcctccctagcggcgaggtgctcgaaaccgcagcgcccggtgtggaggatattagcgggcttccatctggcgaggtgctggagacggctgcccctggggttgaggatatttcaggactgccctctggagaggtactggagactgctgcacctggtgtggaggacatttccggtctcccctccggtgaagttctggaaaccgcagcgccgggcgttgaggatatcagcggactccccagtggggaggtactggaaaccgcagcccccggtgtggaagacatctcgggccttcccagcggcgaggtgctggagactacagctccgggagttgaggagatctcgggcctccctagcggagaggtcctggagaccacagctcctggtgtcgacgagatctccggattaccaagcggcgaggtcctggagacaaccgctcccggcgtggaagagatcagtggcctcccttctggcgaggtactcgagaccagcacaagcgctgtaggcgatctaagtgggttgccatccggcggcgaggttctggagatctccgtcagcggagtggaggatatatccggcctcccttcaggtgaggttgtagagaccagtgcttctgggattgaggacgtcagcgaattacctagcggagaaggcttggagacctcagcctccggtgtggaggatctgagccgcctgcctagtggcgaagaggtgcttgaaatttccgcctctggcttcggcgacttgagtggcttgccaagcggcggagaaggccttgagacctcagctagtgaggtgggtacagatctgagcggactgccatcaggaagggagggactggagacaagcgcttccggagctgaggacttatccggacttccttcagggaaagaagatctggtgggctccgcttccggagacttggacctgggcaaattgccatctgggacacttgggagcggccaagcacctgaaacatctggcttgcctagcggcttcagcggagaatattccggagtggacctgggctccggtccaccctctggactgccagacttctctggactgccttcaggatttccaacagtgagcctggtcgactctaccttagtggaggtcgtgaccgccagcacagcctccgagcttgaaggtcgcgggactattggtatttctggggctggagagattagcggccttccttccagcgaactggacataagcggcagggcctcaggactgccatcagggacagagctctctgggcaggcctctggctcacctgatgtgtctggggaaatccccggattattcggagtgagtggtcaaccctctgggttccctgataccagtggtgaaacatcaggcgtcacagagctcagtgggttgtcatcgggccagcccgggatctcaggggaagcaagcggagtgctgtatgggacctcacagccatttggtattaccgatctgagtggcgaaacaagcggagttccagacctgagtggtcagccttctggtttgccaggcttcagcggagctacgtctggagttccagatctggtgagcgggacgacatccgggtcaggggagtcttctggcatcaccttcgtggatacatccctggttgaagtagctcccaccacattcaaagaagaggaaggactggggtccgtagagctgtctggcttaccttccggagaggctgatctgagtggcaagagtggaatggtcgacgtgagcgggcagttcagtggtacggtggacagctcgggcttcacctcccagacaccggagtttagcggccttccctcaggaattgccgaagtgtccggcgagtcatcccgcgcagagataggatccagcctgccctctggggcctattatggcagcggcaccccctcctccttcccaacggtgagcctggttgatcgaactctggttgagtccgtgacgcaggcgccaacagcacaggaagctggtgagggcccatccggcatactggagctgtcaggtgcccattctggagcccccgacatgtcaggggaacattctggcttcctcgatctttccggtcttcagagtggcctgatcgaaccttctggagagcctcccggtacaccctacttttctggagattttgcctccaccaccaatgtttccggcgaaagcagcgtcgccatgggcaccagtggggaggcgtccggcttgcctgaggttaccctgatcacaagcgaattcgttgagggcgtgacagaacccactattagccaagaactcggccagcgacctcctgtcacccataccccgcagctctttgagtcctcaggaaaagtgtccaccgccggggacatctcaggggccacacccgtactgccaggatcaggagttgaggtctcttcggtgccagagtccagcagcgaaacatccgcatatccggaagccgggtttggcgcaagcgccgcaccggaggcttccagagaagattcagggtctcctgacctgagcgaaaccaccagtgctttccatgaggctaaccttgaacgcagtagtggactcggcgtaagcgggtccaccctgacttttcaggagggggaagccagcgccgctcctgaagtctctggggagtccaccacaacctcagatgtgggaactgaggcaccgggattgccatctgccacgcctaccgcgtctggcgatcgtactgagatttctggagatctgtctggacatacttcacagctgggcgtggtgatctccactagcatcccagagagcgagtggacacaacaaacccagcgcccagccgaaacgcatttagagattgagtcgagctcactgctctactcaggcgaagaaacacacaccgtcgagacagcaacctcccccactgacgcctcaattccagctagtcccgagtggaagcgggagtcagaatccaccgcggctgctcccgctcgaagttgcgccgaggagccatgtggagctggtacttgcaaggaaaccgagggacacgtcatttgtctctgtcctcctggctataccggcgaacactgcaatattgatcaggaggtgtgcgaggaggggtggaacaagtaccagggtcactgttataggcatttcccggaccgtgagacatgggttgatgcggagcggcggtgccgcgagcaacagtcccatttgagttccattgtgaccccagaagagcaagagttcgttaataataacgctcaagactaccagtggattgggcttaatgaccgcacaattgaaggagattttcgatggagtgacggccaccccatgcagttcgagaactggcggcccaaccaaccagacaatttttttgcggcaggcgaggactgcgtcgttatgatttggcacgagaagggtgaatggaacgacgtgccctgcaactaccatttgccttttacctgtaaaaagggcacagtggcctgcggcgaaccccccgtagtcgagcacgccaggaccttcgggcagaagaaagataggtacgaaattaacagtcttgtacgttatcagtgcacagagggatttgttcaacggcacatgcccactattcgttgccagccttcagggcactgggaggagccccagatcacttgcacggaccccacaacttacaaacggcgtctccagaagagatcctctagacatccgaggcgtagtagaccctccaccgctcactag

SEQ ID NO: 107736 - DNA, 7479 bp, synthetic construct
  misc_feature 1..7479: note = Description of Artificial Sequence: Synthetic coding sequence
  source 1..7479: mol_type = other DNA
atgaccacgctactttgggtgttcgtgaccctgagggtcattacagccgcggtgacagtggagacctctgaccacgacaactccttatcagtctcgattccgcagcctagccctttacgcgtgcttcttggcacctcattaactataccctgctattttattgatccaatgcaccctgtaactacggcgccgtctaccgctcccctggcccctaggatcaagtggagcagggtaagcaaagagaaagaggtggttttgctggtggccaccgagggccgggtccgcgtgaattctgcctatcaggacaaggtgtcacttccaaactacccagccatcccaagtgacgccacactggaggtccaaagcctacggtccaatgattccggcgtgtacaggtgtgaagtgatgcatgggattgaagattctgaggctacattggaggtcgtcgtgaaagggatcgtgtttcactatcgggcgatctccacccgctacaccctggacttcgaccgggcacaaagagcctgcctccagaactctgcaattatagcaacccctgaacagctgcaagcagcctatgaagacggattccaccagtgcgacgcgggctggttggcagatcaaaccgtaaggtatccaattcatacaccgcgtgagggatgctacggagacaaagacgagtttccaggcgtgagaacttatggcatacgggacacaaatgagacctacgacgtgtattgtttcgccgaggaaatggaaggtgaagtgttctatgctactagtcctgagaagttcactttccaggaggccgccaacgaatgtcgcagactcggagcacgcctcgccaccaccggtcagctgtacctagcctggcaggccggaatggacatgtgctccgctgggtggctggctgatcggtccgtgagatatccaattagcaaggctcggccaaactgcggtggtaacctgcttggagtaaggaccgtttacgtgcacgcaaatcaaactgggtacccagatccaagctcccgctacgacgcaatttgctacacaggggaggatttcgtggatattcccgagaatttcttcggcgtcgggggagaagaggacattacagtgcagaccgtcacctggcccgacatggaacttcctttaccaagaaacatcactgagggagaggctcgcgggtctgtgattctgactgtaaagcccattttcgaggttagcccatctcctcttgagcctgaggagcccttcaccttcgctccggaaatcggagccaccgctttcgcggaggtggaaaatgaaactggagaggccacccgcccgtgggggtttcccacacccggcctgggcccagccacagccttcacctccgaagacctagtggtgcaagttaccgctgttcccgggcagccacacttaccagggggagtggtttttcactaccggcccggccctactcggtacagcttgacttttgaagaggcgcagcaggcatgtttgaggaccggcgccgttatagcctccccggagcagctgcaagcagcctacgaagcaggctatgagcagtgtgacgctggctggcttcgagaccagaccgttcggtaccctatcgtttcacctagaaccccttgcgtcggtgacaaggatagtagtcctggagttcgcacatatggcgtgagacccagcactgagacttacgacgtgtattgcttcgttgacaggctggagggcgaagtgttcttcgcaactcgactggaacagttcaccttccaagaagccctggagttctgtgagtcccacaatgcaactctggcaacaactggtcagctctacgctgcatggtctcgcgggcttgataagtgctatgctggttggttagcagacggcagtttgaggtatccaatcgtgactcccaggcccgcttgcggaggcgataaaccgggcgtgaggacagtgtacctgtatcctaatcagacaggactcccggacccactgagtagacaccacgcattctgctttcggggcatcagcgctgtgccctcacctggagaagaggagggcggaactcccacgtcccctagtggagtggaagaatggatcgtcacccaagtggttcctggagttgccgctgtcccggtggaggaggagacaaccgcggttccatccggggaaaccacagcaattctggaattcactactgagccggaaaaccagaccgaatgggaacctgcctacacgcctgtgggaactagtcccttaccagggatcctcccaacctggccaccaactggagccgcaaccgaagagtcaacggaggggccttctgccaccgaggtgccttccgcttcagaggagcccagcccatccgaagtccctttccccagcgaggagccctccccctctgaagagcctttccctagcgtccgaccctttccttccgttgaattgttccccagcgaggaaccttttcctagtaaggaaccttctccatcggaagaaccaagtgcgtctgaggaaccctatacgccctctcccccagtaccaagctggacagagctgccttctagtggagaggagtccggcgcacccgacgttagtggcgacttcacaggtagcggagatgtatccggccacctggacttcagcggccaattatctggggacagagccagtggcctgccctccggcgaccttgactcaagcgggctgacttcaactgtcggcagtggcctccccgttgaaagtgggttgccctccggcgatgaagagcgtatcgaatggccaagcacgcctacagtcggggaactgccttccggggcagaaattctggaagggagcgcaagcggcgttggagacctgagtggacttccttccggggaagtcctggaaacctctgcctcgggagtgggcgacctctctgggctgccttcaggagaagtcctggagaccacagccccaggagtggaggacatttccggtttgccttccggggaggtactggagacaacagctccaggcgtggaggatatctctggtctcccttcaggggaggtgcttgaaactaccgctccaggcgtggaagatatctcaggccttccaagcggtgaggtcctggagaccaccgcaccaggcgtagaagatattagcgggctgcccagcggagaggtgctggagaccactgcaccaggtgtggaagacatttcaggactgccctccggagaagtgctggagactactgcccccggggttgaagacattagcggactacctagcggcgaagtgttagagaccgctgccccaggtgttgaggacatatccgggctaccctccggggaggtgcttgagaccgccgcgcccggtgtcgaggatattagcggcctgccaagcggggaggtgctggaaaccgcggcaccaggcgtcgaggatatctctgggctgcccagcggcgaggtgttggaaacagctgctcccggagtggaggacatcagcggactaccttctggcgaagtgctggaaacagccgcccctggtgttgaagacatctcgggactgcctagcggtgaggtcctggaaacggcagctccgggagtggaagacatttcaggcctaccgtctggagaggtgctcgaaacagctgctcctggggtggaagatatcagcgggttgccaagcggcgaagttctggaaaccgctgcgcctggagtcgaggatatcagtggtctgccgtctggcgaggttctggagacagccgccccaggggtcgaagatatatccggcctgcccagtggtgaagttttggagaccgccgcacccggcgttgaggatatcagcgggcttccaagtggagaagtgctggaaacggctgccccaggcgtggaagacatttctggactgccaagcggggaggtcctggagacagccgctcccggggttgaagacatttcgggccttccaagcggggaggtcctggagaccgccgcccccggcgttgaggacatctcaggattaccctctggagaagtgctcgagactgcagccccgggggtcgaagatatcagcgggctgccctctggagaagttctagaaacagcggcacctggtgtggaggacatctctggcttgcctagcggcgaagtcttagagactgctgcaccaggggtagaggacatcagcggcctgccgtccggagaggtactggagacaacggcccccggtgtggaggaaatctcgggtttgccgagcggggaggttctcgagacgactgcacctggagtcgacgaaatctccggtctcccctccggggaggtgctggaaacgactgcccctggagtggaagaaattagcggactgcccagcggagaagttttggagacttccacttccgccgttggcgacctgagcggtttgccctcaggaggggaggttttagaaattagcgtaagcggcgtggaagatattagtggcctgcctagtggagaggtcgtggaaacatcagcatcaggaattgaggacgtgagcgagttgccttccggcgaagggctcgagacatccgcgagcggcgtggaggatcttagccgacttcctagtggcgaggaagtcttggaaatcagtgcctctggatttggggacctatctggcctccctagcggcggcgagggcctcgagacatctgcctctgaggttggtaccgatctgagtggattaccaagcggaagggagggacttgaaacctccgcctccggcgcagaggacctgtcaggccttcctagcggcaaagaggatctggtcggctcagcttcaggtgatctcgacttggggaaactcccgagtgggacactggggtccgggcaggctccagagacttcgggcctaccctccggatttagtggagagtactcaggggtcgacctgggctcaggaccgccaagtggcctcccagatttcagtgggctcccttcggggtttcccactgtttcgctggtggattctactctggtggaggtggtcacagcatctacagcatcggagctggagggacgtggcaccatcgggatcagcggcgcgggggagatcagtggcttgccgtcaagtgaactcgacatttcaggacgggctagtggcctgccgtcagggaccgaactctctggccaggcaagcggatcacctgacgtgtcaggcgaaatcccaggtctgtttggagtgtcagggcagccatccggttttcccgacacatctggtgagaccagtggcgtgactgagctgtccggactgtcttctggtcaaccgggcattagtggcgaagcgagtggagtgctatatggaacgagccagccttttggtatcaccgacctgtccggcgaaacaagcggggtgcctgacttgagcgggcagccctccggcctaccaggtttcagcggtgccaccagtggtgtacctgatctagtcagtggcacaacaagtggcagcggcgaaagctctgggatcacattcgtggacacctcacttgtggaggtggctcccacaacctttaaggaggaagaaggtctcggttctgttgagctgtcaggcctccccagcggtgaggcggacctctctggcaagagtggcatggttgatgtatccggtcagttctccggcaccgtagattcttcaggctttacaagtcagacgccggagttttcagggctgccaagtggcattgccgaagtcagtggcgagtcgagcagagctgaaatcggatcttcactgcccagtggagcctactacggcagcgggacccctagttcttttcccacagtctccctagtcgatcggacattagtcgagtctgtaacacaagcgcccactgcccaggaagccggagagggaccgtcaggcatccttgagctgtcaggagcgcactccggagcccccgacatgtctggggagcactccggctttctcgatttgtccgggctgcagagcggactaatcgagccatccggcgaaccaccagggacgccctattttagcggggacttcgcttcgactaccaacgtgtccggtgagtctagtgtggcaatgggaaccagtggcgaggccagtgggctgccggaggtgacccttataacaagcgaattcgtcgagggcgtgactgaaccaactatctctcaggagttgggacagaggcctccggtgacacacacgcctcagctctttgaatcaagcggcaaggtgtcaactgcaggagacatttctggcgcgacaccagttctccccggctctggggtagaggtctcctctgttcctgagtcttcatctgaaaccagcgcctatccggaagctggattcggagcaagtgctgcccctgaagcctcaagagaggatagcggtagtcctgacctgagtgagacaacgtccgcattccacgaggctaatctcgaacgatcctccggactaggcgtgtctggctctacactgaccttccaggagggcgaggctagtgcagccccggaagtctctggggaatccacaacgaccagcgatgtgggtactgaggccccaggactcccatccgcaacccctaccgcaagtggtgacagaacagaaatctccggagacctcagtggccacacaagtcagttgggggtcgttatctccacgtccatacctgaatccgagtggacacagcaaacccagcgccctgctgaaacacatctagaaatcgaatcttcgagtctcctgtattctggcgaggaaactcacaccgtggagacagcaacatcccccaccgatgcttctatccccgcatcacccgagtggaaacgagaatcagaaagtactgcagcggatcaagaagtgtgcgaagagggctggaataagtaccagggacactgctacagacactttccagacagggaaacatgggtggatgcagaacggagatgtagggagcagcaaagtcacctgagcagtattgttacacccgaagaacaggaatttgtgaataataacgcccaagactaccagtggatcggtctgaacgatagaaccattgaaggtgatttccgatggtccgatggacatcctatgcagttcgagaattggcggcctaaccagcccgacaatttctttgcagccggggaggattgcgtggttatgatctggcatgagaaaggggaatggaacgacgtgccatgcaattaccacttgccattcacttgcaagaagggaactgtggcctgcggcgagcctccagtggtggaacacgctcgaacattcgggcagaagaaagatagatacgagatcaattccctggtgcggtatcaatgcactgaaggctttgttcagcgacatatgcctactattcggtgtcagccaagcggtcactgggaggagccacaaattacctgcacagacccaactacctataagagacggttacagaaacgatcctcgcgtcatccaagaaggtcccggccatccactgcgcactag

SEQ ID NO: 107737 - DNA, 7593 bp, synthetic construct
  misc_feature 1..7593: note = Description of Artificial Sequence: Synthetic coding sequence
  source 1..7593: mol_type = other DNA
atgacgacgctgctgtgggtgttcgtaacactgagagtgattacagcagccgtaactgtcgaaacctctgatcacgataatagcctctctgtgtcaattccacagccatctcccttgagagttctgctcggcacatctctgactattccatgctactttatcgaccctatgcaccctgttacaacagcccccagcacagcgccacttgcacctcggataaagtggtctcgggtcagcaaagagaaggaagtggttctcctcgtggctaccgaaggccgagtccgcgtgaactctgcctaccaagataaggtgagccttccgaactacccagccattcccagtgacgcgacgctcgaagttcagtctctcaggagcaatgattctggcgtctacaggtgtgaagtcatgcatggtattgaggactccgaggctacattggaggtggtggtcaagggcatagtcttccattaccgggcaatttccacaagatatacactggattttgaccgagcccagcgagcctgtcttcagaatagcgccatcatcgccactccagaacagctgcaggcagcatacgaggacgggtttcaccagtgtgacgctggatggctggcagaccagaccgttaggtacccaatacacacccccagagaaggctgctatggggacaaggatgagtttcccggcgtccgaacttatggcataagagacacaaatgagacatacgacgtgtactgcttcgccgaggaaatggagggtgaagttttctacgctacatctccggagaagttcactttccaagaggcagccaatgaatgccgaagactcggagcccgcttagcgaccactggccagctataccttgcatggcaggctgggatggacatgtgttcagcagggtggctggctgacagaagtgttcggtatccaatatccaaagcccggcctaactgcggtgggaacttgctcggtgtgcggaccgtgtacgtccacgctaaccagacgggatatcctgacccgagttctcgctatgatgccatttgttacaccggggaggacttcgtggacatccctgagaacttttttggagtgggcggagaggaggatatcaccgtgcagaccgtcacatggcccgacatggagcttcctcttccgcgcaatattacggagggcgaggcacggggttcggtcatcttaacggttaaaccgatatttgaagtttccccctctccactggaaccggaggagcctttcacattcgcccccgagatcggagcgactgcattcgccgaagttgagaacgagacgggcgaggcaacccggccatggggctttccaacaccgggcctcggccccgccactgctttcacttcagaagatttggttgttcaggtcacagcggtgcctgggcagcctcacctccccgggggcgttgtattccactacaggccgggacccacgagatactctttgacctttgaggaggcacaacaggcgtgcctaaggaccggagcagttattgccagccccgaacagctgcaagccgcctatgaagctggatatgaacagtgtgacgcaggctggttacgtgatcagaccgttcgttacccaatagtctccccccgtaccccctgcgtgggcgataaagatagctcacctggcgtgcgtacctacggcgtgcgaccttctacagaaacatacgatgtttactgctttgtggacaggctagaaggtgaggtgttcttcgcaactaggctggagcagttcacgttccaagaagccttggagttctgcgagtcacataatgccacactcgcgaccacgggccagctgtatgctgcctggagccggggcttggataagtgttacgcgggctggcttgctgacggcagtctccgctaccctatagttacacctagacccgcatgtgggggagacaagccaggggttaggaccgtttacctctatccaaaccagacaggccttccagatcccctgagcaggcaccacgccttttgttttaggggaatttctgctgtgccaagccctggcgaagaggagggaggtacaccaacaagcccatccggtgtcgaggaatggatcgtgactcaggtggtcccaggagtagcggcggttccagtggaggaggaaaccaccgccgtaccaagtggtgagaccactgcaatcctcgaatttactactgagcctgagaaccagaccgaatgggagccagcctacaccccggtgggtacatctcccctgccgggcattctgccaacctggccgccaactggcgcagccaccgaagagtcaacagaaggaccctccgccacagaggtcccgtcagccagtgaagagccctccccgagcgaggtgccctttccctccgaggagccctcaccatcagaagaaccctttccttccgtgaggccattcccttccgtggagctttttccatcagaagagccttttcccagcaaagagccatcaccatctgaagaaccttccgccagcgaagaaccctatacacctagcccacccgtcccttcatggacggaactcccttcaagtggtgaggaaagcggagctcccgacgttagcggggatttcacaggatccggcgatgtgagcggtcacctggatttttcaggtcagctctccggagaccgtgcgtctggacttccgtctggggacttggactcctccggtctaaccagcactgttgggagcgggcttccggtggagagcggactcccttctggggacgaggagcgaatagaatggccttccacacccaccgttggagagctgcctagtggagccgagatcctcgaaggcagcgccagcggggttggagacctgagcggactcccttctggagaggtgttggaaactagcgcctccggcgtgggggacctgtccggtctgccaagtggggaggtgttagagaccaccgctcctggcgtagaggatattagcggactgcccagcggagaagtacttgaaacaacagcccctggggttgaagacatatccgggttgccatccggcgaggtgttagagaccaccgctccaggcgtagaggatatctccggactcccctctggtgaagtcctcgagacaacagccccgggagttgaagatattagtgggctcccttcaggggaggttctggagactacagctcccggagtggaagacatcagtgggctgcctagtggagaggtgctggagacaaccgcccctggagttgaggacatcagcggtctgccgagtggggaggttctggagaccgcagctcccggggtggaagacatttccggactgccttcgggggaagtgctggagactgccgctcccggagtagaggatatttcaggacttcctagtggggaggtgcttgagacggctgcacctggcgtggaggacatcagcgggctgccctcaggagaagtgcttgagacagcggcccctggggtggaggacatctcaggtctgcccagtggcgaagtacttgagacagctgcccctggagttgaggacatctccgggctgcccagcggagaggtgctggagactgccgctcctggggtggaagacatctcagggcttccatctggagaagtcctggaaacagcggcgcctggcgtggaggatatcagtgggctccccagcggcgaagtgctagaaaccgctgccccaggtgtggaggatatttccgggctgcctagcggcgaggtccttgagaccgcagctccaggggtagaagatattagtgggctacccagcggagaagttctagagaccgcagcccctggtgtggaggatatctctggcttgccttcaggtgaggttcttgagacagcagcccctggagtagaggacatttctggcctgccgagcggggaggtcctggaaaccgcagcaccaggagtggaggacatcagcggtttgccttcgggcgaagtcctggaaaccgccgcccccggcgtggaagatatttctggactaccttctggggaagtattggaaacagccgccccaggtgtcgaagacatatctgggctgccttccggggaggtacttgagactgccgcgccaggagtcgaagatatttcaggactgccatctggggaggtactggaaactgcggcccccggggtcgaagatatttccggcctccccagcggtgaggtgctcgaaacaaccgccccaggcgtggaagagatcagtggactccccagcggtgaagtgctggaaactacagcaccaggggtagatgaaattagcgggcttccctcaggagaagttttggagactaccgcacccggggtggaagagatcagtggtttgccgtccggcgaggtgctcgagacctctacttcggcggtaggagacctgtcgggcctgccgagcggcggggaggtattagaaatttccgtgtctggagtggaagatatcagcggactccctagcggagaggtcgtcgagacatccgcttctggcattgaagacgtttctgaactgccgagcggggagggtctggagacgtctgcatcgggagtggaggacctgtcacggctgccttccggggaggaggtgctggaaatctccgcctcaggatttggtgatctgagtggactccccagtggtggtgaaggtctcgagacatccgccagtgaagtgggcaccgacttaagcgggcttccctccgggagagagggtctggagacgtccgccagcggagccgaggacttaagcggtctcccttccggcaaggaagatctggtgggtagcgctagcggcgacctggacctcggtaaacttccaagcggcactctgggatccggtcaggcccctgagacttccggactccctagcggcttcagcggcgagtacagtggcgtggatctggggtccggaccccctagcggccttcctgacttctccgggcttccctctggatttcccacagtttcactcgtggactccactctcgtagaggtcgttaccgctagcaccgcaagcgaattggagggcaggggcacaattggcatcagcggggcgggcgagatctccggtctcccttccagcgagctagacattagcggcagggcgtccgggttgccatctggcactgaactgagcggacaggcctccggatcaccagatgtgtccggggaaatccccggccttttcggcgtgtccggacagcccagcggattccctgacacctccggcgaaacatccggcgttacagaactatccggattgtctagcggccagccaggcatctccggtgaggcgtctggagtgctgtatggcaccagtcaaccttttggcattacagatctgtcgggagaaacatctggcgtgcctgacctcagcggccagccctctgggctgccaggattttcaggcgctacatctggggtgccggacttggtgagcggtaccacctcgggctcaggcgagtcctccggtatcaccttcgtcgacacctccctggtggaagtcgctccaacgacttttaaagaagaagaaggcctgggcagtgtggagcttagcggcctccccagcggggaggccgacctgtctgggaagtccggcatggtggacgtaagtggccagttcagtggcactgtggacagttctgggtttacctcccagactcctgaattctcagggctcccatctggaatagctgaggtgtcaggagagtcatctagagctgaaattggctctagtctgccatccggcgcttactatggctctggcacaccctcctcgtttcctactgtgagcctcgtagataggacgctggtcgagagtgtaactcaggcaccaaccgcccaggaagccggcgagggtccttctgggattctcgagctctcaggagcccattcgggcgctccagacatgagcggggagcacagtggatttctggatctcagcgggttacagagtgggctcatcgagccttccggagagccccccggaactccatatttctctggagattttgcatcgaccactaacgtgagcggtgagagcagtgtcgccatgggcacctctggagaggccagtggcctgccggaagtgacactaataacctccgaatttgttgaaggagtgactgagcctactattagccaggagctgggtcagcgtcctcctgtaacacacacgccgcagctctttgagagtagcggcaaggtgagcaccgcgggagacatctcaggagccactccagtgctcccggggagtggcgtggaagtctcatccgttccagagtcgtcatcagaaacctcagcctatccagaggcgggcttcggcgctagtgctgcgccagaagcctcaagggaggacagcggttctcctgacctctctgagactacttctgcgtttcatgaggctaacttggaaaggagttctgggctcggcgtgtcagggagtactcttaccttccaggaaggtgaagcttccgccgctcccgaagtctcgggcgagagtactaccaccagcgatgtgggtaccgaggcccctgggctgccctctgctaccccgacagcctctggcgaccgcactgagatcagcggcgatcttagcggccatactagtcagttgggagtggtgattagcacctccattccggagagcgagtggacgcagcagacccagcgcccagccgagacacatctggaaatagagtctagctcactgctgtattcaggtgaagaaacgcacaccgtggaaacggctaccagtcctactgatgcttccataccagctagtccggaatggaaaagggaatccgaatcgaccgctgcggcaccagccaggtcctgtgcggaggagccctgcggagctggcacctgcaaagaaaccgaaggccacgtgatctgtttatgcccacccgggtatactggcgagcactgtaatatcgaccaggaggtatgtgaggagggatggaacaaataccaaggacattgttaccgccattttccagatagagagacttgggtcgacgctgaacgaagatgtagagagcaacagtcgcacctgtcttccatcgtaacccctgaggagcaggagtttgtgaacaacaatgctcaggactaccagtggatcgggctcaatgacagaacaattgagggcgatttcaggtggagcgacggacaccccatgcagttcgaaaattggcggcccaaccaacctgataacttcttcgccgcaggcgaagattgtgtggtgatgatctggcatgaaaaaggcgagtggaacgacgtgccatgtaattaccatctaccctttacctgcaagaaaggcacagtagcttgcggcgagccgccagtcgtggaacatgctcgcacctttggccagaaaaaggatcggtacgagatcaactcgcttgtccgctatcaatgcactgagggcttcgtgcagcgccacatgcctacaatccgatgccagccctccgggcactgggaggagcctcagattacctgtactgacccgacaacttataaaaggcggttgcagaagcggtctagtagacatccgcgtagaagccggccgagcaccgcacactag

SEQ ID NO: 107738 - DNA, 399 bp, synthetic construct
  misc_feature 1..399: note = Description of Artificial Sequence: Synthetic coding sequence
  source 1..399: mol_type = other DNA
atgttgacagccgctgttctgagttgtgctctgctgctggccctcccggctacccgaggagctcagatgggcttggccccaatggaaggtatacgccggcctgaccaggccctgctgcccgaacttcctggcctcggcctgcgggccccactgaaaaaaacgacggctgaacaagcagaggaagatctgttacaggaggctcaggcactcgcagaggtattggatttacaggatcgggaacctagaagctcccgaagatgcgtgagactacatgagagttgcctcggacaacaagtgccctgctgtgacccttgcgccacttgttactgtagattctttaatgccttttgttactgccgcaagctgggcacggcaatgaatccttgttcccggacatag

SEQ ID NO: 107739 - DNA, 399 bp, synthetic construct
  misc_feature 1..399: note = Description of Artificial Sequence: Synthetic coding sequence
  source 1..399: mol_type = other DNA
atggacgtcactcgcctgttacttgcaaccttgctcgtctttctgtgcttttttacagccaatagccatctgcctccagaagaaaagctccgggatgacagatctctgaggagtaacagctctgtgaacttactggatgttccatccgtctcgattgtggccctaaacaaaaagtccaaacagataggccgaaaagccgccgaaaaaaagcggtctagcaaaaaagaagcctccatgaagaaagtggttaggcctcggacgccattatcagcaccgtgtgttgctacccgcaacagctgtaaacctcctgcccccgcatgttgcgacccatgcgcttcatgtcagtgtaggttctttcgatcggcctgcagctgtagggtgctgagcctgaattgttag

SEQ ID NO: 107740 - DNA, 936 bp, synthetic construct
  misc_feature 1..936: note = Description of Artificial Sequence: Synthetic coding sequence
  source 1..936: mol_type = other DNA
atggctctagaggtggtgtttctggctagggggccctccgggctgctcctctataatggacagaagaccgacggtaagggcgatttcgttagcctcgccctgcgcgacaggcgattggagttcaggtatgatctgggaaagggggccgctgtgatccgcagtcgggagcctgtgacgcttggcgcctggacacgggtgagcctagagcggaatggcaggaagggcgcactgcgcgtgggagacggaccgcgggttttgggagagtctcccaagagtcgaaaggtgccccataccgtcctgaatctcaaagagcctctctatgtcggcggagcccccgacttctcgaaactcgcccgagcagcggctgtgtcatctggctttgatggggcaatacagctggtgtccttgggcggtcggcaattgctgacccccgagcacgtgctgcgccaggtcgatgtaacatctttcgcgggtcatccatgtacaagagcttctggacatccatgcctgaacggtgcgagctgcgtcccacgggaggccgcctacgtgtgcctttgtcctggcggcttttctggcccacactgtgaaaagggtcttgtggagaagtctgccggagacgtggacacactcgcattcgacggtagaactttcgtggagtatcttaacgccgtaacggaaagtgagctcgcaaatgagatccctgtgcccgagacgctggactccggagccctgcacagtgagaaagctctgcagtcaaaccactttgaactgtccttaagaacggaggccactcaaggtttagtactttggagtggtaaggctaccgagcgagccgactacgtggcactggctattgtggatggacatctgcagttatcatacaatctgggctcccagcccgtggttctcagaagcacagtgcctgttaacacatag

SEQ ID NO: 107741 - DNA, 6138 bp, synthetic construct
  misc_feature 1..6138: note = Description of Artificial Sequence: Synthetic coding sequence
  source 1..6138: mol_type = other DNA
atggccggtcgttcacaccccggacccctgagaccccttctgcctcttcttgtggtcgccgcttgtgtgctgcccggcgccgggggaacgtgccctgaacgcgccctggaacggcgggaagaggaggccaatgttgttctaaccggcacagtggaggagatattgaatgttgacccagtccaacatacatacagttgtaaagtgagggtctggaggtacctgaaaggcaaggaccttgtggcgcgtgagtccctgctcgacggtgggaataaggtggtgatcagtgggttcggcgaccctcttatctgcgataatcaggtgtcgacaggggataccaggatctttttcgtcaaccctgctccgccctacctgtggccagcacacaaaaacgagttgatgttgaactcctcacttatgcgtatcactttgcggaacctggaagaggtagagttctgcgtggaggacaagccaggcactcacttcactccagtccctcccacaccccctgatgcctgccgggggatgttgtgtgggttcggcgctgtatgcgaaccgaatgccgagggaccgggtagagcaagttgcgtgtgtaagaagagtccctgcccatctgtcgtagcccctgtttgcggtagcgacgctagtacctatagtaacgagtgtgagctgcagcgggcccagtgttctcagcagagacggattcgcctgttatcccgtgggccctgcggtagcagggatccatgcagtaatgtgacatgctcttttgggagcacttgcgcaaggtctgccgatggacttaccgcctcttgtctgtgtcccgccacctgccggggggcccccgaaggcacagtttgcggttcggatggcgccgactatcctggcgaatgccagctgctgcggagagcctgtgcccgccaggaaaatgtgttcaagaagtttgatgggccatgtgatccttgccaaggagccctcccagatccttctcgctcttgccgggttaatccacgcacgcgtcgacccgagatgctcctgcgccctgagtcttgcccagctagacaggctcccgtatgcggtgatgatggcgtgacctacgagaatgattgcgtgatggggcgatccggagccgcccggggtttgctcctgcagaaggtgcgttctgggcagtgtcaaggtcgtgaccagtgccccgagccctgtcggtttaatgctgtctgtttatctcgaagggggagacctaggtgcagttgcgatagagtaacatgtgatggcgcttaccgcccagtgtgtgcccaggatggccggacatatgactcagactgttggcggcaacaggcagagtgcaggcagcagcgcgcgatacctagcaagcatcaggggccttgtgaccaagctccctcgccttgcctgggcgtacagtgcgcatttggagctacttgcgccgtaaagaatggccaggctgcatgcgaatgcctccaggcatgctcttctctgtacgatccagtgtgcggtagtgacggcgtcacctatggtagcgcttgcgagctggaagcgacggcctgcaccctgggacgcgagatccaggtagcccgaaaaggcccctgcgaccggtgtgggcagtgtcggttcggagctttatgcgaagctgagacggggcgctgcgtttgcccctccgagtgcgtggcccttgcacaacccgtgtgtggttccgacggacacacatatcccagcgagtgcatgctgcacgtgcatgcttgcacacatcagatatcacttcacgtggctagtgctggaccatgcgaaacctgtggcgatgcagtatgtgcttttggcgccgtttgtagtgctggtcagtgcgtgtgtccccggtgtgaacaccctcctccagggcccgtgtgcgggagcgacggtgtcacctatggaagcgcttgtgagctgcgagaagccgcgtgcttacagcagacacagatcgaggaagcaagggctggcccttgtgaacaggccgaatgcggcagtggaggaagcggctccggcgaagatggggactgcgaacaggagctgtgccgccaaaggggcgggatctgggatgaggatagtgaagacggtccttgcgtatgtgatttttcgtgccaatctgtcccaggcagtcccgtttgtggatctgacggagtgacttattccaccgaatgcgagcttaagaaagcccgatgtgaatcccagcgcgggttgtacgttgcggctcagggagcctgtagagggcccacgttcgctcctctgcctccagtcgctcccctacattgtgcccaaactccctacggatgctgtcaagacaatattactgcagcaagaggtgtgggcctggccgggtgcccttcagcctgccagtgtaaccctcacggatcatatggtggcacctgcgaccccgccacagggcaatgctcctgtcggccaggagtgggagggttgaggtgcgaccgatgtgagcccggcttctggaatttccgtggaatcgtcaccgatggaaggagtggatgcaccccgtgcagttgcgatccacagggagctgtccgagatgactgtgagcagatgaccgggctttgttcttgtaagcccggggtcgcagggccaaagtgtggacagtgccccgatggtcgggccctgggtccagccggctgtgaagctgatgcctcagctcctgcgacatgcgctgagatgcggtgcgagttcggggctcgctgtgtggaagaatccgggtcagcgcactgcgtatgcccaatgctcacctgcccagaggctaacgctaccaaagtgtgcggttctgacggagttacttatggaaacgagtgtcaactgaaaacaattgcatgtcgccagggcctgcaaattagcatccagagcctcggaccatgccaagaggcagtggcaccttccactcaccctaccagcgctagcgttacagtgaccacaccgggtttattgctgtcacaggcgttacctgcaccaccaggtgcattacccctcgcaccttcctccacagctcatagccagaccacccctccgccatcctccagacccaggacaacagccagcgttcctcgcacaacagtgtggcccgtcctaaccgtgccccccactgcaccgtctcctgctccctcccttgtcgcgagcgcttttggagaatctggaagcaccgacggatcctcggacgaggaactttcaggggaccaggaagctagcggaggaggctctggcggtctggagccgcttgagggaagtagcgtggcaactccaggcccccctgtggagcgtgcgtcttgctacaactctgctctaggatgctgcagcgacgggaaaaccccatccctggatgctgagggatcaaattgccccgccaccaaggtttttcagggagtgctagagctggagggggtggaaggtcaggagctgttctacacccccgaaatggctgatcctaaaagtgagctgttcggagaaactgctaggagcattgagagcactctggacgatttgtttcgaaacagcgatgtgaagaaggatttccggagtgtgagacttagggaccttgggcctggaaagtctgtccgcgccatcgtggacgtgcacttcgacccaactacggcttttcgggcaccagatgtggctagggcattactgcgccagatacaggtttctcggcgcagatctctgggggtgcgcagaccgttgcaggagcacgtaaggttcatggatttcgactggtttcctgcgttcatcaccggggccacatctggagctattgctgccggcgcgacagccagggcaacgaccgctagccgtctcccttcctcagctgtgactcctcgggcgccacacccttcgcatacaagccaacccgtcgcaaaaacaaccgcggcccccaccactaggcgaccaccgactaccgcccccagtagggtacctggtaggagacctcctgcacctcagcagccacccaaaccatgtgactcgcagccttgttttcatggcggtacctgccaagactgggcccttggaggcggtttcacttgcagttgccctgccgggagaggcggagccgtgtgcgagaaagtgctcggcgcacccgtgcccgcgttcgaaggcaggtcttttctcgccttcccgaccctccgggcctaccacacactgaggttggctctggagttcagggccctcgagccgcaagggctgttattatacaatggtaatgccaggggtaaagactttttggccctagcactgttggatggaagagttcagctccgctttgatacgggatccggtccggcggtgctgaccagcgccgtgcctgtcgagccaggtcaatggcaccggcttgagctgtctaggcactggcggcgcggcaccttaagtgtggatggggaaactccagttctgggcgagtcccccagtggtacagacggccttaacctggacaccgatctgtttgtcgggggagtccccgaggaccaagctgccgtggcactggaacggactttcgttggcgccggtcttagagggtgcatccggctgctggatgtcaataaccagaggctggaactgggtatcgggccaggggcagctacaagggggtctggagttggggagtgcggtgaccacccctgcctgcctaatccatgtcatggaggggccccctgtcagaaccttgaggcaggcagattccactgccagtgtcctcctggacgtgtgggcccaacatgtgccgatgagaagtcgccttgtcagccgaacccctgtcacggtgccgccccttgcagggttctgcctgaagggggagcgcaatgtgaatgcccacttggtcgcgaaggaacattctgtcaaaccgcaagtggccaggacggaagcggaccctttctggcagatttcaacggctttagtcacctggagctccggggcctgcacacctttgccagggatctcggagagaagatggcactcgaggtcgttttccttgctagaggtccaagtggtctacttctgtacaatggtcagaagacagacggaaagggagatttcgtgtctcttgctttgagggatagaagattagaattcagatacgacttaggaaagggagcagccgtgatacgctcacgggaacctgtgacactcggcgcctggactagagtttccctagaaagaaatggtcgaaaaggagccttgcgagtcggcgatggccctcgggtcctgggggaatcgcccgtgcctcacacagtcctgaatttaaaggaacccctgtacgtcggtggtgcccctgatttttccaagcttgcacgtgccgcagcagtttctagcgggttcgacggagcaattcagctcgtgtccctgggaggtcggcagctcctgacgcccgagcatgtgctgcgtcaggttgacgtgacctctttcgccggacacccttgtaccagggcctcaggacacccatgtctgaatggggcctcttgcgtgccaagagaagcagcttacgtgtgtctctgtccgggcggatttagcgggcctcattgcgagaaaggactggtcgagaagagcgcgggcgatgtggacacgctcgcctttgacgggcggactttcgtcgagtacctgaatgcagtgactgaaagcgagaaagccctgcagtcaaaccactttgaactgtcactgaggaccgaagcaacccagggccttgtgctgtggagtggcaaggcgacagagagagccgactacgtggccctggctatcgtggacggtcacctccagctatcctacaatctcggtagccagccggtggttctgaggtccacagtgccagtgaacactaacagatggctgcgtgttgtggcacacagggaacagcgcgaagggtctctgcaggttgggaatgaggcccctgtcactggttcaagtcccctgggcgcgacccaactggacactgacggagcactgtggctggggggattgcctgaactgccggtgggccctgcgctgcccaaggcctatgggaccgggtttgtggggtgtctgagagacgtggtggtcggtaggcaccccctccacctcttggaggacgcggtaacaaagcccgagttgcggccttgtcctacgccatag

SEQ ID NO: 107742 - DNA, 816 bp, synthetic construct
  misc_feature 1..816: note = Description of Artificial Sequence: Synthetic coding sequence
  source 1..816: mol_type = other DNA
tagcggtatgatcttggaaaaggtgccgctgtgatcagaagcagggagccggtcactctgggagcctggactcgcgtgtctctggagcgaaacggccgcaagggcgcgctccgtgtgggtgatgggccccgcgtgcttggtgaatcgcctaaatctcggaaggtaccccatactgtgttgaacctgaaagagcccctttacgtcggcggcgcccctgatttcagcaagctggccagggccgcggccgtttccagcggcttcgatggggcgattcagctggtttccctgggaggccggcagctgttaacaccggagcatgtcctgcggcaagtagacgttacaagtttcgcgggtcatccctgtacccgagcctcaggccatccatgtcttaacggggcctcctgcgtgccaagagaagccgcatacgtgtgcctctgccctggtggattctcggggcctcattgtgagaagggcctggtcgaaaagagtgccggagacgttgacactcttgcattcgatggccgcaccttcgtggagtaccttaatgccgttacagagtctgaattggccaacgagataccggtgcccgaaactcttgatagcggagctctgcactccgaaaaggctctccagtccaaccattttgagctctcccttagaacagaggcgactcaaggacttgtgttgtggagcggaaaagctactgagagagcggactatgtcgcccttgccatcgttgatggacatcttcagctgtcttataacctgggctcgcaaccggtcgtgttgcgctcaacggtgcccgtgaacacctag

SEQ ID NO: 107743 - DNA, 462 bp, synthetic construct
  misc_feature 1..462: note = Description of Artificial Sequence: Synthetic coding sequence
  source 1..462: mol_type = other DNA
atggcacttgtgttcgtgtatgggactctcaagagaggccagcctaaccatcgcgtgctgagagatggcgcccatggaagcgctgccttcagagctcgcggacggacactggagccatacccgctggtgattgccggcgaacacaacattccttggttgttgcaccttcctggaagcggtcgattagtggagggcgaggtctatgccgtggatgagagaatgctgcgctttttggatgacttcgagagctgtccagccttatatcagaggaccgttctccgggtccagctcctggaggatcgcgcgcctggggccgaagagcctcctgctcccaccgccgtgcagtgttttgtttacagccgagccacatttccacccgagtgggcacagttgccccaccatgactcatacgattccgaaggacctcacggactgcgctacaacccaagggagaaccggtag

SEQ ID NO: 107744 - DNA, 462 bp, synthetic construct
  misc_feature 1..462: note = Description of Artificial Sequence: Synthetic coding sequence
  source 1..462: mol_type = other DNA
atggccctggtcttcgtgtatggtacattgaagcggggccagcctaaccacagagtgctgagggacggagctcatgggtccgcagcctttcgagcacggggaaggactctcgaaccttatccccttgtcatcgctggcgagcacaatataccctggctcctgcacctcccagggtcaggaaggctggtggaaggagaggtttacgcagtggacgaaagaatgctgcggttcctagacgattttgagtcctgtccggcactctaccagagaacggtgctgcgcgtccagctgcttgaagatcgcgcccccggcgctgaggagccccctgccccaacggcagtgcaatgcttcgtatattcaagggccacatttccccccgaatgggcccagttacctcaccatgacagttacgacagcgaagggccccatggcttacgatacaacccccgtgaaaaccggtag

SEQ ID NO: 107745 - DNA, 879 bp, synthetic construct
  misc_feature 1..879: note = Description of Artificial Sequence: Synthetic coding sequence
  source 1..879: mol_type = other DNA
atgaatcctttctggagtatgtctacctcatcagttagaaaacgaagcgagggggaagagaaaaccctgaccggggatgtcaaaaccagtcctccgagaacagcccctaagaaacaacttccgtcgatcccgaaaaacgcgcttcccatcacgaagcctactagtcccgcccccgctgctcagtctaccaacggcacacacgcctcatacggccctttctacctggaatatagcctcttagccgagttcacacttgtagtgaagcagaagctgccaggcgtctacgtacagccttcttaccggtcagccctcatgtggtttggcgtcatatttatccgccacggcttgtaccaggatggagtattcaaattcaccgtttatatccccgacaattaccccgacggagattgcccccgattagtctttgacatacccgtgtttcaccctctggttgacccaacctcaggggagctggatgtgaaacgcgcctttgccaagtggcgccggaatcacaatcacatttggcaggtgttgatgtatgccaggagagtgttttacaagattgacacagcttcacctcttaacccagaggccgctgtcctttacgaaaaggacatacaactgttcaagtctaaggtagttgattcagtcaaagtgtgtacggcacggttgtttgaccaaccaaaaatcgaggacccctacgccattagtttctcaccctggaacccttcggtccacgatgaagccagagaaaagatgctcacccagaagaaacctgaagaacagcacaataaatcggtgcacgtggctgggctgtcctgggtaaaaccaggttcagtgcagccgttcagcaaagaagaaaagaccgtcgctacttag

SEQ ID NO: 107746 - DNA, 879 bp, synthetic construct
  misc_feature 1..879: note = Description of Artificial Sequence: Synthetic coding sequence
  source 1..879: mol_type = other DNA
atgaaccccttttggagcatgagcacgtcctctgttagaaaaagatccgagggtgaagagaagacactgaccggagatgtgaagacttcccctcccagaacagccccgaagaagcagctgccctcgatcccaaagaacgctctgccaatcactaagcctacttcccctgcccccgctgcccagtcaactaacgggacacatgcatcgtacggacccttttacttagaatactctctgctggctgaatttactctggtggtaaagcagaaattacctggcgtctatgtgcagccatcttacagatctgccttgatgtggttcggcgtgatttttatccggcatggcttataccaagatggtgtgtttaaatttaccgtgtatatccctgacaactatccagatggcgattgccctcggttggtgttcgacatccctgtgttccaccccctggtcgatcctacttcaggcgaacttgacgtgaagcgcgccttcgccaagtggagaaggaatcataaccacatctggcaggtgcttatgtacgcccgacgggttttttataaaatcgacaccgccagccccttgaatccggaagccgcggtcctgtatgagaaggacatccagctgtttaagtccaaggtggtggacagcgtgaaggtgtgtactgccaggctattcgaccagcctaagatcgaggatccttacgctatctctttctccccttggaacccatctgtgcatgacgaggctcgcgaaaagatgctaacgcaaaagaagccagaggagcagcacaataagtctgtacacgtcgccgggctctcatgggtgaagcccggtagcgttcagcccttcagtaaggaggagaaaacagtcgcgacatag

SEQ ID NO: 107747 - DNA, 1179 bp, synthetic construct
  misc_feature 1..1179: note = Description of Artificial Sequence: Synthetic coding sequence
  source 1..1179: mol_type = other DNA
atggcgtcccacaaactgctcgtcaccccccctaaggcgctgttaaagccactgtcaatacctaaccaactcttgctcggaccgggtccatcgaacctgccacctcgaattatggccgccggcggtcttcagatgatcggctccatgtccaaggacatgtaccaaatcatggatgaaatcaaagaaggtattcaatacgtcttccagacccggaacccgctaacactggtcatctcaggatcagggcactgcgctctggaggctgcgctggttaatgtgctagagcccggcgacagtttcctggtcggggccaacgggatatggggccagcgcgctgtcgatatcggggagcggatcggggctagggtgcatcctatgactaaggatcctggcggtcattatactctgcaggaagtggaagaaggattagctcaacacaagcctgtgctgctctttctcactcatggtgaaagctccacaggcgtgctccagcctttagacgggtttggggaattgtgtcatagatacaagtgtttgctcctcgtcgacagcgtggcgagtctggggggaactccattgtacatggatcggcagggcatcgacatcctgtatagcggctcccagaaggctctgaatgcaccccccggtacctcactcatcagttttagcgacaaagcaaagaagaagatgtacagtcggaagaccaaaccgttttccttttacctcgacatcaagtggctggctaacttctggggctgtgatgaccaaccacgtatgtaccaccatactatccctgtgatctccctctactcccttagggagtctctggcactgatcgccgaacaaggcctggaaaattcttggagacagcaccgagaggccgcagcttacctccatggacgtctgcaggcactcggattgcaactctttgtgaaggacccggccctcaggctgccaacagtcactacagtggcagtacctgcgggatatgattggagagacatcgtttcttacgtgatcgatcactttgatatcgagattatgggagggcttgggccaagcacaggcaaagtgctgcgcatcgggctcctgggctgcaatgccacccgcgagaatgtagaccgggtcaccgaagctctccgcgccgccttacagcattgtccgaaaaagaaactatag

SEQ ID NO: 107748 - DNA, 3078 bp, synthetic construct
  misc_feature 1..3078: note = Description of Artificial Sequence: Synthetic coding sequence
  source 1..3078: mol_type = other DNA
atggagccttttacgaatgatagattgcagttgcctaggaatatgatcgagaacagcatgtttgaagaagaacctgatgttgtagatcttgccaaggaaccctgcctgcatcctcttgagccagatgaggtcgagtatgaaccccggggctcacgcttgctcgtcagagggttgggagaacatgaaatggaagaggacgaggaggattacgagtcctccgccaagttgctagggatgagctttatgaaccggagcagtggcctacgaaactctgcaaccggttatcgacagtcccctgatggagcatgttccgtaccgtccgctcgcaccatggtcgtgtgcgcctttgtaatcgtcgtcgccgtgagcgtgatcatggtgatctatcttctgccccgatgcacatttacaaaggaaggatgtcacaagaaaaatcagagcattggcctgatccagcccttcgctactaacggaaagctattcccctgggcgcagattagattacccaccgcagtggtacccctgaggtatgaacttagcctccacccaaatctgactagcatgacttttcgcggcagtgttactattagcgtccaggccttgcaggttacatggaacattatcttgcactctactgggcacaatatttctcgggtgacctttatgtcagctgtgtcttctcaggagaagcaggctgaaatcttggaatacgcatatcatggccagatcgcgattgtggcccctgaggccctgcttgctggacacaactacactctcaagattgaatactccgcgaatatttcttccagttattacggcttctatggattttcctataccgatgagagcaatgagaagaagtactttgctgcaacccagttcgagcctttagctgcgaggagtgcctttccttgcttcgatgaaccagcatttaaggccacctttattatcaagattatccgcgatgaacagtatacagctttgtctaacatgcccaaaaagagctccgtggtgttggacgatggactcgttcaggacgaattcagcgaatctgtgaaaatgtcaacctacctggttgctttcattgtcggcgagatgaaaaatctgagtcaggacgtgaatggaactctggtatcaatttatgcggttcccgaaaagattggacaggtgcattatgccctggagaccaccgttaagctgctcgagttcttccaaaattatttcgaaatccagtaccccctcaagaagttggatctagtggctattccagactttgaagctggagccatggagaactggggtctgctcacattcagggaggaaactctgctctatgatagcaacacatcttctatggccgataggaagcttgtgacgaaaatcatagcccatgagctggctcatcagtggttcggaaatctggtgacgatgaagtggtggaacgatctgtggctgaatgaaggcttcgctacatttatggagtattttagcttagagaaaatcttcaaggagttatcttcctacgaagacttcctcgacgcccggtttaaaaccatgaaaaaggacagtcttaattctagccacccgatctctagtagcgtgcaatcttctgagcagattgaggaaatgttcgactccctctcttactttaaaggaagtagcctgctgctcatgctaaagacctatttgtccgaggacgtgttccagcatgcagtggtgctttatctccacaatcacagttatgcgtccattcagtctgacgacttatgggacagctttaatgaggttacgaatcagaccttagatgttaagagaatgatgaagacatggaccctccaaaagggcttccctctggtaactgttcagaagaagggcaaagaactatttattcagcaggagagattcttcctcaacatgaaacccgagattcagccttccgatacctcttatctgtggcacatacccctatcttatgtgactgagggcaggaactactcaaaataccagtccgttagcctgcttgataagaagtccggggtgatcaacctcactgaagaggtcctttgggtgaaagtaaacattaatatgaacgggtattacatcgtacattacgccgacgatgactgggaagcactgatccatcaactgaagatcaacccatacgtgttaagcgacaaggaccgtgctaacctgatcaataacatctttgaacttgccggcctgggtaaagtgcctcttaagcgcgcattcgacttgatcaattatctcggtaatgaaaatcataccgccccaatcactgaagctttgtttcaaaccgatctgatctacaatctcctcgaaaagttagggtacatggaccttgccagtcggcttgtaacgcgcgtcttcaaactcctccaaaatcagatccagcaacaaacatggaccgacgaaggcacgccctctatgcgggagctgaggtctgccctcctggagtttgcttgcactcataacctcggaaactgctccacgaccgcaatgaagctgttcgacgattggatggcctctaacggcactcagtccttaccgactgacgttatgacaaccgtcttcaaggtgggcgccaagactgacaagggatggagttttcttctcggcaaatatatctccatcgggagcgaggccgagaagaacaagatcctggaggcactggcttccagcgaagatgtgcgtaagctttactggctcatgaaatcatcattaaatggcgataattttaggactcagaaattatcctttattatcaggacagtgggtcgtcactttcctggccatcttctcgcctgggacttcgtgaaggagaactggaataagctcgttcagaagtttccactaggctcttacacgatccaaaatattgtggcagggtctacttatctgttttctaccaagactcatctgagtgaggtgcaggccttctttgaaaatcagtcagaggctacctttaggcttaggtgtgtccaggaggccttagaggtgatccagctgaatatccaatggatggagaaaaatctcaagtctctgacctggtggctctag

SEQ ID NO: 107749 - DNA, 2907 bp, synthetic construct
  misc_feature 1..2907: note = Description of Artificial Sequence: Synthetic coding sequence
  source 1..2907: mol_type = other DNA
atggactcaactcttaccgcctctgagataaggcagaggttcatcgatttctttaaacgcaacgagcatacctatgtgcactccagcgccaccattcctttggatgacccgacgcttttgttcgccaacgccggcatgaatcagttcaagccgatcttcctgaacacaattgatccaagccacccaatggcaaagcttagccgggccgctaacacccagaaatgcatacgagcaggggggaagcataatgacctagacgacgtgggaaaagatgtgtaccatcacacgtttttcgaaatgttaggttcttggagtttcggcgattattttaaagagctggcttgcaaaatggctcttgagctgctgactcaggagtttgggatccctatagagcgcctgtacgtgacttatttcggaggagatgaagccgccggactggaggccgacctcgaatgcaaacagatctggcagaatctgggactggacgacactaaaatcctgcctggcaacatgaaggataacttttgggagatgggagatactggcccttgcggaccatgcagtgaaatccactatgacaggattgggggccgcgacgctgctcacctggtcaatcaagacgatcccaacgtgctagaaatctggaaccttgtgtttattcagtataaccgagaagccgatgggattctgaagccccttccaaaaaagagtatcgacaccggcatgggcctggagcggctggtttctgtgctgcagaacaaaatgtctaactacgacaccgacctgtttgtgccctattttgaggctatacagaagggtaccggggcccgcccatacactggcaaagtgggcgcagaggatgccgacgggatcgatatggcctaccgagttctggccgaccatgctaggactattactgtggcattggctgatgggggacgccccgacaatactggacgggggtatgttttaagaagaatcctgcggagagccgtgcgctacgcacacgaaaagttaaacgcttcccgtggcttttttgctacgctggtggacgtggtggtgcagagcctgggcgatgcgttccccgagctgaaaaaagaccctgacatggttaaagacattattaatgaggaagaagtgcagttcttgaagaccctgagcagaggacggcgcattctggacagaaagatccaatcgctgggggacagtaaaaccattccgggagatacagcctggctgttatatgacacatatgggttcccagtcgacttaacaggccttattgctgaggagaagggcctggtggtggacatggacggatttgaggaagagagaaagctcgcacaattgaaatcgcagggtaagggggccggcggagaggaccttatcatgttggacatttatgccatagaggaattgagagcaagaggtctggaggtaaccgatgatagccctaaatacaactaccacctggactcctcagggagttacgtctttgaaaataccgtcgcaaccgtaatggccctcagacgcgaaaagatgttcgtggaagaggtgtccacaggtcaggagtgcggggtcgtgctggacaaaacatgtttttacgccgagcagggcggacagatttacgatgagggttacctagtgaaagtggacgacagttcagaggataagacagagtttacggttaaaaacgcgcaggttcggggagggtacgttctacatattggcactatctacggagacctgaaagtcggcgaccaggtttggctttttatcgatgaacccaggcggcggccaataatgtcaaaccacactgcaacccatatactgaactttgccttgagaagcgtcctcggagaagccgaccagaagggttcacttgttgcgcctgatcgcttgagattcgacttcaccgctaagggagccatgtcgactcagcagatcaaaaaagccgaggaaatcgcgaatgaaatgatcgaagccgcaaaagccgtttatacacaggattgtccactcgctgccgcaaaggcaatccagggcctgagggccgtgtttgacgagacctatcccgatcccgtgcgcgtcgtttctattggagttccagtctccgagctcttggatgatccaagcggaccggctgggagcctgacttccgtcgagttttgtggaggaacccacttaagaaattccagccatgcgggcgccttcgttatcgtcaccgaggaagcaattgccaaaggaattagaaggattgtggccgttactggagcagaagcacaaaaggcactgcgcaaagcagaaagcctcaaaaaatgcctgagcgtcatggaggcaaaagtgaaggcgcaaactgcacccaacaaagatgtgcagagggagatcgcagatctgggcgaagccctcgccacggcagtgatcccccagtggcaaaaggatgagctcagagaaaccctgaagtcgctgaaaaaagttatggatgacttggacagagctagcaaggcggacgttcagaagcgtgtgctggaaaagaccaaacaattcatagactcaaatccaaaccagccgttggtcattcttgagatggagtctggggcgagtgccaaggcacttaacgaggccctgaagctgttcaagatgcactcccctcagacgtcggctatgctctttacagtggacaacgaagcagggaagatcacctgtctctgccaggtaccgcaaaatgcagccaatcggggccttaaggctagtgagtgggtacagcaagtttcaggcttgatggacggcaaggggggaggtaaagacgtcagtgcccaggccacaggaaaaaacgtcggttgtttacaggaggccctgcaactagcaacctccttcgcccaactccgactcggtgacgtgaagaactag

SEQ ID NO: 107750 - DNA, 2958 bp, synthetic construct
  misc_feature 1..2958: note = Description of Artificial Sequence: Synthetic coding sequence
  source 1..2958: mol_type = other DNA
atggctgcgtcagtggcagctgccgcaagaaggctgcgtcgcgccattcgccggtccccagcctggagaggactttcacatagacctctgagttcagaaccacctgccgcaaaggccagcgctgttagggcagcattcctaaacttctttagggaccgccacggtcatcgactcgtcccatccgcctctgtgagaccaagaggagatccctcgcttctgtttgtgaacgccggtatgaatcagttcaagcctatctttctgggcacggttgacccaagatcagaaatggctggattcaggagagtcgctaattcacagaagtgtgtgagagcaggagggcatcacaacgacctggaggacgtgggcagagatctttctcaccacacatttttcgagatgctaggtaattgggcctttggtggagaatattttaaggaggaagcttgtaacatggcctgggaacttctgacgcaagtttatggtatcccagaagagcgactgtggatttcttactttgatggggaccctaaagcaggcttagatccggacctggagactagggacatctggctctctctcggagtgcctgcctctagagttctctcttttggtcctcaagaaaatttctgggagatgggggatacgggcccatgcgggccctgcaccgaaatccactacgatctggcagggggcgtcggcgcgcctcaacttgtggaactttggaatctcgtgttcatgcagcataatcgagaggctgacggaagtcttcagcccttaccacagcgccatgttgatacgggaatgggactcgagagactggtggcagtcctccagggcaagcactcaacctacgacacagatctgttcagtcccctcttgaatgcaatacagcaggggtgcagagccccaccctaccttgggagggttggcgtggcagacgaaggccggacggacacggcctacagggtcgtggcagatcatatcaggaccctatccgtgtgtatatcagatggcatctttcctggcatgtcagggccacccctagtcttaaggagaatcctgcgaagagcggtaagattctcaatggaaattctgaaggcccccccgggatttctggggtctttggtgcccgtggttgtggaaactctgggtgatgcctaccccgaactacaaaggaattccgctcagattgcgaacttagtttcagaggacgaagccgccttcctggccagtctggagcgggggaggagaattattgataggacgttacggaccctcggccctagcgatatgttccccgcggaagtggcctggtcactgtccctgtgcggcgatctcggtttgccactggacatggtagagctgatgctggaggagaagggcgtgcagctggattccgcagggcttgaaagacttgcccaggaggaggcacagcaccgcgcgcgacaggccgagccagttcagaagcaaggcctgtggcttgatgtacacgccctgggcgagctccagagacagggtgttccacctacagacgactcgccaaaatataactactctcttaggccttcaggctcgtacgagttcggcacctgtgaggcccaagtgctacaattatacactgaagacggtaccgctgtggctagcgtggggaaaggtcaaagatgtgggctcctgctggatcgcacgaacttttacgctgaacaaggaggccaggcttctgaccggggctatctcgtgagagctgggcaggaggacgttttattccccgttgcccgagcccaggtgtgtggggggttcatcttgcacgaagcagtggcccccgagtgcctgagactgggcgaccaggtgcagctgcacgtggatgaagcatggagactggggtgcatggcaaaacacaccgccacccacctgctgaactgggcccttcgacagacactggggccggggaccgaacagcagggatctcatcttaaccctgagcagctgaggctggatgtgacaacacagaccccccttacacctgagcagttgcgggccgtcgagaacacagttcaggaagctgtcgggcaagacgaggctgtttacatggaggaagttcccctcgccctgaccgcacaggttcctggcttaaggtcactggatgaggtgtaccccgaccccgtgcgcgtggtcagtgtcggcgtcccagtggcccacgctctggatcccgcctcacaagcagcactgcagacttctgtcgaattgtgttgtggcacacatttgctcaggaccggggctgtgggggatctggtaatcatcggtgaccgacaactgtcgaagggaactacccggctgctggctgtcactggtgagcaggcccaacaggccagggaattgggccagtccctcgcacaggaagtgaaggccgccactgagaggctttccctaggcagtagggatgttgctgaggcgctacgactatctaaggatatcggccgacttatagaggccgttgaaaccgctgttatgccacagtggcagaggagggaactacttgccaccgtcaaaatgctgcaacggagagcaaatacagcgattcgcaagctgcaaatgggccaggccgctaaaaaaacgcaggaactgctagaacggcatagtaaaggacccttaattgtggacaccgtgagcgccgaatcactctccgttttagtgaaggtggtccggcagctttgtgaacaagccccatcaacatccgtcctactgttaagcccccaacccatgggtaaggttttgtgcgcctgtcaggtcgcccagggcgcaatgcccacgttcactgcagaggcctgggcgttggccgtgtgttcgcatatggggggtaaagcttgggggagtagggttgtggcccaaggtaccggctctacaacggacttagaagccgcactgagcattgcccaaacctatgctttgagccagttatag

SEQ ID NO: 107751 - DNA, 1578 bp, synthetic construct
  misc_feature 1..1578: note = Description of Artificial Sequence: Synthetic coding sequence
  source 1..1578: mol_type = other DNA
atggaattttgtgtggaggatagcaccgatgtgcatgtgctgattgaggaccatcgaatagttttctcttgcaagaacgccgacggagtcgaactgtacaatgagattgagttctatgctaaggtgaacagcaaagacagtcaggacaaacggagcagtcggagtattacatgctttgtgaggaaatggaaggagaaggtggcatggcctagactgacaaaagaagacatcaaacccgtttggctaagcgtggacttcgacaactggagggactgggaaggtgatgaggaaatggaactcgcccatgtcgagcactatgccgagctgctgaaaaaggtaagtacgaaacggcctcctcctgcaatggacgacttggatttcacgacgactgtcgtatcgtgctgccctgccgagctacaaacggaggggagcaacggaaaaaaggaggtgctcagcggtttccaggttgtgcttgaagacaccgtcctctttccagaaggcgggggacaacccgatgatcggggaacaatcaacgacatctctgtccttcgcgtgacgcggagaggagagcaggccgatcatttcacccagacaccacttgaccctggcagtcaggttttagtcagggtggactgggaacggcggtttgaccacatgcagcagcactcagggcaacacctcatcaccgccgtcgctgaccacctcttcaagctgaagactacttcctgggagctaggaaggttcagatctgccatcgaactggatactccgagtatgacagccgaacaggtagccgccattgagcaatcagtgaacgagaagatccgggaccgcttacctgtgaatgtccgggagctgtccctggacgatcctgaggtggagcaggtcagtgggaggggcctccccgatgatcatgcgggacccattcgcgtcgtaaacattgagggggtggacagtaacatgtgctgcggcactcacgtcagcaatttgtcagacctgcaagttataaaaatactcgggacggagaaagggaaaaagaatcggactaacctaatcttcctgagcgggaacagggtcctcaagtggatggagcggagccacggaacggagaaagcccttacagcactcctaaaatgcggggccgaagaccacgtggaagccgtgaaaaagctccagaattctaccaagatactgcagaagaataatctgaatctgttacgggatctcgccgtccacatagcccacagtctgcgcaattctcccgactggggaggagtggtcatccttcacagaaaagagggagatagcgagtttatgaatatcatagcaaacgaaattggtagtgaggagactcttctgttcctcaccgtcggagatgaaaagggcggcgggctgtttctgttagcaggtcctcccgcctctgtagaaactctgggaccccgggttgccgaagtcctggaaggcaagggagctgggaagaaggggaggttccaaggaaaagcaaccaagatgagtaggaggatggaagcccaagcactgctccaggactacatctccacccagtcggccaaagagtag

SEQ ID NO: 107752 - DNA, 1761 bp, synthetic construct
  misc_feature 1..1761: note = Description of Artificial Sequence: Synthetic coding sequence
  source 1..1761: mol_type = other DNA
atgttttccctgccgttgaattgcagtcccgaccatatccgccgcggttcatgctggggcagaccccaagaccttaagatcgccgccccagcgtggaactctaaatgccatcccggagctggcgccgcaatggcaaggcagcacgcgcggacactgtggtacgaccgaccacggtacgtctttatggagttctgtgtggaagactctaccgatgtccacgtgttaatagaggatcaccgaattgtgtttagctgtaagaacgctgacggtgtggaactgtacaacgagattgaattttatgccaaggtcaatagcaaggattcacaagataagaggagtagtcgaagcatcacatgcttcgtgagaaagtggaaggagaaagtggcctggcctaggttgacaaaggaggacataaaaccagtctggctgagtgttgacttcgacaattggagagattgggagggcgatgaggaaatggagttagcccacgtggaacactatgccgagttgcttaagaaggtctctaccaagagacctccacctgccatggacgacctggactttactacaaccgtggtgagctgctgtcccgctgaacttcaaacagaaggtagcaatggaaagaaagaggtgctgtctggcttccaggtggtcctcgaagataccgttctgtttcccgagggcggggggcagccagatgaccgagggaccataaacgatatctctgtgttgagggtgacgcggcggggcgagcaggccgaccactttacccaaaccccgctcgatcctggatctcaggtgcttgtccgagtagactgggagcgtaggtttgatcatatgcagcagcattccggtcagcatctaattaccgctgtggccgaccatctattcaagttgaagactacctcatgggagttaggacggtttcgttccgccatcgagttagatactccatctatgaccgctgagcaggtcgcagccatcgaacagtccgtaaacgaaaagatccgggataggcttcccgtgaatgtacgagagcttagcctggacgaccccgaggtggaacaggtctctggcagaggtttgccagacgatcacgctggacctataagggtggtaaacatcgagggggtggactcaaacatgtgttgcgggacgcatgtgtcaaatctttcagatctgcaggttataaaaatcctaggaaccgaaaaggggaaaaaaaaccggacaaatcttatatttctgtctgggaatcgagtcctcaaatggatggaacgatcacacgggactgagaaggctctaactgccctgttaaagtgtggcgcagaagaccatgtggaagcagtcaaaaagctccagaactccacaaaaatcttgcagaagaataacttaaatttgttacgagatctggccgtgcacatcgcgcacagcctcaggaattctccagattggggaggtgtggtcattcttcatcgcaaggagggggactctgagtttatgaatatcatagcaaacgaaattggatccgaggaaacccttcttttcctgacagtcggagacgagaaagggggtggattgttcctgcttgccggtccgccggcatccgtggagactctgggtccccgggtggcggaggtgctggagggcaagggggcggggaagaaaggacgcttccagggcaaagccacaaaaatgtcccggagaatggaagcacaggccctgctgcaagattatatctcaactcaaagtgcaaaggagtag

SEQ ID NO: 107753 - DNA, 1761 bp, synthetic construct
  misc_feature 1..1761: note = Description of Artificial Sequence: Synthetic coding sequence
  source 1..1761: mol_type = other DNA
atgttctctttgcccctaaattgctcaccagaccacatcaggcgcggcagctgctggggcaggccacaggacctgaagattgccgcacccgcctggaacagtaagtgtcacccaggcgccggcgccgccatggccaggcaacatgcccgtactctgtggtatgatagaccacgatacgtcttcatggaattctgcgtggaagactctactgatgtccacgtcctaattgaggatcatcggatcgtcttttcttgtaagaacgccgacggcgttgaactctacaatgagattgagttttacgcaaaagtcaattcaaaggattcgcaagacaagcggtcctcccgcagcataacctgcttcgtgcggaaatggaaggagaaagtggcgtggccccgcctgaccaaggaagacatcaaacccgtttggctatccgtcgacttcgacaattggcgggactgggaaggcgatgaagaaatggagttggctcatgtggagcactatgccgagctcctgaagaaggtgtcaacgaaacggccaccccccgccatggacgatttggatttcactactacagtggtgtcctgttgcccggccgaactccagactgaggggtccaacggtaagaaagaagtcttatctgggtttcaggttgttctggaagatacagtgctctttccagagggaggaggccagccagatgatcgcggtaccatcaatgacatcagcgtgctcagggtaactcgccggggtgaacaggccgaccacttcacacagacccctctggaccctggctctcaagtgttggttcgcgtggactgggaaagacgcttcgaccacatgcagcagcactcggggcagcacttgatcacagcagtggcagatcacctattcaaacttaagaccaccagctgggaacttggtaggttcagatctgccattgagctcgataccccatctatgacagccgagcaggtggcagccattgaacagagcgtaaacgagaaaatccgcgatcggctcccagtgaacgtgagggaattgtcgctggatgacccagaagtcgaacaagtgagtggtagagggctacccgatgaccacgcagggcccatccgagttgttaatatcgaaggggtcgactcgaatatgtgttgtggcacacatgtttctaatctgagcgacctgcaggtgatcaagatcctggggacagagaagggcaagaagaaccgcacaaatctgattttcctgtccggtaacagagtgctgaaatggatggagcgcagccacgggacagaaaaagcgttaaccgctctcctaaagtgtggcgccgaggatcatgtggaagccgtgaagaagctgcagaacagcacaaagattcttcagaagaacaacctaaatctgctccgggatctggccgttcacatcgcgcattccctgaggaattctcccgactggggtggcgtggtgatcttgcatcgaaaggaaggcgactctgaatttatgaatattattgcaaatgagatcggctcggaagagacgctgctgtttctgacagtgggggacgagaagggcggtggcctgtttttacttgccggacctcctgctagcgtggaaacgcttggcccccgcgttgctgaggtgttagaaggcaaaggagcgggtaagaaaggacgttttcaaggcaaagccacgaagatgtccaggcggatggaggctcaggccctgcttcaagactatattagtacgcaaagtgccaaagagtag

SEQ ID NO: 107754 - DNA, 1239 bp, synthetic construct
  misc_feature 1..1239: note = Description of Artificial Sequence: Synthetic coding sequence
  source 1..1239: mol_type = other DNA
atggcattttggtgtcagagagatagttacgcccgagagtttaccaccacagtcgtatcctgttgtcctgcagagctgcagacagaaggaagcaacgggaagaaggaggtgctgtccggatttcaggtggttctggaggatacagtccttttccctgaagggggaggacagcccgacgacagaggtaccataaatgacatttcagttctgcgggtgacaagacggggagaacaggccgatcattttacccagacgccactggacccaggaagtcaagtgcttgtcagagtggactgggaaagacgtttcgatcacatgcaacagcattctgggcaacatctgatcacggctgtggccgaccacttgttcaaactcaaaactaccagttgggaactcggaaggtttcgttctgctattgagctagacacacccagtatgactgcagagcaggtcgccgccattgagcagagcgtgaacgaaaaaatacgcgatcggcttccggtgaacgtgcgtgaactctccctggatgatccggaagttgagcaggtgtccggtcggggcttgccagacgatcacgccggcccgatccgcgtcgtgaatatcgagggggtagatagtaatatgtgctgcgggactcacgtcagcaacctctctgatttgcaggtgataaagatacttggaacagaaaagggtaaaaagaaccgaacaaacctcatatttctatctggcaacagagttttgaagtggatggagaggtcacatggaaccgagaaggcactaacagcactcctcaagtgcggggctgaagaccatgtagaggccgtgaagaaactccagaacagtacaaaaatactgcaaaaaaacaacttgaatctcttacgggacctcgccgtgcacatcgcccactctctcagaaattctcccgactggggcggcgttgtgatattgcacagaaaggagggggacagcgaattcatgaacatcatcgccaatgagatcggcagcgaagagactctgcttttcctcaccgtgggcgatgaaaaagggggcggcctgtttctgctggccggccccccagcatccgtggagactctcggcccccgagtggcagaagtgttagagggtaaaggtgccgggaagaaagggagattccaagggaaggcaacaaaaatgagccgtcgtatggaagctcaggctctactgcaggattatattagcacacagagcgcaaaggaatag

SEQ ID NO: 107755 - DNA, 501 bp, synthetic construct
  misc_feature 1..501: note = Description of Artificial Sequence: Synthetic coding sequence
  source 1..501: mol_type = other DNA
atgttttctctaccgttaaattgttctcccgaccatattagacgaggttcctgctggggacgtccacaggaccttaagattgctgcccccgcttggaactccaaatgtcaccccggcgcgggcgcagcgatggccagacaacacgcgcgtacgctatggtatgatcgaccgcgatacgtgttcatggaattttgcgtcgaagactccacagatgtccacgtgctcattgaagaccaccgcatcgttttctcctgcaagaacgctgacggggtggagctttacaacgagattgaattctatgccaaggtaaacagtaagcctgtatggcttagcgtggatttcgacaattggcgtgattgggagggtgacgaggagatggaactcgctcatgtggagcactacgcggagctgcttaagaaagtgagcacaaagcggccgccccctgctatggacgatctggacgatgatagcgattcagccgacgatgccacctctaattag

SEQ ID NO: 107756 - DNA, 399 bp, synthetic construct
  misc_feature 1..399: note = Description of Artificial Sequence: Synthetic coding sequence
  source 1..399: mol_type = other DNA
atggaattttgtgtagaggacagcactgatgtacacgtgcttattgaggatcaccggatcgtcttctcatgtaaaaatgcggacggtgtggaactttataacgagattgaattctacgcaaaagttaactccaaggactcccaggacaaaagaagttcccgctctatcacgtgcttcgtgcggaagtggaaagagaaagttgcatggcctagactaacaaaggaggacatcaagcctgtatggctgtcagtggactttgataactggagagattgggagggcgacgaagagatggagctggcccatgtcgagcattacgccgagcttctgaagaaagtgtcaactaagagacctcccccagcaatggacgacctcgactttacaacgacagtggtgtag

SEQ ID NO: 107757 - DNA, 1830 bp, synthetic construct
  misc_feature 1..1830: note = Description of Artificial Sequence: Synthetic coding sequence
  source 1..1830: mol_type = other DNA
atgaagtgggtgacattcatctccttgttgttcttattttcctctgcatattccaggggcgtcttcagacgggacgctcataagtccgaggtggcccatcggttcaaagatttgggcgaagagaactttaaagctctggtactgatcgctttcgcacagtatctacaacagtgcccctttgaagatcacgtgaaactggtaaatgaggtcacagaattcgccaagacgtgtgttgcagacgagtccgcagaaaactgtgacaaaagcctccacaccttattcggagacaagctctgtaccgtggcaacacttagagaaacgtatggagagatggccgactgctgtgcaaagcaggaaccagagagaaatgagtgcttcttacagcacaaggatgacaaccccaacctgccccgcctcgtcaggccagaagtggacgtcatgtgcactgcgttccacgataacgaggaaacctttctcaagaaatatttgtatgaaatagcccggcgccatccctatttttacgcccctgaattgctgttttttgccaaacgctataaagccgcttttacagagtgttgccaagcagctgacaaagccgcttgtctcttaccgaagcttgatgagctgcgggatgagggtaaggcgtcgagcgcaaaacaacgtctcaagtgtgcctctctccagaaatttggtgaacgggccttcaaggcatgggccgtcgcacggttatcccaaagatttcccaaggctgaattcgccgaagtttccaaattggttaccgatttgacgaaagtgcacactgagtgctgccatggcgacctgctggaatgcgcggacgaccgggcagatttggccaaatacatctgcgagaaccaagactctatcagtagcaaactaaaagagtgctgcgaaaaacccttgctggagaagagtcactgtatcgctgaagtggagaatgacgagatgcccgctgatttgccgtctctggccgctgacttcgtggagtcaaaagacgtgtgtaaaaattatgccgaagcaaaggacgtttttctgggcatgtttctgtacgaatatgcccggagacatcccgactattccgttgtcctcctcctgcggctagcaaaaacatatgagactacgctagaaaagtgctgcgctgctgccgatcctcacgagtgttacgctaaggtgtttgatgaatttaagcctctggtggaagagcctcagaatttaattaagcagaactgcgaattgttcgagcaattaggggagtataaatttcagaatgcgttgctggtgaggtataccaagaaggttccacaagtctcgactcccacccttgtcgaggtgagcagaaacctgggcaaagtggggagtaaatgctgcaagcatccagaagcgaaacgaatgccttgtgcagaggactatttaagtgtggtgctaaaccaactttgcgtgctgcacgagaagacccccgtcagcgatcgggtcaccaaatgttgcaccgaatcccttgtcaacaggagaccctgtttcagtgccctggaagtggatgagacttacgttcctaaggagttcaatgcggagacattcacctttcacgcagacatctgcacattgagcgaaaaagagcgccaaattaaaaagcagactgctttggtggagcttgtgaaacacaaacctaaagccactaaagaacagctgaaggccgtgatggacgatttcgccgcctttgtcgaaaaatgctgcaaggccgacgataaagagacgtgtttcgccgaggagggtaaaaaactggtcgcagcatcccaggccgccttgggactctag

SEQ ID NO: 107758 - DNA, 1191 bp, synthetic construct
  misc_feature 1..1191: note = Description of Artificial Sequence: Synthetic coding sequence
  source 1..1191: mol_type = other DNA
atgaagtgggtgacattcatttccctgctattcctattttcttctgcctactctcggggggtttttcgcagggacgctcataagtccgaagttgcacaccggttcaaggatctgggggaagaaaacttcaaggccctagtactgattgcttttgctcagtatctgcagcaatgccctttcgaagaccacgttaaactggtaaatgaagttaccgagttcgccaagacttgcgtggcagacgagagcgcagagaactgtgacaaatctctgcataccttatttggtgacaagctgtgcaccgttgccacgcttagggaaacgtacggagaaatggcggattgctgcgccaagcaggagcctgagcgaaatgaatgcttcctgcaacacaaagatgacaacccgaatcttcctagactagtgagacccgaagtcgacgttatgtgtaccgccttccatgataatgaagaaactttcttaaagaagtacctgtacgagaccactctggagaagtgctgcgctgccgctgacccccatgagtgctatgccaaagtattcgacgaattcaagcctctggtagaggagccccaaaatcttattaaacaaaattgtgaactgttcgaacaacttggggaatataaatttcagaacgccctcctggtgcggtataccaagaaggtgcctcaggttagcacgcccacattggtcgaagtctctaggaatttaggcaaggtgggtagcaaatgctgcaagcatccagaggccaagcggatgccgtgtgccgaagattacttatctgtggttcttaatcagctgtgtgtcctccacgagaagacccccgtgtctgacagggtcacaaaatgttgcaccgagtctcttgtgaataggaggccatgttttagcgcgctggaggttgacgaaacctatgttcctaaagagttcaacgctgagacgttcacgtttcacgcggacatttgcactctttccgaaaaggaacgccagatcaagaagcagactgcactggtcgagctcgtgaagcacaaaccaaaggctactaaggagcagctgaaagcagtaatggatgacttcgctgcctttgttgaaaagtgctgcaaggctgatgataaagagacttgcttcgcagaggagggaaagaaactcgtggccgcatctcaggccgcgctgggtttgtag

SEQ ID NO: 107759 - DNA, 1254 bp, synthetic construct
  misc_feature 1..1254: note = Description of Artificial Sequence: Synthetic coding sequence
  source 1..1254: mol_type = other DNA
atgaaatgggtcacgttcatttctctactctttctattttcaagcgcttactcaaggggcgtatttcgtcgcgacgcgcataagagcgaggtggcccaccggtttaaagatctaggagaggagaactttaaagctctcgcggtggcacgcctgtctcagcggttcccaaaggccgagttcgccgaggtctccaagctggtgactgacttaactaaggtgcacactgagtgctgccacggggacttactcgaatgcgccgacgaccgggccgatttggcaaaatatatctgcgagaatcaggacagtatctcttcgaagcttaaagaatgctgcgagaagcctctgcttgagaaaagccactgtatcgccgaagtcgaaaatgacgaaatgccggccgatctgccttccctggcggctgatttcgtcgagtcaaaagatgtatgcaagaattacgccgaagctaaggacgtgtttctgggcatgttcctttacgagtacgcccgtagacatcccgactattctgtggtacttctcttgcggcttgccaagacctacgaaactacacttgagaagtgctgcgccgccgcggatccccacgaatgctacgctaaagtatttgacgaattcaaaccactcgtggaggagccacagaacctgatcaaacaaaattgtgagctattcgagcagcttggggagtacaagttccaaaacgccttactcgtacggtataccaagaaggttccgcaagtgtcgacacccacgctggtggaagtttccagaaatctgggcaaagttggatccaaatgctgtaaacaccctgaagcaaagcgaatgccctgcgccgaggattacctctctgtggtgttgaaccagctgtgcgtgcttcacgaaaagacacctgtgtccgacagggtgacaaagtgctgcactgagtctttggtgaaccgacgcccgtgtttctccgctttagaagtcgatgaaacctatgtcccgaaagaattcaatgctgagacatttacctttcacgccgacatatgcactctgtcagagaaagagagacaaattaagaagcagaccgccctggtggagcttgtgaaacacaagcctaaggccactaaggagcagttgaaggcagtcatggatgactttgcggctttcgtagagaagtgctgcaaggccgatgacaaagaaacatgctttgccgaagagggcaagaagttggtggccgccagccaagccgcactgggcctgtag

SEQ ID NO: 107760 - DNA, 1857 bp, synthetic construct
  misc_feature 1..1857: note = Description of Artificial Sequence: Synthetic coding sequence
  source 1..1857: mol_type = other DNA
atgaaatgggtgacattcataagtctgctgttcctgttctccagcgcctactcccggggcgtctttagacgcgacgcgcttttcctcttcttcttcccttgtccagataagtctgaggtggcccacaggttcaaggatttgggagaggagaatttcaaggcacttgtgctgatcgcctttgcacagtatctccagcagtgtcctttcgaagaccacgtgaaacttgtcaacgaggtgacagagtttgcgaagacatgcgtagctgacgaaagtgctgagaattgcgataaatccctgcacactttgtttggcgacaagctatgtaccgtagctacgctccgcgagacgtacggagagatggcagactgttgcgcgaaacaggaacccgagagaaatgaatgtttcctgcaacacaaggacgataacccaaatttaccccgtctagtgcgcccagaagttgatgtgatgtgcactgccttccacgacaatgaagaaacatttctgaagaagtacctctatgaaatagcgcgaagacatccctacttctatgcgcctgagctgctgttcttcgctaaacgatacaaagcggcctttacagaatgttgtcaggccgccgataaagccgcctgtctgctgcccaaacttgacgagttgagagatgagggcaaagccagctctgccaagcagcggctgaaatgtgcttcactgcagaaattcggagagcgggctttcaaggcctgggccgttgccagactttctcagagatttcccaaagctgagtttgcggaggtctctaaactggtgacagatctgacgaaggtgcacaccgagtgttgccatggtgacctgttagagtgcgctgacgatagggccgacctggccaaatatatctgtgagaaccaggattcgatatcatccaaacttaaggaatgctgtgagaagcccctgctggagaaaagtcactgtattgctgaagtagaaaacgatgaaatgcccgcggacctcccgtctctcgctgctgattttgtagagagtaaagacgtttgtaagaactacgccgaggccaaagacgtattcctgggtatgtttttgtacgagtacgcacggagacaccccgactactccgtggtcctcctactgcgcctagcaaagacatatgaaacaaccctggaaaaatgctgtgccgccgcagaccctcatgagtgttacgccaaagtgtttgatgagtttaaacccctggtcgaggagccacagaacttaattaaacagaactgcgagctatttgagcaactgggtgagtataaatttcaaaatgctcttctggttagatatacaaagaaggtgccccaggtgagtaccccaactctggtagaggtgagccggaacctaggaaaggtcggctctaagtgctgcaagcaccctgaggcaaagagaatgccatgtgccgaagactacctctctgtggtgctgaaccagctttgtgtcctgcacgagaaaacccccgtgtcagatcgtgtaactaagtgctgtaccgaatcattggtgaatagacggccctgcttttcagccttggaagtcgacgagacctacgtccccaaggagtttaatgctgaaacatttacgttccacgccgacatctgcacattgtctgagaaagagagacagattaaaaaacagaccgcactggtggagctcgtgaaacacaaacctaaggcaactaaagaacagctgaaggccgttatggacgactttgccgcgttcgtagaaaaatgctgcaaagcagacgataaggaaacctgctttgccgaagagggtaagaagttggtggccgcgagccaggccgccctgggcctctag

SEQ ID NO: 107761 - DNA, 1161 bp, synthetic construct
  misc_feature 1..1161: note = Description of Artificial Sequence: Synthetic coding sequence
  source 1..1161: mol_type = other DNA
atgtttgctgaaattcagatccaggacaaggatagaatgggtactgcaggaaaggtgattaaatgcaaagctgcagtgttgtgggaacagaaacagcccttttcaatcgaagagatcgaagtggcacccccaaagaccaaagaagtgagaatcaagatattagcaaccgggatctgtcggacagatgatcacgtgatcaaaggaacaatggtgagcaagtttccggtgattgtgggacatgaagctacagggattgtcgagagtatcggcgagggcgtgactactgtaaaaccaggcgacaaggtcattcccctgtttctaccccaatgccgtgagtgcaatgcctgtcggaacccggacgggaatctgtgcatccgctccgacattactggccggggagtcctcgcggatggcactactcgatttacatgtaagggcaagcctgtacaccacttcatgaatacctccacattcactgagtataccgtagttgacgaaagttcggtggcaaagatagacgacgctgcgccccctgagaaggtgtgtctgatcggttgcggcttcagcactggttatggcgccgccgtgaagaccggcaaggtgaaacctgggtccacttgcgttgttttcggattaggtggtgtggggctaagtgtcattatgggctgtaaatccgccggggcttctcgtatcatagggatcgatctgaataaggataaattcgagaaagcgatggctgttggagcgactgagtgtatcagtcccaaggattccaccaagccaatctctgaagtcctgtctgagatgaccggaaataacgtcggctacacctttgaggttatcggtcacctggagactatgatcgacgctttggcatcatgtcacatgaactacggaacttcggtggtcgtgggcgtaccacctagcgctaagatgctgacctatgaccccatgctgttgtttaccgggcgaacttggaaagggtgtgtctttggcgggctaaagtcccgggatgacgttcctaagctggttaccgaattcctcgccaagaagttcgacctggatcaactgattacacatgttttgccgtttaaaaagattagtgagggttttgagctcctgaactctgggcagagcattaggaccgttctaacattttag

SEQ ID NO: 107762 - DNA, 1128 bp, synthetic construct
  misc_feature 1..1128: note = Description of Artificial Sequence: Synthetic coding sequence
  source 1..1128: mol_type = other DNA
atgtccacagctggtaaggtgattaaatgcaaagctgccgttttgtgggaagtgaaaaagccttttagcatcgaagacgtggaagtggctcccccgaaagcttacgaggtgaggattaaaatggtggcggtgggcatctgtcacacagatgaccacgtggttagcggtaacctcgttaccccactccccgtgattttgggccacgaggccgcaggcatagtcgaaagcgtgggcgagggcgtgaccacagtgaaacccggcgacaaggtgatcccactttttaccccccagtgcggaaaatgccgggtgtgtaagaatccggaaagtaactattgcttgaagaatgatctggggaaccctagagggacactgcaagatggaacgaggcgttttacatgtagaggtaagcctattcatcattttctggggactagcaccttttcgcaatatacagtggttgacgagaatgccgtggctaaaatagacgccgcatcccccctcgagaaagtgtgtctgataggttgcgggttctcaacagggtatggatctgccgtcaacgtggccaaggtcacccccgggagtacctgcgctgtatttggcctgggcggagtggggctgtctgcagttatgggctgtaaagctgctggtgcagcgagaatcatcgctgtcgacatcaataaagacaaattcgcaaaagccaaggagctgggagccactgaatgtatcaacccgcaagactataagaagccaattcaagaggtactgaaggagatgaccgatggtggggtggatttttcctttgaggtgattggtcgattggacacgatgatggcgtcattattatgttgtcatgaggcctgcggcacaagcgttatcgtcggagttccccctgcttcgcaaaatctttcaattaaccccatgctgcttttgaccgggcgtacgtggaagggcgccgtgtatgggggctttaagagcaaggaagggatcccgaagctggtagcagattttatggcaaagaagttctccctcgatgctctaattactcatgttctgcccttcgagaagattaatgagggctttgacctcttgcactccggaaagtctattagaaccgtgcttactttctag

SEQ ID NO: 107763 - DNA, 1008 bp, synthetic construct
  misc_feature 1..1008: note = Description of Artificial Sequence: Synthetic coding sequence
  source 1..1008: mol_type = other DNA
atggtggcagtggggatctgccataccgacgatcatgtggtcagcgggaatctggttacacctcttcccgtcatcctgggacatgaggcagccggtatcgtggagtcagttggggaaggtgttaccacagttaaacccggggacaaagtgattccgttgtttacccctcagtgtggaaaatgccgtgtctgtaagaatcctgagagcaactattgtctcaagaatgatctaggaaatcctcgcggcacactgcaggacggcacacgtaggtttacttgccggggtaaaccgattcatcactttctgggaacctctactttttcacagtacaccgtggtggatgaaaatgctgtcgctaagattgatgccgcttctccactcgaaaaggtgtgtctaatcggatgtgggttttctaccggctacggctcagcagtgaacgtcgccaaggttacgccagggtctacctgcgcagtgtttggcctggggggagtcggtctgtctgccgtaatgggctgcaaagctgcaggcgctgcgaggatcatcgccgtcgacatcaataaggacaagtttgccaaggcaaaagagctgggggcaacagaatgtattaatccacaggattacaagaagcctattcaggaggtgctgaaggaaatgaccgatggaggtgtggatttctcttttgaggtcattgggagactagacaccatgatggcctcacttctatgttgccatgaggcctgcggaaccagcgtgattgttggcgtgccccccgcttcccagaatctgtcaatcaaccccatgctgctattaacgggacgcacttggaagggggctgtgtacggcggtttcaagagtaaggagggaattccaaagctcgtcgccgacttcatggccaagaagttttctctggatgctctgatcactcacgtgcttccgtttgagaagattaatgaaggtttcgatctactgcacagcggcaaatcaattagaactgttctcacgttttag

SEQ ID NO: 107764 - DNA, 1089 bp, synthetic construct
  misc_feature 1..1089: note = Description of Artificial Sequence: Synthetic coding sequence
  source 1..1089: mol_type = other DNA
atgtcgaccgccggcaaggtgatcaagtgtaaggctgccgtgctctgggaagttaagaagccattttcaattgaagacgtagaagtggctccgccgaaggcttacgaggtaaggatcaagatggtcgctgtagggatttgccacaccgacgaccacgtcgtgtccgggaacctggtgaccccactccctgtcatcctcggacacgaagctgccggcattgtggagagtgtcggtgaaggcgtcaccaccgttaaacctggcgacaaagtcataccactctttactcctcaatgcggcaagtgccgagtgtgcaaaaaccctgaaagtaactactgcttgaaaaatgacctgggaaatccgcgtggcaagcccatccatcacttcttggggacctcaacgttctctcagtatacagtagtcgacgaaaacgccgtggctaagatcgacgccgcctccccactggagaaagtgtgcctcattggttgcggcttttcaactggatacgggtccgccgtgaacgtcgccaaagttactcccggatccacttgtgcagtgttcggcctaggcggagttggcctgagcgccgtgatgggatgcaaagccgctggcgctgcgcgaatcatcgccgtcgatatcaataaagataaatttgctaaggctaaagagctgggtgctaccgagtgtattaacccccaggattacaagaagccgattcaagaggtgttgaaagaaatgacggatggtggagtggatttttctttcgaagtgattggacggctggacacaatgatggccagcctactatgctgtcatgaagcatgcgggaccagcgtaattgttggagtaccaccggcctcccagaacctgtccatcaacccaatgctgttgctgactggtagaacctggaagggagcagtttacggaggttttaaaagcaaagaggggatacctaagcttgttgcagattttatggctaagaagtttagcctcgatgctctgatcacccatgttctgccgttcgagaagatcaacgagggctttgacttgctccacagtggaaaatccatcaggaccgtcctcaccttctag

SEQ ID NO: 107765 - DNA, 1143 bp, synthetic construct
  misc_feature 1..1143: note = Description of Artificial Sequence: Synthetic coding sequence
  source 1..1143: mol_type = other DNA
atggggaccaagggaaaggtcatcaagtgtaaggcagctatcgcttgggaggccggcaagcctttatgcatcgaggaggtggaagtcgcaccgcctaaggcccatgaagtgcgtatccaaatcatcgctacgagtctttgccacaccgacgctacagtgatagattccaagttcgagggcctggctttccccgtcattgtggggcatgaagccgcagggatagtagaaagtattggaccaggggtaactaatgttaagccgggggacaaggtgatcccgctgtacgcccctctgtgtagaaaatgtaaattctgtctttctcccttgaccaacctttgtggaaaaatttccaacctgaaaagccccgcttccgatcagcagttgatggaggataaaaccagccggtttacgtgtaaaggtaaacctgtgtatcatttctttggcactagcacgttttcccagtataccgtggtttcggatatcaaccttgccaagatcgacgatgatgctaatctggaaagagtgtgcctcctgggctgtgggttttccaccgggtatggcgccgctattaacaatgctaaagttactcccggatcaacgtgcgctgtttttggccttggcggagtgggcctctctgcggtcatggggtgcaaagcggcaggcgcctctaggatcatcggaattgacatcaatagtgagaagtttgtgaaggccaaagcgctcggagcaaccgattgtctgaaccctcgtgatctccataaaccaatccaggaggtcattattgagctgacgaagggaggggtcgactttgccttagactgcgctggaggatccgagaccatgaaggcggccctggattgcacaacagccgggtgggggagctgcaccttcataggcgtcgccgcaggctccaaggggctgacaatttttcctgaagaacttataatcgggcgaaccattaatggtaccttcttcggtggctggaagtctgtggatagtatacccaagctcgtgactgattacaagaataagaaattcaacctcgatgcgttggtgacacacaccctgccatttgataagatcagcgaagcctttgacctcatgaaccaggggaagagtgtccggacaattctgatcttctag

SEQ ID NO: 107766 - DNA, 1200 bp, synthetic construct
  misc_feature 1..1200: note = Description of Artificial Sequence: Synthetic coding sequence
  source 1..1200: mol_type = other DNA
atgttagtgaggggcccgcatttcgagttgcagaggtgcaagacacatctgttctcatcaaattatttaacacaggttatcaaatgcaaggccgccatagcctgggaggcaggtaagcccctttgcattgaagaagtggaagtggccccccctaaggcccatgaagtgcgcatccagattatagctaccagcctctgccacactgacgccactgtgatagatagcaagttcgagggcctggcattcccggttatcgtggggcatgaggccgccggcattgtggaaagcataggccccggtgtcactaacgtgaaacctggtgacaaagtaatcccgctgtatgcacctctgtgcagaaaatgcaagttctgcctgtctcctctgactaacctatgtggaaaaatttccaacctcaagagtcccgctagcgaccaacagttaatggaagacaaaactagcaggtttacctgtaagggaaaaccagtctatcatttttttgggacgtcgacctttagccagtacaccgtcgtgagtgatattaatttagcgaagatagacgacgacgcaaatctcgaacgagtttgtctgctgggttgtggcttttccaccgggtacggggctgcaataaacaatgccaaggttactcctggttcgacctgcgccgtcttcgggctggggggagtgggactatcagccgtgatgggttgtaaagcagccggcgcgtcaaggattattggcatcgacataaactccgaaaagttcgtcaaggccaaagcgctgggggccacggactgcctgaacccgcgtgatctccataaacccattcaggaggttattatagagctaacaaaaggaggcgtggattttgccctcgattgtgctggggggtccgagacaatgaaggccgcgttagactgtacaacagcaggctggggctcttgcactttcatcggcgttgcggctgggagtaagggcctgacgatctttccagaggagctgataattggccgaactatcaacggtacattctttgggggatggaagtccgtggatagtatcccaaaactggtcactgattataagaataaaaagtttaatttagatgcactagtgacacacacgctaccctttgataagattagcgaggcttttgacctgatgaaccagggaaagtcggtgagaacaattctgattttctag

SEQ ID NO: 107767 - DNA, 1125 bp, synthetic construct
  misc_feature 1..1125: note = Description of Artificial Sequence: Synthetic coding sequence
  source 1..1125: mol_type = other DNA
atggcaaacgaagtgattaagtgcaaggccgcagtggcctgggaagctggtaagcctttatctatcgaagaaattgaggtggcaccaccgaaggcccacgaggtgcgcattaagatcattgcgaccgcagtatgtcatactgacgcctacaccctctccggagccgaccctgaaggctgctttcctgttatcttgggtcacgaaggagccgggatcgtggagagcgtcggcgaaggagtcaccaagcttaaagcaggggatacagtaatccccctctatatcccccagtgcggtgagtgtaaattctgcttaaatccgaaaaccaacttgtgccagaaaatccgagttacccagggtaaagggctcatgcccgacgggacgtctcggttcacctgtaaggggaagacgatcctccactacatggggaccagtacattctccgagtataccgtggtcgcggacatcagcgtagccaagattgacccattagcgcctctggataaggtctgtttgcttggttgcggcatctctaccggctacggggctgcagtgaatacagccaaactagaaccgggctcagtctgcgctgtcttcggcctgggtggagtcggcctggcggttatcatgggatgcaaggtggccggagcctcgcgaatcatcggagttgatattaacaaagataagtttgctcgggctaaggaatttggggctacggagtgcattaatccgcaggacttttcaaaacccatccaggaggtgttgattgagatgaccgacggtggggtggactactcattcgaatgtatcggtaacgtcaaagtcatgagggccgctctggaagcctgtcataaaggttggggcgtaagcgtagtagtgggtgtggcagcctctggcgaagagatcgcgactaggccgtttcagctcgtcacgggacggacctggaagggcacagcctttggaggctggaaatcagttgagtccgtccccaaactggtctccgaatatatgtccaaaaaaatcaaagtggacgaatttgtgactcataatctctcctttgacgagataaacaaggcattcgaactgatgcattctgggaaatcaatccgcactgttgtgaagatctag

SEQ ID NO: 107768 - DNA, 1107 bp, synthetic construct
  misc_feature 1..1107: note = Description of Artificial Sequence: Synthetic coding sequence
  source 1..1107: mol_type = other DNA
atgtgtaccaccggccaggtgatccgatgcaaagctgcaattctctggaaacccggtgcccccttttccatcgaggaggtagaagttgcccctccgaaagcaaaagaagtacgtatcaaggtagttgccacgggcctctgtgggaccgaaatgaaggtcctcggaagtaagcatctggacctgctgtaccccactatcctgggtcacgaaggggccggtattgtggagtctataggtgaaggagtctcgacagtgaaacccggtgacaaagttatcacgctgttcctccctcagtgtggggaatgcacaagttgcctgaattccgagggaaatttttgtattcagtttaaacagtccaaaacccaattgatgtccgatgggacctcacgtttcacctgcaaaggaaagtccatctatcattttggaaacacaagcaccttttgcgaatacaccgtgatcaaagagatttcagttgctaaaattgacgctgttgcgcctctggagaaagtgtgcttgatctcctgtggctttagtacaggctttggcgctgccatcaataccgcgaaggtgactccgggcagtacttgtgctgtgtttggcctgggaggggtaggtctgtccgtggttatggggtgtaaggcagccggagctgctcggattataggggtcgacgtgaacaaagagaagttcaagaaggctcaggaacttggcgccacagagtgtctgaaccctcaagatctgaaaaaacccatccaggaggtgctattcgatatgactgacgccgggattgatttttgcttcgaggccatcggcaacctggacgttctggccgccgccctagctagttgcaacgaatcctacggtgtgtgcgtcgtggttggcgtcctccccgctagtgtgcagctgaaaattagcggtcagctgtttttctccggccgcagcctgaaggggtcggtgttcggagggtggaaatccaggcaacacatcccgaaactagtggcagactacatggcggagaagctgaatcttgatcccctcatcacacatactctaaatttggataagataaacgaagctgtggaattaatgaaaaccgggaagtggtag

SEQ ID NO: 107769 - DNA, 1128 bp, synthetic construct
  misc_feature 1..1128: note = Description of Artificial Sequence: Synthetic coding sequence
  source 1..1128: mol_type = other DNA
atgtgtactaccggacaagtgatacggtgcaaagctgctatcctgtggaaaccgggcgcccccttcagcatcgaggaggtggaagtggctccgccaaaggccaaagaggtccgcatcaaggtggtggcaactggtctctgcggtaccgaaatgaaagtccttggtagcaagcacctcgatctgctttaccctaccatcctggggcacgaaggggctgggattgtggagagcattggggagggagtgtccacggtgaagccaggcgacaaggtcattactctcttcctgccacaatgcggggagtgcaccagttgtctaaacagtgagggaaacttctgcatccagtttaagcaaagcaaaacccagctcatgtctgatggaacctcacgctttacctgcaaaggaaaaagcatctaccacttcggaaatacctcaactttctgcgaatataccgtcatcaaggagatttctgttgccaaaatcgatgccgtggcccctctggagaaagtgtgtctaattagttgcggctttagtaccggatttggcgccgcgatcaatactgctaaggtgaccccgggctccacctgtgcagtgttcggcttaggtggcgtgggactcagcgtggtaatgggttgcaaggcagccggagccgcgcgcatcataggtgtggatgtaaataaagaaaagttcaaaaaggcccaagaattgggagctaccgaatgccttaacccgcaggacctgaagaaaccaattcaggaggtgctatttgatatgaccgatgcaggaatcgacttttgctttgaggccataggtaacctggatgttctggctgctgcccttgccagctgcaacgagagctatggagtgtgtgttgtggtgggcgtcctgcctgcaagtgtgcagttgaagattagcggacagctctttttctctggtagatccttgaagggtagtgtgttcggcgggtggaagagcaggcagcacattccgaaactggttgctgattatatggcagagaaactcaaccttgaccccttaataacccacacactgaatctggacaagattaatgaggctgtggagcttatgaaaactggcaaatgtatccgctgtatcctccttctgtag

SEQ ID NO: 107770 - DNA, 501 bp, synthetic construct
  misc_feature 1..501: note = Description of Artificial Sequence: Synthetic coding sequence
  source 1..501: mol_type = other DNA
atgggctgcaaggcggctggagctgcccggataatcggtgtggatgttaacaaagaaaaatttaaaaaagcgcaggagttgggagccaccgagtgcctgaacccgcaggatctcaagaaaccaattcaagaagttctgttcgacatgacggacgctggtatagatttctgctttgaggccattggcaacctcgacgtgcttgccgcagcactagcaagctgtaacgaatcatacggggtgtgtgtcgtagttggcgtccttcccgctagcgtgcagctgaagatcagcgggcagctgttcttctcaggacggagtcttaaaggatcagtcttcggtggctggaaaagcagacaacacataccaaaattagttgctgattacatggccgaaaagcttaaccttgatcctctgattactcatacgctgaacctagacaagataaatgaggctgtagaactgatgaagaccgggaagtgcatcagatgtattctgctgttgtag

SEQ ID NO: 107771 - DNA, 1068 bp, synthetic construct
  misc_feature 1..1068: note = Description of Artificial Sequence: Synthetic coding sequence
  source 1..1068: mol_type = other DNA
atggaaccagagaagcagactgaaatctctgagtttttcctgcaaggcctgtccgagaaaccggaacaccagacactgctgttcacaatgtttctgtccacatacctggtgacaattatcggcaatgcactgattattctcgccatcattaccgattcacaccttcacactcccatgtacttctttcttttcaatctgtctttggtggacaccctcttgtctagcaccaccgtaccaaaaatgctcgctaacattcaggctcagagcagggccattcctttcgtggggtgccttacccagatgtacgcgtttcacctgtttggcacaatggacagttttctcctggccgtcatggcaatagatcgctttgtggctatagtgcatccccagagatacctcgtactgatgtgctccccagtctgcggactcctactaggagccagttggatgataactaacctgcaatccctgattcacacctgcctgatggcacagcttactttttgcgccggaagtgaaatcagccatttcttctgcgacttgatgcccctgttgaaactgagcggtagcgacacgcacactaatgagctggtcatcttcgccttcggcatcgtcgtaggtacttcacccttctcttgcattctgctctcgtacataagaatattctggactgtgtttaagattccatctacccgcggcaagtggaaggccttcagcacatgcgggctccacctcactgtggtgagccttagctatggcacgattttcgcagtgtatttgcagcctacaagcccatcaagcagtcagaaagacaaggcggcagcattaatgtgtggcgtcttcatccccatgctaaatccattcatctacagtataagaaataaagacatgaaggccgctctgggaaagcttatcggcaaagtcgccgtcccatgtccccgccccgaacagctgctggatgtgtaccacgttccaggctcattactggcagctcgcgatacagagatgcatcccatcccctaccccggcggggtccagagcctggccggaaaccgagacatggaatag

SEQ ID NO: 107772 - DNA, 1125 bp, synthetic construct
  misc_feature 1..1125: note = Description of Artificial Sequence: Synthetic coding sequence
  source 1..1125: mol_type = other DNA
atggggacggctggaaaagtcattaaatgcaaggctgccgtgctgtgggagcagaaacagccgttcagcatagaggagatcgaagtcgcaccgccaaaaactaaagaagttaggataaagatcttggcgacgggcatatgtcgcactgacgatcacgtgattaaggggactatggtaagcaagttcccagtgattgtcgggcatgaagctacaggaattgtggagtccattggggagggggtaaccactgtgaagccaggtgacaaggtcatcccgctcttccttccgcaatgtcgggagtgcaacgcatgccgtaaccccgacggaaatctatgtattcgcagcgacatcacagggaggggcgtgctggccgacgggacaacccggttcacttgcaagggcaagcctgtgcaccattttatgaacactagtaccttcacggaatataccgtagtcgacgagagcagcgtggcaaaaatcgacgacgccgctccacctgaaaaggtttgtctgatcgggtgcggcttcagcacaggttatggggcggccgtgaagaccggaaaggtaaagcccggctccacctgtgtggtctttggactgggcggcgtgggattgtccgtgattatgggctgcaagtccgccggcgcatctaggattattggaattgacttgaacaaagataagttcgagaaggccatggcagttggagctacggaatgcatcagccctaaggattccacaaagccgatctcagaagtactgtccgagatgactggtaataacgtgggatacaccttcgaggtgatcgggcatcttgaaaccatgattgacgcccttgcttcatgccatatgaattacggcacgtccgttgtcgttggggtaccgccaagtgccaagatgcttacctatgacccaatgctgctgttcacagggcgaacatggaaagggtgtgtgtttggcggccttaaaagcagggacgatgtgcctaagcttgtgaccgagttcttagcaaaaaaatttgatctggatcaactgattactcacgtgctcccatttaaaaaaatcagtgaaggctttgagctgctgaactctgggcagagcatccggaccgtcttgacattctag

SEQ ID NO: 107773 - DNA, 1185 bp, synthetic construct
  misc_feature 1..1185: note = Description of Artificial Sequence: Synthetic coding sequence
  source 1..1185: mol_type = other DNA
atgaagtgtctcgtctcacgccacaccgtaagggagaccctagacatggtgttccaaaggatgtctgtggaggctggggtaatcaaatgtaaggcagccgtactgtgggagcagaaacaaccgtttagtattgaggagatcgaggtcgccccccctaaaaccaaggaggtgaggattaagattctggccaccggcatctgtagaactgatgaccatgtgattaaaggtacaatggtgtccaagtttcccgtgatcgtcggccacgaagccaccggcatcgtggaatccatcggggagggggtgaccaccgtgaagcctggtgataaggtaatccctctcttccttccccagtgccgagagtgcaacgcctgtagaaatccagatggcaacctttgcattcggtctgatatcacagggcggggtgtcctggcggatggtactacccgctttacctgcaaagggaagcctgtgcatcattttatgaatacaagcacctttacggaatatacagtcgtggacgagagttctgtggctaaaatcgatgatgccgctccacctgaaaaagtttgccttattggctgcggtttctcaactgggtacggggcagcagttaaaactggcaaggtgaagcctgggtctacctgtgtcgtattcgggcttgggggtgtggggctgtccgtaatcatgggatgcaaaagtgcaggggcgtcccgaattatcggtattgatctgaacaaggacaagttcgagaaagcaatggctgtgggcgccacagagtgtatctctcctaaagactctaccaagccaatttccgaggtactcagcgagatgaccgggaataacgtggggtatacatttgaagtgatcgggcacctggagaccatgatcgatgcactggccagctgccacatgaactacggaactagcgttgtagtgggcgttcctccgtccgctaagatgttgacttatgatccaatgctactcttcacagggagaacatggaagggctgcgtgttcggtggccttaagtctcgggacgatgttccaaaactggtgaccgaatttctcgccaaaaagttcgatctggatcagctgattacacacgttttacctttcaagaagatatctgaaggattcgagttactgaactccgggcagtcaatccgaaccgtgctgactttttag

SEQ ID NO: 107774 - DNA, 954 bp, synthetic construct
  misc_feature 1..954: note = Description of Artificial Sequence: Synthetic coding sequence
  source 1..954: mol_type = other DNA
atggtcagcaagttccctgtaattgtagggcacgaagccacaggaattgtggagtccatcggggagggcgtcaccaccgtgaaaccgggggacaaagtaatccctctgttcctgccacagtgtcgagagtgtaacgcatgtagaaacccagatggaaatctgtgtattaggagtgacatcaccggaagaggcgtgctggctgacggtacaacaaggtttacttgtaaggggaagccggtacaccacttcatgaatactagtacctttaccgaatacaccgtcgtggacgaatcgagcgtcgccaaaatcgacgacgccgctccacctgaaaaagtatgcctcatcggttgcggcttctctaccgggtacggagccgctgtgaagactggcaaagttaaacccggcagcacatgtgttgtgttcggcctgggtggcgtcggtctttccgtaatcatgggctgtaaatccgctggcgcttctcgcattattggcattgatcttaacaaggacaaatttgagaaggctatggctgtcggagcaacggagtgtatctcccccaaggattctaccaagcctatctcagaagtactgtcagaaatgaccgggaataatgtgggttatactttcgaagtgataggtcatctcgagactatgattgatgctctggcctcatgccatatgaactatgggacgtcggtcgttgtgggtgtcccgcctagcgctaagatgctgacatatgacccgatgctgctgttcaccggtcgcacttggaaaggctgcgtgttcggtggtctgaagtccagggacgatgtgccaaaactcgtaaccgagttcctcgccaagaaattcgatctggaccagctcattactcatgttttgccctttaagaagatcagtgaaggcttcgaactgctcaactcaggccagagcatccggaccgttctgacattttag

SEQ ID NO: 107775 - DNA, 912 bp, synthetic construct
  misc_feature 1..912: note = Description of Artificial Sequence: Synthetic coding sequence
  source 1..912: mol_type = other DNA
atggctgctgctgcacgtgcaagagtggcctacttgttacgacagttacagcgagccgcatgccaatgcccaacgcacagccacacatactcccaagccccaggcctctccccctctggaaagaccacagactacgctttcgagatggccgtgagcaatatacgctatggggcagccgtcacaaaagaagtgggaatggaccttaaaaatatgggcgctaagaatgtgtgtcttatgacggacaagaatctgagcaagttacctccggtgcaagttgccatggactcactggtgaagaatggcattcccttcacagtgtacgataatgttagggtcgagccgacagatagcagtttcatggaggcaatagaattcgctcaaaaaggcgcgttcgatgcctatgtagcggtcggtggtggatccacgatggacacttgtaaggccgccaacttgtacgctagcagtccacacagcgactttctggattatgtcagtgcccctatcgggaagggaaagcccgtgtccgttcctctgaagccactaatcgcggtgcctactacctcgggaacgggttctgagactactggcgtagcgatattcgattacgaacatttgaaggtgaagataggtattacctcaagagccattaagccaactttgggactgattgacccgttacacacccttcatatgcccgcccgagttgtcgctaactcaggttttgatgtcctgtgtcatgcactcgagagctataccacactgccttatcatctgcgcagtccttgtccatccaaccccataacgagaccagcctatcaaggttcaaatcccatttcagacatttgggcaattcatgcactcaggatcgttgcgaaatatctcaagcgcgctgtaaactccacggacaagtag

SEQ ID NO: 107776 - DNA, 1404 bp, synthetic construct
  misc_feature 1..1404: note = Description of Artificial Sequence: Synthetic coding sequence
  source 1..1404: mol_type = other DNA
atggccgccgccgcgcgagcacgggtggcctacctgctgagacagctgcaacgagccgcgtgtcagtgtccgactcactcccacacttatagccaagcccccggcttaagtcctagtggaaagaccaccgactatgcatttgaaatggccgtgagtaacattcgctatggtgccgccgtgaccaaggaggtcggtatggacctgaagaatatgggcgccaaaaacgtgtgcctaatgacagacaagaacctctcgaaactgccaccggtgcaagtggctatggacagcctcgttaaaaacggcattccatttaccgtttacgataacgttcgcgtcgaacccacagattcgagctttatggaggcaattgagtttgctcagaaaggagccttcgacgcctatgtggcagtgggggggggttctacaatggatacctgtaaagccgctaacttatatgcatctagtccacacagcgactttttggactacgtctccgctcccatcggcaaagggaaacctgtttccgtgccgttgaaacctctgattgctgtacctacaacctccggcaccggatcagaaacaaccggcgttgctattttcgactacgaacacttgaaggttaagattgggataacctcccgcgcgataaaacctacgcttggactcatagatcccctccacacgctccacatgccggcccgcgtagttgcgaacagtggctttgatgtcctgtgccacgctctggaatcatataccactctcccctatcatctgagatccccttgcccaagtaacccaataacccgccccgcgtatcagggctctaacccaatttcggacatatgggctatccacgctttgcgcattgtcgcaaaatacctcaagagagctgtgcggaatcccgatgacctcgaggccaggtcgcacatgcacctagcaagtgcattcgccggcattggctttggcaatgctggtgtgcatttatgtcacggcatgtcttatcccatctccggcttggtgaagatgtacaaagcaaaggattataacgtggatcatcccctggtgcctcacggcctgagcgtcgtactcaccagcccagcggtgtttacttttaccgctcagatgtttcctgagagacacttggaaatggcggagattctaggcgcagacactaggactgctcgcatccaggacgccggcctggtgctggccgatacgctcagaaaattcctatttgacctagatgtcgacgatgggctagctgcggtcggctacagcaaggccgacattcctgccttggtgaaaggcacactcccacaggagagagttactaaactcgccccctgcccgcagagtgaagaggacctggccgccttattcgaagcttctatgaaattgtactag

SEQ ID NO: 107777 - DNA, 2406 bp, synthetic construct
  misc_feature 1..2406: note = Description of Artificial Sequence: Synthetic coding sequence
  source 1..2406: mol_type = other DNA
atgaagatagccgtgattggccagtctctgttcgggcaagaggtctactgccatctgagaaaggaggggcacgaagtggtcggcgtgttcaccgtacctgacaaggacggtaaagccgatcctctagggttggaggccgaaaaggatggggtgcccgtattcaaatatagccgctggcgggccaaaggtcaagctcttcctgatgtggtcgcaaaataccaggccctgggggccgagctgaacgtattgccattctgcagccagttcatccccatggagatcatctccgccccccgccacggcagcattatataccacccatcattactgccacgccatcggggagcaagtgcgattcataattggattaggggaaatgacaaggtccctggggcgtggaccgaggcttgcgagcagaagcttaccttctttaactctaccctgaacactagtgggctagtgcccgagggagacgccctccccatccctggtgctcacaggcccggagtagttaccaaggcggggctgattctctttggcaacgacgataaaatgctccttgtgaagaacatacaactggaagatggtaagatgattctcgcaagcaatttcttcaaaggagccgcctcaagcgtccttgaactgacagaggcagaactggtgaccgccgaggctgtcaggtcggtttggcaacggattctgcctaaagttttagaggtggaggactccaccgacttcttcaagtccggcgctgcttctgtagatgtggtccgcttagtggaggaggtgaaggagctgtgcgacggactagagctggagaacgaggacgtctatatggcatccacgttcggggatttcatacaactattagttagaaagttgcggggcgacgacgaagaaggagagtgctctattgattatgtggaaatggctgtgaacaagcgcacagtgaggatgccacaccaactcttcattggcggcgagttcgtcgacgcagaaggggctaaaacatcagaaactatcaaccccacggacggcagcgtgatatgtcaggtgtctctggctcaggtcacggacgtggacaaggcagtggccgccgccaaagatgccttcgagaatgggcgctggggcaagatcagtgccagggacagaggccggctgatgtatcgcctcgctgatcttatggaacagcatcaggaagagttggccacaattgaggcgttagacgcaggggccgtgtataccctggctctgaaaacccacgttggaatgagcatccagacattccgctactttgcagggtggtgcgataaaatacaggggagtactattccgataaatcaagcaagacccaatcgtaacctcaccctcacccgcaaggagcccgtcggggtgtgtgggataatcatcccctggaattatccactgatgatgctgtcctggaagaccgcagcctgtctggctgctggtaataccgtggtcatcaaacccgcacaggtgacacctttgacagccctgaaatttgccgagctgaccctgaaagctggtatccccaagggtgtggttaacgttttaccaggctccggctctcttgtgggccagcgcctgtcagaccaccccgacgttagaaaaattggctttacaggctccacagaggttgggaagcatatcatgaagagctgtgcaatatctaacgtcaagaaagtatctctggagctcggcggtaagagccccctgataattttcgcagattgtgatctgaacaaagccgtgcagatggggatgtcatctgtgttcttcaacaaaggggaaaactgtattgcggccggccgcctgttcgtggaagacagcatccacgacgaatttgtgcgtagggtcgtggaggaagtaaggaagatgaaggttgggaaccctcttgacagggacaccgaccacggaccacaaaatcaccacgctcaccttgtcaaactcatggagtattgccagcacggtgttaaagagggcgcaactctcgtttgcggtggaaaccaggtgcctcgaccaggcttcttcttcgaaccgacggtgttcactgacgtggaggaccatatgttcattgcaaaagaagagagtttcggaccggtcatgataatctcccggttcgcggatggagacctggacgcggtcctctcacgtgccaatgccacagaattcggactggcctcaggagtgttcactcgagatatcaacaaagccctgtacgtgtcagataaactccaagccggaactgttttcgtgaacacgtacaacaagactgacgtagcagccccttttggcggctttaaacaaagcggtttcgggaaggacttgggtgaggcagcgctcaacgaatatctgagggtaaaaaccgttacgtttgagtattag

SEQ ID NO: 107778 - DNA, 1506 bp, synthetic construct
  misc_feature 1..1506: note = Description of Artificial Sequence: Synthetic coding sequence
  source 1..1506: mol_type = other DNA
atgtcaagctccgggacacctgacctgcctgttttgctcaccgacctgaaaatccagtataccaagatttttataaacaatgaatggcatgactcggtctcagggaaaaaatttcctgtgtttaaccctgccacggaagaggaactttgtcaggtggaagagggtgacaaagaggatgtagataaagccgtgaaagctgctcggcaagcttttcagatagggtcaccttggcgtacgatggacgcctcagagcgcggcaggctcctttacaaactggccgatctgatcgaacgggaccgcctgctgctggctacaatggagtcaatgaacggcggcaaactctatagcaacgcttacctgaatgatctggctggatgcattaagacccttcggtattgtgccggctgggctgacaagattcaaggaagaacgattcctatcgacggaaacttcttcacctacacccgacacgaacccattggagtgtgcggccagatcatcccttggaatttccctcttgtgatgcttatttggaagatcggacctgccctttcgtgcggaaacactgtggtggtgaaaccagcagagcaaaccccgttaaccgcactgcacgttgcttctttgattaaagaggccggctttccaccaggtgtggtgaacatagttcccgggtatggccccacagctggagcagctattagctctcatatggacatcgataaagtggccttcaccggctccactgaagtcggtaaattaatcaaagaagccgctggaaagtctaaccttaaacgcgtgaccctcgagttaggaggtaaatctccttgcatcgtcttagctgacgccgacctggataatgccgtggaattcgcacaccatggcgttttctatcatcagggccagtgttgtatcgccgcgtcccggattttcgtcgaggagagtatctatgacgaattcgtgcggcggtctgtcgagagggcgaagaaatacatcctggggaatccactcacacccggagtgacccaagggccccaaattgataaagaacaatatgacaagattctggacctgatcgagtctggtaagaaggagggggccaagcttgagtgtggaggcggtccttgggggaacaagggatattttgtgcagcctaccgtgttctctaacgtgacagatgagatgagaatcgccaaggaggaaatatttggacccgtgcaacaaattatgaaattcaaatccctggatgatgtcattaaaagagccaataataccttttacggtctgtcagcaggtgtgttcacaaaagacatagataaagccattaccatcagctccgccctgcaggcaggaacggtttgggttaactgttacggggtcgtgagcgcacagtgccctttcggcggattcaaaatgagcgggaatggccgggaactgggtgagtacggtttccacgaatacacagaggtgaaaacagttaccgtgaaaatatctcagaagaattcctag

SEQ ID NO: 107779 - DNA, 693 bp, synthetic construct
  misc_feature 1..693: note = Description of Artificial Sequence: Synthetic coding sequence
  source 1..693: mol_type = other DNA
atgagtagcagcggcacacccgatctcccagtgttgttgactgatttaaagattcagtatacaaagatcttcataaacaatgagtggcacgacagtgtgagtggcaagaagtttcccgtatttaacccggctactgaagaggagctgtgccaggtggaggagggtgataaggaggatgtcgataaggcagtaaaggctgctcgccaagccttccagatcggctctccttggaggaccatggacgcgtctgaaagaggaaggttgctttacaaattagccgatctaattgagcgcgacaggctgctgttggccactatggagtcaatgaatggtgggaaactgtactccaatgcctatctgaacgacctggctggctgtataaaaacactccgctactgcgcaggttgggccgataagatccaggggcgaacgatccccatagacggtaactttttcacctacactcgtcacgagcccatcggagtgtgcggccaaatcattccttggaactttccgctggtcatgctgatttggaagattggcccagcgctgagctgcggcaacacagttgtggtgaagcctgctgaacagacccccctgaccgccctgcatgtggcatcactgatcaaggaggccgggttcccgccaggtgttgtgaatatcgtacctggatatggagcctcagtggtttag

SEQ ID NO: 107780 - DNA, 717 bp, synthetic construct
  misc_feature 1..717: note = Description of Artificial Sequence: Synthetic coding sequence
  source 1..717: mol_type = other DNA
atgtcctcaagcggcacaccagaccttcctgtcctgctgactgacctgaagatccagtatacaaaaattttcattaataacgagtggcacgacagtgtatccgggaagaagtttccagtgttcaatcctgccacggaggaggaactgtgtcaggtggaagagggggacaaggaggacgtggacaaggccgtgaaggcagcaagacaggcattccagattgggagtccatggcggacaatggatgcatcagaaagggggagactcctgtataaactcgccgatctcattgaacgggaccgattgctgttggccactatggagagtatgaatgggggcaagctctatagtaacgcctatcttaatgacctggcagggtgcattaaaaccttaagatactgtgcaggatgggcagataagatccagggaaggacgatccctatcgatggcaatttctttacatacacaagacacgagcccatcggcgtgtgcggccagattattccgtggaatttccccctcgtgatgctcatctggaagatcggccctgctctcagctgtgggaacacagtggtcgtgaagcccgcagagcagactcctctgactgccttgcatgtggcgagcttaattaaggaggccggctttcctcccggagtggtcaatatagttcccggttacggaccaacagccggagcagcaatcagctctcatatggactag

SEQ ID NO: 107781 - DNA, 990 bp, synthetic construct
  misc_feature 1..990: note = Description of Artificial Sequence: Synthetic coding sequence
  source 1..990: mol_type = other DNA
atcgctgaaccagtgacatgtgtaccgggggcagaaagcgagatgagctcctctggcactccagacctgcctgtgctactcactgacctcaagatacagtacacgaagatctttattaacaatgaatggcatgacagcgtgtccggaaaaaagttcccagtgttcaacccagctactgaagaagagctctgccaggtggaagagggcgacaaagaggacgttgataaggcggtgaaggcagcacgacaggcctttcagatcgggtcaccatggcgaacaatggatgcttctgagcgtgggagactactatataagctggccgaccttatcgagcgggataggctgcttctggccacaatggagtccatgaacggcggcaaactctattccaacgcatatctgaacgacttggccggatgtatcaaaaccctgcgatactgtgctggatgggccgataagatccaggggcgcaccattcctattgacggcaatttctttacctatacccgccatgagcccatcggggtttgcggccagataattccttggaactttcctctcgttatgttgatttggaagatcggacccgctctgtcctgtggtaatacagtggtggtgaaaccggcagagcaaaccccacttaccgccctgcatgtggcctctctgatcaaagaggctggcttccccccaggcgtcgtcaacattgtgccaggttatgggcctaccgcaggcgcagctatatcgagccacatggacatcgataaagttgcctttaccgggagcaccgaggtcgggaagcttatcaaggaagccgctgggaaatcaaatctcaagcgggttaccctagagctagggggtaaatctccctgcatcgtcctagctgacgccgatctggacaatgcagtcgagtttgcacaccacggagtattctatcatcagggccagtgttgtatcgctgcgagcaggttttgtggcaggattaatctgtag

SEQ ID NO: 107782 - DNA, 612 bp, synthetic construct
  misc_feature 1..612: note = Description of Artificial Sequence: Synthetic coding sequence
  source 1..612: mol_type = other DNA
atgagtagcagtggaaccccagatctccctgtgctccttaccgatctcaagatccaatatacaaagattttcataaataacgagtggcatgattccgtgtcaggaaagaagttccctgtgttcaaccccgcaaccgaagaagaactctgccaggtggaggagggcgacaaagaagacgtcgataaggccgttaaagccgcgaggcaggcgtttcagattgggtccccctggcgtacaatggatgcgagcgaacgcggccgtctgttgtacaagctcgcagacttgatagagcgggaccggttgttgttagccacaatggagagcatgaacggcggtaagctgtattctaatgcttacttgaacgatctggccggttgtatcaagacactcagatattgtgccgggtgggccgacaaaatccaggggcggaccattccaattgatggcaatttctttacgtatactaggcacgagcccattggcgtctgcggccagatcattccctggaactttcctcttgtcatgctgatatggaaaatcggccctgctctgtcttgtggcaacacagtggtagtcaaaccagccgagcagactccgctcacagcgctctag

SEQ ID NO: 107783 - DNA, 1557 bp, synthetic construct
  misc_feature 1..1557: note = Description of Artificial Sequence: Synthetic coding sequence
  source 1..1557: mol_type = other DNA
atgaccagctcaaaaatcgagatgcctggagaggtcaaggctgaccctgcggccctaatggcaagcctacacctcctgccctctccaacacccaacctggaaatcaagtacacgaagatttttataaataatgaatggcaaaactctgagagcggtcgcgttttcccagtgtacaatcctgctaccggcgagcaagtttgtgaagttcaagaggccgacaaagctgacatcgacaaagctgttcaggccgccagattggccttttccctgggttccgtgtggaggcggatggacgcctcggaaaggggccgccttcttgataagctggctgatttagtggaaagggacagggctgtcctggcaaccatggagtctctcaatgggggaaagccttttctgcaagccttctacgtcgacctccagggcgtgatcaagacatttagatactacgctggctgggccgacaagattcatggcatgaccattcccgtggatggagactattttacctttacacgtcacgaaccaatcggggtttgtggtcagattatcccatggaacttccccctccttatgttcgcttggaaaatcgcccccgctttatgctgcggcaatacagtggtaattaaacccgctgagcaaacacccctttccgctctttatatgggggctttgatcaaagaggctggattcccaccgggagttatcaacatcctgcccgggtatggccccacagcaggagctgccatcgcatcccacattggaatcgataaaatagcttttacaggctcaactgaagtcggaaagctgatccaggaagcagctgggcgcagcaatttgaagagggtcaccctcgaactggggggtaagtcacccaacatcatatttgctgatgccgatcttgactacgctgtcgagcaagcccaccagggagtattttttaatcagggccaatgctgcactgccggcagccggatctttgtggaggagtccatttatgaagagttcgtgaggcggagcgtggagcgtgctaaaaggagagttgttggatcgcccttcgaccccaccaccgaacaagggcctcagatcgataagaaacaatataacaagattctggaactaatccagagcggcgtcgcggagggcgccaaattagagtgtgggggcaaggggctcgggcggaaaggattctttatagaacccaccgtgttctctaacgtgacagacgacatgagaatcgcaaaggaagagatctttgggccagtacaggagatccttaggtttaaaactatggacgaagtcatagaacgggcaaataactcagatttcggcttggtggctgccgtgtttaccaacgacatcaacaaagcattgaccgtgtcttcggctatgcaggctgggaccgtttggataaattgttacaacgctttgaatgctcagtcccccttcggaggattcaaaatgtccggcaatggccgcgaaatgggagaatttgggttgcgcgagtacagcgaggttaaaactgtgaccgtgaagatcccgcaaaagaactcttag

SEQ ID NO: 107784 - DNA, 1443 bp, synthetic construct
  misc_feature 1..1443: note = Description of Artificial Sequence: Synthetic coding sequence
  source 1..1443: mol_type = other DNA
atgacctctagtaagatcgagatgcccggcgaggtgaaagctgatcctgctgcattgatggcctccctgcacctcttgcctagtccgacccccaacctggaaataaagtataccaagatcttcatcaacaatgaatggcaaaattctgagtccggtagagtgttccctgtctacaatccagccacaggagagcaagtttgtgaagtccaagaggccgataaagcagacattgataaggctgtgcaggccgccagactggccttttctctgggttccgtgtggcgccggatggacgctagcgaacggggacgtctactcgacaaattagctgatcttgtggagcgggatagggccgtgctggcaaccatggagtccctgaatggtgggaagccattcttgcaggcgttctacgtcgacctccagggcgtgatcaagacattccgatactatgccggatgggccgataaaatccacggcatgacaattccggtggatggtgactatttcacatttactcgtcatgaacctatcggcgtgtgcggtcagatcattccgtggaattttcctttgctgatgtttgcttggaaaatcgcaccagcactgtgttgcggaaatactgtggtgataaaaccggccgaacagacccctctctcggccctgtatatgggcgccctgattaaagaagtgggcaaactaatccaggaagccgccgggcgatctaatctgaagcgcgtgacactggaactcggaggaaagagtccaaatattatatttgctgatgctgacctagattatgcagtggagcaggcccaccaaggggtcttcttcaaccagggtcagtgttgcacggccggcagccgcatcttcgtcgaggagtcaatctatgaagaatttgtcagacggtcagtcgagagagcaaagaggcgtgtggtcgggtctcccttcgatccgacgaccgaacagggcccccagattgacaaaaagcagtataacaagattctcgagctgatccaaagcggcgtcgcagaaggtgccaaactggaatgcgggggcaaggggctggggcgcaaaggcttctttatcgaacccacggtgtttagcaacgttaccgatgacatgagaatcgcaaaagaagagatattcggccctgtgcaggaaatacttaggttcaagacgatggacgaagtgatcgagcgggccaataacagcgattttggactggtggccgccgtgtttactaacgacatcaacaaggccctcactgtatcatccgcaatgcaagcgggcacggtatggattaattgctacaatgctttgaacgctcagtccccgttcggcggctttaaaatgtccggaaacggccgggaaatgggcgagttcgggctacgcgaatactccgaggtgaagacagtgacagtcaagatcccccagaagaactcttag

SEQ ID NO: 107785 - DNA, 1494 bp, synthetic construct
  misc_feature 1..1494: note = Description of Artificial Sequence: Synthetic coding sequence
  source 1..1494: mol_type = other DNA
atgaagaaccaatgcgagaccgtctggctgaagtcgcccatcaagttgaagctgatattcataaacaatgaatggcagaacagcgagagcggcagggtcttccccgtttacaatccggccactggggagcaggtgtgtgaagttcaagaggctgacaaggccgatattgacaaggctgttcaagctgcccggttagctttttcgctgggaagcgtctggcggcggatggatgccagcgagaggggtagactgctggacaagctggcggatcttgtggaacgggacagggctgtgcttgccacaatggaatccttgaacggtggaaagcccttccttcaggcgttttatgtcgacctacagggagtaattaaaactttcagatattatgccggctgggccgacaagattcatgggatgacaattccggtagatggtgactacttcacgtttacacgacacgagcccattggagtgtgcggtcagattatcccatggaactttcccctgcttatgtttgcttggaagatcgcaccagcactctgctgcgggaatacagttgtaatcaaaccagcagagcagacacccctctcagccctgtacatgggagctctcatcaaggaagctggattccccccaggtgtaatcaacatactccctggctacgggcctactgctggcgcggcaattgccagccatatcggcattgataaaatagcattcacaggctcaaccgaagtggggaagctcattcaggaggccgcagggaggagcaacttgaaacgcgttaccctcgagttgggcggaaagtccccaaacattatattcgccgacgccgatctggactacgccgttgagcaggctcaccagggcgtttttttcaatcaaggacagtgctgtactgctggttcccgcatttttgtggaggaatccatctacgaggaattcgttaggcgctccgttgagcgcgccaaaaggagggtggtgggcagccctttcgatcccactacagagcaggggccacaaattgataagaaacagtacaacaagattttggagcttatccagtcaggcgttgcggaaggagcgaagctcgagtgtggtggaaagggactaggtcgcaaaggtttctttatcgaaccaaccgtgttctctaacgtcaccgatgatatgcgaatcgccaaggaggagatctttgggcctgtccaagagattcttagattcaagaccatggatgaggtgatagaaagggctaataactctgacttcgggttggttgcagctgtgttcactaacgatattaacaaggcccttacagtctcatccgccatgcaggctgggacagtgtggatcaattgctacaatgcgttaaatgcacagagcccttttggcggcttcaagatgtcgggcaatggccgggagatgggcgagtttggccttcgcgagtattccgaggttaaaaccgtgacagtcaaaattcctcaaaaaaattcctag

SEQ ID NO: 107786 - DNA, 1470 bp, synthetic construct
  misc_feature 1..1470: note = Description of Artificial Sequence: Synthetic coding sequence
  source 1..1470: mol_type = other DNA
atgaagggcaagaattgcaatgatgtaaagatattcatcaataatgagtggcaaaattccgagagcgggagggtatttcccgtttataatccagcgaccggtgagcaggtatgcgaggtgcaggaagcagacaaggcggacatagacaaagccgttcaggcagccaggctggcgtttagcctcggctctgtatggagacggatggatgcatctgaaaggggaaggcttttggataagcttgctgacctggtcgaaagggatagggctgtgctggccaccatggaaagtcttaacggcggtaaaccttttctgcaagccttttatgtcgatctacagggtgtaataaaaacttttcgctactacgccggatgggcagacaaaatccacgggatgactatcccagtggatggcgattacttcacatttacaagacacgagcccattggagtctgtgggcagatcatcccatggaacttcccactgctcatgttcgcatggaaaattgcgcccgcgctgtgttgcggcaacaccgtggtgatcaagccagccgaacaaacacccctgagtgcgttgtacatgggagcccttattaaggaagccgggttcccccctggtgttatcaacattctaccaggatatggccccacagcaggggctgcaatcgccagccacattggtattgataagattgcatttacaggtagcacagaagtgggaaaactaatccaggaggcagcagggcgctcaaacctgaagcgggttacattagaactgggcggaaagagcccaaacatcattttcgctgacgcagatcttgactacgccgtagaacaggcgcatcagggagttttcttcaaccagggccagtgctgtactgccgggagcaggatttttgtcgaagaaagtatctatgaggagtttgtgagacgcagcgtggaaagagctaagcggagggttgttgggagtccctttgacccgaccacagaacagggccctcaaatagataagaagcagtacaataagatactggagctaattcagtctggagttgctgagggtgctaagctggaatgcggagggaagggccttgggagaaaaggtttctttatcgaacctaccgtgttctctaatgttactgatgacatgagaatcgccaaggaagaaatctttggtcctgtgcaggaaatcctccgctttaagaccatggacgaagtcatcgagcgggctaataacagtgacttcgggcttgtggctgctgtctttactaatgacattaacaaggccctgacggttagttcagccatgcaggccggtactgtgtggattaattgttacaacgccctcaacgcccagtcgccattcggcggattcaaaatgtccggcaacggaagagaaatgggcgaattcggcctgcgcgaatacagcgaggttaaaaccgtgactgtcaagatacctcagaaaaatagctag

SEQ ID NO: 107787 - DNA, 30 bp, synthetic construct
  misc_feature 1..30: note = Description of Artificial Sequence: Synthetic coding sequence
  source 1..30: mol_type = other DNA
atggatgcctccgaacgtgggcgactgtag

SEQ ID NO: 107788 - DNA, 1470 bp, synthetic construct
  misc_feature 1..1470: note = Description of Artificial Sequence: Synthetic coding sequence
  source 1..1470: mol_type = other DNA
atgaagggcaggaattggaaaactacaaagattttcattaacaatgaatggcagaattccgagtcagggcgcgtgtttcccgtgtacaatccagccacaggggagcaggtctgcgaggtgcaggaggcagacaaggccgacatcgataaggctgtacaggctgccaggctcgcctttagcctgggcagcgtgtggcggcggatggatgccagtgagcgaggtcgactgttggataagttggcagatcttgtcgagcgagaccgcgcagtacttgccactatggaaagcctcaacggggggaagccattcctccaggctttttacgtggatctgcagggcgtaataaagactttccgctactacgccggctgggcggacaagatacacggaatgaccatccctgtagacggcgattattttacgtttacacggcacgagcctatcggcgtgtgcggacagataattccttggaatttccccttactgatgttcgcctggaagatcgcacctgccctgtgttgcggcaacacggtggtaatcaaacctgctgagcaaacccccctgtcagcgctgtatatgggcgccctgatcaaagaagctgggttccccccaggggtgatcaacatactgcctggatacggtccaactgcaggagccgctattgcatcccatattggcattgacaagattgctttcaccgggagtaccgaggtagggaagctcattcaggaagctgctggccggagcaatctgaagagggtgacacttgaactggggggaaagtcccccaatataatttttgcagatgcggacctagattatgcagtggaacaggcccaccagggagtgttttttaaccagggccaatgttgtactgctggttctaggatctttgtcgaagagagcatctacgaggaatttgtgcgaagatcagtcgaacgcgctaagagaagagtggtaggaagcccattcgaccccactacagagcagggaccccagatcgacaaaaaacagtacaacaagattcttgaactaatccaaagtggagttgctgagggcgcaaagctggagtgcgggggcaaaggtctgggccgcaagggattctttattgagccaaccgtattctcaaacgttacggatgatatgagaatcgcgaaagaggaaatatttggccccgtgcaagagatcctgcgcttcaagaccatggatgaagtcattgaacgtgccaataattcagactttggactcgttgcagctgtgttcaccaatgacattaataaggctctgactgtaagtagtgcgatgcaggcaggcaccgtctggatcaattgttataatgccctaaacgcacaaagcccctttggcgggttcaaaatgtctgggaacgggcgagagatgggggagtttgggctgagagagtatagtgaggtgaaaacggtaacagtcaagatcccccagaagaattcgtag

SEQ ID NO: 107789 - DNA, 78 bp, synthetic construct
  misc_feature 1..78: note = Description of Artificial Sequence: Synthetic coding sequence
  source 1..78: mol_type = other DNA
atggacgcctctgagaggggccgtttgctggataagctcgccgaccttgtagagagggatagagctgtcctcgcctag

SEQ ID NO: 107790 - DNA, 1269 bp, synthetic construct
  misc_feature 1..1269: note = Description of Artificial Sequence: Synthetic coding sequence
  source 1..1269: mol_type = other DNA
atggatgccagtgagaggggcagactgttagacaagctcgccgatctggttgaacgggacagggccgttctggcaaccatggagtccttaaatggcgggaagccttttttgcaggcgttctatgtagacttgcagggtgtaatcaaaacatttaggtattatgcagggtgggccgataagattcacggtatgacaatacccgtagacggcgattactttacatttactagacacgagcccattggagtgtgcggccagatcatcccatggaacttcccactcctgatgttcgcttggaaaatagcgccagcattatgctgcggcaatactgttgtcatcaagccggcagaacagacgcctctttctgcactgtacatgggtgctctgatcaaggaggctggatttcctcccggggtcattaatattctgcccggatatggtcccaccgccggggcagcaatcgcatctcatatcggaattgacaagattgcttttacagggtccaccgaggtcgggaaactgatacaagaagccgcaggaaggagcaacttaaaaagggtgactttagaactgggcggaaaaagtcctaacattatatttgcagacgcagacttagattacgctgtggagcaagcccatcaaggcgtgttcttcaaccagggccagtgttgcactgccggcagtagaatctttgtcgaagagagcatttacgaggagttcgtgcggagatcagttgaacgtgccaagcggagggtggtgggaagcccatttgaccctaccaccgagcagggaccccagattgacaaaaagcagtataacaaaatacttgaactaatccagtccggggttgccgagggggcaaagctcgaatgcggtggaaagggactgggtcggaagggattcttcatcgaaccgaccgtcttttctaatgtgaccgacgatatgcggattgctaaagaagaaatctttgggcctgttcaggagatccttcgctttaaaaccatggatgaagtgatcgagagagcaaataatagcgatttcggcttggtggccgccgtgtttaccaatgacatcaataaagctttgacagtgtcctctgctatgcaggcaggcaccgtttggatcaactgttataacgccctgaacgcccagtctcccttcggtgggtttaagatgtcaggcaacggcagggaaatgggcgagttcggcctgcgcgagtatagcgaggtgaagacagtgactgtcaagatccctcaaaaaaatagctag

SEQ ID NO: 107791 - DNA, 258 bp, synthetic construct
  misc_feature 1..258: note = Description of Artificial Sequence: Synthetic coding sequence
  source 1..258: mol_type = other DNA
atggatgccagcgaacgcggacgcttgcttgacaagctagccgacctggtcgaacgcgaccgggcggtgctggccacaatggagtccctgaacggcggaaaaccttttctccaagctttctatgtggacctccagggtgttatcaagacatttcggtattacgccggatgggctgacaagatacatggaatgacgatccctgtggacggagactattttactttcactcggcacgagcccataggggtctgtggatag

SEQ ID NO: 107792 - DNA, 1539 bp, synthetic construct
  misc_feature 1..1539: note = Description of Artificial Sequence: Synthetic coding sequence
  source 1..1539: mol_type = other DNA
atggcaaccgcaaacggagcggtcgagaatggtcagcccgaccgcaaaccacccgccctgcctcgcccaataagaaacctagaagtgaagtttactaagatctttataaataacgaatggcatgaatctaagtctggcaagaagtttgcgacatgcaacccctccaccagggagcaaatctgtgaggtcgaggaaggcgataaacccgatgtcgataaggctgttgaagcggctcaagttgcttttcaaagaggaagcccatggcggagactcgatgcgctgtctagggggcggctgctgcatcagctcgccgacctagtggagagggaccgcgcaaccctggcagcgctggaaaccatggataccgggaagccctttttacatgccttttttattgacctggagggctgcattcgaaccctgcgttacttcgccgggtgggctgataagatccagggaaagactatccccaccgacgataatgtcgtctgttttacccgacatgagcctataggcgtgtgcggagctatcactccttggaactttccgttgctgatgctggtctggaagctggcccccgcactctgttgcggaaatactatggtgctaaagcccgctgagcagacgccgctcacagcactctatctggggagcttgattaaagaagctggttttccaccaggcgtagttaacatagtgccaggctttggccccaccgttggagccgctatttctagccatccacagatcaacaaaattgcttttaccggcagtaccgaggtggggaagctcgtgaaggaggccgcttcaaggtcgaatcttaaaagggtgacactagagttgggcgggaagaacccttgtatagtctgcgccgatgctgatttggatctggctgtcgaatgcgcacatcagggcgtgttcttcaatcagggtcagtgctgcaccgcggcatctagagtgttcgtggaagagcaagtgtattccgagtttgtgcgacgatcagtggaatatgccaaaaaaagacctgttggtgatcccttcgatgtgaagacagagcagggtccacaaatcgatcagaagcaattcgataagatacttgaattgatcgagtcagggaaaaaggaaggcgccaagctagagtgcggtggtagcgctatggaagataaaggactcttcatcaagcctaccgtttttagcgaggtaactgataatatgcgcattgccaaggaagaaatctttggtccagtgcagcccattctcaagttcaagtctatcgaggaggtgatcaagagggctaactccacagactatgggctcaccgccgccgtatttaccaagaatctggataaggcgctgaaactggccagtgcgctggaatcgggaaccgtgtggattaactgttacaacgcactgtacgctcaagcacccttcggcgggttcaaaatgtctggcaacggccgggagctcggcgaatacgcactggccgaatatactgaggtcaaaacagtgactatcaaactgggcgacaaaaatccctag

SEQ ID NO: 107793 - DNA, 456 bp, synthetic construct
  misc_feature 1..456: note = Description of Artificial Sequence: Synthetic coding sequence
  source 1..456: mol_type = other DNA
atggctactgctaacggagctgtcgagaacggacagcccgacagaaagcccccggctcttccccgaccaatccggaatctcgaggtcaagtttacaaaaatatttattaacaatgagtggcacgagagtaagtccggaaagaagtttgctacctgcaacccaagtactcgggaacaaatctgtgaagtggaagagggggataaacctgatgtggataaggctgtggaggcagctcaggtcgcttttcagcgcggctcaccttggcggcgattggacgccttaagtcgcggacggctactgcatcaattggctgacctggttgaaagggatcgagccacccttgccgctctagagactatggacacaggcaaaccctttctgcacgcctttttcattgacctcgaaggatgcatcagaactctacggctgataaagtcttcctctacgaagtcgtag

SEQ ID NO: 107794 - DNA, 1554 bp, synthetic construct
  misc_feature 1..1554: note = Description of Artificial Sequence: Synthetic coding sequence
  source 1..1554: mol_type = other DNA
atgctgcggtttttggcacccaggctgctttcactgcaggggaggaccgcgcgttattccagcgccgcagcattgccatcccccattctgaatccagatattccatataaccaattatttattaacaatgaatggcaggacgcggttagtaagaaaacctttcccaccgtaaatcctaccacaggcgaggtgattggtcacgtggccgagggagacagggctgatgtcgatagagctgtaaaggccgccagggaggcttttcgcctgggtagtccatggagacgcatggacgcctctgagcgaggcaggctgctgaatcgcctggccgatctggttgaacgtgatagagtgtacctcgcttccttggagacgcttgataatgggaagccgtttcaggagtcgtacgctctggacctagacgaggtcattaaagtttaccgatatttcgctggatgggcagacaagtggcatggaaagacgattcccatggacggccagcacttttgttttacccgacacgagccggtcggagtctgtggccaaattattccctggaactttccactagtaatgcaagggtggaagctggcgcccgccctggccacaggaaacactgtagtcatgaaagtcgccgaacagacccccttatcggctctgtatctggccagtctgattaaggaagccggctttccacctggagttgtcaatattattactggttatgggcccaccgctggcgccgccatagctcagcatgtggacgtcgataaggtggcatttactggctccaccgaagttgggcacctgatccagaaagcggccggagacagtaatttgaaaagggtaacccttgaactagggggaaaatcaccttctatagtcctcgccgacgccgatatggagcacgccgtggagcagtgtcacgaggctctattttttaacatgggacagtgttgctgcgcagggtctcgcaccttcgtggaagagagcatttataacgagttcttggaacgtacggtggaaaaggccaaacagcgcaaggtcggtaacccatttgaattggacacacagcagggaccacaggttgataaagaacagtttgaacgggtcctgggatatatccagctcgggcaaaaggagggcgcaaagctcctctgcggaggcgagcgcttcggcgaacggggcttctttatcaaaccaacggtgtttgggggcgtgcaggacgacatgcgtatagccaaggaggaaatcttcggtcccgtccagcccctgttcaaattcaagaagatcgaggaggtcgtcgagagggccaacaacacaagatatgggctggctgcggccgtgtttacaagggatctggataaagccatgtatttcacccaagccctccaggcgggcaccgtgtgggtgaacacctataacatcgttacttgtcataccccctttggtgggttcaaagaatccggaaacgggcgggagctgggcgaggacgggctgaaagcctataccgaagtcaagacggtgacaataaaggtgccacagaagaactcatag

SEQ ID NO: 107795 - DNA, 657 bp, synthetic construct
  misc_feature 1..657: note = Description of Artificial Sequence: Synthetic coding sequence
  source 1..657: mol_type = other DNA
atggagcatgcagtcgagcaatgtcatgaggccctgttctttaacatgggtcaatgctgctgtgccggctcacgaacattcgtggaggagagcatttataatgaattcctggaacgaacagtagaaaaggctaaacagcgaaaagtggggaatccctttgaattggatacacagcagggccctcaggtagacaaagaacagtttgagagagtcctcggatatatccagctaggtcagaaagaaggggccaaactcctctgcggcggggagcgattcggcgaaagggggttcttcatcaaacctacggtctttggaggggtgcaggatgacatgcgaatcgccaaggaagagatcttcggaccagtgcagccccttttcaagttcaagaagatcgaggaggttgttgagcgagcgaacaatactagatatggtctggccgccgctgtgtttacacgggacttggataaagccatgtattttacacaggcactgcaggctggaaccgtgtgggtgaacacttataacattgtcacctgccatacacccttcggcggctttaaggagtctgggaatggccgagagctcggggaggacggcctgaaagcttatacagaagtcaaaacagtgactattaaggtgcctcagaaaaattcttag

SEQ ID NO: 107796 - DNA, 2739 bp, synthetic construct
  misc_feature 1..2739: note = Description of Artificial Sequence: Synthetic coding sequence
  source 1..2739: mol_type = other DNA
atggcaggccctagcaacccccccgccactatgaaaatagcagtgattggccaaagcctttttggacaggaggtgtattgccacctacgtaaggaggggcacgaggttgtcggtgtattcacggttccggacaaagatgggaaggcagatcctttgggcctggaggcagagaaggacggcgtgcctgtattcaaatattcccgctggcgcgctaaaggacaggctctaccagacgttgtggctaagtaccaagccttgggtgctgaattgaatgtgcttcccttctgctctcagtttatacccatggaaattatctctgcccctagacatggcagcataatctaccacccctctctcctgccgcggcacaggggcgcttcagctattaattggaccttgatccacggcgataagaagggtggcttctctatcttctgggccgacgatgggttggacactggagacttgctgttgcagaaagagtgcgaggttctccctgacgacacagtcagcacactatacaatcggtttctgtttcctgaaggaattaagggtatggtccaggctgtccgcctcattgcagaagggaaggccccgcggctacctcagccagaagagggggccacatacgaggggattcaaaagaaggaaacagccaagattaattgggatcagccagctgaagctatacacaattggatccgaggcaacgacaaggtccccggcgcatggacagaggcatgcgagcagaaactgacatttttcaactctacactgaacacatcggggttggtgcccgagggggacgcactccctatcccaggagcacaccgccctggcgtggtgactaaggcaggtctaatattattcggtaatgatgataaaatgttactggtgaagaatatccagctggaagatgggaaaatgatccttgcctctaacttcttcaagggtgccgccagtagcgtgctggaattaacagaggcggagctcgtcactgcagaggccgttagaagcgtgtggcagcgtattctgcccaaagtgctggaggttgaagattcgacagatttcttcaagtccggggctgcgtccgtagatgtagtgagattggtggaagaggttaaggaattgtgtgatgggctcgaattggagaatgaggacgtgtacatggcttcaactttcggggacttcattcagctgctagtcagaaagctaaggggcgacgatgaggaaggggagtgcagcatcgactacgtcgagatggcagtaaataaacggacagtccgaatgccacatcagttgtttataggtggggagttcgttgatgcggaaggcgccaaaacctccgagactattaaccctacagatgggtcggttatttgccaagtctctctggcacaggtaacggacgtagacaaggcggtggccgcggctaaggatgcattcgagaatggacgatggggtaagatctctgctagggaccgtggccgcttgatgtacagattggccgatctaatggaacagcatcaggaagaactggctaccattgaagcattagacgctggggccgtgtacacactcgccttgaagactcacgttggaatgtccatccagacattccggtattttgcaggatggtgtgataaaatacagggtagcacaatcccaataaatcaagcccggcccaatcgcaatctcacccttacaagaaaagagcccgtcggggtttgcggcatcattataccttggaactatccacttatgatgctatcctggaagacagcagcctgtctcgccgctgggaacacagtagtcataaaacccgcacaggtcacccctctaaccgcattaaagttcgctgaactcacacttaaggccggaatcccaaagggagtcgtgaatgttctgcctggtagcggaagcctggtagggcagcggctgtctgatcatcccgacgtacgaaaaatcggatttaccggctctactgaagtcgggaagcatatcatgaagtcctgtgctatttctaacgtgaaaaaagttagcctggagctgggggggaagtcaccactgattatctttgccgattgcgatctcaacaaggcggtgcaaatgggaatgtcgagcgttttttttaacaaaggtgagaattgcatcgccgcgggacgcctcttcgtagaggactctatacacgacgagttcgtaagaagagttgttgaagaagttcggaaaatgaaggttggtaatcccctagaccgggacaccgaccacggaccccagaaccatcacgcacacttggtcaagctgatggagtattgccagcacggcgtgaaggagggggccaccctggtgtgcggggggaaccaggtgccaagacctggattcttctttgaacctactgtttttacggacgttgaagatcacatgttcatagcgaaggaggagagcttcggaccagtgatgatcatttcaagattcgcagacggcgacctggacgctgtgttgagtagggctaatgctaccgaatttgggttggcatctggcgtttttacacgcgacatcaataaagcactgtacgtatctgacaagctgcaggccggcaccgttttcgtgaatacgtacaataagactgacgtggctgctcccttcggcggtttcaaacaatctgggtttgggaaggatttaggcgaggccgcgttaaatgagtacctcagagtcaagacagtgaccttcgaatattag

SEQ ID NO: 107797 - DNA, 1518 bp, synthetic construct
  misc_feature 1..1518: note = Description of Artificial Sequence: Synthetic coding sequence
  source 1..1518: mol_type = other DNA
atgaaaatcgcagtcatcggtcaatccctctttggccaggaagtatactgtcatctgcgcaaggagggccacgaggtggtgggagtcttcacagtgcctgacaaggatggtaaagcggatcctctgggtcttgaggctgagaaggacggtgtcccagtgtttaagtattcccgctggcgggccaaaggccaggcccttcccgatgtcgtcgccaagtaccaggctctgggcgctgaactgaacgtactgcccttttgctcacagttcatccctatggagatcatttctgcccccagacacggctcgattatttaccacccctcattacttccaagacataggggcgcgtcagctatcaattggacattgattcatggagataaaaagggcggtttttccatcttctgggccgacgacggtctggacactggcgacctgctactccagaaagagtgcgaagtgctcccagatgacacggtcagcacactgtataaccgttttctgtttcccgaaggcatcaagggtatggtgcaggccgtgagactaatcgcagagggaaaggcacctaggctgccccagcccgaggagggagcgacttacgaaggcatccagaagaaggaaacagcaaagattaactgggatcaaccagcagaggcaatacacaactggattcgcggtaacgacaaggtccccggcgcatggaccgaagcttgtgaacaaaagcttacattttttaattcaacccttaacacgagtggattggtgcccgagggggatgctctgcctatacctggggcccatcgccccggtgttgtgaccaaggctgggctaatcctgtttggcaacgatgataagatgctgcttgtgaagaatattcagttggaggacggaaaaatgatactcgcgtctaacttttttaagggagctgcatcctccgttctcgagctcacagaagctgagctggtaacggcagaggccgttagaagtgtttggcagagaatcctccccaaggtactggaggtggaggattccacggattttttcaagagcggcgcagcctctgtggatgtggtgagactcgtcgaggaagtgaaggagctctgcgacggcctagaacttgaaaatgaggacgtttatatggccagtacgtttggagacttcatccagctgctggtacgcaaacttagaggtgatgacgaagagggtgaatgttcaatagactatgttgaaatggcggtgaataagcgtacggtgcggatgccacaccagctgtttatcggcggggagtttgtagacgctgagggcgctaaaactagcgagacaatcaaccctacagatggatcggtgatctgtcaggtgtcgttggcacaggtgacagacgttgataaggccgtcgccgctgcaaaagatgcattcgaaaatggcagatggggcaaaatctcagcaagggatagagggcgtctcatgtatagagcgcctcctagccccagcacccgtccagatcctaccgccacgtag

SEQ ID NO: 107798 - DNA, 2709 bp, synthetic construct
  misc_feature 1..2709: note = Description of Artificial Sequence: Synthetic coding sequence
  source 1..2709: mol_type = other DNA
atgaagatcgccgtgattggccagtccctgtttggccaggaagtgtactgtcacttgcgcaaggaaggacatgaagtggtgggcgtgtttactgttccggataaggatggtaaggctgacccactgggtctcgaggcagagaaggatggcgtccccgtattcaaatactccagatggcgagcgaagggtcaggcactgcccgacgttgtggctaaataccaggcattgggtgccgaacttaatgtactgcccttctgctcacagttcataccaatggaaattatatcagctccaagacatggctccataatttatcatccttccctgctccctcgccaccgaggcgccagcgctattaattggactctgatccacggggacaaaaagggcggattcagtatcttctgggctgacgatggactagacacaggggaccttcttttgcagaaggagtgcgaagtgcttccagatgatactgtaagcacactctataatcgatttttattcccagaaggcattaaagggatggttcaggccgttcgcttaatcgcggaaggaaaagctccccggctccctcaacccgaagaaggagctacctatgaaggcattcaaaagaaggaaaccgcaaagattaactgggatcagccggccgaagcaattcacaactggatcagagggaacgacaaggtgccgggcgcctggacagaagcctgcgagcagaaactgaccttcttcaactcgaccttaaacacctcggggttggttcccgaaggtgatgccttacctattcctggagcccatcgtcccggtgtggtgacaaaggccggactgattctgtttggcaacgacgataagatgcttctcgtgaagaatattcagctcgaggacgggaaaatgatcctggcaagcaattttttcaagggcgccgctagctctgtgctggaactaacagaggccgagctggttactgccgaggcagtgcgatccgtttggcaacgaatcctgcctaaagttctagaggtggaggactctaccgatttctttaagagcggggcggcctcagtggacgttgttcgattagtggaagaggtaaaggagctttgcgatggcctcgagcttgaaaatgaagacgtgtacatggcatctaccttcggtgacttcattcagctgcttgtccgaaagttacggggtgatgatgaagaaggggagtgcagcatcgactacgtcgagatggctgtcaataaaagaacagtgagaatgccacatcaactgttcatcggcggggagttcgttgatgccgaaggtgcaaaaacctctgaaacaatcaacccaacagacggatccgtgatctgccaggttagcctagcacaggtgactgatgtggataaggctgttgccgcggcgaaagatgcattcgaaaatgggagatggggaaagataagtgccagagatcgcgggagactaatgtaccggctggcagatcttatggagcagcaccaagaagagctggccactatcgaggccctcgacgcgggagccgtgtatacactcgctttgaagactcacgtgggcatgagcatccagacatttcgctattttgccggatggtgtgataaaatacagggcagcactatccccattaatcaggctagaccgaacaggaacctgacactgacgcgaaaagagcctgtgggcgtctgcgggattattatcccatggaactacccactcatgatgctgtcatggaaaaccgccgcatgcctggctgctggaaataccgtcgtgatcaagcctgctcaggtgacacccctgacggctctgaaattcgccgaactcactctgaaggccggaattcccaaaggagtagtgaatgtactccctgggagcgggtcactggtgggccagcggctgagtgatcaccccgacgttcgaaagatcggcttcacgggaagcaccgaagtgggtaaacatattatgaagagctgcgccatctccaacgtgaagaaggtgagcttggaattgggcggcaagtcacccctcatcatttttgccgattgcgatctgaacaaggcggtgcagatgggaatgagcagtgtgtttttcaacaagggcgagaactgtatcgccgccggcagactttttgtagaagattcaatccatgacgaatttgtaagacgggttgtggaagaagtgagaaaaatgaaagtcgggaatcctctggaccgtgatactgatcacgggccccagaatcaccacgcccacctagtcaaattgatggagtactgccaacacggtgtaaaggaaggagcgacgctggtttgcggcggaaaccaagtcccgcggccagggttcttcttcgaaccaactgtctttacagacgtggaggaccatatgtttatagctaaagaagaaagcttcgggcccgtgatgatcatcagcagattcgctgatggagacttggatgccgttctgagcagagctaacgcgaccgaattcggactggctagcggagtattcacaagagacattaataaagcactctatgtaagcgataaactgcaggcaggtacggtgtttgtcaacacatataacaaaacagacgtggccgcaccattcggaggattcaagcagagcggtttcggcaaggatctgggagaggcagcactcaacgagtaccttcgagtgaaaaccgtcacattcgagtactag

SEQ ID NO: 107799 - DNA, 483 bp, synthetic construct
  misc_feature 1..483: note = Description of Artificial Sequence: Synthetic coding sequence
  source 1..483: mol_type = other DNA
atggttcaggccgtgcggcttattgccgaaggcaaagcaccgaggctacctcagccagaggaaggggccacctacgagggtatccagaagaaagagactgctaaaatcaattgggaccagcccgcagaggctatccataattggataagaggtaacgacaaggtccccggtgcctggactgaggcttgcgagcagaaactgaccttctttaattccaccctgaatacaagtggactcgtcccagagggcgacgccctacctattcctggcgcccatagacccggagtagtgacaaaggccggattgattttgttcggtaacgacgataaaatggtacgcgccagactctgggtcacttgtctcctgaaggccacgcatgcccctgtgctgggccttaggccgcatagaaagacccttggctccagcggagaaaacggaaaaaatcagacccaggagggtaccctgaccttgatttgtccctag

SEQ ID NO: 107800 - DNA, 507 bp, synthetic construct
  misc_feature 1..507: note = Description of Artificial Sequence: Synthetic coding sequence
  source 1..507: mol_type = other DNA
atgaagatagccgttataggccagagtctgtttggtcaggaggtctactgccatctgaggaaagagggccatgaggtcgttggtgtatttaccgtccctgacaaggacggtaaggccgatcctctgggcctggaagccgagaaagacggtgtacccgtatttaaatatagcagatggcgcgcaaaaggacaagccttgccagatgtggttgccaagtaccaggccctcggagccgaactgaacgtcctgccattttgttcacaattcattcctatggagataatttcagccccgcgccatggctctattatataccatccttccctcctgccacgtcacaggggcgctagtgctatcaactggaccctcattcatggggacaagaagggaggatttagcatcttctgggccgacgacggactggacacgggagacctgctcctgcagaaggagtgtgaggtccttcccgacgacacagtgtcaactctgtacaacagattcctgtag

SEQ ID NO: 107801 - DNA, 2709 bp, synthetic construct
  misc_feature 1..2709: note = Description of Artificial Sequence: Synthetic coding sequence
  source 1..2709: mol_type = other DNA
atgaagatagccgtgattggacagagcctgttcggacaggaagtgtattgccatctgcgtaaggagggccacgaggttgttggggtgtttaccgtgcctgacaaggacgggaaggcagacccactcggcttggaagctgagaaagacggcgtccccgtgttcaaatatagcagatggcgcgctaagggtcaagccttgccggacgttgttgccaaatatcaggctctgggcgctgagctcaacgtcctgcccttttgctcccaattcattcccatggaaatcatctctgctcctcgacatggatcaatcatatatcacccttcactcctgccacgacaccggggcgccagtgccattaactggacgctgatccacggagacaagaaaggcggcttcagcatcttctgggccgatgacgggttggatacaggggatctgttgctgcagaaagaatgcgaggtcctccctgacgataccgtctcaactctgtacaatcgatttctgttccctgaggggataaaggggatggttcaggcagtaagattgatagctgagggcaaggccccgagacttcctcaacccgaggagggggccacttatgaggggattcaaaaaaaagagacagcaaagataaactgggatcagccagccgaagcgatccataactggattagaggcaacgataaagtgcctggagcatggacggaggcctgtgagcaaaagctcacctttttcaactccacattaaatacctcaggcctggtacctgaaggcgatgccttgcctattccaggcgctcatagacccggggttgtgacaaaagccggcttgatattgttcggtaacgacgataagatgctcctggtcaaaaacattcagctggaggatgggaaaatgatcctggcatcaaatttcttcaaaggggccgcatcttctgtgctggaactcacagaggctgagttggtcactgctgaggcggttagatcagtttggcagcggatcctgccaaaagtcctggaagtggaggattctaccgatttttttaagtccggagccgcttccgtcgacgtggttaggctggttgaggaagtaaaggagctttgcgacggactggagctcgagaacgaggatgtatatatggcttcgacattcggtgattttatccaactcctggtgaggaaattgagaggagatgacgaggaaggggagtgctccatcgattacgtagaaatggcagtgaacaagaggaccgtaagaatgccccaccagctgttcatcggcggggagttcgtggacgccgagggcgccaagaccagtgaaactatcaacccaacagatggatcagtcatctgccaggtctcacttgcccaagtcactgatgtcgacaaggccgttgccgccgcaaaggacgcgttcgaaaatggccgatggggaaaaatcagcgccagggatcgcgggaggctgatgtaccgccttgcagacctcatggagcaacatcaggaagagcttgcaaccattgaggcactcgacgccggagccgtgtatactctggctctgaaaacacatgtaggaatgagtatccaaacattccgctactttgctgggtggtgtgataaaatccagggctcaacaatacctataaatcaggcgcgccctaatcgaaatcttactctgaccagaaaggaaccagtgggggtctgcggcataatcatcccatggaattaccccctcatgatgttatcttggaagacggccgcatgtctcgccgcgggaaatacagttgttatcaagcccgcccaagttactccactgaccgccctgaaatttgcagagctgacccttaaagctggcatccctaaaggcgtcgttaatgtgctgccaggcagtggttcgctagtcgggcagcggctcagtgaccaccccgatgtccgaaagatcggattcactggttctacagaagtggggaagcacatcatgaagtcatgtgctatttcaaatgttaaaaaagtgtccctggaattgggcggcaaatctcctctaatcatattcgccgattgcgacttgaataaagcagtgcagatggggatgagctcagttttttttaataagggtgagaattgtatcgccgccggccgactgtttgtagaggatagcattcacgatgaatttgtgcgaagggtggtggaggaagtgaggaaaatgaaggtcggcaacccgcttgatcgcgacaccgatcacggcccacagaatcatcatgcacacctggtgaaactgatggaatattgtcagcatggagtcaaagagggcgccacactggtatgtgggggtaaccaggttccacggccagggttcttctttgaacctacagtcttcaccgatgtggaggatcatatgttcatagccaaggaggaaagcttcggccccgttatgatcatctctagattcgcagatggggacctggatgccgttctgagtagagccaatgccaccgagttcgggctcgccagtggggtctttacaagggacattaacaaggcactgtacgttagcgacaaactccaggccgggaccgtctttgtgaacacatataacaaaacagacgtggccgccccttttggcggcttcaagcaaagcgggttcggcaaagacctgggggaagctgcactgaatgaatacctgcgggtcaagacggtgacatttgagtattag

SEQ ID NO: 107802 - DNA, 474 bp, synthetic construct
  misc_feature 1..474: note = Description of Artificial Sequence: Synthetic coding sequence
  source 1..474: mol_type = other DNA
atgaaaatagcagtaatcgggcagagcctgttcggccaggaagtgtattgtcacctgcggaaggagggccacgaagtcgtgggagtgtttacagtaccggacaaggacgggaaagctgatcctctggggctggaggctgagaaagacggagtccccgtattcaaatactccaggtggagggccaaagggcaggccctacctgacgtagttgcaaaataccaggcccttggggccgagctcaatgtgctcccgttctgcagtcagtttatacccatggaaattatcagcgcgccaagacacggaagcattatataccaccctagtctgctgcctaggcatcgcggagcatccgccattaattggaccctcatacatggagataagaaagggggtttctcgatcttctgggcagacgatgggctggacaccggggatctcctgctgcagaaagagtgtgaggtcttgccggactag

SEQ ID NO: 107803 - DNA, 534 bp, synthetic construct
  misc_feature 1..534: note = Description of Artificial Sequence: Synthetic coding sequence
  source 1..534: mol_type = other DNA
atgaagattgccgtcatcggacaatccctcttcggtcaggaggtctattgccatctcagaaaggagggccatgaggtggtgggagtattcacagtccccgataaggatgggaaagccgaccctttgggcctggaagctgagaaggacggagtccccgtgttcaaatattcacgatggcgcgcaaaaggccaggccctgcccgacgttgtggccaagtaccaggctctgggtgcagaactgaatgttctacccttctgtagtcaattcatcccaatggaaatcatctccgcaccacggcatgggtccatcatttaccacccttctctgctccctagacaccgtggcgcatccgcaatcaactggacacttatccatggggacaagaaggggggattctctatattctgggccgacgacggacttgacaccggtgacctcctactgcaaaaggaatgcgaagttctgcccgatgacacagtatctaccctgtataaccgcttcctgttcccggagggaattaagggaatggtctag

SEQ ID NO: 107804 - DNA, 303 bp, synthetic construct
  misc_feature 1..303: note = Description of Artificial Sequence: Synthetic coding sequence
  source 1..303: mol_type = other DNA
atgaaaatcgccgtgattggtcagtccctctttggacaggaagtctattgccacctgaggaaagagggccacgaggtggtgggggtttttacggtcccagacaaggatggaaaagctgatccactagggctagaagccgagaaggatggagtgccggttttcaaatactcccggtggcgggctaagggccaggcattgccagacgtcgtggcaaagtaccaggccttaggtgccgaactgaacgtgctgccattctgcagccaatttattcctatggaaataattagcgcaccccggcactag

SEQ ID NO: 107805 - DNA, 2409 bp, synthetic construct
  misc_feature 1..2409: note = Description of Artificial Sequence: Synthetic coding sequence
  source 1..2409: mol_type = other DNA
atggccgcaactcgggctggaccccgggcccgcgagattttcacttccttggagtatggacccgttcccgagagccatgcctgcgcactagcgtggctcgatacccaggataggtgcctgggccactacgtgaacggaaagtggcttaagccagaacatagaaacagtgtgccctgccaggaccccatcaccggggagaatcttgcttcatgcttacaggctcaggcggaagacgtcgctgccgccgttgaagccgccagaatggctttcaaaggctggtcagcccatcctggcgttgtcagggctcagcacttgacacgcctcgcagaagtaatccagaagcaccagcggctgctgtggacccttgaatctttagtgacgggccgagccgtgcgggaggttcgggacggggatgtccagttggcgcagcagctgctccactaccacgccatccaggcaagcacacaggaagaagctttggccgggtgggagccgatgggtgttattggtctcatccttccccctacttttagctttctagagatgatgtggagaatttgccctgccctggccgtggggtgcaccgtcgtggcactggttcccccagcctcgccagcgccccttctgttggcccaattggctggggagttggggccttttcctggtatactaaatgtcttaagcggacccgcgagtctggtgccaatcctcgccagtcagcccggtatcaggaaagtggccttctgcggcgcccctgaggaagggagagctcttcggcggtcccttgctggcgaatgcgctgagctggggctcgctctgggcacagaatcactgctccttttgaccgacactgccgacgttgactccgccgtggagggcgtggttgatgcagcgtggtcagatcggggcccgggcgggcttagacttttgatccaggaatcagtgtgggatgaagccatgaggaggctgcaggaacgtatgggtcggctgcgctcaggacggggtctagacggggccgtggatatgggcgctcgcggcgcagcagcctgtgacctagttcaacggttcgttcgggaagcccagtcccagggtgctcaggtcttccaggccggggatgtgcctagcgaaagaccattttatccacctactcttgtgagcaatctccctccagccagcccttgcgcccaggtggaggttccttggcccgttgtcgtagctagtcccttcaggaccgccaaagaggctctgcttgtggccaacggcacaccccgcggggggtcagcaagtgtctggtctgagcgattaggtcaagctttggagttaggttacgggttgcaggtcgggacagtttggattaacgcccacgggctgcgggatccttctgtccccactggcggttgtaaagaatctggctgttcctggcatggcgggcccgacgggctgtatgaatatctgcgaccctccggcacacctgctcgtttgtcttgcctgagcaaaaatctgaactacgacaccttcgggctcgccgttccttccaccctccctgcaggcccagaaattggacctagccccgcaccaccctatggtctgtttgtgggagggcgtttccaggcgcccggggccagaagctcgcggccaattagagattcttcaggtaatctgcatggctacgttgcagaaggcggggcaaaggacattcgcggagccgtggaggcggctcaccaggcattcccagggtgggccggccagtcacctggagcacgggccgccctgttgtgggctctggcagcagccctggaacgccgcaagtccacgctcgctagcaggctggagcggcaaggggctgagctgaaggctgctgaagctgaagttgaactcagtgctagacggctcagagcgtggggggctagagtacaagcccaaggccatacacttcaggtggcggggctgagaggccccgtgctgcgcttgcgagagcctctaggagtattagcagtcgtgtgccctgacgagtggccgttgttagcctttgtgtccctgctcgccccggctttggcctatggcaacaccgtggtcatggtgcctagcgccgcttgtccgcttctcgctttagaagtgtgtcaagacatggccaccgtcttccccgccggcctggcaaatgtcgtgactggagacagggatcacctcactcggtgtttagcactccaccaggatgttcaggcaatgtggtatttcgggagtgcccagggatcccaattcgtggagtgggcttccgccggaaatctgaagcccgtatgggcaagtagaggatgtccccgcgcatgggaccaggaggcagagggcgcagggcccgagctgggcctgagagtcgcccgcactaaggccctttggttgcctatgggcgattag

SEQ ID NO: 107806 - DNA, 1914 bp, synthetic construct
  misc_feature 1..1914: note = Description of Artificial Sequence: Synthetic coding sequence
  source 1..1914: mol_type = other DNA
atgggggtaattgggctgatactgcctccgacattttcttttcttgaaatgatgtggaggatctgcccagctcttgcagtaggatgtaccgtggtggccctcgtgccaccagcatcccccgcacctcttctgttggcgcaattggctggggagctggggccattccccgggattctgaatgttctgagcggcccagcttctcttgtgccaatattggcttctcagcccggcataaggaaggtggcgttctgcggcgcacctgaggagggccgggcattgcggaggagtctggcaggcgaatgtgcggagttgggcttggccttgggtacagaaagcttactccttcttacagacaccgcagatgtcgactccgcggtggagggggtggtggacgctgcctggagtgacagaggcccaggtggactgcgcctgctcattcaggaaagtgtgtgggacgaggccatgagaaggttgcaggagcgcatgggtcgcctccgctcaggtcgcggcttggacggggctgttgacatgggcgctcggggagccgccgcatgcgacctggtgcaaagattcgtgcgcgaggctcagtcacagggcgcccaggtgttccaggccggtgatgtcccaagcgagcgcccgttttacccaccaacactggtgagtaaccttcctcctgcatcaccctgtgcccaagtcgaggtgccttggccagtggtggtcgcaagcccttttcgtaccgctaaggaagccctcctggtggccaatggcaccccaagaggtggcagcgcatctgtttggtcagaaagactgggccaagcactggaacttgggtacggactccaagtggggactgtctggataaatgcccacggcctaagagatccttccgtgccgacaggcggttgcaaagaatctgggtgttcctggcatgggggcccagatggactgtatgagtacttgcgcccaagtggcactcctgcccgtctcagttgtctgagcaaaaaccttaactacgacacgttcggactagccgttcccagcacactgccagcaggacctgaaataggacccagtccggccccgccttacgggctctttgttggcggccgattccaagcaccaggagctaggagcagccgacccataagagatagcagcggcaacctacatggctacgtggcggaggggggagcaaaagacattagaggtgctgtagaagctgcacaccaggcctttccaggctgggctgggcagtcacctggggcaagagccgccctgctttgggctttagctgccgccttggaacggcgaaaatctacactggcctctagattggagcgccagggagctgagctcaaggctgccgaagccgaagtcgagctcagcgcccggagacttagagcatggggtgctcgagtgcaggctcagggccacacattgcaggttgcgggactccgcgggccggtcttacgtctcagggagcctctgggcgtacttgcagtggtgtgtccagatgagtggcctttgctcgcatttgtctctttgttggctccagccttggcctacggcaacaccgtcgtgatggtaccctctgccgcctgcccgctccttgcactggaagtgtgccaggacatggcaacggtcttccccgccggtttggcaaatgtcgtgaccggggacagagatcatcttacaaggtgcctggccctccaccaagacgttcaagcaatgtggtacttcggttctgctcagggatcgcagttcgtcgagtgggcatctgcaggaaaccttaaaccagtgtgggcttctaggggatgcccacgggcatgggaccaggaggcggagggggctgggccagagctgggactccgcgtcgctcgaaccaaggctttgtggctgccaatgggagattag

SEQ ID NO: 107807 - DNA, 2256 bp, synthetic construct
  misc_feature 1..2256: note = Description of Artificial Sequence: Synthetic coding sequence
  source 1..2256: mol_type = other DNA
atggcagccaccagggctggtccacgcgctcgcgaaatcttcacgtcgcttgagtatggacctgttccagagtcacatgcctgtgccctcgcttggttggacacacaggaccggtgtctagggcactacgtcaacggaaaatggttgaagccagagcacagaaacagcgtcccatgccaggatcctattaccggcgagaacctggcttcttgtctgcaggcccaagcagaggatgtagctgccgcagttgaagctgcgaggatggcgttcaaggggtggagcgctcacccgggggtggtgcgggctcagcacttgacgaggctggcggaggtgatccagaagcatcagcggctgttatggacactcgagtcacttgtgactgggagggcagtacgcgaagtccgcgacggagatgtgcagttggcccagcagctcttgcattaccacgcaattcaggccagcactcaagaagaggcgctggcagggtgggaaccaatgggcgtcatcgggctgattttgccacctacattttcgttcctcgagatgatgtggcggatctgtcctgccctcgctgtaggctgcacagtcgtcgctcttgtgccacccgcaagccccgctcctctcctgttggcccagctagccggcgagctggggccttttcctgggatactgaacgtgttgagcggaccagcctcccttgtgcccatcctcgcatcacagcccgggatccgtaaagtggctttttgtggcgcacccgagggcggcctgaggctgctgatacaggaatctgtctgggatgaggctatgaggaggttgcaggagcggatgggacgtctgcgatccggtcgcgggctggacggcgctgtagatatgggtgccaggggtgccgccgcatgtgacctcgttcagcggtttgtgcgtgaggcccagtcccagggtgcccaggtcttccaagctggagacgtaccaagtgagcgccctttttatccaccgacgctcgtgtctaacttgccacccgcttctccttgtgcacaggttgaggtgccgtggcccgttgtggtagcgagcccattccgaactgccaaagaagccttgttagtcgcgaatggtacgccgcggggcggtagcgcaagcgtttggtccgagagactcggccaggcgctcgagctgggatatggtcttcaagtgggaacagtgtggattaatgctcatggtctgcgagatccttcagtgccaaccggcgggtgtaaagagtcaggatgctcttggcacggggggccggatggcctctatgagtatctcaggcccagcgggacccctgcacgactttcctgcctgtcaaaaaatttgaactacgacaccttcggactggctgtgccgtcaactctccccgccggccctgagattggccccagccccgcccctccctatggactgttcgtcggagggcgttttcaggcccctggcgcccggtcttcacgccccatacgcgactcctcaggtaatttacacggatatgtggcagagggaggtgctaaggatataaggggagcggtagaggctgctcaccaggcctttcctggctgggctggccaatcccctggcgcgagagctgctttgctctgggctttggcggctgcattggaacgccgaaaatccaccctggcgtctagactggaacgccaaggcgccgaactaaaggctgcagaagcagaagtggaactctcagcccggaggctgcgagcctggggggcacgggtgcaggcccaaggtcacaccctgcaggtggcaggtctgcgtggtccagtgctgaggctgcgcgagccactgggcgtgcttgcagtagtttgtcctgatgaatggcctcttctcgccttcgttagtctcctggccccggctctggcctatggcaacacagtcgtaatggtccccagcgcggcgtgccccctgctggccctggaggtctgccaagacatggccaccgtctttcctgcagggctggccaacgtggtgaccggcgacagagaccatctgaccaggtgcctggcactgcaccaggacgtccaggccatgtggtacttcggatcagcccagggttcccaattcgtggaatgggcaagcgctggcaacctgaaaccagtgtgggccagccggggttgtccacgagcgtgggatcaggaagccgagggcgcaggcccggagctggggctccgagtggcaagaaccaaggcgctgtggttgcccatgggggactag

SEQ ID NO: 107808 - DNA, 1920 bp, synthetic construct
  misc_feature 1..1920: note = Description of Artificial Sequence: Synthetic coding sequence
  source 1..1920: mol_type = other DNA
atgagaaccggagtgatcggtctcatattacctcccacctttagtttcttggagatgatgtggcgcatctgccctgccctggcagtcggctgcactgtcgtcgccctggtgccccctgctagcccagcccccctgctactggctcagctcgccggggagctcggcccattcccaggcatcctaaatgtcctgagcggcccagcttcgttggttcctatccttgcctcacagcccggaattaggaaggtcgccttctgcggcgccccagaagagggccgtgccctgcggcggtctctggcgggagagtgcgccgagttggggctcgccctcggcaccgaaagcctcctcttactcaccgacacagctgatgtggattctgcagtggagggggttgttgacgcggcttggtcggaccgcgggcccggaggcctgcgactgcttatccaggaaagcgtgtgggatgaggcgatgcgcagattgcaggagcggatgggccgtttaagatctggccggggcctagatggggccgttgatatgggcgccaggggcgctgccgcttgcgacttggttcagcggttcgttcgagaagctcagagtcagggggcccaggtgttccaggcaggggacgtgccgtcggaacgtcctttctacccccccacattagtatcaaatttacctcctgcgagcccatgcgctcaggtagaggttccgtggcccgttgtcgtggcgtcccccttccgcaccgcaaaggaggctctgctggtcgcgaatggcaccccaagaggtggcagtgcctctgtctggtctgagcggttagggcaggcacttgagctcggctatgggctccaggtgggaacagtatggataaacgctcatgggttgcgcgatccctcggtgccaaccgggggatgtaaagagtcaggctgttcgtggcacggaggcccggacggtctctacgaatacctccgcccctctggtacacccgctagactgagttgcctgagcaaaaatctgaactacgacactttcggattagccgtgccctctactttgccagctggacctgagatcggcccttcgccagcgcccccatacggattgttcgttggcggccgattccaggctcctggtgcccggagttcgcgaccaatccgggatagctctgggaatctgcacggctatgtggccgagggcggagctaaggatatcaggggtgccgtggaagcagcacaccaagcattccctggttgggctggccagtctccaggcgcccgcgctgccctgctctgggcccttgccgctgccctggagagaaggaagtccaccctggctagtaggctcgagagacagggcgccgagttaaaagcagccgaggcagaggtggagctcagcgctaggcgcctaagggcctggggagcgcgggtccaggcacaggggcataccctgcaggttgctggactgcgcgggccagtcttaaggcttagagaaccactcggcgtcctggcagtggtgtgtccggacgaatggcccctcttggcgtttgtgagcctccttgcccccgctctcgcttacggaaatactgttgtgatggttccaagcgcggcttgccctctgctcgcgctggaggtgtgtcaggacatggctacggtgtttccagctggcctggccaacgtcgtaaccggagacagggatcacttaacccggtgtctggccctccatcaggacgtgcaggccatgtggtactttggctccgctcagggcagccaatttgtggagtgggcaagcgctggaaatctgaagccagtatgggcatcacggggttgtcctcgcgcatgggaccaggaggccgagggggccggccctgagctggggctgcgagttgctaggaccaaggccctctggctgccaatgggcgactag

SEQ ID NO: 107809 - DNA, 2382 bp, synthetic construct
  misc_feature 1..2382: note = Description of Artificial Sequence: Synthetic coding sequence
  source 1..2382: mol_type = other DNA
atgttatcacaagtataccggtgtggcttccagcccttcaaccagcacttgctgccctgggtgaagtgtaccactgttttcaggtcacactgcattcagcctagcgtgatcagacacgtccgcagctggtctaatatcccgtttattaccgtgcccctcagccgcacacacgggaagtcctttgctcatagaagtgaattgaagcacgctaagaggatcgtagtgaaacttggatccgccgttgtgacacggggcgacgagtgtgggcttgccctcggccgcttggcgtcaatcgtggagcaggtgtcagttttgcagaaccagggaagagagatgatgctagttaccagcggcgctgtcgcatttgggaagcaaagactgagacacgaaatcctgctaagccaatccgtgagacaagctctccattccgggcaaaatcaactaaaggagatggcgataccggttttagaggccagagcttgcgccgctgcagggcagtctgggttgatggcactctatgaggctatgtttacccagtatagtatatgcgcagcccagatacttgtgactaacctcgacttccacgacgagcagaaacgtcgcaacctgaacggcactctacatgagctgttacggatgaatatcgttccgatcgtcaacacgaacgatgccgtggtcccgcctgcggagccgaacagtgatctccagggtgtcatcagtgttaaggacaatgactcactcgcagcacgcctcgctgtcgagatgaagaccgatttattgatagtgctgtctgatgttgagggattgtttgactccccccccgggtcagacgacgccaaactcattgacatcttctatcctggagaccagcaaagcgtcaccttcgggacgaaatctcgagtgggaatggggggaatggaagcaaaggtaaaagcagccttgtgggctctgcaaggcgggacttctgtagttatcgccaatggcacacatcccaaagtcagtggacatgtgataacagatatagtggaaggtaagaaagtcggcacattcttctccgaagtgaaacctgccggacctacagtggagcaacagggcgaaatggcgcggtccgggggacggatgctggctactttggaacccgaacagagagctgagattattcaccacttggcagatctgctcaccgaccagcgtgatgaaattctgctggccaacaagaaagatttagaggaagctgagggaaggcttgcagccccactcctgaagcgtctgagcctgtcaaccagtaaattgaactctctggctattggcctaagacagatcgccgcctcctctcaggattccgttggccgcgttctcagacggacccgaatagccaagaatttggagctagagcaggtaaccgtccctatcggagttctgctggtgatctttgagagccgcccagattgcttgccacaagtcgccgcactggctattgcaagcgggaatggcctgctgttgaagggaggaaaggaggccgcccactctaatcggatattacatcttctgacccaagaggccctgtctatccacggcgtgaaggaggccgtgcagttggtcaacacccgagaagaagtggaggatctttgcagacttgacaagatgatcgacctcattataccaaggggttcatcccagttggtacgggatatacagaaagccgctaaaggcatcccggttatgggtcactctgagggcatatgccacatgtacgtggactctgaagcctctgtagacaaggtgacaagactggtgcgggactcaaagtgcgagtaccctgctgcctgcaacgcattggaaacgctgctgatccaccgcgatctcctgcggactcccttgttcgaccagattattgacatgttaagagttgagcaggttaaaatccatgccggtccgaagtttgcctcatatctgactttttcaccaagcgaggtcaagtctctgaggacagagtacggcgacctggagctgtgcatagaggtggtggacaatgtgcaggacgcaattgatcacattcataagtacggaagctctcacacagatgtcatcgtcactgaagacgagaacaccgcggagttcttcctgcagcatgtggatagtgcctgtgttttttggaatgccagcaccagattctctgacggctatcgttttgggctgggggcagaggtaggaatcagtacatcgaggatccatgcgagggggcccgtgggcctggaaggtctgcttaccactaaatggttgctgagaggtaaggaccacgtcgtgtcggattttagcgagcacgggtccctgaaatatctgcacgagaatctacccataccacagcgtaacactaactag

SEQ ID NO: 107810 - DNA, 2388 bp, synthetic construct
  misc_feature 1..2388: note = Description of Artificial Sequence: Synthetic coding sequence
  source 1..2388: mol_type = other DNA
atgctctctcaagtgtaccggtgcggatttcagccctttaatcagcacctgctgccatgggttaaatgtactacagtgtttcgcagccactgtatacaaccctctgtgattcggcatgtccgcagttggtccaatatcccgtttatcacagtcccactgtcaaggacgcatggaaagtcatttgcccatcgatccgagctcaaacatgcaaaacgcattgtggtgaagttgggaagtgctgttgtgacccgtggggatgaatgtgggctggcactcgggcggcttgcttctatcgtggagcaggtgtcagtcctgcagaaccagggacgcgaaatgatgcttgtgacgagcggtgccgtcgcattcggcaagcagagactgcgccacgagattttgctctcccagtctgtgagacaggcattacattccggccagaaccagttgaaggaaatggcaatcccagttctggaggcgagagcgtgcgccgccgccggccagtccgggctgatggccctgtacgaggctatgttcacacaatattccatctgtgcggcgcagattttggtgactaacctggactttcatgacgaacagaagcgtaggaacctcaatgggacattgcatgaactgttgaggatgaacattgttccaattgtcaatactaatgatgcggtcgtcccgcctgcagagcctaattctgacctgcagggagtgaacgtgatcagtgttaaagataatgattccctggccgctaggcttgccgttgagatgaagaccgacctcctcattgtgctgtctgacgtggagggactgttcgatagtcccccgggatctgacgatgcgaagctgatcgatatcttttaccctggcgatcagcagtccgtgaccttcggaacgaaatctcgcgtcggcatgggcggcatggaggcaaaagtgaaggctgctctctgggctttacaaggtggtacctccgtcgttattgcgaatggcacccatcctaaagtgagtggccacgtcattacagacatcgttgagggcaaaaaggtcgggacctttttttcggaggtgaaaccggcagggcctacagtggaacagcagggagaaatggctagatctgggggcaggatgctcgctaccttggaacctgagcagcgggcagagatcatccaccacctagcagatttactgactgaccaacgagacgagatcttactagccaacaagaaagatctggaagaggccgagggcagactggctgcacctctactgaaacgtctgtcactctcgacctccaaactaaattctttggccataggtctgagacaaatcgccgcctcttctcaggactctgtgggcagggtgttacgtcggacccggattgccaaaaacctcgagttggaacaggtgacagtccctattggggtgcttctggtgatttttgagtctcggccagactgcctgccacaggttgctgcattggcaattgcctccggcaacggattgttgctgaagggtggaaaggaggcagcccacagcaatagaattctgcacctcctgactcaggaggctctctcaattcacggcgttaaggaggcagtacagctcgttaacacaagggaagaagtggaagatttatgtcgactcgacaagatgattgatcttattatcccccgtgggtcttcccagttagtcagggatattcagaaggctgcaaagggcattcccgtgatgggacactcggagggtatctgccacatgtacgtggactcagaagctagcgtggataaggtgactcgcttagttcgcgacagcaaatgcgagtatccagctgcctgtaacgcactggagacgctgctcatccatagggatcttctgcgcaccccactgttcgatcaaatcatcgatatgcttagagttgagcaggtcaaaatacacgctgggcctaaatttgcaagctacctaacattctctccttccgaggtgaagtccctgagaacagagtacggcgacctggagttgtgcattgaagtcgtcgacaatgtccaggatgccattgaccacatacacaaatatggaagttctcacactgatgtcatcgtgactgaggacgagaacactgccgagttttttcttcagcatgtggattccgcatgcgtgttttggaacgcttccaccagatttagcgatggataccgcttcggcctcggtgccgaagtgggcatctccaccagtcgcatccacgctagaggtcccgtggggctggaggggctgctgaccaccaaatggctcctgaggggcaaagatcatgtcgtgagcgacttcagcgagcacggatctcttaaatatttgcacgagaatctacctattccacagcgcaacaccaactag

SEQ ID NO: 107811 - DNA, 1554 bp, synthetic construct
  misc_feature 1..1554: note = Description of Artificial Sequence: Synthetic coding sequence
  source 1..1554: mol_type = other DNA
atgttgcgcgcagcagcccggtttggcccccgcctgggtcggcgacttctgtctgcagcagcgacccaggccgttcccgctccaaatcagcaacctgaggttttctgcaatcaaatctttatcaacaacgaatggcacgatgccgtttcaaggaagacattcccaacggtcaatccttccactggcgaggtcatttgtcaagtcgcagaaggggacaaagaagatgtggataaggctgtaaaggcagctcgtgctgcttttcagctggggtctccatggcgcagaatggacgcctcgcaccggggtcgcctgctcaaccgactcgcggacctcatagagagggaccgcacataccttgccgccctggagacactggataacggtaaaccctatgttatctcctacctcgttgacctcgacatggtcttgaaatgtctgcgttactatgcaggctgggctgacaaataccatggaaagactattcccattgacggggatttcttctcttatacccgccacgagcccgtaggggtttgtggccagatcattccctggaacttcccactgttgatgcaagcgtggaagctgggcccagcactggccaccggtaatgttgttgtcatgaaagtggctgagcaaactcctctgacagccttgtacgtggccaacctcatcaaagaagccggtttcccccccggagtcgttaacatagtcccaggttttggacctaccgccggtgccgccattgcaagccatgaggacgtcgataaggtcgcattcactggctccacggagattggacgcgtaattcaagtcgcagcgggttcctctaacctgaaacgtgtcaccttggagttgggaggcaagagtcccaacataatcatgagtgatgcagacatggactgggcagtggagcaggcccatttcgcactttttttcaaccagggtcagtgttgttgtgccggatctcggactttcgttcaggaggatatttatgatgagttcgtagagcgtagtgttgcccgcgcaaagtccagagttgtaggtaatccattcgactctaaaacagagcaaggcccacaggtcgatgaaacccagttcaagaagatactgggatacatcaataccggcaagcaggagggtgccaagcttttgtgtggcggcggaattgccgccgacagaggctattttatacagcccactgttttcggcgatgtccaggatgggatgactatcgccaaggaagagatatttggacctgtgatgcaaatcttgaaatttaaaaccatcgaggaggtggtggggagagcgaataattccacctacggactagccgcagcagtgttcacaaaggacctggacaaggcaaattacttgagccaggccttgcaggcgggcactgtgtgggtaaactgctatgacgtttttggagcccagtccccattcggtggttataagatgtctggcagcggcagagagctcggcgagtacggtctgcaggcctacaccgaggtcaagacagtgacagtaaaagttcctcaaaagaattcttag

SEQ ID NO: 107812 - DNA, 1413 bp, synthetic construct
  misc_feature 1..1413: note = Description of Artificial Sequence: Synthetic coding sequence
  source 1..1413: mol_type = other DNA
atgctgagagccgcggcccgcttcgggcccaggctgggccgccgcctgctaagtgccgcagccacacaggctgtcccggctcccaaccagcagcctgaagtattctgcaaccagatcttcataaataacgagtggcatgatgcagtttctagaaaaacctttcccactgtcaatccatccactggcgaggttatatgtcaggttgccgagggggacaaagccctggaaaccctggacaatggtaagccctatgtgattagttacctcgttgacctggatatggtgcttaagtgtctacgctattacgccggctgggcagataagtaccacggtaaaacaattcctattgacggcgatttcttttcctatacgcggcacgagcctgtgggggtgtgcggccagatcatcccatggaacttcccactgctgatgcaggcctggaaactgggtccggcactggctacaggaaatgttgtggtaatgaaagttgcggaacagacccccctcaccgcgctctatgtcgccaatctgatcaaggaggctgggtttccccccggggtggtgaacatagtcccgggctttgggcccacggcgggcgctgccatagcgagccacgaagatgtcgacaaggtggcgtttacaggctccaccgagattggaagggtcattcaggtcgccgcagggagctccaacttgaaacgagtgactctcgaattaggcggaaaaagccctaatatcatcatgtcggatgccgacatggactgggcagttgagcaggcgcattttgcgttattcttcaaccagggccagtgttgctgcgccgggtcccggacctttgtacaggaagatatctatgacgagttcgtcgaacgatccgttgccagggccaagtctcgcgttgttggtaacccattcgacagtaaaaccgagcagggtcctcaggtggatgaaacgcagtttaagaagattttgggctacatcaatacaggcaagcaggagggggcaaaattgctgtgtggcggtggaatcgccgctgaccggggttactttatacaacccactgtatttggagacgtccaagatggtatgacaatcgccaaggaagagatcttcggtccggtcatgcagatacttaagtttaagaccatcgaggaggtggtggggcgagcaaacaactccacctacggtctggccgccgccgtcttcaccaaggacctggacaaagcaaactatctgagccaggccctccaggctggcactgtgtgggtcaattgctacgatgttttcggggcccagtccccatttggggggtataaaatgtctggtagtggtcgggaacttggggaatatggactccaggcctacaccgaggtgaagacggtgaccgtcaaggtgccccagaagaattcttag

SEQ ID NO: 107813 - DNA, 1989 bp, synthetic construct
  misc_feature 1..1989: note = Description of Artificial Sequence: Synthetic coding sequence
  source 1..1989: mol_type = other DNA
atgagaggagcgggcccatccccaaggcaaagccctcggactctgcggccagatcctgggccggcaatgagtttctttcggagaaaagtcaagggtaaagaacaggaaaaaactagtgacgtgaaatccataaaagcttccatttcagttcatagcccacaaaaatctaccaaaaaccatgcgctgttagaggccgccggaccttcacatgttgctattaatgccatttctgccaatatggattcgttctctagtagtcggactgctacactgaaaaaacagccaagccatatggaagccgcccactttggcgacctcggccggtcgtgcctggattatcagacccaggaaaccaaatcaagcctatcgaagacgcttgagcaggtcctacatgatacaatcgttctgccgtacttcatccagttcatggaacttcgacgaatggaacatctggtgaaattctggcttgaggctgagtcttttcatagcactacatggagccgcatcagggcacactccttgaacactgttaagcagtcttcgctcgccgaaccagtgtccccatcgaagaagcacgagacaacagcctccttcctaactgactctctggataagaggctcgaggattccggatcagcacagctctttatgactcactctgaggggatcgacctgaacaatcggaccaattctacgcaaaaccatctgctgctctcccaagaatgtgactccgcccattctcttcgattggaaatggcacgagcagggactcatcaggtgtctatggagacacaggagtcctcctctacactgaccgttgcctctaggaattcccctgccagcccgctcaaagagctctctggaaagctgatgaagtccatcgagcaagacgcagtaaatacgtttactaagtacatctcccctgacgcagctaaacctatacctatcaccgaggccatgaggaatgatattatcgctaggatctgcggcgaggatgggcaggtggaccccaattgtttcgtcctggctcagagcattgtgttctcggccatggagcaggagcacttcagcgaattcctgcggagccaccacttctgtaagtatcaaattgaggtgctgacatcgggcaccgtatatctcgctgatattctcttctgcgagtctgcgctgttctattttagtgagtatatggagaaggaagatgccgtgaatattttgcagttctggctagccgccgacaactttcagtctcagctagccgctaagaaaggacagtacgatggccaggaggctcaaaatgacgccatgatcctatacgacaaatacttcagtctacaggcaacacaccccctcggttttgacgatgtggtaagactggaaatcgaatccaacatctgtagagaaggggggcctttacccaattgttttaccactccactgcgacaggcgtggaccaccatggagaaagtgtttctccctggctttctctcctctaacctttattacaagtaccttaatgacctcatccactccgtccgcggcgacgagtttcttggcgggaacgtttctttgaccgccccgggcagcgtgggacccccagatgaatcgcacccaggcagctccgactccagtgcctctcagagctccgtaaagaaagcatctatcaagattttgaagaattttgacgaagccattatagtggacgccgcttcgttggaccctgagtcgttataccagcgaacttatgcaggcaaaatgaccttcggaagggtgagcgacctaggtcagttcattcgagaaagtgaacctgagccggatgtccggaagtcaaagggctcaatgttctcacaggccatgaagaaatgggtccagggcaacactgacgaggcacaagaggaactcgcctggaagatagctaagatgatagtgtcagatatcatgcagcaggcacagtatgaccagcccctggaaaagagcacaaaactctag

SEQ ID NO: 107814 - DNA, 1536 bp, synthetic construct
  misc_feature 1..1536: note = Description of Artificial Sequence: Synthetic coding sequence
  source 1..1536: mol_type = other DNA
gaggtgcaacggactcctcacccgacttttgaatactttttcttcctaagtcggaagttgccaggacaggaactgcaagggctgaacgggcgggaggcaggcagtctgaatacctctccactgggctcttgccgctcccgaagtccctcctacagggaaaggctgtgtcagcggagacacgaacaggaccagagagggcgcgaggccaggcctcgccgcctccagggccgcacccgcccgttgcaatttcgtatacagcagctagaagctctgcagcgcctcatccaagaacaggaacaggagttagttggagcgctggcagccgatcttcacaaaaacgagtggaacgcttactacgaggaagtggtttacgtgctggaggaaatcgagtatatgatccagaaacttcctgaatgggccgccgacgaacctgtcgagaaaacacctcaaacgcagcaagatgaactgtacattcacagtgaaccattgggagtcgtgctcgtgataggtacctggaactatccattcaatctgactattcagcccatggttggcgctatcgcagctggcaacagcgtagtcctgaagccctccgagctttcagagaacatggcgtctttgctcgctacaattatacctcagtatctcgacaaagatctgtatccggtaatcaatggaggggtgccagaaaccactgagctgttgaaggagcgattcgatcacattctgtatacaggctccacgggagtggggaagattattatgactgcggccgcgaagcatctgacgcccgtgaccctggagttgggcggtaagagcccctgctacgtggataagaattgtgatctcgatgttgcttgtcgacggatagcgtggggcaagtttatgaactctgggcagacatgtgtcgcccctgattatatcttgtgcgacccgtccatccaaaaccaaatagtcgaaaagctgaagaagtctctcaaggagttttacggggaagatgctaaaaaatctagggattacggtcgaatcattagtgctcgacactttcagcgcgttatggggctcattgaaggccaaaaagtggcctatggcgggaccggcgatgccgccactcgatatattgctcctacgatactgaccgacgtggaccctcagagccctgtaatgcaagaggaaattttcgggcccgtcttgcctatagtctgtgtacggagtctggaagaagcaatccagtttattaatcagcgcgagaagccgttggccttgtacatgttcagtagtaacgacaaagtgattaagaaaatgattgctgagacctcgtctggtggtgtggcagctaatgacgtcatagtgcatattacccttcactctttgcctttcggcggagtgggcaactctggaatggggagctaccacggaaagaagtccttcgaaaccttttctcataggaggtcctgcttagtgaggcctctgatgaatgacgagggattgaaggtgcgctaccctccctccccagctaagatgactcagcactag

SEQ ID NO: 107815 - DNA, 1170 bp, synthetic construct
  misc_feature 1..1170: note = Description of Artificial Sequence: Synthetic coding sequence
  source 1..1170: mol_type = other DNA
atgtctaaaatatccgaggctgttaagcgggccagggcagcctttagctctggtagaacacggcctcttcagttccgcattcagcagttagaagcactgcaacgtctgatacaagagcaggagcaggagcttgtgggcgccctggcggccgacctccacaaaaatgagtggaatgcctattacgaggaggtggtgtatgtgctcgaggagatcgagtatatgatacagaagctgcctgaatgggccgcagatgagcccgtagaaaagacacctcaaactcaacaagatgagctctacattcattctgaacctcttggagttgtgctagtcattggtacgtggaactatccgtttaacctcacaattcaacccatggtgggagccatagccgcaggcaattctgtggtgctgaagccatcagagctaagcgaaaacatggcatctcttctggccacaattattccacagtacctggataaggacctttatcctgtaatcaacggtggtgtgcctgaaaccactgagctgctaaaggaaagatttgatcacatcttgtacacaggatcgaccggagtggggaagatcatcatgactgctgccgccaagcacctgacccctgtgaccttggagttaggagggaagtctccatgttacgtcgacaaaaattgtgacctggacgtggcatgcaggaggatcgcgtggggcaaatttatgaactccggccagacttgcgtcgccccggactacattctgtgcgatccatccatccaaaaccagatcgttgaaaagttgaagaaaagtctcaaagaaatattcggacccgtccttcctatcgtatgtgtcaggtccctggaggaggctatacagtttatcaaccaacgtgaaaagccactggctctgtacatgttctccagtaatgacaaggtcatcaagaaaatgatagcagagacctctagtggcggggtcgccgctaatgatgtaattgtacatattaccctgcacagtttacctttcgggggagttggcaattctgggatgggttcatatcatggaaaaaaaagttttgagaccttttctcatcgtcgttcctgtctggtgagacccctaatgaatgatgagggactgaaagtgcgttatcccccaagcccagcaaagatgacccagcactag

SEQ ID NO: 107816 - DNA, 693 bp, synthetic construct
  misc_feature 1..693: note = Description of Artificial Sequence: Synthetic coding sequence
  source 1..693: mol_type = other DNA
atgagcaagatcagtgaggccgtaaagcgagctcgtgctgcatttagcagcggccggacgcggccattgcagttcaggatccagcagctcgaagctctgcagaggttaatacaagaacaggagcaggaactcgtcggggctctggccgcggacctgcataagaacgagtggaatgcctactacgaagaggtggtgtacgtcctggaagaaattgaatacatgatccaaaagctgcccgagtgggctgccgatgaacccgttgagaagacacctcagactcaacaggacgagctgtatatacactccgagcccctgggcgtcgtgctggtgattggcacctggaactatccattcaaccttacgatccagccaatggtcggcgctatagctgccgggaattcagtcgtcctgaagccatcagagctttctgagaacatggcctctcttctggccacaatcatcccacagtatcttgacaaggatctgtaccctgtgataaatggcggtgtcccagaaaccacagagctgctgaaggagcggtttgatcacatcttgtatacaggatccacgggtgttggcaagatcattatgaccgctgccgccaaacacctgacacccgtcacactcgagcttggcggaaaaagtccttgttacgtggataaaaactgcgatctggatgtggcctgtaggtag

SEQ ID NO: 107817 - DNA, 1119 bp, synthetic construct
  misc_feature 1..1119: note = Description of Artificial Sequence: Synthetic coding sequence
  source 1..1119: mol_type = other DNA
atgagtaagatctccgaagccgtgaaacgagccagggctgccttctcgagcgggagaaccaggccgctgcagtttagaatccagcagcttgaggctttgcaacggttgattcaggaacaagagcaggagctggtcggagccctggccgctgacctgcataagaacgagtggaacgcctactatgaggaggtggtgtacgtgctcgaggagattgagtacatgattcagaaattgcccgagtgggccgccgatgagccggttgaaaaaacgccccaaacacagcaggatgaactgtacattcatagtgagcctctgggggtcgttctggtgatcggcacctggaattatcctttcaatctgactatccaaccaatggttggcgccattgctgccgggaatagtgtagtacttaaaccgagtgagctcagcgagaatatggcctctctgctggcaactattattcctcaatacctggacaaagacttatatccagtgatcaatgggggggtgccagagactactgagttgctaaaagaaaggtttgatcacatcttgtacactggaagtaccggcgtgggaaaaatcattatgaccgctgcagcaaaacatctcactcctgttacgttggagttggggggcaaatctccctgttatgtggacaaaaattgtgacttagacgtggcctgcaggcgcatagcatgggggaaatttatgaacagcggacagacatgcgttgcccccgattacattctctgcgacccctccatccagaaccagatcgtcgaaaaactgaagaaatcactcaaagaattttatggtgaagacgcgaagaagagccgcgactacggcaggattataagtgcccgccacttccagagggtcatggggttgatcgaaggccaaaaagtagcttatggtggcactggcgacgccgccacacggtatatagcacctacgatccttaccgatgtagatccacaatccccggtcatgcaggaggagatcttcggccctgtgttgcccatcgtctgtgttaggtccctggaagaagctattcagttcatcaaccagcgcgaaaagcccctggctttgtatatgttcagctcaaatgataaatag

SEQ ID NO: 107818 - DNA, 1362 bp, synthetic construct
  misc_feature 1..1362: note = Description of Artificial Sequence: Synthetic coding sequence
  source 1..1362: mol_type = other DNA
atgtcaaagatctctgaggctgtcaaacgagcccgcgcggcatttagtagtggtcggacgagaccattgcagtttcgaatccaacaactggaggccctccagcgcttgatacaagagcaagagcaggagctggtaggcgcactggcagcggacctgcacaagaacgagtggaatgcctattatgaggaagtggtgtacgtgttggaggagattgagtatatgatccagaaactgccagaatgggccgcagatgagcccgtagagaagaccccacaaacccagcaggatgagctatatatccattccgaaccattgggcgtcgtgttagtaatcggtacctggaattacccttttaatctgacaatccagcccatggtaggggctatcgcagctggcaatagtgtggttttgaagccttcggagttgtcagagaatatggccagcctgttggctaccattatcccacagtatctggataaagacctgtatccagttattaacgggggtgtacccgagacaaccgagctcctcaaggaacggtttgaccacattctctatacgggctccacaggggtggggaagatcatcatgactgcggccgctaaacatcttactccagtgacactagagctgggtggcaagagtccctgctacgtggacaagaattgcgatctagatgtcgcatgtaggcggatcgcctggggcaaattcatgaatagcggccagacgtgtgtggcacccgattatatcctgtgcgatcctagtatccagaatcaaatcgtagagaaattgaagaaatccctgaaggaattctacggcgaggatgcgaagaagtctcgggactacgggcgaatcatctccgccaggcactttcagcgtgtgatgggcctgatcgagggacaaaaggtggcatacgggggtacaggcgatgcagctactcggtacattgcacctaccatcctcacagacgtcgatccgcaatccccggtgatgcaagaggagattttcgggcctgtgctgcctattgtgtgtgttcgctccctcgaagaggctatccagttcatcaatcagcgcgagaagcctctggccctgtatatgttcagttctaacgacaaagtaataaaaaaaatgatcgccgagacctctagcggaggggtagccgcaaacgatgtgattgtccatataactctgcattccctcccctttgggggtgtcggaaatagcggcatgggaagctaccacgggaaaaagtcctttgaaacattttcgcacagacgcagctgtctggtgagaccactgatgaatgacgaaggtttaaaggtgagatacccaccgtctccagctaagatgactcagcattag

SEQ ID NO: 107819 - DNA, 1362 bp, synthetic construct
  misc_feature 1..1362: note = Description of Artificial Sequence: Synthetic coding sequence
  source 1..1362: mol_type = other DNA
atgtccaagattagcgaggcggtgaaacgcgcccgcgcggcattcagtagcggccggactcgccctctgcagtttcgcatccagcagctcgaggccttgcaacgactcatacaagaacaagaacaagaactcgtgggagcgctggcagcagacctacataagaatgaatggaacgcttactacgaagaagtagtttatgtgcttgaggagattgagtatatgatccaaaagcttccagagtgggcggcagacgaacctgtcgagaagacccctcagactcagcaggatgagttgtacattcattccgagccattgggggtagtcctggttatcgggacatggaactacccatttaacctgacgatccagccgatggtgggtgccattgccgcgggcaactcagtcgtccttaagccctccgaactgtctgagaatatggcatccctgctggccaccattataccccagtacctggataaagatctataccctgttatcaacggcggtgtccctgaaactaccgagctgcttaaggagaggttcgatcacatcttgtatacaggatcaacgggcgtcgggaaaattattatgacggctgccgctaaacacctaacacctgttacattagagctcggaggaaagtccccatgctacgttgacaaaaactgcgacctcgacgtggcctgccgtcgaattgcttggggtaagttcatgaactccggccagacctgcgttgcccctgactacatcctttgcgatccatcgatccagaatcagatagtggagaaactaaaaaaaagtctgaaggaattttatggggaggacgccaaaaaatcccgcgactacggtcgaataatctccgcccgacactttcaacgggtcatggggctaatcgagggccagaaagtggcctatggcgggacaggtgatgccgctacacgctatatcgcccctaccatcctcacagatgttgatcctcagtcccccgtgatgcaggaggagatatttggtccagtcttgcccatagtgtgcgttcggtctttggaggaagctattcagttcataaaccagcgggaaaagccacttgccctgtacatgttcagttctaatgacaaagtcattaaaaagatgatcgcggagacttcctccgggggtgtcgcggccaacgacgtgattgtacatatcacactccactcccttcctttcggaggggtggggaactcagggatgggaagctatcacggaaagaagtcattcgagacattctcgcaccggcgcagctgtcttgtgagacctctcatgaacgatgaaggcctcaaagtacgatatccaccatcccccgcgaagatgacccagcactag

SEQ ID NO: 107820 - DNA, 1203 bp, synthetic construct
  misc_feature 1..1203: note = Description of Artificial Sequence: Synthetic coding sequence
  source 1..1203: mol_type = other DNA
atgatccagaagttacccgaatgggcagcagatgagcctgttgaaaagacacctcagacacaacaggacgaactgtacatccacagcgagccacttggcgtggtgctagtgatcggtacatggaactaccctttcaacttgacgattcagccgatggtaggcgcaatagctgccggcaacagtgttgtactgaagccaagcgaactgtccgagaatatggcgtctctactagcaacaatcatccctcagtaccttgataaagacctctaccccgtcattaatggcggtgtccccgagacaaccgaactcctaaaggagcggttcgatcacattttgtatactggaagtacaggggttggcaagatcattatgacagccgcagcaaagcacctaacacctgtgaccttggagctcggaggcaagagcccctgctatgtcgacaagaattgtgacttggacgtggcgtgtcgcagaatcgcctggggtaagttcatgaattctgggcagacgtgtgtcgcgccagactatattctgtgcgacccatctatccaaaaccaaattgtggagaagcttaagaaatctcttaaggagttctatggggaggacgccaaaaagtctcgggattatgggcgcataatcagcgctcgccattttcagcgggtgatgggtttaatcgaaggacagaaagtagcgtacggagggacaggcgatgctgctactagatacattgcaccaaccatcttaactgatgtggatccccagagccctgttatgcaggaagagatcttcgggccagtactaccaatcgtttgcgtgaggagcctcgaagaggctattcagtttattaatcagagagagaaaccactcgcactctatatgttcagcagtaacgacaaagtgatcaaaaaaatgatcgcagaaacatcaagtggaggtgtggccgcaaatgacgtaattgtgcacataacactccacagtttgccttttggcggtgtcggcaactctggcatgggcagttaccacggaaaaaagagttttgagactttcagtcacagacggtcctgcctggtgcggcctctgatgaacgatgaggggctaaaggtgcggtatcccccctcccccgccaaaatgacccagcattggctttcttggccctgggaaaaccggtcttgttccccttcccctgctcccctgctctgttag

SEQ ID NO: 107821 - DNA, 1458 bp, synthetic construct
  misc_feature 1..1458: note = Description of Artificial Sequence: Synthetic coding sequence
  source 1..1458: mol_type = other DNA
atggaactggaggtgagaagagtccgacaggcgttcctttccggccgcagcagacccctgcgctttcgacttcagcagctggaagccctccgaaggatggtgcaggagagggagaaggacatcctcaccgctatagctgcagatctttgcaaatctgaatttaatgtgtattcacaagaagtgatcacagttttgggggagatcgacttcatgctcgaaaacttgcccgagtgggtgacagcgaaaccagtgaaaaagaacgtgctcaccatgttagatgaggcatacatccagccccagccactgggggtggttctgatcattggagcctggaactatcctttcgtgcttactattcaaccgcttatcggtgccattgccgccggaaatgctgttataattaagccctctgagctttcggagaatacagccaagatcctggccaagttgttaccacagtaccttgaccaggatctttatatcgtgatcaacggaggggtggaggagaccactgagcttctaaaacagcggtttgaccacatcttctataccgggaacactgctgtgggcaagatcgttatggaagccgccgctaagcaccttacccccgttactctggagctcggaggaaaatcaccttgttatattgataaagactgtgaccttgacattgtctgcaggcgtatcacttgggggaaatatatgaattgtggccagacgtgcatcgcccctgactacatcctgtgtgaggccagcctccagaatcagattgtgtggaagatcaaggaaacagtgaaggagttttatggtgaaaatatcaaagagtcccccgactatgagaggatcatcaacctgaggcattttaaacggatcctgtctttactggaaggacaaaaaatagcatttggcggcgagacggacgaagcgacccgatatatcgctccaacagtgctgacagatgttgatcccaagacaaaggttatgcaagaggagatcttcggccctatcctgcccattgtacccgtgaagaatgtagatgaagcgatcaattttataaacgagcgggaaaaaccccttgccctctatgtgttcagccataatcacaaactgataaagcggatgattgacgagacgtccagcggcggcgttactggcaacgatgtaattatgcactttaccctgaactcctttccttttggcggcgttggttcctcaggaatgggtgcctatcacggcaaacactctttcgacacctttagccaccaacgcccttgtctactgaaaagcctaaagagagaaggggctaacaaactcaggtacccacctaatagccagtcaaaagtggactggggcaagttcttcctactgaaaagatttaacaaagaaaagttgggcctgctgttactgacattcctaggcatcgtcgcagcagtgctcgtgaaggcagaatactactag

SEQ ID NO: 107822 - DNA, 1527 bp, synthetic construct
  misc_feature 1..1527: note = Description of Artificial Sequence: Synthetic coding sequence
  source 1..1527: mol_type = other DNA
atggaacttgaagtccgacgagttcggcaagccttcctgtccggcagatctagaccccttaggttccgcttacagcaactggaggccctgcgcagaatggttcaggagcgggagaaagacattctcacggcgattgccgccgacctgtgcaaatcggagtttaacgtgtactctcaggaggtgattactgtcttaggcgagattgacttcatgcttgagaacttgccagaatgggttacagccaagcccgttaaaaagaatgtgctcacaatgctcgatgaagcctatattcaaccccagcccctcggagtggtgctgatcataggggcttggaactaccccttcgttctgacgattcagccactcatcggcgccatcgctgctggcaatgccgtgataattaagcctagtgaactcagtgagaatactgccaagatcttggccaagctgctcccccagtacctggatcaggacctctatatcgtgatcaacggtggagtggaggaaacaaccgagcttctcaagcagcgctttgaccacattttttacacaggaaatacggctgtagggaagatagtcatggaggctgctgctaagcatttgacaccagtcacactggaattgggaggcaaatcaccttgctacattgacaaagattgcgacctcgacattgtctgccgaagaattacatggggaaagtacatgaactgtggtcaaacctgcatcgcccccgattacatcctgtgcgaggcctccctgcagaaccagattgtgtggaagattaaagagaccgtgaaagagttttatggggaaaatatcaaagagagccctgattacgagagaataatcaacctgaggcacttcaagcggatcctctcactgctggagggacagaagatcgccttcgggggggaaacagatgaagcaacacgctacatagcacccactgttctaacggatgtggacccaaagactaaggtcatgcaggaggagatatttggcccgatactgcctatagttccagttaagaacgtggacgaggctattaatttcatcaacgagcgcgaaaagcccctcgctctatatgtgttttcgcataaccataaactcattaaaagaatgattgacgaaaccagctctggaggagtgactgggaacgatgtcattatgcatttcactctcaatagcttccctttcgggggagtcgggtcttctggcatgggcgcatatcacgggaagcattcattcgacactttctcccaccagcgtccttgtctgctgaagagcttgaaacgtgaaggagccaacaaactgcgatatccccctaatagccagagtaaagtagattgggggaagttttttctcctgaagagattcaacaaggaaaaacttggtctgctcctgttaactttcctgggcatagtggctgccgtgttagtgaagaaatatcaagcagtgctcaggagaaaagctctgctgatcttcctcgtggtgcaccgtctccgctggtcaagtaaacaaagatag

SEQ ID NO: 107823 - DNA, 1458 bp, synthetic construct
  misc_feature 1..1458: note = Description of Artificial Sequence: Synthetic coding sequence
  source 1..1458: mol_type = other DNA
atggagttggaagtccggagagtccgccaggcattcctgtcaggtcgatcaaggccgttacgcttcaggctgcagcagttggaagcacttcgaaggatggtccaggagcgggagaaggatatcctgacagctatagcggccgacctctgtaagtccgagttcaacgtgtattcccaagaagtgattaccgtgctgggggaaatcgattttatgctcgaaaacctgcccgagtgggtgaccgccaaaccggtcaagaaaaatgtcttaaccatgctggacgaagcctatattcagccccagcccctcggcgtggtgctcattattggcgcttggaattacccattcgtcctgacaatccaacccctgatcggagcgatagccgcggggaacgcagttataatcaaaccgtccgagctgtcggaaaatacggccaagattctcgctaaactgcttcctcagtacctggaccaagacctctacattgtcattaacgggggggtggaggagaccactgagctgcttaaacagcggttcgatcacattttttatactggaaatactgccgtgggtaaaatagtcatggaagcagctgccaagcacctgacacccgttacactagaactgggtgggaaaagcccatgttacatcgataaggattgtgatctggacatcgtttgcaggagaatcacatggggtaaatatatgaattgcggacagacatgcatcgccccggattacatcctgtgcgaggcgtctctacagaatcaaatcgtgtggaagattaaagagacagtgaaggaattttatggggaaaacatcaaagaatcccctgattacgaacggatcattaaccttagacatttcaagcgcatcctatctcttctggagggtcaaaaaattgcgttcgggggagaaacagacgaagccacacgctacatcgcacccactgttttgaccgatgtagaccctaagacaaaggtgatgcaagaggaaatctttgggccaatcctgccaatcgtgccggtcaaaaacgtcgacgaagctattaactttattaacgagcgggagaaacccctggccctgtatgtttttagtcacaatcataaactcattaagcggatgattgatgaaacctccagcggaggtgtgaccgggaatgatgtgatcatgcattttaccctgaactcctttccctttgggggagttggatcatcgggcatgggagcttatcacgggaagcattctttcgacacattcagccaccagagaccgtgcttactaaaatcacttaagcgtgaaggagcgaacaaactgaggtacccccccaatagtcagtctaaggttgattggggtaagtttttcctcctgaagcgattcaacaaggaaaagctgggcctgctgctactaacttttttaggcatcgtcgccgccgtcctggtcaaggccgagtattattag

SEQ ID NO: 107824 - DNA, 501 bp, synthetic construct
  misc_feature 1..501: note = Description of Artificial Sequence: Synthetic coding sequence
  source 1..501: mol_type = other DNA
atggagctagaggtaaggcgggtccggcaggcctttctcagtggaaggagcagacctctgcgcttcaggctgcagcaattggaagccctgcgaagaatggttcaggagcgagaaaaagacatccttacagctattgccgccgacctctgcaagtccgagtttaacgtgtactcccaagaggtgattactgtgctcggcgagattgacttcatgttggagaatttgccagaatgggtgaccgccaagccagtcaagaaaaacgtcctcaccatgctggatgaagcctacatccaaccccagccgctaggggttgtgttgattataggggcttggaactacccatttgtgctaacaattcaaccgctaatcggcgccattgctgcagggaacgccgtgatcattaagccgtctgaactttccgagaatacggctaagatcctggcaaagctactaccacagtacctggaccaagacctatacatagttatcaacggagggtag

SEQ ID NO: 107825 - DNA, 1158 bp, synthetic construct
  misc_feature 1..1158: note = Description of Artificial Sequence: Synthetic coding sequence
  source 1..1158: mol_type = other DNA
atgaaagacgaacccaggagcaccaatttattcatgaagctggatagcgtgtttatctggaaggagccttttggactcgtcttgataatcgccccctggaattaccctcttaatctgacactggtgctgctggtaggagccctcgcggctggctcttgtgtggttctcaaaccatccgagatcagccaggggactgagaaggtactggcagaggtgctcccacagtatctcgatcaaagctgcttcgccgtcgtgctagggggcccacaggagactggccagctcctagagcacaagctggattacatcttctttacagggtcaccacgcgtcggaaagatcgtaatgacagctgctacaaagcatttaacaccagtgacactcgagttaggaggaaagaacccttgttatgtggatgacaattgtgatcctcaaaccgtggcgaacagggtggcgtggttttgctactttaatgccggccagacatgcgtggccccagactacgttctgtgttcacctgagatgcaggagcgattgctcccagctctgcagagcacaataactcgattctacggcgacgacccccagtcaagtcccaatttgggacatatcatcaaccagaagcagttccaaagactccgcgccctgctggggtgtagtcgggtggccatcggcgggcagagcaacgagagcgatcgatacattgcccccaccgtgctggtggatgtccaggaaaccgagcccgtgatgcaggaagagatttttggtccaattcttcccatcgtgaatgtgcaaagcgtcgatgaagctattaaattcatcaaccgacaagagaaacctctcgcgctgtacgctttctctaactcaagtcaggtcgttaaccaaatgctagaaaggactagcagcgggtcatttggcgggaatgagggatttacttatatcagcctcctttcagtaccgttcggaggcgtcggtcacagcggtatgggaagatatcatgggaagtttacgttcgataccttttctcatcaccgaacctgcctgcttgctccttcaggtctggagaagctaaaagagattcactaccccccctacaccgactggaatcaacagctcttaagatgggggatgggctcccagtcgtgtactctgctgtag

SEQ ID NO: 107826 - DNA, 447 bp, synthetic construct
  misc_feature 1..447: note = Description of Artificial Sequence: Synthetic coding sequence
  source 1..447: mol_type = other DNA
atgaaggacgagcctcgaagcaccaacttgtttatgaagcttgattcagtcttcatttggaaggaacctttcggcctcgtgctgattattgccccatggaactaccctctcaatctgacactcgtcttactggtcggcgctttagcagcagggtcctgtgtggtactaaagccaagtgagatctcgcaaggcacagagaaggtcctcgctgaggtcttgccacagtacctcgaccaatcctgctttgccgtcgtcctcggcggaccacaagaaaccgggcaactgctggagcataagctcgactacatcttcttcacaggatccccccgggtcggcaaaatcgtgatgactgcagccacaaagcatctcacgcccgtgaccctggagctagggggcaagaacccgtgctatgtggacgacaattgtgatccccagacagtggcgtag

SEQ ID NO: 107827 - DNA, 288 bp, synthetic construct
  misc_feature 1..288: note = Description of Artificial Sequence: Synthetic coding sequence
  source 1..288: mol_type = other DNA
atgaaagatgaacctagatcgacaaatctctttatgaaattggactccgtatttatttggaaagagccgttcggactggtgctgatcattgccccctggaactacccactgaacctgaccctagtattgctggtgggggctctggctgccggcagctgcgtggtgttaaagccaagcgaaatctcacagggcactgaaaaagtcctggcagaggtactaccgcagtatttggaccagtcatgtttcgctgttgtactgggcggtcctcaggagaccgggcagctttag

SEQ ID NO: 107828 - DNA, 1158 bp, synthetic construct
  misc_feature 1..1158: note = Description of Artificial Sequence: Synthetic coding sequence
  source 1..1158: mol_type = other DNA
atgaaagatgaaccccgcagtaccaacctttttatgaagctggacagcgtctttatttggaaggagcccttcggactggtgctcataatagccccatggaactacccactgaacttgacattagtgctattggtgggcgctctcgccgctggaagttgcgtggtactgaagccgtccgagatttcccagggaactgaaaaggtgcttgccgaagtgctgcctcagtacttggatcagtcttgtttcgctgtcgtgctgggcgggccgcaggagaccggccagctgcttgagcataaattggattacatatttttcaccggtagtcctagggtaggcaaaatcgttatgaccgccgctacaaaacacctcactcccgtcacactggagctaggtggtaaaaacccgtgctacgtggatgataactgcgatccccagaccgtagccaaccgcgtcgcatggttctgctacttcaacgccggccagacgtgcgtggctccagattacgttctgtgctctccagaaatgcaggagcggttgctgcccgcactgcaatcaacaattacgcggttttacggggacgacccccagtcgagcccaaatcttggccatattatcaatcagaagcagtttcagcgcctaagggcgctgctgggatgctcgcgggtggcaattggtggtcagtctaacgaatccgatagatacatcgcccccaccgttttggtggacgtacaggagacggaaccagtaatgcaagaggaaattttcggtccaatcctgccaatcgtgaatgtgcagtctgttgacgaagccataaaatttatcaacagacaggaaaagccactggcattgtacgccttttccaacagtagccaggtggtgaatcagatgctggagaggaccagttcaggatcatttggcggtaacgaaggattcacctatatttcactactaagtgtgccttttgggggcgtcggccattctggtatgggcagatatcacggcaaatttacattcgacacattcagtcaccaccgaacttgcctccttgccccgtcaggacttgaaaaattgaaggagatccactatcctccgtacacagattggaaccaacaactgctgcgatgggggatgggctcccagtcttgcactctgttgtag

SEQ ID NO: 107829 - DNA, 1692 bp, synthetic construct
  misc_feature 1..1692: note = Description of Artificial Sequence: Synthetic coding sequence
  source 1..1692: mol_type = other DNA
atgttgctaccagcgcccgcactccgaagggcattgctctcacggccgtggaccggtgcgggtctgcggtggaagcatacttcttctctgaaggtggctaatgagccagtgttagccttcacccaggggagtccagaacgcgacgctctccagaaagccctgaaagacttgaaaggaaggatggaggcaattccctgcgtggtgggcgatgaggaggtgtggacatccgacgttcaataccaggtgagccctttcaaccacggccataaagtggcgaaattctgttacgccgacaagtccctgctgaacaaagctatcgaagcagcactcgcagcccgcaaagaatgggacctgaagcccatcgccgatcgagcgcagatattcctcaaggcagcagacatgctgtcaggcccccgccgtgcagaaatactggccaaaacaatggttggccaagggaagaccgttatacaagcagaaattgatgccgcagcggaactcatagatttcttcagattcaatgcaaaatatgccgtggagctggagggccaacagcccattagcgtgcccccttctaccaactccaccgtttatagaggcttggagggattcgtggccgccatctcgccattcaacttcaccgctattggtggcaatctggccggcgctccagcactgatgggcaacgtcgtactgtggaagccctcagacaccgccatgcttgcatcgtacgccgtttaccgcattttgagggaagcagggttgccgccgaatataatacagtttgtgcccgcagatggacctctttttggagatacagttacatcttctgagcacctttgcggaattaattttaccggctcagtgcccacgtttaaacatttatggaaacaggtggcccagaacctcgatcgatttcacacattcccacggctggccggtgagtgtggaggaaagaacttccattttgtgcaccggagcgctgacgtcgaaagtgtggtgagcgggactctgcggagcgcattcgagtacggggggcagaagtgtagtgcctgttcgcgcctgtacgtgcctcattctttgtggccccagatcaagggccgtctgctagaggagcattctcgtattaaagtgggagaccccgctgaggactttggaaccttctttagtgctgtgattgatgctaaaagctttgccaggattaagaagtggctggagcatgctaggagtagccctagtctgactatcctggctggcggaaaatgcgatgatagcgtcggatacttcgtggaaccgtgtatcgtggagtcaaaggacccccaagaaccaattatgaaggaagagatctttggtcctgtgctgtctgtatacgtctacccggacgataaatataaagagacactgcaactcgtagactcaactacatcctatggattgaccggggccgtctttagccaggacaaggacgtggtacaggaggctacaaaagtcctgcgcaacgcagctggcaatttttacataaacgacaaatccacaggctcaatagttgggcagcagccattcgggggggcacgggctagcgggaccaatgacaaacccggaggacctcactacattctgaggtggacttctccccaggtcatcaaggaaacacataaacctctgggcgattggtcctacgcctacatgcagtag

SEQ ID NO: 107830 - DNA, 588 bp, synthetic construct
  misc_feature 1..588: note = Description of Artificial Sequence: Synthetic coding sequence
  source 1..588: mol_type = other DNA
atggaggctataccgtgcgtggttggagacgaagaggtttggacgagtgatgtacagtaccaggtcagccccttcaatcatggccacaaggtggctaaattctgttacgccgataagtcactcctgaataaggcgatcgaagctgccctggcggctcgtaaggagtgggacctgaagcccattgccgatcgtgcccagatttttctaaaagccgctgacatgctctccggtcctcgccgggcagagatacttgccaaaactatggtgggtcagggcaagaccgtcatacaggctgagattgatgcggccgcagaattaatcgatttctttcgcttcaacgctaaatatgccgtggagctggaaggacagcagccaatcagtgtgcccccttcaaccaacagcactgtttataggggccttgagggattcgtggccgctattagcccattcaattttaccgctattggtggtaacctggccggggctccagcccttatgctgcgtgagggggtggtgacactgcctttatgccagatgacaaaattgaggcacaccgctgtgacatatcttgcaagactctccgactag

SEQ ID NO: 107831 - DNA, 633 bp, synthetic construct
  misc_feature 1..633: note = Description of Artificial Sequence: Synthetic coding sequence
  source 1..633: mol_type = other DNA
atgttgctgccagcacctgccctacgcagagcacttctgtctaggccatggaccggggccggtcttcgctggaagcacacctcatccctcaaagtagccaacgaaccggttctggcctttacccaggggtcgcccgagcgagatgcgctgcagaaggctttgaaggatctcaaaggaaggatggaggcgatcccttgcgtcgtcggggatgaagaagtgtggacaagcgatgtgcaataccaagtgtcatcccttttgaataaggcaattgaggcggccctagccgcccgcaaggaatgggaccttaagccaatagcagacagagcgcagatatttctgaaggctgcagacatgctgagcggacctcgccgcgccgaaatcctcgccaagaccatggtgggacaggggaaaacagtgatccaagcagaaatcgacgccgcagctgaattgatcgacttctttcggtttaatgcaaagtacgccgtggaattagagggacaacagccaattagtgtgccaccaagcaccaacagtacagtgtacagaggtcttgagggtttcgtagcggcaatatctccattcaacttcactgccatcggcggtaacctcgccggggcaccagcgctgatgtag

SEQ ID NO: 107832 - DNA, 1692 bp, synthetic construct
  misc_feature 1..1692: note = Description of Artificial Sequence: Synthetic coding sequence
  source 1..1692: mol_type = other DNA
atgttgttaccggcaccagcgctgcgccgtgcgctcctttccaggccatggacgggcgccggccttaggtggaaacatacctcctcattgaaggtagcaaacgagccggtgttagcatttacacaaggcagccccgagcgtgacgctctccaaaaagctttaaaagatctgaaaggtaggatggaggccattccctgcgtagttggcgacgaggaggtgtggacatcagatgtccagtatcaggtaagccccttcaaccacgggcacaaagttgctaaattttgctacgctgataagtcactgctgaataaagccattgaagctgccctggctgcccgtaaagagtgggacttgaagccaattgccgatcgagcgcagattttcctcaaggccgccgacatgctctcagggccccggcgggcggagatactcgccaagacaatggtaggccagggcaagacagtgattcaggccgaaatcgacgccgccgcagaactgatagatttctttaggtttaacgccaaatatgccgttgagctggagggccagcagcctatatcagtgcctccctcaacgaattccacagtgtacagaggcctggaaggattcgtcgctgccatcagcccattcaattttacagccatcggggggaacctggccggagctccggccctgatgggcaacgtggtactgtggaagccctcagacacagctatgctcgcctcctatgcagtctatcgtatcctgcgcgaggctggccttcccccgaatattatacagtttgtgccagctgacggcccactgttcggtgacacagtgacatcatcagagcatctgtgcggcataaatttcaccggaagcgtaccaacatttaaacacctgtggaagcaagtggcccagaatcttgaccgattccatacatttcccaggcttgccggtgaatgcgggggaaagaactttcacttcgtgcatcggtccgccgacgtggagagcgtcgtgtcaggcactctgagaagtgcctttgagtacggtggacagaagtgctcagcttgcagccggctctatgtgccgcactctctctggcctcaaatcaaaggccgtctcctggaagagcacagccgcatcaaggtgggagacccagccgaagactttggcacctttttctccgccgtcatagatgctaaatcattcgcgagaattaaaaagtggctggagcacgcaaggtcatctccctctctgaccattctggctggcggcaaatgcgacgatagtgttggctactttgtggaaccatgtattgttgagagcaaggacccccaagaaccgattatgaaagaggaaatcttcggacccgtcctcagtgtctacgtgtaccctgatgacaagtacaaagaaactctccaactggttgattccaccacttcatacggattgaccggcgccgttttctcacaggataaggatgtcgtccaggaagctaccaaagtgctcagaaatgccgctggaaatttttatatcaatgacaaaagcactggcagcatcgtgggtcagcagccttttggcggagctagagcctcgggcacaaatgataaaccaggcggtccacattatatcctgagatggacttcgccccaggtgattaaggagacacataagccgctgggggattggagttacgcgtatatgcagtag

SEQ ID NO: 107833 - DNA, 645 bp, synthetic construct
  misc_feature 1..645: note = Description of Artificial Sequence: Synthetic coding sequence
  source 1..645: mol_type = other DNA
atgcttcttccggctcctgctcttcgccgcgctctgctttccagaccctggaccggagcaggcttaagatggaagcacacaagctcacttaaggtggccaatgagccggtgctagcattcactcagggaagccccgagagggacgcgctccagaaggctctgaaggatcttaaaggaagaatggaggccatcccgtgcgtggtgggcgatgaagaggtctggacatcagacgtgcagtaccaggtgtctagcctcctgaacaaggctattgaggccgccctcgctgcgaggaaggaatgggacctgaaacccattgccgaccgcgcccagatctttctcaaggccgcagatatgctgagcgggcctcggagagcagaaattctcgccaagacaatggtcggacaaggtaaaacggtcatccaggctgagattgacgctgctgcggaactcatcgatttcttccgtttcaatgccaaatacgcagtggaactcgaaggccagcagccgatctccgtcccaccctctacaaattcgacagtctacagggggttggaaggcttcgtggctgccatatccccttttaactttactgccattggaggaaatctcgcaggtgcccccgcactcatggttcggtgtgggtag

SEQ ID NO: 107834 - DNA, 462 bp, synthetic construct
  misc_feature 1..462: note = Description of Artificial Sequence: Synthetic coding sequence
  source 1..462: mol_type = other DNA
aacaaggcaattgaggcggccctagcggcccgaaaagagtgggacttgaaaccaatcgctgatcgggcgcaaatcttcttaaaggcagctgacatgttgagtggacccaggcgcgcggagattctggccaaaacaatggtcggccaaggtaagacggtgattcaggcggaaatagacgctgctgctgaacttatcgacttcttccggtttaatgcaaagtacgcagtggagcttgaggggcagcagcctatttccgttccaccttccacgaattcaacagtttaccgggggcttgagggcttcgttgccgcaatatcaccctttaacttcacagccatcggcggaaacttggccggcgctccagccctgatgctccgcgaaggagttgtcaccttgcctctgtgccaaatgactaagttacggcacaccgccgttacatatctcgcacgcctgtcagattag

SEQ ID NO: 107835 - DNA, 1512 bp, synthetic construct
  misc_feature 1..1512: note = Description of Artificial Sequence: Synthetic coding sequence
  source 1..1512: mol_type = other DNA
atggaggctatcccatgtgttgtaggtgatgaggaagtttggacatctgacgtgcagtatcaggtctcccccttcaatcacggccacaaagttgcaaagttttgttacgccgataaaagccttctgaacaaggccatagaagccgccctggctgccaggaaagagtgggacttgaagcctatcgccgaccgagctcagatattcctgaaagctgccgacatgttgagcggcccacggagagccgagattctggccaagaccatggtgggtcaggggaaaactgtgatccaggctgaaattgatgccgcggccgagctaatcgatttctttcggtttaacgctaagtatgccgtggaactggagggccagcagcccatctctgtaccaccaagcaccaactctaccgtgtatagaggactggaggggtttgtggccgctatctcgccctttaactttaccgcaattggcggaaacttagctggggcacctgccttaatgggaaacgtggtcctatggaagccatctgacactgctatgctggcatcttacgcggtctatagaatactgagggaggctggcctgccaccaaatattatacagtttgttcccgccgatggccccttgttcggggatactgtaacttcaagtgaacatctgtgcggaattaacttcaccgggtccgtgcccacattcaagcacctgtggaagcaagtcgcacagaatttggatcgattccacacatttccgagactggccggcgagtgcgggggcaaaaatttccatttcgtccacagatcggccgatgtcgaatccgttgtgtctgggaccctcagatccgcctttgagtacggaggccagaagtgttccgcttgctccaggctatacgtgccgcactcactttggcctcagataaaagggagattgctcgaagaacattctcgaattaaagtgggtgaccccgccgaagactttggtactttcttcagcgcagtaattgatgcaaaatcattcgctcgaatcaagaaatggctggagcacgcacggagctcgcctagtctgactattctcgccggaggaaaatgcgacgacagtgttggctatttcgtcgaaccctgcatcgtggaaagtaaggatccgcaagagcctataatgaaggaggagatcttcggacccgttctctccgtttacgtataccctgacgacaaatacaaggaaacacttcagctggtggactcaacaacctcttatgggctgactggcgcggtattctcgcaggacaaagacgttgtacaagaggccaccaaggtactgcgaaatgctgctggcaatttttacattaatgacaaaagcactgggagcatcgttggacaacaaccttttggtggcgcccgcgcatccgggaccaacgataagcctgggggtccccattatatccttcgttggaccagcccccaagtgattaaggagactcataagcctctgggcgattggtcgtatgcttacatgcagtag

SEQ ID NO: 107836 - DNA, 1539 bp, synthetic construct
  misc_feature 1..1539: note = Description of Artificial Sequence: Synthetic coding sequence
  source 1..1539: mol_type = other DNA
atgctgttgccagcccccgccctgcgcagggctctgctcagcagaccgtggaccggagccggtttgcggtggaaacacacttcctccttgaaagtggctaacgagcccgtcctcgcgtttacccaggggagccccgaacgcgacgccttgcaaaaagccctgaaggacctcaaagggcgcatggaagccataccttgcgttgtgggcgacgaggaagtgtggacttcggacgtgcagtatcaggtaagcccgttcaaccacgggcataaggtcgccaaattctgctacgccgacaaaagcttactgaacaaagccattgaagcggctctggcagcgcgcaaggagtgggacttgaagcccatagctgacagggcccagatttttctgaaagcagccgacatgctgtcaggaccgcggcgcgccgagatcctcgcgaagacaatggtgggccaaggtaagactgtgatccaggctgagatagacgctgccgccgagctgatcgacttcttccgatttaacgctaaatacgccgtggagctggagggccaacagcctataagtgtgcctccgtctactaacagcacagtgtacaggggattggagggttttgtcgcagccataagtccttttaacttcaccgcaatcggcgggaacctagctggagcccccgcgctgatgggtaatgtggtgctttggaagccctcggacactgctatgctggccagctacgccgtgtaccgcatcttaagggaggccgggctacctccgaatataattcaatttgtgccagcagacggccccctgtttggggatactgtgactagctctgaacacctatgtggcatcaacttcaccgggtcagtgccaaccttcaaacacctgtggaaacaggtggctcagaacctggataggttccatacctttccgcgcctggcaggtgagtgcggcggaaagaatttccattttgtccatagaagtgcagacgttgagagcgtcgtcagcggcactctgcgctccgccttcgagtacggaggtcagaagtgctcggcttgttccaggctctacgtaccccactcgctctggcctcagattaagggacggctcctagaagagcatagtcgcatcaaggtcggagaccccgcagaggactttggtactttcttttccgccgtgattgatgcaaaggaaatttttggacccgtgctctcagtgtatgtttacccagacgacaaatacaaagagaccctccagttggtcgatagcacaacgtcatacggactgaccggagccgtattttcccaggacaaagacgttgtgcaagaagcaacaaaggtcttgcggaatgcagccgggaatttctacataaacgacaaatcaaccggcagcattgtgggtcagcagccctttgggggggcccgggcgtcaggaactaacgacaagccaggcgggccccactacatcttgcgatggaccagtccccaggtcatcaaagagacacataaacccctgggcgactggagctacgcttatatgcagtag

SEQ ID NO: 107837 - DNA, 1647 bp, synthetic construct
  misc_feature 1..1647: note = Description of Artificial Sequence: Synthetic coding sequence
  source 1..1647: mol_type = other DNA
atggctacatgcatttggctgagatcctgcggtgcccggcgcctcgggtcaacattccccgggtgtcgactacgaccgagagcaggtggacttgtccctgcctcgggacctgcccctggtcccgctcaactgagatgttatgctggacgcctggccggactgagcgccgccctactgcgtacggattcattcgtgggtgggcggtggttgcccgccgcagccactttcccagttcaagatccagcctctggagcagcactgggtatggtggccgactgcggcgtccgggaagcaagagccgcagtccgggccgcctacgaggcgttttgtcgctggagggaagtatccgctaaagagcggagctcgctgctgcgcaagtggtataatctgatgattcaaaacaaggatgatctggcaagaatcattaccgctgaatcgggaaagccccttaaagaggctcatggtgagatcctttactccgctttcttcctagagtggttcagcgaagaggccagacgcgtgtatggtgatattatccacacccctgccaaagacaggcgcgccctggtgctgaagcagcctatcggcgtcgcagcggtgattacaccctggaattttccttccgcgatgattacccggaaggttggtgcggccctcgcagccgggtgcactgtcgtggtgaaacctgccgaagacactcctttttccgcgttggccctagcagaggttaaccaaggattcctgttggacctcgacccccttttacttgcctcccaggctggcataccttccggagtgtacaatgtaataccctgtagtcggaagaatgcaaaagaagtgggcgaggccatatgcaccgatcctctcgtcagtaaaatttcgtttacaggctcaacaacgactggaaaaattctgctgcatcatgccgcaaactctgttaagcgggttagtatggagctggggggcttagccccctttattgtgtttgactctgccaacgttgaccaagctgtggctggcgctatggcatccaagttccgaaatactggccagacatgcgtctgcagcaatcaattcttggtgcagcgaggcatccatgatgctttcgtgaaagcatttgccgaagctatgaagaagaatctgcgagtgggaaacggcttcgaggaggggaccacacagggccctctgattaatgagaaggcggttgagaaagtagagaagcaagttaacgacgccgtctccaagggggcgacagtcgtcacaggggggaaacgccatcaactaggcaagaacttctttgagcctaccttgctctgcaacgtgactcaggatatgttatgtacacacgaagaaacttttggtcctctcgccccagttatcaaattcgatacagaagaggaagcaatagccatagctaacgcagcggatgttggactggccggatatttttactcccaggaccctgcacagatctggcgcgtagccgagcagcttgaggttggtatggtgggtgttaatgagggactgatcagttcagtcgagtgccctttcgggggagtgaaacaaagcggcctggggagagagggttcaaagtacggaatcgatgagtacttggaactgaaatatgtatgttatggaggattgtag

SEQ ID NO: 107838 - DNA, 1608 bp, synthetic construct
  misc_feature 1..1608: note = Description of Artificial Sequence: Synthetic coding sequence
  source 1..1608: mol_type = other DNA
atggcaacctgcatatggctccgatcctgtggagcacgaaggctcggctcaacctttcctggctgtcgtctaagaccgagagccggggggcttgtgcctgcaagtgggccggccccggggcctgcacagctcagatgctatgctggcagactggcagggctcagcgctgcccttctgaggacagatagcttcgtgggtggacgctggctccctgctgcagccacatttccagtccaggatcctgcctccggtgcagcactggggatggtggccgattgcggagttcgggaagctagggcagcagttcgggccgcctatgaagctttctgccgttggcgcgaagtgtccgctaaggaaagatcatctctgctgagaaaatggtacaatttgatgatccaaaataaagatgatctggctcggatcatcaccgccgagagcgggaagccgctgaaagaagctcacggggaaatcctgtacagtgctttctttcttgagtggttcagcgaagaggcaaggagggtgtatggtgatattatccacaccccagccaaggatcggagggcactcgtcctgaagcagccaatcggggtcgccgccgttatcaccccgtggaacttccccagcgcaatgatcacgcggaaagttggggccgccttggcagccggctgcacagtggtggtgaagccagcagaggatacaccattttctgcactcgctctggcggaattggcctctcaagctgggataccatctggagtctacaacgtgatcccatgctcgcggaagaatgccaaagaggtcggagaggctatttgcacagacccgttggtatctaagatctccttcactggaagcactaccacagggaagattctgcttcaccatgcagcaaacagcgtgaagagagtgtccatggagcttggtggtctggccccctttatcgtgttcgatagtgctaacgtggaccaggctgtcgccggcgccatggccagtaagttccggaacacaggacagacctgtgtgtgctctaaccagttcctggtgcagaggggcatccatgatgctttcgttaaggccttcgctgaggccatgaaaaaaaatcttcgggtgggtaacggatttgaagaaggcaccacacagggacccctcatcaacgaaaaggcagtcgagaaggtagagaagcaagttaatgacgcagtttcgaagggggctactgttgtcaccggcggcaagaggcatcagctggggaaaaacttttttgaacccacactcctctgcaatgtcacccaagacatgctgtgtacgcacgaagagaccttcggtcccttggcccccgtgattaagtttgatacagaggaagaggccatcgctatcgctaatgctgccgatgtggggctagccgggtacttctattcacaggatcctgcccaaatttggcgagtagcggagcagctcgaagtcgggatggtaggcgtcaatgagggactgatcagtagcgtggaatgtcccttcgggggagtcaagcagtccggcttgggccgggaaggatcgaagtatggcattgatgagtatcttgagctgaaatatgtttgctacggaggcctctag

SEQ ID NO: 107839 - DNA, 1344 bp, synthetic construct
  misc_feature 1..1344: note = Description of Artificial Sequence: Synthetic coding sequence
  source 1..1344: mol_type = other DNA
atggtggcggattgcggggtcagggaagcgagagccgctgtgcgggcagcctatgaagcattttgtagatggagagaggtttccgccaaggagcgaagctccctcctcaggaagtggtacaacctcatgattcagaataaggacgatctggcaaggataattactgctgagtcagggaaacctttaaaagaagcccacggcgaaattctgtacagtgcctttttcctcgagtggttctccgaggaagcccgcagagtgtatggcgatattatccacactcccgcaaaagatcggagagcactggtcctgaaacagccaatcggggttgcagccgtcattaccccctggaactttccatcggccatgattactaggaaagtcggggctgctctggctgccggttgcacagtggtggttaagccggcagaggacacacccttctcagcgttggccctcgcagagctggctagtcaggcgggcataccatccggcgtgtacaacgttataccatgctccagaaaaaatgccaaggaggtgggggaggcaatctgcactgacccactagtatcgaagatttcctttacggggtctaccactaccgggaaaatactcctacatcatgccgctaatagtgtgaagcgggtctctatggaactcggtggcttagctcctttcattgtgtttgatagtgcaaacgtagaccaagccgtcgcgggtgcgatggccagtaaatttagaaatactggacaaacctgcgtgtgtagtaaccagttcctggtgcagcgagggatccacgacgcctttgtaaaagcatttgcagaagccatgaagaagaatctgcgagttggcaacggtttcgaggaggggactacacaagggcctctgattaatgagaaggccgtggagaaggtagaaaaacaggtgaacgacgctgtcagcaagggcgctaccgtagtgactggcgggaagagacaccagctggggaagaacttctttgagcccactttgctctgcaatgtcacgcaagacatgctttgcacgcacgaagagacattcgggccccttgcgcccgtgataaagttcgacacggaggaggaggctattgccattgctaacgcagcagacgtcggcttggcgggctacttctatagtcaggaccctgcccagatttggcgagttgccgagcaactggaagttggtatggtgggggtaaatgagggcctgatttccagtgtggaatgcccgttcggtggggtaaagcaaagtggactcggcagggagggaagcaagtatggtattgatgagtacctggaactcaaatacgtctgttacggagggttgtag

SEQ ID NO: 107840 - DNA, 1608 bp, synthetic construct
  misc_feature 1..1608: note = Description of Artificial Sequence: Synthetic coding sequence
  source 1..1608: mol_type = other DNA
atggccgctctcctcgcagctgcagcagtcagagcacgaattctccaggtatctagtaaagtgaaaagttctcccacttggtactccgcctcctctttcagctctagtgttcccaccgtgaagttgtttattggaggcaaattcgtagagagcaagtccgacaagtggatcgacatccacaatcccgctacgaatgaagttattggccgcgtgccacaggcgacaaaggctgaaatggatgccgccattgcttcttgcaaacgcgctttccccgcctgggccgatacgtccgtactcagtcggcagcaggttctgctccggtaccagcagctcattaaagaaaacctgaaggagattgcaaagctgattactctggagcaaggtaaaacactggcagacgctgagggagacgtgtttagggggctacaggtggtagaacatgcctgctcagtgacgtcactgatgatgggcgaaaccatgcctagtattactaaagatatggacctctatagctataggctgccactaggagtgtgtgccggcatcgcgccgtttaattttccggcaatgattcccctttggatgttccctatggctatggtctgcgggaacaccttcctgatgaagccctcagagcgcgtgcccggtgccactatgcttctcgccaagctgcttcaagattctggtgcgccagatggcacactgaatatcatccatggacagcacgaagccgtaaactttatttgcgaccacccagacattaaggccatttcttttgtgggctctaacaaggcaggagaatatatctttgaaaggggaagcagacacggcaaaagggtacaggcgaatatgggagccaagaaccacggggttgtgatgccagatgctaataaagaaaatactctgaatcagctcgtcggggctgccttcggagcagcagggcagcgctgcatggctctctctaccgcagtgttagtaggcgaggccaaaaagtggcttccggaactagtagaacatgcaaaaaatctccgcgtcaatgctggagatcaacccggcgccgacctcggcccgcttatcacaccacaggctaaggaacgagtatgcaaccttatcgacagcgggacgaaagagggggcctctatcctgctcgatggcaggaagattaaggtgaaggggtatgagaacggtaatttcgttggccctacaatcatttctaacgtaaagcccaatatgacctgttacaaagaggagatttttgggcctgtgctggtcgtgcttgagaccgaaacactggacgaagcaatccaaatcgtgaataacaacccttacggcaatggcaccgccatattcacgaccaacggcgctaccgctcgtaagtatgcccatcttgtcgacgtgggacaggtgggcgtcaacgtaccaatccccgtgccacttccaatgtttagttttaccggcagccggagctcgtttcggggggacacaaacttttacggcaagcaggggatccaattctacacccaactgaagacaatcacgagccagtggaaggaggaagatgccactctctcatctcccgcagtggttatgccgacaatgggcagatag

SEQ ID NO: 107841 - DNA, 1620 bp, synthetic construct
  misc_feature 1..1620: note = Description of Artificial Sequence: Synthetic coding sequence
  source 1..1620: mol_type = other DNA
atgtggcgattgcctcgtgccttgtgcgtccacgctgcaaaaaccagcaagctgtctggcccctggtccaggccagccgcgttcatgagcactctgctgattaatcagccgcagtatgcctggctgaaagagctggggctgagggaagaaaatgaaggcgtgtataatggaagctggggcggccgaggcgaagtaatcaccacctactgcccagcaaacaacgagcccatcgcccgggttaggcaggcctctgttgcagactacgaggaaactgtcaagaaggctcgcgaagcctggaagatctgggccgatattccagcgccgaagaggggcgagattgttcgccagatcggcgatgctctgagggagaagattcaagtgctcggatcactggtcagcctggagatggggaagatcctggtagagggagtcggcgaggtgcaggaatacgtggacatctgcgattacgccgttggactgtctcgtatgattggcgggcccatcctccccagcgagcgcagcggccatgcccttatcgagcagtggaaccctgtgggcctcgtcggcatcataaccgctttcaactttccagttgcggtctatgggtggaacaacgctatcgcaatgatttgcggtaatgtgtgtctatggaagggcgcccccaccacctcactgattagcgtggccgtaacgaaaatcatcgcgaaagtactcgaggataataagcttcccggagcaatttgtagtctaacctgtggtggggctgacataggcaccgctatggccaaggacgagcgtgtgaatctcttgtctttcacaggatctactcaggtggggaagcaggttgggttgatggtacaggagagattcggtaggtccctcctggaactcggtggaaataatgccatcatagcctttgaggacgctgatcttagcctggtcgtgccatcagcactgttcgccgccgtgggtactgctggacagcggtgtaccaccgcccgccgcctctttatacacgagtcgatccacgatgaagttgtgaacaggttgaaaaaagcttacgctcagattagagtggggaacccgtgggaccctaatgtgctgtacggacccctgcacactaagcaggctgtcagtatgtttttgggtgcagtcgaggaggctaaaaaggagggagggacagtggtgtacggaggtaaggtcatggatcgacccggcaattacgtggagccgactattgtgactgggcttggtcacgatgcgtcaatcgctcatactgagacttttgccccgattctctatgttttcaagttcaagaatgaagaggaggtctttgcgtggaataacgaagtgaaacaagggctttctagttccattttcacaaaagacttgggtagaatctttaggtggctcggtccaaagggaagcgattgcggaattgtaaacgtcaacattcccacctctggcgcggaaatcggcggagccttcggcggggaaaagcataccggagggggaagagaaagcggaagtgacgcctggaaacagtacatgaggcgctccacatgcactataaattattctaaagatctccctctcgcacagggcataaagtttcagtag

SEQ ID NO: 107842 - DNA, 1044 bp, synthetic construct
  misc_feature 1..1044: note = Description of Artificial Sequence: Synthetic coding sequence
  source 1..1044: mol_type = other DNA
atgtggagactgccccgcgcattatgtgtacatgccgccaaaacatctaagctctctggcccttggagccggcctgctgcattcatgagtacctctctgatatctgttgcggtgactaagataattgctaaagtgctagaagacaataagctccccggagccatctgctccctcacatgcggcggtgctgatattggcaccgctatggccaaagacgagcgcgtgaatctgctgagcttcacaggctcgactcaggtgggcaagcaggttgggctcatggtccaggagcgtttcggtagatctttgttagagctgggcggcaataacgctattattgcatttgaggatgctgacttgtccctagtggtcccgtcagcactcttcgccgccgtgggcacagcaggccagagatgcacaacagctcggcggctatttattcacgaatccattcatgatgaagtcgtaaatcgcttgaagaaagcctatgctcagattcgggtgggaaacccatgggacccaaatgttctctatggccctctccacaccaagcaagccgtctcgatgttcctcggggccgtggaagaggctaaaaaagagggtggtacggtcgtctacggcggtaaagtcatggaccgcccaggtaactacgtggagcccactattgttactggtctggggcacgatgccagcatcgcgcatacagagacattcgccccaattctgtacgtcttcaagtttaagaacgaagaagaggtcttcgcttggaacaacgaggtcaagcagggccttagctcgtcgatttttacaaaagacctaggccgaatttttcgatggctcggcccaaaggggagcgactgcggaatcgtgaatgttaacattccaactagcggcgctgagataggcggggcgtttggcggtgaaaagcataccggaggcggtcgggagtccggctctgatgcctggaagcaatatatgagacggtctacttgtaccattaattattccaaagacctgccgttggctcaggggattaaattccagtag

SEQ ID NO: 107843 - DNA, 1509 bp, synthetic construct
  misc_feature 1..1509: note = Description of Artificial Sequence: Synthetic coding sequence
  source 1..1509: mol_type = other DNA
atgggctccccaggtcgtggagctgggctgtatttttccagttcgcagggcttggggctcatcccgtccccgggactgagcatgtggaggctgccccgagccttgtgcgttcacgctgcaaagactagcaaactgtccgggccttggagccgtcccgccgcatttatgtcaacgcttctgatcaaccagccccaatatgcttggctcaaggaactggggctcagggaggaaaatgagggagtctataacggatcttggggcggaaggggggaggttataactacctactgtcctgccaacaatgagcctatcgctagagtacgacaagctagcgtggcagactacgaggagaccgttaagaaggccagggaggcctggaagatttgggctgacatccctgctcctaagagaggagaaatagttcggcagattggagatgccctcagggaaaaaattcaggtcttaggtagtctagtctcactggaaatgggaaagattcttgtggaaggcgtgggcgaagtgcaagagtacgttgacatatgcgattacgcagtcggcctgagccggatgatcggcgggcccatactcccaagcgagagatcaggtcatgccctaattgagcaatggaacccagtggggctggtcggtatcatcacagccttcaacttccccgtagctgtctacggctggaacaacgctatcgccatgatttgcggtaacgtgtgcctgtggaaaggggcgccaaccacttcattgatcagcgtcgccgtaactaagatcattgccaaggtgctggaggacaacaagttaccaggggctatctgttcccttacatgcggcggcgcggacataggcactgcaatggctaaagacgaaagagtaaacctgctttcatttaccggttccacacaggtgggcaagcaggtaggcctcatggtgcaggagagatttggccggtctctgctggagctaggaggcaacaatgccatcattgcgttcgaagacgcagatctttctctggtggtgccttctgctctcttcgcagccgtgggaaccgccgggcagagatgcacaacagctcggcgtctcgtgatggatagaccggggaactatgtggaacccacgatagtgaccggtttaggtcacgacgcgtcaatcgcgcataccgaaaccttcgcacctatactgtacgtgtttaagttcaaaaacgaagaggaagttttcgcctggaataacgaggtgaagcagggcttaagcagcagcatattcacaaaggacctgggcaggatctttcggtggctgggtcctaagggctccgactgtggaatcgtgaacgtcaacattccaaccagtggggcagagatagggggcgccttcggaggcgagaagcataccggaggtggcagagagtccgggtcggacgcctggaaacaatacatgcgtcgaagtacatgcactatcaactacagcaaggaccttcccttggctcagggtataaaatttcagtag

SEQ ID NO: 107844 - DNA, 1314 bp, synthetic construct
  misc_feature 1..1314: note = Description of Artificial Sequence: Synthetic coding sequence
  source 1..1314: mol_type = other DNA
atggcgggaaccaacgccctgctgatgctggagaactttatagacggaaagtttctgccatgctcatcctacatcgacagctatgacccttcaactggcgaggtttactgccgcgtgcccaacagcgggaaggacgagatcgaggcagctgtcaaggcagcgagggaggccttcccttcctggtcttcccgctctccgcaagagcgatcacgtgtgttaaaccaagtggccgacctgctggagcaatctttggaggagtttgctcaggctgagtcaaaggaccaaggaaaaacacttgctctcgctaggactatggacatcccgcgatctgtgcagaacttccgattcttcgcaagctcttctttgcaccatacaagcgagtgcacacagatggaccatctcgggtgtatgcattatacagtgagggctcccgtcggtgttggggtcccacctggggttgtaaacatcgtgttcggtactggcccgcgagtgggagaggcactggttagccaccccgaagtccccttaatctcctttactgggtcacagccaactgcggagaggattacgcaattgagcgcaccccactgtaagaagctgtctctggagcttggcggaaaaaatcccgctatcatatttgaagacgctaacctggatgaatgcattccggccacagtccggtcatcatttgctaaccagggggaaatctgcttatgcacgtcacgcatcttcgtgcaaaaaagtatttacagcgagtttttgaagcgttttgttgaggcaactagaaagtggaaggtgggaattcctagcgaccctctcgtgtctattggtgcattgatcagcaaggcccacctggagaaggtaagatcttatgtgaaacgagcactagccgaaggtgcccagatctggtgtggagagggggtcgacaagttgtctctacctgcaaggaaccaggccggctattttatgttgcccactgtgatcactgacatcaaagacgaatcttgctgcatgaccgaggaaattttcggtcctgtgacgtgcgtcgtcccattcgatagtgaggaagaggtgatagagcgagctaacaatgtcaaatacggactagctgccaccgtgtggagttctaacgtcggacgtgtgcatcgtgtggccaagaagctgcaaagcggtctggtttggacaaactgctggttaatccgcgagttaaatctccccttcggagggatgaagtcaagcgggattggtcgagagggagccaaggacagttacgatttttttaccgaaatcaaaaccattaccgtaaagcactag

SEQ ID NO: 107845 - DNA, 1464 bp, synthetic construct
  misc_feature 1..1464: note = Description of Artificial Sequence: Synthetic coding sequence
  source 1..1464: mol_type = other DNA
atggccggaactaatgccctgctgatgttggagaatttcatagatggaaaattcctcccttgtagctcttatatcgattcctacgatccctccacaggtgaagtgtactgtcgagtgcccaacagcggtaaagatgagattgaggcggccgttaaggctgctcgggaggctttcccatcatggtcttcacgatcacctcaggagagatcaagggtgctgaaccaagtagcggacctcctggagcagtctctcgaggagttcgctcaagcagaatcaaaagatcagggcaaaaccctggctctggccaggacaatggacatcccccgtagtgttcagaattttagattcttcgcctcaagcagcctgcatcacacgtctgagtgcacccaaatggatcatcttggatgtatgcattataccgtgcgagcacctgtcggagtggccggattgatttcgccttggaacctcccactatacctgctgacttggaagattgcccccgccatggccgcaggcaatactgtgatcgccaagccatcagagttgacttctgttacagcctggatgctgtgcaaactcctcgataaggccggggtacctcctggagtggtgaacattgtcttcgggacaggcccacgcgtgggcgaagcgctagtgtcacacccggaagtgccgctcatctctttcactggaagccagccaacagccgaaagaatcacgcagctgtctgccccccattgcaagaaactgagcctggaactgggtggtaaaaatcctgccatcatatttgaagacgcaaacttagacgaatgcatcccagccacagtccgctcttcctttgccaatcagggagagatctgtctctgtaccagtaggattttcgtgcagaaatctatctattctgagtttttgaagagatttgtggaggcaactcgaaagtggaaggtaggaatacccagtgacccacttgttagcattggagcccttataagcaaggcgcacctggagaaagttcggtcctacgttaaacgggccttggcagaaggtgcccagatctggtgcggcgaaggcgtggataagttaagcctgcctgccaggaatcaggccggatacttcatgctgcctacagttataacagatatcaaggatgagagctgctgtatgactgaggagatttttgggcccgtcacctgtgtggtccccttcgactcggaagaagaggtgatcgagcgagcaaacaatgttaagtacggacttgctgctacggtctggtcctcaaacgtgggcagagttcaccgcgttgctaaaaaattgcagagcggccttgtttggactaattgttggcttatccgagagctcaacttgccatttgggggtatgaagagtagcggcatcggacgggaaggggctaaggactcatatgacttcttcaccgagattaagaccataaccgtaaagcattag

SEQ ID NO: 107846 - DNA, 1302 bp, synthetic construct
  misc_feature 1..1302: note = Description of Artificial Sequence: Synthetic coding sequence
  source 1..1302: mol_type = other DNA
atggctggaaccaacgcactgctgatgttagaaaatttcatcgacggcaaattcctgccgtgctccagctacattgactcatatgaccccagcacaggtgaagtctactgccgagttcccaattctggaaaagatgaaattgaggcagcagtgaaggcggctagagaagcctttcccagctggtcctctcggagcccacaggaaagatctcgagttctgaatcaggtggctgatctgctggagcaatccctggaagagtttgcacaggcagagtccaaggatcagggaaagacactggcactggcccgtacaatggacatcccacgatccgttcaaaattttcggttctttgcctcgagctcgctgcatcacaccagtgagtgcacacagatggaccatcttggctgtatgcactacacagtacgcgcccccgtcggggtagctggcctgatttccccttggaacctgcctctctacctcctcacgtggaaaatcgcgcctgcaatggccgcaggtaacacagtgattgctaagcctagcgaactgacaagtgtcacagcctggatgctttgtaaactgctcgataaggcaggggtgccccctggggtggttaatatcgtctttgggacaggccctagagtgggggaggccctcgtgtcccacccagaggtgcctctgatttctttcacaggctcgcaaccaacagcagagcgaatcacccagctgtctgccccccactgtaaaaaactgtccctggaacttggcggaaaaaatccggctatcatcttcgaggatgccaatctggatgaatgtatacctgccactgtacggagctcgtttgctaaccaggtgcgctcttacgttaaaagagccctggctgagggagctcagatttggtgcggggagggcgtagacaagctgtcattacccgcaagaaatcaggccgggtacttcatgctcccgaccgtcattacggatattaaggacgagagctgttgcatgactgaggaaattttcggtccggtgacctgcgtggtgccgtttgattctgaagaagaagtgatcgagcgcgcaaacaacgtcaagtatgggttggctgcaacagtctggagtagtaatgtcggccgagtgcatcgcgtcgccaaaaagctccagagtgggctcgtctggactaactgctggcttatccgagaactcaacctgccattcggggggatgaaatctagtgggatcggccgagagggggccaaagattcttacgatttcttcactgaaattaagaccatcacagtgaagcactag

SEQ ID NO: 107847 - DNA, 1557 bp, synthetic construct
  misc_feature 1..1557: note = Description of Artificial Sequence: Synthetic coding sequence
  source 1..1557: mol_type = other DNA
atgtttctacgggccgggttagctgcgctgagcccattgctgcggagcttgcggccatctccagtcgccgcgatgtctacggggaccttcgtggtgtcacagccccttaattatagaggaggcgctagagtggagccggcagacgcctccgggactgagaaggcgttcgagcccgctacagggcgggtgatcgcaacgttcacatgcagtggggaaaaggaagttaacctggcggttcagaatgcgaaagccgcttttaaaatttggtcccagaagtccggtatggagagatgcaggattctgttggaggccgccagaatcataagggagcgcgaggatgagatcgcaacaatggagtgtataaacaacggtaagagcatttttgaggcacggcttgatattgatatttcctggcagtgcctggagtattacgctggtttggctgcatcgatggccggcgagcatatccagctaccagggggcagttttggctacactcgccgggagccattaggggtttgtgtgggaatcggcgcttggaactatccatttcaaattgccagttggaagagcgccccggcactagcctgtggaaatgctatggtgtttaagccttccccgttcactccagtaagcgcactccttctggctgaaatttattctgaagcaggcgtgccacctggactctttaacgttgttcaaggcggagccgccaccggtcagtttctatgtcaacatccagacgtggctaaggtgtcatttaccggcagtgttccaaccgggatgaagattatggagatgtccgctaagggaatcaagccagtcactttggagctgggcgggaaatcccccctaataatttttagcgattgcgatatgaacaatgcggttaagggggcacttatggccaatttcttgactcaggggcaggtgtgctgcaacggtactagagtgtttgtccaaaaggagatcttggataagtttaccgaggaggtcgtgaaacagacacagcgcatcaaaatcggtgacccattgctcgaagatacaaggatgggacccctgataaacaggccccatttggagagggtgctcggcttcgtaaaagttgcaaaggaacaaggagccaaagttctttgcgggggggatatctatgtgccagaagaccccaagcttaaggacggctactacatgagaccctgtgtcctcactaactgtagagatgatatgacctgcgtgaaggaggagatatttggtcctgttatgtccatcctatcgttcgacactgaagcagaggtattggaacgggccaacgatacgacattcgggctggctgccggtgtttttacaagggatatccagcgtgctcacagggtggttgcagaattgcaggccggtacttgtttcattaacaattacaatgtgtcacccgttgagctccctttcggcggatacaagaagagcggattcggaagagagaatgggagagttacaatcgagtattatagccaactgaagactgtttgcgtcgagatgggcgacgtggagagcgcgttctag

SEQ ID NO: 107848 - DNA, 1275 bp, synthetic construct
  misc_feature 1..1275: note = Description of Artificial Sequence: Synthetic coding sequence
  source 1..1275: mol_type = other DNA
atggaaagatgtagaatcctgctggaagctgctcggataatcagggagcgcgaggacgagatcgcgacgatggagtgtattaataacgggaagagtatctttgaagcacggttggacatcgacatatcatggcaatgtctggagtattacgcgggcctggccgctagcatggccggcgaacatatacagcttccaggcggaagcttcggctacacccggagagagccattgggagtgtgcgtaggcataggtgcctggaactaccctttccagatcgcaagctggaagtccgccccggctctggcttgcggaaacgctatggtcttcaaaccctcccccttcactcctgtgtctgccctgcttctcgccgaaatctattccgaagctggcgtccctcctgggttattcaacgtggtgcaggggggcgcagccacaggtcagtttctttgtcagcatccagacgtagccaaagtgagctttactgggtccgtccctaccggaatgaaaatcatggagatgtctgcaaagggaatcaagccagtgacattagaactgggaggcaagagccccttgatcatttttagtgactgcgacatgaacaatgctgttaagggcgctctcatggctaacttcctgacccagggccaagtttgttgcaacggcaccagggtcttcgtccagaaggagatcctcgacaagttcactgaggaggtagttaagcagactcaacggattaaaataggcgatcctctgctagaggacacacgaatgggaccactcatcaatcgtccccaccttgagcgtgtactgggcttcgtcaaggttgctaaggaacagggggcgaaagtgttgtgcggaggtgacatttacgtgcccgaggatccaaaactaaaggacggttactacatgagaccctgcgtgcttaccaactgccgcgacgatatgacctgtgtgaaggaggagatcttcggccccgtgatgtctatcctctcttttgatactgaggccgaggtgctggagagagctaatgacaccacttttggtctggccgccggtgtgttcacccgtgatatacaaagggcccatagagtcgtggcagaactccaggccggtacctgctttataaacaattataacgtgtcaccagtagagctgcctttcgggggctataagaagagcggcttcggacgagagaacggtcgtgtaaccatcgagtattactcccagctgaagacagtgtgcgtcgagatgggcgacgtggagagtgccttttag

SEQ ID NO: 107849 - DNA, 4017 bp, synthetic construct
  misc_feature 1..4017: note = Description of Artificial Sequence: Synthetic coding sequence
  source 1..4017: mol_type = other DNA
atggacagggctagcgagctcctgttttatgtcaacggcaggaaggtgatagagaagaatgtggacccagaaaccatgctcctgccatacttacgtaagaaactccgcctgacagggacaaagtacgggtgcggcggaggcggatgcggcgcatgcaccgtcatgatctcgcggtataatccaatcactaagcggattcgtcaccatcccgctaacgcctgccttatccccatatgctccctctatggggccgccgtgactaccgtcgaggggattggatctacccacactcggatccatcctgtgcaggaaaggatcgcaaagtgccacggtactcagtgtgggttctgcactccaggaatggtgatgtctatctatacactgttgcgtaatcatcccgagccaacattggatcaacttactgacgcccttgggggcaatttgtgccggtgtaccggctaccggcccataattgacgcatgcaaaactttttgcaagactagcggctgctgccagtccaaggaaaatggcgtttgctgcctggaccagggcatcaacggtcttccggagtttgaggaagggagtaagacatcccctaaattattcgccgaagaagagttcctgcctttggaccccactcaggaactgatcttccctccggagcttatgattatggccgaaaagcagagtcagcgtacccgcgtttttggttctgagaggatgatgtggttctcacctgtcaccctgaaagaactgctcgagtttaagtttaaatatccccaggccccagtcatcatgggcaatacaagtgtgggcccagaagtcaaattcaaaggtgtgttccacccggtgatcatatcccccgatcgcatagaagagctcagcgttgtaaatcatgcatacaatgggctgaccttaggcgctggattatcattagcgcaggttaaggacatcctggctgatgtagttcagaaactgcctgaggagaagacccagatgtaccacgcgttgctgaagcacttggggactctagccggctcccagattagaaatatggcatccctgggtggtcatatcattagtaggcatcctgacagcgaccttaatcccattctcgcagtgggcaattgcacactcaacctgctgtccaaggaagggaagagacagatcccactgaacgaacagtttttgagtaaatgtccaaatgctgatctaaagcctcaagagatcctcgtttcagtgaacattccttactctcggaagtgggagttcgtgtcagcctttagacaggcgcagcgccaagaaaatgcactggccattgtcaacagcggtatgagggtcttcttcggagaaggggacggcatcatcagggagttgtgcattagttatggaggagtcggccccgcaacaatctgtgcgaagaactcttgtcagaagcttatcggccgccactggaacgagcagatgctcgacatcgcctgtcggctgatactcaatgaggtgtctctcctcggatccgctccggggggcaaggttgaattcaaacgtaccttgatcatttcatttctcttcaagttttatctggaagtttcacaaatcttgaagaagatggaccctgtgcattacccttcccttgccgataagtacgagtccgcactagaggaccttcacagtaagcatcactgttccactcttaagtaccaaaacattggccccaagcagcaccctgaagacccgattggacatcccatcatgcatctctcaggcgtgaaacacgcgaccggcgaagccatctattgtgatgatatgcccctcgtggaccaggaattgtttctgactttcgtcacgagttcccgggctcacgctaagatcgtgtccatcgatctgagcgaagccttgagtatgccaggcgtggtcgatataatgaccgccgagcatctgtcggacgtgaactctttttgcttttttacagaggctgagaaattccttgcaacggataaggtattctgtgtcggacagctagtttgcgccgtcctggccgatagcgaggttcaggctaaaagggcagcaaaacgtgttaagatcgtgtaccaagacctcgagcccctcattctaacgattgaagaatccattcaacacaactcgtctttcaagccggagcgaaagctggagtacggcaatgtcgacgaagcgttcaaggttgttgaccagattctggaaggagagatccacatgggtggccaagagcatttttatatggagacacaaagcatgctcgttgtaccgaagggagaagaccaggagatggatgtttatgtttctacacagtttccaaagtacatccaggacattgtcgcttcaaccttgaagcttcccgctaataaagtcatgtgtcacgtgcgccgcgtgggcggagcatttggggggaaagttctgaaaactggaatcatcgcggccgtcacagcgttcgcagccaataagcatggccgggcggttcgctgtgtgctggaacgaggcgaagacatgcttatcaccggcggtcgacacccctacctcgggaaatacaaggcaggatttatgaacgacggtcgtattctcgcgctggacatggagcactatagcaatgcaggggcgagcctggacgagagtttgttcgtgatcgaaatgggcctgcttaaaatggataacgcttataaattccccaacttgaggtgtcgcgggtgggcttgtcgcaccaatctgccatctaatacagcatttcggggtttcggatttccccaggccgccctgatcacggaaagttgtatcacagaggtggcggccaaatgcggactttccccagagaaggtccgcattataaatatgtataaggaaattgaccagacaccgtataaacaagagatcaatgcaaaaaatctcatccaatgctggagggagtgcatggccatgagctcttattccctccggaaggttgctgtggaaaagttcaacgccgagaattactggaagaagaagggactggcaatggtgcccctcaagtttcctgtgggccttggctctcgtgccgcagggcaagccgccgccctagtgcacatctatttagacggcagcgtgctcgtgacgcatggtggcatcgaaatgggtcaaggcgttcacactaagatgattcaagtcgtgtcacgggagctccgaatgcctatgagtaacgtccatttgcgcggtacctctactgagacggtccccaacgcaaatatatcaggaggtagtgtggtggctgatctcaatgggctggccgtgaaggatgcatgtcaaaccctgctgaagcggttggaaccgatcatcagcaaaaatccgaaagggacatggaaagactgggctcaaacagcttttgatgaatcaatcaacttatcagccgtagggtacttccggggctatgaatccgatatgaactgggaaaagggtgaaggccaaccatttgaatactttgtatacggtgctgcttgtagcgaggtggagattgactgcttgactggcgatcataagaacattaggaccgacattgtcatggacgtaggatgcagcatcaaccctgctatcgacatcggtcagattgagggagcctttatccagggcatgggtctatacaccatagaagagctgaactatagtccacaaggtatcctgcatacacgcggaccggaccagtacaagatccccgctatctgcgatatgcccacggaactgcatatagctttgctgccgcccagtcagaactctaacacactttattcatccaaagggctgggggaatccggagtgtttctgggatgctctgtgttcttcgcaatccatgatgctgtgagcgccgccaggcaggaaagagggctgcatgggccgctcactctgaactctcctttgacccccgaaaaaattcgcatggcgtgtgaagacaaatttactaaaatgataccccgcgatgaacctggtagctacgtaccatggaatgtgccaatctag

SEQ ID NO: 107850 - DNA, 456 bp, synthetic construct
  misc_feature 1..456: note = Description of Artificial Sequence: Synthetic coding sequence
  source 1..456: mol_type = other DNA
atgctcctcccgtatctgcgtaaaaagctgagacttactgggactaaatatggttgcggggggggcggctgcggcgcttgcacagtgatgatcagccgatataatcccatcactaaaagaattcgccaccatcctgcgaatgcctgcctgatcccgatttgctccctttacggcgctgccgtcacgaccgtcgaggggatcggtagtacgcatacccggatccaccccgtacaggaaaggatagctaagtgtcacggtacgcagtgtggattctgtaccccgggaatggtcatgtccatttatactcttctccgcaaccaccccgagcccacgctggatcagttgactgacgctcttgggggcaacctctgtaggtgcaccgggtaccggccgatcattgacgcctgtaaaactttctgtaagactagcggctgttgtcaaagtaaggaaaattag

SEQ ID NO: 107851 - DNA, 858 bp, synthetic construct
  misc_feature 1..858: note = Description of Artificial Sequence: Synthetic coding sequence
  source 1..858: mol_type = other DNA
atggacttatcagcagctagtcacagaattcctcttagtgacggaaattcgatcccgatcatcgggctgggaacatattctgagcctaagtcaacacctaagggagcgtgcgcaaccagtgtcaaggttgctatagatacagggtatcggcacattgatggcgcctacatttatcaaaacgaacacgaagttggagaagccattcgtgaaaagatagctgagggaaaagtgcgccgggaggacattttctattgcggaaagctgtgggcaacaaatcacgtgcccgagatggtccggcctacattagagagaacactgcgtgtgctccagctcgattacgttgatctgtatatcatcgaggtgcctatggccttcaagccaggcgacgaaatctatccccgagatgagaatggcaaatggctgtatcacaaatccaatctctgtgccacttgggaagtcgagtgccacccgtattttactcagcctaaactgctcaaattctgccaacagcacgatattgtgatcaccgcttattctcccctcggtacttctcgtaaccccatctgggtgaacgtgtccagccctccccttctgaaggatgccttactgaactcattgggcaagcggtataataagacagccgcacagatcgtgctgcggtttaacatccagaggggcgtcgtggtgatccccaagtcattcaacctggaacgaatcaaggagaatttccaaatttttgatttctctctaacagaggaggaaatgaaggatatcgaggccctgaataagaatgtcaggtttgtggagctgctaatgtggcgcgaccatccggagtacccattccacgacgagtactag

SEQ ID NO: 107852 - DNA, 873 bp, synthetic construct
  misc_feature 1..873: note = Description of Artificial Sequence: Synthetic coding sequence
  source 1..873: mol_type = other DNA
atggatttgagcgcagcctcccacaggattcccctcagcgacggaaatagcatccccattatcggtttgggcacctacagcgaaccgaagagtacccctaaaggagcgtgtgccaccagcgtcaaggtcgctatcgatactgggtaccgtcacatcgacggcgcatacatctaccagaacgaacacgaagttggcgaggccattcgggagaaaatcgctgagggcaaagtgcgccgcgaggacatattctattgtgggaaactatgggccaccaatcatgttcctgagatggtgcggcccactctggagcggactctgagagtgctgcaattagactacgttgacctgtatattatcgaagtacctatggcctttaaacccggagatgagatctaccccagagacgagaatggcaagtggctgtatcacaagagcaacctttgcgctacctgggaagccatggaagcttgtaaggatgccggtctggtcaaaagcctgggcgtttcaaacttcaacagacggcagcttgaactcatactgaataagcctggtcttaagcataagccagtaagtaatcaagtcgagtgtcatccgtacttcacacaacctaaactgttaaagttttgtcagcagcacgacatcgttatcaccgcctacagcccgctagggacatccaggaaccctatttgggtgaatgtgtcttccccacctctgttgaaggacgccttgttgaatagcctagggaagcggtataataaaacagctgcccagattgtcctgaggttcaatattcagcgcggggtcgtagtgattcctaaatctttcaaccttgagcggatcaaagagaactttcaggtggcacggtccagttag

SEQ ID NO: 107853 - DNA, 978 bp, synthetic construct
  misc_feature 1..978: note = Description of Artificial Sequence: Synthetic coding sequence
  source 1..978: mol_type = other DNA
atggccgctagctgcgtgctgctgcacaccggccagaaaatgcccttgattgggctggggacctggaaatcagagcccggccaggtgaaggcagcagtcaagtacgccctaagcgtgggatacaggcatattgattgcgctgccatttatggaaatgagccagagattggagaggcccttaaggaggatgtgggtcctggtaaggccgtccctcgggaggagttatttgtgacctcaaaactctggaataccaagcaccacccagaagacgtggaacccgccctgcggaagacactcgccgacttacagcttgagtatttggatctttacttgatgcactggccttatgcttttgagaggggagacaacccctttccaaagaacgccgatggaacaatctgttatgattcaacacactacaaagagacatggaaagcactagaggctctcgtcgcgaaagggctcgtccaggctctcggtttgagtaatttcaactcccgacaaatcgatgatattctgtcagttgcgtccgtgaggcctgccgtactgcaagtcgaatgtcatccatatctggcccagaacgagctaatcgcacattgtcaagcacgagggctggaggttacagcctattcccccctaggtagctccgaccgggcttggcgcgaccccgacgagcccgtgctactcgaggagcctgtggtgcttgcactcgccgaaaaatacggaaggagtcccgcccagatcttgcttcgttggcaggttcagcgaaaggtgatctgcattcccaaatcaatcacgccatcccggatcctgcagaatatcaaggttttcgacttcacattcagtccagaggagatgaagcagctgaacgcccttaacaaaaactggagatatattgtgcctatgctgaccgtcgacggcaagcgggttccgcgggatgccgggcatccattgtatcccttcaatgatccatattag

SEQ ID NO: 107854 - DNA, 978 bp, synthetic construct
  misc_feature 1..978: note = Description of Artificial Sequence: Synthetic coding sequence
  source 1..978: mol_type = other DNA
atggccgcttcttgcgtgttgttgcacaccgggcagaaaatgccactgatcggcttgggtacctggaagagcgagccaggccaagtaaaggcggctgtgaaatatgccctctccgtcggttatcgccacatagattgcgctgccatctacgggaacgagcccgagatcggcgaggcccttaaggaagatgtcgggcccggaaaagcagtccctcgggaggagctgtttgtgacttcaaagctgtggaataccaagcaccaccccgaagatgtggagccggccctgcgaaagactcttgctgatctgcagcttgaatatctcgatctgtatcttatgcattggccttacgcgtttgagagaggggacaatccatttcctaagaacgccgacggaacaatctgttacgattctacccattacaaggagacctggaaggcactggaggctctggtcgctaagggtctggtgcaagctctcggcctatcaaattttaactctagacagatcgatgacatcctgtccgtggctagcgtccgcccggcggttctccaggtggaatgtcacccatatcttgcccagaatgagctgatagcccactgccaagcacgtggactcgaggtcacagcctacagcccgttggggagctcagatagggcatggagagatcccgatgagcccgtccttctcgaagagccagtggttctggcactcgccgagaaatacggacgcagccctgcgcagatcctgctcaggtggcaggttcaacgcaaagtgatctgtattccgaagtcaataactccaagtcgcatccttcagaatatcaaagtttttgattttactttcagtccggaggagatgaaacaattgaacgctctaaataagaattggcgctacatagtaccaatgctgactgtggatggcaaacgagttccccgcgatgctggccatcccctttatccctttaatgatccttactag

SEQ ID NO: 107855 - DNA, 444 bp, synthetic construct
  misc_feature 1..444: note = Description of Artificial Sequence: Synthetic coding sequence
  source 1..444: mol_type = other DNA
atggccgctagttgcgtcctattacacacaggacagaagatgcccctgatcggtttaggtacatggaaaagtgagccaggtcaagttaaagctgctgtaaaatatgccctgtcagtggggtataggcatatagactgtgccgcaatctatggcaacgagcccgaaataggcgaagccctgaaggaggacgttgggccaggaaaggccgtacctcgggaggaactttttgttacatccaagctgtggaacacaaaacatcatccggaggatgttgaacccgccctgagaaaaacgctggccgacctccagctggaataccttgacttatacctgatgcactggccctacgccttcgaacgaggtgacaaccccttccctaaaaacgcagatggcacaatttgttacgatagcactcactataaagaaacctggaaggctctttag

SEQ ID NO: 107856 - DNA, 951 bp, synthetic construct
  misc_feature 1..951: note = Description of Artificial Sequence: Synthetic coding sequence
  source 1..951: mol_type = other DNA
atggccagtaggctgctcctgaacaacggagcaaagatgccaattctgggcctgggaacttggaaaagtcctccaggtcaggtgacggaggccgtgaaggttgccatcgacgtcggatatcgccatattgattgcgctcacgtgtaccaaaacgagaatgaagtaggagtcgccatacaggaaaagttgagggagcaggtcgttaagagggaagaactctttatcgtttctaagctgtggtgtacataccacgaaaaaggactagtgaaaggtgcttgtcagaaaactttaagtgacctgaaattggactacctggacctgtacctcatccactggcccactggattcaagcccggaaaagagttctttccacttgatgaatccggcaatgtcgtaccttccgacacgaatatcctcgacacgtgggctgctatggaggagcttgtcgacgaggggctcgtcaaagccattggtataagtaattttaaccatcttcaggtcgaaatgatactcaataagcccggactgaaatacaaacctgccgtcaaccaaatcgagtgtcatccttacctgactcaagaaaagctcattcagtactgccagtctaaaggcatcgtggttaccgcctattcgcctttgggttctccagaccgtccttgggctaagcctgaagacccatctcttctggaagaccctcgaattaaagccatcgcagctaaacataataagacaactgcgcaggtgcttattcgttttcccatgcagagaaacctcgtggttataccaaaatcagtcactcccgaaaggatcgccgagaacttcaaggtcttcgacttcgagctaagctcccaggacatgacaacgctcctgagctataaccggaattggagagtctgcgccctgctctcttgtacctcacacaaagactacccttttcacgaagagttctag

SEQ ID NO: 107857 - DNA, 618 bp, synthetic construct
  misc_feature 1..618: note = Description of Artificial Sequence: Synthetic coding sequence
  source 1..618: mol_type = other DNA
atgggtgttgtgtcgctattcttgtgcatcgttgagcagatctttacgagctccaagaaaatacagttcaggggtatattcatggctaaggtaccaaaatctaaagcgctcgaggccacaaagctggccattgaggcagggttcagacacattgactcagctcacttatataacaacgaggagcaggtaggcctcgcaatccgttccaaaattgcggatggttcagtcaagcgcgaggatattttttatactagtaaattgtggtgtaatagccataggccggaactggtgcgccccgccttggaacggagcctcaagaatctgcagctggattacgttgatctgtatctgattcacttccctgtgtctgtgaagcccggagaggaggtaataccgaaagacgaaaacggaaaaatcctgttcgatacggtggacctgtgtgcaacatgggaggctgtggaaaaatgcaaagatgccggattggcaaaatctattggagtgagtaactttaacagacggcagctggagatgatactcaataagcccggcctgaaatacaaaccagtttgtaatcaacctcgagacaacagcatattctccttgtccccagactggtag

SEQ ID NO: 107858 - DNA, 972 bp, synthetic construct
  misc_feature 1..972: note = Description of Artificial Sequence: Synthetic coding sequence
  source 1..972: mol_type = other DNA
atggattctaaataccagtgtgtgaagctgaacgatggacactttatgcctgtcctcggtttcggtacctacgctcctgcagaagtacctaaatctaaagccctagaagccacgaaactggccatcgaggctggctttagacacattgactccgcgcacctgtacaacaacgaggagcaggttggactagcaattcggtctaaaatagccgacggatctgtcaaacgggaagacatcttttatacttccaagctgtggtgtaacagtcaccgaccggaactggtgcgtcccgccttagaacggtcactgaaaaacctgcaactcgactacgtagacctgtacctgatacacttccctgtcagcgtgaagccaggagaagaggtgatcccgaaagacgaaaacggcaagatactgtttgacacggtcgacctatgcgcaacctgggaagccgtcgagaagtgtaaagatgctggtctagccaagtccatcggcgtttcgaacttcaacaggcgccaattggaaatgatattaaataagcctggtctcaagtataagcctgtgtgcaatcaagtggaatgccacccttactttaaccagcgcaagctgctggacttttgtaaatctaaggacatcgtgctggtcgcctatagtgctctcggctcacatagagaggagccttgggtggaccccaattccccagttctgctcgaggaccctgttctttgcgccctcgcgaaaaagcataaaaggaccccagctctgattgctctgcgatatcagcttcagcgcggggtggtcgtgctagcaaagagctacaatgaacagcggatccgacagaacgtgcaggtctttgaattccagctaacatccgaggagatgaaagcaatagatggactcaatcgcaatgtaagatacttgactctcgacatctttgcagggcccccaaactatccattcagcgacgagtactag

SEQ ID NO: 107859 - DNA, 972 bp, synthetic construct
  misc_feature 1..972: note = Description of Artificial Sequence: Synthetic coding sequence
  source 1..972: mol_type = other DNA
atggattccaaataccagtgtgtgaaattaaacgatggccacttcatgccagtcctcggctttggcacctacgctccagcagaagtgcctaagtcaaaggcgctggaagccaccaagttggcaatcgaggccggtttcagacacatcgactccgcccatctttacaacaatgaggaacaggtcggcctcgcaatcaggtctaagatagccgacggctccgtgaaaagagaagacatattctatacatctaaactgtggtgcaattcacaccgccccgaactcgttaggccagctctggaaaggagtttgaaaaatctgcaattagattatgtggatctttatctcattcactttccagtcagcgtgaaacctggggaggaggtcatccctaaagatgaaaatggaaagattctgtttgatactgttgatctgtgcgcgacttgggaagccgtggaaaagtgcaaagacgcaggcctcgccaaatctataggagtgtctaattttaataggcgccagctggagatgatcctcaacaaacccgggttgaaatataaaccagtgtgtaatcaggtagagtgccatccctacttcaatcagcggaagttactcgacttttgcaagtcaaaagacatcgtcctggtggcctattccgccctgggcagtcacagggaagagccatgggtggatcctaactcaccagtcttgctcgaggaccctgtcttgtgtgccctcgcaaaaaagcataaacgcactcccgctttaatcgctctaaggtatcagctgcagaggggggtggtcgttctagccaagagttacaacgaacagcgtatccggcagaatgtgcaggtatttgagtttcaactgacatcagaagaaatgaaagccatcgacgggctgaacagaaatgtgaggtacctgacccttgacatttttgccggaccacctaactaccccttcagcgacgaatactag

SEQ ID NO: 107860 - DNA, 747 bp, synthetic construct
  misc_feature 1..747: note = Description of Artificial Sequence: Synthetic coding sequence
  source 1..747: mol_type = other DNA
taatctaagtaccagtgcgttaagctaaacgatgggcacttcatgcctgtcctgggcttcggcacctacgcacccgccgaagtcggtctggcaattcgcagcaagattgcagatggctctgtcaagagagaagatatcttttacacttctaaactgtggtgtaactctcaccggcccgagctcgttcggcccgcactagaaaggtccctcaagaacctccaattggactacgttgatctctacctgattcattttcctgttagcgttaaacctggtgaagaagttatccctaaggacgagaatgggaaaattctgttcgacacggtcgacctgtgcgcaacatgggaggcagtagagaagtgcaaggacgctggcttggctaaatccattggggtttctaattttaatcgaagacagctagagatgatcctcaacaaacctggcctgaagtacaagcccgtgtgcaaccaggtggagtgtcacccctattttaaccagaggaagcttctggatttctgcaaatccaaagacatagtgctggtcgcctacagtgccctcgggagtcatagagaggagccctgggttgaccccaattcccctgtcctgctggaggaccccgtgctatgcgctttggctaaaaaacataagaggacacctgccctcattgcattacgatatcagctgcagagaggcgtcgtcgtcctggccaaatcctacaatgaacagcgaatccggcaaaacgtatag

SEQ ID NO: 107861 - DNA, 972 bp, synthetic construct
  misc_feature 1..972: note = Description of Artificial Sequence: Synthetic coding sequence
  source 1..972: mol_type = other DNA
atggatagcaaataccaatgtgttaaactgaacgacgggcacttcatgccagttcttggctttggtacatacgcgcccgctgaggtaccaaagtccaaagctctggaggcggtaaagcttgctatagaggccggattccatcacatcgattctgcacatgtgtacaacaacgaagagcaggtgggcctagccatccgtagcaagattgctgacggaagcgtgaaacgggaagacatattctacactagcaagttgtggtccaatagtcacaggccagaactggtccgcccagccctcgaacgctctctgaaaaacttgcagctggactatgtggacttgtaccttatccactttcctgttagcgtgaagcctggggaggaggtaataccaaaagatgagaatggtaagatcctgtttgataccgtcgatctgtgtgccacatgggaagcaatggagaagtgcaaggatgcaggactggctaagagcataggagtttctaacttcaaccacagactcctcgagatgattttgaacaaacccggcttaaaatataagccggtgtgcaatcaggtggagtgccacccttatttcaatcagcgaaagttactggatttctgcaaaagcaaagacatcgtccttgtcgcatattccgccctcgggtctcaccgtgaggagccctgggttgacccaaacagccccgtactgctggaggatcctgtcctgtgcgctttggccaagaagcataagagaacacccgcactgatcgcccttcgctaccagttacagaggggggtggttgtcctggccaagagctacaatgaacagcggatcagacagaacgtgcaggtctttgagttccagctgacaagtgaggaaatgaaggctattgatggcctcaatagaaatgtgcgttatctcactcttgacatcttcgctgggccaccaaactaccctttctcagatgagtactag

SEQ ID NO: 107862 - DNA, 972 bp, synthetic construct
  misc_feature 1..972: note = Description of Artificial Sequence: Synthetic coding sequence
  source 1..972: mol_type = other DNA
atggattcgaagtaccagtgtgttaaactgaatgacggtcatttcatgccagtgctgggcttcgggacctacgcccccgcggaggtgcccaaatccaaggcacttgaagccgtgaaactcgccatcgaagccggattccatcacattgattccgctcatgtttataataatgaggagcaagttggtctggcaattcgctcaaagatcgcggatggttcagtcaaacgggaagacatcttctatacaagtaaactttggagcaatagccatagaccagagctggtgcggcccgcactggaacgatctcttaagaatttgcagctagattacgtggacctgtacttgatccacttccctgtgtcggtgaaacctggggaggaggttatccccaaggacgaaaatggaaagattctgtttgacaccgtggacttgtgtgctacatgggaggcaatggaaaagtgcaaagacgccggcttagccaaatctatcggggtctctaatttcaaccatcggctgctggaaatgatcctcaataagcccggattgaaatataaacctgtgtgtaatcaggtggaatgccacccttatttcaaccaaagaaagctgctcgatttttgtaaatccaaggatatagtcctggttgcatacagtgcactgggctcccatcgcgaggaaccctgggtggatcccaattctccagttttgctcgaggacccggtactatgcgccctcgctaagaagcacaaaaggacccctgccctcatcgccctcaggtaccagctgcaacgcggagtggtggttctggcgaaatcctacaatgaacagaggattaggcagaatgttcaggtgtttgagttccagctgacttctgaggagatgaaagctatcgacggccttaacagaaacgtccggtacttgaccctggatatctttgccggccctccaaattacccgttctcggacgagtattag

SEQ ID NO: 107863 - DNA, 894 bp, synthetic construct
  misc_feature 1..894: note = Description of Artificial Sequence: Synthetic coding sequence
  source 1..894: mol_type = other DNA
atggacagtaaatatcagtgtgtcaagctgaatgatggccacttcatgccagtgctgggttttggcacgtatgcacctgccgaggtacctaaatcaaaggcccttgaagctgttaagctggccattgaggctgggttccaccacattgattctgcacacgtgtacaataacgaggaacaagtcgggttagcaatcaggagtaagattgctgacggcagcgtaaagcgagaagacatattttacacttccaaactgtggagcaactctcaccgacctgaactcgtccggcctgccctcgagagatctttgaaaaatctacagctggattatgtcgacctatacctgatccattttcctgtatcagtgaaggccatggaaaagtgcaaagatgccggactagccaaatctataggtgtctccaattttaaccaccgactcctggagatgatcctgaataagcccggactcaagtacaagcctgtctgtaatcaagtggagtgtcatccgtatttcaaccaaaggaagctgctggatttctgtaaatcgaaggatatagtgctggttgcctactcagcactgggatcgcatcgagaggagccctgggtggaccccaactcacctgtgctactggaggatcccgtcctgtgcgcgctggcaaaaaagcacaagcgaaccccagcactcatcgccctcaggtaccaattgcagcgtggggtggtggttctggctaaatcatacaacgaacagcgcattcgacagaatgtccaggtctttgagttccagctgacctccgaggaaatgaaagccattgatggccttaataggaacgtgaggtatctgacattggacatcttcgccgggccccctaattaccccttttccgacgaatactag

SEQ ID NO: 107864 - DNA, 420 bp, synthetic construct
  misc_feature 1..420: note = Description of Artificial Sequence: Synthetic coding sequence
  source 1..420: mol_type = other DNA
atggatagcaaatatcagtgcgtcaaattaaatgacggacactttatgcccgtcctaggcttcgggacatatgctcccgccgaagtgcctaagtctaaagcactcgaagctgtaaagttggcaatcgaagccggcttccatcatattgacagtgctcacgtctataacaacgaggaacaggtaggcctagcaatcaggtccaagattgctgatggctcagttaagcgtgaggatatcttctacactagtaagctgtggagcaatagccaccgtcccgagttggtgaggccagcactcgagagaagcctgaagaacctgcagctggattacgtggatctctacttgatccactttccagtgagcgtaaaagaagacatcggcatcttgacttggaaaaaatctccaaaacacaacagctag

SEQ ID NO: 107865 - DNA, 972 bp, synthetic construct
  misc_feature 1..972: note = Description of Artificial Sequence: Synthetic coding sequence
  source 1..972: mol_type = other DNA
atggattccaaacaccaatgcgtgaaacttaatgatggccactttatgccggtgctgggcttcggaacctatgcccctccagaggttcctcgctcaaaagcgctagaagtgacaaaactggctattgaagctggatttcgccacatcgattcagcacatctctacaacaatgaggagcaggtaggcctcgcgataaggtcaaagatcgcagacgggagcgtgaaacgagaagatattttctacacctcaaagctgtggagcacatttcatagacctgagttggtccgccccgccctcgaaaactcgctgaagaaagctcagctggactatgtcgacttatatttaatccattcacctatgtccttaaaacccggcgaggaactgtctccgactgacgagaacggcaaagtcatttttgatatcgtggatctgtgtaccacgtgggaagcaatggaaaaatgtaaggatgctgggctggctaagtccataggggtgtctaactttaataggaggcagctcgaaatgattctcaacaagccgggattaaaatacaagcccgtctgtaatcaggtcgaatgccatccatacttcaacagatccaaattactagatttttgcaaaagcaaggacattgtgttagtggcttattcagcgttgggaagccaaagagataaaagatgggtggatcccaattctccagtgttgctggaggacccagtgctgtgtgcacttgcaaaaaaacataaaaggacgcccgcactcatagctctgagataccagctacagcgcggcgtcgtggtcctggcgaagtcatacaatgaacagaggattcgccaaaatgtacaagtgtttgaattccagctcaccgcagaagatatgaaagcgatagacggcttggatagaaatctccattatttcaattcagactctttcgcttcccatcctaattacccgtattccgatgagtattag

SEQ ID NO: 107866 - DNA, 615 bp, synthetic construct
  misc_feature 1..615: note = Description of Artificial Sequence: Synthetic coding sequence
  source 1..615: mol_type = other DNA
atgtccttaaaacctggcgaagagctgagtcctacagatgagaatggcaaagtaatcttcgacattgtggacctctgcacaacctgggaagcaatggaaaagtgcaaagatgcgggtctcgccaagagcatcggggtgagtaacttcaaccgccggcagcttgagatgattttaaataagcctgggctcaagtacaagcccgtgtgcaaccaggtggaatgccacccatacttcaatcgcagcaaattgctggacttctgcaagtctaaggacatcgtgcttgtcgcttattcagcgctcggctcccagcgggacaagcgttgggtggatcctaatagccccgtgctcctcgaggatcccgtactgtgcgcccttgctaagaaacataagagaacccccgctctgatagctctgcggtaccagctacaaagaggtgtggttgtcttggccaaaagttacaatgagcagaggatcaggcagaatgttcaggtgtttgaattccagctgactgcggaagatatgaaggcaatcgacgggctggaccgtaatctccactattttaactctgacagctttgcatcgcaccctaactatccttacagcgacgagtactag

SEQ ID NO: 107867 - DNA, 972 bp, synthetic construct
  misc_feature 1..972: note = Description of Artificial Sequence: Synthetic coding sequence
  source 1..972: mol_type = other DNA
atggaccctaaataccaaagggtagaactgaatgatggacacttcatgccagttctcgggtttgggacctacgcccctcccgaggtccctcgaaaccgcgccgtagaggtcactaagctggccatcgaagccggcttccggcacattgacagtgcctacctctataacaacgaggagcaagtaggcctcgcaataagatccaaaatcgcagacggctctgtgaagcgtgaagatatcttctacactagcaagttgtggtgtacattcttccagccgcagatggtccagcccgcattggagagctctctgaagaagctgcagttagattacgtggatctctatctgctccatttcccgatggcgttgaagcccggagagacaccactgccaaaagatgagaacggaaaggtgatcttcgatacagtagatctgtctgcaacatgggaggttatggagaagtgcaaggatgcgggcctcgccaagtcaataggggtatctaactttaactgccggcagctggaaatgattctcaacaagccaggactgaagtacaagcctgtgtgcaatcaagtggagtgccatccctacctgaaccagtccaaactgctggatttctgcaaaagcaaggatatagtgttagtcgcacactctgcactcggaacacagcgacacaaattgtgggtggatcccaactcccctgtgttgctggaagatcccgtgctttgtgctcttgctaagaagcacaaacaaacgcccgccctgatagctctgaggtatcagctgcagcggggagttgtggtcctggccaagtcatacaatgagcagcgcatcagagaaaatattcaggttttcgaatttcagctgacatctgaggacatgaaagtgctcgacggactgaatcgcaattatcggtatgtagttatggactttcttatggaccatccggactacccattctccgatgagtactag

SEQ ID NO: 107868 - DNA, 972 bp, synthetic construct
  misc_feature 1..972: note = Description of Artificial Sequence: Synthetic coding sequence
  source 1..972: mol_type = other DNA
atggatcctaaataccaacgcgtggagttgaacgacggacatttcatgcccgttctcggcttcggtacttacgcaccccccgaagtcccccggaatagggccgtggaggttacgaagctggctattgaggccggatttcgccatatcgattctgcctacctctacaataacgaggagcaggttggtctggctattcgtagcaagatcgccgatggatctgtgaaacgagaagacatcttctacacctccaagctgtggtgcactttcttccagccacagatggtacagccagccctggagtcttctctgaagaagctgcagctggactacgtggacctgtatctgctccatttccctatggctctgaagccaggcgaaacgccgctacccaaagatgagaacggaaaagtgatattcgatacggtagacctgagtgctacttgggaagtgatggaaaaatgtaaagacgcaggattggctaagtcaattggggtgagtaacttcaactgtcgccagttagaaatgatcttgaacaaaccaggactgaagtataagcccgtctgtaaccaagtcgagtgtcatccttatctcaatcaaagcaagctcctggacttttgcaagagcaaagatatagtactcgtcgcccactccgcattggggacacagcgtcacaaactgtgggtggaccccaatagtcctgtcttactcgaggatccagtgttgtgcgcccttgccaagaaacacaaacagactcctgcccttattgccctgcgctaccaactgcagcggggagtggtggtgttggccaagagctataacgaacagagaatccgggagaacatccaggtcttcgagttccagctgacatccgaggatatgaaagtactcgacggactcaaccgtaactatcgctacgtagtaatggattttctaatggatcacccagactatcccttttcagacgagtattag

SEQ ID NO: 107869 - DNA, 381 bp, synthetic construct
  misc_feature 1..381: note = Description of Artificial Sequence: Synthetic coding sequence
  source 1..381: mol_type = other DNA
atggatcccaaataccagcgggtcgagctgaatgacggtcactttatgcctgtgctcggctttggcacctacgcaccacccgaggtccctagaaatcgtgcagttgaggttaccaagctggccattgaagcggggtttcggcacatcgactccgcatacctgtacaacaatgaggaacaggttgggctcgctatccgctccaagatcgccgatggctccgtgaaacgtgaggacattttctatacgagcaagctctggtgcacctttttccagccccagatggtgcaaccagctttagaaagtagtctcaagaagctccagctggattatgtggatctgtacttgctgcattttcctatggctctgaaaagtacaacctag

SEQ ID NO: 107870 - DNA, 981 bp, synthetic construct
  misc_feature 1..981: note = Description of Artificial Sequence: Synthetic coding sequence
  source 1..981: mol_type = other DNA
atggacctaagcgcagcaagccataggatccctttgtctgacggaaactccatccccatcatcggactgggcacatactcggagcctaagtccacacccaagggtgcttgcgccacatccgtgaaagtggcgattgacacgggttacagacacatagacggcgcatacatctaccagaacgagcatgaggtgggtgaagcaatccgcgagaagatcgcagaaggaaaggtgcggcgggaagacatcttctattgtgggaagctttgggctactaatcacgtgcccgaaatggttcggccaaccctcgagagaacactgcgtgtactgcagttggattacgtggatttgtacattatagaagtgcccatggccttcaagccaggcgacgaaatctaccctagagacgagaatggtaagtggctgtatcacaaatcaaatttgtgcgcaacctgggaggcaatggaagcctgcaaagacgctggcttggttaaatccctcggagtatcgaacttcaatcgcaggcaacttgagcttattttgaacaagcccggcttgaagcacaagccagtaagcaatcaggtcgaatgccatccttacttcacacagcctaaactgctgaagttctgtcagcagcatgacatcgtgataactgcctattctccactgggcacctcacgcaaccccatttgggtaaacgttagcagtccacctctcctgaaggatgccctcctaaatagcctgggaaagaggtataacaaaaccgccgcccagatagtgctccgttttaacatccaacgcggtgtggtggtcattccaaagtctttcaacttggagaggatcaaggaaaatttccagattttcgatttcagtttgactgaggaggagatgaaggatatcgaggcactcaacaaaaacgttagatttgttgagctactgatgtggcgtgaccaccctgaatacccctttcacgacgagtactag

SEQ ID NO: 107871 - DNA, 441 bp, synthetic construct
  misc_feature 1..441: note = Description of Artificial Sequence: Synthetic coding sequence
  source 1..441: mol_type = other DNA
atggcatttaagccgggtgatgaaatctatcccagggatgagaacggcaagtggctataccacaagagtaatctttgcgccacttgggaagccatggaagcctgcaaggacgctgggcttgtcaagtctcttggtgtaagcaactttaacaggcgccagctggagctgatcttaaataagcctggcctcaaacataaacccgtgagtaaccaggtcgagtgtcacccctactttacccagccaaagctgctgaagttctgccaacagcacgacatcgtgattacagcctattcgccactggggacctcacgcaatcccatatggcgacagctccataagctggccctcttggacctgccaatcctcagggtcacattgcactccgttcataccctgcactccgagaaactggtaacgggcgaccttcagtgtcctgggtag

SEQ ID NO: 107872 - DNA, 672 bp, synthetic construct
  misc_feature 1..672: note = Description of Artificial Sequence: Synthetic coding sequence
  source 1..672: mol_type = other DNA
atggcgcacagattccctgctttgacgcaggagcaaaaaaaagattcccagggaaagctcttccggaacatcctaaaagagaaagggattgtcgttggtatcaagctggatcagggcggagcccctttagccgggaccaacaaagagacaacaatccaggggctcgatggcctgtctgagcggtgtgcccagtataagaaggacggtgttgacttcgggaaatggcgcgccgtgctgcgcattgcggatcagtgccccagctccctggcaatccaggaaaacgccaacgccttggctaggtatgcatctatatgccagcagaatggtcttgtaccaattgtggaaccagaagtcataccagatggcgatcatgatctggagcactgtcagtacgtaactgaaaaagtgttggcagctgtgtataaagcgctcaacgaccaccacgtctacctggagggcacactgctgaaacctaatatggttaccgccggtcatgcctgtaccaagaagtacacaccagagcaggtcgccatggctaccgttaccgctttgcacagaacagtccccgccgctgtccctggtatctgcttcttatcagggggcatgtcagaagaagacgcaacactgaacctgaacgccattcccacacgcgtgcaatgtccgcccgcgtag

SEQ ID NO: 107873 - DNA, 1095 bp, synthetic construct
  misc_feature 1..1095: note = Description of Artificial Sequence: Synthetic coding sequence
  source 1..1095: mol_type = other DNA
atggcccaccggtttccagcattgactcaggagcaaaaaaaagaattgtcggaaatcgcccagtccatagttgccaatgggaaggggattctcgcagccgacgaaagcgtcggcacaatgggaaatcggctccagcgcattaaagttgagaacacagaagagaatagaaggcagtttagagagatattgttttcagtggattcaagtattaatcagtcaattggcggtgtcattctcttccatgaaaccctgtaccagaaggattcccagggcaagctgtttaggaatatattaaaagagaaggggattgtagtgggtattaaactagaccagggaggtgcaccactggcaggcaccaataaagagacgactatccaagggctagacgggctgtccgaaagatgtgcacaatataagaaagacggcgtggatttcggcaagtggagagccgtcctacggatcgcagatcaatgtcccagttcgcttgctatccaggaaaacgcaaacgctctggcacgctacgccagcatctgtcagcagaacggtttagtgcctattgtagaacctgaggtgatccccgacggagatcacgacctggaacactgccagtacgtgaccgaaaaagtgttggccgccgtttataaggcactgaacgatcaccatgtttacctggaaggcacccttctgaaacccaatatggttacagctggacacgcttgtaccaagaagtatacccccgagcaggtggcgatggctacggtgaccgccttgcacaggaccgtgcctgcggcggtgcccggcatttgtttcttatccggcggaatgtctgaagaggatgccacactgaatctgaatgccatcaatctgtgccccctgcccaagccttggaaactgtcattctcatacgggcgcgctctgcaggcatccgcgttggccgcctggggcggcaaggccgctaacaaggaggcaacgcaggaagcattcatgaagcgggctatggccaattgtcaagccgccaaggggcagtacgtacacactgggagctcaggcgcggcttcaactcaatcattgtttactgcctgttatacatactag

SEQ ID NO: 107874 - DNA, 951 bp, synthetic construct
  misc_feature 1..951: note = Description of Artificial Sequence: Synthetic coding sequence
  source 1..951: mol_type = other DNA
atggctcaccgatttccggccttaacacaagagcaaaaaaaggagttgtcagagatagcccagagtatagtcgccaatggcaaggggatattggctgctgacgagagcgtgggaactatgggcaatcgcttgcagagaatcaaggtggagaacacagaggaaaatcggagacaattccgggagatcctgttcagtgtcgactcttcgattaaccagtcaatcggtggagtgattctgttccacgagaccctttaccaaaaggatagccagggaaagttattccggaatatcttgaaggaaaaaggtatcgtcgtgggcattaagctcgatcaagggggggcaccgctcgccggaaccaacaaagagaccaccattcagggactcgatggcctaagcgaacgctgtgctcagtacaagaaggacggtgtggattttggcaagtggcgcgctgtccttcgcatcgctgaccaatgccctagcagcctggcaatccaagagaatgccaacgccttggcccgctatgcctcgatctgtcagcagaacgggcttgtacccatcgtggagccagaggtcattcccgatggcgatcacgatctcgagcactgtcagtacgtgactgaaaaggtcctggctgcagtatacaaagcactgaacgatcaccacgtctatctcgagggaacactgctcaagcctaatatggttacagcgggacacgcatgcaccaaaaagtatactcccgaacaggttgcgatggcaacggttactgcgctccacagaactgttcccgccgctgtcccaggaatctgtttcctctccgggggtatgagtgaagaggatgctacactcaacctcaatgctattaacttatgccccctcccaaaaccctggaaactatcctttagcggtgtggcccgcctacaaactcgtcgacagcccaggcggctgctttag

SEQ ID NO: 107875 - DNA, 1947 bp, synthetic construct
  misc_feature 1..1947: note = Description of Artificial Sequence: Synthetic coding sequence
  source 1..1947: mol_type = other DNA
atggtatccctgccccctccacagtcagacgtaaccttaccagggccaactaggcttgaaggagagcggcagggagacctgatgcaagcacctgggctgccaggttcacctgctccccagtccaagcacgccggattctcatgctcctcgtttgtgagtgatggaccccccgaaagaactccttcactgcctcctcactctcctcggatagcctcacctggtcctgagcaggtgcaggggcactgtcctgctggtccaggcccgggaccatttcggctgtctcctagtgataaatatcctgggtttggcttcgaagaagccgccgcatctagcccaggccggtttctcaagggtagccacgccccgtttcacccgtacaaacgccccttccacgaagacgtttttccagaagccgaaaccactctggctctgaaagggcattcatttaagacccccggacctctcgaagcctttgaggaaattcccgtggatgtggccgaagccgaggcatttctgccaggcttctccgctgaggcctggtgcaacggcctgccgtatccctctcaggaacacggaccacaggtcctgggcagcgaggtaaaagtaaagccacctgtccttgagtccggagccggaatgttttgctatcagcccccattgcaacacatgtactgctcctctcagccgccatttcaccaatatagccctggcggcggcagctacccaataccatatctggggtcatctcattatcagtatcagcgaatggccccacaagcatcaacagatggccaccagcccctgttcccaaagcccatctattcatattcaatcctaattttcatggcacttaaaaactctaagaccggaagtctgccagtgtccgagatctacaacttcatgacagagcacttcccttacttcaaaactgctccggatgggtggaagaactccgttcgacacaacttgtctctgaataagtgctttgaaaaagtggaaaacaagagcggatcttccagcaggaaaggctgcctgtgggctcttaatcctgctaagattgataaaatgcaggaagaattacaaaagtggaaaaggaaagatcctattgcggtgaggaaatctatggccaaacctgaagagttggactcactgataggcgataagagggagaaactcggctcaccactgttaggatgtccccctcccggtttatccggaagcggtccgatccggcctctggcacctcctgccggcctttccccccccctccatagcctccacccggcaccgggcccaatcccaggcaaaaaccccctgcaggatcttttgatgggccacacccccagttgctatggacagacttaccttcatctgtcacccggcctcgcacccccagggcctccgcaaccactattcccccagcctgatgggcatttggagttgcgtgcccaacccggcactccacaggactctccgcttcccgctcatactcccccatctcattcagctaagctactagcggagccctcaccagcacggacgatgcacgacactctgctgcccgacggcgatcttggtacagacctggatgctatcaatcctagtttgactgacttcgactttcagggaaacctctgggagcaactcaaagacgattccttagccctggaccccttggtgctggtgacctccagcccaacctcaagcagcatgcctcccccacagcctcctccacactgcttcccccccggaccatgtctgacagagactggatcgggcgcgggagatctggcagctcctggcagcggtgggagcggagccctcggcgacttgcatcttaccaccctttactccgcgtttatggagctcgaacccacccccccaaccgcaccggcgggtccatcagtatacttaagcccttcctctaaaccagtagccctggcttag

SEQ ID NO: 107876 - DNA, 1095 bp, synthetic construct
  misc_feature 1..1095: note = Description of Artificial Sequence: Synthetic coding sequence
  source 1..1095: mol_type = other DNA
atgccccactcttatcctgctctttccgcagagcaaaaaaaggaactgagtgacattgctctaagaattgtggccccaggaaagggaatcttagcagctgacgaatcagtgggtagtatggcaaagaggctctcccagatcggagtggaaaacacggaggaaaaccggagactgtaccgccaggtcctattttcagcagacgatcgagtgaagaagtgcatcggaggggtaatcttcttccatgaaaccctatatcagaaggacgataacggcgttccgttcgtgcgcacaattcaggataagggcattgtagtaggaattaaagtcgacaaaggcgtcgtgccacttgcgggaactgatggtgagaccaccacccagggcctggacggcctgtctgagaggtgtgctcagtacaaaaaggatggggccgacttcgccaagtggagatgtgtgctgaagatcagcgagaggaccccctctgcccttgcgattcttgaaaatgccaatgtgctcgctcggtatgcctccatctgccagcagaatgggatcgtgcccatcgtagagcccgaaatcttgccagacggcgaccacgacctgaagaggtgccaatatgtcactgaaaaggtgttggcagcagtttacaaggccctgtccgaccaccatgtgtatctcgagggaacactactcaaaccaaacatggttacgcccggccatgcatgccccatcaagtacacccctgaggagattgccatggcaacagtcaccgcgctcagaagaacggtccccccagctgtccctggcgttacgtttctttcagggggacagtctgaagaagaggcctctttcaaccttaacgcaatcaatcgatgtccgctgccaagaccttgggcactgaccttttcttacggacgagcactgcaggcctctgctctaaatgcctggcgggggcagcgtgacaacgccggtgctgctactgaggagtttataaaaagggccgaggtgaacggtcttgctgcacagggcaagtacgagggttctggtgaagatgggggcgcagctgcccagtctctgtacattgcaaatcatgcatactag

SEQ ID NO: 107877 - DNA, 450 bp, synthetic construct
  misc_feature 1..450: note = Description of Artificial Sequence: Synthetic coding sequence
  source 1..450: mol_type = other DNA
atgccccactcttaccctgcactgtccgctgagcagaagaaagagctgagtgatattgccttacgaatcgtcgccccaggaaaaggaattctggctgccgacgagagtgtcgggtctatggcgaagagactgagtcaaataggggtggagaatactgaggaaaatcggcgactgtacagacaggtcttgttttccgctgatgacagagttaagaagtgcattggtggagttattttcttccacgagacactgtaccagaaggacgacaatggggtgcccttcgtacgtacaatccaggacaaaggaattgtcgtggggatcaaagtggataagggggtagtgccactcgcaggtacagatggagaaacgaccacccagggcttagatggattgagcgaacgatgtgcccaatacaagaaagatggcgcagattttgccaagtggcgctag

SEQ ID NO: 107878 - DNA, 795 bp, synthetic construct
  misc_feature 1..795: note = Description of Artificial Sequence: Synthetic coding sequence
  source 1..795: mol_type = other DNA
atgccctctatctttgcttaccaatcctctgaggtcgactggtgcgaaagcaactttcagtactcagagctggttgctgagttttataacaccttctctaacatcccattctttatctttggccccctcatgatgctcctgatgcacccatacgcacaaaaaaggagcaggtatatttacgtggtgtgggtattgtttatgataatcggtttgttctctatgtattttcacatgacgctgtcttttctgggtcagctgcttgacgagattgctattctgtggctactggggtctggctactccatttggatgcccaggtgctactttccatccttcctgggcggaaacagaagtcagttcatcagactggtctttatcactaccgtggtaagcacactgctgtctttcttgcggccgactgtgaatgcctatgctttgaacagcattgcactgcacatcttgtacatagtatgccaggagtatcggaaaacatctaataaggaactgagacatctgatcgaggtcagtgtcgttctgtgggctgtagcccttacaagttggattagcgacagactgttgtgtagtttctggcagaggattcacttcttttacctgcattccatatggcacgtgctgatttcaatcacattcccctacgggatggtcactatggctctggtagacgccaactatgaaatgccgggggagacgttgaaagtgagatactggccgcgtgactcctggccagtgggactgccatacgtggagatcagaggggatgacaaggattgttag

SEQ ID NO: 107879 - DNA, 828 bp, synthetic construct
  misc_feature 1..828: note = Description of Artificial Sequence: Synthetic coding sequence
  source 1..828: mol_type = other DNA
atgggcgctccgcactggtgggaccaattacaggccggatcatcagaagtggactggtgcgaagataattatactatcgttccagcaatagccgagttttataacacgatcagtaatgtcctttttttcatcctgcctcccatttgcatgtgtctgtttcgccagtacgccacctgcttcaatagcgggatttatctgatttggaccctcctggtcgttgtgggcatcggatccgtgtacttccacgccactcttagttttctagggcagatgctggacgagcttgctgtgctttgggttttgatgtgcgccctagcaatgtggtttccccggagatacttacctaagatttttagaaatgatcgcggtaggttcaaagtggttgtttccgtcttaagtgccgtaactacatgtttggcttttgttaagcctgctattaataacatctcattgatgaccttaggcgtgccgtgcaccgcactgctgatagcagagctgaagcgctgtgataatatgcgggtgttcaagctgggcttgtttagcgggctgtggtggaccctggccctgttttgttggatttctgaccgcgctttttgtgaattactttcttcttttaactttccatatctgcactgcatgtggcacattctcatttgtttggcagcgtacctcggttgtgtgtgctttgcctatttcgacgctgcatctgagatccccgaacaaggccccgtaattaagttttggccgaatgaaaagtgggccttcatcggagtcccctatgtctctctgctctgtgccaacaagaagtcttctgtcaagattacatag

SEQ ID NO: 107880 - DNA, 423 bp, synthetic construct
  misc_feature 1..423: note = Description of Artificial Sequence: Synthetic coding sequence
  source 1..423: mol_type = other DNA
atgtgtcttttcaggcagtacgcaacctgtttcaatagcggcatttaccttatttggacactcctcgtcgtagtagggattggctccgtgtacttccatgctacgttgtcctttctgggccagatgttggatgagttagcagtgctatgggtgctcatgtgcgctctggctatgtggtttccgagacgatatctgccgaaaatttttcgtaacgataggggtagatttaaagtggtggtgtccgtgttatcggccgtgacaacttgcctggcgttcgtgaagccagctatcaacaacatatcattaatgaccctcggcgtcccgtgcacggctctcctcatcgcagaacttaagcgccacgagcgcaatcagagacgcaggcaccggaaaggcggacaacagggggggggagataaggtctag

SEQ ID NO: 107881 - DNA, 1587 bp, synthetic construct
  misc_feature 1..1587: note = Description of Artificial Sequence: Synthetic coding sequence
  source 1..1587: mol_type = other DNA
atgcaaggcccttgggtactcctccttcttggactgcgattgcagctgtcactcggtgttatccccgcagaggaagaaaatcccgcattctggaacagacaggccgcagaggccttggatgcagctaaaaagctgcagccaattcagaaggtggcaaaaaacctgatcctcttcctcggtgatgggctgggcgtgccgaccgttaccgcaacaaggatcttaaagggccagaagaatggtaaactcggcccagaaactcctctggccatggatcgctttccttatctggcactgagcaagacgtataatgtggaccgacaggtgcctgattctgccgccacggcaacggcttatttgtgcggagtgaaagctaacttccagacaatcgggctctctgcagccgcgaggttcaaccaatgcaatacaacccgcggcaacgaggtcattagcgtgatgaaccgggccaagcaagccgggaaatcagtgggagtggttaccacaacccgcgtccaacatgctagtccagcaggaacatatgcccacaccgtcaatcggaactggtactccgacgctgatatgccggcatcagcaaggcaggaagggtgtcaagacatagctacgcagcttatcagcaatatggacattgacgtgatcctgggcgggggacggaagtacatgttccccatgggcacccccgaccctgagtacccagccgacgcctctcaaaatgggattagacttgatggcaagaatctagttcaggagtggctagctaaacatcagggtgcctggtacgtatggaataggacagaactgatgcaggcgagcctggatcagagtgttactcatctcatgggactgtttgaacctggagataccaaatatgaaattcaccgcgaccccaccctcgacccttccctcatggagatgacagaggccgccctccgcctcctcagccgcaatcctcggggattttacctttttgttgagggcggacgcatagatcatggacaccacgaaggggtggcttatcaagcactgaccgaggccgtgatgtttgacgatgccattgagcgtgccggacagctgacgagtgaagaagacacactgaccttggtgactgctgaccattcccacgtgttcagctttggaggctacacccttaggggaagctcaatttttgggctggctccgagcaaggcacaggatagcaaagcctatacatcaatcctgtacggtaatgggcccgggtacgtgtttaatagcggggtcaggcctgacgttaacgaatccgagagcggcagccccgactatcagcagcaagctgcagtgcctctttcttccgagacccatggaggagaggatgtggcggtgttcgcccgtggcccccaggcccacctagtgcacggggttcaggagcagtcattcgtggcccatgtgatggccttcgctgcctgtttagagccgtacacagcgtgtgatctggcgcctccagcgtgtacaacagatgctgcccatcccgttgctgcatctctccctcttttggctggaaccctgcttttgctgggcgcctccgccgcaccgtag

SEQ ID NO: 107882 - DNA, 513 bp, synthetic construct
  misc_feature 1..513: note = Description of Artificial Sequence: Synthetic coding sequence
  source 1..513: mol_type = other DNA
atggaccgcgccatcggtcaggctggttcactgactagctctgaggacaccctgaccgtcgtgaccgctgaccatagtcatgtattcacttttgggggatacacacccaggggaaactccatctttggacttgctccgatgctgagcgataccgataagaagccatttaccgcgatcctgtatgggaacggccccggatacaaggtcgtggggggcgaacgcgaaaatgtgagcatggttgattatgcacacaataattatcaggcacagtccgccgtcccgctccggcacgagactcatggcggagaggacgtggccgtgttctcaaagggaccaatggcccacttgctccacggagtgcatgagcagaactatgtgccccacgtgatggcatacgcggcttgcattggcgcgaatctgggtcattgcgctcctgcctcgtccgctggaagtctcgctgccgggcccctgctacttgcgctagcgctgtatcccctcagcgttctcttttag

SEQ ID NO: 107883 - DNA, 513 bp, synthetic construct
  misc_feature 1..513: note = Description of Artificial Sequence: Synthetic coding sequence
  source 1..513: mol_type = other DNA
atggatcgcgccattggtcaggctgggtcacttacaagctccgaggacacgctgacagtggtcacggcggatcactcacacgtgtttacgtttggcggctacacccccaggggcaacagtattttcggtctcgctcccatgttatctgacaccgataagaaaccctttactgcaatcttatacggaaatggtccgggttacaaggtagtcggaggcgaaagagagaacgtaagcatggtggattatgcccacaataactaccaagcacagtctgctgtccctctgcggcacgagactcatggaggggaggatgttgctgtgttctctaaaggaccaatggctcatcttttgcatggggtccacgaacaaaactatgtccctcacgtaatggcttatgccgcatgcatcggtgctaacctcggccactgcgccccggcaagcagtgctgggagtctcgccgctggacccctcctcctggccctcgccctgtatccactcagcgtgctcttctag

SEQ ID NO: 107884 - DNA, 1575 bp, synthetic construct
  misc_feature 1..1575: note = Description of Artificial Sequence: Synthetic coding sequence
  source 1..1575: mol_type = other DNA
atgatttcaccattcctcgtcctcgctattgggacctgtctgacgaacagtcttgtcccagaaaaagaaaaagacccaaagtactggcgcgatcaagcccaggagacccttaaatacgccttagaactccagaagctgaacactaatgtggctaaaaacgttataatgttcctgggagacggaatgggcgtcagtactgtgactgctgctcgtatccttaaagggcagctccatcacaatcctggcgaggagacaagactcgaaatggacaagttccccttcgtggctctgtcaaaaacctacaataccaacgcccaagtcccagactccgctggcactgccactgcttacctttgcggagtgaaagctaacgagggaacagtgggcgtgagcgccgccacggaacgatcgagatgcaatacaacccaggggaacgaggtaacctctattctgcggtgggcaaaggacgcaggtaagtccgtgggtatcgtgaccacaactagggtaaatcatgccaccccaagcgccgcttacgctcattccgcagatagggactggtacagcgataatgaaatgccacctgaagcactgtcccaaggatgcaaagatattgcgtaccagctcatgcacaatattcgcgatattgacgtcatcatggggggtggacggaaatacatgtatccaaagaacaagacagacgttgagtatgaaagcgatgaaaaggctcggggaacaagacttgacggcttagatctcgtcgatacctggaagtctttcaagccccgttataagcacagccactttatctggaatagaactgaactgctgacgttagatccccacaacgtggactaccttctggggctgtttgagcccggcgatatgcagtatgagctgaatcgtaataatgtaacagacccaagtctgtcagagatggtcgtggtggcaattcagatccttcgtaagaatccgaagggcttttttctcctggtggagggtgggcggattgaccacgggcaccacgaaggaaaggctaagcaggccttgcacgaagccgttgagatggatcgggcaatcggccaagcgggcagcctgacctcctccgaagacacactaaccgtagtaacagccgaccactcgcatgtatttacttttggtggttacaccccaaggggtaactctatctttggactcgctcccatgctctcagacaccgataagaagcccttcaccgctatactgtacgggaatggtccaggctacaaagtcgtgggcggggaacgtgaaaacgtttctatggtggactacgcacacaacaactaccaggcccaatcagccgtgcccctgagacacgaaacacatggtggggaagacgtggccgtgttcagcaaggggcctatggcgcatttactgcacggggtgcacgagcagaattacgtcccacacgtcatggcttacgcagcttgcatcggcgccaatctcggccactgcgcccccgcaagtagcgccggcagcttagccgcagggcccctgctgttggcactagccctgtaccccctttccgtacttttctag

SEQ ID NO: 107885 - DNA, 1575 bp, synthetic construct
  misc_feature 1..1575: note = Description of Artificial Sequence: Synthetic coding sequence
  source 1..1575: mol_type = other DNA
atgatttcgcctttcctcgtgctggccattggcacatgccttaccaatagcctcgtgcccgaaaaagaaaaggatccgaaatattggagagatcaggctcaagaaacattaaagtacgcactggaattacagaagttgaacacaaatgtggccaagaatgtaattatgtttttgggagacggaatgggagtgtcgactgtaacagccgctcgaatcctgaagggccagctccaccacaatccaggggaagagactcggctagagatggacaaattcccctttgtggccctgagtaaaacatacaataccaatgctcaggtaccggattctgccgggaccgccacagcttatctttgtggagtgaaagcgaacgaaggcaccgtgggagtttcagctgcaaccgagagatcaaggtgtaatacaacgcaaggtaatgaggtgacctccattttgagatgggccaaggacgcaggtaaaagtgtgggcatcgttacaacaacccgcgttaaccacgccactcccagtgctgcttatgcccatagtgccgacagggattggtattcggacaatgaaatgcctcctgaagctctgagccagggttgtaaggatatcgcctaccagctcatgcataacattagggacattgatgtaattatgggaggtggcagaaaatatatgtatcctaagaataagacagacgtggagtatgagagtgatgagaaagcacgtgggactcggctcgatggacttgacctggtagatacctggaaatcttttaaaccaaggtacaagcactcccactttatctggaaccgaactgaactgctaacactggatccacataatgtggattatttgctgggactgttcgaacccggcgacatgcaatacgagcttaatagaaacaatgtgacagacccttcgctgtctgaaatggttgttgttgccatacagatcctgcggaaaaaccctaaggggttcttcctgcttgtggaaggaggacgcatcgaccacggacatcacgaggggaaggccaaacaggccctgcacgaagcagttgagatggatcgcgccattggacaagccggttccttgacctcctccgaagacacactgactgtggttaccgccgatcattcacacgtcttcacatttggcggctacacccctcggggcaacagtatttttgggctggctcctatgctgagcgacacggataaaaaacctttcacagccatcctttacgggaacgggcccggatataaggtggtcggaggcgaacgtgagaacgtttcaatggtagattacgcccacaataactaccaagcccagtctgctgtgcctttgcgccatgaaactcacggcggtgaggatgtggcggtgttcagtaaaggccctatggctcacttactacatggggtgcacgagcagaattacgtgccgcacgtgatggcctacgcggcttgcattggcgccaacttagggcactgcgctcctgcctcgagcgccggatcattggcagcaggtcccctgctgcttgctcttgccttatatccactgagcgtgctcttttag

SEQ ID NO: 107886 - DNA, 1575 bp, synthetic construct
  misc_feature 1..1575: note = Description of Artificial Sequence: Synthetic coding sequence
  source 1..1575: mol_type = other DNA
atgatcagcccatttctggtgctcgccatagggacctgcctcacaaatagtttggtgcccgagaaagaaaaagatccgaaatattggagggatcaagctcaggagactctcaaatacgctctcgagcttcaaaaactcaataccaacgtggcgaagaatgtgatcatgttccttggagatggtatgggggtgtcaactgtcaccgccgccagaattctgaaagggcagttgcaccacaaccccggggaggagaccaggttggaaatggacaagttcccatttgtagccctgagtaagacatataatacaaacgcccaggttcctgattccgctgggactgcgactgcctatctgtgcggcgttaaagctaatgaaggaacggtgggagtcagtgccgcaactgagcgaagcagatgcaacaccacccagggaaacgaggtcacatcaattcttaggtgggccaaggatgctggtaagtcagtcgggattgtgacgacaacacgggtgaaccatgctacgccttccgccgcgtacgcccattcagccgatagggactggtacagcgacaacgagatgccaccggaagctttgtcacaggggtgcaaggacatcgcgtaccagctgatgcacaacattagggacatcgacgtgattatgggcgggggcaggaagtacatgtatcctaagaacaaaaccgacgtggagtacgaatctgatgagaaagcaaggggtactcgcctcgacgggcttgatcttgtcgatacttggaaatctttcaaaccccggtacaagcattcccattttatttggaatagaacagagctcctgaccctcgatccacacaacgtggattatcttctgggtctgttcgagcctggagacatgcagtatgaacttaaccgcaataacgtgactgacccctcattatccgagatggtagtggttgccattcaaatcttacgcaaaaatcccaaaggattctttttgctggttgagggcggacggatcgaccacggccaccacgaaggcaaagctaagcaggctcttcacgaagccgtagaaatggatagagctatcggtcaggccggctctctgaccagtagcgaagacactctgacagtcgtcactgcagaccactcccacgtttttacatttggaggttacactcccagaggcaactcaatttttggcctggctcccatgttgagtgataccgataagaaaccctttaccgctattctgtatggaaacggcccgggttataaggtcgttggcggcgagagagagaatgtttcaatggtggattacgcccacaacaactatcaagcacagagtgccgttccactgcgacacgaaacccacgggggggaggacgttgctgtgttcagtaaaggacctatggctcacctattacatggcgtgcacgaacagaattacgtcccgcatgtcatggcatatgctgcctgtatcggtgctaatctaggacattgtgctccagcttcctccgctggaagtctggcagccgggcctctgcttctggccctcgctctgtatcctttgtctgttctcttttag

SEQ ID NO: 107887 - DNA, 1344 bp, synthetic construct
  misc_feature 1..1344: note = Description of Artificial Sequence: Synthetic coding sequence
  source 1..1344: mol_type = other DNA
atgccttggtcctttcgcagctcaacgccaacctggctacgaatgagctcctgctcatgggagatgacatacaataccaacgcccaggtccccgatagtgccgggaccgctacagcatacctatgtggagtgaaggcaaacgaaggcacagtcggtgtgtcagccgccactgaaagatcccgctgcaacactacgcaaggcaacgaggttacttctatactgaggtgggccaaagacgctggaaagtccgtcggtattgtgacaactacccgagttaatcacgctactccgagcgctgcgtatgcacatagcgctgatagagattggtattcagataatgagatgccccccgaggccctctcacagggatgcaaggacattgcataccagcttatgcacaatattcgggacattgacgtgattatgggagggggcaggaagtatatgtatccaaaaaacaagaccgatgtagagtacgagagtgatgaaaaggcacgtggaaccaggttagacggcctggacttagttgacacttggaagagctttaaaccacgttacaagcactcccattttatctggaacagaactgagcttctcacactggatcctcataatgttgactacctcctgggtctgtttgagccaggagacatgcagtacgagctaaacagaaacaatgtcacggatcccagcctgtccgagatggtggtggttgccatccaaattttacggaaaaatccgaagggattcttcctgcttgtagaaggtggaagaatcgatcatggccaccatgagggtaaagctaagcaggccctgcatgaagctgtggaaatggatcgggctatcggccaggcgggttcattgaccagctcagaagataccctcaccgtggtcaccgccgatcactcgcacgtctttaccttcggaggctacactccgagaggcaattctattttcggactggcccccatgctgtccgacacggacaaaaagcctttcacagcaatcttgtacggcaacggtcctggctataaggtggtgggtggcgagagggagaacgtcagcatggtggattacgcgcacaataattaccaggcccagtccgctgtgcctctgcggcatgaaacccacggaggggaggatgttgcagttttttcaaagggccctatggcccatttgctgcacggggttcatgagcaaaattatgtgccacatgtcatggcttatgctgcctgtatcggggccaatctgggccactgcgcccccgcctcttcggctggatctctggcagccggcccgcttcttctcgccctcgcactgtacccactgtcagtccttttctag

SEQ ID NO: 107888 - DNA, 1410 bp, synthetic construct
  misc_feature 1..1410: note = Description of Artificial Sequence: Synthetic coding sequence
  source 1..1410: mol_type = other DNA
atgttccttggtgacggaatgggagtctctacagttacagccgctcgtatattaaagggccaactccaccataatccaggcgaggagacccgactggagatggataagtttcctttcgttgcactgagtaaaacctataacacaaatgcacaggtccctgacagcgccgggacggctactgcttatctatgcggcgtgaaggcaaacgaaggaaccgtcggcgtgtcagctgctacagaaaggagccgctgcaatactacccaggggaatgaagtgacttcaattttaagatgggccaaggacgctggcaaatccgttggaatcgtgaccacgactcgagtgaaccacgcaacgccttcagcggcctatgcacacagcgctgaccgcgattggtattctgataacgagatgccacccgaggctttgtcccagggctgcaaggacatcgcctaccagctgatgcacaacatccgagacatcgatgtcattatggggggaggacggaagtacatgtacccaaagaataagactgatgtggagtacgaatcagatgagaaagcccgcggaacgaggttggatggactggatctggttgacacttggaaaagtttcaaacctcgctacaagcactctcatttcatatggaatagaaccgaactactgacgttggacccccataacgtagattatctgctgggactctttgaacctggggacatgcagtacgaactgaataggaacaatgtgaccgacccctcactgtctgagatggttgtggttgcaattcagatcctgcgcaagaacccaaaagggttcttcctgctggttgaaggcggtcggatcgaccatggacaccacgaaggaaaggcaaagcaggccctccatgaagccgttgagatggatagagctatcgggcaggcaggtagcctcacgagcagtgaggatactttgacagtggtgacggccgaccactcacacgtgttcacctttggtggttacacccctagaggtaatagcatcttcggccttgcccccatgctatctgataccgacaagaagccgtttacagccatcctgtatggcaatggccccggctataaggtagttggcggggagcgggaaaatgtctctatggtggattacgctcataacaactatcaagctcaaagcgccgttcccttgcggcatgagactcacggaggagaagatgttgcggtgtttagcaagggaccgatggcacacctgctgcatggcgtgcacgagcagaactatgtgccacatgtgatggcctatgccgcctgtattggcgcaaatctgggtcactgtgcccctgcttcctcagcaggcagcctcgccgccggccccctgctgctggctctggcgctgtatcctctgtccgtcctgttttag

SEQ ID NO: 107889 - DNA, 1608 bp, synthetic construct
  misc_feature 1..1608: note = Description of Artificial Sequence: Synthetic coding sequence
  source 1..1608: mol_type = other DNA
atgctgggtccttgtatgctcttgttacttctgctgctaggcctgaggctgcagctgtcccttggtataatacctgtcgaggaggaaaaccccgacttctggaacagagaggccgccgaggctctcggggcggccaagaagttgcagccggctcagaccgccgccaaaaatctgatcatcttcttgggcgatggcatgggagtgtcaaccgtcaccgccgcgaggatcctcaagggccagaaaaaagataaattagggccagagatccccctggcaatggacagattcccttatgtggccttgtccaagacgtataatgtggataaacacgttccagactcaggagctaccgctaccgcctacttatgtggagtgaagggaaactttcagactatcgggctcagcgcagctgcccgtttcaaccagtgtaataccacaagagggaacgaggttattagcgttatgaaccgcgcaaaaaaagccgggaagagtgttggtgtggtcactaccactcgagtgcagcacgcgtctcccgcaggaacctatgcacacaccgtaaaccgaaattggtacagcgacgcggatgtaccggcctccgctaggcaagaaggatgtcaggacatcgctactcaactgatctctaatatggacatagatgtaatactggggggcggtcgaaaatatatgtttcggatgggcaccccagatcccgaatacccagacgattatagtcagggcggcacaaggcttgacggaaaaaatctggtccaggagtggctggccaagcgccagggagctaggtacgtgtggaacagaactgaactaatgcaggctagcctggaccccagtgttacacacctaatggggctgttcgagcccggagacatgaagtatgaaatacaccgcgacagcacactggacccgtctctgatggagatgacagaagctgcgcttagactcctctcacgaaatccgcgtggattttttctgtttgtggaggggggaagaatagaccatgggcatcacgagtcccgagcttaccgcgcccttaccgagactatcatgttcgatgatgccatcgaacgggcagggcaacttacttctgaagaggacactttatcattagtcacagctgaccactcccatgtgttctcattcggcggctatccacttaggggctcctctatcttcggtctcgcacctgggaaagccagggacagaaaggcatacaccgtcctgttatacgggaatggccctggctacgtgctgaaagatggggcccggcccgacgtgacagaaagcgagagtgggtcccctgaataccgacaacagagcgcagtgccactggacgaagagacccacgctggtgaggacgtggcagtattcgctagaggcccccaagcgcacctggtacacggcgtgcaggagcagacctttattgcccacgtgatggccttcgccgcctgcctcgagccatatacagcttgcgatcttgcccctccagccgggacaactgatgcggcccaccccggtcggagcgtcgtgcctgctctcttaccgttactcgctggaacattacttcttttggaaacggctaccgccccctag

SEQ ID NO: 107890 - DNA, 1599 bp, synthetic construct
  misc_feature 1..1599: note = Description of Artificial Sequence: Synthetic coding sequence
  source 1..1599: mol_type = other DNA
atgcagggaccctgggttctcctgctgttaggacttcggctacaactgtcactgggaataatccccgttgaggaggagaacccagatttctggaatagacaggctgcagaggcactcggcgcagccaagaagcttcagcctgcacagacagccgccaaaaacctgataatcttccttggcgatggcatgggagtctcaacagtcaccgccgcccgtatactgaaaggtcagaagaaggataaactaggtccagagacatttttggcgatggaccgatttccatatgtcgctctcagcaagacttactcagtggacaaacatgttcccgactccggagccaccgcaacagcctatctgtgcggcgtgaaagggaacttccagaccatcggcttgtccgctgcagcaagattcaaccagtgtaataccactcgagggaatgaggtgatttcggtaatgaatagggccaaaaaggccggaaagtccgtcggggtagtcactactacgcgcgtgcaacacgcctcaccggcgggagcttacgcacatacggtcaacaggaattggtactcagatgctgatgttcccgcatcagctaggcaggaggggtgccaggatatcgcaacacagctaatttctaacatggacattgacgtgattctgggagggggacgcaaatatatgttccccatgggcacccccgaccctgagtaccccgatgattactctcagggcggcaccagactggacggtaagaatctcgttcaggaatggctggctaagcatcaaggtgccagatacgtttggaatcggacggaactcctgcaggcaagtctggacccgtccgttacacatcttatgggcctgttcgaaccaggggacatgaaatacgagatacaccgcgatagcacactggacccttccctcatggaaatgacagaggccgccctgctgctgctgtctaggaaccctcgcggattttttctgtttgtggagggtggcagaatcgatcacggtcatcatgagtctagggcttaccgcgctctgacagaaaccatcatgtttgatgatgcgatcgagagggcagggcagctgacttccgaggaggacaccctgtctctggtgactgcggatcattcgcatgttttttcctttggcgggtatcccctcagaggctctagcatcttcggcctcgctcccggaaaggctagagaccgcaaggcatatactgttttgctttatggcaatgggccaggatacgtcctgaaagatggtgctaggccagacgttacggagagtgaaagtggctcccctgagtacaggcaacagagcgccgtgcccctggacggtgaaacccacgcaggggaggacgtcgctgtctttgcaagaggtccacaggctcacctagtccacggcgttcaagagcaaactttcattgcacacgtgatggcctttgccgcctgccttgaaccatacaccgcatgtgatctcgcccctagggctggcaccacagacgccgcccatcccggaccctctgttgtgcctgcattgttgccgttgcttgctgggacacttctgctgcttggtaccgccaccgccccctag

SEQ ID NO: 107891 - DNA, 474 bp, synthetic construct
  misc_feature 1..474: note = Description of Artificial Sequence: Synthetic coding sequence
  source 1..474: mol_type = other DNA
atggacagatttctcgtgaagggggcacaggggggtctcctgcgcaaacaggaagaacaggaacccaccggggaagaacctgccgtgcttgggggagacaaggagtcaacaagaaagagaccgagacgtgaagcacctgggaacggtggacacagcgccggaccatcttggcggcatattagggccgagggtcttgattgctcatacaccgttctgtttggcaaagcagaggctgatgaaatcttccaggaactggaaaaggaggttgagtactttactggcattaaaatggccgtcaccaccagtggctctacggagatgatgaaggagaattggcctctcggcgcccccctgcccctgagccctagcgtgccagcggagactcttagttcaggtattcgaataccagtgggaaaggccccacctggcggctggcgatggtcaggttgtagatggccaacgggcgcctactag

SEQ ID NO: 107892 - DNA, 2958 bp, synthetic construct
  misc_feature 1..2958: note = Description of Artificial Sequence: Synthetic coding sequence
  source 1..2958: mol_type = other DNA
atgatacgccatgctggtgcgcctgcgcggggggatcctacaggcccagtgccagtcgttggcaagggggaggaggaggaggaggaagatgggatgcgcctgtgcctccctgccaacccaaaaaattgtctcccccaccggcgaggcatttccatcctggagaaattgatcaagacatgccctgtgtggctgcagctttccctgggccaggctgaggtggcccgcatactccatagagttgttgcgggaatgtttctggtgcgacgcgatagctcttccaagcaattagtgctttgcgtgcattttccctccttgaatgaatcttctgcagaggtcttagaatacacaataaaagaggaaaagtccattctatacttggaaggtagcgcactagtgttcgaggacattttccgactgatcgcattttattgtgtgtctagggatttgttaccgtttacactgcgactccctcaagcaatcctggaagcgtcgtcattcactgatcttgaaacgatagcaaatctcggtttgggcttttgggacagtagcctcaacccaccacaggagcggggcaaacccgcagagccaccccgcgaccgagccccaggcttccctctggtttcttctctgaggcccacagcacacgacgcaaactgcgcatgcgaaattgaactttccgtcggcaacgaccgattatggtttgtgaatcccatattcatcgaggattgttcttctgccctcccaaccgaccaaccccctctgggaaattgcccagcaagaccccttcccccgactagtgatgcaacctcccctacttcgcgttgggctcccaggaggccgcctccacccccgcccgtgctccccctgcagccttgcagtccagcccagccaccagtcctgcccgctcttgcccctgccccagcgtgtcctttgcccacaagccctccagtgccagcccctcatgtgacaccacatgcgcctgggcccccggatcatcctaaccagcctcctatgatgacatgtgaaagactgccctgtcctaccgcagggctcgggccactgagagaagaagccatgaagcccggggccgccagtagccccctccagcaggtacctgcccctcccttgccagcgaagaaaaacctccctaccgcccccccaaggcggcgcgtctcagaacgtgtctcccttgaggaccagtcaccagggatggcagccgagggagaccaactatccctcccaccacagggcactagcgatggccccgaagacacacccagggaaagcacagagcaagggcaagatacagaggtcaaggcttccgatccccactcgatgcccgaactccctaggactgccaagcaaccgcccgtgccaccaccgaggaaaaaaaggatctctagacagctcgctagcacactacccgctcctcttgagaatgcggaactgtgcacccaagcgatggccctggagactcctacaccgggaccaccacgggaaggtcagtcccccgcttcacaggctggtacccagcaccctcctgcccaggcgacagctcatagccagtcaagcccagagtttaagggaagtttggccagcctctccgattccctgggagtgagcgtgatggctacagaccaagactcctactctaccagtagtaccgaggaagagctggagcagttctccagcccgtccgttaaaaaaaaaccgagtatgattctgggcaaggcaagacaccgtctcagctttgcatcattctcatccatgttccatgccttcctgagtaacaacagaaagttgtacaagaaggtggtggaactggcacaagataaagggtcctattttggatccctcgtgcaagactataaggtgtattccctggaaatgatggcacgacagacctcaagcactgaaatgttgcaagagattcgcactatgatgacccaacttaagtcatatcttttgcaatccaccgaattaaaagcgttagtggaccccgctctccatagtgaggaagaactcgaggccatcgtggaaagcgctctgtataagtgcgtcttgaaaccactgaaagaggccataaactcctgtctacaccagatccattctaaagatggctccctgcagcagctgaaggaaaaccagctcgtgatcctcgcaactactaccaccgacctgggagtcaccacctccgtgccagaggttccaatgatggagaagatcctccagaagtttacttctatgcacaaagcgtatagtccagagaaaaaaatctctattcttctcaagacatgcaaactgatatacgactccatggcactcggaaaccccggtaagccatatggggccgacgacttcttacccgtcctgatgtacgtgttggctaggagcaatctgaccgaaatgctgttgaatgtcgagtatatgatggaactgatggaccccgcacttcagttaggcgaaggctcatactaccttactacgacctacggagcattagagcatattaaaagttacgataaaatcacagtcacaagacagttgtcagttgaggtccaagactctattcatagatgggaacgacgccgtacgctgaacaaggccagggcatctcgctctagcgtgcaggacttcatctgtgtgagctacttggaacccgagcaacaggcccggacccttgcttctcgcgctgacacccaggcccaggccctttgcgcgcagtgtgccgagaaatttgccgtggagcgacctcaagcccacaggctcttcgtcctggtggacgggcgctgctttcaacttgctgacgacgctctgcctcattgcataaagggatatctgctgagaagcgagccaaaaagagactttcatttcgtctatagacccttagacggaggcggcgggggtgggggcgggtccccgccttgtctggttgtcagagagcccaacttcctttag

SEQ ID NO: 107893 - DNA, 786 bp, synthetic construct
  misc_feature 1..786: note = Description of Artificial Sequence: Synthetic coding sequence
  source 1..786: mol_type = other DNA
atggacaggttcctggtaaaaggagcccaggggggactcttaagaaagcaagaagaacaagagcccaccggggaggaacccgccgtgctcgggggggataaagaatccactagaaagcgtccccggcgcgaggcccccggcaacggaggccatagtgccgggccaagttggaggcacattcgagcggagggacttgattgcagctatacggtgttatttggaaaggcggaggcagacgaaattttccaggaactggagaaagaggtcgagtactttacgggcgcactggcccgggtgcaggtcttcgggaaatggcattcagtcccgcggaagcaagctacatacggggatgcaggcctgacctacacgtttagtggtcttacgttatctcccaagccctggatccccgtcttagaacggatacgcgaccatgtgtccggtgtaacgggccagaccttcaacttcgtcttaatcaaccgctacaaagacgggtgcgatcacattggcgagcacagggacgatgagcgagagctggcacccgggagtccaatcgcttcagtcagttttggtgcctgccgcgacttcgttttcagacataaggattctcgtggtaaatcgccaagcagaagggtcgccgtggtgcgcctcccactggcccatggctctcttctgatgatgaatcaccccaccaatacgcactggtatcactccctgccagtacgtaagaaagtccttgctcccagagtgaatctaacattcagaaaaatcctcctgaccaaaaaatag

SEQ ID NO: 107894 - DNA, 786 bp, synthetic construct
  misc_feature 1..786: note = Description of Artificial Sequence: Synthetic coding sequence
  source 1..786: mol_type = other DNA
atggaccgcttcctcgtgaagggcgcacaggggggactgctccgcaagcaggaggagcaggagcctactggggaagaacccgctgtgttgggaggagataaagagtcgacacgcaaacggccacggcgcgaagctcccggcaacggcggccacagcgcaggcccctcttggagacacattagagccgaaggacttgattgctcttataccgtgctattcgggaaagcggaagcggacgagatattccaggagctagagaaggaggtggagtattttacaggggctctcgcccgagttcaggtctttggtaagtggcatagcgttccacggaaacaggccacatacggggatgccggtctgacgtacactttctctggcctcacactatcccctaagccatggataccggtgctggagcgcattagagaccatgtgagcggagttacgggacagaccttcaactttgtgttgatcaacaggtacaaggacggttgtgatcatatcggcgaacaccgagacgacgagcgcgaactggcccccggcagcccaatcgcctctgtgagttttggcgcatgtcgcgactttgtgttcaggcacaaggattcacgcggtaagtccccctcgagacgcgtcgccgtggtccgtttgccgctagcccatggcagcctgcttatgatgaatcacccgaccaatactcactggtaccactcactcccagttagaaagaaagtgctggcaccccgagtcaatctgacttttcgcaaaatccttttaaccaaaaaatag

SEQ ID NO: 107895 - DNA, 786 bp, synthetic construct
  misc_feature 1..786: note = Description of Artificial Sequence: Synthetic coding sequence
  source 1..786: mol_type = other DNA
atggatcgtttcctggtcaagggcgcccaaggcggcctactgcggaagcaagaagagcaggagcctaccggggaggaacccgccgtcttgggtggagacaaggaaagcactagaaagcggcctagacgcgaggcgcctggcaacggagggcattccgctggcccgtcttggaggcatatccgagccgaggggctcgactgcagctacactgtgctctttggaaaggcagaagcagacgaaatttttcaagagttggaaaaagaggtcgagtactttacaggggctctcgcacgggtccaggtgttcgggaagtggcacagtgtcccccgcaagcaggctacctacggagacgccggccttacctacactttctccggccttaccctttccccgaagccttggatacctgttttagagcggatccgggaccatgtgagcggggtgacggggcagacattcaatttcgttcttatcaaccggtacaaagacgggtgcgaccacataggcgaacaccgagacgatgagagggagttggcccccggctcccccatcgcctcggttagtttcggagcctgccgggatttcgtcttccgccataaagatagcagaggcaaatcgcccagccggcgtgtcgctgttgtacggcttcccctcgcccacgggtccctactgatgatgaatcatcctacaaatacacactggtatcactcattgccagtccggaagaaagtcctggcccctcgagtaaacctgacattccggaagatcttactaactaagaagtag

SEQ ID NO: 107896 - DNA, 453 bp, synthetic construct
  misc_feature 1..453: note = Description of Artificial Sequence: Synthetic coding sequence
  source 1..453: mol_type = other DNA
atggataggtttctggtgaagggcgcccagggcggtttattgcgcaaacaggaggagcaggaaccaacaggagaagagccagccgtgctgggaggagacaaagagtctaccagaaaacgccctagacgcgaagcgcctggaaatggtgggcactccgctggcccaagctggcgtcatatcagggccgaaggactcgactgttcttacaccgtgctgttcggaaaggccgaggctgatgaaatcttccaagagctggagaaggaagtggagtacttcaccggcgcgcttgccagggtacaggtcttcggcaaatggcattcagtgccacggaaacaggccacgtacggagacgccgggctcacatacactttttctggactgactctatctcctaagccttggatccctgtcctggagaggatccgggatcatgtgagtggggtgaccggctag

SEQ ID NO: 107897 - DNA, 366 bp, synthetic construct
  misc_feature 1..366: note = Description of Artificial Sequence: Synthetic coding sequence
  source 1..366: mol_type = other DNA
atggacaggtttcttgtgaagggagcccagggaggcctgctaagaaagcaggaagagcaggaacccaccggagaggagcccgcggtgcttggcggcgataaggagagcacacgcaaaaggccccgtcgcgaagcccctggtaatggcggacactccgctggccctagctggaggcacatcagggctgagggtctagactgctcttacactgtactctttggaaaggccgaggctgacgagatctttcaggagttggaaaaagaagtcgaatatttcacgggggcactggctagagtccaggtcttcggaaagtggcactcagttccaagaaaacaggctacctacggggacgccggtctaacttag

SEQ ID NO: 107898 - DNA, 483 bp, synthetic construct
  misc_feature 1..483: note = Description of Artificial Sequence: Synthetic coding sequence
  source 1..483: mol_type = other DNA
atggatcggttcttagtgaaaggcgcacagggcgggctgctgagaaaacaggaagagcaggaacccacaggagaagagccagctgtacttggaggcgacaaggaatctacccgcaaacggccccggcgcgaagcccctggaaacggtggtcacagtgccgggccatcttggcgccatatccgcgccgagggacttgattgcagttacaccgttctttttggaaaagccgaagccgacgagatttttcaggaactcgagaaagaagtagaatacttcaccggcgcccttgcacgcgtgcaggttttcggaaagtggcattcagtcccccgaaaacaggccacgtacggagatgccgggctaacatatacattctccgggttgactctcagccctaagccatggatccccgtcctggaaagaatcagagatcatgtatcaggtgtgaccggccagaccttcaacttcgtattgatcaaccggtag

SEQ ID NO: 107899 - DNA, 861 bp, synthetic construct
  misc_feature 1..861: note = Description of Artificial Sequence: Synthetic coding sequence
  source 1..861: mol_type = other DNA
atggaggagaaaagacgtagggcccgagtacagggcgcttgggccgcccccgtcaagtctcaagcgatcgcccagcccgctaccaccgccaagtctcacctccatcagaaacctggccaaacctggaagaacaaagaacaccacctgtccgaccgggagtttgtctttaaggagccacagcaggtggtgaggcgggctccagaaccacgagtcattgacagagaaggagtctacgagattagcctttcccctaccggcgtgtctcgggtttgtctgtaccccggattcgtggatgtgaaggaagccgactggattctggagcagctttgtcaagatgtgccctggaaacagaggactggaatcagggaagatattacttaccagcagccacgcttaaccgcctggtatggcgaactgccctatacttattcaaggattaccatggagcccaatccacactggcatcccgtcctgagaactctgaaaaatcggatcgaagaaaacactgggcacacgttcaacagccttctgtgtaacctgtaccggaacgaaaaagatagcgtagactggcactccgatgatgagcccagtctgggaagatgtcccatcattgctagcctctcatttggtgccacccggacctttgagatgcgaaagaagcccccgcctgaagaaaacggcgactacacgtatgtcgaaagagtgaaaatcccactggaccacggcacgctgctgatcatggagggtgcgacacaggccgattggcagcatcgagtccccaaggaataccactctagggagccgagagtgaatctaactttccgcactgtgtatcccgaccctcggggggccccgtggtag

SEQ ID NO: 107900 - DNA, 513 bp, synthetic construct
  misc_feature 1..513: note = Description of Artificial Sequence: Synthetic coding sequence
  source 1..513: mol_type = other DNA
atggaagagaagagaagacgagcacgggttcagggagcctgggcagcacctgtgaagtctcaggccatagcccagccagccacaaccgctaagtctcacctgcatcagaaacccggccagacatggaagaacaaggagcaccacctgtcagaccgcgaatttgtgttcaaagaaccccagcaagtagttagacgagcccctgaaccgagggtcattgaagaaggcgtgtacgagataagcctgtcacctacaggtgtgtcccgagtttgcttatatccggggttcgtagacgttaaagaggctgactggatattagaacagttgtgccaggatgtgccctggaagcagcggaccggcatcagagaggatagcatccttcagctcacctttaaaaagtccgcacctgtgtctggaaccgctaccgctccccagtcttgttggtatgaacggcccagtcctccccacatacctgggcctgctatacttaccaggacgcggctttgggcgccctag

SEQ ID NO: 107901 - DNA, 183 bp, synthetic construct
  misc_feature 1..183: note = Description of Artificial Sequence: Synthetic coding sequence
  source 1..183: mol_type = other DNA
atggaagagaaaagacgccgtgctcgggtgcagggtgcgtgggctgcacccgtcaaatcccaagccatcgctcaaccagctacgacggcgaagtcccatctgcaccagaaacccggacagacatggaagaataaggaacatcatctttccgatcgcgagttcgtcttcaaagagccgcagtag

SEQ ID NO: 107902 - DNA, 909 bp, synthetic construct
  misc_feature 1..909: note = Description of Artificial Sequence: Synthetic coding sequence
  source 1..909: mol_type = other DNA
atggccgctgctgcggcagagaccccggaagtgcttcgcgaatgtggttgcaagggcatcaggacctgtctcatatgtgagcgccagagaggaagcgaccctccttgggagctgccacctgccaagacctaccggtttatatattgtagcgatactgggtgggcggtcggcacagaagagtcagacttcgaaggctgggccttcccattccccggcgtcatgctgatcgaggatttcgtcactcgcgaagaggaagcagagttggtgcgcctgatggatcgggatccctggaaattaagccagtcaggacggaggaaacaggactatggacctaaagtcaatttcaggaagcagaaattgaagactgaggggttctgtgggctaccatctttctcccgcgaggtcgtgagaaggatgggactctaccccggactggaaggattcagacccgtcgaacaatgcaaccttgactattgtccagaaagaggatccgcaatcgatcctcacctggacgacgcctggctgtggggggaacggctggtcagcctgaatctcctatcgcccacagtgttgtctatgtgcagggaggccccaggatccctgctcctctgcagcgcaccctccgcggctccagaggctctggttgacagcgtcatcgccccctcccgcagtgtactgtgtcaggaggtagaggtcgctatacccctgcccgcacgcagcctgctagtactgaccggagccgctcggcaccagtggaaacacgctatccaccgtcgtcacattgaagcgcgacgagtatgcgtcacattccgggagctgtccgcagagttcggccccggtgggagacaacaggagctgggccaggagctcctcaggatagctctgtcatttcagggtagaccagtatag

SEQ ID NO: 107903 - DNA, 1377 bp, synthetic construct
  misc_feature 1..1377: note = Description of Artificial Sequence: Synthetic coding sequence
  source 1..1377: mol_type = other DNA
atggctgcggctagcgggtatacggatctgcgcgagaagctgaaaagtatgacgagcagagataactataaggccggatcacgagaggcggccgccgcagccgcagctgcagttgccgccgctgccgccgccgccgcagccgccgaaccctatcctgtgagtggagccaagaggaagtatcaggaagattcagatcccgagcgcagcgattacgaggagcaacagctccaaaaggaggaagaggcccgcaaagtaaaatccggtattcggcagatgcgcctattcagccaagacgaatgcgccaaaattgaagctcggatcgacgaggtcgtcagccgggctgaaaaaggactgtacaatgaacacaccgtcgacagggccccactcagaaacaaatacttctttggggaaggatatacatacggagcccaacttcaaaaaaggggaccaggccaggaaagattgtaccccccaggagatgtggatgaaatccccgaatgggtgcatcaactggtgattcagaaacttgttgagcatcgggttatcccagaagggtttgtgaattcagcggtaataaacgattatcagccaggaggatgcattgttagccacgtagatccgattcacatcttcgagaggccaattgtgagtgtcagttttttttcggactctgctctgtgcttcggctgcaaatttcagtttaagcctatccgggtgagcgaacccgtactgagtctaccagttcggcgaggctccgtgacggtgttgtcgggatatgcagctgatgagattacacattgcatcaggccccaggatattaaggagaggcgggcagtgatcatactgcgcaagacccggctggatgctcctcgtctggagacgaagtccctatctagttcagtgcttcctcccagctacgctagcgatcggcttagcggaaacaaccgagaccctgccctgaaacctaaaaggtcgcacagaaaagccgacccagatgccgcgcatcggcctcggatcctcgaaatggataaggaggaaaataggcggtctgtgctgctgcccacgcaccgccggcgcgggagctttagctccgaaaattattggaggaaatcatacgaatcctcagaagactgctctgaagcggctggctccccgggcaattctggttcctccctgcggtcttgcccttcattttgctttgagggcttcgtttttgtgcattggggggtctttgttttctgcttcctgttttttctgattctatacatcttcccctggttctgttgtctgcttggccttaagaatagaatagggcaggatcttgggagtcacatcctggggatcccccccgggtggaaagggtgctggcaccagtag

SEQ ID NO: 107904 - DNA, 1185 bp, synthetic construct
  misc_feature 1..1185: note = Description of Artificial Sequence: Synthetic coding sequence
  source 1..1185: mol_type = other DNA
atggcggctgcatccgggtataccgatttacgcgagaaactaaaaagcatgacatcccgcgataattataaggcaggcagtcgggaagcagccgcggcagccgcagcagcggtggctgctgccgcggccgccgcagctgccgccgagccatatcccgtatctggggccaagcgaaaatatcaagaagatagtgaccctgagcgctccgactatgaggagcaacagctgcagaaggaagaggaagcaagaaaggtaaagagcggtattcgccagatgagactgttcagccaggatgaatgcgcaaagattgaggcccgtattgacgaagtagtgtctcgcgccgagaaaggtttatataacgagcacacggttgacagggcaccacttcgaaacaaatacttttttggcgaaggatatacatacggggctcagctgcagaaacgcggccccggacaggagcgactgtatcctcccggcgatgtggatgagattcccgagtgggtacatcagctggtcattcagaaactagtcgaacaccgcgtaatccccgaaggatttgtaaattctgctgtcatcaatgattatcagccggggggctgcatcgtgtcgcacgttgacccaattcatatctttgaaagaccaatcgtttctgtctctttctttagcgacagcgccctctgtttcggatgcaagttccagttcaaacccattcgggtgagcgagcccgtgctgtcactccctgtgcgtcgcggatccgtcactgtacttagtggctatgccgcagacgaaatcacccactgcatcagaccacaggatattaaggaacgtagagccgtaataattctgagaaaaactaggttagacgccccacgcctggaaacaaagtctctgagctctagcgtgcttccaccttcctacgcttcagacagactctccgggaataacagggaccccgctttaaaacccaaaaggtcccatcgaaaggctgaccccgacgcggcccacaggccaagaatcctagaaatggataaggaggaaaaccggagatctgtgctgctaccaactcataggagacggggaagctttagttctgaaaactattggcgtaaatcctacgagagtagcgaggactgtagcgaggctgcgggatcccccgctcgcaaggtgaaaatgagaagacattag

SEQ ID NO: 107905 - DNA, 1152 bp, synthetic construct
  misc_feature 1..1152: note = Description of Artificial Sequence: Synthetic coding sequence
  source 1..1152: mol_type = other DNA
atgaggaggtgcaggcgtccatgtcctgccggacgcggtgaaggagggggcggtcggtccccagcggccgctgctgccgtcgccgcggccgccgcagccgccgcggctgcagagccatacccagtatcaggtgccaagagaaaatatcaagaggactcagatcctgagcggagcgattacgaggaacagcagctccagaaagaagaagaggccagaaaggtaaaatcaggaatccgccagatgagacttttttctcaagatgagtgtgcaaagatcgaggctcggattgatgaggtggtttcccgcgctgaaaagggcctgtataatgagcacacagtcgatcgagcgccactgaggaacaagtacttttttggcgaaggctatacgtacggagctcagcttcagaagcggggccctggtcaggaacgtttgtacccacctggggatgtggacgagataccagagtgggtccatcagttggtgatccaaaaacttgtggagcatcgcgtgataccagagggatttgttaattcagcagtcataaacgattaccagcccggtggctgtatagtatcccacgtggatccgattcatatcttcgaacgcccgattgtctccgtttccttcttttcagactcggctctctgctttgggtgtaaatttcagtttaagccaatcagagtttctgagcccgtgctcagtcttccagtgagaagagggagtgtgaccgttctgtctggctatgctgccgatgaaatcacacactgtatcagaccacaggacatcaaagagcgccgcgctgtaattattctccgcaaaacacgccttgacgccccaagacttgagacgaagtcactgtcctcgtcagtgctgccgccttcttatgcgtctgaccgcctgagcgggaataaccgggacccggccctgaaaccaaagaggtcccatagaaaagctgaccctgacgcggcccaccgccccaggattcttgagatggacaaggaagaaaaccgacgatcggtgttgttacctactcacaggcgccggggcagcttctcctccgagaactactggcggaagtcctatgaatcttctgaagattgctcagaggcagctgggtcccccgcacgaaaggtcaagatgcggcggcattag

SEQ ID NO: 107906 - DNA, 717 bp, synthetic construct
  misc_feature 1..717: note = Description of Artificial Sequence: Synthetic coding sequence
  source 1..717: mol_type = other DNA
atggaggagcaggatgcccgggtgcctgcgctcgaaccatttcgggtagagcaagcacctccagtgatctactacgttcccgatttcatttcgaaagaggaggaggaatatctgttgcggcaggtgttcaacgctcccaagcccaaatggacccaactatcggggcggaaactgcagaattggggcggactacctcacccccgtgggatggtgccagagcggcttccaccatggctgcagagatacgttgacaaagtctccaacctgagtctgtttggggggttaccagccaaccacgtcctggtgaaccagtatctccccggggagggcattatgccgcatgaggacgggcctctgtattaccccacagtctcaactataagcttgggctcccacacggtgctggatttttacgagccacgtcggcctgaggacgatgatcctactgagcagccgcggcctccgccaagacccacgactagcctgttactcgagccgaggtctctgctggttttaagagggcctgcgtacacacgcttgctccacgggattgccgcagcccgggtcgatgccctggatgctgcgtcttctcccccaaacgctgctgcatgccccagtgcccgacctggcgcttgcctcgtgaggggaacccgcgtgtctctgactattaggagagtcccccgcgttcttcgggccggtctgctgctgggtaaatag

SEQ ID NO: 107907 - DNA, 801 bp, synthetic construct
  misc_feature 1..801: note = Description of Artificial Sequence: Synthetic coding sequence
  source 1..801: mol_type = other DNA
atggccggccgcggcatgggtatgctgaatctggaaatcggaggtgacgcaggcgggcggatcggttgtaaagaattggtactgatggaagaacaggacgctcgcgtgcccgctcttgagcccttccgagtcgagcaggctccccccgtaatctattatgtaccagactttataagtaaggaagaagaggaatatcttttacgccaggtgtttaatgctccgaagccaaagtggacccagctcagcgggcggaaactgcagaactggggcgggctgcctcaccctcgcggaatggtacccgaacgactgccaccgtggctgcagaggtatgtggacaaggtttccaacctgtccctattcggtggactgcccgccaatcatgtgttggtcaaccaatacctccctggggagggcataatgccccacgaggatgggcctttgtactatccaacagtatctacaatcagtctgggctcccacacggtcctcgacttctatgagccacgcagaccagaggatgatgatcctacggagcagcctcgcccccctcccagacccacaaccagcctgctgctagaaccacggtccctgctggtgcttagaggaccggcgtatacacgactcctacatggcatagccgcagcacgagtcgacgcactcgacgctgcttcaagcccccctaacgcagcagcctgccccagcgcgaggcccggcgcctgcctggtgagaggtacccgagtctcccttacaatcaggcgcgtgcctcgagttctgagagctgggttgcttctaggaaagtag

SEQ ID NO: 107908 - DNA, 717 bp, synthetic construct
  misc_feature 1..717: note = Description of Artificial Sequence: Synthetic coding sequence
  source 1..717: mol_type = other DNA
atggaagaacaggatgccagggtgccagcactggagccttttagggtggaacaagcccctcctgtcatttactacgtcccggacttcatctcgaaagaggaggaggaatacctgttgagacaagtgtttaatgcaccaaagccaaagtggacacaattatctgggcggaagttgcagaattggggcgggctccctcatccgcgcggtatggtgcccgaacgcctccccccctggttacagaggtatgtcgacaaagttagcaacctttccttatttggagggctaccggccaaccatgtgcttgtgaaccaatacttgccaggagaggggatcatgccacacgaggacgggcctttgtattaccccacagtcagcacgatttccctgggctcgcatactgtcctggatttctacgagccgcggagaccggaggacgacgatcccacagaacagcctcggcctccccctcggccaacaactagcctcctgctggagccgaggtcactgctggttttgcgaggcccagcatacacaaggttgctgcacggaatcgccgccgcgcgcgtggatgctctggacgccgcctcatcacccccaaatgctgcagcctgcccctcagcaagaccaggagcttgtcttgtgcgcgggaccagggtatctctgaccatccgtcgcgtgccccgcgttttaagagccgggctgctgctggggaagtag

SEQ ID NO: 107909 - DNA, 666 bp, synthetic construct
  misc_feature 1..666: note = Description of Artificial Sequence: Synthetic coding sequence
  source 1..666: mol_type = other DNA
atggcggggacggggctccttgctctccgtacgctgcccggacctagttgggtcaggggcagcgggccttcagtattgtcaagactgcaggatgccgcggtcgtccgtcctggcttcctgtcaaccgccgaggaagaaaccctttctagagagttggaacccgagctgcgacgcagaaggtatgaatacgaccattgggatgctgctattcacggtttccgggagaccgagaagagtaggtggtcagaagcatctagggccattctgcagagagtgcaggcggctgcttttggccccggtcaaacgctgctttcatctgtccatgtactggaccttgaggccagaggctatatcaaaccccatgtcgatagtatcaaattttgtggcgccaccattgccgggttgagcctgctaagtccttcggtgatgaggctggtccacacacaggagccgggagagtggctcgagctgttgcttgagcccgggtctttgtatattttgagaggcagcgctcgctatgattttagccacgaaatcctccgagatgaggaatcattttttggcgagcggcgaattccccggggccggaggatatctgtcatttgcagaagcctccctgagggaatgggccccggtgagagcgggcaacctccccctgcctgctag

SEQ ID NO: 107910 - DNA, 1995 bp, synthetic construct
  misc_feature 1..1995: note = Description of Artificial Sequence: Synthetic coding sequence
  source 1..1995: mol_type = other DNA
atggattctaatcaccagtcaaactataagctcagtaaaaccgaaaaaaaatttttacgcaaacagatcaaagccaagcacacgctcctgagacacgaaggaatcgagacggtctcttatgccacacagagcctggtcgtggccaacggcggcttgggcaatggggtatctcgcaatcagttgctccccgtgttagagaagtgtggcctagtggacgcgctgctaatgcccccaaacaagccttacagttttgcccgatatcgcactacggaagaatctaagcgagcatacgtgacccttaatggaaaagaagtggtggatgatctggggcagaaaattacactgtacttaaactttgtggaaaaggtccaatggaaagagctgaggccacaggctcttccgcctggtctgatggttgtggaagagataattagctcagaggaagagaaaatgttgcttgagtccgtggactggacggaagacaccgacaaccaaaacagtcagaaaagcctcaagcaccggagggtgaagcattttggatatgaatttcattacgagaataacaacgtagacaaggacaaacccctcagcggcggtctgccagatatatgcgaaagctttctggagaaatggctccgtaagggctatatcaagcacaagcccgatcagatgaccatcaatcagtacgagcccggacagggaatcccagcacacatcgatacccatagtgcgttcgaagatgagattgtcagtctgtccttaggtagcgagattgtgatggacttcaaacaccccgatggtatcgccgtgccagtcatgctgccaaggaggtctctattggttatgacaggagaaagtagatacctatggactcacggaattacgtgcaggaagttcgataccgtgcaggcatctgagagtctcaagtcagggatcattaccagcgatgtcggagacctcaccctgagtaagagaggactgcggacgagctttactttcagaaaggtgcggcagacaccctgtaattgtagctaccccctggtgtgcgactcacaaagaaaggagacaccaccgagcttccccgagagtgataaggaagcctccaggttagagcaggaatacgttcatcaagtgtacgaggagatcgcgggacacttctcctcaacgagacacacaccctggccccacatcgtggagttcctgaaggctctgccctcaggctccatcgtggcggacattggttgtggtaacggcaaatatttggggataaacaaagagctctatatgattggttgcgatcggagccagaacctggtggacatctgtcgcgagcgtcaattccaggccttcgtctgtgatgcactggcggttcctgtccggagtgggtcttgtgacgcttgcatttcaatagcggtcattcaccacttcgctactgccgagcggcgcgtcgccgcattgcaggaaatcgtccggctccttcgccctggcggcaaagcactgatctacgtatgggctatggagcaggagtataataaacaaaagtccaagtatctccggggtaacagaaatagccagggcaaaaaggaggaaatgaactccgacacttccgtgcagagatctctagtagaacagatgcgcgacatgggcagcagggatagtgcctcaagtgtaccgagaatcaacgatagccaggaaggtggatgcaacagccggcaggtttccaacagcaagctgcccgtccatgtcaatcgcacttccttctactcgcaagatgtgctagtgccatggcacttgaaggggaacccagacaaggggaaacctgttgagccctttgggcctatcggctcacaggatccttcaccagtgttccaccggtattatcacgtgttccgagagggcgagctggaaggagcatgtcgcacggttagcgatgtcagaatcctgcagagctattacgaccagggaaattggtgtgtgatcctccaaaaagcctag

SEQ ID NO: 107911 - DNA, 2004 bp, synthetic construct
  misc_feature 1..2004: note = Description of Artificial Sequence: Synthetic coding sequence
  source 1..2004: mol_type = other DNA
atgtttgccatggacagcaaccaccagagcaattacaagttaagcaagaccgagaagaaatttctcaggaaacagattaaggctaaacatacgcttctaaggcacgagggtatcgaaacagtgagttatgcaactcagagtctcgtcgtggcaaacggggggctgggcaatggcgtgtctcggaatcagctgctccctgtgcttgagaagtgcgggcttgtggacgccctactgatgccccctaataagccttattccttcgcaagataccgcaccactgaagaaagtaaaagggcctatgtcactctgaatggaaaggaggtcgtcgacgatctgggccagaaaataacactgtacttgaatttcgttgagaaagtacagtggaaagagttgagaccgcaggccttgccacccggtctcatggttgtggaagagataattagttccgaagaagaaaagatgctgttggagagtgttgactggaccgaagataccgataaccagaactcgcaaaaaagtttgaagcaccgtagagtcaagcatttcggctacgaattccattatgagaataacaacgtcgacaaagataagcctctgtcagggggcctgcctgatatttgcgagtctttcctggagaagtggctgcgtaaaggttatatcaaacataagcctgatcagatgaccatcaaccagtatgagccaggccagggcattcccgcccacatcgatacccacagtgccttcgaagatgaaatagttagcctctcactcgggtccgaaatcgtcatggactttaagcatcctgatggaatcgccgttcccgtcatgctgccgcgccgaagtttgttggtgatgacaggcgagtcgcgttacttgtggactcatgggattacctgtaggaaattcgatacggtgcaagcctccgaatcactgaagtctggaattatcacgagcgatgtgggcgacctgacccttagcaaaaggggtctccgcacatccttcacattccgtaaagttaggcagacgccatgcaactgttcatatccgttggtatgtgacagccagaggaaggaaacaccacccagctttccagagtccgacaaagaagcttcgaggctcgaacaggaatatgtccatcaggtgtacgaggaaattgcaggacatttttcctcaactcggcatacgccctggccccacatcgtggaatttctgaaggctttgccgtccggctccattgtggctgatattgggtgcggcaatgggaaatacctcggtatcaacaaggagttatacatgattggttgcgatcgctctcaaaatttggtcgatatatgtcgcgagcggcaatttcaggccttcgtgtgcgatgccctcgcagtgcctgttcgatccggcagctgtgatgcttgcatctctatcgccgtgatccatcatttcgccacggcagaaagaagggtcgccgcactgcaggaaatcgttcggttgctacggccagggggcaaagcactgatttatgtgtgggccatggagcaggaatataataaacagaagtctaagtacctgagagggaatagaaattctcagggcaagaaagaagagatgaattctgacacatccgttcaacggtcgctggtagaacagatgcgcgatatggggagccgggactcggcttcgtctgtccccaggattaatgactcccaggaaggcggctgtaacagccgacaggtaagcaacagcaagttacctgtacacgtgaatagaacgtccttttattcccaggacgtgctcgtgccctggcatttaaaggggaaccctgacaaggggaagcccgtcgagcccttcggaccgattgggtcccaggatccctcccccgttttccataggtactatcacgtttttcgagaaggcgaattagaaggtgcatgtagaactgttagtgacgtgagaatcctccaatcatactacgaccagggcaactggtgtgtaattctccaaaaggcgtag

SEQ ID NO: 107912 - DNA, 1995 bp, synthetic construct
  misc_feature 1..1995: note = Description of Artificial Sequence: Synthetic coding sequence
  source 1..1995: mol_type = other DNA
atggactctaatcaccagagcaattataagttgtctaaaactgaaaagaagtttttgagaaaacagatcaaagccaagcatacattgctgcgtcacgagggtatcgaaactgtgtcctatgccacccagtccctggtggtcgcaaatggggggcttgggaatggtgtcagccgcaatcagttgttgcctgtcctggaaaaatgcgggctggttgacgctctcctgatgcccccgaataagccctatagctttgctcggtaccgcacaactgaagagagtaaacgagcctacgtgaccttgaatggtaaggaggttgtcgacgatctcgggcaaaagatcaccctctatcttaactttgtcgaaaaggtgcagtggaaagagctccgcccgcaggccttgccccctgggctgatggtagtggaggagataatctcctccgaggaagagaaaatgttactggaatcggttgattggaccgaggacactgacaaccagaattcacaaaagtctttaaagcaccgtcgcgtgaaacactttggttacgagttccactatgagaacaataatgttgacaaggacaagcccctgtcaggcgggcttcctgacatctgcgagagcttccttgaaaagtggttgagaaagggatatattaagcataagccagatcagatgacaattaaccagtacgagcccggccaggggattccagcacatattgatacacactcagcctttgaagacgagatcgtctccctgtccttgggctccgagatcgtgatggattttaaacatccagacggcatcgccgtcccggtgatgctgccgcggaggtctctcttggtcatgacaggggaaagccgttatctatggacacacggaatcacctgccgtaagtttgacaccgttcaggcctccgagtctctcaaaagtgggatcatcacaagtgacgttggcgacctgacactcagcaaacggggtctcagaaccagcttcacattccggaaagtgagacagaccccttgcaactgctcctaccctctcgtctgtgactcccaacggaaggagacacctcctagcttccccgagtccgacaaggaagccagccggttggaacaagaatatgtgcatcaggtctatgaagaaatcgctggccacttcagctccacccgccataccccgtggccccacattgtggagttcctgaaggcgctcccgtccgggtctattgtggccgacatcgggtgcggcaatgggaagtacctgggaatcaacaaggaactgtacatgatcggttgtgatcgatcccagaacctggtcgatatctgccgggagagacagttccaggcgttcgtgtgcgatgctctagcagttcccgtgcggtctggctcctgcgacgcctgcatttctatagcggtgatacaccacttcgccactgcagagcgcagggtggccgctctgcaggagattgtgcggctcttgagaccaggaggcaaggccctgatttacgtgtgggccatggagcaggagtacaataagcagaagagcaagtacctgaggggcaatcggaactcacagggtaaaaaggaagaaatgaattcagacacctcggtgcagcgcagtctcgttgaacagatgcgggatatggggtcccgggacagcgccagcagcgtgcctcgcatcaatgattctcaggaagggggatgcaatagccgccaagttagtaattccaaactgcccgtgcatgtcaaccggaccagcttttacagccaggacgttttagtcccttggcatctgaagggcaaccccgataaaggcaaacccgtcgagccttttggaccaattggtagccaggacccaagcccggtgttccatagatactatcacgtttttcgagaaggggaattagaaggcgcctgtcgcactgtctccgatgtccggatcctgcagagctactatgaccaggggaactggtgcgtgattttacagaaggcctag

SEQ ID NO: 107913 - DNA, 675 bp, synthetic construct
  misc_feature 1..675: note = Description of Artificial Sequence: Synthetic coding sequence
  source 1..675: mol_type = other DNA
atggattctaatcaccagtctaattataagctcagcaagactgaaaaaaaatttttacgtaaacagattaaggctaaacacacactgcttcgtcacgagggtattgagactgtgagctacgcaacccagtcccttgtcgtggccaacgggggacttggcaacggagtgtctcgcaaccagctcctgccagtacttgagaaatgcggtcttgttgatgcattacttatgcctcccaacaaaccgtatagtttcgcccgctacagaaccacagaagaatccaaacgtgcatacgtcaccctcaacggaaaggaggtggtggacgacctgggacagaaaatcacattgtacctaaactttgtcgagaaggtgcagtggaaagagttgcggccccaagcattaccgcccggacttatggtggttgaggagattatcagcagcgaagaggagaaaatgctcctcgaatctgttgactggaccgaagatactgataatcagaatagtcaaaaaagcctgaagcaccgccgggtgaagcatttcgggtacgagtttcattacgaaaacaacaacgttgataaagataaacctctctcaggtggtcttcctgatatctgcgagtcatttttagaaaagtggctgaggaaagctgagaaaaacctggaggtaggcatacactag

SEQ ID NO: 107914 - DNA, 1338 bp, synthetic construct
  misc_feature 1..1338: note = Description of Artificial Sequence: Synthetic coding sequence
  source 1..1338: mol_type = other DNA
atgaagaatcccgaggctcaacaagacgtcagcgtgtcccagggctttcgcatgctcttttataccatgaagccctccgagacgtctttccagacactcgaggaggtccccgattacgttaagaaggcaacaccattctttatcagtttgatgcttctggagctggtagtcagttggattttgaaagggaaacctcccgggcgtctcgatgatgccctcacctccatctctgctggcgtgcttagtcggctaccatcccttttctttaggtcaatagagctgaccagctatatatatatttgggaaaattacaggctgtttaacttaccctgggattcgccatggacttggtattctgccttccttggggtagatttcggctactactggtttcataggatggcccacgaggtcaacattatgtgggcgggccatcagacacaccactctagtgaagattacaacctgtcaactgcgttacggcagtcagtgctgcagatatacactagctggattttttacagtccactcgctttgttcatacccccgagcgtgtacgcggtgcatctccaatttaatttgttataccagttttggattcatactgaggtgatcaataacctgggaccattggagttaatcctcaacacaccatcacaccaccgagtacatcacgggaggaataggtactgcatagacaaaaactacgcaggggtactgatcatatgggacaagatattcggcacctttgaagctgagaatgagaaggtcgtttacggactgacacatcccatcaacacatttgagcccattaaggtccaattccatcatctgttcagcatttggactacattctgggccacgcctgggttttttaacaagtttagcgtgattttcaagggaccaggctggggacccggaaaaccaaggctgggcttgagtgaggagattcccgaagtgacaggcaaggaagtgcctttctctagcagctctagtcaactgctcaagatatatactgtcgtgcaatttgccctgatgctggccttttatgaagagaccttcgctgataccgccgcgctctctcaggtgacactcctgctgagggtctgctttatcatactgaccctaacaagtattggattcctcttagaccagcgccctaaagccgctatcatggagacccttaggtgcttgatgtttcttatgctgtaccgattcgggcacctcaagcctctggtgcctagtctgtccagcgcgttcgagattgtgttctccatctgtattgcattctggggagttcgcagcatgaaacagctgactagccacccttggaaatag

SEQ ID NO: 107915 - DNA, 1977 bp, synthetic construct
  misc_feature 1..1977: note = Description of Artificial Sequence: Synthetic coding sequence
  source 1..1977: mol_type = other DNA
atggcagaagcagccgcggccgccggcggaacaggactgggtgccggcgcatcctatggaagcgccgcggatagagatcgcgatcccgaccctgatagggccggacgacgcctgcgggtcctgtctggtcacttgttgggccgaccaagagaggctctgtctaccaatgagtgcaaggctcggcgagctgcgagcgccgctacggctgcaccgacagctacccccgccgcacaggagtctggaactattccaaaaaagagacaagaagttatgaaatggaacggatggggctataacgattccaagttcattttcaataaaaaagggcagattgaattgaccgggaaaagatatccactgtctggaatgggactcccgacctttaaagagtggatccagaacaccttaggagttaatgtcgaacataagactacatccaaggctagtctgaatccgtctgatacacctccctccgttgtcaatgaagattttctgcacgatctgaaagagaccaatatctcgtacagccaagaagcggacgacagggtctttagggcacatggccactgtctgcatgagatattcttgttgcgggaaggtatgtttgaacggatcccagacatcgtactttggcctacctgccatgatgatgtcgtgaagatcgttaatcttgcctgcaagtataacctctgtattatccccataggcggtgggacatccgtgtcatacggactcatgtgtcccgccgatgaaactagaactatcatcagtctggacacttcccagatgaatcggatactttgggtggatgagaataacctaactgcccacgtcgaagcaggtatcactgggcaagaactggagagacagctcaaagaaagcggctactgtaccggacacgaacctgatagcctggagttttctacagtcggcggctgggtctcgacgagagcctctggaatgaaaaaaaacatctacggcaatatagaagatctcgtggtgcatatcaagatggtgactccacgcggtatcatcgaaaagtcttgtcagggaccacgaatgtcaacagggcctgatatccatcatttcatcatgggttccgagggtactctgggagtgattactgaggcaactatcaagatcagacccgttcctgagtaccagaaatatggctcggtcgctttcccgaactttgaacaaggggtcgcttgtctgcgggagatagcgaagcagcgatgcgccccagcatctattcgcctgatggataataagcagttccagtttggccatgcactgaaaccacaggtgtcgtcgatttttaccagctttctggatgggctcaaaaagttctacatcaccaagttcaagggcttcgatccgaaccagctatccgtagcgacgctgctcttcgagggtgatagggaaaaggtgttacaacacgagaagcaggtctatgatatcgctgctaagttcggcgggttggccgctggcgaagacaacggtcagcggggttatctactgacatacgtgattgcatatatacgtgatttggctttggagtattatgtgttgggagagagcttcgagacgtccgcaccttgggaccgcgtcgtcgatctgtgtagaaacgtgaaggaaagaattactcgggagtgcaaagaaaagggcgtacaatttgcaccattcagcacttgccgggtgacccagacatacgatgccggagcctgcatttacttttacttcgcctttaactacaggggaatatccgatcctcttacagtcttcgaacagacagaggccgcagccagagaggagattcttgccaacggggggagtctgagccaccaccacggcgtgggaaaactgagaaagcagtggttgaaagaatccatttcggatgtcggctttggcatgttgaaatcggtgaaggagtatgtagacccgaataacattttcgggaacaggaatcttctctag

SEQ ID NO: 107916 - DNA, 966 bp, synthetic construct
  misc_feature 1..966: note = Description of Artificial Sequence: Synthetic coding sequence
  source 1..966: mol_type = other DNA
atggatccaaagtacccgtggagcaagtgcggccataaaacgacctccaaagctagtttgaatccctccgatacgccgccatccgtcgtcaatgaggactttttgcacgacctgaaagagaccaatatctcgtattcacaggaagccgacgaccgggttttcagggcgcatgggcattgtcttcatgaaatattcctgttgagagaaggaatgtttgagaggatccccgatatcgttttatggcctacatgtcacgacgacgttgtaaagatcgtgaatttggcctgtaagtacaacctatgcatcatccccattggggggggtactagcgtgtcctatggcctgatgtgccccgccgacgagaccagaacaatcatctctctagacaccagtcaaatgaataggatcctttgggtcgacgagaacaacctgacagcacacgtagaggctggaatcaccggccaggagctggagcgacagctcaaggagagtggttattgcaccggacatgagccagacagcctcgagttctctactgtggggggttgggtgtctactagggccagcggaatgaaaaagaacatctatgggaacatcgaagatttagtagtccacataaaaatggttaccccgcgaggaatcatcgaaaaatcttgtcagggtccccgaatgtctacagggccagatatacatcacttcatcatgggctcagagggcactctgggagtgattaccgaggctacaatcaaaatacgccctgtgccagaataccagaaatacggttccgttgcctttcccaactttgaacagggcgtggcatgtttaagggaaattgcaaaacagcgatgtgcacctgcttccatccgcctgatggataataaacagtttcagtttgggcatgcactgaaaccccaggtcagctcgattttcacatcctttctggatggcctcaaaaagttctactag

SEQ ID NO: 107917 - DNA, 1176 bp, synthetic construct
  misc_feature 1..1176: note = Description of Artificial Sequence: Synthetic coding sequence
  source 1..1176: mol_type = other DNA
atggatatggcaagcgaatccgtcgggggaaaaattctgttcgccaccgacgattttttcgcaccggccgaaaatctgataaagagcgactcaccctgcttcaaagagcacgaatacactgaattcggaaagtggatggatggctgggagactcgcaggaagaggatccctggccacgattggtgtgtgttgcgactgggcatacagggtgtgatccgtggtttcgatgttgacgtgtcatattttacgggggattacgctcctcgagtgtccattcaggcagcgaatttggaggaagataaactgcccgaaattccagaaaggggtaccaggacaggagcagccgccactcccgaggaattcgaggctatagcagagctgaaaagtgacgattggagctacctggtccctatgactgaactgaaaccaggcaaccccgcttctgggcataactactttttggtcaattctcagcagcggtggacccatattcgccttaatatttttcccgacggaggtatagcacgactgcgagtgtttggcacgggacagaaggactggaccgccacagaccctaaggagccagccgatctggtggcgattgcttttggaggggtatgcgttgggttttctaatgctaaatttggtcaccccaataatataataggagttgggggtgcaaagagtatggccgatggatgggaaaccgccagaagacttgacagacccccaatccttgagaatgatgaaaacgggatactgctcgtgcctggctgtgagtgggcagtattccggctggctcaccctggcgttatcacgcgtattgagattgacacaaagtatttcgaaggaaatgcacccgatagctgtaaagtggacggctgtattctgactacacaggaggaggaggccgtcattcgtcagaagtggatcttacctgcacacaaatggaagcccttgttacctgtgaccaaactgtctccaaaccagtctcatctgtttgattctctaacacttgagctgcaggatgtaattacccacgcacgactaaccatcgtgcccgatggaggcgtcagccgcctgaggttgcggggttttccttcctcgatatgtcttctccgtccgagagaaaaaccaatgttaaaattctccgtgtcttttaaggccaacccttag

SEQ ID NO: 107918 - DNA, 486 bp, synthetic construct
  misc_feature 1..486: note = Description of Artificial Sequence: Synthetic coding sequence
  source 1..486: mol_type = other DNA
ggacgcaaggcctcagagaagaccgggggtcgggaaggcgagcctgccgatcgaggcctgcaactaggtgggaaagccttcggacttctcaaagcacaacaggaagaaaggcttgacgagataaacaagcaatttctggacgatcctaaatattcttcagacgaggacttgcctagtaaactggaggggtttaaagaaaaatatatggagttcgacctaaatggaaacggcgatatcgacatcatgtcgctgaaaagaatgcttgaaaaactgggagtgccaaaaacacacctggagctgaagaagctcatcggcgaggtctctagtgggtcaggagagacttttagctaccccgattttttgcgcatgatgttgggcaaacgatccgcaatcctgaagatgatactcatgtatgaggaaaaggcccgggagaaagagaagccaaccggacccccagcgaaaaaagccattagcgagctgccatag

SEQ ID NO: 107919 - DNA, 282 bp, synthetic construct
  misc_feature 1..282: note = Description of Artificial Sequence: Synthetic coding sequence
  source 1..282: mol_type = other DNA
atggaattcgacttgaacgggaacggagacattgacattatgtctctcaaacgtatgctcgagaagttgggcgtgcctaagacacacctggagttaaagaagttaatcggggaggtgtcaagcggatcaggagagacattcagctatccggatttcttacggatgatgctggggaaacgttcagccatcttgaagatgatactgatgtatgaggaaaaagcccgtgagaaggagaaacctacaggtccacctgcgaagaaagctatctctgagctaccatag

SEQ ID NO: 107920 - DNA, 444 bp, synthetic construct
  misc_feature 1..444: note = Description of Artificial Sequence: Synthetic coding sequence
  source 1..444: mol_type = other DNA
atgtcacaaactagagacctccaggggggcaaggcatttgggctgctgaaagctcagcaggaagaacgactggacgaaataaacaagcagtttctggacgacccgaagtattcttcggatgaggacctcccttccaaactggagggtttcaaagaaaaatacatggagtttgacctgaatggaaacggtgacatcgatatcatgagcctgaaacgcatgcttgagaagctgggggtgcccaagacgcatctggaacttaaaaaactgatcggtgaagtgtcgagcggatcaggcgagaccttctcttatcccgattttctgaggatgatgcttggcaagagatcggctatcctgaaaatgattctgatgtatgaggagaaggctcgcgaaaaggagaaacctaccggaccccccgcaaagaaagcaatcagtgagttaccctag

SEQ ID NO: 107921 - DNA, 282 bp, synthetic construct
  misc_feature 1..282: note = Description of Artificial Sequence: Synthetic coding sequence
  source 1..282: mol_type = other DNA
atggaatttgacctaaatggcaatggagacatcgatataatgtctctcaagcgtatgctggaaaagctgggggttccaaaaacgcacctggaactgaaaaagctgattggagaggtgagttctggaagcggcgaaacatttagctatccagacttcttgaggatgatgctcggcaaaaggagcgccatcctcaagatgatcctgatgtacgaagagaaggcaagagagaaagagaaacccaccgggcccccagccaagaaggccatctctgaactcccctag

SEQ ID NO: 107922 - DNA, 444 bp, synthetic construct
  misc_feature 1..444: note = Description of Artificial Sequence: Synthetic coding sequence
  source 1..444: mol_type = other DNA
atgtctcagaccagagatctccagggcggcaaggccttcgggctgctgaaggctcagcaggaggagagactagacgaaatcaataaacagttcttggacgacccaaaatattcctccgacgaggaccttccaagcaagttggaagggtttaaggagaaatacatggaatttgatttaaatggcaatggggacatcgacatcatgagcctcaagaggatgctggagaagctcggcgttcccaaaactcacttagaactcaagaagctgatcggggaagtgtcatcagggtcaggggagacgttctcctatcctgactttcttcggatgatgctgggaaaaaggagtgccattttaaagatgatcctgatgtacgaggagaaggcccgagagaaggagaaaccgaccggaccacctgccaagaaggctatatctgagctaccttag

SEQ ID NO: 107923 - DNA, 486 bp, synthetic construct
  misc_feature 1..486: note = Description of Artificial Sequence: Synthetic coding sequence
  source 1..486: mol_type = other DNA
ggtcggaaagcaagtgaaaagacaggaggaagggaaggggaacccgctgataggggccttcaattgggcgggaaggcttttggactgctgaaggctcagcaggaagagcgcctggatgagatcaacaaacaattcctggacgatccaaaatacagctctgacgaagacctaccctctaaattggaagggttcaaagagaagtatatggaatttgacttaaatggcaacggggatatcgatatcatgtccctcaagcgtatgctcgaaaaactcggtgttcccaaaacccatctcgagttaaagaagttgatcggggaggtgtcgtctggaagcggagagacatttagctatccagatttcctgagaatgatgctgggcaagaggagcgctattctgaagatgattctgatgtatgaggagaaagcgagagaaaaggaaaaacctactgggccacccgctaagaaggcaataagtgaactgccctag

SEQ ID NO: 107924 - DNA, 444 bp, synthetic construct
  misc_feature 1..444: note = Description of Artificial Sequence: Synthetic coding sequence
  source 1..444: mol_type = other DNA
atgagccagacccgtgacctgcaggggggtaaggcattcgggctcttgaaagctcagcaggaagagagactggacgaaattaacaaacagttcctcgacgatccaaagtattcttctgacgaagatttaccaagtaagctggagggatttaaggaaaagtatatggagttcgatttgaatggaaacggggacattgatataatgtctctcaaacgaatgctcgaaaagcttggcgtgcctaagacacacctggagttaaaaaagctgattggagaggtgagctctgggagcggagagacattttcatatcccgactttcttaggatgatgctggggaaaaggagtgccattctgaagatgatcctcatgtacgaagagaaggcaagagaaaaggagaagccaaccgggccgcctgcgaagaaagcaatctctgaactgccctag

SEQ ID NO: 107925 - DNA, 444 bp, synthetic construct
  misc_feature 1..444: note = Description of Artificial Sequence: Synthetic coding sequence
  source 1..444: mol_type = other DNA
atgtctcaaacgcgagacttacagggaggcaaggcattcggcctcctgaaagctcaacaggaagagagactggacgaaatcaataagcagtttttggatgaccccaaatacagctctgacgaagacctcccctctaaactagaagggtttaaagagaagtatatggaattcgatctgaacgggaatggcgacatagatataatgtccctcaaacggatgctggaaaaattgggagtacctaagacacatctggagctgaagaagctgatcggagaagtgtcctcggggagcggcgagacattttcataccccgacttcctacgcatgatgctcggcaagcgaagcgccatcctcaagatgatcctgatgtacgaggagaaggctagagaaaaggagaaaccaaccggacccccagcgaagaaggctatttccgagctgccatag

SEQ ID NO: 107926 - DNA, 282 bp, synthetic construct
  misc_feature 1..282: note = Description of Artificial Sequence: Synthetic coding sequence
  source 1..282: mol_type = other DNA
atggaattcgatttgaatggcaacggtgatattgatataatgagcctcaaacggatgcttgaaaagctaggtgtccctaagacccatctcgagcttaaaaagctgatcggcgaagtgtcttcagggtctggggagacattcagctaccccgatttccttcggatgatgctgggtaagcgcagcgctatcctgaagatgattctcatgtatgaagaaaaggcccgggagaaggagaagcctacaggaccccctgcgaagaaggctatctctgagctcccatag

SEQ ID NO: 107927 - DNA, 282 bp, synthetic construct
  misc_feature 1..282: note = Description of Artificial Sequence: Synthetic coding sequence
  source 1..282: mol_type = other DNA
atggagttcgacttgaatggaaatggagatattgacatcatgagtctcaaaagaatgctggaaaagctgggagtgccaaagacccacctcgaattaaagaaattaatcggggaggtgtcatcagggtccggcgagacattcagctaccctgacttcctcagaatgatgctgggcaaaagatcggctatactgaagatgatcctgatgtacgaagagaaagcacgcgagaaagagaaacccactggcccccctgccaaaaaggctatcagtgagcttccatag

SEQ ID NO: 107928 - DNA, 486 bp, synthetic construct
  misc_feature 1..486: note = Description of Artificial Sequence: Synthetic coding sequence
  source 1..486: mol_type = other DNA
ggacgaaaggcctccgagaaaaccgggggcagagaaggggaaccggccgaccggggtctgcagctaggagggaaagcttttggactgttaaaagcacaacaggaagagcgtttggatgagatcaataaacagttccttgacgatccaaaatacagtagcgatgaggatctgccgtctaagctggaggggtttaaagagaagtatatggagttcgatctgaatggcaacggggacattgacatcatgtcgttgaagcgcatgttagagaaactgggtgtgcccaagacccaccttgagttgaagaagcttatcggcgaagtttcatccggaagcggtgaaaccttttcctaccctgactttcttaggatgatgctgggaaagcgatccgcaatacttaaaatgatccttatgtacgaagaaaaagctcgcgagaaagagaagcccacgggtcctcccgccaagaaagccatatccgagctcccatag

SEQ ID NO: 107929 - DNA, 282 bp, synthetic construct
  misc_feature 1..282: note = Description of Artificial Sequence: Synthetic coding sequence
  source 1..282: mol_type = other DNA
atggaattcgacttgaatggcaatggcgacatcgatatcatgagcctgaagcgtatgttggaaaaactcggcgttcccaagacccatttggagctgaaaaagttaattggagaagtgtctagcggctctggggagacctttagctacccagacttcttgcggatgatgttgggtaagcggtccgcaatactgaagatgattttgatgtacgaagagaaggctcgcgagaaggaaaaaccaactggtcctcccgccaaaaaggccatttccgagctgccctag

SEQ ID NO: 107930 - DNA, 282 bp, synthetic construct
  misc_feature 1..282: note = Description of Artificial Sequence: Synthetic coding sequence
  source 1..282: mol_type = other DNA
atggaattcgacctgaacggaaatggggacatcgacattatgtcactgaagcgcatgcttgagaagctcggtgttcctaaaactcatctcgagctcaagaaactgatcggtgaagttagttctggttctggtgaaacgtttagctatccagacttcctgcgcatgatgcttggtaaaaggtctgctatcttgaaaatgattctgatgtatgaagaaaaggcccgcgagaaggagaagccaacagggcctcccgccaaaaaggccattagtgagttgccttag

SEQ ID NO: 107931 - DNA, 444 bp, synthetic construct
  misc_feature 1..444: note = Description of Artificial Sequence: Synthetic coding sequence
  source 1..444: mol_type = other DNA
atgtcacagactagagacctgcagggaggcaaggctttcggtctcctcaaggctcagcaagaggaaagactagacgaaataaacaaacaattcctggatgatcccaagtattcctcggatgaagacctgcccagtaagttagagggcttcaaagagaaatacatggagtttgatcttaacggtaacggcgacatcgacatcatgagtttgaagcgcatgttggaaaaacttggagtacccaagactcacctggaattgaagaagctgatcggggaagtttctagcgggtctggcgagacattttcttatccggactttctgcgcatgatgctgggtaaacgctccgcaatcctaaagatgatcctgatgtatgaagaaaaagcacgcgaaaaggagaagccgaccgggcctcctgcaaaaaaggccatatcggagttaccgtag

SEQ ID NO: 107932 - DNA, 486 bp, synthetic construct
  misc_feature 1..486: note = Description of Artificial Sequence: Synthetic coding sequence
  source 1..486: mol_type = other DNA
ggtcgtaaggcgagcgagaaaactgggggtcgagaaggggagcccgctgaccgaggcctgcagcttggcggaaaggcatttggcttgttaaaggcacagcaggaggagcgactcgacgagataaataagcaattcctggatgatccgaaatattctagtgacgaggacctgccgagtaaactggaggggtttaaggaaaagtacatggagttcgacctcaacggtaatggggacattgacatcatgtccttgaagcggatgctagagaaactcggagtaccaaagacgcacttggaactgaaaaagttaatcggggaagtcagttctgggtctggcgaaacgttctcctaccccgattttctacggatgatgttgggcaagcggagcgccatccttaagatgatactgatgtacgaggaaaaggcccgggaaaaagaaaaacctactggcccccctgcaaagaaagctattagtgaactgccttag

SEQ ID NO: 107933 - DNA, 444 bp, synthetic construct
  misc_feature 1..444: note = Description of Artificial Sequence: Synthetic coding sequence
  source 1..444: mol_type = other DNA
atgtcacagactcgtgatctgcagggcggcaaagctttcggcctgcttaaggcccagcaggaggagcgacttgacgaaattaataaacagtttttggacgatcctaaatactcttcagatgaggatttgccttctaagctggagggcttcaaagagaagtacatggaattcgacctaaacggcaacggggatattgacataatgagcctgaagagaatgcttgaaaagctgggagtccctaagactcatctcgaattaaagaaattaattggcgaggtgtcttctggttctggtgagacattttcttaccccgactttctgcggatgatgctcggaaagcgttccgccattctgaagatgatcctgatgtatgaagaaaaagcccgggaaaaagaaaaaccaactggacctccagccaaaaaagctatctctgagctgccttag

SEQ ID NO: 107934 - DNA, 486 bp, synthetic construct
  misc_feature 1..486: note = Description of Artificial Sequence: Synthetic coding sequence
  source 1..486: mol_type = other DNA
ggtaggaaggccagtgagaaaacgggtggaagggagggtgagccagcagatcgcggactgcagctgggcgggaaggcattcgggctcttaaaggcacaacaagaggaaaggctggatgagattaacaagcagtttttggatgaccccaaatatagttctgacgaggatttaccctctaaactggagggcttcaaggaaaaatacatggagtttgacctgaacgggaatggggacatcgatattatgtcccttaagcggatgctggagaaactaggtgtgccgaagacccacctggagctcaagaaattaatcggcgaggtgtcttcgggcagtggtgaaacattctcatatccagatttcctccgaatgatgcttggcaaaaggagcgccatcctgaaaatgattctgatgtatgaagagaaggctcgagagaaggaaaagcccaccggcccccccgcaaagaaagccatcagcgagttgccatag

SEQ ID NO: 107935 - DNA, 486 bp, synthetic construct
  misc_feature 1..486: note = Description of Artificial Sequence: Synthetic coding sequence
  source 1..486: mol_type = other DNA
ggccggaaagcctccgagaaaaccggcggccgtgagggggaaccggctgataggggtttgcagctgggagggaaggctttcggactgctgaaggcacagcaagaagagcgtttggacgagatcaataaacaatttctagatgaccccaaatatagctccgacgaggacctgccctccaaactggaggggttcaaagaaaagtacatggaattcgacctgaatggcaatggagatatcgatatcatgtctcttaaaaggatgcttgaaaaactcggcgtccctaagacacacctggagctgaagaagctaattggtgaagtgagcagtgggtccggtgagacattctcctatcctgacttcctccgtatgatgctgggtaagcgttccgccattcttaagatgatactcatgtacgaggagaaggcaagggagaaagaaaagccaactggcccgccagcaaaaaaagctatctcagaattgccctag

SEQ ID NO: 107936 - DNA, 282 bp, synthetic construct
  misc_feature 1..282: note = Description of Artificial Sequence: Synthetic coding sequence
  source 1..282: mol_type = other DNA
atggagttcgatctgaacggcaatggtgacatagacattatgagcttaaagagaatgcttgagaaactcggcgtgccaaagactcacttggaacttaagaagctcatcggagaagtgagttctggatcgggggagaccttttcctaccctgatttcttgcgaatgatgctcggtaagcggtcggccattctgaagatgatcctcatgtacgaggagaaggcccgcgagaaagagaagccaaccggtcccccggccaaaaaagcaatttctgagctcccctag

SEQ ID NO: 107937 - DNA, 1062 bp, synthetic construct
  misc_feature 1..1062: note = Description of Artificial Sequence: Synthetic coding sequence
  source 1..1062: mol_type = other DNA
atgagcaaaccccctgatttgttgctgcggcttctgaggggtgcaccaaggcagagggtttgcaccctgttcatcatcggtttcaaatttaccttctttgtatcaatcatgatttactggcacgtggtaggtgagcctaaggagaaaggccagctgtacaacctgccagctgaaattccttgtccgacactgacaccacctacaccccccagtcatggccccaccccaggcaacattttttttttagaaactagcgaccgcaccaacccaaacttcctgttcatgtgttccgtggagtcagccgcccggacccatcctgaatcccacgtgctagttctgatgaagggcctacccgggggcaacgctagcctgccgcgccacctggggattagtctcttgtcctgtttccctaacgtccagatgctccccctcgaccttagggagctgttccgagacacacctttggccgactggtatgcagccgtgcaggggcggtgggagccatatcttctccctgttctgagcgatgcttctcgaatcgctcttatgtggaagttcggtggcatttacctggacaccgatttcatcgtgttgaagaacctcagaaacctaaccaatgtgctaggcacgcagagtcggtatgtactgaacggcgcttttcttgctttcgaaagacgacatgagtttatggcgctgtgtatgcgggattttgtggaccattataacggttggatttggggtcatcagggacctcagcttttgacaagggtcttcaagaagtggtgcagcatccgaagtcttgctgaatcacgtgcatgcagaggggtgaccactctcccacctgaagcattttatccgataccatggcaggattggaagaagtacttcgaggatattaacccagaagagctcccaagactgttatcggcaacgtatgctgtccatgtttggaacaaaaagagccaaggcactcgtttcgaggcgacaagtcgggcacttctggcacagctgcatgctcggtattgccctacgacccatgaagccatgaaaatgtacctttag

SEQ ID NO: 107938 - DNA, 1062 bp, synthetic construct
  misc_feature 1..1062: note = Description of Artificial Sequence: Synthetic coding sequence
  source 1..1062: mol_type = other DNA
atgagtaagccacccgacttgctgcttagactgctccggggcgcgccccggcagcgggtgtgtactctgttcatcattggattcaaattcacttttttcgtctcaatcatgatttattggcatgtggtcggcgaaccaaaggagaaggggcagctgtataacctcccagccgaaatcccatgccccacattgactccccccacgccgccctctcacggtccaactcccggcaacatcttctttctggaaacaagtgaccggacgaatcctaattttttgttcatgtgcagcgtagaaagcgcagctagaacccaccccgaaagccatgttctggtgcttatgaaagggctgccaggcgggaacgcaagtctcccacgacacttaggcatcagcctgctgtcatgctttccgaacgtgcagatgctgccactggacctcagagagcttttccgcgacaccccactcgcagactggtatgccgcggttcaggggcggtgggagccatacttactgcccgtgctatccgatgctagccgaatagccctgatgtggaaattcggggggatttacctggatacagacttcattgtgctgaagaatctgaggaatctgaccaatgtcctggggacacagtccagatacgtcctaaacggcgctttcttggctttcgaaaggcgacatgaattcatggcattatgtatgcgtgactttgtagaccactataatggctggatttggggccaccaaggccctcagctacttacacgcgtgtttaaaaagtggtgctccataaggtctctggcagaatcacgcgcctgccgcggagtcacaacactgcctccagaggcattttatcctattccatggcaagactggaagaaatatttcgaagacataaaccctgaagagctgcccaggctgctcagcgctacttatgcagttcacgtttggaacaagaagagccagggcacgagattcgaggcgacatcccgagcactgctagctcaactgcacgcccgttactgcccgactacccacgaggctatgaagatgtacctgtag

SEQ ID NO: 107939 - DNA, 1062 bp, synthetic construct
  misc_feature 1..1062: note = Description of Artificial Sequence: Synthetic coding sequence
  source 1..1062: mol_type = other DNA
atgagcaagccccctgatcttttactgcggttgctgaggggagctccccggcagagggtctgcaccctgtttattatcggtttcaaattcacgtttttcgtgtctattatgatatactggcacgtagtgggggagcctaaggagaaaggacagttgtacaacctccccgccgaaatcccttgtccaacactcaccccccccactcctcccagccacggacctacccccgggaacatcttcttcttggagaccagcgaccggacaaaccccaacttcttgtttatgtgttccgtggagtctgccgcccgcactcacccggaaagccacgtgctggtccttatgaaaggcctgccaggtggtaacgcgagcctcccacgacacttgggaatcagtctgctgtcatgtttccctaacgtccagatgctgccccttgatctcagagagctgtttagagacaccccactggcagactggtatgcggctgtacagggacggtgggagccgtacctccttccagtgttaagtgacgcgagccgcattgcacttatgtggaagttcggcggaatctacctcgacactgacttcattgtactgaagaatctgcggaacttaacaaacgttctgggcacacagtcgaggtatgttctgaacggtgcttttctcgctttcgagcgtcgtcacgaattcatggccctctgcatgcgtgatttcgttgaccactacaacggttggatctggggtcaccagggcccgcagctcttaacaagggtatttaaaaaatggtgtagcatcagatcgctggccgaatcacgggcctgcagaggggtcacgacactcccccctgaggccttctatcctattccctggcaggactggaaaaagtactttgaagatattaatccggaggagctgccccgactgctgtccgccacctacgccgtgcacgtgtggaacaaaaaatcacagggaacacggttcgaagcaacatcccgcgccctgcttgctcagctgcacgctcgatattgccccaccacgcatgaagccatgaagatgtacttatag

SEQ ID NO: 107940 - DNA, 1311 bp, synthetic construct
  misc_feature 1..1311: note = Description of Artificial Sequence: Synthetic coding sequence
  source 1..1311: mol_type = other DNA
atgagtaaaccccctgacttactgttacggcttctccgcggagccccaagacaaagagtgtgtactctctttattatcgggtttaagttcacgttttttgtgagtattatgatctattggcacgtggtcggagaaccaaaagagaagggacagctgtacaatctcccagctgaaatcccttgtccaaccctgacccctcccacaccaccatctcatggccctacgcccggtaatatcttctttctggagaccagcgacagaactaatcctaactttctgttcatgtgcagcgtggagtcagccgcccgaactcatcccgagagtcacgttctggtgcttatgaaaggactacctggcgggaacgcatctctgccccggcatcttggtatctctctcctttcatgcttccccaacgtccaaatgttgcccctggatctgcgcgagctgttccgcgacacgccactcgctgattggtatgcagccgtccagggccggtgggaaccatacttgctaccagtgctgagcgatgcttcacgaattgctctgatgtggaaattcggagggatttatttggacaccgactttatagtactgaagaatctacgtaacctgaccaatgttctggggacccagtcacggtatgtactaaatggcgctttcctcgcctttgagcggcggcacgaattcatggccctgtgtatgcgcgactttgtagaccattataacggctggatctggggccaccagggaccccagctccttacacgcgtgtttaaaaagtggtgcagcattcgatcccttgccgaaagcagagcctgtagaggagtgactaccctgcctcctgaggccttttatcccattccctggcaggactggaaaaaatacttcgaggatattaatccagaggagctcccacgactcctatccgctacctatgcagtgcatgtctggaacaagaagagccagggaaccgcagggcctgctgcttgtccactcctcccccacgacgccagaggacatgagaacgtcttagtgaggggtccgcctggccacctgcctaacctcctacttatggggcactgggccgcgctaccaggtgaggccaggttgcgggctcgggagagagaagcgagagcagccaccgggttacggcaggccgttgaggagctgtgggagcaggcgcaatgggaagcggtggacacaccacgcaccgtgagctgcttagaggctggactcacccatggggctattgccagcgggggaaggagtgtgagcgctcccggcctgttagacaatcgacaggaggggtag

SEQ ID NO: 107941 - DNA, 309 bp, synthetic construct
  misc_feature 1..309: note = Description of Artificial Sequence: Synthetic coding sequence
  source 1..309: mol_type = other DNA
atggctcttctgaaggctaacaaggatctcatctctgccggactgaaagagttcagtgtcctgcttaaccagcaggtatttaacgacccgctggttagcgaagaagacatggttacagtggtcgaggactggatgaatttctacatcaactactatcgacagcaggtgacgggggagccccaggagcgcgataaggctctgcaggagctgcgtcaggaattaaatacccttgctaacccttttctcgccaagtaccgggactttctgaagtcacacgaacttccttcccacccccccccatcatcctag

SEQ ID NO: 107942 - DNA, 1488 bp, synthetic construct
  misc_feature 1..1488: note = Description of Artificial Sequence: Synthetic coding sequence
  source 1..1488: mol_type = other DNA
atgagcatgctggtggtgtttctgctgttgtggggggttacgtggggccctgtcaccgaggccgcaattttctacgagactcaacctagcctgtgggcagagtcagaatccctcctaaagcccctagcaaatgttacactaacctgtcaagcccacctggaaacgcctgattttcagcttttcaagaacggcgttgcacaggaacccgtgcatctcgatagcccagcaatcaagcaccagtttctccttactggcgacacacaagggaggtatagatgccggtctgggctgtcaacaggatggacccaactgtcgaaactgctggagctcaccgggcccaaatccctgcctgctccgtggctgtccatggcccctgtctcgtggatcaccccgggcctgaaaacaacggccgtctgcagaggcgtgctgaggggcgtcacttttttgctgcggcgcgagggcgaccacgaatttctcgaagtccccgaagcccaggaagatgtggaggcaacctttccggtccatcagccaggtaactacagctgctcttaccgaacagatggagaaggtgccttatcagagccatcggccactgtgactatcgaagagctcgctgcacccccgcctcctgtgctcatgcaccacggtgagtcatcacaagtgcttcaccctggaaataaggtaacgttaacgtgcgtggcaccactttccggcgtggacttccagctcagaagaggggaaaaggaattgctggtgcctaggtctagtacgagcccagacaggattttcttccatctcaacgccgttgctctgggcgatgggggtcactatacttgcaggtacagactacatgacaaccagaacggatggagtggagattccgctcccgtggaactgattctctccgatgagacactgccagcaccggagttttctccggagccagaatccggtcgcgcgttacgtttaagatgcctggcccctctggagggagcccgctttgctctagtgcgcgaggataggggcggcagaagagtccataggtttcagagtccagcaggcaccgaggcccttttcgagctgcataacatttcagttgccgatagcgccaactattcatgcgtatacgtggatctgaaacctccgttcggaggctcagcaccctcagagcgattagagcttcatgtggatggacctcctccacggcctcagttaagagccacttggtctggagcagtcttggctggtcgggatgccgtgctgagatgtgagggccctattcctgacgtgaccttcgaactcctgagggaaggcgagactaaggccgtgaagaccgtgcgcactccgggggccgctgccaacctggaactgatatttgtggggccgcagcatgcaggaaactatcgctgccggtataggtcatgggtgcctcacacttttgagagtgagctgtccgaccccgtcgaactgttggtggcagagtcatag

SEQ ID NO: 107943 - DNA, 1059 bp, synthetic construct
  misc_feature 1..1059: note = Description of Artificial Sequence: Synthetic coding sequence
  source 1..1059: mol_type = other DNA
atgcggtctctgggtgcactgttgttactgctgtcggcctgtctggcagtgtcggccggcccagtccccacaccacctgataacatacaggttcaggagaattttaatatatcacggatatatggcaaatggtacaatttagcaataggcagcacatgtccatggcttaaaaagataatggatagaatgacggtgagtaccctcgtgctgggggagggtgctactgaggccgaaattagcatgacaagcacacggtggcgaaaaggagtgtgcgaggagaccagcggagcgtacgagaagacagacactgatggcaaatttctttatcataagtctaagtggaatattaccatggaatcctacgtcgttcacactaattacgacgagtatgcaatattccttacaaaaaagttcagccgccaccacggccctaccattaccgctaaattgtacgggcgggcaccacaattgagggaaactttgcttcaagattttcgagtcgttgcacagggagtgggaattccagaagactctatctttaccatggccgacagaggcgaatgcgtgccgggcgaacaggagccagaacctatcttaattccacgcgtgagacgggcggtcctgcctcaggaggaggaaggaagcggtggcggccagctcgtgacagaggtaaccaaaaaggaggatagttgtcagctcgggtattcagctggcccttgtatgggaatgacttcacgctatttttataacgggacctccatggcgtgcgagacgtttcagtacggagggtgcatgggtaacgggaacaattttgttaccgaaaaagagtgcctccaaacatgtcgcacggtagccgcgtgcaatctgcccatagtgagaggcccctgccgggcttttattcaattgtgggccttcgacgcggtaaagggtaaatgcgttctctttccttatgggggttgtcagggaaatgggaataaattctactccgaaaaggagtgtagagagtactgtggagtgccaggtgacggagatgaggaactgctgcgtttcagcaattag

SEQ ID NO: 107944 - DNA, 813 bp, synthetic construct
  misc_feature 1..813: note = Description of Artificial Sequence: Synthetic coding sequence
  source 1..813: mol_type = other DNA
atggaccgaatgactgtgagtactttagtgcttggagagggcgccactgaagcggagatttccatgactagtaccaggtggcgaaaaggagtttgtgaagaaacgtccggggcctacgagaaaacagatacagacgggaagtttttgtatcacaaatctaagtggaacatcactatggagagctatgtagtacacactaactacgatgaatatgcgatttttttaacaaaaaaattctccagacatcacggccctaccattactgcaaagctgtacggtcgagccccacagttaagagagaccctattgcaagactttcgggtagtggctcagggggtcgggattccagaggattctatattcacgatggctgaccggggtgagtgtgtccctggcgagcaagaacccgaaccgatactgattccacgcgtcagacgcgctgtcctgccccaggaagaggaaggtagcggcggaggccagctggtgaccgaagtcacgaagaaggaagacagctgccagctggggtatagcgccggcccatgcatggggatgacgagcaggtacttctataacggcacgagcatggcctgtgagaccttccagtacgggggatgcatgggtaatggcaacaactttgtgaccgagaaagaatgtttgcaaacgtgtcggactgtgggagagtgcggctctccccctctgtgtgcgctgcatccccaggatccagtccccccagtcaatcacttgcgcattgagaaggtagccaatcgagggcactctagcgggcgcacaccgggaggtttcctgaagtcctag

SEQ ID NO: 107945 - DNA, 897 bp, synthetic construct
  misc_feature 1..897: note = Description of Artificial Sequence: Synthetic coding sequence
  source 1..897: mol_type = other DNA
atggtaaggatggtccccgtgctgctgtccctcctgctcctattaggtccggctgtgccccaggagaaccaggatggccggtacagcctcacttacatttatacgggactgtcaaaacacgtggaagacgtgcccgccttccaggcgctgggttcattaaacgatctccagttctttagatacaatagtaaagatagaaagtctcagccaatgggattgtggcgccaggtggaagggatggaagactggaaacaggatagtcaactccagaaagcacgggaggacatcttcatggaaaccttgaaagatatcgtggagtattacaatgactcgaacggaagtcatgtgctgcaaggcagatttggttgcgagatcgaaaacaaccgctcttccggcgccttctggaaatactactacgatggcaaagactacatcgaatttaataaggaaatacctgcctgggtcccgttcgatccagccgcgcagattaccaaacagaagtgggaggctgagccggtttatgtccagcgggctaaggcgtaccttgaagaggaatgtcccgcaaccttgcggaagtacttgaagtactcaaagaatatcttagatagacaggatcccccgagcgtcgtagttacatcacaccaagcaccaggcgaaaaaaagaaattaaaatgcctcgcatatgacttctaccccggcaagatcgacgtccactggaccagggctggagaagttcaagaacctgagcttcgaggcgacgtgctacacaacggcaacggaacttaccagagctgggtggtggtggccgtgcccccacaggacaccgccccttactcgtgccacgttcaacactcctccctggcacagcctctggtcgttccatgggaggcatcctag

SEQ ID NO: 107946 - DNA, 1104 bp, synthetic construct
  misc_feature 1..1104: note = Description of Artificial Sequence: Synthetic coding sequence
  source 1..1104: mol_type = other DNA
atgaagtccctggtgctcctgctctgcttggcccaactgtgggggtgtcactccgccccccacggcccaggactcatttatagacaacccaattgtgacgacccagagacggaagaagctgcgctggtggccatagactacatcaaccagaacttaccttggggttataagcatactttgaaccaaattgatgaagtgaaggtctggcctcagcaaccctcaggggaactattcgaaatcgaaatagacaccctcgaaacaacctgtcacgtcctcgatcccacccccgtcgcgagatgttcagttcgtcagctgaaggagcacgccgtcgaaggcgattgtgacttccagctcctgaagcttgacgggaaattcagcgtcgtttatgccaaatgcgacagctctcccgactcagctgaggacgtgcggaaggtatgtcaagattgtcccctgttggccccgctcaacgacacaagggtcgtgcatgctgccaaggcagcccttgctgcattcaacgcccagaataatggatccaacttccagctggaagagattagtcgagctcagctcgtccccctcccgccgtccacctacgtggaattcaccgtgtcaggcactgactgtgtggctaaggaggcaacggaagccgcaaagtgcaacctgctcgccgaaaagcaatacgggttttgtaaggcaactctgtctgaaaagctcggcggggctgaagtggcggtcacctgcatggtatttcagactcaaccagtgtcatctcagccgcaacccgaaggtgccaacgaagccgtgccaaccccagtagttgatcctgacgctccacctagccctcccctgggcgcgcctgggctccccccagcgggcagtccgcctgattcacacgtcctgcttgccgcccccccaggccaccagctgcacagggcccattatgacctgagacacactttcatgggcgtcgtctctctgggaagcccttccggggaagtctcgcatccacgaaaaaccagaaccgtggtgcaacctagcgtgggggctgctgctggacccgtggtgccaccttgcccagggcgcattcggcattttaaggtctag

SEQ ID NO: 107947 - DNA, 1302 bp, synthetic construct
  misc_feature 1..1302: note = Description of Artificial Sequence: Synthetic coding sequence
  source 1..1302: mol_type = other DNA
atgtttgctgggtgctttttttttctgcttaatcagtctcgtaatcaccctgtgtccctttgtaacagttccggaagactccaacagattaataaagcacatcacccaccgtgggtgtatctgagccagcagtcaacttgggttggccccgaagcgtccaatcacctccacgcttgccaagggctcagtggcgctgctatgaagtcgcttgtgctgcttttgtgcctagcacagctctggggatgtcactccgctccccacggaccagggcttatatacaggcagcccaactgcgatgaccctgagacggaggaagccgcactggtggccattgattatattaaccagaatctcccatggggatataaacacacgcttaaccagatcgatgaagttaaagtgtggcctcagcaacctagcggagaactgttcgagatcgagatagacacccttgagactacatgccacgttcttgacccaactcctgtggccaggtgcagtgtgaggcagctgaaggagcacgccgtcgaaggagattgcgattttcagctgctgaagctggatgggaaattcagcgtggtatatgctaagtgcgattcctctcctgatagtgcagaggatgtgagaaaagtgtgccaggattgccctctgctggcacccctcaatgacacgagagtagtgcatgctgccaaagcagcgttagcagctttcaatgctcaaaacaatggaagtaatttccaactggaagagatctctcgtgctcagctagtgcccctgcccccatctacatatgtggagtttaccgtgtctggtactgattgtgttgcaaaggaagcgacagaagccgctaaatgcaatttgctggcagagaaacagtacggattttgtaaggctactctcagcgaaaagctggggggggcagaggtggccgtgacgtgtatggttttccagacgcagccagtgagtagccaaccacaaccagagggagcaaacgaagccgtccccactcccgtcgtcgatccggacgctcccccttctccacccctgggagcgcccggtttgccacccgcagggagccctcctgattcccatgttctcttagccgcccccccaggccatcaactgcatagagcccactacgacctgcgtcacacgttcatgggcgttgtgtcattggggtctccatctggagaggtgagtcaccctaggaaaaccagaacagtagtccagccaagtgttggggcggcggccggacccgtggtgcctccgtgtcctggccgcatcaggcatttcaaggtttag

SEQ ID NO: 107948 - DNA, 4425 bp, synthetic construct
  misc_feature 1..4425: note = Description of Artificial Sequence: Synthetic coding sequence
  source 1..4425: mol_type = other DNA
atggggaaaaacaaactgttgcatcccagtttggtgcttttgttgctcgttttacttcccacagatgcttccgtatctggcaagcctcagtacatggtacttgtgccatctctacttcatactgagactaccgaaaaagggtgcgtgctgttgagctatttaaatgagacggtgaccgtgagcgcctccctcgaaagcgtgaggggaaacaggagcctgttcactgatctggaggctgaaaatgatgtgctccattgtgtggctttcgccgtcccaaagtcaagcagcaatgaggaagtcatgttccttacagtccaggtgaagggacccacacaagaatttaagaagcggaccacggttatggtgaagaatgaagactccctcgtgttcgtgcagaccgataaaagcatttacaagcctggccaaacggtcaagtttagggtcgtttctatggacgaaaacttccatccacttaacgaactgattccccttgtatatatacaggacccaaagggtaatcgtatagcccagtggcaatcgttccagctggaaggtgggctaaagcagtttagctttccactttcgtccgagccgttccaggggtcgtacaaagtagtggtccaaaaaaagtcaggggggcgcaccgaacacccattcactgtagaagagttcgtcctaccgaaattcgaggtgcaggtaactgtccctaagatcattactatccttgaggaagagatgaatgtcagtgtgtgcggattgtacacctatgggaaaccggtgcccggccatgtcactgtgtccatttgccgtaagtatagcgacgcctccgactgccacggtgaggactctcaggcgttctgtgaaaagttttctgggcagctaaattctcatgggtgcttctatcagcaggtgaaaacaaaggtgttccaattgaagcgcaaagagtatgaaatgaaactgcacaccgaggcccagattcaagaagaaggtacggtggttgaactgaccggtcgacagtctagtgaaatcacacgaaccatcactaaactctctttcgtgaaagtggatagtcatttcagacagggcatccccttctttggacaggtccgcctcgtggacggaaagggggtgccaatccctaacaaagttatatttatacgagggaatgaggctaattactactctaatgccaccacagacgagcacgggctggtccagttttccatcaacacgacaaacgtgatggggacctctcttacagtgagagtaaattataaagacagaagcccatgctatggataccagtgggtgtctgaggagcatgaggaggctcaccacacagcgtacctggttttctcgccctctaaatcattcgtgcatctggaacctatgtcccacgagctaccatgcggacacacccaaacagttcaggcccattacatattaaacggcggcacactgctgggtctcaagaaactcagtttttactatcttattatggccaaagggggcattgtgcgaactgggactcatgggttactcgtcaagcaagaggatatgaagggacacttctctatctctatccccgttaaatctgacattgctccggtggctaggctgcttatctacgcagtgcttcctacaggcgatgtaattggcgattcagcaaagtacgacgtggaaaattgcttggctaacaaagtcgacctctccttttccccatcacagtctctccccgcatcgcacgcgcatttgcgagtgacggctgcaccccagtccgtttgtgcactgagagccgttgatcaatcagtcctgcttatgaagcctgatgccgagctgtcggcctcctcggtttataatttgctacctgaaaaagacctcacaggatttccaggccctctcaacgatcaggataacgaagattgcataaatcgccataacgtgtatattaatgggattacatacacacccgtctcaagtacgaatgaaaaggacatgtattcctttcttgaggacatgggcttgaaggcattcactaactcaaaaattcggaaacccaagatgtgtccccaacttcaacaatatgagatgcatgggccggagggcctgcgggtcgggttttatgaaagtgatgttatgggaagaggacacgcccgactggtgcacgttgaagaacctcacacagagaccgtccggaagtactttcctgaaacctggatatgggatctcgtagtggtgaactcagccggggtcgctgaagtaggtgtgaccgtgccagataccattactgagtggaaagccggggcgttttgcctgtcggaggatgccgggcttggcatcagtagcactgcatcactgcgcgcatttcagcctttttttgtcgagctgaccatgccctattctgtgattcgcggcgaagctttcacccttaaagcaactgtgctcaactatctccctaagtgtatccgcgtgtccgtgcagctcgaagctagtcctgctttcctagccgtacctgtggagaaagaacaggccccgcactgtatttgcgcaaacgggcgccaaacagtcagctgggccgttactccaaaatcgctgggtaacgttaactttactgtctctgctgaggccctggagagccaggagttgtgtggcaccgaagtgcctagcgttcccgagcatggtcgtaaggacacggtaataaagcctttactagtcgaaccagaaggccttgagaaagaaacaactttcaattctctgctgtgtccttccggcggggaggtgtcggaagaactttcattgaaactgcctcctaacgtagtggaagaaagtgccagggccagtgttagcgtgctgggagacatactcggcagtgccatgcaaaatacccagaatcttcttcagatgccttacggatgtggggagcagaacatggtgctttttgctcccaacatctacgtactggactacctgaacgaaactcagcagttaacacctgagattaaaagtaaagctatcggatatctaaataccggttaccagaggcagctgaactacaaacattacgatggaagctactctacttttggggagcggtatggccgcaatcaaggaaatacatggctgacagccttcgtcctgaagacatttgcacaggcacgagcttacatctttatagacgaagctcacataacacaggcactgatttggctgtctcagcgtcagaaggataatggatgctttagatcttcagggagcctgctgaacaacgcaattaaagggggcgtcgaggacgaggtgaccctgagcgcctatattacaattgcactgctggagatacctctgaccgtaactcacccagtagtgaggaatgctcttttttgccttgaaagcgcctggaagacagcccaggaaggcgaccatggatcccatgtttataccaaagccctgctggcctatgcattcgctctggcgggcaatcaggacaagcgcaaggaggtgctgaagagtttgaacgaggaagcagtaaaaaaggacaactctgtccactgggagaggccgcaaaagccaaaagctcccgtgggccacttctacgaaccacaggcgccatcggctgaagtggaaatgacttcctacgttctcctggcttatctaacagctcagcctgcgcctacctcagaggacttgacttccgccacgaatatcgtgaaatggattacaaagcagcagaacgcacagggcggcttctcttctacacaagataccgttgttgcgcttcatgcgctatccaaatacggagctgccacctttaccagaacgggcaaggctgcacaggtcacgatccagagcagcgggactttcagcagcaagtttcaggtcgataataacaaccggctgctgttgcagcaagtctccttgcccgagctgcccggcgagtactctatgaaagttaccggagaagggtgcgtgtaccttcaaaccagtctgaagtataacattctgcccgaaaaggaagagttcccttttgctctgggggttcaaactcttccccaaacttgcgacgagccgaaggcccataccagctttcaaatctccctgtctgttagttatacgggcagccgctccgctagcaacatggccatcgtcgacgtaaagatggtcagtggattcatccctcttaaaccgacggtgaagatgctggagaggtctaaccacgtttcacgcaccgaggtgtcctctaaccacgtccttatctacctggacaaagtatctaatcagaccctttccctgttcttcacagtactccaggatgtccccgtgagggatttgaaacccgcaatcgtaaaggtgtacgactactacgaaaccgatgagtttgccatagccgaatacaacgccccatgcagcaaggatctgggcaacgcttag

SEQ ID NO: 107949 - DNA, 507 bp, synthetic construct
  misc_feature 1..507: note = Description of Artificial Sequence: Synthetic coding sequence
  source 1..507: mol_type = other DNA
atgggcaagaacaagctcctacatccttcactggtcctgttgttgcttgtactgctccccaccgacgcaagcgtctccggtaaaccccaatatatggtgcttgtacccagccttttgcacacggaaacaacagaaaaaggatgtgtgctcctgagctacttgaacgaaacagttaccgtgagtgccagcctggagagcgtgcgagggaatagatccctcttcactgacttggaggcggaaaacgacgtgttacactgtgtggcatttgcagttcccaagagtagctcaaatgaagaggtgatgttcctaacagtgcaagtgaagggaccgacgcaggaattcaagaagcgcacgacagttatggtgaaaaacgaagatagcctcgtgttcgttcagactgacaagtcgatttataagccgggtcagactgtgaaattccgcgtagtgagtatggacgagaattttcatcctctaaatgagctcatccccctggtatacatccagtag

SEQ ID NO: 107950 - DNA, 4470 bp, synthetic construct
  misc_feature 1..4470: note = Description of Artificial Sequence: Synthetic coding sequence
  source 1..4470: mol_type = other DNA
cgagtgcagtacgtatgcagcccgccagccccctccttctgcaatatgggcaaaaacaaattgctgcatccgagtcttgtgctgctactgctggttctgctgcccactgatgcaagtgtttccgggaagccccagtacatggtgcttgtgccctcactgcttcatactgaaactaccgagaaaggatgtgttttgctatcctatcttaacgagacagtgactgtctcagctagccttgagagtgtcagaggaaaccggtctcttttcacagacctggaagcagaaaacgacgtccttcactgcgtcgcttttgcggtgccaaaaagtagctctaacgaggaagttatgttcctgactgtccaagtgaagggccccacccaggagttcaaaaagcgcacgactgttatggtgaagaacgaggactccctggtttttgtccagaccgacaaaagtatatataaacctggacagactgtgaagttccgcgtcgtcagcatggacgagaattttcacccactcaatgaattaatcccactggtgtacatccaggaccctaagggtaaccgaatcgcccagtggcagagctttcagctggagggaggtctgaaacagttctccttccccttatcttcggagcccttccagggctcttataaggtggtggtccagaagaaaagtgggggccgaaccgaacaccccttcacggttgaggagtttgtgctgccaaagttcgaagtacaagtgacggtgccaaaaatcataacgattctagaggaagagatgaacgtgagtgtatgtggattgtatacatatggaaaacctgtgccaggccacgtaacagtgtctatttgcagaaagtattccgatgcctccgattgccacggtgaggactcacaggccttctgcgaaaaattcagcggccagcttaacagtcatgggtgtttttaccagcaagtgaagacaaaggttttccagctgaagaggaaggaatatgaaatgaaactgcataccgaggcacagatccaggaggaaggtactgtagtcgagttaacggggcggcagtcttcggagattaccagaacaattactaaactcagttttgtgaaggtggatagccacttccggcaaggcatccctttcttcgggcaggtccggctagtggacgggaagggcgtccctattcctaataaggtcatcttcattcgcggaaacgaagcgaattactacagtaatgccaccaccgatgagcacggcctggtgcagttctcaattaatacaaccaacgtcatgggtaccagcctgacagtgagggtaaattacaaggatcggtccccatgctatggttaccagtgggtgtcggaggaacatgaagaagcccaccacacggcttaccttgtattttcaccttccaagtctttcgtgcacctcgaaccgatgtcccatgagcttccttgcgggcacacacaaactgtgcaggcccactatatcttgaacggtgggaccctgctgggcctcaaaaagctctctttttactacctaataatggcgaagggtggcatagtcagaactggtacgcacgggctgcttgtgaaacaagaggacatgaaggggcacttttccatctctattcctgtgaagtcggacatagcacctgtggctcggctgcttatatatgccgttctccctacaggtgatgtcatcggtgattccgccaaatacgacgtcgaaaattgtttagcaaataaggtggaccttagcttctccccctcacagtctctgcctgcttcccatgcacacctccgcgtgaccgccgctccacagtcagtgtgtgcactgcgagccgttgaccagagcgtgttgctgatgaagcccgacgctgagctgagcgcatcttcagtgtataatcttctccctgaaaaggatcttaccggattccctggacctctcaacgatcaggacaacgaggattgtatcaaccgtcacaacgtctatatcaacggcattacctacacgccagtgagttccaccaatgaaaaggatatgtacagcttcctcgaagatatggggctaaaagcttttactaattccaaaatacgcaaaccaaaaatgtgtccccagttacagcaatacgaaatgcatggcccagagggtctgagagtaggcttttacgaaagcgacgtaatgggacggggccacgcccgcctcgtacatgttgaagagccccatacagagaccgtgaggaagtattttccggagacctggatctgggatttggtggtcgttaacagcgccggagtggccgaggtaggagtcacagttcctgatactattacagagtggaaagccggagcattctgtctgagcgaggatgcggggctcggcatttcatccactgcttctctccgagctttccagcctttctttgtggagcttacgatgccttattcagtcatccgtggagaggcatttaccctgaaagctacagtgctgaattatctgcctaagtgcattagagttagtgttcaattggaagcatcaccagccttcctggccgtaccggtggaaaaggagcaagcccctcactgcatctgtgcaaacggccggcaaacagtgtcctgggctgtgacccccaagagcctcggcaacgtgaacttcacagtgtcagctgaagccctggaatcccaggagctgtgtgggacagaagtgccttctgttcccgaacacggccgtaaagatacagtgatcaagcctctgctcgtcgagccggaaggcctggaaaaagaaactacttttaacagccttctttgccctagtgggggtgaagtttctgaagagctctcgcttaagctaccgcctaatgtagtcgaggagtccgctagggcatccgtgtccgtgctgggggacattcttgggtcagccatgcagaatacccagaacctccttcagatgccctacggttgcggcgaacagaatatggtgctgtttgcccccaatatttacgtgcttgactatctgaacgagactcagcagttgacaccggaaatcaagtccaaggctattggctatctaaataccggctaccagcgacagctcaattacaaacactatgacggcagctactcaacctttggagaacgatacggacgcaaccaaggcaatacttggctcaccgcgttcgtgttaaagacattcgcacaggctcgagcttatattttcattgacgaagcgcacattacacaagcgctgatctggctcagccagagacagaaggacaacgggtgcttcagaagctctggctcgctgcttaacaatgctattaaaggaggggtcgaggacgaagtcactttgtccgcatatattaccatcgccttactggagattcctctcaccgtaacccaccccgtagtgagaaacgctctgttctgcctcgaatccgcctggaagaccgctcaggagggcgaccatggtagtcatgtgtacaccaaggcccttctcgcctatgcatttgccctggcgggaaaccaagacaaacggaaggaggttctaaagtccctgaatgaagaggcggttaaaaaggataattccgttcattgggaaaggcctcagaagccaaaagctcctgtaggacacttctacgagccccaggctccttccgctgaggtagagatgacctcttatgtgctactggcgtacctgaccgcacaacccgcaccaaccagtgaagacttgaccagcgccaccaacatcgtgaagtggatcactaagcagcaaaacgcccaaggagggttttcctcaactcaggatacagtagtggccctgcacgctctttctaagtatggtgcggcgactttcacgcgaacaggcaaagctgcgcaggttacaattcaatccagtggaacgttctcgtcaaaatttcaggtcgacaacaacaacaggttgctgcttcagcaggtgtctctgccagaactgcctggggaatactccatgaaagtaacgggtgaaggctgtgtatatttacagacttctctaaaatataatatcttgccggagaaagaggaattcccatttgcccttggggtccaaacactccctcagacatgtgacgagcctaaagcccacacctcctttcagatttcactcagcgtctcttacacggggagtcggagcgcctcgaacatggcgatcgtagacgtgaagatggtcagcgggtttatccctcttaaaccgaccgtcaaaatgctggagcgctctaatcacgttagtagaacagaagttagttctaaccacgtgctgatatacctggacaaggttagcaatcagactctcagtctgttctttactgttctccaggatgtgcccgtgagagatttaaaaccagccatcgtgaaggtgtacgactactacgaaaccgatgagtttgcaatagctgaatataacgccccatgttcaaaagatttggggaacgcttag

SEQ ID NO: 107951 - DNA, 4365 bp, synthetic construct
  misc_feature 1..4365: note = Description of Artificial Sequence: Synthetic coding sequence
  source 1..4365: mol_type = other DNA
atgtgggcccagctgttgctcggaatgctggccctgagccccgcaatcgccgaagaactacccaactatctcgtaactctaccggcaagactgaatttcccaagcgtgcagaaggtgtgtctggatttgtcccccggctattcggacgttaagttcaccgtaaccctcgagacaaaggataagactcaaaagttgttggagtactccggcctgaaaaagaggcacctgcattgtatttcctttttagtgccaccacccgcagggggcacagaggaggtggccacaataagagtgagtggagtgggaaataatatcagcttcgaggagaagaagaaggtcctgattcagagacaggggaacggtaccttcgtgcagacagacaagcctttatacactcctgggcagcaggtgtattttaggatcgtgacaatggacagtaacttcgttcccgtcaatgacaaatacagtatggttgaactacaggaccccaactcgaacagaattgctcagtggctcgaggttgttccagaacagggcatcgttgatctaagcttccagctggccccggaggctatgctagggacctatacagtcgccgtggctgagggaaaaaccttcgggacattctcagtggaggagtacgtgttgcccaagtttaaggtggaggtggtcgagccgaaggaattatccacagtccaggaatcctttcttgtaaagatctgctgccggtacacatacggtaagcccatgctgggggccgtgcaggtaagcgtttgccagaaagccaacacctattggtatagagaagtggagcgcgagcagttacctgataagtgccgaaacttatcgggccagactgataagaccggctgcttctccgcccctgtcgacatggctaccttcgatcttattggttatgcgtacagccatcaaatcaatatagttgccactgtggtcgaagaaggaactggcgtggaggctaatgctacccagaatatctacatcagcccacagatggggtccatgacatttgaagatacttctaacttttatcaccccaatttccccttttcaggcaagattagggtgcgtggccacgacgatagcttcttgaaaaatcatctcgtgtttctggttatctacggcacgaacggaacattcaaccaaacacttgtcaccgacaacaacggtctcgccccctttactcttgagacctccgggtggaacggcactgatgtgtcactggagggaaagttccagatggaagatctggtttataatcctgaacaggtgcccaggtattaccaaaacgcttatctccatctgcgccccttttacagcactacacgctcgtttctgggcatccaccggttgaacggccccttgaagtgtggtcaaccccaggaggtccttgtggattactacattgatcctgcggacgcctctcccgatcaagagatcagcttctcatactatctgatcgggaaaggctccctggttatggaaggacagaaacacctaaactcaaaaaagaaaggtctgaaagccagcttctctctgagcctaacatttacatcacgattagcacctgatcccagcttagtaatctatgcaatcttcccgtccggtggcgtcgtggccgacaagattcagttctcagttgagatgtgcttcgataaccaagtctccctcggctttagccctagtcagcagcttcccggggcagaggtggagcttcaattgcaggccgcaccgggcagtctgtgcgctctgcgagcagtggacgagtccgtacttcttcttagaccggaccgggaactaagtaacaggtccgtgtacgggatgttcccgttctggtatggccactacccataccaagtggctgaatatgaccagtgtcctgtttccgggccttgggattttccacaacctcttatagaccctatgccccagggccacagttcccagcgctcaataatttggcggcccagcttcagtgaggggacagacttgttttctttctttagggacgtaggcctgaaaatcctgagtaatgctaaaatcaagaagcctgttgattgtagtcaccgtagcccggaatacagcacagccatgggagccggcggcggacaccctgaggccttcgaatccagcacacctctccaccaggccgaagactcccaggtgcgccagtactttccggaaacctggctctgggatcttttccccattggcaatagtgggaaagaagctgtgcatgtcactgttccggatgctataactgagtggaaggccatgtctttttgtacctcccagagccgggggttcggcttgagccccacagtgggtctcacggccttcaaaccatttttcgttgatttgacactgccatacagcgttgtcaggggcgagagttttcgattgactgccaccatattcaattatcttaaggactgtatccgcgtgcagactgacctggccaagagccacgaataccagctggagtcctgggccgatagccaaacctcttcttgtctgtgcgcagatgacgctaagacccaccactggaatataactgctgtgaaactgggccatattaacttcactatttctactaaaattttggactccaacgaaccctgtggaggacaaaaaggatttgttccccagaagggaagatccgacaccctgatcaagcccgtacttgtcaaaccagaaggagtgcttgtagaaaaaacacactcatctctgctctgccctaaaggcaaagtagcatccgagagcgttagccttgagctcccggtggatattgttccggacagtacaaaggcctacgtaacagtcctcggtgacattatggggacagcactgcagaaccttgacgggttggtacaaatgccttccggctgtggcgagcaaaacatggtattatttgcaccaatcatctacgttttacagtacttggaaaaagctggacttctcactgaggaaatcaggtctcgcgcggtcggattcctggaaattggctaccaaaaggaactgatgtacaagcatagcaacggtagctactcagccttcggcgagcgggatggcaacgggaacacatggctgacagcgttcgtgaccaagtgctttggccaggctcagaagtttattttcatcgatcctaagaacattcaggacgccctaaagtggatggcaggcaatcagttgccttccggttgctacgccaacgtaggcaacctcctgcataccgccatgaagggaggagtggacgacgaagtaagcctcaccgcttatgtgacagccgccttattagaaatgggaaaggacgttgatgacccgatggtgtcccaaggactgcggtgtttgaagaattctgccaccagtacaactaacctgtatactcaagccctgctagcctatatctttagcctggcgggcgagatggacatcaggaacatactactcaaacagttagatcaacaggccattatcagtggagagagcatttattggtctcagaaacctacgcccagcagtaacgcctctccatggagcgaaccagcagccgtggacgtggaactgacggcctatgcattgctggcccagctaaccaagccaagcttaacacagaaagagatagccaaagccacgtctatagtggcttggctggccaagcagcacaacgcttacgggggcttctcatctacacaggatacagtggtcgcgctacaggccctggcgaaatacgccacaacagcctacatgccatcagaggagattaatctggtcgttaagtctacggagaacttccaaagaaccttcaacatccaatccgttaacagactggtgttccagcaggacacattgcccaacgtgcccgggatgtacactctggaagcgagcggccaaggatgcgtctatgtgcagacagtgctgcgctacaacatcttaccccctacaaacatgaagaccttctccttgagtgtcgagatcggcaaggcaaggtgcgagcaacctactagtcccagaagccttaccctgactatacatacgtcatatgtaggatctcgaagttccagcaatatggccattgtggaggtgaaaatgttatccgggtttagccccatggaaggcacgaaccagttgctcctccagcagccactcgtgaaaaaggtggagtttggaacagatactcttaacatttacctagatgaactgattaaaaatacccagacctatactttcacgattagccaaagcgtgctagtcacgaacctcaagcccgccaccattaaggtgtacgattactatctgcccgacgagcaggccacaatccaatactccgatccctgtgaatag

SEQ ID NO: 107952 - DNA, 4365 bp, synthetic construct
  misc_feature 1..4365: note = Description of Artificial Sequence: Synthetic coding sequence
  source 1..4365: mol_type = other DNA
atgtgggcgcagcttttgttaggaatgttagctttatctccggctattgccgaggagttgccaaattatctggtgacactcccggcccgacttaattttccttccgttcagaaggtgtgtctggacctgtcaccagggtacagcgacgtcaaatttacagtgactctcgagacaaaagataagacccagaaactgctggagtactctggcctcaaaaagcggcacctgcactgtatcagttttttggtgcctcccccagccggcggcaccgaggaagtggccaccattagggtgtctggcgtgggcaataacattagcttcgaggaaaaaaagaaagtattgatccagcgccagggaaatgggactttcgttcagacggacaagccgttgtacacaccaggacaacaggtgtatttccgtatcgtcacgatggacagtaacttcgtacccgtcaatgacaaagtgtcatgggaagaaggccaggatcccaatagtaacagaatcgcccagtggctggaggtggtaccagaacagggcattgtcgacctgagcttccagctcgcacccgaagctatgctcggcacctatacagtggcggtggccgaggggaagaccttcggaactttctcagttgaggagtatgttctgcccaagttcaaagtcgaggtcgtagagccaaaggaactaagcacagtgcaagagtcatttctcgttaaaatctgttgtcggtacacttacggcaagccgatgctcggagctgttcaagtgagcgtgtgtcaaaaagccaatacctattggtatcgggaggtggagagggagcaactccccgacaagtgcaggaacctgtccgggcagaccgataaaacaggctgtttctccgctcccgtggatatggctaccttcgatctcattggatacgcctacagccaccaaataaacattgtcgctaccgtggtcgaagaaggaactggggttgaggcaaatgccactcagaatatatatatcagccctcagatgggcagtatgacttttgaagataccagcaacttttatcatcccaattttcccttctccgggaaaattagagttcgcggccacgacgacagcttcctgaaaaaccatctggtgtttttggtgatttacggcacaaatggtacattcaatcagacgctggttactgataacaacggactggctcctttcacactcgaaacgtccggctggaatggcaccgatgtgtccctagagggcaaatttcaaatggaggacttagtctataatcctgagcaggtcccacgctattaccagaatgcctacctccacttgcgccctttctattccacaacgcgaagttttctaggaattcacaggttaaatggaccactgaagtgtgggcaaccccaggaagtgcttgtggactactatattgaccccgccgacgcgtctcccgatcaggagatctcattctcgtactatctgattggcaagggctccctcgttatggagggccagaaacatttgaattctaagaaaaaaggactgaaggcctcattttccctgtcattgaccttcacatcgcggctagccccagatcccagccttgtgatctacgctatctttccaagcggtggcgtggtggctgataaaattcagtttagtgtggagatgtgcttcgataatcaggtcagcttgggtttctccccctcacagcagcttccgggcgctgaggttgagctgcagttacaagccgcaccagggtccttatgcgccctgagagcagttgacgagagcgttctgctgcttcgccccgatagggaattgtcgaacaggagcgtgtacggcatgttcccattctggtatggacattacccctaccaggtcgctgaatacgaccagtgcccagtcagcggcccgtgggatttcccgcagccactgattgatcccatgcctcagggacacagctcgcagaggagcattatttggcgtccgtccttttcagagggcacggatctattcagcttcttcagagatgtcggcctcaagattctgtccaacgccaagatcaaaaagcctgtggattgctctcaccggtctcctgagtactcaacagccatgggggccgggggaggtcacccagaggcctttgagtcaagcacacccctgcaccaggccgaggactcccaggtgcggcagtacttcccagaaacctggctgtgggatttgttcccaatcggaaacagtggcaaggaggcagtacatgtaacagtaccagacgcgattacagagtggaaggctatgtcattctgcaccagccagagtagaggcttcgggctttccccaacggtaggattgaccgcgttcaagcccttctttgtagatctgacgctgccatacagtgtggtgcgaggtgagagttttaggctgacggccacaatatttaattatctgaaggactgtatacgcgttcagacagatcttgccaaatcccatgaataccagttagaatcttgggcagactcacagaccagctcttgtctgtgtgccgacgacgccaaaacccaccattggaatatcacagcagtcaagctcggccacatcaacttcactatcagcactaagatactggactctaatgagccatgcggaggccagaagggattcgtgccacaaaagggcaggagtgacaccttgattaaacctgtgctggtcaaaccagagggagtactggtcgagaaaactcacagctccctcctgtgccccaagggtaaggtggccagcgaatcagtgtctctggaactgccagtagacatcgtgcctgacagcacaaaagcatacgtcaccgtcttaggggatattatgggcacagccttacagaacttagacgggcttgttcaaatgccctctggttgcggcgaacagaatatggtcttgtttgcccccataatttatgttttacagtatcttgaaaaagctgggctgttaacagaggagatccggtcccgcgctgtgggctttcttgagatcggatatcagaaagagctaatgtataagcatagcaacgggagctactctgcttttggagaacgggatggaaatggaaatacatggctgactgcattcgtaactaagtgctttggccaggctcagaagtttatttttatcgacccaaagaatattcaggatgcactgaaatggatggctgggaaccagctgccctccgggtgctacgctaacgtgggcaatcttctgcacactgccatgaagggcggggtggatgatgaggtgagtctcaccgcttacgtaacggccgcattactggagatggggaaggatgtcgacgaccctatggtctcccaaggcctccgatgtcttaaaaacagcgctacctcaactactaatctctacacccaagcccttctcgcctatatcttcagcctggctggggaaatggacatcagaaacattctattaaaacagcttgaccagcaggccatcatttctggggagagcatctactggagccaaaaaccaaccccttctagcaacgcctccccatggtctgaacccgccgccgtcgacgttgagctcactgcgtacgccctgctggcccagctgactaagcctagcctaacacagaaggagattgccaaagcaacctccatcgtggcctggctggctaaacaacataacgcttacgggggtttcagcagcacccaggatactgttgtggccttgcaagcactcgcaaagtacgccactacagcatatatgccctctgaggaaataaacttagtcgtcaaatcaactgaaaactttcaaaggacctttaatattcagtcagtgaatcggctcgtctttcagcaggatactctccccaacgtacctggcatgtatacattggaagctagcggacagggatgcgtctacgtgcagactgtgctgaggtacaatatcctgcctcctaccaacatgaagacattctccttatccgttgagatcggcaaggcaaggtgtgaacaacccacaagccctcgtagcttaacgctgacaattcatacttcatacgttggatcaagatccagcagcaacatggcaatcgttgaagttaaaatgttaagtgggttctctcccatggagggcacaaaccagctgctcctccagcagccactcgtgaagaaggtcgaatttggcacggatactcttaatatttatctcgatgaactgataaaaaatacccagacatacacatttaccattagccagtccgtactcgttactaatctgaagcccgcgaccatcaaagtctatgactactatttgccggacgagcaggccacaatccagtatagcgatccctgcgaatag

SEQ ID NO: 107953 - DNA, 3015 bp, synthetic construct
  misc_feature 1..3015: note = Description of Artificial Sequence: Synthetic coding sequence
  source 1..3015: mol_type = other DNA
tcctttctcggtatccataggttgaacggcccattaaaatgtggacagccgcaagaggtcctggtcgattactatatagacccggccgatgcctcgcccgatcaggagattagcttttcctactatcttattgggaagggtagccttgttatggaagggcagaagcatctgaattccaagaagaagggactcaaggccagttttagtctctctctcacattcacaagccggttagcacctgaccccagcctggtgatttatgcaatcttcccaagcggaggagtggtggcagacaaaatacagttttcggtcgaaatgtgttttgataaccaggtctcactgggattttctccaagccagcagctccctggggcagaggtcgaattacaactgcaagccgcacctggctccttgtgtgccctgcgagccgttgatgaaagcgttctgttgttgcggcctgaccgagagctgtccaaccgctctgtgtacgggatgtttccgttctggtacggacattacccgtaccaggtggcagagtatgatcagtgcccggtgtctggaccatgggatttcccccagccactgatcgatcccatgccacaaggccattccagccaacgttccattatttggcgccccagcttcagcgagggcacagatcttttctcttttttcagagacgtaggcctgaaaatcctcagcaacgcgaaaatcaaaaagccagtagactgctcccatcgctctcccgaatattcaacagcaatgggggccgggggggggcatccagaggcattcgaatcttctacgcctctgcaccaagctgaagatagtcaggtgcgacaatatttcccagagacttggctttgggatctgttcccgattggaaacagcggcaaggaagctgtccacgtcactgttccagacgctatcacagaatggaaagccatgtcattctgcacctcgcagagccggggttttggattgtcccccacagtgggcctgaccgctttcaagcccttctttgtggatctgacactgccctattctgtcgtgcgtggcgaatctttccgcctgactgccactatttttaattaccttaaagattgtatcagagttcagaccgatctggccaagagtcatgagtaccagctcgagtcctgggccgactcacaaacatcatcctgtctttgtgccgatgacgccaagacccatcactggaacattaccgcagttaaactaggccatataaatttcactatttcaacaaagattctggattctaacgagccttgtgggggacaaaagggttttgtcccccagaaaggccgatcagacaccctgatcaagcctgtattggtgaaacccgagggcgtgcttgtggagaaaacacattcttccttgctatgccccaaaggcaaggtagcttcagagagcgtgagccttgagctccctgtcgacatcgttccagactccactaaagcctatgtgaccgtactgggggacatcatgggcacggcgctgcagaacctggacggactcgtgcagatgccaagtgggtgcggcgaacagaacatggtccttttcgcacctatcatctatgttttgcaatatctcgagaaggccggcctgctcaccgaagaaatccggtcacgggccgtgggattccttgagatcggataccagaaagaactgatgtacaagcatagtaacgggtcttactcagcctttggtgagagggatggcaacggaaacacatggctaactgcctttgtaacaaagtgttttggccaagcccagaagttcatttttatcgatcccaagaacatccaggatgcccttaaatggatggcagggaaccagctgcccagcggatgctacgccaacgtgggcaatctgctgcatacagcaatgaagggaggggtggacgatgaagtctctttgaccgcctacgtaaccgctgccctgctggaaatgggtaaggatgtggacgacccgatggtgagtcagggtctgcgttgtctgaagaatagtgctaccagcacaactaacttatatacccaggcactcctggcctacatctttagtctagccggcgagatggacatccgtaacattctcctaaagcaattagaccagcaggccattatttcaggggaaagtatctattggagtcagaagccaacgcccagctcgaacgcttcaccgtggtccgaacctgcagctgtggatgtggaattaacagcctatgcgctgctcgcccagctgaccaaaccgtctctgactcagaaagaaatcgcaaaagccacctctattgttgcatggctggccaaacaacacaatgcctacggagggttctcctctactcaggatacggtcgtggctcttcaagccctcgcgaagtacgcaaccacagcctacatgccatctgaggagatcaaccttgtggttaagagcacagagaactttcagaggacatttaacatccagtcggtaaacagactcgtattccagcaggacacactccccaacgtaccaggaatgtataccttggaggcttcaggccaagggtgcgtttatgtccagaccgtgttacgatataacattctgccacctactaatatgaagactttcagtctgtctgtggaaattggcaaagcccggtgcgagcaaccaaccagtcctagaagccttactttgaccatccatacttcctatgtgggatcccgaagcagctctaatatggctatagttgaagttaagatgctttcgggtttctccccaatggaaggaactaatcagctcctgctgcagcagccgctcgtgaagaaggtcgaatttggtactgatacattaaatatctacctggacgagctgatcaagaatacacaaacttacacatttacaatctctcagtctgtgttggtcacgaacctgaagcctgcaaccattaaggtttatgactactatctgcctgatgagcaggcaactattcaatattcggacccctgcgaatag

SEQ ID NO: 107954 - DNA, 1830 bp, synthetic construct
  misc_feature 1..1830: note = Description of Artificial Sequence: Synthetic coding sequence
  source 1..1830: mol_type = other DNA
atgaagtgggtggagtccatctttctcattttcttgttaaacttcactgagtctcggactctacatagaaacgagtacggtattgctagtatactggattcctatcagtgtacagctgaaatctccttagcagatctcgcaacgatattctttgcccagttcgtgcaggaagccacttataaggaagtttccaagatggtaaaagacgctctcacagccattgagaaaccgacaggagatgaacagtctagtggctgtctagagaatcagctgcccgctttcctagaagaactgtgccacgaaaaggaaattctcgaaaagtatggccattccgactgttgttctcagtcagaggaggggcggcataactgctttctcgctcataagaagccaacacctgccagcataccactcttccaggtgccggaacctgtcacatcatgtgaggcgtatgaggaggacagagaaacatttatgaacaaatttatttatgagatcgcaagacgccacccctttctttacgcccccaccatcctgctgtgggctgcccggtacgataagatcattcccagctgctgcaaagccgaaaacgcagtcgagtgcttccagacaaaggcagccacagtaacaaaggaactccgggaaagctcccttttgaaccagcatgcatgtgccgttatgaagaatttcggaaccaggacttttcaagccattacagtgaccaaactctcccagaagttcaccaaggtcaacttcacagagattcagaaactggtgcttgacgtggcccacgtgcacgagcattgctgtagaggcgacgtccttgactgtctgcaagacggcgagaaaattatgagctacatttgctcacagcaggacacgttatccaacaaaattaccgaatgctgcaaacttaccaccctagagcgtgggcaatgtatcatccatgccgagaacgacgagaaacccgaagggcttagccctaatctcaacagatttctgggggaccgggattttaaccagttcagttcaggcgagaaaaacatcttcttggcctcattcgtgcacgagtattcacggaggcacccacagttagcggtgtccgtgatcctgcgggttgcaaaggggtatcaggaattactagaaaagtgttttcagacggaaaacccccttgagtgccaagataagggagaagaagagctgcagaagtacatccaggaatcacaggcactggccaagagatcctgtggactcttccagaagctgggggaatattacctgcagaatgcttttttggtggcctatacaaaaaaggcaccacagctaacaagtagcgaactcatggccattacgaggaaaatggcagcaactgctgctacatgttgccagcttagcgaagacaagctcctggcctgtggggagggcgcagccgatataatcataggacatttatgcattcgccacgagatgacacccgtcaacccaggcgtgggtcagtgttgtacctcctcctacgcaaacaggcggccctgttttagttctctggttgtggacgaaacctatgtgccacccgcgttctccgacgacaagtttatcttccataaggatctgtgtcaggctcagggggtggcccttcagacgatgaagcaagaattcctgatcaacctagtgaaacaaaagccgcaaatcacggaggagcagctagaagccgtgatagcagatttttccggcctgctcgagaagtgctgtcaaggccaagagcaagaagtatgcttcgccgaagagggtcagaagctgatcagtaagactcgagctgcccttggagtgtag

SEQ ID NO: 107955 - DNA, 3735 bp, synthetic construct
  misc_feature 1..3735: note = Description of Artificial Sequence: Synthetic coding sequence
  source 1..3735: mol_type = other DNA
atgaacaatcaaaaggtcgttgctgtgcttctgcaggagtgcaaacaagtgttggatcagttgctcctggaagcacctgacgtgtcggaagaggacaagagcgaggaccagcggtgtcgtgcactactgccgagtgagttgaggactctaattcaggaagccaaggaaatgaagtggccctttgtgcccgagaaatggcagtataaacaggctgtcggccccgaagacaaaacgaaccttaaagatgtgatcggagccggcctgcagcagctgctggcctcacttagagcttcaatcctggcccgagactgcgcagctgcagctgcaatagttttccttgtcgatcggtttctgtatgggttggacgtgtccggcaaattgctgcaggtagccaaggggctacataagctgcaacccgctacacctattgcaccccaggttgtcatccggcaggcacgaatctctgtgaattctggaaagttacttaaggcagagtatatcctgagcagcctaatcagtaataacggcgctacaggcacctggctgtaccgaaatgaatctgacaaggtgctggtccaaagcgtgtgcatacagattcgcggtcagattctgcagaaactgggtatgtggtatgaggccgcagagctgatttgggcttccattgtgggctacctggctctgccgcaacccgataaaaaaggattaagtacgtccctggggattctcgcagatatctttgtgtcaatgagcaagaatgattatgaaaagtttaagaacaatccacaaataaacctttccttactgaaagagttcgaccatcacctactctccgcagccgaagcatgtaagttagccgctgctttctcggcctatactcctctttttgtgctgactgcagtgaacattcgagggacgtgcctgctcagctactcctcttccaacgactgcccccccgaactgaagaatctgcacctatgtgaagccaaagaagcctttgagatcggcctcctcacaaagagggatgatgagccagtgacaggcaaacaggagctgcacagctttgttaaggcagcattcggactgaccaccgttcacagacggctccatggcgagacaggcacagtgcacgccgcgtcacagctgtgcaaagaagcaatgggaaagctctacaatttttctacctccagtcggtcacaagacagggaagctctttcccaggaagtgatgagcgtgattgcccaggtgaaggagcaccttcaggtgcaatccttttccaatgtggatgatcggtcgtacgtacctgaatcattcgagtgtaggctggacaagctcatattgcatggacagggggattttcagaagatcctggatacatactcacagcatcataccagcgtttgtgaagtgtttgaaagtgactgcggtaacaacaagaacgagcagaaggacgccaaaaccggggtgtgcatcacagcccttaagaccgaaatcaaaaatattgacactgtgtccaccactcaggagaagccccactgtcagcgtgacacgggaatcagttcctcactgatgggcaaaaacgtccagagagagcttcggagggggggcagaaggaactggactcatagcgatgctttcagggtgtctttagaccaggatgtggagacagagactgagccgagcgattactcaaacggcgagggcgccgttttcaataagagtctgagtggctctcagacttcttcagcttggagtaatctcagcggtttcagtagctccgctagctgggaggaggtcaattaccatgttgatgataggtctgcccggaaagagccgggcaaggagcatctcgtcgatacacaatgtagcaccgctctgtccgaggaactagagaatgatcgtgagggacgagctatgcatagtttgcatagtcagctgcacgacctcagtctgcaggagccaaataacgataacttagaacctagccagaaccagccccaacagcagatgccccttacccccttttccccccacaatacccctgggatctttctggcaccgggggccggcctacttgagggcgcgcctgagggcatacaagaggttcggaatatggggcccagaaacacgtccgcccattctcggccaagctatcggtctgcctcctggtcctcagactcaggcagaccaaagaacatgggaacccatccttctgttcagaaagaggaagccttcgaaattattgtggagttccccgagacaaactgtgacgtaaaggaccggcagggtaaggagcagggcgaggagatatccgagcgcggagctggacctactttcaaagcctccccctcgtgggtagatcccgagggcgaaacagctgagtccactgaagatgcaccactggatttccaccgtgttctgcataactcactcggtaatattagtatgctgccttgtagcagcttcactcccaactggcccgttcagaatcccgactctagaaagtctgggggcccagtcgcggagcagggtatcgatcccgatgcatcgactgtggacgaggaagggcagctcctcgattcaatggatgtgccatgtacaaacggccacggttctcacagactttgtattctcagacagccacctggccaacgagctgagacccccaattccagtgtatccggaaatattctgttcccagtgttgagcgaggattgcactaccaccgaggagggtaaccagcctgggaatatgcttaactgttcacaaaactcctcatcaagttcggtatggtggttgaaatcaccggcattttcctccggctcctcagaaggagacagcccatggagctatcttaatagttctggaagttcatgggtcagcctgccagggaagatgcgcaaggagatacttgaagcgcgaacccttcaaccagacgactttgagaaactactggcaggtgtccggcacgactggctgtttcagaggctcgagaacacaggagtgttcaagccatcccagctgcatcgtgctcactcggccttgcttctcaaatactccaaaaagtccgagctttggacagcacaggaaactatagtctatctcggagactacttgacagtcaagaagaaggggaggcagagaaatgctttttgggtccaccacttgcaccaggaagaaattctagggcggtatgtagggaaagactataaagagcagaagggactctggcaccactttacagatgtggaaaggcagatgaccgcgcagcattatgtaactgaatttaacaaacggctgtatgagcagaatattccgacacagattttttacataccctccactattctcctgatcctcgaagataagacgatcaagggatgtatatccgttgagccatacattttaggggaattcgtgaagctcagcaataacaccaaggtggttaagacggaatataaggcaacagaatacgggctggcctacgggcatttcagttacgagttctcgaaccaccgggatgttgtggtggatctacagggatgggtaacaggcaacggtaaaggattaatttatctaactgaccctcaaattcactccgtggatcagaaggtgttcacaactaactttgggaagcggggcatattctactttttcaataatcagcatgtcgaatgcaacgaaatatgtcaccgattaagcctcacacgcccctctatggagaagccgtgtacgtag

SEQ ID NO: 107956 - DNA, 429 bp, synthetic construct
  misc_feature 1..429: note = Description of Artificial Sequence: Synthetic coding sequence
  source 1..429: mol_type = other DNA
atgaacaatcagaaggtcgtcgcggttttgctccaagagtgcaaggcgctgcttccttccgagctgcgcacgctgatccaagaagccaaggagatgaagtggccattcgtcccagagaagtggcagtacaagcaggctgtagggccggaggataaaaccaatttgaaagacgtgatcggagccgggttgcaacagctgctagctagccttcgggcctcaattctggcaagagattgtgcagctgcagcagccatcgtgtttctggttgacaggtttctctatgggctggatgtgtcaggcaagctgcttcaggttgccaaggggctccataaattacaacctgccacccccattgctccacaggtggtgattcgacaggcacgtatatcagtaaacagcggttctcaccctgcaaagcatagcatgtag

SEQ ID NO: 107957 - DNA, 3735 bp, synthetic construct
  misc_feature 1..3735: note = Description of Artificial Sequence: Synthetic coding sequence
  source 1..3735: mol_type = other DNA
atgaataatcagaaagttgtggcagttctgctgcaggaatgcaagcaggtgctggaccaacttctgctggaggctcctgatgtgtctgaagaggataagtcggaagaccagagatgccgggccctgctcccaagcgaactccgtacactgattcaagaagcaaaggaaatgaagtggccttttgtcccagagaagtggcagtataaacaagctgtaggccccgaggataaaaccaatctgaaggacgtcataggagccggactgcagcaattgctggcatctctgcgggcctccatactggcgagggactgtgccgctgcggcggcaatcgtgtttttagtcgatcgtttcctctatggtcttgatgtgtccgggaagctgcttcaagtggcaaaaggattacacaaactgcagccggccactcctattgctcctcaggttgtgatccgccaagctcggatctcagttaatagcggaaaactgctcaaagcagagtatatcctgagttccctcatttccaataatggcgccaccgggacatggttgtatcgtaacgaaagcgataaagtgctggtgcagtcagtttgcatccagattcgaggacagattctgcagaagctggggatgtggtatgaagcagccgaactcatctgggccagcatagtggggtacttggcactaccacaacccgataaaaagggcctgtcaacatctcttggtattctggcagatatctttgtctcaatgagcaagaacgactacgagaagtttaaaaacaacccccagatcaacctgtctctgttgaaggaatttgaccatcacctgctgtccgcagctgaagcatgtaaactggccgctgccttctccgcctatactccactattcgtgctgactgcggtgaatataagaggtacatgtctgctgtcttactcctcatccaatgattgcccccccgaactgaagaacctgcatctctgcgaggccaaggaagccttcgagatcggtctgctaactaagagagatgacgagcccgtgaccgggaagcaggagttgcactctttcgttaaagccgcattcggacttactacagttcaccgccggctacacggcgagaccgggacggtgcatgcagcgtcccagttatgcaaggaagcaatgggaaaactgtacaactttagcacaagctcccggtctcaggaccgggaggcgctgtcccaggaggtgatgtctgtgatagcccaggtgaaagaacatctacaggtacagtctttttctaacgtggatgatcgttcctacgtgccggaaagcttcgagtgccgcctggacaagcttatactgcacggccaaggagatttccagaaaattctggatacgtactctcagcaccacacatcagtgtgtgaagtcttcgagtctgattgtggcaataacaagaacgagcagaaagacgctaaaacgggagtgtgcattactgcactgaaaaccgaaatcaagaacatcgacactgtgtctaccacacaggagaagccccattgccaacgcgacaccggaatatcttcaagcttgatgggcaagaatgtgcaacgcgaacttagaaggggaggacggaggaactggacccactcagacgcctttagagtatctctggaccaggatgtggaaaccgaaaccgagccatcggattacagcaatggagagggcgccgtctttaataagtccctgagtggatcacagacttcgagtgcctggtcaaatcttagcggattcagctctagcgctagctgggaggaagttaattaccatgtagacgacagaagtgcccggaaagagcctggcaaagaacacctggtggatactcaatgctcgacagccttgtcagaggaactggagaatgatagagagggcagagctatgcactctctacattcacagctccacgatctaagcttgcaggaacctaataatgataacctggaaccctctcaaaatcaaccgcagcaacaaatgccgctcacccccttttcaccacacaacactccgggaattttcttagctccaggtgccggtctgctggagggcgccccagaaggcattcaagaggtgagaaacatgggaccgcgaaatacctccgcccattcacgtccctcttataggagcgccagctggtcatccgacagcggtaggcctaagaacatggggacacacccgtcggtccagaaagaagaggctttcgagatcattgtggaatttccggagaccaattgcgacgttaaagaccggcagggcaaggagcagggcgaagaaatttccgaaaggggagccggtccgaccttcaaggcctccccatcttgggttgaccccgagggcgaaacagccgagtctaccgaagatgcccccctcgactttcatagggttttgcacaacagcctgggtaacatttctatgctcccctgctctagctttaccccgaattggcccgttcaaaatccggactcgaggaagtccggagggcctgttgcagaacagggaatcgaccccgatgctagcacagtggacgaagagggacagttattagattcgatggacgtgccttgtacaaatggacatggtagccaccgcctgtgcatcctcagacagcccccaggccaaagagccgagacaccaaactcctcagtgtccgggaacatcctgttccccgtcctgtcggaagactgtactaccacagaggagggcaatcagcccggcaacatgcttaactgttcccagaacagcagttctagtagtgtatggtggctgaagtcccccgcctttagttccggttcatccgagggcgattccccttggagttacctgaactcttcaggttcttcatgggtaagcttacccgggaagatgcggaaggaaattttggaggcgcgtacgctgcaaccagatgactttgagaagttgctggcaggagtgcggcacgactggttgttccagcggctcgaaaataccggagtttttaaaccttcccagttgcatcgagctcacagtgcgttactgctgaagtattcaaaaaaaagtgaattatggactgcccaagaaacaattgtgtacctgggagactatttgaccgtgaagaagaaggggcggcaacggaatgccttttgggtccaccatctgcatcaggaggagattttgggccgctacgtcgggaaagattataaagaacaaaagggtctgtggcaccattttacagatgtagaacgacagatgaccgcccaacactacgtgacggaattcaacaagaggctctatgagcagaacatccccacccagatcttttatatcccctcgactatcctattgattctcgaggacaagaccatcaagggctgcatcagcgtagaaccatacattctgggcgagttcgttaagttgtctaacaacaccaaggtcgtcaaaaccgagtacaaggccacagagtatggtttagcctatggccatttttcttacgagttctccaatcaccgagacgtggtggtggatttacagggatgggttacaggcaatggaaaaggtctgatctaccttacggacccccagatccattctgtggatcagaaggtgttcacgaccaactttggaaagcgagggattttctatttctttaataaccagcatgtcgagtgcaatgaaatctgtcatcgtcttagtctcaccagacctagtatggaaaaaccctgcacttag

SEQ ID NO: 107958 - DNA, 3501 bp, synthetic construct
  misc_feature 1..3501: note = Description of Artificial Sequence: Synthetic coding sequence
  source 1..3501: mol_type = other DNA
atgtgcagaaagcgaaccagggcccggacatcggctgcggaagccagcttacgggcctcaattttggcaagagactgtgcagctgctgctgccatagttttcctggtcgatcgatttctgtatggcctggatgtctcaggcaagctgctgcaggttgcaaaaggattgcacaagctccagccagctactccgattgccccgcaagttgtgattcggcaggcacgaattagcgtgaatagcggaaagctgctgaaggccgagtacattttgagtagtctgataagcaacaatggcgctacgggcacttggctctatcgcaacgaaagcgataaagtactggtccagagcgtgtgcattcagatcagagggcaaatcctgcagaagctcgggatgtggtacgaggctgcggaattgatatgggcctccatagtcggttacctggcactgcctcagcctgacaaaaaaggtctgtctacatctctgggaatcctcgccgacattttcgtatccatgagcaagaacgattatgaaaaatttaaaaacaaccctcagattaacctgagtctgttgaaggagtttgaccaccacctgctatccgcggctgaggcctgcaagctcgctgctgctttcagcgcctacacacctttgttcgtgctcacagccgtaaatatcaggggcacctgcttgctgtcatattcatcatctaatgattgtccaccagagcttaagaatcttcacctatgcgaggccaaagaggctttcgagattggacttttgacaaagagagacgacgagcctgtcaccgggaagcaagaattgcatagtttcgtgaaggctgcttttggactgactaccgtccatcgccgccttcatggcgagaccggtaccgtccatgctgcctctcagctgtgcaaagaggcaatgggcaaactctacaattttagcacatccagccggagtcaggatagggaagcactctcacaggaggttatgagtgttatcgcacaggtcaaggaacacttgcaagttcagtcgttctcgaatgtagacgatcgttcttatgtaccagaatctttcgagtgccgcctcgacaagcttattctgcatggccagggggatttccagaaaatacttgatacgtattctcagcaccatacgagcgtgtgcgaagtgttcgaatctgactgcggcaacaacaagaacgaacaaaaggatgccaaaacaggggtttgtatcacagccctcaaaacagagattaagaatatagacacggttagtacaacacaggaaaaaccgcactgccagcgggataccgggatcagttcatctctgatgggcaaaaacgtgcaacgggagctccggaggggggggcggcgaaattggactcactccgacgccttccgggtgtcactcgaccaggacgtggaaaccgagactgaaccgagtgattactctaatggcgagggcgcagtcttcaacaagtcccttagcgggtcacagacgtcttccgcttggagcaatttatctggattctccagcagtgcatcatgggaagaagtcaattaccacgttgacgaccggtccgctaggaaggagccaggcaaagagcacctggtcgacacgcagtgttctacggccctcagcgaagaactcgagaacgatcgggaggggagggcaatgcattccctgcactcgcagctgcacgacctctccttacaggagccaaataacgacaatttggagccttcacagaatcagcctcaacagcagatgccacttaccccattctccccgcacaacaccccaggtatcttcttggcaccaggggcgggcctgcttgagggtgcacccgagggaatccaggaggtgaggaatatgggccctcgcaatactagcgcccactccagaccatcctatagatccgcatcctggagtagtgattctggcaggccaaagaacatgggaacgcaccccagcgtgcaaaaggaggaggcatttgaaatcattgtggagtttccagagacaaattgcgatgtgaaggataggcaagggaaggagcagggcgaagaaataagcgaacgcggggccgggcccaccttcaaagccagcccgtcttgggttgatccagagggagagaccgcagaaagcacggaagacgctcccctggattttcatagagttctgcacaattctcttggaaatatcagtatgctgccgtgcagtagctttacgccaaattggcccgtgcagaatccagattctcgaaagtccggcggaccagtagccgagcagggcatcgaccccgatgcaagcacagtggacgaagagggccagctgctcgattctatggacgtgccctgtaccaacggccatggatcccatcgactgtgcatcttgcggcagcccccaggccaaagagcggaaacacctaactctagcgtgagtggaaacatattgtttcccgtcctgtccgaagactgtactaccacagaagaagggaaccagcctggtaacatgcttaactgcagccagaactcatcctctagtagcgtgtggtggctgaagagtccagctttttcaagtggcagttccgaaggtgactccccatggtcttacttaaacagttcagggtccagttgggtttcccttccaggcaaaatgcgcaaggaaatccttgaagcccggacgcttcaacccgacgactttgaaaagctgctggcaggagtgaggcacgactggctttttcagcggcttgaaaatacgggcgtttttaagccgtcgcagctgcaccgcgctcacagtgccctgctactgaaatactctaagaagtccgagctttggacggcccaggaaacgatcgtctacctgggcgactacttgacagtgaagaaaaaaggaaggcagagaaacgccttctgggttcatcaccttcatcaggaagagatcctcggcagatacgtggggaaggactacaaagaacagaaggggctctggcatcactttactgatgtggagcggcagatgaccgcacagcactatgtgactgaattcaacaaaagattatacgagcagaacatccccacacagatattttacatacccagcacaatcttactgatcttggaagacaaaaccataaaaggatgtatctctgtcgagccctacattctcggcgagtttgtcaaattgagcaataacacaaaagtcgtgaagaccgagtacaaagcaaccgagtacgggttggcctatggccacttttcttacgaattctccaaccacagagacgtcgttgttgatctgcaggggtgggtgaccggcaatggtaagggacttatttacctcactgatccacaaattcactctgtcgaccagaaggtgttcacaactaacttcggaaaacgaggaatcttctatttcttcaacaatcagcacgttgaatgcaacgaaatctgccaccggctaagtcttacaaggccctctatggagaaaccctgcacatag

SEQ ID NO: 107959 - DNA, 1149 bp, synthetic construct
  misc_feature 1..1149: note = Description of Artificial Sequence: Synthetic coding sequence
  source 1..1149: mol_type = other DNA
atggcattgcagggaatctcagtagtggagctgtcaggattggctccaggtcccttttgcgccatggtgctggcagatttcggtgccagggtcgtcagagtggatcgccccggaagtagatacgacgtttcccggctgggtcgtgggaaacgatcccttgtgttggatctcaagcagccgcgtggcgcggccgtccttagacgcttgtgtaaaagaagcgatgtgttgctagagccatttcggcgtggagtgatggagaagctgcaactgggccctgagatattgcagcgagagaacccaagattaatttatgccagactgtccggatttgggcaaagcggctccttctgcagactggcgggacacgacatcaattatctagcactgtcaggggtgctaagcaaaatcggaaggtctggggagaatccctacgcacccctaaatctgctggctgatttcgccggcggggggctcatgtgcgccctgggcatcataatggcactgtttgatcgtaccaggaccggaaagggacaggtgatcgatgccaatatggtcgaaggcactgcttatttatcttcattcctctggaagacccagaagctgtcattgtgggaggctccccgaggccagaacatgctggacggcggcgcgcctttttacactacatataggacagctgacggggaattcatggcagtgggtgcaatcgaaccacagttctacgaactgctaatcaaaggcttgggcctgaaatctgacgaactccccaaccagatgagcatggatgattggcccgagatgaaaaagaagtttgccgacgtcttcgccgaaaaaaccaaggcagagtggtgccaaattttcgacggtacagatgcctgtgtgactccagttctcacgttcgaagaggtggtccaccatgaccacaacaaagagagggggtccttcatcacctctgaagaacaggacgtctctcctcgcccagctccacttctcctcaacacaccggccattcccagcttcaagcgcgacccattcatcggtgaacacacggaagagattctcgaggagtttggcttctcccgggaggagatctaccagttaaacagtgacaagattattgagagtaacaaggtcaaggcgagcttgtag

SEQ ID NO: 107960 - DNA, 597 bp, synthetic construct
  misc_feature 1..597: note = Description of Artificial Sequence: Synthetic coding sequence
  source 1..597: mol_type = other DNA
atggccttacaggggatctccgttgtggaactgagtggactggctccgggtcccttctgtgcgatggtgctcgccgactttggcgcccgtgtggtgcgggtagacaggcccgggtcccggtatgacgtatctagacttggccgcggtaagagaagcctcgtcctggacttaaagcagccacgcggggccgctgtgcttcggcggctttgtaaacggtccgatgtcctgctggaacctttcaggcggggcgtcatggagaaactgcagttgggtcctgaaatcctgcagcgcgaaaaccctaggctgatctatgcaaggctcagcgggtttggacagagcggttccttctgtcggcttgccggacacgacatcaattatttagccctgtctggtggaaggaattcaatcttcaagttttttagcgtagagaatagtgaaatagagtccgtcgggagtacctctagaacagagcatgttggttggtggagcaccttcctatatgacctccaggatagtaggtgggggatccacgggtgttggagcaacagaacgcccgtcctgcgggcggccgatcaaagaacatggacaaaagtgtag

SEQ ID NO: 107961 - DNA, 690 bp, synthetic construct
  misc_feature 1..690: note = Description of Artificial Sequence: Synthetic coding sequence
  source 1..690: mol_type = other DNA
atggcccttcaagggatatccgtagtggaactgagtggcctcgcaccggggcctttctgcgctatggtactggccgactttggagctcgggtagtgcgcgttgaccgccccggctctcgatatgatgtgtcaagactgggaagggggaagagatcattggttctggacttgaaacaaccccggggcgccgccgtactgcgacgcttgtgtaagcgctctgatgtactactcgagccgttccgacgtggcgtcatggagaagcttcagcttggtcccgaaatacttcaacgcgaaaacccccgtctgatctacgcgcgcttatccgggtttggccagtccggaagcttttgtcgactggctggtcacgatatcaactatcttgccctcagtgggggccgcaacagcatatttaagtttttttccgtggagaacagcgaaattgaatcagttggtagcaccagcaggacagaacacgtgggatggtggtccacctttctgtacgacctgcaggactctcgctggggaatccacgggtgctggtccaacaggacccctgtgttgcgcgcagcagatcagcgcagcttgatcccatattttaacctatatctgcagtttctcaatatttccatgcagaacttgttcaaggttcatacccttttacgaccttgctacttcctgggccaaaagtag

SEQ ID NO: 107962 - DNA, 1185 bp, synthetic construct
  misc_feature 1..1185: note = Description of Artificial Sequence: Synthetic coding sequence
  source 1..1185: mol_type = other DNA
atggccctgcaaggtatctccgtggtggaactttctggactcgctcctgggccattttgcgccatggttctggctgacttcggggccagagttgtacgtgtggaccgtcccggttctcggtatgatgtgagccgcctaggcaggggtaagcgcagcttagttttggacctcaaacagccacgaggggctgccgtcctacgaaggttgtgcaagcgcagtgatgttttattggagccattcaggcgaggcgtgatggaaaagctccagctagggcccgaaattctgcaaagagaaaatccgaggttaatttacgctcgcttgtccggctttgggcaaagcgggtcgttttgtagactcgccgggcacgacattaattatctggcactctctggcgtcctgtccaaaatcggtagatcaggcgagaatccctacgccccactgaacttgctggcagactttgcgggaggcggccttatgtgcgctctcggcatcataatggcgctgttcgaccgaactaggacgggaaaagggcaggtcattgatgccaatatggtcgaaggcacggcatatctcagctcttttctctggaaaacacagaaactgagcctgtgggaagcccctagagggcagaatatgctggacgggggagcgcctttctacactacttaccgcaccgcggatggagagttcatggctgtgggcgccatcgagccccagttttatgagctactaattaagggcttgggactaaaatccgacgaactgcccaatcagatgtcaatggacgattggcccgaaatgaagaaaaagttcgctgacgtgttcgccgaaaagacaaaagccgaatggtgtcaaatctttgatgggaccgatgcctgcgtgacgcctgtactgacttttgaggaggtggtccatcatgatcacaacaaggagcgcgggtcttttatcacttccgaggagcaggatgtctccccacgccctgcccccttgctgctaaatacccctgccattccgtcttttaagcgggatccctttatcggcgagcataccgaagagattcttgaagagtttggtttcagcagagaggagatttaccaacttaattccgacaagatcatcgaatctaacaaagccggctctaaattttggatactgtatccaactcactccaacattcaaaaatag

SEQ ID NO: 107963 - DNA, 1002 bp, synthetic construct
  misc_feature 1..1002: note = Description of Artificial Sequence: Synthetic coding sequence
  source 1..1002: mol_type = other DNA
atggccgccggctgctgtggagtaaagaagcagaaactgagcagttccccaccttcaggttccggcggaggcggcggtgcttctagctccagccattgcagcggagagtcccaatgtcgggcaggcgagctcggactgggcggcgcagggaccaggttgaacggcctcggcgggctgacaggcggcggatccggtagcgggtgcacactgagccctccccagggctgtggcggggggggcggcggtatcgccctgagtcccccgccctcctgcggcgtaggaactctcctgagcacccccgccgcagccaccagttcaagcccatcatcaagctctgcagcctctagtagctcccccggcagcaggaaaatggttgtgtctgccgagatgtgctgtttttgttttgacgtgctctactgccacttatatggctaccagcagcctaggacaccgcgcttcaccaatgagccttatcccctattcgttacgtggaagatcggtcgagataagcggctccggggttgtattgggacattcagtgcaatgaatttacactctgggcttcgcgaatatacactcaccagtgctctcaaagactctcgttttccacccatgactagggacgaacttccacgactgttttgcagtgtcagtctgttgaccaacttcgaggacgtctgcgactacttggattgggaagtgggcgtgcatggtatccggatcgagtttatcaacgagaaaggatcgaaaagaaccgcgacctacctccccgaagttgcaaaggagcagggctgggaccacatccagaccatcgactcactgttgcgcaagggtggctacaaggcccccattaccaatgagtttagaaaaacaataaagttaacccggtatcgaagtgaaaaaatgacgctgagctatgctgagtatctcgcgcaccggcagcaccatcatttccagaatggtatcggccacccgcttcctccatacaaccactactcttag

SEQ ID NO: 107964 - DNA, 633 bp, synthetic construct
  misc_feature 1..633: note = Description of Artificial Sequence: Synthetic coding sequence
  source 1..633: mol_type = other DNA
atggtagtatccgcagaaatgtgctgcttctgttttgacgttctctattgtcatctgtacggataccaacagcctaggactccccgcttcacgaatgagccgtacccgttgtttgtcacttggaagatcggccgagacaaaaggctgaggggttgtattggaacctttagcgcaatgaatttacactctggattgcgcgagtataccctgacctcggctcttaaagactcacgtttccctccgatgactcgcgatgaactgcctaggctgttttgcagcgtgagtttgcttacaaatttcgaagacgtctgtgactacctagattgggaagtaggcgtccacggaatccgaatcgagtttataaacgaaaagggctccaagaggaccgctacctacctccctgaggttgcaaaagaacagggctgggatcacattcagacaattgacagcctgctccgcaagggggggtataaggctcctataacaaatgaattccgcaagacaattaaactaacccggtatcgaagtgaaaaaatgaccctttcttacgcagagtatctggcgcacaggcagcaccatcactttcagaatggtataggccaccctctgcctccgtataatcattactcctag

SEQ ID NO: 107965 - DNA, 891 bp, synthetic construct
  misc_feature 1..891: note = Description of Artificial Sequence: Synthetic coding sequence
  source 1..891: mol_type = other DNA
atggccgccggctgctgtggggtgaagaaacagaaactaagttcttcaccaccctcaggttctggtggaggaggaggggcttcttccagtagccattgcagtggcgaatcccagtgcagagcgggcgaacttggcctcggcggagctggaaccaggctgaacggactcggagggctgaccggcggcggatcaggcagtgggtgcactctgagcccaccccaaggatgcggcgggggtggaggggggatagctctgagcccgccgccgagctgtggggtgggcactctcttatccaccccggccgccgccacttctagctctccatcgtcatctagtgcggccagcagtagttctcctggatcaagaaagatggttgtgagcgcagaaatgtgttgcttctgtttcgatgtgctctattgccacctgtacggctaccagcagcctcggacacccaggtttacaaatgaaccttacgctctgaaagacagcaggttccccccaatgacgagggacgaactacctaggctgttctgctccgttagcctgctgactaacttcgaagacgtttgtgattacttggattgggaggttggggtgcatggcattcggattgaattcataaacgaaaaaggaagtaaaaggaccgccacctacctcccagaggtcgccaaagaacaaggatgggatcatatccagactattgactccttgctccgaaagggtggctataaagcacccatcacaaatgagttcaggaaaacaatcaagctgacaagatacagatccgagaagatgactctgtcgtacgccgagtacctcgcgcataggcaacatcatcacttccaaaacgggatcgggcacccattgcccccgtacaatcactatagctag

SEQ ID NO: 107966 - DNA, 2862 bp, synthetic construct
  misc_feature 1..2862: note = Description of Artificial Sequence: Synthetic coding sequence
  source 1..2862: mol_type = other DNA
atgtgcaatcctgaggaggcagctctcttgaggcttgaagaggttttttctgctacgctggcccacgtcaattcactagtgttacagccgctcctcccagctgcgcctgatccctcggatccttgggggcgcgagtgcctgcggctgcttcagcagctgcacaaatcatctcaacagctgtgggaagtgactgaagagagcttacacagcctgcaagaacggctgaggtaccctgatagcaccggcttagaatccctgttgttactccgcggcgcagaccgcgtgctgcaagcccacatcgaatatattgagagttatacgagctgtatggtcgtccaagcattccagaaagcagctaaaaggcgctctgaatattggcgggggcaaaggaaagccctgaggcagttgttgagcggagtctcatcggaggggtccgttggggcgtctctgggccaggctctgcaccagcccttggctcaccacgttcagcagtatgtgttattactgctgagcctgggagatacaattggcgagcaccaccccacccgcgagttagtggttaacgcggtcaccctgtttggcaatctgcaatcctttatgaaacaagaactggatcaggcggtcgccacacaggctctttggcacacactcaggggtagactgcgggatgtactgtgtacccctgcccaccggcttcttcaggatagccaagacgtaccagtcacagtggctccgctccgcgcggagcgcgtgctattgtttgatgacgcgttggttcttctgcagggtcataatgtgcatacattcgacctcaaactcgtgtgggtggatccgggacaggacggctgcacctttcatctactgacccccgaggaggagttttctttctgcgccaaagacagccaggggcaggctgtgtggcaatggaaagtcacctgggccgtacaccaggcacttcacggcaagaaggattttccggtgttgggggcgggacttgagccctcccagcctcctgactgcaggtgtgccgagtacacttttcaggcagaggggcgactatgtcaggctacatacgagggcgagtggtgtcgcgggcgaccacacggcaaggggaccctgaaatggcctgacggcagaaaccacgtgggcaacttctgtcaaggcttggaacatggctttggaatccgcctccttccacaggcaagcgaggataagtttgactgttacaaatgccattggagagaaggatccatgtgcggatacggaatctgtgagtattcaacggacgaggtctacaagggatatttccaagagggactgcggcacggttttggcgtactggaatctgggcctcaggctcctcagcctttcagatatacgggacattgggaaagggggcagcgcagcggctatggtattgaggaagacggcgatcggggagagaggtacataggaatgtggcaggccggccagcgccacgggccgggagtgatggttacacaggccggcgtgtgttatcagggcacattccaggccgacaaaactgttgggcctggcatcttgctgtctgaggatgattctctgtatgagggcacgttcacccgtgacctgacattgatgggcaaagggaaggtgacttttccaaacgggttcactctggagggttcattcggttccggtgcaggtcgaggcctgcacacacagggggtcctggacactgctgccctgccacctgatccttcctcaacatgcaagagacagttgggcgtcggcgctttccctgtggaaagcagatggcagggggtttattcaccattccgagacttcgtctgcgctggttgccctcgtgacctgcaggaggctctgcttggcttcgacgtgcagagtagtagagaactacgaagatctcaggactacctcagttgtgaacggactcatccagaagatagtgtcggatccatggaggatatactcgaagagctgctgcagcacagggaaccgaaggccctgcagctgtatctcagaaaggccctctctaattctctgcatcccctgggaaaactgttgcgtaccttgatgttgacattccaggctacctacgccggtgttggtgcaaataagcatttgcaggagctggctcaagaggaggttaaacagcacgcccaggagttgtgggccgcataccgaggactgctgcgggtcgccttagaacgcaagggtcaggctctggaagaggacgaagatacagagacgcgggacctccaggtgcacgggctggtcttgccccttatgttgccctccttttactctgagctgttcacgctctatctgcttctacacgagagagaggacagcttttatagtcaaggcatcgccaatcttagcctctttcctgacacacagttactggagtttttagatgtccagaaacatttatggcctttgaaagacttaacactgacatctaaccaacggtattcactggtgcgggataaatgtttcctgtctgcaactgagtgtctgcaaaagattatgaccaccgtggacccgcgagaaaaattggaagtgctggaacgaacatatggggaaatcgagggaacggtttcaagagtgttggggagggagtacaaactgcccatggatgaccttctccctttattgatatatgtcgtgtccagagcaaggattcagcacctgggcgcagagatacatctgattcgggacatgatggatccaaatcacaccgggggcctgtatgactttctgctgacggcgctggaatcctgctacgagcacattcagaaggaagatatgaggctccatcgcctgcccggccattggcactccagggagctgtggtag

SEQ ID NO: 107967 - DNA, 903 bp, synthetic construct
  misc_feature 1..903: note = Description of Artificial Sequence: Synthetic coding sequence
  source 1..903: mol_type = other DNA
atggaagacatcctggaagagctgctgcagcaccgcgagcccaaggcactgcaactttaccttcgaaaggcactctccaatagtcttcaccccctgggtaagctgctccggacactcatgctgacctttcaggcaacttacgccggagttggagccaacaagcatttacaggagcttgcccaagaagaagtgaagcaacacgcccaggaactatgggcggcataccggggactgctaagggtcgccctggaaaggaaggggcaggctctggaggaagacgaggataccgagactcgagatctacaagtccacggtctcgtgcttccactgatgcttcctagcttctacagcgaattgtttactctctacctgctgctgcacgaacgagaggacagcttctattcacaggggatcgccaatctttctctctttccagatactcagctcctggaattccttgatgtgcagaaacacctgtggccgttaaaagatctcacactgacaagcaatcaacgatatagcttagtgagagataaatgttttcttagtgcaaccgagtgcctccaaaaaattatgaccacggtggatccaagagagaaactagaggtcttagaacggacatatggcgaaattgaaggaactgtaagccgcgttctgggacgggaatataagcttccaatggatgatcttctccccctcctgatttatgtcgtatcgcgcgctaggatccagcatctgggagcagaaattcacctgatccgtgatatgatggaccctaatcacaccggcggcctttatgactttctgctgactgccttggaatcctgttacgagcacattcagaaagaggacatgcgcctgcaccgccttccgggccactggcactcacgcgagctttggtag

SEQ ID NO: 107968 - DNA, 2862 bp, synthetic construct
  misc_feature 1..2862: note = Description of Artificial Sequence: Synthetic coding sequence
  source 1..2862: mol_type = other DNA
atgtgtaaccctgaagaagctgctttgctacgactcgaggaggtcttctccgccactctggctcatgttaactcgcttgtccttcagcccctcttgcctgcggccccggacccctcagacccctggggccgggagtgtttgcgcctgctccaacagctgcataaatctagccagcaactgtgggaggtcacagaagagagtctccattctctgcaggagcgcctgcggtatcctgactctacgggactggagagcctgctgttactgcggggagccgatcgggtgctccaggcccacatagagtacatcgagagctatacatcctgtatggtggttcaagctttccaaaaggcagcgaaacgtcgctcagaatattggcgagggcagaggaaagcccttcggcaattgctctcaggcgtaagctccgaaggttccgtgggcgcatcattggggcaggcactgcaccaacctttggcccaccacgtgcagcagtatgttctgctgctgctcagcctgggagacaccattggtgagcaccatccaacaagagagcttgtcgtgaacgcagttacgttgtttggaaatctgcagtcatttatgaagcaggagctggaccaggccgtggcaactcaggcgttgtggcacaccctgaggggtcgcctaagagatgtgctctgtacacctgctcacaggctgctgcaggatagccaggacgtgcccgtcacggtggctccattgagagccgagcgcgtgcttctctttgatgacgctctagtgctgctccagggacacaacgtccacacatttgacctcaagctggtttgggtcgaccctggacaagatgggtgtacctttcacctcctgacgcccgaagaagagttttccttttgcgctaaagacagtcaaggccaggcggtgtggcaatggaaggtgacctgggctgttcatcaggcccttcatggaaagaaggattttcctgtgctgggagcaggattggagccctcacagcctcctgactgcagatgtgctgaatatacttttcaggccgagggacggctgtgtcaggccacatatgaaggcgaatggtgtcgagggcgcccacacggcaagggaactttgaaatggcccgacgggagaaaccatgtgggtaacttctgccaggggctagagcatgggttcggaattagattgctgccccaagcctctgaagataagttcgactgttacaaatgccactggagagagggctccatgtgtggatatggtatttgtgaatattccaccgacgaagtttataagggctacttccaagaaggccttcgccacgggttcggagtcctcgaatcaggccctcaggccccgcagccattccgctatacaggacactgggagcgcggtcagagatccggctacgggattgaggaagacggagaccgcggggaacgttacataggaatgtggcaggcaggacagagacacggccctggcgtcatggttacacaggccggggtgtgttatcagggaactttccaggccgataagactgtgggtcccggaatcctgctcagcgaagacgactccctgtatgagggaacctttactcgggacctgacactgatggggaaaggaaaggtgacctttcccaacgggttcacattggaagggtctttcgggtccggagcagggaggggactgcacacccagggagtgctcgacacggctgctctcccaccggatccttcttccacctgtaagaggcagctgggtgtaggcgcatttccggtagaatcccggtggcagggagtgtactctcctttccgggactttgtgtgtgctgggtgtcccagggacctgcaggaagctctcctgggttttgacgtgcagagcagcagggagctgcggaggtcacaggattatctgagctgcgaaagaacccacccagaagattcagtggggtcaatggaagacatcctagaggagttgcttcagcacagagagccgaaggctcttcagctgtatttgcgaaaggccctgagtaactccctgcaccccttaggaaagctattgcgaacccttatgctgacctttcaagcaacttatgcgggggtgggagctaataagcacctacaggaactggcacaggaggaggtcaaacagcacgctcaagagctttgggcggcctaccgtgggctgcttcgtgtggccttggaacgtaagggccaggcattggaggaggatgaggataccgagaccagggacctccaagtgcatggtctggtgttgcccctgatgttaccatctttctattccgaattgtttactttataccttctcctacacgagagggaagatagtttttactcccaaggaattgctaacttatctttgttccctgacacccaacttctcgaattcctagacgtacaaaagcacctctggcccctgaaagatttaaccctgactagcaatcagcgctatagtctcgtgcgtgacaaatgcttcttgagcgctactgagtgtcttcagaaaataatgacaaccgtcgatcctcgggagaagctggaggtgctagagaggacctacggtgaaattgaggggaccgtgagccgggtgttgggtagagaatataagctgcccatggacgacctcctgcctctgctgatttacgtagtgagtcgcgctcgcatccagcatctcggcgcagaaattcacttgatccgtgatatgatggaccccaaccatactggtggcctgtacgactttctgttaacggccctagagtcttgctacgagcacatccagaaggaagacatgaggctccatagacttccgggacactggcatagcagagaactatggtag

SEQ ID NO: 107969 - DNA, 12504 bp, synthetic construct
  misc_feature 1..12504: note = Description of Artificial Sequence: Synthetic coding sequence
  source 1..12504: mol_type = other DNA
atggagcccgaggatttgccatggcctggggaattggaagaggaggaggaggaagaagaagaagaggaggaagaagaagaggaagctgcagcagcagccgccgccaatgtcgatgacgtggtggtggtggaagaagtcgaggaggaagccggtcgtgaactggatagtgattcccactacggtccacaacaccttgagagcatcgatgatgaagaggacgaggaagctaaagcctggctacaggcacaccctggcagaatcttgccgccattaagcccaccacagcacaggtatagcgagggcgagcgcacttctctggaaaagattgtaccgctaacttgccacgtgtggcagcagattgtgtaccagggtaatagtaggacacagatttctgacacgaatgtggtctgtctcgagacgactgctcaacggggatccggagacgaccaaaagacagaatcgtggcactgcctaccccaggagatggatagttcacagacactcgatactagtcaaactcggtttaatgtccgaaccgaagacaccgaagtgacagacttcccaagcttagaggaaggtattctaacacagtcggagaatcaggtaaaggaacctaacagggatctgttttgctccccgttactggtcattcaggattcttttgcctctcccgacctgcctctgttgacctgcttaacacaagatcaagagttcgcccccgacagcctgtttcatcagagcgagctctccttcgccccccttcgcgggatacccgataaaagcgaagataccgagtggagcagtcgcccaagtgaagtgagcgaggcgctgtttcaggccacagcagaggtcgcctctgatcttgcatccagtagatttagcgtctctcagcatccactcattggctcgacagccgtcggatctcagtgcccttttctcccttctgaacaggggaacaacgaagaaacaatctcctcagttgacgagctcaagatccctaaagactgcgaccgatacgatgacctatgctcctacatgtcatggaagacaagaaaggacacccagtggcctgagaacaatttagctgacaaggatcaggtcagtgtggcgacctcttttgacatcaccgacgaaaatattgctaccaaaagaagcgaccactttgacgccgctagaagttacgggcagtattggactcaggaagattcaagcaaacaggcagaaacatatcttacaaaaggactgcagggcaaggtggaatcagacgtgattaccctcgacggcctaaatgagaacgccgtggtttgcagcgaacgcgtggcagaactccagaggaaaccgactcgcgagagcgaatatcattcctctgatctgcggatgctgcggatgtctcccgacaccgtccccaaggccccaaagcacctgaaagctggagatacctccaaaggcgggatagccaaagtaactcaatcaaatctaaagagcgggattacaacgacacccgttgatagcgacatcgggtcacacctgagtctctccctggaggatctttcccagctggccgtctctagtctggaaaccacaaccggccagcacacagatacactcaaccagaagacattagctgacacccacctgaccgaagagactctcaaggttacggctattccagagccggcagaccagaaaaccgccactcctaccgtgctcagctcttctcacagtcacagaggcaaaccatctatcttctaccagcaagggttgccagatagccacctcactgaggaagcactcaaagtgtccgcagcgccgggtttggccgaccagactaccggtatgagtactttgacttcaacatcatattctcaccgcgagaaaccagggaccttctaccagcaggagctgcccgaatcgaatctgacggaagaaccattagaggtttctgccgcccccggccctgttgaacagaaaaccggaatccctaccgtttcaagtacctctcactcacatgtcgaggatctgttgttcttctatcgccagaccctgcccgacggtcatctcactgatcaggcccttaaagtgtcagccgtctccggccctgccgatcaaaaaacgggcaccgccactgtgttatccaccccgcactcccacagggagaagccaggcatattctatcagcaagaatttgcagactcacatcagacagaagagacactgacaaaggtgtctgcgacaccgggccctgctgatcagaagactgaaatcccagctgttcaaagttccagctattcacagagggagaagccttctattctatatccccaggatctggccgattctcacttgcctgaggaaggcctgaaggtctctgcagtcgccggtcctgccgaccagaagaccgggctgcccacggtgccaagttccgcctattcacatcgagagaaacttcttgtcttttatcagcaggccttgctggactctcatctccccgaagaagccctgaaagtgtctgcggtgagcgggcctgcagatggcaagaccgggacccctgccgtcacatcgacctcctcagcatcaagtagcctcggcgagaaacctagtgcattttaccagcagacgttgcctaatagccatctgaccgaagaggctttgaaggtttccatcgtgcctggacctggcgatcagaaaacagggattccttctgcaccatcttccttctactcacaccgggaaaaacccatcattttcagccagcagactttaccagatttcttgttccctgaggaggcgctgaaggtatccgccgtgtcagtgttggctgcccagaagacaggcacacctacagtatctagtaattcacattcgcactcggagaagagtagcgtattttaccagcaagaattgccagattccgatcttcctagagaatccctcaagatgtccgccattcccggtcttactgatcagaagaccgtaccgacaccaacagtcccgagtggatctttcagtcatagagaaaagccctctattttttatcaacaagagtggccggactcctacgcgacagagaaggctttaaaggtatctacaggaccgggaccagcggatcagaaaaccgagattcccgccgtgcagtcatcttcataccctcaacgcgaaaagccttccgttttatacccccaagtcctctctgacagccacctccccgaagaaagcctgaaagttagtgcctttcccggacccgccgatcagatgaccgatacccccgctgtgccttccaccttctacagccagcgtgagaaaccaggtattttttatcaacagaccctgccagagtcgcacctgcctaaggaggcccttaagatctcagttgctcctggactggccgatcagaagaccggcacacctactgttaccagtacgtcgtacagccagcatcgagagaaaccttctatttttcaccagcaggcactgccaggcacgcatatacccgaggaggcacaaaaagtttccgccgtgaccggtcccggaaatcagaagacatggatccctagagtattgtcaaccttctacagtcagcgcgagaaacccggtatcttctaccaacagacactgcctggaagtcatattcctgaggaggcccagaaagtctcacccgtgctgggacccgcggaccagaagacaggcaccccaacacctacgtctgcttcttattcacacacggagaaacctggaattttttaccagcaagtcctcccagataaccatcccactgaagaagctcttaagatcagtgtagcaagcgagcctgtggaccagactacaggtacacccgcagtgacatcaacctcttattcacaatatagagaaaaacccagcatcttttatcagcaaagcttgccctcatcgcatctgacggaggaggcgaagaatgtgtctgccgttccaggccccgccgatcagaaaacagtgattcccattttgccgtccaccttttactcccatacagagaaaccaggagtcttttaccagcaagtgctgccacactcacatcctacagaggaagctctcaagatcagcgtcgcctccgagcccgttgatcaaacaacaggcaccccaaccgtcactagcactagctattcacagcatacagaaaagccctcaatcttctatcagcagtccctgcctggttcccatttgacagaagaagcaaaaaacgtgagtgcagtccctgggcccggagaccggaagacagggatccctaccctgccctccacgttctacagtcacactgaaaagcctgggagcttttaccaacaagtattaccacattcgcacttgccagaagaagcactggaagttagtgtggcacctgggccagttgaccaaaccattggaactcccaccgtgacctcgcccagttcaagctttggtgagaagcccatcgtgatctacaaacaggccttccctgaggggcatctgcctgaggaaagcttgaaggtttcagttgcacccgggcctgtcgggcagaccaccggggccccaaccattacctctcccagttactcacaacacagagctaaatctggttcattctatcaactggccttgctcggctctcaaattccagaagaggctctgagagtatcatccgcccctggtcctgccgatcagacaactggcattcccactatcacctccacttcctattcctttggagagaagccaatcgtgaactacaagcaggcttttcccgacggacacctccccgaggaagcactgaaagtgagtatcgtgtccgggcccaccgagaaaaaaacagacattcccgccggcccgttgggctcctctgcactcggagagaagcccattactttttataggcaagctttgcttgatagcccactcaataaagaagtggtcaaggtctctgccgcaccaggcccggccgaccagaaaacagaaacactccccgtgcacagtacctcctatagtaatagaggcaagcctgtgatcttctatcagcagactttgtcagattctcaccttccagaagaagcgctgaaagtccccccagttccagggcccgatgcccagaagaccgagacccccagtgtaagcagcagcctctatagttaccgggagaaacctatcgttttctaccagcaggccctgcctgattcagaactgactcaagaggcactgaaggtctctgcagtcccacaaccagccgaccaaaaaacgggcctttctacggtgacttcttctttctactcacatacggaaaaacccaacatctcttatcaacaggagctccctgactcacatttgaccgaagaggcccttaaagtgagcaacgtccccgggccagctgatcagaagaccggagtgtcaactgtcaccagtacgagttattctcatcgcgaaaagccaatcgtttcttatcagcgagaactgcctcacttcaccgaggccgggttaaagatcctgagagttccagggcccgccgaccaaaaaaccggaattaacatacttccatccaacagctaccctcaacgcgagcattctgtcatctcatatgaacaggagctgccggatctgacagaggtcaccctcaaggcaatcggcgtcccaggcccagcggatcagaagacaggcatccaaatagcctcatcaagctcatactccaatagggaaaaggcctccatctttcaccagcaggaactacccgatgtaacagaggaagccctgaatgtttttgtagtaccaggacagggagaccggaagacagagattccaacagtcccattgtcctattactccagacgggagaaaccgtctgtaatttcccaacaggagcttcccgactcgcatctgactgaagaggctctgaaggtgtctcctgtgtcgatccccgctgaacagaagaccggcatccccatcggcctcagttcatcttactctcatagccataaagagaagctgaagatttcaacagtgcacatccccgatgatcagaagacggaatttcccgcagccactctctctagctatagccagattgaaaaacctaaaatctcaacggtaatcggacctaatgatcaaaaaaccccatcacagaccgccttccattcatcctattcccagaccgttaaacctaatatcctgttccagcagcagctaccggaccgggatcagtccaagggtattctcaagatctctgccgtgccagaactgacagacgtaaacactggcaaaccagtgagtctgtctagttcctatttccacagggagaaaagtaacatctttagcccccaggagttaccaggctctcatgtgacagaggacgttctgaaggtcagtacgattcccgggcccgccggtcagaagaccgtgctgcccacagccctcccgtcctctttcagccatcgcgagaagcccgacattttttaccagaaggatctgcctgaccgccatctgacagaggacgcactgaagatatctagtgctctggggcaggctgaccaaatcacaggtctacagaccgttcctagcgggacgtattcacacggcgagaaccataaattggtcagcgaacacgttcagcgcttaattgacaatttaaactcttccgattcttcagttagctctaacaacgtgcttttgaactcacaagcagatgacagggtggtaattaacaagccagaaagcgccgggtttcgtgacgtcggctcagaggagattcaggacgccgaaaatagcgccaagactctgaaagagataagaaccctgctcatggaggccgagaatatggcacttaaaagatgtaactttcccgcccccctagccaggtttcgggatatcagcgacatctcattcatacaatcaaaaaaggtcgtttgcttcaaggaaccctcctccaccggagtgtccaacggtgatttactgcatagacagcctttcaccgaagaatcccccagtagtaggtgtattcagaaagatatcgggacccaaacgaaccttaaatgccgccgtggaatcgagaactgggaatttatcagttctaccactgtgagatcccctctgcaagaagccgaatccaaagtgtcaatggctctcgaggagacactgagacagtaccaggctgcaaagtcagtgatgagatccgaaccggagggatgctcaggaacgataggtaataagattattatccccatgatgaccgttattaagtcagattcaagctctgacgcaagtgatgggaatggctcctgctcatgggattcaaatctgcctgaatctttagaatccgtgtctgatgtgctgctgaacttttttccttacgtcagtccaaagacctcaataaccgactcccgggaggaggaaggggtgagcgagagtgaggacggaggcggcagttcagtggacagcctcgctgcccatgtgaagaacctgttgcagtgtgagagttcactcaaccacgccaaagaaattctgcgaaacgccgaagaggaggagagccgagtgcgcgcacatgcttggaatatgaagttcaacctggcccatgactgcggatacagcatctctgaacttaacgaggacgatagaaggaaggtggaggagataaaggcagagttgtttggacacgggaggacaacagacctaagtaaaggactgcaatctcctcgagggatggggtgtaagcccgaggccgtgtgttcacacataattattgaatctcacgagaaggggtgtttccgcaccctgacatcagaacatccacagctcgataggcacccatgcgcatttcggtccgctggtcctagtgaaatgacacgagggcgccaaaacccttcttcttgtcgagcaaagcacgtgaatctcagcgcgtcactggaccagaataatagtcattttaaggtatggaattctctccagttaaaatcacatagccccttccagaactttatcccagacgaattcaaaatttccaagggtctgagaatgcccttcgatgaaaagatggatccttggctgtctgaactcgtcgaacctgccttcgtccctccaaaagaagtggacttccacagttcctcacaaatgccttcaccagagcctatgaaaaagtttaccactagtattaccttcagctcccatcgccatagtaaatgcattagcaattcttcagtggtgaaggtaggcgtgacggagggcagccaatgcacgggtgcatctgtgggggtattcaattctcattttaccgaagagcaaaatcccccccgagatcttaaacagaagacttcgagcccatcctcatttaagatgcattcgaatagccaggacaaggaagttaccatactggcagagggcaggaggcagtcccagaaactgcccgtggacttcgagaggtccttccaggaagaaaagccactagaaaggagcgacttcacaggttcccattccgaaccctctaccagagcaaactgttccaactttaaagaaatccaaataagtgataatcatacgttgatctctatgggcagaccatcatctaccttaggcgtcaaccgctcgagttctaggctcggtgtaaaggaaaaaaacgtgacaatcactccagatcttccatcatgtatttttctggaacagcgcgaattatttgagcagagtaaagctcccagagctgacgaccacgtgcgtaaacaccattctccatcaccacagcaccaggactacgttgcgccagatttaccgagctgcatcttcttggagcaacgggagctctttgaacagtgcaaggcaccatatgtagaccatcagatgcgagagaatcactcaccattaccacagggacaagacagcatagcgagcgacttaccgtcgccaataagcctagagcaatgtcagagcaaggctccaggcgtcgacgatcagatgaataagcaccacttccccctgccccaaggacaggattgcgtggtcgaaaagaacaaccagcataagcccaagtcacacatcagcaacattaatgtcgaggcgaagttcaacacagtcgttagtcagagtgccccaaatcactgtactctggccgctagcgcttctacacctcccagcaaccgcaaagccttgtcctgtgtccacattacactttgccccaagacctcctctaagctcgacagcggaactctggatgaaagattccattcactggatgccgcatccaaggctagaatgaattctgagttcaactttgatctccatactgtgtcgtcccggagcctagagcctacctcaaagctgctgaccagcaagccagtggcccaggaccaggagtctcttggcttcctcggacctaagtcctcactcgactttcaagtagtgcagcctagcttgcctgacagtaatactattacgcaggatctgaagaccataccctctcaaaattcccagattgtcacgtcacggcaaattcaggttaacatctcagactttgagggtcactccaaccctgagggcacccccgtatttgccgatcggctccctgagaaaatgaagacaccactctcagctttcagcgaaaaactgtccagcgatgcagtgacacagataactacagagtcgccagagaagaccctattctctagtgaaatctttatcaacgctgaggacaggggccacgaaatcatcgagcccggaaaccagaagttaaggaaggcccccgtgaaatttgccagttcatcatctgtgcagcaagtgacatttagcaggggtactgatgggcagccactgctcttgccttataagccctcgggctcgacaaaaatgtattacgtcccccagctaagacagatccccccatctcctgactccaagagcgatacgactgtcgagtcaagtcactcgggctctaatgatgcaatagctccagatttcccagcacaggttttgggtactagagatgatgacctgtccgccacagtcaatataaagcacaaggaaggcatttactcgaagcgagttgtcaccaaggcctcgcttcctgtgggcgagaagccattgcagaatgagaacgccgatgcaagtgtgcaagtactgatcactggggacgagaacctctcagacaaaaaacagcaggagatccatagcactagagctgtgactgaggcggctcaggctaaagagaaagagtcgctgcagaaagataccgccgactctagtgcggcagcagcagcggagcattctgcccaggtgggagatcctgagatgaagaatcttcctgataccaaagccataacgcaaaaggaagaaattcaccggaagaagacagtgcccgaggaggcctggcctaataataaagagagtctccagattaatattgaagagtctgagtgccacagcgaatttgaaaatacaacacgctctgtcttccgctctgcaaaattctatatccaccatcccgtccacctaccaagcgatcaggatatatgtcatgaaagtctgggcaagtctgtatttatgcgccactcatggaaggatttttttcagcatcaccccgacaagcaccgcgaacacatgtgccttcccctgccataccagaacatggacaagacaaagaccgattacactaggatcaaatcactgagtatcaacgtgaaccttggcaacaaggaggttatggacaccacgaaatcacaggtgcgggattatcctaaacacaatggtcaaatcagtgatccgcaacgtgaccagaaagtgactccagagcaaacaactcagcatactgtgagcttaaatgagctgtggaacaaataccgtgagcgccaaagacagcaaagacaacctgaactaggggaccggaaagaactgtccttagttgacagacttgaccgcctggccaagattctgcagaatcctatcacccactctctgcaagtttctgagagtacccacgatgattcccgtggcgaaagaagtgtaaaagagtggagcggcagacaacagcaaagaaataagctgcagaagaagaaaaggttcaagagcctcgaaaagagccacaagaataccggagagcttaaaaaaagcaaggtgctgtctcatcacagggcaggtcggagcaatcagatcaagattgaacagattaagttcgacaagtatattctgtccaagcagcctggattcaactacatctccaacactagttctgactgtcgtccatcagaagaatcagaattgttgacagacaccaccacaaatatcttaagtgggacaacaagtacagtggagagcgatatcttgacgcagacggatcgcgaggttgcattacatgaaagatcaagtagcgtgtcgacgatcgatacagcccggctgatccaagctttcggccatgaaagagtgtgccttagccctcggcggataaagttgtatagcagtattaccaaccaacaaaggaggtacttggagaagcggtccaaacattcgaagaaggtgctcaatacgggtcaccctctggtcacatccgagcacactcgtcgaagacacatccaggtggcaaatcacgttattagttcggattccatttcttcttcggcctccagtttcttgtccagcaactccacattttgtaataaacagaacgtgcacatgctcaataaggggatccaggcagggaaccttgaaatcgttaatggagccaaaaagcatacccgtgatgtgggtataacattcccaacaccaagttcaagcgaggctaagctcgaagaaaacagcgacgtgacaagctggtcagaagagaaaagagaagagaagatgctgtttacagggtaccctgaagaccggaagctcaaaaagaacaagaaaaattcgcacgagggagtttcctggttcgtacccgtggagaacgtggaaagccgatcgaaaaaggagaatgtgccgaacacttgtggtcctgggatcagctggttcgagccaattaccaagacccgcccttggcgcgagccacttcgcgaacagaattgccaggggcagcacctggacggaagaggctatcttgccggaccgggacgcgaagctggccgggacctccttcggccttttgtgcgcgccacattgcaagagtctttgcaatttcacagacccgattttatctccagaagcggagaacggatcaagagacttaaacttatcgttcaagagcggaagctgcagtctatgctccagacagagcgagatgctctattcaacatagatcgggagcgccagggtcatcagaacagaatgtgtccgttgcctaaaagagtatttttggctatccaaaagaacaaaccgatctctaaaaaagagatgatccaacgatcaaaacggatctatgaacagctgccggaggttcagaaaaagcgggaagaggaaaaacgcaaatcagaatataagtcctaccgattgcgcgcacaactttacaagaaacgcgttaccaatcaattgctcgggcgcaaagttccctgggattag

SEQ ID NO: 107970 - DNA, 7686 bp, synthetic construct
  misc_feature 1..7686: note = Description of Artificial Sequence: Synthetic coding sequence
  source 1..7686: mol_type = other DNA
atggaacccgaggatctgccctggcccggcgaattggaagaagaggaagaggaagaagaagaggaggaggaggaagaggaagaggccgctgctgcggccgcggccaacgtcgatgacgtggtggtggtggaggaggtggaagaggaagccggtagagagctcgacagtgatagccactacggacctcagcacctggagtctattgacgatgaggaagacgaagaagcgaaagcctggctgcaggcccatccagggagaattcttccacctctgtcaccgcctcaacacaggtattctgaaggtgagcgaaccagtctggagaagatcgtcccactcacatgccatgtgtggcaacagattgtgtatcagggaaactctagaacccagatctcagacacaaatgtcgtgtgcctcgaaacaacagcccagagaggtagcggcgacgaccagaaaaccgaatcttggcactgcctcccacaagagatggactcctcacagaccctggatacgagccagaccagatttaatgtgcgcaccgaagacactgaagtgactgatttcccctccttagaagaggggatccttacccagtccgaaaaccaggtcaaggagcctaaccgcgatctgttctgtagtcctttattagttatccaggattctttcgcgtcaccagacctcccccttctgacatgtctgacgcaagaccaggagttcgcgcctgactccttgttccatcaatccgagctcagcttcgctcctctgcgggggatcccagacaaatccgaggacactgaatggagctctcgccccagcgaggtgagtgaggccctcttccaggccacagctgaagtggcttcagatctggcttcatcccgttttagcgtctctcagcacccactgatcgggagcactgcagtgggctcccaatgtccattcttgccgtcagaacagggcaacaacgaggaaacgatctcctccgtcgacgaactgaaaattcccaaagactgtgatagatacgacgacctttgctcttatatgagttggaaaaccagaaaagacacacagtggcctgagaacaacctggctgataaagaccaggtctccgtcgcaacctcgttcgatatcaccgacgagaacatagctactaagcgctccgaccactttgacgctgcacggagctatgggcagtactggacccaagaagacagcagcaaacaggctgagacatacctaactaaaggtctacagggaaaggtggaatcagacgtgattacactggatggtctcaacgagaatgcagttgtgtgctcagagagagtcgccgagctccagcgcaaaccgacccgagagagtgaatatcattcttccgatctgaggatgttgaggatgtctcccgatacagtccctaaggccccaaagcacttaaaagccggtgatacctccaagggaggcatcgcaaaagttacccaaagtaacctgaagagcggtataaccactacacccgtcgattctgacatcggcagtcacctctcactgagcctcgaggacctgtcccagttagccgtgagctctctggaaactactaccggacagcacacagatactctgaatcagaaaacattggctgacactcacctgaccgaagaaaccttgaaagtgactgccataccagagcccgctgatcagaagaccgctaccccaactgtgttgagctcctcacattctcaccgtgggaaacccagcatattctaccagcaagggctccctgattcccatctcacggaggaggccctgaaggtttcagcagctcctggcctggctgaccagaccaccggaatgagtacactgacttcaacgtcatactctcatcgcgaaaaacctggaaccttctaccagcaggagctccccgagtccaacctgacagaggaaccactggaagtgagcgccgcccccggcccagtggagcaaaagactggcatccccaccgtaagctccacatcacactcacacgtggaagacctcctgttcttctaccgccagaccttgcccgatggacacctgaccgatcaagcactcaaagtctccgcagtaagtggcccagcagaccagaagactgggacagccaccgtactctcaactccgcactcccacagagaaaaaccagggatcttctaccagcaagaattcgcagacagtcaccagacggaagaaactctaacaaaggtgtccgctacacctggcccagctgatcagaagacagagatccctgccgtgcaatcctcctcctattcccagcgggagaagccatctattctttacccccaggacctggccgattctcaccttcccgaggaggggctcaaggtatccgcagttgctggtcccgctgatcagaagacaggtctgcctacagttccatcttcggcttactcgcacagggagaaattgctggtattctatcagcaggctctgctcgactctcatctgccagaggaagctcttaaggtgagcgctgtcagtgggccagcagacggaaagaccgggaccccggctgtgacttctacttcctcagcttcctctagtctgggagagaaaccatcagcgttttatcagcagacactacccaattcacacttaaccgaggaagccctaaaagtgagcatcgtgccaggccccggggaccaaaaaactgggattccgagcgctcctagtagtttctatagccatcgagaaaaaccgattattttcagccagcaaacattgcccgatttcctgtttcctgaggaagctcttaaggtgagcgcggttagtgtcctggcagcccagaagaccggaacacccacggtctcatccaactcacactcccatagcgagaagagttcggtcttctaccaacaagaactgcctgactctgacctcccccgcgaaagtctgaaaatgagtgccatacccggtctgaccgaccaaaaaacagtgccaaccccaacggtgccctcaggctcatttagccaccgggaaaaaccttcaattttctatcagcaggaatggcctgattcatacgcgactgaaaaagccctgaaagttagtactggccctggcccagcagaccagaagaccgagattcccgccgtccaatctagctcatacccacagcgcgaaaaaccctccgtcctctatccccaggtccttagcgactctcacctcccggaagaatcactcaaagtgagcgcattcccaggcccagccgaccagatgaccgacactcccgcagtcccgtctaccttctactcacagagagaaaaacccggcatcttttaccagcaaaccctgccagagagtcacctccccaaggaggccctcaaaatttctgtggcacccggcctcgctgaccagaaaactggcacacctaccgtgacatcaacatcttacagtcaacaccgagagaaaccttcaatcttccaccaacaggccctgcctggcacccatattccagaggaggctcagaaagtgagcgccgtaaccggacccgggaaccagaaaacttggatcccaagggtactaagcacgttctatagccagagagagaagccaggaatattctaccagcaaaccctccccggatcgcacattcccgaggaggcacaaaaagtaagcccagtactcggcccagccgaccagaaaacagggaccccaactcccactagcgcttcctactctcacactgagaagcctggcatcttctaccagcaggtgctgcctgataatcaccccacagaagaggcactgaagatatccgtagccagcgagcctgtggatcagactacgggcacccctgctgtcactagcacttcatactcacagtatcgggagaagcctagcattttttatcaacagagcctccctagctctcatcttacagaggaggccaaaaacgtgtctgcagttccagggcccgctgatcaaaagacagtgattcctattttgccaagcacattctatagccatactgaaaagccaggagttttctaccagcaggtgctgccccattcacatccaacagaggaagctctgaagatcagcgtcgcaagcgagcctgtggatcagacgactgggacgcccactgtcacatccacaagctactcacagcatacggagaagccctcaattttctatcaacaatcattaccaggctcgcatctgaccgaggaggcgaagaacgtctcagctgtgcccggtcctggtgacaggaaaaccggtataccaacactgccctctacattttattcccatactgaaaagcctggtagcttttaccaacaggtcctacctcacagtcatttgccggaggaggcactcgaagtgtccgtagctcccggccccgttgatcaaaccattggaacaccgaccgtcacttccccctcctcctccttcggcgagaagccgattgtcatctataagcaggctttccctgaaggccatttaccagaggagtctcttaaagtctccgtggctccggggccagttgggcaaacaacgggcgctccaaccatcactagccccagttactcgcagcaccgtgccaaaagtggcagcttctaccagttagctcttctgggctcccagatcccagaagaggctttgagagtcagcagcgcgcccggcccagccgatcaaacgaccggcatccctacaattaccagtacttcgtatagtttcggcgaaaaaccaatcgttaattacaaacaggcatttcccgatggccatttacctgaagaagcgttaaaggtgtcaattgtgagtgggccaaccgaaaagaaaaccgatatcccagctggcccactggggtcttctgccttgggggagaagccaattacgttttatagacaggctctgctcgactcccctctcaataaggaggtggtgaaagtgtccgccgcccctgggcccgcagaccagaaaaccgaaactcttccggttcattccacctcatattcaaaccgtggtaaaccagtcattttctatcagcaaactctaagtgactctcaccttccagaagaggccctgaaggtaccgcccgttccagggcctgatgcacagaagaccgagaccccatcagtgtcatcatccttatacagttatcgggaaaagcccatagtgttctaccagcaagcccttccagactcagagttgactcaggaggccctaaaggtgagtgccgtcccacagcctgctgatcaaaagacaggtctgagtacggtgaccagttccttctacagccataccgaaaagcccaacattagctatcagcaagagctccccgatagtcacctcacagaggaggcattgaaggtaagcaatgttcctggaccggccgatcaaaagacaggggtctctaccgtcacttcaaccagctatagccatagagaaaagcccatcgtgagctaccagcgcgagctgcctcattttacagaggcaggtttaaaaatcctgcgtgtacccgggcccgctgaccagaagaccggtataaacatccttccctctaactcataccctcagcgcgaacattcagtaatctcctatgagcaggagttacccgacctgactgaagttacgctgaaggctattggagtgcctgggccggccgatcagaagactggaatccagatcgcgtcttctagttcttactccaatagagagaaggcttcaatatttcaccaacaggagcttcctgacgtcaccgaggaggctctcaatgtcttcgtggtgcccgggcaaggtgaccgtaagaccgagataccaaccgtcccactgtcctactattcacgaagagaaaaaccatctgtgatatcacagcaggaactgccagactcccatctcacagaggaggctctcaaggtcagccctgtatccatccctgccgagcagaaaaccggcatacctatcggcttaagctcgtcgtactctcacagtcacaaagagaaactgaagatctctaccgtgcatattcctgacgaccagaagactgaattccctgcggcaactctgagtagttacagtcagatcgaaaaaccaaagatttctactgtcataggaccgaatgatcagaagacccccagccagaccgcattccactcatcctactcccaaacagtaaaacccaacattctgtttcagcagcagctccccgatcgggatcagagcaaggggattctgaagatcagcgccgtgccagaactgactgacgtcaatactggcaaaccagtgagtctgagctctagctattttcaccgggagaagtctaatatcttttcacctcaggaattacccggctcccacgtcactgaggatgtgttaaaggtgtccacaattcctggcccggcaggacagaaaacagtcctgccgacggcattaccatcctctttttcccacagagagaaacctgatatcttctatcagaaggacttgccagaccggcacctgacggaagacgcacttaaaatttcaagtgccctgggacaggcggatcagatcactggactccaaaccgtgccaagtggaacctattcccacggcgagaatcataagctcgtgtctgagcacgttcagaggttgatcgataatcttaatagctcagactctagcgtgtccagtaataatgtacttctgaacagccaggccgatgaccgggtcgtgatcaacaagccagaatcggccggtttcagagacgtgggcagcgaggagattcaggacgccgaaaactctgcaaagactctcaaggagatcaggactctgttgatggaggccgagaacatggcactgaaacgatgtaattttcccgctccattagctcggttccgggacatcagcgacataagctttattcagagcaagaaggtggtttgtttcaaggaaccctcctctacaggggtatccaatggcgacctgctccaccggcagcccttcaccgaggagtcaccttctagcaggtgcattcagaaagacattggcacgcagacaaacctcaagtgtcgccgcgggatcgaaaactgggaatttatctcttccacaaccgtgcgctcccctctgcaggaggcagagtcgaaagtgtctatggcgctggaggaaaccttgcgccaataccaggcagcaaagagcgtcatgcggtctgaacccgagggttgctccgggactatcgggaacaaaatcatcatcccaatgatgacagtgatcaagtcagattcatcttcagacgcctctgacggcaatggaagttgttcgtgggattctaatctcccagagtctcttgaatccgtatccgatgtcctgctgaacttctttccatatgttagccctaaaacctctatcacggatagcagagaagaggagggagtatccgagtctgaagacggaggagggtcttcagtagacagcctggcggctcacgtgaaaaacctactccagtgcgaaagctcccttaatcacgcgaaggagatcctccgaaacgcagaggaggaggaatctagagttcgtgcccatgcatggaatatgaagtttaatctggcacacgactgtggctatagcatctcggaactcaacgaagatgacagacgcaaggtagaggaaattaaagccgagctgtttggccatggccgtacaaccgatctttcaaagggcttgcaatcttag

SEQ ID NO: 107971 - DNA, 1944 bp, synthetic construct
  misc_feature 1..1944: note = Description of Artificial Sequence: Synthetic coding sequence
  source 1..1944: mol_type = other DNA
atggctgcacccgccggtggtggtggtagcgcagtctctgttttggcccccaatggcaggcgccatacagttaaggtgacgcctagcactgtcctgctccaagtccttgaagatacgtgtcgacggcaggacttcaacccttgcgagtacgacttgaaattccaacgaagcgtcctggacctctctctgcagtggcggtttgcaaacctgccgaacaatgccaagttggagatggtgcccgccagccgcagtagggagggccctgaaaacatggtgagaattgccctgcaactcgacgacggttctcggctccaggacagcttttgttcgggtcagactttatgggagttgttatcacatttccctcagattcgcgagtgtctacaacatcctgggggggcaacccccgtctgcgtctatactagggacgaggtcaccggagaagccgcgttgcgcggaacaacccttcagtcattggggcttaccggcgggtctgccaccattaggttcgtcatgaaatgctatgaccccgtgggtaaaacacccggaagcctgggtagctctgctagtgccgggcaggccgcggccagcgccccattgcctctggaaagcggcgagctcagccgcggtgacctgtcaaggcccgaggacgcggacacgtccggaccttgctgcgagcatactcaagagaagcagtctacccgcgctcccgctgccgccccctttgtgcctttctccggggggggacagaggctggggggaccacccggacctacccggcctctcacaagctcctccgccaaactgcctaagtcactgtcctcgccgggcgggcccagcaagcctaaaaaaagtaagagtgggcaagatcctcagcaggagcaggagcaagaaagagaaagagatccacagcaagagcaagaaagggaaaggcccgtcgatcgggaacccgtggacagagagcctgtcgtctgccatcctgatctggaggagaggctgcaggcctggccagccgagctccctgacgaatttttcgaacttacggtggacgacgtcaggcgtaggttggctcagctcaagagcgagcgcaagcgacttgaggaagcccctttggtcacaaaagcttttcgtgaagcccagattaaagaaaaattggagcgataccccaaggtagccctgcgagttttgttccccgacagatacgtattgcagggttttttccggccctcagagacagtgggcgacttaagagactttgtgcggagtcacctgggtaatcctgaactgagcttctatttgttcattaccccacctaagaccgttctggatgaccatacacaaaccctcttccagccacagcttggggatagagttgcacctttcactctgggaccttcattaaagagatgcctgggaccggaacaaagaacaaggcttcccgtggttggcgacggcggcgacgtagattccggcaggctattattctggggtccttcacggggacgggcttcacctagcactgggcagcctccgtgccaccccgtgtgccgacctagttccccgcctagccccaggccctcatctggcgatccgtctcgtgtgaaggccggtcataagcatgtcggcacaggcagggctaacctctttcccgccgctctcgtccacctcggtgcagaggaaccagcgggtgtgtacctcgagccaggattactggaacacgctatcagtccttccgccgcagatgtgttagtagccaggtacatgtctcgagccgccgggtctccctccccactccccgctcccgatcccgcccccaaatctgaacctgctgccgaagaaggcgccttagtcccccctgagccaatcccaggtaccgcccagcccgtcaaaaggagcctgggcaaggtgccaaaatggctcaagctgccagcatcgaagcggtag

SEQ ID NO: 107972 - DNA, 1662 bp, synthetic construct
  misc_feature 1..1662: note = Description of Artificial Sequence: Synthetic coding sequence
  source 1..1662: mol_type = other DNA
atggctgcaccagccggcggggggggttccgctgtgtccgtattagccccaaacgggcgccggcataccgtcaaggtcacccccagcactgtgcttcttcaggtcctcgaggacacctgccggcgccaggatttcaatccatgtgagtatgacctgaagtttcagcggtccgtcttagacctcagtctgcagtggaggttcgcaaaccttccaaacaatgcgaagctggagatggtcccggcttctcggtcccgcgaaggccccgagaatatggtgaggatagccctgcagctcgacgacggtagtcgtttgcaagactccttttgctccgggcagaccctttgggagttgctgtcacacttcccacaaatcagggagtgccttcagcatccaggtggcgccacgccagtgtgcgtctacaccagggatgaggttactggcgaggccgctcttagggggacaaccttgcagtctctcggtctgactggcggcagtgccactattcgctttgtgatgaagtgttacgatccagtgggaaaaactcctggctccctgggcagcagcgcctctgctggccaggcggcagcctcggctcccctgccgttagagtctggggagctgagtagaggcgacctctctaggccagaagatgcggatacctcagggccttgttgtgaacatacacaggagaagcagagcactagagcccctgccgccgcaccatttgttcctttttcaggaggcgggcagcggctgggcggaccccccgggcctactaggccactgacgagttcctccgccaagctgcccaagtctctaagctcccccggaggcccatcaaagcccaaaaagtccaagtctgggcaggacccccagcaggagcaggagcaagagagggaacgcgatcctcagcaggagcaggagcgggaaaggcctgtggatcgggagcctgttgatcgagaacccgttgtgtgccatcccgacttagaggagcgcctccaggcttggcccgctgagctgcccgacgagttcttcgagctcacggtagacgatgttagaagaagactggctcagcttaaatccgagcgtaaacggctggaggaagctcctctggtgaccaaggcattcagggaggcccagattaaagagaagctggaacggtatcctaaggtggcactgcgggtgctctttccagatcgctacgtcctccaagggttctttaggcccagcgaaactgtcggggacctgagggactttgtccgctcccacctcgggaaccctgagctgtccttttatctgttcattactcctccaaaaactgttctggacgaccatactcagaccctgtttcaggcaaatctgttccccgctgccctcgttcacctaggagctgaggagcccgctggcgtttacctcgaaccaggcctgctggagcatgctatcagcccttccgccgctgatgtgctcgtggcccgatatatgtctcgcgctgcaggcagcccctctccattaccggcccccgacccagccccaaagagtgagcccgcagcagaggaaggagcattggtgcccccagagccaatcccagggactgcccagcctgtcaaaagaagcttagggaaagtgcccaagtggctgaaattgcccgcgtccaagcgatag

SEQ ID NO: 107973 - DNA, 1050 bp, synthetic construct
  misc_feature 1..1050: note = Description of Artificial Sequence: Synthetic coding sequence
  source 1..1050: mol_type = other DNA
atggtgccagcatcccgttcccgggagggacccgaaaacatggtaagaatagcattacagctggacgatggtagccggctgcaggatagcttttgttccggccagacactttgggaattgctctctcacttcccccagatccgggagtgtctgcaacaccctggcggagcgaccccggtgtgcgtctatacacgcgacgaagtgactggggaggcggccttaagagggaccaccttgcagtctctgggccttacgggagggagtgccacaataagatttgtgatgaagtgctacgacccagtaggcaaaacacccggatcgctgggctcaagtgcatctgctggccaggcagcagcaagtgctcctctcccgttggaatccggagaactctctagaggagacctgtccagacccgaggacgcagacacatctggcccctgttgcgagcacacgcaggagaagcagtcaacgagagccccggccgctgctccatttgtgccattctcgggcggaggacagcgactgggtggccctcctggtccaactaggccgcttacgagtagcagcgccaaactgcccaagagcttatcttcacctggaggccccagcaagcccaaaaaatctaagagtggtcaggatcctcaacaagagcaggaacaggagcgggagagagatcctcagcaggaacaggagagggagagacccgtcgatagggaaccagtcgatcgagagcctgtggtctgtcatccggacctcgaggagagactacaggcttggcccgctgagttaccggacgaattttttgagttgaccgtggacgatgtgcggcgtcgcctcgcccagttgaagtccgaacggaagcgcctggaggaagccccgttggtcactaaagctttccgggaagcacagattaaagagaaactcgagcgttatccaaaaagacgttccctctcactgtccccacgactggagagcgtcgttccctctcagctaacagcctcttctgcttctcgcgtgcaggtcgtgttactgccgcagcctccaaaatag

SEQ ID NO: 107974 - DNA, 981 bp, synthetic construct
  misc_feature 1..981: note = Description of Artificial Sequence: Synthetic coding sequence
  source 1..981: mol_type = other DNA
atggagtttcttagcgaaaaatttgccctgaaaagcccccccagtaaaaatagcgacttttacatgggggccggcggacccttggaacacgtcatggaaaccctggataatgaaagcttttattccaaggctagcgcaggaaagtgcgtgcaggcatttggtcctcttcccagggctgagcaccatgtgcgactggagcggaccagtccatgccaagatagctctgtgaattacgggattactaaggtggaaggacagcccctccacactgagctgaatagggcgatggataactgcaactcactgcgcatgagtcccgtgaaaggcatgcaggaaaagggagaactggatgaactcggggacaaatgtgatagcaatgtatcatcttccaaaaaacgtcgccatagaaccacctttactagccttcaactggaggagcttgagaaggtgttccagaagacgcattaccctgatgtgtatgtaagggaacagttggccctgcgcacagaactgactgaggcacgcgtccaggtgtggttccagaaccgacgcgccaaatggcggaagcgcgagaggtatgggcagatccaacaagctaaaagtcacttcgctgctacttacgacattagcgtcctcccgagaaccgattcctaccctcagattcagaataacctttgggccggcaacgcgagcggtggctccgtagtgacttcctgcatgctgccacgagatacctcaagctgtatgacaccctactcccactctcccagaacagatagctcttacacaggtttttccaaccatcagaatcagttctctcacgttcccctcaacaacttttttacggattccctgctgactggcgccaccaatgggcatgccttcgaaaccaagcccgaattcgagagaagatcttccagtatcgcggtgctgcgaatgaaagctaaggagcataccgccaatatcagctgggctatgtag

SEQ ID NO: 107975 - DNA, 1032 bp, synthetic construct
  misc_feature 1..1032: note = Description of Artificial Sequence: Synthetic coding sequence
  source 1..1032: mol_type = other DNA
atggacccagaacattgcgcaccatttcgggtgggtccagcacccggcccttacgtcgcctctggtgacgagcctccaggaccacagggtacgcctgccgccgcgcctcacctgcatccagctccccccaggggcccaaggctgacgaggttcccagcatgcggccctttggagccttacctgccggagccagcaaaacctcccgcgaaataccttcaggacctgggacctggcccggctctgaatggaggtcatttttatgaaggacccgcagaggccgaggagaagacatctaaagctgccagcttcccccagttacctcttgactgcaggggggggccacgagatggaccctccaatctccagggcagccccggcccttgcctggcttccctgcatttacctctgtctcctgggctccctgatagtatggagctggctaagaataagtccaagaagcggcgtaatagaacgaccttctccaccttccagctcgaggaactggagaaggtcttccagaaaacccactaccctgatgtgtatgcgagggagcagctcgccctccggacagatctgacagaggcacgcgttcaagtgtggttccaaaatcgaagggctaagtggaggaagcgggaacgttatggaaagattcaggagggccgcaaccccttcaccgccgcctatgatatctccgtgctgcctcgaacagatagtcatcctcagttgcagaatagcctatgggctagcccaggatctggcagcccaggaggaccttgtcttgtatcacctgaaggaatcccctccccttgcatgtcgccatattcacatccacatggatcggtggctggatttatgggcgtacctgctccctccgccgctcaccctggcatctatagcatacacgggtttccgccaacactgggtggacactctttcgagccaagttctgatggagattacaagtccccctctctggtgtccttgcgggttaagcctaaggagccccccggcctcctgaattggaccacctag

SEQ ID NO: 107976 - DNA, 1236 bp, synthetic construct
  misc_feature 1..1236: note = Description of Artificial Sequence: Synthetic coding sequence
  source 1..1236: mol_type = other DNA
atgaatgcggaaacatgtgtcagctactgcgagtctcccgcagcggccatggacgcctactactctccagtgagccagtcaagggagggctcgagccccttccgagccttcccgggcggggataagtttggaacgacgttcctcagtgcagctgcgaaggcccagggatttggagacgcgaagagccgagcgcggtacggagctggacagcaggatctcgcaaccccactggagagtggtgccggcgcaaggggtagtttcaataaattccagccacaaccttcgaccccccagccccagccacctcctcaacctcagcctcaacaacagcagcctcagccccagcctccagcacagccccatttgtatctccagagaggggcttgcaaaacaccaccagatggctccctcaaattgcaggagggctcgtcggggcacagcgccgccctgcaggtgccatgctatgctaaagagtcttccctgggggaacctgaactcccgcccgattctgataccgttggtatggacagctcctacctgtcggtaaaagaagcgggcgttaaggggccccaggacagggccagctcagacttgccgagtcctttggagaaagcggactcggagagcaacaagggcaagaagagaaggaaccgcacgactttcacctcataccagctggaagagctggagaaggtctttcagaagacccactatcctgacgtctatgccagggagcagctggccatgcggacagatctgaccgaggccagagtgcaggtctggttccagaaccgccgagctaagtggcgtaagcgggagcggttcgggcagatgcagcaggtgcggacacatttttctactgcttatgaactgcctcttctgactagagccgaaaactatgcccagatacagaacccgtcatggctgggtaacaacggggctgcctctccagtgccagcctgcgtcgtgccatgcgatcctgtcccagcgtgcatgtccccccacgcccacccccctggatcaggtgcctcctccgtgacagacttcttgtcagtgtccggagccggtagccatgtgggccagactcacatgggatctctgttcggggccgcatctctctcacccggcctgaatggctacgagctgaacggagaaccagaccggaaaacaagctccatcgccgctttaagaatgaaggctaaagagcacagtgccgcgatcagttgggcaacttag

SEQ ID NO: 107977 - DNA, 630 bp, synthetic construct
  misc_feature 1..630: note = Description of Artificial Sequence: Synthetic coding sequence
  source 1..630: mol_type = other DNA
atgagatctacaatcctactgttttgcttgttgggcagtacaaggtctcttcctcagctaaaaccggctctcggccttccacctaccaaactggcacctgaccaagggactctgccgaaccagcaacaaagcaatcaagtgtttccctccctgtccctcatccctctaactcagatgttgaccctgggccccgacctgcatctgctcaatcctgctgctggaatgacccccgggacgcagacacaccctctgaccctgggcgggctcaacgtgcaacagcagctgcatccccacgtgcttcccattttcgtaactcagttaggggctcaggggaccatattaagctcagaagagctacctcagattttcacttccctaatcatccacagcctttttccagggggaattctcccaactagccaggccggagcaaatcctgatgtgcaagacggcagtcttccagccgggggtgccggagttaatccggccactcaagggacacctgcaggccgcctcccaacaccatctgggaccgatgacgactttgctgtaactacgccagctggcatccagcgctcaacccacgctattgaggaagccacaaccgaatctgcaaatggaatccagtag

SEQ ID NO: 107978 - DNA, 627 bp, synthetic construct
  misc_feature 1..627: note = Description of Artificial Sequence: Synthetic coding sequence
  source 1..627: mol_type = other DNA
atgcgatcaactatcctgcttttctgtctgctcggttcaaccaggagtctgcctctgaaacctgcgctcggcttaccgccgactaagctggcgcccgaccagggcacgttacctaatcagcagcaatctaaccaagtgttcccatcattgtcattgatcccattaacccaaatgcttacattgggtcccgacttgcaccttctgaatcctgccgcagggatgaccccagggacccagacccatcctctgactcttggtggccttaatgtgcagcaacagcttcaccctcacgtcctccctatctttgttacccagctgggcgctcagggcacaatactgtcatccgaagagctaccccagatcttcacatccttgatcatccattccctatttccgggggggattttaccaacgagtcaggcgggcgccaatccagacgtccaagatgggtccctcccagctgggggcgccggtgtaaacccggctacccagggcaccccagctggccgactccccaccccaagtggtacggatgacgactttgccgtcaccactcccgccggcatccagcggtccacacacgctattgaagaagcaacgacagaatccgccaatggtattcagtag

SEQ ID NO: 107979 - DNA, 2256 bp, synthetic construct
  misc_feature 1..2256: note = Description of Artificial Sequence: Synthetic coding sequence
  source 1..2256: mol_type = other DNA
atgccagcactggggtgggccgtcgccgctattctaatgctacaaacagctatggccgagccgtctcccggtacccttcctaggaaagcaggcgttttcagcgatctgtcaaaccaggagttgaaggcagttcactccttcctttggtcaaagaaagagctccggctgcagccaagctctaccactacgatggccaagaatactgtttttctgatagagatgctcctccctaagaagtaccacgttcttcgctttctagacaagggcgagcggcaccccgtgcgtgaagctcgggccgtcatcttcttcggagaccaagaacaccctaacgtgactgaattcgccgtgggaccacttccgggaccttgttatatgcgcgcactctccccccgacctggctaccagagcagttgggcaagtagaccaatatcaactgccgagtatgctcttctgtaccatacgctccaggaggccacgaagcctttacaccaattttttctgaatactacaggcttctcatttcaggattgtcatgaccgttgcctggcctttaccgacgtggccccacgcggtgttgcatccggccagcggcgatcttggctgatcatccagcggtatgtggaaggctatttcctccatcctactggattggagctgttagtggaccacggctccactgacgccggacattgggcagttgagcaggtgtggtataatggaaagttttatggaagccctgaagagctggctaggaagtacgccgatggtgaagtggacgtagtcgtgctcgaggacccccttcccggtgggaagggccatgactcaaccgaggagcctcctctgttctcctctcacaagcccaggggagactttccctcacctattcacgtgtcagggcctcggctcgtgcaaccccatggcccacgcttccgactcgagggcaatgccgtactctatggcggatggagtttcgcctttaggcttcggtcctcatccggccttcaggtcctcaatgtgcacttcggcggagagaggatcgcatatgaggtctcagtacaggaggcagttgcgctgtacggcggccataccccagctgggatgcagaccaaataccttgatgtggggtgggggctcggttccgtcacccacgagctggccccggggatcgattgtccagaaacggctacctttctggacaccttccactattatgacgcggacgacccagtgcactatcccagggctttatgcctgttcgaaatgccaactggggtgcccctgcgccggcacttcaactctaatttcaagggagggtttaacttctacgccggacttaagggccaggtgctggtgctaagaacaacctcaaccgtgtataactatgactacatctgggactttatcttctaccccaacggtgtaatggaagcaaaaatgcacgccacaggatatgtgcacgctacattctacacccccgaaggtctaagacacgggacaaggctgcatacgcacctaattgggaatatccacacccatctggtgcactatagagtggatttggatgtggccggtacaaaaaattcctttcaaacccttcagatgaagctggagaatatcaccaatccctggagtccaaggcacagggtggtacagcccaccttggagcagacccaatactcttgggaacgtcaggccgccttccgttttaagaggaaactccctaagtacctgttattcacatccccccaggagaatccatggggccataagcgcacttatcgactgcaaatacacagcatggctgatcaggttcttccacccgggtggcaggaggagcaagccatcacttgggcaagatacccactggccgttacgaagtatcgggagagcgagttgtgttcctcatccatctatcatcagaacgatccatggcatcccccagtagtgtttgagcagtttctgcacaacaacgagaatattgaaaatgaagatctagtggcgtgggttacagtaggctttctgcacattccccactctgaggatatcccaaataccgctactcctggcaattcggtgggattcctcctgagaccctttaacttttttcccgaggacccttcactggctagccgcgacaccgtgatcgtgtggccaagggataacggacccaactatgtccagagatggatcccggaagaccgggattgcagtatgccccccccattttcctataatggtacttacagacctgtttag

SEQ ID NO: 107980 - DNA, 2313 bp, synthetic construct
  misc_feature 1..2313: note = Description of Artificial Sequence: Synthetic coding sequence
  source 1..2313: mol_type = other DNA
atgccggcactgggatgggcggtagccgctatacttatgcttcaaacagcgatggcggagccctcccctggcaccctccctagaaaggcaggagtatttagcgatctgtccaaccaggagttgaaggcagtgcattcctttctgtggtctaaaaaggagctgcgcctacagccctctagtaccacaacgatggcgaagaatacagtttttctgatcgagatgctgctccccaagaagtaccatgtactgaggtttttggacaaaggtgaaagacaccccgtccgagaggcccgagcagtcattttctttggcgatcaggaacatcctaatgtaaccgaatttgcagttggaccactgcctggaccttgctacatgagggccttgtccccgcgaccgggctaccagtcaagctgggcatcacggcccatcagcacagctgagtatgctctcttataccatactttacaggaggcaaccaaacccttacaccagttttttctcaatacaactggcttttctttccaggattgtcatgaccggtgcttggcctttaccgatgtggcaccaaggggggtggcgtcggggcagagaagatcctggctgatcatacagcggtacgtcgagggctatttcctgcaccctaccgggctggaattactggtggatcacggatcaacagacgcaggccattgggcagtagaacaggtatggtataatggtaagttctatggctcgccggaagaactagcacgtaagtatgcggacggggaggttgatgtcgtcgtgctggaggaccccctacccggtgggaagggtcacgactcaaccgaagagccccccctgttttcaagccacaaaccccggggcgatttcccatcacccatacacgtgagtggccctcggcttgtgcagccccacggccctaggtttagactggaaggcaatgctgtgctgtatggaggttggtcatttgctttccggctgaggtcctcgtctgggcttcaggtcctcaatgtacacttcgggggggagagaatcgcttacgaggtaagcgtgcaggaggccgttgcgctatacggagggcatactccggccggaatgcagactaaatacttagacgtcggctgggggttaggatccgttactcacgagctggcaccagggattgattgtccagaaacagccaccttcttagacaccttccactattacgatgcagacgatcccgtccactatccaagggccttatgtctgttcgaaatgccaacaggtgtgcccctgcgacgccatttcaactcaaatttcaagggaggcttcaacttttacgccggattaaaggggcaggtcttggtgctgaggaccacttcaaccgtttataattatgattacatatgggatttcattttttaccccaacggggtgatggaggcaaaaatgcatgccacagggtatgtgcatgcgacattctacactcccgagggactgcgacacggaactcgtctgcatacacacctgattgggaatatacacacacatttggtacattaccgagtcgacctggacgtggcaggcactaagaactccttccaaacactacaaatgaaactggagaacatcaccaacccttggagtccgcgtcatagggtggtgcagcccactcttgaacagacccaatacagctgggaaaggcaggctgcttttcgcttcaagagaaaactgcccaagtacctcctgttcacctcgccacaggaaaacccgtggggccacaaacggacttatcgcttacagatccacagcatggcggatcaggttctgcctccgggatggcaggaggagcaggctatcacttgggctaggactgagggggggcagcctcgggccctgtctcaggcggctagccccgtccctgggcgataccctctcgctgtgacgaagtaccgggaatcagaactctgcagctcatcaatctaccaccagaatgatccttggcaccctccggtggtgtttgagcagttcttgcacaacaatgagaacatcgagaacgaggaccttgtagcctgggtgacagtgggctttctgcacatacctcactccgaggacatccctaacactgcaactcctggcaactcagtgggctttttactccgcccctttaatttcttccctgaagatccttccctggcttccagagacacggttatcgtgtggcccagagataatggtcctaattacgttcagagatggataccggaggatagggattgttcaatgccaccgccatttagctataatggcacttatcggccggtttag

SEQ ID NO: 107981 - DNA, 1884 bp, synthetic construct
  misc_feature 1..1884: note = Description of Artificial Sequence: Synthetic coding sequence
  source 1..1884: mol_type = other DNA
atgcgcgccctttcgcccaggccagggtaccagtctagttgggcttctagacccatttccaccgcagagtacgctctcctctaccatactctccaggaggccacaaagcccctgcatcagtttttcctgaacactaccggcttcagttttcaggactgccacgatcgatgtttggcctttaccgacgtagcccctagaggggtagcttctggacagaggcggagttggctgatcatacaaagatacgttgaggggtattttcttcaccccactggcctggagttactggtcgaccacggatccactgatgccgggcactgggccgtcgaacaggtctggtataatggtaaattctacggctccccagaggaattggctagaaagtacgcagatggcgaggtcgacgtggtggtgctggaggaccctcttccaggcgggaagggacatgactctacagaagaacctcctctgttttcttcgcacaaacctaggggagattttccaagcccgatacatgtgagcggcccgaggctggtgcaaccccacggcccccggtttcgcctcgagggcaacgctgtgctgtatgggggctggagcttcgccttccgtctcagatcttcctccgggctgcaggtcctcaatgtgcactttggcggagaacgaatcgcttatgaagtttcagtgcaagaggctgtagccctctatggaggccacacaccagcaggtatgcagacaaagtatctggatgtcgggtggggcctcgggagtgttacacacgaactcgccccgggaatcgactgccccgagacggctacctttctggacacattccattactacgatgcagatgaccctgttcactatcctcgagccttatgccttttcgagatgcctactggtgtccctctgcgacgtcactttaattcaaacttcaaaggaggattcaacttttatgccggcctgaaaggtcaggttctggtgctgcgcaccacaagcacggtctacaactatgactacatttgggattttatcttctatccgaacggagtcatggaggcaaaaatgcacgccaccgggtacgtccacgccacgttctatacccctgaagggttgcgacacgggacaagactccacactcacctgatcggaaacattcacactcatctggtgcattaccgggtggatctagacgtagctggtacaaagaactcctttcaaactctccagatgaagctggaaaacattacaaacccttggtcaccaaggcaccgggtggtccagccaacactggagcagacccagtacagctgggagagacaggccgccttcaggttcaagagaaaacttccaaagtaccttctcttcacttctccgcaagagaatccgtgggggcacaaaagaacatatagactgcaaatccattcgatggctgaccaggtacttcctcctgggtggcaggaagagcaggctattacttgggcgcgctacccgctggcagtgacaaaatacagggaatcagaattgtgttctagtagtatataccatcagaacgatccttggcatccaccggtagtttttgaacagttcctccacaacaacgagaatattgaaaatgaggacctggttgcctgggtgacagtgggctttctccacatacctcacagcgaggacattccaaatactgcaacccctggaaactccgttggctttctactgcgtcctttcaacttctttcctgaggatcccagtttagcaagccgcgataccgtgattgtttggccacgggataatggcccgaactatgtccagaggtggatcccagaggatcgcgattgctcaatgcccccacccttctcctacaatggaacctaccgacctgtatag

SEQ ID NO: 107982 - DNA, 750 bp, synthetic construct
  misc_feature 1..750: note = Description of Artificial Sequence: Synthetic coding sequence
  source 1..750: mol_type = other DNA
atgccagctctaggctgggccgtagcagccattttgatgctgcagactgcaatggccgagccgtccccggggacccttccccgaaaggctggcgtattcagcgatctgtcaaatcaggaacttaaagccgtgcactcattcctttggagtaaaaaggagttgcggctccagcctagcagtaccacgactatggccaagaatactgtgttcttaatagagatgttgcttccaaaaaaataccatgtgctcaggtttctcgacaaaggagagcggcatccagtgcgcgaagccagagcagtgattttttttggggaccaggaacatccaaatgtgaccgagttcgcagtcggcccccttccaggaccttgctacatgcgggccctgtctccacgacctggataccagtcctcctgggcatcaagaccaatctccacagctgagtacgcgctactatatcatacactgcaagaggccacgaaaccgctgcatcagttcttcctaaataccacaggcttttccttccaagattgtcacgaccgctgccttgcatttacggatgtcgctccacgcggcgttgccagtggtcagcggcggtcatggctgatcatccagcgatatgtcgaggggtactttctccaccccaccggactcgagctactggtcgatcatggctccactgatgcaggccattgggccgttgagcaggtctggtacaacgggaaattttacggctcacctgaggagctatag

SEQ ID NO: 107983 - DNA, 2256 bp, synthetic construct
  misc_feature 1..2256: note = Description of Artificial Sequence: Synthetic coding sequence
  source 1..2256: mol_type = other DNA
atgcccgcgctgggctgggccgtcgctgccatacttatgctacagaccgccatggctgagccaagtcccggtacgctaccgaggaaagccggtgtctttagcgatttgtctaatcaggagttgaaagccgtgcactctttcctgtggtcaaagaaagaacttagactccaaccaagttccacaacaaccatggcaaagaacacagtgttcctcatagagatgctgctgcccaagaaatatcatgtgttaaggtttctggacaagggagagcggcatcctgtgcgtgaagctcgggccgtgatcttctttggcgaccaggagcatccaaatgttacagagtttgcagtgggccccctcccaggcccctgctacatgcgcgccctgagcccacggcctgggtatcaaagtagctgggcctcccgaccaatctcaactgctgaatatgccctgctgtaccacaccctgcaggaggccacaaagccgctgcaccagtttttcttgaacacaaccggtttcagttttcaggactgtcacgatcggtgcctggcgtttactgacgtggcccctagaggggtcgcaagtggacaacggagaagctggctgatcatccagcggtacgttgagggatacttcctccatccaaccgggctggagctcttggtggaccacggatccacagatgccggacattgggcggtcgaacaggtgtggtacaatggtaaattctatggctcgcctgaagagttggcccggaagtacgccgatggcgaagtagatgtcgtggtgctcgaagaccccttgccaggtggtaaaggccacgatagcacagaggaaccacctctgttctcaagccataagcctagaggagatttcccctctcctattcacgtctctggaccccggctggtgcaaccgcacggaccaagatttcgattagagggcaacgctgttttgtatgggggctggtcctttgctttccggttgcggagttcaagcggtttgcaggtcctgaatgtccattttggaggcgaacgaatcgcatacgaggtatcggtccaagaagccgtagcactgtacggcggccacacaccagcaggaatgcagactaagtatctcgacgtggggtggggattgggttcagtgacccacgaacttgcccccggtatcgactgccccgagacggcaacttttctagacacgttccactattatgatgcagatgaccctgtgcactaccctcgcgctctgtgcctgttcgagatgccaacgggagtacccctgagaaggcacttcaattctaacttcaagggaggttttaacttctatgccggactcaaaggccaggtcctggttctgagaacgacttctactgtgtataactacgactatatctgggattttatcttctatcctaacggggttatggaggccaaaatgcacgcgacaggatatgtccacgccaccttctatacccccgagggcctcagacatggcacgcgtctgcatactcaccttatcggtaatatccacacacacctggtgcactatcgggtggacctggacgtggcgggaacaaaaaacagttttcagactctgcagatgaaactggaaaacataaccaatccatggagcccaagacaccgcgttgtgcagccaaccctcgaacagactcagtattcctgggagagacaggcggcattcaggtttaagcgaaagctgcccaagtacttgctgttcaccagcccccaggagaatccctggggacacaaacgaacgtaccggctccagatccactctatggcggatcaagtgctaccacctggctggcaggaggaacaggcaatcacatgggctcgatatccccttgctgttacaaagtatcgagaaagcgagctgtgttcctcctccatataccaccaaaatgatccttggcatcccccagtggtgtttgaacagttcctccacaacaacgagaatatagaaaacgaggacctggttgcttgggtgactgtgggctttctgcacatccctcactctgaggatatacctaataccgccacccccggcaattcggtcggtttcctcctcaggcccttcaattttttccctgaagatccctctctggcgtcaagggataccgtgatagtgtggccccgcgataacgggcccaactatgtacagcggtggatccctgaagatcgcgactgtagtatgccgccacccttctcttacaacggcacatatagaccagtgtag

SEQ ID NO: 107984 - DNA, 1014 bp, synthetic construct
  misc_feature 1..1014: note = Description of Artificial Sequence: Synthetic coding sequence
  source 1..1014: mol_type = other DNA
atgccagcgctcgggtgggccgttgcagctatcctcatgctccagaccgcaatggccgagccatcccccgggactttacccaggaaggcgggggtcttcagtgacctgtcgaaccaggagctcaaagctgtgcatagtttcctttggtctaagaaggagctgaggctgcagcctagctcgacaacaaccatggcaaagaacaccgtctttctgattgagatgttactgcccaagaagtaccacgtactgagattcctcgacaaaggggaacggcaccccgtgcgcgaggcacgagccgtgatcttctttggcgatcaggaacatccgaatgttacggaatttgctgtgggccctctgccgggcccctgttacatgcgtgcattatcgcctcggcctggctaccaatcttcctgggcctcccgcccgattagcaccgccgaatacgccctgctgtatcacaccctgcaggaggccacaaagcctctgcatcagttcttcctgaatacaaccggcttcagttttcaagactgccatgatcgctgtctcgctttcacagatgtagcccccaggggggttgcgagcggacagaggcgaagctggctgatcattcaaagatatgtggagggttactttctgcaccctacaggcttagaacttctggtggatcacggctcaactgatgcgggtcactgggctgtcgagcaggtgtggtataacggcaagttttacggctctcctgaggaactggctcgcaagtacgcggacggagaagtggatgtagtcgtcctcgaagatccgctgcctggcggcaaaggacatgattccaccgaggagccacctctcttctcttctcataaaccacgcggagacttcccatcccccatacatgtaagtggacctcggttagttcagccacacggaccccgcttccgtctcgagggcaatgccgtgctgtacggaggttggagcttcgcctttagacttcgaagttcatcaggtctccaggtgttatag

SEQ ID NO: 107985 - DNA, 582 bp, synthetic construct
  misc_feature 1..582: note = Description of Artificial Sequence: Synthetic coding sequence
  source 1..582: mol_type = other DNA
atggaggcaaaaatgcacgccacaggatacgtccacgctactttttacacgcccgagggtctgcgacacggaacaagactgcatacccatttaatcggcaatatccatacccatctcgtacattaccgggtcgatctggatgtggcaggcaccaagaattccttccagacccttcaaatgaagctggagaatattaccaacccatggtctccgagacaccgcgtagtgcaaccaacacttgagcagacacaatacagctgggaacgtcaggcagctttcaggttcaaacggaagctgcctaagtacctcctgtttacgtcgccccaggaaaatccgtggggtcacaaacgaacttacaggctccagattcatagtatggcggatcaggtcttgccccccggctggcaggaggaacaggccattacctgggccaggtacccattggccgtcacgaaataccgcgaatccgagctctgttccagtagcatataccaccagaacgacccttggcatccttggtccctgtcatcttttttcactacgacaagaaccctgaagatgcggacctggtggcccggctag

SEQ ID NO: 107986 - DNA, 2256 bp, synthetic construct
  misc_feature 1..2256: note = Description of Artificial Sequence: Synthetic coding sequence
  source 1..2256: mol_type = other DNA
atgcctgcactgggatgggctgtagcagcaatactcatgctgcaaacggctatggctgagcccagtccgggcaccctgccgcgaaaagcgggagttttttccgacttgtccaaccaagaactgaaggccgttcactcttttttgtggtccaagaaagaactgcgcctacagccctcctctaccacaactatggctaagaacacggtgtttctcatcgaaatgctgcttcccaaaaagtaccatgtgttaagattcctagacaaaggcgagcggcatcccgtgcgcgaggcccgtgcggtgatcttttttggagatcaggagcaccccaatgttacagagtttgcagtgggacccctgccaggaccctgttatatgcgagctctgagtcccaggcccgggtaccagagctcctgggcgagcaggcctataagtaccgccgaatacgctctgctgtatcatacactacaagaagccaccaaaccactccatcagttcttcctgaataccaccggcttcagcttccaggattgtcacgaccgctgtctagcttttaccgatgttgctccacggggcgtggcaagtgggcagcgaagaagttggctgattatacagcgctacgttgaaggctattttctgcatccgaccgggctggagttactagtggatcacggctccaccgacgccggccattgggcggtcgagcaggtatggtataacggaaaattctacggctcgcccgaggagttggctcggaaatacgcggatggcgaagtcgatgttgtcgtgctcgaagacccgttacccggtggcaagggtcatgacagtacagaagaaccaccactgtttagctcccacaagccacgcggcgatttcccctcacccatccacgtgtcaggccctcgccttgtacagccacacggaccacgcttccgcctagagggtaacgctgtcctatatggcggctggtcattcgcattcagattgcgcagctcctccgggctgcaggtcttgaacgtccatttcggaggcgaaagaatcgcttatgaagtgagcgtacaggaagccgtggcactgtacggcggccacaccccggcgggtatgcagactaaatacctggatgtaggttggggactcgggagcgtcacccatgagctcgcccccggcatcgactgtcccgagaccgctacctttttggatacgttccattactacgacgcagatgatcccgtgcactaccctagggctctgtgtctgttcgaaatgcctacaggcgtccccctacggagacattttaattctaattttaaaggaggatttaacttctacgcggggctgaagggtcaggtgctggtgctcagaaccacgtccactgtctacaactacgattacatctgggactttatcttttatccgaacggcgtgatggaggccaaaatgcacgcaactggatatgtacacgccacattttatacacccgaaggactgcggcatggaactaggctgcatacacatcttatcggtaatatacatacccatttggtgcactacagggtagacctagacgtggccggcactaagaacagcttccagaccttacagatgaagctggagaatataacaaacccctggagtccccgtcacagggttgtgcagcctacgctggagcagacgcagtattcatgggagcggcaggccgctttccgatttaagcggaaactgcctaaatacttgctgttcacatcaccccaggagaatccctggggtcacaagcggacttaccgccttcagatccactccatggcagaccaggtcctaccacctggatggcaggaggagcaggccatcacttgggcacgatatcctctggccgttacaaaatatcgggagtcagaattgtgtagtagttctatctaccaccaaaacgacccctggcacccccctgtggtcttcgagcagtttctgcacaacaatgagaatatcgagaatgaggacctggttgcgtgggtgacagtgggttttctccacatcccacacagtgaggacatccccaatacagcaaccccaggcaatagcgtcgggttcctgttgagaccttttaatttttttccggaggatccatctctggcctctcgggacaccgtgatcgtgtggccgcgggataacgggcccaattacgtccaacgatggatacccgaggaccgagattgctcaatgccccctcccttcagttataacggcacgtaccgaccggtttag

SEQ ID NO: 107987 - DNA, 1191 bp, synthetic construct
  misc_feature 1..1191: note = Description of Artificial Sequence: Synthetic coding sequence
  source 1..1191: mol_type = other DNA
atgctgccctcacttcaggagtctatggatggtgatgagaaggaattggagtcatccgaggaagggggatctgcagaagaaaggagactcgagccaccctcatcgagccactattgtttgtatagctataggggatcccggctggctcagcagaggggtgattccgaggacgggtccccctccggcaccaacgccgagactcccagtggagacgattttagcctgtctttggctgacacgaacctacccagtgaagtcgaaccagagttaaggagttttatcgcaaagagactatccagaggagcagtattcgagggcctgggcaatgtcgcctctgttgagctcaagatcccaggataccgggtcggatgttattattgcctgtttcaaaatgaaaaattgctccccgagacagtgaccattgatagcgagaggaacccgtcagagtacgtggtgtgcttcctgggaggcagcgaaaaaggccttgagacctttcgccttgaactggataagtacattcagggactgaaaaacaacatgaactgtgaggcgaggggactggagagccatataaaatcttacctctccagttggtttgaagacgtcgtctgtccaatccagcgggtggtgttgcttttccaggaaaagctgacatttctgctgcatgccgcactgtcctatactcctgtcgaggtaaaagaaagcgacgagaagactaaacgggacatcaatcggtttctctcagtagcctcactccagggactcattcacgaaggaacaatgacctccctgtgtatggccatgaccgaggaacaacataagtccgttgtgattgattgttcttcgtctcagccccagttttgcaatgccggttccaaccggttctgcgaagattggatgcaggccttcctcaatggggcaaagggcgggaacccgttcctgttccgccaggtgctggaaaacttcaagcttaaagcgatacaggataccaataatctgaaaaggttcatcaggcaggcggagatgaatcactacgctctcttcaaatgctacatgtttcttaagaactgtgggtctggagacatcctcctgaagattgtgaaggtggaacacgaggaaatgcccgaggcaaagaatgtcatagcagttttggaggagttcatgaaggaggccctagatcagagcttttag

SEQ ID NO: 107988 - DNA, 1539 bp, synthetic construct
  misc_feature 1..1539: note = Description of Artificial Sequence: Synthetic coding sequence
  source 1..1539: mol_type = other DNA
atggatcttaaggaatcccctagtgaggggtctttacagccaagtagcatccaaattttcgccaatacttcgactctgcacggaattcgccacatatttgtgtacggcccactgacaatacgtcgggtgctctgggccgttgcttttgtcggctcacttgggctgctcctcgtcgagtcatctgagagagtgtcctactacttcagttaccaacatgtgacgaaagtggatgaagtggtggcacaatcattggtttttccagcagtgacgctgtgtaatctgaatgggtttcgcttttcccgactgaccaccaatgatctgtaccacgcaggagaattactggcgcttttggacgtcaatctccagatccccgaccctcacttagccgacccctcagtgcttgaagctcttcgccaaaaggctaatttcaagcactacaagcccaagcagtttagtatgctcgaatttctgcacagggtgggacatgacctgaaagacatgatgctctactgtaaattcaaaggccaggagtgcgggcatcaggacttcaccaccgtgttcaccaaatatggaaagtgttatatgtttaactcaggggaggatggtaagcccctgcttacaacggtgaagggcgggacaggaaatgggctggagataatgctggacatacagcaagacgaatacctgccgatttggggcgagactgaagagaccaccttcgaggcaggtgtgaaggtgcagattcattcccaaagcgagccgcccttcatccaagaactgggcttcggcgtggctccaggtttccagaccttcgtggctacgcaagagcagaggcttacatacttgcctccaccatggggcgagtgccgctcctctgaaatggggcttgacttcttccctgtgtattctataactgcgtgccggatcgactgtgaaacacgctatatcgttgaaaactgcaattgtcgaatggtgcatatgcccggcgacgcccccttttgcactccagagcaacataaggagtgcgccgagccagccctgggcctcttggccgagaaggacagcaactactgcctctgcagaaccccttgcaaccttacccggtacaataaggagctcagcatggtgaaaattccaagcaagacttccgccaagtaccttgagaaaaagtttaacaagagcgaaaaatatataagcgagaacatcctcgtgctcgacatctttttcgaagcactcaactacgaaaccattgagcaaaagaaagcgtatgaggtcgctgcattgctaggggatattggtggtcagatgggactatttattggagcttcgatcctcactatactggagctgtttgactacatctacgaattgataaaggaaaagctgcttgacctcctgggtaaggaggaagatgaaggatcccacgacgagaacgtgtccacatgtgataccatgccaaatcacagtgaaacaattagtcatactgtcaacgtgcctctccagacaacgctggggactctggaggagatcgcatgttag

SEQ ID NO: 107989 - DNA, 612 bp, synthetic construct
  misc_feature 1..612: note = Description of Artificial Sequence: Synthetic coding sequence
  source 1..612: mol_type = other DNA
atgttcaattcaggcgaagatggaaagccgcttctcactacagtcaagggaggaacaggcaacggcttagagattatgctggatatccagcaggacgagtatctgccaatttggggcgaaactgaagagaccacttttgaggcgggggttaaagtccaaattcactcccagtctgagcctcccttcatacaggagctcgggttcggggtcgcacctggatttcagacctttgtggcaactcaagagcagaggcttacttacctgccaccaccatggggcgaatgtaggtcctctgagatgggtcttgatttcttccccgtctattcaatcacagcttgtagaatagactgcgaaactaggtacatcgttgagaattgtaattgccgcatggttcacatgcctggggatgcccccttctgtacccctgagcagcataaagaatgcgccgaaccagccctaggacttcttgcagaaaaggatagcaattattgcttgtgtagaacaccttgtaacttgacccggtataataaggagcttagcatggtgaaaataccgagtaaaactagcgcaaagtatttagagaaaaagttcaataaatccgagaagtactag

SEQ ID NO: 107990 - DNA, 1287 bp, synthetic construct
  misc_feature 1..1287: note = Description of Artificial Sequence: Synthetic coding sequence
  source 1..1287: mol_type = other DNA
atggcggttggggcaagtggccttgagggcgataaaatggccggagctatgccgctacagctgctactcctgttaatccttctgggtcccggaaatagcctgcagctgtgggatacatgggcggacgaagccgagaaggcgttagggcctctgttagccagggatcgtcggcaggcgaccgagtacgagtatctggactatgatttcctcccagagactgaacctccagagatgttgaggaattcaaccgacacaactccattaacaggacccgggacccccgagagcacaacggtagagccagcagcccggcgcagtacaggacttgatgccggaggggccgtgactgagctgacaactgaactggccaatatgggaaatctgtcaaccgattctgcagcaatggagatccagacaacccagccagccgccacggaggcacaaacgactcagcctgtgccaacagaggcccaaaccaccccgcttgcggccactgaggcacagaccaccaggctcacagcaacagaggcgcaaaccactccgctcgccgccaccgaggcacagacgacaccacccgccgccacagaggcccagacaactcagcccaccggcctagaggcacaaaccactgccccggccgccatggaggcacagactactgcgcctgctgcgatggaagcccaaacaacaccccctgctgccatggaggctcagacaacccagacaaccgctatggaagctcaaaccaccgctccagaggctacagaagctcagacaacgcagccaaccgcaacggaagcccagaccacccctcttgccgctatggaggccctatccacggagccctcagcaactgaagccctctctatggaacccaccaccaagaggggacttttcattcccttttccgtttcaagtgttacccacaagggaatcccaatggccgcctccaatctgagcgtgaattacccagtcggagccccagatcacatctctgtcaaacaatgcctgcttgctatactaatcttggctctggtggcgacaattttttttgtgtgtacagtggtactggcagtgcggctgtcccgcaaggggcacatgtatccagtgagaaactattcccctaccgagatggtctgcatcagctccctattacctgacggaggagaagggccttcagcgacagccaacggcggactctcaaaggcaaagtctcctgggttgactccggagcccagggaggaccgcgaaggcgacgacctcacattgcactcctttttgccctag

SEQ ID NO: 107991 - DNA, 1587 bp, synthetic construct
  misc_feature 1..1587: note = Description of Artificial Sequence: Synthetic coding sequence
  source 1..1587: mol_type = other DNA
atggagctcaaggccgaggaagaggaggtcggcggggtccagcctgtttcaattcaggcattcgcgtcgtcgagtacgttacacggtctggcacatattttctcttatgagcggctatcattgaagagagctttgtgggctctttgcttcctgggtagcctggctgtgctgctctgtgtttgtaccgaaagagtgcagtactactttcattaccatcacgtcaccaagctagatgaggtggctgcctcacaattaacgttcccagctgtcaccctctgcaatctgaatgagttccgctttagccaggtgagcaagaacgatctttaccatgccggggagctgctcgcactactgaataatcgatacgagattcctgacactcaaatggcagatgaaaagcagctggaaatactccaggacaaggctaattttcgatccttcaagcccaaacccttcaacatgagagaattctatgaccgggcagggcacgatatacgggacatgttactgtcttgccacttccgaggggaggtatgttctgccgaggacttcaaggtggtgttcaccagatatgggaagtgttatacatttaattcaggtcgggacgggagaccaaggctgaagacaatgaagggcggtaccggcaacgggctggaaattatgctggatatccagcaagatgaatatttacctgtttggggagaaacggatgagacctctttcgaggccggtatcaaagtacagatccacagccaggacgaaccccccttcatcgatcagttaggtttcggcgtggctcccggttttcagacttttgtcgcatgtcaggaacagaggttaatctatctgcctcctccatgggggacatgcaaagctgtcactatggactcagatctggactttttcgattcctactcgataacggcatgtcgcatcgactgtgaaactcgatacctggtagaaaattgcaattgcaggatggtgcatatgcccggtgatgccccttattgtactcctgaacaatataaagagtgtgcggaccctgctctggacttccttgtggagaaagatcaggagtattgtgtttgtgaaatgccatgtaacctgactcgctacggaaaagaacttagtatggtcaagattccaagtaaggcatccgccaaatatttggctaaaaagttcaataaatcagagcaatatatcggtgagaatatcttggtcctcgacattttcttcgaagttttaaattatgagactatagaacagaaaaaagcgtacgagatcgccggcctgcttggcgatatcggcgggcagatgggactctttataggagcctccattctcactgtactcgagctgtttgactacgcttacgaggttattaaacacaaactgtgccggaggggaaaatgtcaaaaggaggcaaagaggtctagcgccgataagggtgtagcgttatcccttgatgatgtgaaaagacataatccctgcgagtcactcagagggcaccccgcgggtatgacatatgcagccaacatcctgccccatcatcctgcccggggaaccttcgaagactttacttgttag

SEQ ID NO: 107992 - DNA, 1689 bp, synthetic construct
  misc_feature 1..1689: note = Description of Artificial Sequence: Synthetic coding sequence
  source 1..1689: mol_type = other DNA
atgcctatccagattttctgcagtatgtcctttagctccggcgaagaagccccaggtcctctgggggatatttggggcccccatcatcaccagcaacagcaggatatatcagagtcggaggaggaggaggaggagaaagagaaggaggccgtgcgcaaagaggccagcgaaggccatagtcccatggatctggtagcgttcgcaaattcgtgcacactgcacgggacaaaccacatattcgtggagggtggccccggcccccgacaggtcctctgggccgtcgcctttgtgttggctttgggcgcgtttttgtgccaggtcggtgatcgcgttgcatactatctgtcatacccccatgtgaccttactcaatgaagtcgctacaactgagctcgcgttcccagccgtgaccctttgcaataccaatgcagtcaggttatcacagctcagctaccccgaccttctctatctggctcccatgcttggtctggatgaatccgacgacccgggagtcccacttgctccacccgggcccgaagccttctctggcgaaccttttaacctgcaccgattttacaacagatcctgccaccgcctagaggacatgctgttgtattgttcttaccaaggagggccatgtgggccacacaacttttctgtggtgtttactaggtacgggaagtgctacacattcaattcaggacgagacgggagaccgcgactgaaaaccatgaaaggaggtactggaaatggattagagataatgttggatatacagcaggatgaatacctccctgtgtggggggagacagatgagacaagcttcgaggctggcatcaaagtgcagatccacagccaggacgagccgcccttcatcgatcaactcgggtttggggttgcaccaggatttcagactttcgtggcctgtcaggaacaacgcctcatatatctcccgccaccgtgggggacctgcaaagctgtcacaatggactccgatcttgacttcttcgattcctattccattacagcctgccggatcgactgtgaaactcgatatttagtggagaactgtaactgcaggatggtgcacatgcccggagatgccccgtattgcaccccggagcagtataaagagtgcgctgaccctgcattggattttctcgtcgagaaggaccaggagtactgtgtgtgtgagatgccttgtaacctaactagatacgggaaggaactgtcgatggttaagatcccttccaaggcctctgccaagtaccttgcaaagaagtttaacaagagcgaacaatatataggtgagaatatactggtgctggatatcttctttgaggtcttgaactacgaaactatcgaacagaagaaggcctacgagattgctggtttgctcggcgacataggcgggcagatgggccttttcataggagcaagcattctgaccgtgctcgagctgttcgattatgcctatgaggttataaaacacaagctatgccggcgcggcaaatgccaaaaagaggccaagcgatcgtccgccgataagggagtggctctctctctcgacgacgttaagcggcacaatccttgcgaaagtctacgcggacaccccgccgggatgacttatgcggcgaacattctgccccaccaccccgccagaggaacctttgaggatttcacatgttag

SEQ ID NO: 107993 - DNA, 1650 bp, synthetic construct
  misc_feature 1..1650: note = Description of Artificial Sequence: Synthetic coding sequence
  source 1..1650: mol_type = other DNA
atgaagcctactagtggcccggaggaagctaggcggcctgcctcagatatccgggtgttcgcctcaaactgttccatgcatggactcggccatgtcttcggtccaggatccctatccctacggaggggtatgtgggccgcagccgtcgtgctaagtgtcgccacatttctgtatcaggtggcagagagggtgcggtattatcgcgagttccaccaccaaactgcgctagatgagcgggaatcccacaggctcatcttccccgcagtgactctgtgtaatatcaatccgctgcggcgatcacgcttaacccccaatgatctgcactgggccggctcagccttgttgggcctagaccccgctgagcatgcggcattcctacgggcactcggtcgcccgccggcaccgcctggattcatgcctagcccaacttttgacatggcacaactctatgctagagccgggcacagccttgacgacatgttgttggattgtagattccgcggccaaccctgcgggcctgagaattttaccactatcttcacacgcatgggcaaatgttatacctttaactctggagccgatggggccgagctgttgacaactactcggggggggatgggcaacggcctggacataatgttagacgtgcagcaggaagagtatctgcccgtgtggcgagacaacgaggagacccctttcgaagtcgggatccgggtgcagatccatagtcaggaagagcctccaatcattgaccaattgggactaggcgtctcccccggataccagacatttgtgagctgccaacagcaacagctgtcatttctcccaccgccttggggagattgcagttcagcttccctcaatcctaactatgaacccgagccgagtgaccctctcggcagcccatcaccctcgccatcccctccttacacgctcatgggctgtcgactggcctgtgagactcggtatgtagccaggaagtgtggctgtcgaatggtatatatgcccggtgacgtccctgtctgctccccacaacaatataagaactgcgcacaccccgcaattgacgcaatgttgcgtaaagattcttgtgcatgtcctaacccctgtgcatctacacggtacgctaaagagctgagtatggtgcggataccgtctcgggccgctgcccgttttctggctagaaaactgaaccgctcagaggcctatatagccgagaacgtccttgccctagacatattcttcgaggccctcaactacgaaaccgtcgagcagaaaaaggcgtatgagatgtcggaactcctcggagacatcgggggacaaatgggtctcttcatcggagcctccctgctcacaatcctggaaatcctggactacctttgcgaagtttttcgggataaagtgttagggtacttctggaatcgacaacacagccagagacacagctcgacaaatttactccaggaaggattgggctcacatcgtacccaggtgccacacctgtccctggggccttctaccttactgtgcagcgaggacctcccccccctaccagtgcctagccccagactatccccacctcccacagctcctgccaccctcagccatagcagcagacctgccgtctgcgtcttgggtgcacccccatag

SEQ ID NO: 107994 - DNA, 1596 bp, synthetic construct
  misc_feature 1..1596: note = Description of Artificial Sequence: Synthetic coding sequence
  source 1..1596: mol_type = other DNA
atgaaaccgacttctgggcctgaggaggctcggaggcctgcgtcagacattcgagtctttgcttcaaactgtagcatgcatggtctgggtcatgtgttcgggccggggtcactcagtcttcgcaggggcatgtgggcagccgccgttgtgttgtccgttgccacattcctttaccaggtcgctgagcgggtgcgatactacagagaattccaccatcagaccgctctagacgagagggagagccaccggctgatctttcctgctgttacactgtgcaacataaacccactccggcgctccagactgacccccaatgacctccattgggctggcagtgcactgctcggcttggaccccgcagaacatgccgcattcttgcgcgcactgggccgccccccagcgccgccaggcttcatgccatcccctacctttgacatggcccagctttacgcccgggcaggccatagcctggacgacatgctgctcgattgcagattccgtgggcaaccttgcgggccggagaacttcactacaattttcactaggatgggaaagtgttataccttcaactccggagccgacggcgccgagctgctgacgaccaccagagggggcatgggaaatggtttggacattatgctggacgttcagcaggaagagtatctccctgtgtggcgcgacaatgaagaaaccccattcgaggtgggcattagagtccagatccatagtcaggaggagcccccgataattgatcagctgggcctgggggtgtctcctggctaccaaacatttgtatcttgtcagcagcagcagcttagttttctcccgcccccttggggagactgttctagtgcttctcttaacccgaattatgagcctgaacctagcgaccctcttggctctccttctccaagtccgagccccccctacaccctgatgggctgtcgcctggcgtgtgagacacggtacgttgctcggaagtgtggctgcaggatggtatacatgccaggtgacgtcccagtgtgttcccctcagcagtacaagaactgcgcccatccagccattgacgccatgctccggaaagacagctgtgcctgccctaatccatgtgcttccacccgctatgcgaaagagttgagcatggtgcgcatcccttctagagcagccgcaagatttcttgctcgaaagctcaaccgctctgaggcatacattgcagagaatgtgcttgccctcgatattttcttcgaggccttaaattatgagactgtggagcaaaaaaaggcctatgagatgtcggagctgctaggagatattggtgggcagatgggcttgttcatcggcgcctcccttctcaccatcctggagatcctcgattacctgtgcgaggtctttagggacaaggtgctgggatatttttggaacagacagcattcacaacggcattcttcaaccaacctcctgcaagaaggcctagggtctcacagaactcaggtcccccacctaagccttgggccccgtcccccaactccaccttgcgccgtgaccaaaacactatctgccagccatagaacatgttacctcgtcactcagctctag

SEQ ID NO: 107995 - DNA, 1632 bp, synthetic construct
  misc_feature 1..1632: note = Description of Artificial Sequence: Synthetic coding sequence
  source 1..1632: mol_type = other DNA
atgaaacccacatcagggcctgaggaggctagacgcccagccagtgacatccgcgtctttgctagcaactgttcaatgcacggcctgggtcacgtatttggaccgggtagcctaagtctacgccgcggtatgtgggcagctgctgtcgtcctctccgttgcaacatttctttaccaagtggccgaaagggtccgatattacagggagtttcaccaccagaccgcactggacgagcgggaatcccacagactgatctttccggccgtgaccctctgtaacatcaaccctcttcggcggagccggttgactcccaatgatcttcattgggccggctccgccctgctcgggctcgatccggcagaacacgcagcctttctgagggccctggggcgaccccctgcgccccccggctttatgccttctcctacctttgacatggcgcagctctatgcccgcgcaggtcacagcctcgatgatatgttactagactgtcggtttcggggccagccctgtggaccagaaaactttactactatattcaccaggatggggaaatgctatactttcaattccggcgccgacggagctgagctgcttacaaccaccaggggcgggatggggaatggccttgacatcatgctagacgtccagcaggaggaatacttgcccgtgtggagagataacgaggaaacaccatttgaagtgggcattcgcgtccaaatccatagccaggaggagccacccatcatagaccagttgggtttaggggtgagcccaggttatcagactttcgtgagctgtcagcaacagcagctcagctttctacctcctccttggggagactgctccagtgcctcccttaatccgaactatgaacccgaaccaagcgacccgcttgggtctcctagcccctctccaagccctccatacacgttgatgggttgccgtctcgcgtgcgagacaagatacgtagcccgcaagtgcggctgcaggatggtgtacatgcctggcgacgtcccagtgtgctctccacagcagtacaaaaactgtgcacacccagcgattgatgccatgttgcgcaaggactcttgcgcatgtcccaacccctgcgcctctacgagatatgctaaagaactctctatggtcagaatcccttctagagccgctgcccgctttctggcccgtaaacttaacagatcagaagcatacattgcagaaaatgtactggcactggacattttttttgaagcgcttaattacgaaacagtcgaacagaagaaggcctatgagatgtcagagctgctgggcgacataggggggcaaatggggctgtttataggagcaagtctcctgactatccttgaaatcctggactatttgtgtgaggtgttcagggacaaagtcctgggctatttctggaatcgacagcactcccaaagacattcttcaacaaacttaacctcccacccatcactatgccgccaccaggattccctgagactccctccccacctactgccgtgccacaccgccctggatcttctgagcgtgagctccgagccaaggcctgatatcctcgatatgccttcactccatgtggctttcccaagttcaccacaaatcaagtcttag

SEQ ID NO: 107996 - DNA, 1944 bp, synthetic construct
  misc_feature 1..1944: note = Description of Artificial Sequence: Synthetic coding sequence
  source 1..1944: mol_type = other DNA
atgttgtccggcgcggctggcgctgctaggagaggaggcgcagctcttgccccaagcctcacaaggtctctggccgggacccatgccggggctgattcgtgtgctggtgcagacaaggggagccataaagagacaattgaggagcgagataaacgacaacagagacagcagcggcagcggcagcaccagggctgcggagccgctgggtctgggtcagattctcccacgagtgggccacaccccgttcccgttcttttccctcttgcgttgtctctggaggagcaacctttgccgccgttgcctctcggtcgggcgcccggtttgctcgcacgcgagggacaggggcgcgaggctctcgccagcccttcctcccgcggtcagatgcccatcgaaatcgtatgtaagatcaaattcgcagaggaggatgcgaaacccaaagaaaaggaagccggagatgagcagagtctgctgggcgctgtggctcccggagcagctccgagagacctggccactttcgcctcaacttcaaccctgcatggtcttggccgcgcatgtggacccggccctcatggcctgcggaggaccctatgggccctcgccctcctgacatctctggccgcgtttctttatcaggccgcagggctggctagaggatatttgactcgcccacacttggtggcaatggacccggctgccccagcccctgttgccggctttccagctgtgactttgtgcaatattaatagattccgccacagcgccttgtccgatgctgatatcttccacttagccaatttgaccggtctgccacccaaagatagagacggccacagagcagctgggctgcggtatcctgagcctgatatggtggacattctgaaccgcacaggtcaccagttggctgacatgttaaagtcctgcaatttttctggacaccattgctccgcctctaactttagcgtcgtttacacacgatacggaaaatgttatacattcaatgcagaccctcgctccagcctgccgtcacgagctggaggtatgggctctggtctagagatcatgctcgatatccaacaagaagagtatctcccaatctggagagaaacgaacgagacgtcattcgaggctgggatccgtgtccagattcactcccaggaagagcctccctatatccaccaactgggatttggcgtatctcccggcttccaaaccttcgtaagctgccaggagcagcggcttacctatctgccgcagccctggggaaattgtagggccgagtccgaattgcgcgaaccagaacttcaaggctactccgcctactccgtttctgcttgtcgactgagatgtgaaaaggaagcagtcctgcagcgatgtcactgccgaatggtccatatgccagactccctgggggggggacccgaaggcccctgtttctgtcccactccgtgcaacttaacgaggtacggtaaagagatatcgatggtgcgtatcccaaacaggggcagcgcccgctacctcgcacggaagtacaaccggaatgagacctatattcgggagaactttctggtgctcgacgtctttttcgaagccttaacaagtgaggccatggagcagcgagcagcttacgggcttagtgccctgctaggggatctgggggggcagatggggttatttatcggggcaagcattcttacactccttgagatcctggactatatttatgaagtctcctgggatcgactgaagcgtgtgtggagacgcccaaagacccctctccgtacatctaccggaggcatatctaccctggggttgcaggaactaaaagaacagtctccctgtcctagcagagggagagtggagggcggaggtgtcagctcactcttacctaaccatcaccaccctcatggtccaccgggaggtcttttcgaggatttcgcctgctag

SEQ ID NO: 107997 - DNA, 2001 bp, synthetic construct
  misc_feature 1..2001: note = Description of Artificial Sequence: Synthetic coding sequence
  source 1..2001: mol_type = other DNA
atgttgtcaggagcagctggagccgctcgtcgcggcggtgctgccctggccccttcactaaccaggtctctggctggcacccatgccggtgcagactcctgtgcaggcgccgacaaaggatcacataaagagacaattgaagagagggataagcggcaacaacgccaacaacgacagaggcagcaccagggatgcggagcagccgggtctggttctgactcccctaccagtggtccacaccccgttccagtgctgttcccccttgccctgtctctcgaagaacagcccctgccccctttgcccttgggacgagcccccggcctgctggcacgcgagggccagggtcgtgaagccttggcctcaccctcttcacgcggccagatgcccattgagattgtgtgtaagatcaaattcgccgaggaggacgctaaaccaaaggagaaagaagccggagatgaacagagtttgctgggtgctgttgcgcctggagcagctccccgggatctcgcaacctttgcatcaacatccaccttgcatgggctagggcgtgcctgtggtccaggacctcacggtctgaggaggacactctgggccctcgcactccttactagtctcgcagcttttctttatcaggcagccggactcgccaggggatacttaactcggccgcacctggtagcaatggatcctgccgctcccgccccagtagctgggttccctgccgtgaccctttgcaacattaacagatttagacacagtgccctgagtgatgcagacatcttccatctcgctaatctgacaggactgccacctaaagaccgggacggacatcgggctgcaggtctgcggtatcccgagcccgacatggtcgacatccttaataggacaggacaccaactcgcggatatgctgaagagctgcaactttagtggccatcattgcagcgcttctaactttagcgtggtgtatacacgttatggaaagtgttacactttcaacgccgacccgcgtagctcattacccagtagagccggcggcatgggctcggggctagaaatcatgctcgacatccagcaggaagagtacctacccatctggagagaaacaaacgaaacctcttttgaggctgggatcagagtgcaaatccatagtcaggaagagccaccctacatccatcagctaggcttcggggtcagcccaggattccagacgttcgtctcttgtcaggaacaaaggctcacatatcttcctcagccttggggaaattgtcgcgcagagagtgaacttagggaacccgaacttcaaggctatagcgcatattccgtgtccgcctgccgactgagatgtgagaaagaggcagtgctgcagcgatgccactgccgaatggtacatatgccaggtaatgagaccatttgcccaccaaatatctacatcgagtgcgcagaccacactctcgacagcttggggggcggtcccgagggcccttgcttctgccctaccccttgcaacctgactagatacggcaaagagatttcgatggtgcggatccctaaccgaggatctgcccgatacttagcccggaaatataaccgaaacgaaacctacattagagagaactttctcgtcctggatgtcttctttgaagctcttacttccgaggcgatggaacaacgcgcagcatacgggctgagcgcactcctgggcgatcttgggggccagatggggctgtttatcggcgcgtccattctgacactcctggaaattctggattacatttatgaagtctcttgggatagactcaagcgggtatggaggcggcctaagactcccttgcggacctctaccggggggatctcgacccttggcctgcaggagttaaaggagcagagcccctgtccctcacggggtcgcgtcgagggtgggggcgttagcagccttctccctaatcaccatcatccacatggcccacccggaggactatttgaggacttcgcatgttag

SEQ ID NO: 107998 - DNA, 2271 bp, synthetic construct
  misc_feature 1..2271: note = Description of Artificial Sequence: Synthetic coding sequence
  source 1..2271: mol_type = other DNA
atgcaccttaaaatcgttcttgcgttcctcgcattgagcctaatcaccatctttgctttggcttatgtgctgctgacatctccgggcggctcgtcacagcccccccactgtccttcggtttcccaccgcgcacagccgtggccccacccgggccagtcacagctgttcgcagacctgagccgagaggagctgaccgcagttatgagatttcttactcagcgcctgggtcctggcctcgtggacgctgctcaagcccagccatctgacaactgtatcttctctgtagaactccagcttccccctaaagctgcagcgctcgcccacctcgataggggtagccctcctcctgctcgcgaggccctggccatcgtgctgtttggcggacagccacaaccaaacgtcagcgagctggtggtggggcccttaccccatccgagctatatgcgagacgtgacagttgagcggcatggaggtcccctcccataccatcggagacccgttttacgcgcagaattcacccagatgtggcgtcacctcaaggaagtggaactgcctaaggcacccattttcttaagctccaccttcaattataatggatccactctggctgcagtacacgccacgcctagaggtctgaggagcggcgaccgggccacgtggatggctttgtaccacaatatctccggggttggactgtttctgcaccctgtcgggttggagctgctgttggaccatcgagcattggatccggctcactggactgtgcaacaagtcttttatctcggtcactactacgcagacttgggccagttggaacgtgagtttaagagcggacggctggaagtggtccgggttcccctcccaccacccaatggggcctcctcactaagaagccgcaattcacctggcccactcccccctctccagttctcaccccaggggtctcagtatagcgtacaaggaaatctagtggtaagctccctatggagcttcacctttggccacggggtattctccggactaagaatctttgacgttagattccagggggaacgaatcgcatacgaagttagcgtgcaggagtgcgtcagcatttacggagccgacagccccaaaactatgctgacccgctaccttgattccagctttggcctgggccgcaattcccgcggcctcgtgcgtggagttgactgtccataccaagccaccatggtagacatccatatcctggtgggaaagggtgctgtccagctgctcccgggggcagtgtgtgtattcgaggaagcccagggattgcctctacgccgccatcacaactatctccagaatcatttttatggaggcctggcaagctcggccctggttgtgcggtcagtaagctccgtgggtaactatgattacatatgggacttcgtcctgtaccccaacggcgctcttgaaggtagagtgcatgccacaggctacatcaatacagcattcttgaaaggcggcgaggagggactgctgttcgggaacagggtgggagagcgggtgctaggtacggtgcacacccacgcctttcactttaaactcgatctagatgtggcaggcttgaaaaattgggtggtggcggaagacgtggtgtttaagcctgttgcagcaccctggaaccctgaacattggctgcagcggccacagctgacgcggcaggtgcttgggaaggaagaccttaccgcgttcagtcttgggtcacctctcccacgatatctgtatctcgcaagtaatcagacgaatgcttgggggcatcaacgaggataccggattcagattcactctcctctgggtattcacatcccgttggagtcagacatggaacgggctctatcttggggcaggtaccagttggtggttactcagcgtaaggaggaggaaagccaatcttcttcgatttatcaccagaacgatatctggaccccgaccgtgacttttgcggatttcatcaacaacgagacacttcttggggaagacctcgtagcctgggttacagcctcctttttacatattcctcacgccgaggatatccccaataccgtcactctgggaaacagagtcggtttccttctgcggccctacaatttctttgatgaggacccttcaatcttctctcctgggtccgtgtatttcgaaaaggggcaggatgctggcttatgcagcatcaatccagtggcctgcctcccggatctggctgcttgcgtgcccgacttgccccctttctcctaccacgggttttag

SEQ ID NO: 107999 - DNA, 2190 bp, synthetic construct
  misc_feature 1..2190: note = Description of Artificial Sequence: Synthetic coding sequence
  source 1..2190: mol_type = other DNA
atgcacttgaaaatagtccttgcttttcttgccctcagtctgataacaatcttcgccctggcttatgttcttctcacctcccctggtgggtcctctcagcctcctcactgtccctctgtcagtcatcgagctcagccctggcctcatccgggacagagtcagctgttcgccgatctgtcacgggaggagttgacagctgtgatgcgatttcttacacagagactgggacccggcctagtggacgccgcccaagcccagccatccgacaactgtatattttccgttgaactgcaattgccccctaaggctgccgctctcgcccacctggatcgcgggtcccctccgcccgctcgagaagcactcgctatcgtactgttcggcggacagccccagcccaacgttagcgaattggtggttggaccactcccacacccctcttacatgagagatgtgaccgtggagagacatgggggacccctcccataccaccgtaggcccgtgttgcgtgcggagttcacacaaatgtggcgacatcttaaggaggtggagctgcccaaggcacccatatttctcagctctacttttaactataacggaagcacccttgctgctgtgcatgccacaccccgtggcttgagatcgggggacagggctacatggatggccctataccacaacatttccggcgtagggctattcttacaccctgtgggactggagctgctgctggaccaccgcgctctcgaccccgcgcattggactgttcagcaggtgttttatttaggccattactacgccgatctcggacagttagagcgcgagtttaaatcggggcggctggaggtggtccgtgtgccccttccccctcctaatggcgccagctctcttcggtctcgaaacagcccagggcccctgcctccactacagttttcgccccaagggtcccaatactcagtgcagggaaacctggtcgtttcttctttatggtctttcaccttcgggcacggtgtgtttagtgggctgagaatttttgacgtgcggtttcagggcgaaagaatcgcatatgaagtttctgtgcaggaatgcgtgtcaatatatggcgcagatagccctaagactatgctcaccagatatttggattcctcattcgggctgggccggaattctaggggcctcgtcagaggagtagactgtccctatcaggctacaatggtggacattcacatcctggtgggcaagggcgctgtgcaacttctgcctggggctgtttgtgtgtttgaagaggcgcagggcctccctctgcgccgacatcataattacttgcagaatcacttttacgggggcctggctagcagcgcactcgtggtcagatccgtatcaagcgtggggaattacgactatatctgggatttcgtactgtacccgaacggtgccctggagggccgggtgcacgcaaccggctacataaatacagcctttctgaagggcggggaggagggtctcctctttgggaaccgggtgggcgagagggtgctggggaccgtgcacactcatgccttccatttcaaacttgatctcgacgtggctggattaaaaaactgggtggttgctgaagacgttgtctttaaacccgtggctgccccctggaacccggagcactggctacaacggccccagcttacacgccaggtcctgggaaaagaggatttgaccgctttttctctgggttcccccctgcctcgctacctctatctcgccagcaatcaaactaacgcctggggacatcagcgaggctaccagctggtggtgacacagcgaaaggaagaagaaagccagagttcctccatttaccaccagaatgatatctggactcctaccgttacgttcgcggactttataaacaatgaaaccctgctaggcgaagacctcgtcgcctgggtaactgctagttttctgcatatcccacatgctgaagatattccgaacacagtcaccctcgggaacagggtcggcttcctcttgcgaccatataatttcttcgacgaggatccctcgatctttagccctggaagcgtttactttgagaagggccaggacgctggcctgtgtagcatcaatcccgtggcctgcctgcctgacctggccgcgtgtgtccccgacctgccgccattttcataccacggattctag

SEQ ID NO: 108000 - DNA, 2292 bp, synthetic construct
  misc_feature 1..2292: note = Description of Artificial Sequence: Synthetic coding sequence
  source 1..2292: mol_type = other DNA
atgaaccaaaaaactatcctggttttgctgattctggccgtgataacgatctttgccttggtctgtgttcttctggtcggacgagggggcgacggaggcgagcctagccagttaccgcactgcccatccgtatccccatccgctcagccttggactcaccccggacagagccaactgttcgcagacctctcaagagaagagctcacggccgtgatgcgattcctcacccaacgattaggtccagggctggtcgacgctgcacaggctcgcccatcagacaattgcgtgttcagcgtcgagttgcagctcccacccaaagcagccgcactagcacatctggatcgaggttctccaccaccggcccgggaggcgcttgcaattgtgtttttcggacgccagcctcagccaaacgtctccgagttggtcgtgggcccattgccacatccatcttacatgagagatgttactgtggagcgccatgggggcccgcttccctaccaccgtcggcctgtgttgttccaggagtacctggacatcgatcagatgatattcaatagggagttgcctcaggccagtgggctgctccaccactgctgtttctataaacaccgggggagaaacctggtgactatgacgactgcaccaagagggctacagtcaggtgatagggcgacctggtttggtctttattacaatatttccggagccggcttctttctgcaccacgtgggtctggagcttctggttaaccacaaagctttggatcccgcccgttggactatacaaaaagtgttctaccagggcaggtactacgatagtttggctcagttagaagcccaattcgaggcaggattagtaaacgtcgtcctgattcctgataacggcaccggaggcagctggtcactcaagagccctgtaccccctgggccggcgccgcctcttcagttctaccctcagggacctcgcttctcagtccaggggagccgcgtcgcttcctctctgtggactttttctttcggactgggagccttcagtggccctaggatctttgatgtgcgctttcagggtgagcgccttgtctatgagatttcactccaggaggccttggccatttatggcggaaattctcctgcggccatgactactaggtatgtagatgggggattcgggatgggtaagtacaccactccgctgaccaggggtgttgattgtccttacctggccacttacgttgactggcatttcctattagaaagtcaggcccctaaaaccatccgggacgccttctgcgtgttcgagcagaaccagggtcttcccttacgccgacatcacagcgacctgtattcgcactatttcggagggctggccgaaactgtgctcgtcgtgcgttccatgtctactctgctaaactacgattatgtttgggataccgtcttccatcctagtggagctattgagattcggttttatgcaacaggctacatttctagcgctttcctctttggagctaccggaaaatacggcaatcaggtcagcgagcatacattaggaacagtgcatactcactctgctcattttaaggtggacctcgacgtggctggactcgagaattgggtgtgggccgaggacatggtgtttgttccaatggccgtaccttggagccccgagcatcagctacaacggctgcaggtcacccgcaaactgctggaaatggaagaacaagccgccttcctggtagggtccgctaccccacgctacctgtaccttgccagcaatcactcaaataagtggggacatcctcgtggttaccgcatacaaatgctgagtttcgccggtgagcctctcccccagaacagttccatggctcggggctttagctgggaacgctatcagctggctgtaactcaaagaaaggaggaagagccttcatcctcctccgtgttcaaccaaaacgacccatgggctccgactgtcgatttttccgattttataaacaatgagactattgcaggcaaagatctcgtcgcctgggttaccgcggggttcttacatataccacacgcggaggatatacccaatactgtgaccgtcgggaacggcgttggtttctttttgcgaccatacaatttttttgatgaggaccccagcttttacagtgcagactccatttactttcggggcgaccaggatgctggagcctgcgaggtaaacccattggcctgtctgccgcaggccgcagcctgcgcccctgacctacctgccttctcacacggaggctttagtcacaactag

SEQ ID NO: 108001 - DNA, 939 bp, synthetic construct
  misc_feature 1..939: note = Description of Artificial Sequence: Synthetic coding sequence
  source 1..939: mol_type = other DNA
atggcgaacaacgatgcagtcctcaagagacttgagcagaagggcgcagaggcagaccagattattgaatatctgaagcagcaagtgtccctcctgaaggaaaaggccatccttcaagccacactgagggaggagaagaagctgagagtggaaaacgcaaaattgaaaaaagaaattgaggaactgaagcaggagctaatacaggcagagattcaaaatggagtgaagcagatcccgtttccttccggcactccactacatgccaacagtatggtctccgagaatgtcatccagagtactgccgtcacaacagttagctccggcacaaaggagcagataaaggggggaaccggcgacgaaaagaaggcaaaggaaaagatcgagaaaaaaggcgagaagaaggaaaaaaagcagcaatctattgccgggagtgccgattctaagcctatcgacgtgtcccggctggatcttcgaattggttgtattataacggccagaaaacatcctgacgccgacagtctgtatgttgaagaggttgacgttggggaaatagccccccgaaccgttgttagcggactcgtgaaccacgtgccattggagcaaatgcaaaatagaatggtgatactcttatgcaatctgaaaccagcaaagatgaggggcgtcctcagtcaagccatggtgatgtgcgcaagctccccagaaaagattgagatccttgcaccccccaacggctctgtcccaggggatcgtattactttcgatgcatttcctggagaacccgacaaggagctgaatcccaaaaagaagatttgggaacagatacagcctgacctccataccaatgatgagtgcgtcgccacgtacaagggcgtgcctttcgaggtgaagggcaaaggtgtgtgccgggcgcaaactatgtcaaattccgggatcaaatag

SEQ ID NO: 108002 - DNA, 1011 bp, synthetic construct
  misc_feature 1..1011: note = Description of Artificial Sequence: Synthetic coding sequence
  source 1..1011: mol_type = other DNA
atgcttcccgcagtagctgtgtccgagccggttgtgcttagatttatgatcttttgcagattgctcgccaagatggcaaacaacgatgccgtactgaaaagactggaacaaaaaggtgcagaagccgatcagatcatcgagtaccttaagcagcaggttagcttactgaaagaaaaagctatcctgcaggccaccttgcgagaggagaaaaaactgcgggtggaaaatgcaaaattgaagaaagagatcgaggagctgaagcaggagctcatccaggctgaaattcagaacggcgttaaacagataccattccccagcggtactcctctccacgccaactccatggtgagtgagaacgtgatccagtccacagcagtcaccactgtgagtagcggcacaaaggagcagataaaaggaggtacaggcgacgaaaagaaagcaaaggaaaagatcgaaaagaagggggagaagaaggagaaaaagcagcaaagtatcgcgggtagtgccgattcgaagccaatcgacgtgtctcgcctagacttacgcatagggtgtattattaccgctcgcaagcatccggatgcagactctttatatgtggaagaggtcgacgttggtgaaatcgcaccacggactgtcgtatctggcctggtaaaccacgtgcccctggagcagatgcaaaaccggatggttatcttgctgtgtaacctcaagccagctaagatgcggggcgttttatcccaggccatggttatgtgtgcatcatcccctgagaaaattgaaatcctcgctcccccgaatggcagtgtccccggggaccgcattacttttgacgcttttcctggagagccagataaggagttgaaccctaagaaaaaaatctgggagcaaattcagccagacctccacacaaatgatgagtgtgtggctacatataaaggcgtgcccttcgaagtgaaaggtaagggcgtctgccgagctcagacgatgagtaattccggtataaagtag

SEQ ID NO: 108003 - DNA, 810 bp, synthetic construct
  misc_feature 1..810: note = Description of Artificial Sequence: Synthetic coding sequence
  source 1..810: mol_type = other DNA
atggcgaacaacgacgcagtgctgaagaggttggaacagaaaggtgcagaggcagaccagataatagagtatttaaaacagcaggttagtctcctcaaggaaaaagctatactccaagctaccctccgagaggaaaaaaagctgcgtgtggagaacgccaaactaaagaaggagatcgaggagcttaaacaggaactgattcaggccgagatccagaacggagttaagcaaatccccttccccagtgggaccccactacatgccaactctatggtgtcagagaatgtcattcagagtaccgccgtgaccactgtgagctcaggaaccaaggaacagatcaagggcggtactggcgacgaaaagaaagcgaaggagaaaattgaaaaaaaaggggaaaagaaagaaaagaaacagcagagcattgcaccaagaacggtcgtttctggtctcgtgaatcatgtgcccctggagcagatgcagaatcggatggtgatactgctctgcaacctgaagcctgctaagatgcggggggtgctgtctcaggccatggttatgtgcgcaagtagccccgagaaaatcgagatcctagcccctcctaatggttcagttccgggcgaccgcatcactttcgatgcgtttccaggcgagccagacaaggagttgaaccccaagaagaaaatctgggaacaaatacagccagatcttcacactaatgatgagtgtgttgcaacttacaagggtgtgccttttgaagtgaagggaaagggggtctgtagagcccagacaatgtccaactctgggattaagtag

SEQ ID NO: 108004 - DNA, 939 bp, synthetic construct
  misc_feature 1..939: note = Description of Artificial Sequence: Synthetic coding sequence
  source 1..939: mol_type = other DNA
atggccaataatgatgccgtgttaaaaagactggagcagaaaggcgctgaagccgatcagattatagagtatctcaagcagcaggtcagcctcctaaaagagaaggccattttacaggccactctgcgtgaagagaaaaagcttagagtcgaaaatgccaagctgaaaaaggagattgaggaactgaagcaagaactgatccaggccgaaattcagaatggcgtgaaacaaatcccatttccttccggcaccccgttgcacgccaacagtatggtttcggagaacgtgattcagagcacagccgtgacgactgtgtcatctgggactaaggaacagatcaagggcggaaccggggacgaaaagaaagcgaaagagaaaatcgaaaagaagggggaaaaaaaagagaaaaagcagcagtcgatagctggctcagctgattctaagcccatcgatgtaagccgactcgacctgcgtataggctgtataataaccgccagaaaacaccctgatgcagactccctatatgtcgaagaggtggacgtgggtgagatcgcgccccgtaccgtggtctctggactagtcaaccacgtgcctctggagcaaatgcaaaaccgaatggtgatactactgtgtaacctgaagccggccaagatgagaggcgtcttgtcacaagccatggtaatgtgcgcaagctctcccgagaaaattgagatcctggcccctcctaatggaagtgtgcccggagataggataacctttgacgcattccccggcgagcccgacaaagagttgaacccaaaaaagaaaatctgggaacagattcagcccgatttacatactaatgatgagtgcgtcgctacgtacaagggcgtgccatttgaagtgaagggcaaaggtgtctgtagggctcagaccatgtccaattcgggcattaaatag

SEQ ID NO: 108005 - DNA, 453 bp, synthetic construct
  misc_feature 1..453: note = Description of Artificial Sequence: Synthetic coding sequence
  source 1..453: mol_type = other DNA
atggccaacaacgacgcggtgctaaagcggctcgagcaaaaaggagctgaagccgaccagatcattgaatatttaaagcagcaggtgagcctgcttaaggaaaaagctattttgcaggccacgctgcgagaagaaaagaaactcagagtcgaaaatgctaagctgaagaaagaaatcgaagagctgaagcaggaactgatccaggctgagatccagaacggggtaaagcagattccattcccatccgggacccccctgcacgctaattcaatggtgagcgagaatgtaatacaaagcactgctgtgaccacagtgtcatcaggcacaaaggaacagatcaagggagggactggcgacgagaagaaggccaaggagaagatagagaagaagggagagaaaaaagagaagaaacagcagagcatagcgggttctgcagattctaagcctatttag

SEQ ID NO: 108006 - DNA, 1227 bp, synthetic construct
  misc_feature 1..1227: note = Description of Artificial Sequence: Synthetic coding sequence
  source 1..1227: mol_type = other DNA
atgacaagtaagggtccagaggaggagcacccttcagttaccttgttccggcagtacctacgaatacggactgtgcaacctaagccagactacggcgcggcagttgccttctttgaggaaaccgccaggcagcttggcctcgggtgtcagaaagtcgaggtcgcacccggctacgtggtaaccgtgctgacatggccgggtactaatccaaccttgtcatcgatcttactgaattcccacactgacgttgtaccagtttttaaggagcactggagccacgacccattcgaagccttcaaggatagtgagggctacatttacgcccgtggggcccaagacatgaaatgcgtgtcgattcagtatctcgaagctgttagacgtctgaaggtcgagggtcaccgctttccccggacaattcatatgacatttgtgcctgatgaagaggtggggggccatcagggtatggagctgttcgttcaacgacctgaattccacgcactgcgggccggattcgctctggacgagggcatcgctaatcccactgacgcctttactgtcttctattctgagagatccccctggtgggttcgggttaccagcaccgggagacctggacacgcaagtaggttcatggaggataccgcagccgagaaactgcacaaggtggtaaacagtattctggcttttcgggagaaagagtggcagaggctccaaagcaacccccatctgaaggaaggcagtgttacaagcgtaaacctgacgaaattagagggcggtgtggcctacaacgtgatcccggcaactatgagcgcctcctttgatttccgggttgctcccgacgtcgatttcaaggcttttgaagaacagcttcagtcctggtgtcaggcggccggggagggcgtgactctggagttcgcccagaaatggatgcaccctcaggtgacccctaccgacgactccaacccctggtgggctgccttcagtagagtctgtaaagacatgaatcttaccctcgaacccgagatcatgccggccgcgactgacaatcgttacataagggcagtgggcgtgcctgccttaggattctctcccatgaaccgaacaccagtcctgctgcatgatcacgatgagaggctgcatgaggccgtttttctgaggggagtggacatttatactagattgctgccagctcttgccagcgtgcccgctttaccgtcagatagctag

SEQ ID NO: 108007 - DNA, 1497 bp, synthetic construct
  misc_feature 1..1497: note = Description of Artificial Sequence: Synthetic coding sequence
  source 1..1497: mol_type = other DNA
atgtggggctgtcaggctcccttaagtagattgcctgccagcggggaaacacctatgagccagtcttggctggtgagccctctagctacccggccatcctttactgcacggtgtagccatagcactcgccatacaggttggagatggtgctgtttcatggaacgtccactcacccttacccgggggagcagctgggcacattgcagttactgccaccggggagccaccggcccttggccccttacgtttcagctgactacacgatccgctatgacatccaagggcccagaagaggagcatccaagtgtaaccctatttaggcagtatttgcggattcggactgtacagcccaaaccggactacggcgccgccgtggccttctttgaggaaactgccagacaattgggcctagggtgccagaaggtggaggtagctcctggctatgtagtgacagtgttaacttggccaggaaccaaccccaccctcagcagtattcttttgaactcccacaccgacgtcgttcccgtattcaaagaacattggtctcacgatcctttcgaagcctttaaagattcagagggctatatttacgcgcgaggtgcccaagatatgaaatgcgtgtccattcaatacctcgaagcggtgcggcgactgaaagtggagggtcacagattcccgaggaccatccatatgacattcgtccccgacgaagaggtgggcgggcaccaaggcatggaactcttcgtacaacgcccagagttccacgcactcagagccggattcgctctggatgagggcatcgccaacccgactgacgcctttaccgtgttctactccgagaggtcaccctggtgggtaagggtaaccagcaccggaaggcccggccatgcttctcgattcatggaggacactgcagccgagaaattgcataaagtcgttaacagcatcctggcgttcagagagaaggaatggcagagactgcagagtaaccctcacctgaaggaaggcagtgtcacttctgtgaacttaactaagctggaaggtggcgtggcatacaacgtgatcccagcaacaatgtctgccagcttcgattttcgggttgctcccgacgtcgattttaaggcttttgaggaacaattacagagctggtgccaagccgcaggggagggggtgacgctagagtttgctcagaagtggatgcacccgcaggtgacaccaacagacgattccaacccctggtgggccgcgttctctcgagtatgtaaagacatgaacctcaccctggagccagagattatgcctgctgcaactgacaaccgatacatcagagcagtaggcgtgcccgctttaggcttttcccccatgaacagaacccctgtgctgcttcatgaccatgatgaaagactacatgaagctgttttcctgaggggcgtggacatttatacgagactgcttcctgccctggcttcggtgccggcccttccaagtgatagttag

SEQ ID NO: 108008 - DNA, 1122 bp, synthetic construct
  misc_feature 1..1122: note = Description of Artificial Sequence: Synthetic coding sequence
  source 1..1122: mol_type = other DNA
atgacaagcaagggccccgaggaagagcatccatcggtcactctgttcaggcagtatttgcggatacgcaccgtgcaacctaagccagactacggcaccaaccctaccctctcctccattctccttaattctcacacggacgtcgttccagtgttcaaggagcattggtcacacgatccattcgaggcctttaaggatagcgagggctatatttacgcacgtggggctcaggacatgaagtgcgtgagtatccagtacctcgaggccgttcgccggctgaaggtcgaaggccatcgcttccctcgcacaattcatatgacatttgtccccgacgaagaggtgggaggtcatcaggggatggaactgttcgttcaacggccagagttccatgcattgagggcgggttttgcattagacgaaggcatcgcgaaccctactgacgcttttaccgtgttttattcagagcgatctccctggtgggtccgggtgaccagcacaggtaggccagggcacgcaagcagatttatggaggacacggcggccgagaagctccataaagtcgtgaattcaatccttgcctttagagagaaggagtggcaaagactgcaatctaacccgcatctgaaggaaggctcagtgacctccgtaaatctcaccaaactggagggcggagttgcctataatgtgatccccgcaactatgtcagctagtttcgacttccgtgttgccccagatgttgactttaaggcattcgaggagcaactgcagtcctggtgccaggcggcgggcgaaggggtcactctagagttcgcacaaaaatggatgcatccccaggtgacccccactgacgactctaatccctggtgggcagcattttccagagtctgcaaagatatgaatttgactctagaacctgagatcatgcctgcagccacagataacagatacatcagagcagtgggggtgccggctctcgggtttagccctatgaacaggacaccggtgttgctgcatgaccacgacgagcgacttcacgaggcagtgtttctgcggggggtcgacatctacacgaggttgctcccagctttagcttccgtccctgctctcccatctgactcatag

SEQ ID NO: 108009 - DNA, 1032 bp, synthetic construct
  misc_feature 1..1032: note = Description of Artificial Sequence: Synthetic coding sequence
  source 1..1032: mol_type = other DNA
atgacatctaagggccccgaggaggagcatccaagtgtgaccctcttcagacagtacctgaggattcggaccgtacagcctaaacccgactacggtgccgccgtggctttttttgaagagacggcaagacagctcgggcttggatgtcagaaggtggaggtggcccccgggtacgtcgttaccgtattgacctggcccggcaccaacccgacactaagctctatcctgctcaacagccacaccgacgtggtcccggtcttcaaagaacactggagtcatgacccgttcgaggccttcaaggattcggaaggatacatatacgcccgcggggcacaagacatgaaatgcgttagtatacagtacctggaagcagtgcgtagactgaaagtcgagggtcaccggtttcccagaactatccacatgacatttgtacctgatgaagaggtggggggacaccagggaatggagctttttgtccagagaccagagtttcatgctctcagagcaggcttcgccctcgacgagggcattgccaacccgacagacgcttttaccgtgttttactccgaacggagtccatggtgggtgcgcgtaacgtctaccggacgcccaggacatgcttctcggttcatggaggatactgccgcagagaagctggcattcgaggagcagcttcaatcgtggtgccaggcagcaggcgaaggcgtgacattggaatttgcacagaaatggatgcatccccaggtaaccccaaccgatgactctaacccatggtgggccgcttttagccgggtctgcaaagatatgaacttgacactagagcccgagataatgcctgcggcaactgacaaccggtacatcagggctgtgggcgttcctgctctaggcttctcccctatgaataggacgcccgtcctgcttcatgatcatgatgaacgactccacgaggccgtgtttctgcgcggcgtggacatctacacacgcctgctgcccgcccttgccagcgttccagcactgccttcagactcttag

SEQ ID NO: 108010 - DNA, 1011 bp, synthetic construct
  misc_feature 1..1011: note = Description of Artificial Sequence: Synthetic coding sequence
  source 1..1011: mol_type = other DNA
atgacttctaaagggcccgaggaggaacatccatctgtcactctgtttcgccagtatctgagaatcagaacggttcagccaaagcccgactacggcgctgctgtcgccttcttcgaggaaactgccaggcaactgggactgggttgtcagaaggttgaggtggctcctggatatgtggtgacagtcctgacttggccagggactaacccaactctctcttccatcctgctcaactcgcacaccgacgtggttcccgtcttcaaagagcactggagtcatgacccgtttgaggccttcaaggactcagagggaatagccaacccaacggatgcttttacagtcttttactccgagcggtccccatggtgggtacgtgtgacgtctactggccgcccagggcacgcttcaaggttcatggaggacaccgcggctgaaaaactccacaaagttgtcaacagcatattggcttttcgagagaaggaatggcaacgcctgcagtcaaacccacacttgaaggaaggatccgtgacttccgtgaacctgactaaacttgaagggggcgtggcttacaacgtaatcccagcaacaatgtcggcctcgttcgacttccgagtggctcccgacgtcgatttcaaagcgtttgaggagcagctccagtcttggtgtcaggccgccggggaaggcgtgactttggagtttgcacagaaatggatgcacccacaggtgactccaactgacgatagtaacccctggtgggccgccttttcacgcgtctgcaaggacatgaacttgaccctggaacccgagattatgccagcggccaccgacaacagatatataagagcagtgggcgtgcccgccctgggatttagccccatgaaccggacccccgtcctactccatgatcacgatgagcggctgcatgaagcggtgttcttacggggcgtcgatatctacaccaggttgctgccagctctggccagcgtgcctgcacttccatctgacagttag

SEQ ID NO: 108011 - DNA, 1278 bp, synthetic construct
  misc_feature 1..1278: note = Description of Artificial Sequence: Synthetic coding sequence
  source 1..1278: mol_type = other DNA
atgaactatgcccgattcatcactgcggcctccgctgctagaaatccgagtccaatccgaacaatgacagacattctgagcagaggccccaagtctatgatttcactcgcgggcgggctgccaaacccaaacatgttcccctttaaaaccgcggtaattactgtcgagaacgggaaaaccattcagtttggagaagagatgatgaaacgcgctttgcaatattcacctagcgccgggatccctgaactattaagttggcttaaacagctccagataaaactgcataatccccctaccatacactaccctccgagtcagggacagatggacctctgtgttacaagcggctcccagcagggactctgtaaggtatttgaaatgattatcaatcctggcgataacgtgctcctggatgagccggcatactctgggaccctacagtcgctacaccccctgggctgcaatattatcaacgtagcatctgatgagtctggcatcgtacccgacagcttgagggatatcttgtccagatggaagcccgaggacgcgaagaacccacagaagaacacacccaagtttctgtacacggtcccaaatgggaacaatcccactgggaattccttaacaagcgaacgcaaaaaggagatctacgaactggccaggaaatacgactttctgatcattgaggatgacccatactacttcctgcaatttaataagttcagggtgcctaccttcctgagtatggacgtggatggaagagtcatcagagccgatagtttttctaagatcatcagctccggactgcgaatcggctttctgacaggtcccaagccattaattgaaagagtgattttacacatacaagtttcaactcttcatccctctacatttaaccagcttatgattagccagctcttacacgagtggggagaggagggcttcatggcccatgtggaccgcgttatcgacttctattccaaccagaaagatgcgattcttgcagccgccgataagtggctgaccggactggccgaatggcacgtacccgccgcagggatgttcctgtggattaaggtgaaaggcataaacgacgtgaaggagctcatcgaggagaaggctgttaagatgggagttctgatgctcccaggcaacgcattttacgtcgatagctctgctccttctccctacctgagggccagcttctcaagtgcctcccccgaacagatggatgtggctttccaggtccttgcccagctgatcaaggagtcgttgtag

SEQ ID NO: 108012 - DNA, 1278 bp, synthetic construct
  misc_feature 1..1278: note = Description of Artificial Sequence: Synthetic coding sequence
  source 1..1278: mol_type = other DNA
atgaactacgctcgttttatcacagctgctagcgctgctcgaaatccatccccgattagaactatgacagacatacttagcagggggccaaaatccatgatcagcctggccggagggttgcccaaccccaatatgttcccctttaaaacggccgtgataactgttgaaaacggaaaaaccatacagtttggtgaagagatgatgaaaagagcactacaatattcacccagcgccgggatccctgaactgctcagctggctaaagcaactgcagatcaaactacacaatccccctaccattcattaccctcctagccaaggtcagatggatttgtgtgtgacatccgggtcacagcaaggtctctgtaaagtctttgagatgatcataaacccaggtgacaatgtgctcttggacgagcccgcttatagcgggactctgcaaagcctgcatccacttgggtgcaatattatcaatgtagcctcagacgaaagcggtattgtccctgatagtctcagagatatcttgagcagatggaagcctgaagacgcgaaaaacccgcaaaaaaacactcccaaattcctgtacacggtccccaatgggaacaatccaaccggcaacagcttgacctcagaacggaaaaaggagatttatgagctagcccggaagtacgatttcctaattattgaagacgacccctattattttctgcagttcaacaaatttagggtgcctacatttctctcaatggacgtcgatggcagagtaatacgggcggactcctttagcaaaattatctctagcggcctgaggatcgggttcctgactgggccaaagccacttattgagagagtcatccttcacatacaggtgtcaactctgcaccctagcaccttcaaccaactaatgatctcccagctgctccatgagtggggggaagagggatttatggcgcacgtggatcgggtgattgatttctattccaatcaaaaggacgccattcttgctgctgctgataagtggctgactggcctcgccgaatggcatgtcccagcggccggaatgttcctgtggattaaggtcaagggaattaacgatgttaaggagctcattgaagagaaggccgtgaaaatgggggtgctgatgctgcctggcaacgccttctatgtggattcctcagcaccgagcccatacctccgtgcctctttctccagcgcaagtcccgaacagatggacgtggcattccaggttcttgcccagttaattaaagagagcttgtag

SEQ ID NO: 108013 - DNA, 543 bp, synthetic construct
  misc_feature 1..543: note = Description of Artificial Sequence: Synthetic coding sequence
  source 1..543: mol_type = other DNA
atgaattacgctaggtttatcacagcagctagtgcagctcggaatccttcccctattcgtactatgacagacatcctgtcaaggggtcccaagtctatgatttcgttggcagggggcttaccgaatcctaacatgtttcctttcaaaaccgctgttataaccgtcgaaaacgggaagacaatccagtttggtgaagagatgatgaaacgggctcttcagtatagccctagcgcaggaatccctgaacttctaagctggctcaagcagttgcaaattaagctccataacccaccaactatccattatccgccaagtcagggccagatggacttatgcgtaacaagcggatcgcagcaaggtctgtgcaaggtgtttgaaatgattatcaatcccggtgataatgtccttctagacgaacccgcctactcaggcacactccagtcccttcaccctctcgggtgcaacattatcaacgtggcctcagatgaatcgggaattgtgcctgatagcctgcgcgatatcctctcccgttggaagccgtag

SEQ ID NO: 108014 - DNA, 630 bp, synthetic construct
  misc_feature 1..630: note = Description of Artificial Sequence: Synthetic coding sequence
  source 1..630: mol_type = other DNA
atgaactacgctcggttcattacagcggcctctgctgcgagaaacccgtcccctattcgcaccatgacagacattctctcgcggggacccaaaagtatgatctcactggccggcggactgcccaaccccaacatgtttccgttcaaaactgctgtgatcactgtggagaacggcaagacgatccagttcggcgaggagatgatgaagcgcgccttacagtacagtcctagcgccggaattccagagttgctcagttggttgaaacagctgcagatcaaactgcacaatcctcccaccattcattatcccccatcgcaaggacagatggacttatgcgtgacgagcggatcacagcaggggctctgcaaagttttcgagatgatcattaatccaggagataacgttcttctggatgagccagcctattctggcacgctgcagtctttacatcccctcgggtgcaacattatcaacgttgccagcgatgaatctggaatcgtccccgattctctgagagatattctctcacgatggaagccggaggatgcaaaaaacccgcagaaaaatacgcctaaattcctctatacagtgcctaacgggaacaatcctactggcaattccttgacttag

SEQ ID NO: 108015 - DNA, 1290 bp, synthetic construct
  misc_feature 1..1290: note = Description of Artificial Sequence: Synthetic coding sequence
  source 1..1290: mol_type = other DNA
atgaactatgccagattcataacagcagcaagtgcagcacggaacccatcacctataaggacgatgagcgaaaaacgcgcagacattctgagccgagggcccaagagcatgatttcactggctggagggctccccaatcccaacatgtttccttttaaaacggccgtgatcaccgtggagaacggcaagacgattcagttcggtgaagagatgatgaagcgtgcactgcaatacagcccaagtgcgggaattcctgaactactgagctggcttaaacagcttcagataaagctacataatccccccactatccactaccccccatcccagggacagatggacctatgtgtgactagtggatcacaacaaggcttatgtaaagtgtttgaaatgatcatcaacccaggtgataacgtattacttgatgaaccagcttattccggcacacttcagtcacttcatccactgggctgtaatattatcaacgtcgcttccgatgagagcggcatcgtgcccgattccctgcgcgacattctctctcgctggaaacctgaggacgcaaaaaacccacagaagaatactcctaagtttctctacacagtgcccaatggtaataatccaacaggcaactctttgacctcggagcgcaagaaggaaatctacgagctggctcgcaagtacgactttttaatcattgaagacgatccttactactttctgcaattcaacaaatttcgcgtccccacattcttgtcaatggatgttgatggacgcgtgattcgagctgactcctttagcaagattatttcctcaggcctgcggattggattcctgaccggccctaaaccgctgatcgagcgggtgatactccacattcaggtgtctacactccatccttccacatttaaccagctcatgataagccagcttctccatgagtggggggaggaggggtttatggcccatgtggatcgtgtgatagacttctacagcaaccagaaagacgcaattctcgccgcagcagacaagtggctgaccggccttgccgaatggcatgtccctgccgcagggatgtttctgtggataaaagttaagggtatcaacgatgtgaaggaactgatcgaagagaaagctgtgaagatgggcgttctgatgcttcccggcaacgccttttatgtggactcatccgcgcctagcccatatctgcgggcctccttctcgtctgccagtcccgagcagatggacgtagcttttcaggtgctcgcccagctaatcaaagaaagtctatag

SEQ ID NO: 108016 - DNA, 1278 bp, synthetic construct
  misc_feature 1..1278: note = Description of Artificial Sequence: Synthetic coding sequence
  source 1..1278: mol_type = other DNA
atgaactatgcgcgatttatcaccgcagctagcgccgctcggaaccccagtcctattcggaccatgacggatattctcagtcgaggcccaaagtcaatgatatcactagccggtggattaccgaaccctaatatgtttcctttcaagacagctgtgatcaccgtagagaatggcaagaccattcaattcggcgaagagatgatgaagcgggccctacagtattcgccctcggctggtatccccgagctgctctcttggctcaaacagctgcagatcaaactgcataatccgccaaccattcattacccacctagtcagggccagatggacctgtgtgtcactagtgggtctcaacaaggcctctgtaaggtcttcgagatgattattaatcctggggataatgtgctcctcgacgaacccgcctacagcggaacccttcagagcttacatccactcgggtgtaacattatcaatgtcgccagcgacgaaagtggtattgttcctgactccctgagagatatcctgagcagatggaagccggaggacgccaagaatcctcagaagaacacaccaaagtttctgtatacagtccccaacggtaacaacccaaccggcaactcattgacatcagagagaaagaaggaaatttacgaactggccagaaaatatgacttcctgataattgaggatgacccatattatttcctacagttcaataagttcagagttccaacttttttgtctatggacgtggatgggagagtgatcagggctgatagttttagcaaaattatctcatccggactgcgcatagggttcctcaccgggccgaaacccctaattgaacgggttattctgcatatccaggtgtctacactgcacccttctacttttaatcagctgatgatttcacaattgctgcatgagtggggcgaagagggattcatggcccacgtggaccgagtgatcgatttctattctaaccagaaggacgctattctggccgcggctgacaagtggctgaccggactggcagagtggcacgtcccagcggccggaatgtttctgtggattaaagtcaaggggattaacgacgtgaaggagctgatcgaggagaaagccgtcaaaatgggggttctgatgctccccggcaacgcattctatgtagacagctccgcccctagcccttatctcagggcctcttttagttctgcttctcccgagcaaatggacgtggctttccaggtcctggcgcagctgattaaggagtccctgtag

SEQ ID NO: 108017 - DNA, 621 bp, synthetic construct
  misc_feature 1..621: note = Description of Artificial Sequence: Synthetic coding sequence
  source 1..621: mol_type = other DNA
atggctcctagccacctgagtgtgagagagatgagagaggacgagaagcccctggtgctggagatgctgaaggctggtgttaaggacacagagaatagggtcgcgctccatgccctgactaggcctcccgctctactgctgctggccgccgcctcgtcaggtctgcgcttcgtgttggcatccttcgcacttgctctgcttttgccggtgtttcttgcggtggctgccgttaagcttgggctgcgtgctcgctggggcagcctgcccccacccggcgggctcggtgggccgtgggttgcagttcggggcagcggagacgtgtgcggagtcctggcacttgccccagggaccaacgccggcgacggggctagagtgacccggctgtccgtcagcagatggcatagaagacgcggagtgggtcgaagactgttggcttttgccgaagcacgagcccgcgcttgggcggggggcatgggcgagccccgagctcggctggtggttccagtggctgtagcagcctggggtgttggcggaatgctggaagggtgtggataccaagccgaaggcggatggggctgtctgggttataccctcgtgcgtgaatttagtaaggatctgtag

SEQ ID NO: 108018 - DNA, 1842 bp, synthetic construct
  misc_feature 1..1842: note = Description of Artificial Sequence: Synthetic coding sequence
  source 1..1842: mol_type = other DNA
atggtgtccaaggatgccagcgtcaaggaatatatattcaaagagttacagaagtatttaccttcccacgcagttcctgatgagctcgttcttattgattccctgcctttcacaagtcatgggaagatcgacgtatctgaactaaacaagatttatctcaactacattaacctaaagtcagaaaacaagctcagcggaaaggaggatctttgggagaaactgcagtatctgtggaaatctaccctgaatctgccagaagacctgctccgagtgcccgatgagagcctttttttgaactctggaggggactctcttaaaagtatcaggctcttgtccgaaattgagaagctcgtaggcacttcagtccccggacttttggaaatcattctatcgtcatcaattctagaaatttacaatcacattctccagacagtagtgcccgatgaggacgtcacctttcgcaaaagttgcgctacaaagaggaagctgtccgacataaatcaggaggaagctagtgggacatctctgcatcaaaaggctattatgacgttcacatgtcacaacgaaatcaacgcattcgtcgttctcagtcggggctcccaaatcctctctctcaatagtacgaggttcttgaccaagctggggcattgtagctcggcctgcccttcagacagtgtgtctcagacaaacatccagaacttgaaagggctgaattcccctgtccttataggtaaaagcaaggacccctcatgcgtcgctaaagttagcgaggaggggaagcctgccattggcacacaaaaaatggagcttcacgtgcggtggcgcagtgatactgggaaatgcgtggacgcttcccccctggtcgttatcccgacctttgataagagttccactacagtgtatattgggagccatagtcaccgaatgaaggccgttgatttctattccggcaaagtcaaatgggagcagatacttggggaccgcatcgaaagttccgcttgtgtgtccaaatgtggaaacttcatcgtggtcggctgttataatggcctggtgtacgtgctgaagtcgaactcaggagagaaatactggatgtttactaccgaagacgctgtgaagagcagcgccacaatggacccaacaactgggctgatttatataggcagtcacgatcagcacgcatacgccctggatatctatcgcaagaagtgcgtgtggaaatcaaaatgcggtggcacagtgttctcatctccctgcctgaatctgatccctcatcatctatacttcgccactctcggcggcttgctgttagccgttaaccccgctacgggcaacgtcatttggaagcacagttgcggtaagccgctcttttcctctcctcagtgctgctctcagtatatctgcattggttgcgtggatggaaacttactgtgttttactcactttggtgagcaggtgtggcagttttccactagcgggcccattttttcatcaccctgtacatcaccctctgaacagaaaatatttttcggatctcatgattgtttcatttattgctgcaacatgaagggccacctccagtggaagttcgagaccacaagccgtgtatacgctacaccttttgctttccataactataacgggtccaatgagatgctgctggccgccgcctcaaccgatggaaaggtgtggatcctggagagtcagagcggtcagctacaaagcgtgtatgagttgcccggagaagttttcagcagccccgttgtgctggagtctatgctgattatcgggtgtcgcgacaattacgtctattgcctcgacttgctcggaggcaatcagaagtag

SEQ ID NO: 108019 - DNA, 2574 bp, synthetic construct
  misc_feature 1..2574: note = Description of Artificial Sequence: Synthetic coding sequence
  source 1..2574: mol_type = other DNA
atgactctccaggaactggtgcacaaggccgcgtcgtgttacatggatcgggtggccgtgtgcttcgatgagtgcaacaatcagttaccagtttactatacatataaaactgttgtgaatgcagccagtgaactctccaacttcttactgctgcactgcgatttccaagggatccgtgagattgggctatattgccagccaggcatcgacctcccatcctggatcttgggcattctgcaggtgcctgctgcatatgtgccaattgaacccgattcacccccatcactttcaactcactttatgaagaagtgtaatttgaaatatatacttgttgaaaagaagcagattaacaaatttaagtcttttcacgagaccctattaaactacgataccttcacagtggagcacaacgatctcgtgctgtttaggcttcactggaagaatacagaagtcaatctgatgctgaatgatgggaaggagaagtatgagaaagagaaaattaaaagcatctcctcagaacacgtcaatgaggaaaaggcagaagaacacatggatctgcggctgaaacattgcttagcctacgtgctgcacacaagcggcactacgggaattccaaagatcgtgcgtgtgccacacaaatgcatcgtaccaaatattcaacacttcagagtgctctttgacatcacccaggaagacgttttgttcttggcttctccattgactttcgatccttctgtcgttgaaattttcctggccctttcttccggcgcttcccttttgatcgtaccaacttccgtgaagttgcttccgtccaaactcgcatcagtcctgttttcccatcaccgggtgaccgtcctgcaggccacacccaccctgcttcgccggtttggctcccagctgatcaaatcaacagttctgtctgcaacgacaagcttacgcgtcttggccctggggggggaagcgtttccctccctgaccgtgctaagaagttggcgtggcgagggaaataagacccaaatcttcaacgtctacggaattaccgaagtgtctagctgggccaccatctataggataccagagaagacactaaatagcacactgaaatgcgaactgcccgtgcagcttgggtttcctctgctgggaacagtggtggaagttagggacactaatggattcacaatccaggagggctcagggcaggtgttcctgggtggcaggaaccgcgtttgttttcttgacgacgaggtcacggtgccgcttggtactatgagagccactggcgattttgtgaccgtgaaagatggagagatttttttcctggggagaaaagactcgcagattaaacgacacggcaaaaggttgaacatcgagctggtccaacaagtggctgaggagctccagcaggtggagagctgtgcggtcacatggtacaaccaggaaaagctgatcctctttatggtgagtaaagacgctagtgtgaaagagtatatattcaaagaattgcaaaagtaccttcccagtcatgctgtacccgatgaacttgtgctgattgactccctgccatttacgtctcacggcaagattgacgtgagcgaactaaataaaatttatttgaattacataaacctcaagtcagagaataagctgtcagggaaagaggacctctgggagaagctgcaatacttatggaagtcaacattaaacctgccagaggatttactgcgtgtgcccgacgagagcctgttcttgaactctggtggcgacagtctgaagagcattcggctgctctctgaaatagagaaactggttggaactagcgtgcctggcttgcttgaaatcatcctgagttccagtatcctggaaatttacaaccatatcttgcagacagtggtccctgatgaggacgtaaccttccggaaatcctgcgctaccaagagaaagctgagcgacataaatcaggaggaagctagcggaaccagcctgcatcagaaagcaattatgacttttacgtgccataatgaaattaatgccttcgtggtgctgagcaggggtagtcagatcctttctctaaactccacaaggtttttaactaagctaggacattgcagttcagcgtgtccatcagattcagtttctcaaactaacattcaaaacttaaaaggtttgaacagcccagttttgattgggaagtcaaaggatccatcatgcgtggctaaggtctctgaagagggaaagccggccattggaactcagaagatggaacttcatgtccgctggaggtccgataccggcaagtgtgtggatgcgagtcccctcgtagtgatacctacttttgataagtctagtaccacggtatatatagggtctcattctcacagaatgaaagccgtcgacttttattctggcaaagtaaagtgggagcaaattctgggtgataggatcgagagctccgcctgcgtgtcgaagtgtgggaactttatcgtggtaggcctcgcagtgctctaccaatggacaaacttattcatcccggtgtatctgactataagagcaaagaacatcttctggtttccttag

SEQ ID NO: 108020 - DNA, 2526 bp, synthetic construct
  misc_feature 1..2526: note = Description of Artificial Sequence: Synthetic coding sequence
  source 1..2526: mol_type = other DNA
atgacactacaggagcttgtgcataaggctgcaagctgctacatggatcgtgtcgctgtgtgttttgacgagtgtaacaaccagctgcctgtatattatacatacaaaacagtggtgaatgctgctagtgagctgtccaacttcctgctacttcattgcgatttccagggtattcgagagatcgggctgtactgtcagccaggaatcgatttgccatcctggattttggggatattgcaagttcctgctgcgtacgtgccgatcgagccggactctcctccgagcctgagcacccacttcatgaaaaagtgtaatctcaagtacattctggtggagaaaaagcaaataaacaaattcaagtcctttcacgaaaccctgcttaactatgacacattcacagtagagcacaatgatctcgttctgtttaggctccactggaagaacactgaggtcaatctaatgcttaatgacggcaaagagaagtacgagaaggaaaaaattaagtcgatctcctctgaacatgtgaacgaggagaaggcggaagagcacatggatctgcggctcaaacattgcctggcttacgttctgcacaccagcggaaccacagggattcccaagatcgtgagagtcccacacaaatgtatcgtccccaacattcagcactttagagtacttttcgacattacacaggaagatgttctgtttctagcaagtccccttacctttgacccctccgtggtggagatctttctcgccctcagcagtggcgctagtttgttgatcgtgccaacgtctgtgaaacttttacccagtaaactagcctctgtgttgttttcacaccatcgtgtgacagtgctccaggccacaccgactttgctcaggcggtttggatcacagttaattaaaagcacagtgctgagtgctaccaccagcctccgcgtgttggcgctgggaggggaggcatttcctagtctcacagtgctccggtcctggcgtggagagggcaataagacgcagatttttaacgtttatggcatcacagaggtttcttcctgggccaccatttacaggatccccgaaaaaaccctgaatagcactttgaagtgtgagcttccagtccaactaggcttcccactgttgggaacggtcgtggaggttagagatacaaacgggttcacaattcaagaggggagcggacaggtgttcctgggcgggcggaatagagtctgtttcttggatgacgaggttaccgtaccattaggcactatgcgggccacaggggatttcgtgacggtaaaggacggggaaatcttttttctcggaaggaaagattcacaaattaaacggcatggcaaaagactaaacatcgagcttgttcagcaagttgccgaagagctgcagcaggtggaaagctgcgctgtgacatggtacaaccaggagaaacttatactttttatggtgagcaaagacgctagcgtcaaagagtacatcttcaaagagttacagaaatacctgccgtcccacgctgttcctgatgaattggtgttgatagattctctgcctttcacctcacacggcaaaatcgatgtatctgagctgaataaaatatatttaaattacatcaatctgaaatctgagaacaaattgtcgggcaaggaagacctttgggagaagctgcagtacctgtggaaatccactctcaacctgcccgaggatctgctgcgtgttcctgacgaatccctgttcctcaattccggaggcgacagcttgaagtccatcagactcctgagcgagattgaaaagctcgtaggcacgtcggttcccggcctcctggaaataatcttgtcttccagcatcctcgaaatttataaccatatcttgcagaccgtcgtgcccgacgaggatgtgacttttcgcaaatcttgcgccaccaaacggaaactgagtgacatcaatcaggaggaagcctctgggaccagcctgcatcagaaagctatcatgaccttcacatgccacaatgaaatcaatgcttttgttgtactgagccgggggagtcagatcctgtctctgaattcaacccgcttcctgactaagttagggcattgcagttcggcttgtcccagcgactccgtcagtcagacaaacattcaaaacttaaagggactgaattcacctgttcttatagggaagtcaaaagaccctagctgcgttgccaaagtgtccgaagaaggaaagcccgccatcggaacgcagaaaatggaactgcatgtgagatggcggtccgataccggtaaatgtgtagatgcatcaccattggttgtgattccaacgtttgataaaagctctacaactgtgtatatagggtcccattcccaccgaatgaaagctgttgatttctatagtggcaaagtgaaatgggaacagattttaggcgaccgcattgaatcaagcgcatgtgttagcaaatgtgggaacttcatcgtggtcgggaaattcctgaacttgcggtttgtggaattaaattag

SEQ ID NO: 108021 - DNA, 2997 bp, synthetic construct
  misc_feature 1..2997: note = Description of Artificial Sequence: Synthetic coding sequence
  source 1..2997: mol_type = other DNA
atgaagaagtgcaacctcaaatacattttagtggagaaaaaacagataaacaaattcaaatcattccatgaaacacttctgaattacgacacgtttaccgtggagcataatgacttggtcctcttcaggcttcactggaaaaacaccgaagtgaatcttatgctgaatgacggaaaggagaagtatgaaaaagagaagattaagagcatttcaagcgagcacgtgaacgaagagaaagccgaagaacacatggatctacgattgaagcactgcctcgcatatgtgctccatacaagtggcaccactggcattccgaaaatagtgcgagtaccccacaagtgtatcgtgccgaatattcagcacttccgcgtgctcttcgatattactcaggaggacgtgctctttctggctagccccctgacttttgatcctagcgttgtggagatttttctggccctcagctccggcgccagtctgcttatagtaccgacatcggtgaaactactgccctcaaagttggcctcagtcctgtttagtcaccaccgggtcactgtgctgcaggccactcccaccttgctgagaagattcgggagtcagttaattaaatcgactgtcctctcggctaccacctcactccgggtacttgccctagggggcgaagccttcccaagccttaccgttctgaggtcctggaggggggaggggaataaaacacagatcttcaatgtttacggaattacagaggtctcatcctgggcgactatatacaggattcctgagaaaacactcaacagtacccttaagtgcgagctcccggtgcagttagggttccccctcctgggtaccgttgtggaagtgagagacactaatgggtttacaatccaagaaggatcagggcaggtgtttttgggggggagaaatcgggtatgtttccttgacgacgaggtcactgtgccccttgggacaatgagggccaccggggatttcgtgaccgtgaaagacggggagatattctttctcggtagaaaggatagccagatcaaacgtcatggcaagaggctaaatattgaactcgtacagcaagttgccgaggagcttcagcaggtggaaagctgtgccgtgacatggtacaatcaggaaaaacttattctgttcatggtctccaaagatgccagtgtcaaagaatatatcttcaaggagcttcagaagtacctgccgtctcatgcagtcccagatgagcttgtgctgattgactcactgcctttcaccagccacggcaaaattgatgtttctgagctgaacaagatctatctgaactacatcaatctcaagtcagaaaataaactgagcggtaaagaggatttgtgggagaaactgcagtacttgtggaagagcacgttgaatctcccagaggacctgctccgcgttccagatgagtctctgtttctgaactctggcggagattcgcttaaatctataaggttgcttagcgagattgaaaagctggtgggcacaagcgtccccggactgcttgagattattttgtccagctctatcctggaaatctataatcatatattgcagacagtcgtccccgatgaagacgtcacatttcggaaatcatgtgccacaaaacgcaagctctcagatataaatcaggaggaggcctccgggacaagcctccaccagaaggccattatgacttttacctgtcacaacgaaatcaacgcattcgtggtgctgtctcgtggaagccaaatcctgtcactaaactcaaccaggttcctcacaaaattaggccattgtagttccgcttgtccctcggattctgtttcccagaccaatattcagaatctcaaggggttgaattcgcctgtgcttataggcaagtcaaaggatccctcatgtgtagccaaggtctcggaagagggaaagcctgccattggtactcaaaagatggagctgcacgttcgctggagaagcgatacgggaaaatgtgtggacgcatcccccctcgtggttatacccacttttgataagagcagtactactgtctatataggctctcacagtcacaggatgaaggcggtggatttctacagcggcaaggtgaagtgggaacagatcctgggcgaccggatcgagtcaagtgcctgcgtctcaaaatgcggaaacttcatcgtggtgggctgctacaacgggcttgtttacgtgctgaagagcaactctggcgagaagtactggatgttcactactgaggacgccgttaaatccagcgctacaatggaccccaccaccgggcttatttatattgggagccacgaccaacacgcttacgccctggacatctataggaaaaagtgtgtgtggaagtctaaatgtggaggcacggttttctctagcccatgcctaaatctgataccccaccacctatattttgcaacacttggcggactgctactggccgtcaatccagcaactggaaatgtcatctggaagcactcatgtggaaaaccgttgttctccagccctcagtgctgctcacaatatatttgtatcggctgcgtggatggcaacctgctgtgcttcacccattttggtgagcaggtctggcagttctccaccagtggccccatcttttctagcccctgtacctccccgagcgagcaaaagatcttcttcggctctcatgactgctttatctattgctgtaatatgaaaggccacttgcagtggaaattcgagaccacgtcgagagtgtatgccacgccatttgcttttcacaactataacggctctaacgaaatgctgctcgcagcggcaagcacggacggcaaagtgtggatcctggaatctcaaagtgggcagctgcagagcgtctacgaattgccaggagaagtcttcagttcacccgttgtgttggagtcgatgctaatcatcggctgccgcgataattatgtgtactgcctggacctgctagggggcaatcagaaatag

SEQ ID NO: 108022 - DNA, 2781 bp, synthetic construct
  misc_feature 1..2781: note = Description of Artificial Sequence: Synthetic coding sequence
  source 1..2781: mol_type = other DNA
atgctccaggtccaccgtactggattggggcgtttgggtgtgtcactgagtaaagggctgcatcacaaagccgtcttagctgtgcggcgggaagacgtgaatgcatgggagcggcgggctccgctcgctccaaagcacatcaagggcatcaccaatctgggctataaggtactcatccagccaagcaatcgccgcgctattcatgacaaagactacgtaaaagctggcggcatattgcaggaggatatcagcgaggcctgcctgattctgggggtcaagcggccgcctgaagaaaaacttatgtctcgaaagacgtatgctttttttagtcacactattaaggcacaggaagcaaacatgggactgctcgacgagattttgaagcaggagattagactcattgactacgagaaaatggtggatcataggggcgtccgagttgttgcttttgggcagtgggccggagtagctggtatgataaacatcttgcacggaatgggtcttcgtcttttagccctgggtcaccacactcctttcatgcatatcggcatggcccataactatcggaactcatctcaggctgtccaggcagtgcgcgatgccggatatgagatctctcttggcctcatgcccaagtctatcgggccgctgactttcgtgtttacgggcacaggaaacgtgtcaaagggagctcaggcaatttttaatgagctgccatgcgaatatgtggaaccacatgagctgaaagaagtctcccagactggcgacctgagaaaggtgtatggtacagtgcttagccgtcatcatcacttggttaggaagacggacgcagtgtatgaccccgctgaatacgacaaacacccggagaggtatatcagcagatttaatacagacattgctccgtacactacttgtttgattaacggtatatactgggaacagaacacacccagactccttactagacaggatgctcagagcttgctggcccccggcaagttctctcctgccggtgtggagggatgtcccgcactgccgcacaagctggtcgctatttgcgacatttcggccgacactgggggcagcattgaattcatgactgagtgcactaccatcgagcaccccttttgtatgtacgatgcggaccagcatattatccatgacagcgtggaaggaagtggtatcctgatgtgtagcatcgataatctgccagcacaactgccgatcgaggctaccgagtgcttcggagatatgctgtatccgtacgtagaggagatgatcttgtccgacgccacccaacccctggagtctcagaacttttcccctgttgtgcgcgacgccgttattacgtccaacgggacgttgccagacaaatacaaatatatccagactcttagggagagccgggaaagggcccagagtttatccatggggaccagaagaaaggtcttggttttaggctcagggtacatatctgagcccgtgttggagtatctgtcacgggatggtaacatagagatcacagtaggctccgacatgaagaatcaaatcgaacagcttggtaaaaaatataatatcaaccccgtgtcaatggacatctgcaaacaggaggaaaaactgggttttttggtcgccaaacaagatttggtcatatctttgctgccctacgtgctgcacccgcttgtagcaaaggcctgcatcacaaacaaagttaatatggtgaccgccagctacatcactccagcgctaaaggaacttgagaagagcgttgaagatgcaggcattacgataatcggcgaattggggctagatcctggactcgatcatatgctcgccatggagactatagacaaggctaaggaagttggggccacaattgaaagttatatttcgtactgtggtggcctgccggcgccagagcatagtaataatcctttaagatataagtttagctggtctcccgtaggcgtgctgatgaacgtgatgcaatccgccacatacctacttgatgggaaggtcgtgaacgtggccgggggcatctccttcctcgatgcagtgacatctatggattttttccccggcctgaacttagaggggtaccccaaccgggacagtactaagtacgccgaaatctatgggatttccagcgcccacaccctgctcaggggtaccctcagatacaagggctatatgaaggcactgaacggttttgttaaacttggccttataaaccgtgaagccctgccggccttccgccctgaggctaatcctttgacctggaaacagctgctttgcgatctggtcggcataagccccagttcggagcatgacgtcctgaaggaggctgtcctgaaaaagctgggtggcgataacacgcaactcgaagccgccgagtggctcggcctgctgggagatgagcaggtcccacaagccgagtctatcctcgatgccctcagtaagcatctggtgatgaagctgagctatgggccagaggagaaggatatgattgtgatgagagacagtttcgggattaggcatccatccgggcaccttgagcataagactatcgacttagtcgcttacggagatattaacgggttctcagcaatggccaaaactgttggtctgcctacggcaatggcagccaagatgctgctggacggagagattggcgccaaagggctgatggggccctttagcaaagagatttatggcccaatcctggagcgtatcaaagctgagggaattatatacactacccagagcactatcaaaccctag

SEQ ID NO: 108023 - DNA, 2781 bp, synthetic construct
  misc_feature 1..2781: note = Description of Artificial Sequence: Synthetic coding sequence
  source 1..2781: mol_type = other DNA
atgcttcaggtccaccgtactggactgggtcggctgggcgtctcactgagtaaggggttgcaccacaaagcagtgttggctgttcgcagagaggatgtcaatgcctgggaaaggcgcgctcctctggcgcctaagcatataaaggggattacaaacttgggttacaaagtactaattcaaccaagcaacagacgggcaattcacgacaaggactacgtcaaggccggtggcatcctgcaggaagatatctccgaggcttgcctgatcctaggtgtgaaacggcctccggaggagaaactgatgagcagaaaaacatatgcattctttagccacaccattaaggcgcaggaagcgaatatggggcttctcgacgaaatcctgaaacaggaaattcggctgatagattatgagaaaatggtcgaccataggggtgtgagggtggtggcctttggtcagtgggccggcgtggctggtatgattaatattctgcatggcatgggcttgcggctgctggccctgggacatcatacacctttcatgcatatcggaatggcccacaactacagaaattcaagtcaggctgtgcaggctgtccgggatgcagggtatgagatttccctcggtttgatgcccaagtcgatcggccctctaacatttgttttcaccggcactgggaatgtgagtaagggagcccaggcgatattcaacgagttgccgtgcgagtacgtggagcctcacgagctgaaggaagtgtcccagaccggggatttaagaaaagtctatggaactgtactctcgcgacaccaccatctggttaggaaaacagacgcagtctacgaccctgcagagtatgacaagcaccccgaaagatacatcagtaggttcaacaccgacattgccccctatactacctgtctcattaatggcatctactgggagcagaatacaccccgcttactgacccgacaggacgcacagtccctgctggctcccggaaagttctcgccggctggtgtggagggctgtccagctctgcctcacaagctggtcgcaatttgcgacattagtgccgatactgggggtagcatcgaattcatgaccgagtgtaccacgattgaacatcccttttgcatgtacgatgccgaccaacatatcatccatgactcagtggaaggatctggcatcctcatgtgctccatagacaacctgccggcccaactgccaatcgaggcgaccgagtgcttcggcgacatgctgtacccttatgtggaggagatgatcctgagtgatgcaactcaacccctggaaagccagaacttttcacctgtcgtgcgcgacgccgtgatcactagcaacggaacactgccagataaatacaagtacattcagacattaagagagtccagggagcgggcacaatcgctgtccatgggtacaaggcgcaaggtacttgtgctaggttccgggtacatttctgagcctgtgctggaatacctgtcaagagatggcaacatcgagatcaccgtgggctctgatatgaagaaccagatcgagcagttgggaaagaagtacaatattaatcctgtatctatggatatctgcaaacaggaagaaaaactgggctttctcgttgcaaaacaggacctcgtcatcagtttgctcccatacgttctgcatcctctggtagctaaagcatgtattacaaataaggtcaatatggtcaccgcatcctatatcacaccagccttgaaggaactggaaaagagcgtggaagacgccgggatcacaattataggagaacttggcctggaccccggtcttgatcatatgcttgccatggagactatagataaggccaaggaagtcggagcaaccatcgagtcctacatcagctattgcggaggcctgcctgcaccagaacattccaacaacccactgcgttataagttcagctggagcccggtgggagtccttatgaatgttatgcagtctgccacataccttctggacggcaaggtggtgaatgtagcaggggggatctctttcttagatgccgtaacaagtatggacttcttccctggattgaacctcgaggggtatcccaatcgcgattcgaccaagtatgcagagatctatggcatatcttctgcccacacactgctgcggggcaccctacgctataaaggctatatgaaggcccttaacggcttcgtcaagctggggctgatcaaccgtgaagctctccctgccttcaggcccgaggctaaccctctgacatggaagcaacttctttgcgatctggtgggtattagtccaagctccgagcacgatgtcctcaaggaggcagtgctgaagaagctcgggggagacaacacccagctggaagcagcagagtggctcggcctgctgggtgatgagcaggtgccccaggcagagtctatcctggatgccctcagtaagcaccttgtgatgaaactgtcatacggcccagaggagaaggatatgatcgtcatgcgcgactcgtttgggattcggcacccctccggacacctcgagcataaaaccatagacctcgtcgcttacggagatattaacgggttttccgctatggccaagactgttgggttgccaaccgcaatggccgctaagatgcttctggatggcgagatcggtgctaagggtttgatgggccctttttccaaagaaatttatggccctattctggagcgcatcaaggctgaaggaattatttacactacgcagagcactatcaagccgtag

SEQ ID NO: 108024 - DNA, 942 bp, synthetic construct
  misc_feature 1..942: note = Description of Artificial Sequence: Synthetic coding sequence
  source 1..942: mol_type = other DNA
atgcagccacagtctgttttacacagcggatacttccaccccctgctccgcgcttggcaaaccgccacgacaacactcaatgcgtctaacctaatttaccccattttcgtcacttatggagtgaagcgccttgaggagatgttgaggcccctggtggaggaagggttgcgttgcgtgttgatcttcggcgtgccgtccagagttcccaaggatgagcgcggttctgccgcagattctgaagagtctcccgctattgaagctatccaccttctaaggaagacgtttccaaatctgttggtcgcctgtgatgtttgtctgtgcccctatacgtcacacggccattgcgggctcttgtccgagaatggagcctttagagcggaagagtctaggcagcggctggccgaggtcgcgttggcatatgccaaggccgggtgccaagtggtggcgccaagtgatatgatggatgggagagtcgaagccattaaagaagctctgatggctcacggtctgggtaaccgggtgagtgttatgtcctactcagccaaattcgccagctgtttctacgggccttttagggatgccgctaagtcctctcccgccttcggggatcggcgatgttatcagcttcctccgggggcgcggggcctggcactgcgcgccgtggacagggacgtccgagaaggggcggacatgctgatggttaaaccaggcatgccttatctggacatagttagagaggtcaaagataaacacccagacttgcccttagctgtttaccacgtgtccggcgaattcgccatgctatggcacggggctcaggctggagcgtttgacctgaaggccgcagtacttgaggctatgacagccttccggcgggccggagcggatattataattacatattataccccccaactgcttcagtggctgaaggaggaatag

SEQ ID NO: 108025 - DNA, 993 bp, synthetic construct
  misc_feature 1..993: note = Description of Artificial Sequence: Synthetic coding sequence
  source 1..993: mol_type = other DNA
atgcaaccccagtctgtgctgcactctggctactttcatcctcttctccgagcatggcagacagctaccacaacgttgaatgccagtaatcttatctaccctatcttcgtaacggacgtgcccgatgacattcaacctatcaccagtctgccaggtgtggctcgatatggcgtcaagaggctggaagaaatgctgcgcccgttggtggaggagggcctgcgatgtgtcctcatcttcggagtacctagtagagtgcctaaggatgaacgagggtccgccgctgatagcgaagaatcgccagctatcgaagccattcacctgctgaggaagacctttccgaacttgctggttgcttgtgacgtatgtttgtgtccctatacttctcacgggcattgcggcttgctttcggaaaatggcgctttccgggcggaagagagcaggcagcgattggccgaggttgcactagcatacgctaaagccggatgtcaggtcgtagcaccatccgacatgatggacggccgcgtcgaggccatcaaggaagctctgatggcgcatggcttggggaaccgggtgagtgtgatgagctactccgctaaatttgcaagctgtttctatggcccattcagggatgccgcgaagtcatcccctgctttcggagacaggaggtgctatcaattgcctccaggagctcgaggcctggcccttcgagctgtagatcgggatgtccgcgagggggccgacatgctgatggtgaaacctggaatgccgtaccttgatatcgtgagggaagtgaaagacaaacatcctgacctccctttggctgtatatcacgtgagtggcgagtttgccatgctttggcacggagcccaggcaggcgcttttgacctgaaggcggcagtactggaggccatgaccgcatttcgcagggctggtgcggatatcataatcacctattacacaccccaactattgcagtggctgaaagaagaatag

SEQ ID NO: 108026 - DNA, 45 bp, synthetic construct
  misc_feature 1..45: note = Description of Artificial Sequence: Synthetic coding sequence
  source 1..45: mol_type = other DNA
atgcccctgtgccctttagcccacgcgatgcaaccacagagctag

SEQ ID NO: 108027 - DNA, 363 bp, synthetic construct
  misc_feature 1..363: note = Description of Artificial Sequence: Synthetic coding sequence
  source 1..363: mol_type = other DNA
atgcccctgtgtcccctcgctcatgcaatgcagccccagagtgtgttgcattctggatactttcatccccttttaagagcctggcagaccgctacaacaaccctcaacgcctctaacctcatctatcccatcttcgtaacggatgttcccgatgatattcagcctatcaccagcctgcctggagtggctcggtatggagtgaaaaggctggaggaaatgttgagacctttagtggaggagggacttcggtgcgttttgattttcggcgtgccttcaagggttccgaaagacgagcggggaagcgccgcagattcagaggagtcacccgcaattgaagctatacatctcctgcgtaaaacgtag

SEQ ID NO: 108028 - DNA, 180 bp, synthetic construct
  misc_feature 1..180: note = Description of Artificial Sequence: Synthetic coding sequence
  source 1..180: mol_type = other DNA
atgcctctgtgtcctcttgcgcacgccatgcaaccccaatctgttcttcatagcggttatttccatcctctcttaagggcctggcagactgccactacgaccctgaatgccagcaacctgatataccccattttcgtgacggatgtaccggacgatattcaaccaataacatccctatag

SEQ ID NO: 108029 - DNA, 1923 bp, synthetic construct
  misc_feature 1..1923: note = Description of Artificial Sequence: Synthetic coding sequence
  source 1..1923: mol_type = other DNA
atggagtcggtggtgcgccgctgcccatttctttccagggtgcctcaggcatttctgcagaaggccggaaaatcccttctgttctatgctcagaattgtccaaaaatgatggaagttggcgcaaaacccgctccccgggcgcttagcaccgctgccgtacattaccaacagataaaagagacccctcctgcttccgagaaagacaagacggctaaggctaaggttcagcagacgcctgatggctcacagcagtctcccgacggaacccagctgccatccggccaccccctgccagcgaccagccaaggcacggctagcaaatgccccttcctggccgctcagatgaatcagcggggctccagcgtgttttgcaaagctagtttagaactgcaggaagacgttcaagaaatgaatgccgtgcgtaaggaggtggccgagacaagcgcagggccttccgtggtcagtgttaagacagatggcggagatccctcaggactgctgaagaactttcaggacatcatgcagaaacagagacctgagcgcgtcagccatctgctgcaggacaatctccccaagagcgtaagtaccttccagtacgaccgatttttcgagaagaaaatcgacgaaaagaaaaatgaccacacttacagggtgtttaagactgtcaaccgcagagctcacatttttccaatggctgacgattattctgactccctcatcacgaagaagcaggtgtctgtgtggtgtagtaatgactatctcgggatgtcccggcatcctcgggtgtgcggggcagtgatggataccctcaagcagcatggagctggcgccggcggcactcgcaacatctcagggacaagcaagttccacgtcgatctggagcgcgagcttgcagacctacatggcaaggacgccgcgctcttgtttagcagctgtttcgtcgccaatgactcaaccctctttactctcgcaaaaatgatgcctggatgcgaaatctactctgactcaggcaatcacgcttctatgatccagggtatcaggaattcaagggtaccgaaatatatatttaggcataatgacgtgtctcacctgcgcgagctcttgcaaagaagtgacccctccgtgcccaagatcgttgcttttgaaaccgtgcattctatggatggcgccgtgtgtccactcgaggagctctgtgatgtggcccacgagtttggcgcaatcacatttgttgacgaagtgcacgccgttgggctgtatggagctagaggcggcggtattggagatcgggatggagtgatgcctaaaatggacataatttcaggcaccctgggcaaagcctttggatgcgttgggggctacatcgccagtacctcttccctgattgacacagtgagaagttacgctgctggatttatctttacaacatctcttcccccaatgctgctggccggcgcgctggaatcagtacggattttaaagtctgctgaggggagagtgctgaggcggcaacaccagcggaatgtcaagctgatgcgccagatgctcatggatgccggtttgcctgttgtgcactgtccaagtcacatcattccagtacgtgttgctgatgccgccaaaaacactgaagtgtgtgacgagctcatgtccagacataacatttatgtacaggctattaattaccctacagttcccagaggcgaggaactccttaggatcgcccctaccccccaccacaccccccagatgatgaattatttcctcgagaacttactcgttacctggaagcaagttgggcttgagctgaagcctcatagcagtgccgagtgtaacttttgccgcagacccctccactttgaggtgatgtctgagcgcgaaaagtcttacttctccggattgtccaaactcgtttcggcccaagcatag

SEQ ID NO: 108030 - DNA, 1923 bp, synthetic construct
  misc_feature 1..1923: note = Description of Artificial Sequence: Synthetic coding sequence
  source 1..1923: mol_type = other DNA
atggaatctgtggtgcgccggtgtccattcctgtcacgagtgccccaggcctttctccagaaagcagggaagtccctgcttttttacgcccagaactgcccaaaaatgatggaagtgggtgccaaaccagcccctagagctctgtctactgcagcggttcactaccaacagattaaggagacccctcctgctagcgagaaggacaaaaccgctaaagccaaggtgcagcagacaccggatggatcccagcagagccccgacggcacacagctgccatccggccacccactgccagctaccagtcagggtacggcttcaaaatgccctttccttgccgctcaaatgaatcagcgaggatcctccgtgttctgtaaggcttccttagaactacaagaagacgtgcaggaaatgaatgctgtgagaaaagaagtggctgagacgtcggccggaccgtctgtagtgagcgtgaagaccgatggtggcgatcccagcggtctgctgaaaaacttccaagacataatgcagaaacagcgaccggagagggttagccaccttcttcaggataacctgcctaagtctgtgtccacctttcaatacgacaggtttttcgaaaaaaaaatcgacgagaagaagaacgaccacacatacagggtgtttaagactgtcaaccgcagggctcacatcttcccgatggccgacgactactcagactcgctcatcacaaaaaagcaggtatcagtctggtgctcgaacgattatctgggcatgagcaggcaccctagggtttgcggcgcggtcatggacacccttaagcaacacggcgcgggtgctgggggaaccaggaatattagtgggacctccaaatttcatgtagatctggagcgtgagttggccgatctccacgggaaggatgctgccctgctcttttcctcctgttttgttgctaatgattctaccctcttcaccttggctaaaatgatgccggggtgcgagatctatagcgatagcggaaaccatgcctcgatgatccagggtattagaaatagtagggtgcccaagtacatctttaggcataacgacgtcagtcatttgagggagttgctacagagaagtgacccttcggtgcccaaaatagtcgcctttgagaccgtccattccatggatggggctgtctgtcccctggaagagctctgtgatgtggcccacgagtttggagccattaccttcgtcgacgaagtacacgccgtcggactgtacggcgctaggggaggcggcatcggcgatcgcgatggcgtgatgcctaagatggatataattagtggcacgcttggcaaagccttcgggtgtgttggtggatacatcgcctccaccagttctttaatagacactgtgcggagttatgccgccgggttcatttttacaacctctttgccaccaatgctgcttgcaggcgcgttagagagtgtgaggatcttgaaaagcgctgaaggcagggtcctgcgccggcagcaccaaagaaacgtcaagctgatgcggcagatgctcatggatgctggcctaccggttgtgcattgcccctcccatatcatcccggtgcgagtggccgacgccgccaagaacacggaggtctgcgatgagctgatgagccgccacaacatctatgtccaggccataaattacccaaccgtgccacggggagaggaactgctgagaattgctccaaccccccatcacacgccacaaatgatgaattactttcttgagaacctcctagtgacatggaagcaagtcggccttgaattgaaacctcattctagtgccgagtgcaacttctgccgccggccattgcacttcgaggtgatgagcgaacgcgagaagagctacttctctgggctgagcaagctggttagtgctcaggcctag

SEQ ID NO: 108031 - DNA, 345 bp, synthetic construct
  misc_feature 1..345: note = Description of Artificial Sequence: Synthetic coding sequence
  source 1..345: mol_type = other DNA
atggagtcagtggttagacggtgtccctttctatctagggtccctcaagctttcttacagaaagcggggaaaagcctgttattctacgcccaaaactgcccgaagatgatggaagtcggcgccaagcctgccccacgcgcactgtctactgctgccgtccactatcaacagatcaaagagacacctcccgcttccgagaaggacaagactgccaaagcgaaggtgcagcaaacacctgacgggagccagcagtcccccgacggaacccagttccgcctcgacaccccttgtctcccccaagctagggcccttcaggccaatgcactgtcctggcagcaccgctag

SEQ ID NO: 108032 - DNA, 1923 bp, synthetic construct
  misc_feature 1..1923: note = Description of Artificial Sequence: Synthetic coding sequence
  source 1..1923: mol_type = other DNA
atggaatccgtcgtgcgccggtgcccctttctgtcccgagtgccccaagcctttctgcagaaggcaggaaagagtcttttgttctacgcccagaactgtcccaaaatgatggaggtcggcgccaaacccgcgcccagagcactctccacagcagcggtgcactatcagcaaatcaaagagactccacccgcctcagagaaagataaaactgctaaggcgaaggtccagcagacacccgacgggtcccagcaaagtcctgacgggacccagctgccgtctggccatcccctaccagccacttcacagggcaccgccagtaagtgtcccttcttagcagcccagatgaatcagcgaggaagctctgtgttctgtaaggcgagcttggagcttcaggaggacgttcaggagatgaacgctgtgcggaaagaggttgcggaaacatctgccggcccatcagttgtctcggtcaagaccgacggtggcgatccatctggactgctgaaaaactttcaagacattatgcagaaacagagaccagagagagtgtctcacctgctgcaggataacctacccaagtccgtaagtacctttcagtatgaccgcttcttcgaaaagaagattgacgaaaaaaagaatgatcacacctatagggtgtttaagactgtgaaccgtagggcacacatttttcctatggcagacgactactctgatagtctgatcacgaagaaacaagtgagtgtatggtgtagcaatgattacctaggtatgagcaggcatccgcgggtttgtggagccgtcatggataccctaaaacagcatggggcgggggccggcgggactcgcaacatctcaggcaccagcaagtttcacgttgatttagagagagaactggctgacctgcacggaaaggatgcagcccttctcttcagctcctgctttgtagctaacgatagcacactgttcacactggctaagatgatgcccgggtgcgagatctactcagattctggcaatcatgcctcaatgatccaggggatcagaaacagtcgcgtgcccaagtatatcttccggcacaatgacgtgtcgcaccttcgggaactcctgcagcgttccgacccttcagtgccaaagatcgtcgcctttgagacggtgcacagtatggatggagcagtgtgtccactggaggagctgtgtgatgtcgctcacgagtttggggccattacttttgtcgatgaggtccacgccgttgggttatacggagcaagggggggaggaatcggcgacagagacggagtgatgccaaagatggacattatttctgggaccctgggaaaagcgtttggatgcgtcgggggttacatagcatcaacatcttccctcattgataccgtgcggtcttacgccgccggtttcatctttactacttcactgcctccgatgctgctggctggtgccttggagagcgtccgcatcctcaagtcggccgagggacgggtgctccgaaggcaacatcaacgtaatgtgaagcttatgcgccagatgctgatggacgctggattacctgttgtgcattgcccgtcccatattattcctgtaagggtggccgacgccgctaaaaacacagaggtttgtgacgagcttatgtctaggcacaacatctatgttcaggctataaactatcccactgtcccaagaggggaggaactgctgcgaatcgcaccaacccctcatcacaccccccagatgatgaactacttcctggaaaaccttctcgttacgtggaagcaggtggggctagaactaaagccccactctagcgctgagtgcaatttctgccgacgccccctgcacttcgaagtcatgtcagagcgcgagaaaagttatttttctggcttgtcgaagctagtgtcagcccaggcctag

SEQ ID NO: 108033 - DNA, 1923 bp, synthetic construct
  misc_feature 1..1923: note = Description of Artificial Sequence: Synthetic coding sequence
  source 1..1923: mol_type = other DNA
atggagtcagtggtgcgccgatgccccttcctatctcgtgtcccccaggcttttcttcagaaagctggaaaatcactgctcttctatgctcagaactgtcccaaaatgatggaagttggcgctaaacccgcaccccgagccctctctacagctgccgtccactaccagcagataaaggagactcccccagcttcggagaaggataagactgcaaaggcaaaagtccaacagacacccgatggaagccagcagagccctgacggcacacagctgccctccggacatcctctgccagccacttcacagggtaccgcctcaaaatgcccgtttctggccgcccagatgaatcaacgcggctcctctgtattctgtaaggcctccctggaattgcaggaagatgttcaagaaatgaatgctgtacggaaggaggtggcagagactagcgcgggccctagtgtggtgtccgtgaagacggacgggggcgaccccagcggcctgttgaaaaactttcaggatattatgcagaagcagcggccggagagggtgtctcacctcctgcaggacaatctgcccaaatccgtgagtaccttccagtacgatcgcttcttcgaaaaaaagatagatgagaagaagaatgaccatacatatcgggttttcaagaccgtaaaccgtcgggcacacatatttcccatggccgatgattatagtgactctctgatcaccaaaaagcaggtgtctgtgtggtgctccaacgactaccttggcatgtctcgacatccacgggtgtgcggagccgtcatggacacattgaagcagcacggcgcaggtgccggtggaacccggaacattagtggaacttcgaagtttcatgtggatctggaaagagaacttgcggacctgcacgggaaggatgcggccctactcttcagcagctgttttgtggccaatgacagtaccctcttcaccctcgctaaaatgatgccaggttgcgagatctactcggatagtggcaatcacgcctctatgattcaagggattcgaaacagtagagtacccaaatatatattccgacacaacgacgtatctcaccttcgcgaactgctgcagagatcggatccttctgtgccgaaaatcgtggccttcgagacggtgcactccatggacggcgccgtgtgccctctcgaagaactgtgcgacgttgcccatgagttcggagctatcacatttgtcgatgaagtgcacgccgtgggcctgtacggagcccggggcgggggtatcggcgacagagatggcgtgatgcctaaaatggacatcatctctggcacccttggcaaggccttcgggtgtgtgggaggatacatcgcgtctacgagctctctaatcgacaccgtacggtcttatgcagctggtttcatcttcaccacctccttgcccccaatgctactagccggggctctcgaatccgtgagaatcctgaagtccgctgagggaagggtgctgcgccgacagcatcagagaaatgtgaagttaatgcgccaaatgctcatggacgccggacttcccgtggtgcactgtccttctcacatcattccagtgcgcgtggccgatgcagctaaaaacacggaagtgtgcgatgagcttatgtccagacataacatttatgtccaagccataaactatcccaccgttccgaggggagaggaactcctgagaatagcgccaacaccccaccataccccccagatgatgaactactttttggagaatctgctcgtgacctggaagcaggtggggctcgagctgaagccccacagttccgccgagtgcaacttttgtagaagacctctgcatttcgaagtgatgtcggagcgcgaaaagtcatacttttccgggttatcgaaactggtctcagcacaagcttag

SEQ ID NO: 108034 - DNA, 1764 bp, synthetic construct
  misc_feature 1..1764: note = Description of Artificial Sequence: Synthetic coding sequence
  source 1..1764: mol_type = other DNA
atggtgaccgccgcaatgctgctccagtgttgccccgtgcttgctaggggcccaaccagtctcctcggaaaagtggtcaagactcaccagtttttgttcgggattggtaggtgcccgatcctggcaacacagggacccaactgttcccagatccatttgaaagcgaccaaggcaggcggcgatagcccctcttgggccaaaggccactgcccgttcatgttgagtgaactccaggacggaaagagcaagattgttcagaaggctgctccggaagtacaggaggacgtcaaagccttcaagacggatttgccatcctctttggtctctgtatcgttgcggaagcctttcagtgggccacaggaacaggaacagataagtggcaaagtgactcacctcatccaaaataatatgccaggcaattacgtcttctcctacgatcagttcttccgcgacaaaattatggaaaaaaagcaggaccatacctatcgggtgttcaagaccgtgaacagatgggctgacgcgtatccatttgctcaacatttctctgaggctagcgtcgcatctaaagacgtaagcgtctggtgttccaatgattacctaggcatgagccggcaccctcaagtgcttcaggctacccaagagacccttcaacggcacggtgcaggagctggtggcacccggaacatttccggtacttcaaagttccacgtggaactggagcaggagctcgctgagctccatcagaaagatagcgctctgctgttcagctcttgcttcgtggcaaacgattctacgctgtttacactggccaagatcctcccaggctgtgaaatctacagcgacgcaggtaaccacgcaagcatgattcaaggcatcagaaacagtggggctgctaagttcgtgtttaggcataatgatcctgaccatctgaagaagctcctggaaaaatccaatccaaagattcccaagattgtagcattcgagactgtgcattccatggacggcgccatctgcccccttgaggaattgtgcgacgtctctcaccaatatggtgcactaacctttgtggacgaggttcatgcagtgggcctgtatggaagccgaggagcgggcattggcgagcgtgatgggatcatgcacaaaatcgatataatctccggtacacttggcaaggccttcggctgcgttggtgggtatattgcttccacgcgagatcttgtcgacatggttagatcttacgccgcgggtttcatcttcacaaccagcctgccacccatggtcctctctggggccctggaaagtgttcgactgttgaaaggtgaagaaggccaagccctgcgcagagcccaccagcgaaacgtaaagcacatgagacaactcctgatggatagagggctgcccgtgattccctgtccttcccacatcattcccattcgagtcggaaatgctgccttaaacagcaaactgtgcgacctgctgttatccaaacacgggatttacgttcaagctatcaactaccccacagttcctcgcggggaagagctgttaaggcttgctccatcaccgcatcactccccacagatgatggaagatttcgtggagaagttgttactcgcttggaccgctgtaggcctccctctgcaggatgtaagtgtcgctgcctgtaatttctgcaggaggccagtacatttcgaactgatgtccgagtgggaacggagttattttggcaatatgggcccacaatacgtcacaacctacgcatag

SEQ ID NO: 108035 - DNA, 1653 bp, synthetic construct
  misc_feature 1..1653: note = Description of Artificial Sequence: Synthetic coding sequence
  source 1..1653: mol_type = other DNA
atggtgactgctgcgatgctgctccagtgctgccctgtcctagccagagggccaacctccctgctgggaaaggtggtaaagacacaccagttcctatttggaatcgggcgttgtccaattctggccacccagggcccaaactgttcccagatacacttaaaggctaccaaagccggcggggatagtccttcctgggcaaagggacattgccctttcatgctgagcgagttacaggacggtaaaagtaagatcgtgcaaaaggcagctcctgaagtccaggaggatgtcaaagccttcaagaccggcaactacgtgttttcatatgatcagttcttccgcgacaagatcatggaaaaaaagcaagatcatacctatagggtcttcaaaactgtcaaccgctgggccgacgcttatccttttgctcagcatttctctgaggcttcagtggctagcaaagacgtttcagtctggtgctctaatgattatcttgggatgtcaaggcatccccaggttctccaggctactcaggagacactccagcgacatggggcaggggccggcggtacccggaatatttctggtaccagtaaatttcatgttgaactcgagcaagagcttgccgagttgcatcagaaagacagcgcactcctcttttccagttgcttcgtagccaacgactccaccctgtttacactggcaaaaatcctacccggctgtgagatctactcagacgccggaaatcacgcttcaatgatccagggcatccggaacagcggcgccgctaagttcgtgttcaggcacaatgatcccgaccatttaaagaaactgctcgagaaaagtaatcccaagattcccaaaatcgtagcgttcgagacagtccattctatggacggcgccatctgcccacttgaggaactttgtgacgtgagccatcagtacggggcgctaaccttcgtggacgaagttcacgcggtgggcttgtacgggtctagaggtgccggcatcggggaacgcgatgggatcatgcacaaaattgatatcatctcaggtactctggggaaggcattcggatgcgtgggcggatatatcgcctcaactagggacctcgtggatatggttaggtcctatgctgccggttttattttcaccacctcactgccccccatggtgctgtcaggagccctggagagcgtcagactgctcaaaggcgaggagggccaggcgctgaggagggctcaccagaggaatgtaaaacacatgcgccaactgctcatggaccgcggactgcccgtgatcccatgtcccagtcacattattccaatccgcgtagggaatgccgccttgaattccaagttgtgtgacctcctcctgtctaagcacgggatctacgtgcaagctatcaattacccaactgtgccacgtggagaggagcttctccgacttgccccatctcctcatcatagtccccaaatgatggaggacttcgtggagaaactgctactggcctggaccgcagtcggtctgcccctgcaggacgtctctgtagcagcatgtaatttctgcaggcgtccagtgcactttgagcttatgagcgaatgggagcgcagttacttcggaaacatgggaccccaatacgtgaccacatatgcctag

SEQ ID NO: 108036 - DNA, 1725 bp, synthetic construct
  misc_feature 1..1725: note = Description of Artificial Sequence: Synthetic coding sequence
  source 1..1725: mol_type = other DNA
atgagggggggggaggttgccctcggatggaacaagaagaagcgtctcttttgtgaagattttagattcaagatggtaaccgccgctatgctgctgcaatgctgccctgtcctggctcgaggcccgacgtcacttctgggcaaggtcgtgaaaacacatcagttcttattcggcatcggaagatgcccaatactggccactcagggacctaattgctcacagatacacctgaaggccaccaaggctggtggtgactcccccagctgggccaaagggcactgccccttcatgctgagcgaactgcaggacggaaaatccaagattgtccagaaagctgctcctgaagtgcaggaagatgtgaaagctttcaagaccggaaattacgtgtttagctacgatcagtttttcagggacaaaatcatggaaaaaaagcaggaccatacctatcgggtatttaagaccgtgaacagatgggcagatgcatacccgtttgctcaacacttctccgaggccagtgtagcgtctaaagacgtctctgtgtggtgttccaacgactatctgggcatgtcacggcacccgcaggtcctgcaagccacccaggaaaccttgcagaggcacggagcgggggccggcggtacccgaaatattagtggtacttccaagttccatgtggaactcgagcaggagctggccgagctgcatcagaaggatagcgcattgttgttctcctcatgtttcgttgccaatgattccactttattcaccctggctaagatactgccaggttgcgagatttatagtgacgctgggaatcatgcttcaatgattcagggaatccgaaattccggagccgctaaattcgtatttaggcataacgaccccgaccacctaaaaaagctattggagaaatcgaatccaaagataccgaaaatcgtggccttcgagactgtacattcaatggatggagctatctgccccctggaggagctgtgcgacgtctcacaccagtatggtgcattgacctttgtcgatgaagtgcacgcagtcggtctgtacgggtctcgtggggcggggatcggtgagagagatggcattatgcataagatagatatcatatccgggacgttaggtaaggcatttggctgcgtcggtggttacattgcttcaacacgggatcttgtggatatggtgagatcctatgccgcaggctttatctttactactagcctcccgcccatggtgttatccggcgccttggaaagcgtacggctcctaaagggagaggaaggccaggccctgcgcagagcacaccagcggaacgtaaagcacatgaggcagctactgatggacagagggctgcctgtcattccatgcccatcccacataatcccgattcgggtaggcaatgccgccttaaacagtaaactctgtgacctgcttctgagtaagcacggcatctatgttcaagcaataaactacccaactgtcccccggggagaggagctcttgaggctcgccccatcgccccatcacagtccgcagatgatggaggacttcgtcgagaaactcctgcttgcttggaccgccgtgggtctaccgctgcaagatgtgtctgtcgccgcctgcaatttctgccggcgacctgtccactttgaattaatgtcagagtgggaacgcagctattttggcaacatgggtcctcaatatgtgacaacctacgcatag

SEQ ID NO: 108037 - DNA, 669 bp, synthetic construct
  misc_feature 1..669: note = Description of Artificial Sequence: Synthetic coding sequence
  source 1..669: mol_type = other DNA
taacttagcttcgtcagaccccagtgtagagcaactgactctccctcctgggccaagggccattgccccttcatgctgtcagagctgcaggacggaaagtccaaaattgtgcagaaggctgcacccgaggttcaggaggacgtcaaggcttttaagaccgatttgccatcaagtctagtgagcgttagcctccggaagcctttttcaggccctcaagaacaagaacagatcagcggaaaagtaacccacctcatccaaaacaatatgcccggtaattacgtcttttcctatgaccagttttttcgggataagataatggagaagaaacaggatcacacttaccgagtgttcaagacagtgaaccgttgggctgacgcctatccgtttgcccaacatttcagtgaggcctccgtggcatccaaggatgtctcagtgtggtgttctaacgactatctcggcatgtcaaggcacccacaagtgctgcaggcgacacaagaaacgctccagaggcatggagccggcgccggaggcacgcggaacatctcaggaacatcaaagtttcacgtggaactggaacaggaactggccgaactgcaccaaaaggactctgccctgctgttttcctcctgctttgttgctaatgattcaactttgttcacactcgcctag

SEQ ID NO: 108038 - DNA, 1212 bp, synthetic construct
  misc_feature 1..1212: note = Description of Artificial Sequence: Synthetic coding sequence
  source 1..1212: mol_type = other DNA
atgcagagagcagtatccgtggttgctcgcttgggctttcggctccaggcctttcccccggcattatgcaggcccctgtcctgtgcacaggaagttctccgtcgcactcctctttacgacttccacttggcccatggagggaagatggtcgctttcgctggttggtctctgccggtgcagtacagggacagccatactgattcccatctacacacaaggcagcactgctcacttttcgacgtcagccatatgctgcagactaagatactgggctccgacagagtgaagctcatggagtcactcgtggtcggagatatcgctgaactgcggccaaatcagggcactttgtcactgttcactaacgaggctggtggtatcctggacgacctcatcgtgacgaatacctcagaagggcacctgtacgttgtgagtaatgcaggctgctgggaaaaggaccttgctctgatgcaggacaaagtgcgcgaactgcagaaccagggccgggacgtggggcttgaagtcctggataatgcgctcttagctttgcagggcccaacagccgcccaggtgcttcaggccggggtggctgatgatcttcggaagctccccttcatgacatccgccgtgatggaagtctttggcgtctccggttgtcgtgtaacgagatgcggctatacgggggaagacggagtggagatttctgttccggttgctggtgcagttcacctcgcaacagcaattttgaaaaaccctgaggtcaaattagccggactggcagcacgggatagcctacggctggaggcaggactgtgcttatatggtaatgacatagacgagcataccacaccagtggagggctcgctgtcttggaccctgggtaaaagacggagggccgcgatggattttcctggggccaaagtgatcgtgccgcagctcaaagggagggtgcagcgcaggcgcgttgggctgatgtgcgagggagcccccatgagggctcactcccccatcctcaatatggagggtaccaagatcggaacagtcacatcagggtgcccctctccttctctcaagaagaacgtcgccatggggtatgttccttgtgagtatagccggccggggaccatgctcctggtcgaggtgcgccgcaagcaacagatggcagtcgtgagcaaaatgccctttgtgcctaccaattactacacgctgaagtag

SEQ ID NO: 108039 - DNA, 1161 bp, synthetic construct
  misc_feature 1..1161: note = Description of Artificial Sequence: Synthetic coding sequence
  source 1..1161: mol_type = other DNA
atgcagcgggcggtgagcgtggtggctagactgggtttcagacttcaggctttccctcccgccctgtgtaggccattgtcgtgtgcacaagaagtactgagaagaactccactatatgactttcatctggcccatggaggcaagatggtagccttcgcaggctggagcttgcccgtgcaataccgagactcccatactgattctcatctgcacacaaggcaacactgtagcctgtttgatgtaagtcatatgttgcagaccaaaatcttgggatccgaccgggtgaaactcatggaaagtctcgtggtaggggatatagctgagctgaggcccaaccagggtaccttatcgctcttcaccaacgaagcggggggaatattagatgacttgatcgtgactaacacttccgagggccacctttacgtcgtctcaaacgccggttgttgggaaaaagatctggcgttaatgcaagataaggtgcgcgaactgcagaaccaaggaagagacgtgggtctggaagtccttgataacgctttgctggctttacagggccctaccgccgcccaggttcttcaggctggagtggctgatgacctaagaaaactgccatttatgacttcagccgtgatggaagtattcggggtttcgggttgccgcgtgaccaggtgtggatataccggcgaggatggcgttgaaatcagcgtgccagttgctggcgccgttcatctagccactgccatcctgaaaaaccccgaagtgaaactggccggcttagcagcaagggatagcctgaggcttgaagctggcctctgtctgtacggaaacgatatagacgagcataccactcccgtcgagggctccctgagttggacacttggcaagcgtaggcgggccgcaatggacttccctggcgctaaagtcattgtgcctcaacttaagggacgggtgcaaagacgaagagtcgggttgatgtgtgagggagcaccaatgagagcacacagccctatcctgaatatggagggcaccaagatcgggacagttaccagcggatgcccttctcctagcctgaagaagaatgtggccatgggctacgtgccttgcgaatatagccgccctggcacgatgctgttagttgagctgccctcaggcccttgcttttag

SEQ ID NO: 108040 - DNA, 1155 bp, synthetic construct
  misc_feature 1..1155: note = Description of Artificial Sequence: Synthetic coding sequence
  source 1..1155: mol_type = other DNA
tgagcggtgtctgtagtagcacgcctgggctttcggctgcaagcgttcccaccagccctgtgtaggcctctgtcctgtgctcaggaggtgctccgaagaaccccactttatgatttccatctggctcatggggggaagatggtggcttttgcagggtggtccctgcccgtgcaatatagggacagccacaccgatagccacctacacacccggcagcactgcagtttatttgatgtgtcacacatgctacagaccaaaatcttaggttccgaccgggtgaagttaatggaatccctggtagtgggagacatagcagagctcaggcccaaccaagggacattgtctctctttaccaatgaagccggtggcatcctggacgacctgatagtgactaacacttccgagggacatttatacgtggtaagcaacgctggatgttgggaaaaagacctggcgctgatgcaggataaagtgcgtgagctccagaatcaggggagggatgttggcctggaagttcttgacaacgcgctgttagcactgcagggaccaacggcggcgcaggtgcttcaggccggtgtggcagacgatctgcggaaattacccttcatgacctcggccgtaatggaggtgtttggggttagcggctgcagggtgacccggtgcgggtacaccggggaggacggtgtggaaatatcagtccccgtcgcaggggctgtgcacctggccacagccatcctgaagaacccagaggttaagttggctggcctggctgccagagattctttgcgtctagaggccggcttatgtctgtacggaaacgacattgatgagcatactacccctgtggaaggtagcttaagttggacgttggggaagagacgaagagccgccatggacttccctggtgccaaggttatagttccgcagttgaagggtcgggtccagcgacgacgggttggactgatgtgtgagggggcgccaatgagagctcactctccaatcctaaatatggaaggaacaaaaattggaaccgttaccagcggatgtcctagcccaagcttgaaaaaaaacgtggccatgggatatgttccctgcgaatacagtagaccaggtacaatgctactcgtcgaactgccttcgggcccatgcttttag

SEQ ID NO: 108041 - DNA, 1080 bp, synthetic construct
  misc_feature 1..1080: note = Description of Artificial Sequence: Synthetic coding sequence
  source 1..1080: mol_type = other DNA
atgcagcgcgccgtatccgtggtcgcccggttgggatttcgtcttcaagccttccccccagccctttgtcggccgctctcttgcgcacaggaggttttgcgccgcacccccctgtatgattttcatttggctcatgggggcaagatggtggccttcgccggttggtctttgcccgtgcagtatcgcgattcacacacagactcgcacctacatacacgccagcactgttctttgttcgatgtgagccacatgcttcagactaagatactgggctcagatcgagtgaagctgatggagtccttggtggtaggggacatcgctgaactgcgtcccaaccaagataaggtcagagaactgcagaatcagggaagagacgtgggcctcgaggtgctggacaatgcgttgctggcactgcaggggcccacagcggcgcaggtgcttcaggccggagtggccgacgatttacggaaactcccatttatgacaagcgctgttatggaagtatttggtgtttctgggtgcagggttacaaggtgcggctataccggagaggatggcgtggagatctctgtacctgtggcgggtgccgtgcatctggcgacggcaatcctgaagaaccccgaagtcaagctcgccgggctggccgcccgggactcccttagactggaggccgggctttgcctgtatggcaacgatattgacgagcacaccacccctgtcgagggaagcctgagttggactctgggcaaaagaaggcgagcagcaatggattttcccggggccaaagtgattgtgcctcagttgaagggtagggtgcaaagaaggcgagtcggcttgatgtgtgagggagctcctatgcgtgctcattctcctattctgaacatggagggcacaaaaattggaacagtgacaagtggctgcccctccccttcgctgaaaaagaacgttgccatgggttatgtcccttgtgagtactcaagaccaggcacgatgctgctggtagaggttcgtcgaaagcagcagatggcagtcgtgagtaaaatgccctttgtgccaactaactattacacactgaagtag

SEQ ID NO: 108042 - DNA, 1044 bp, synthetic construct
  misc_feature 1..1044: note = Description of Artificial Sequence: Synthetic coding sequence
  source 1..1044: mol_type = other DNA
atgcagagagcagtcagcgtcgtggcccgattgggctttcgcctacaggcatttccgccagccctttgtcgtcctctgtcatgcgctcagactaaaattctgggcagcgatcgagtcaagctgatggagagcctggtggtcggggacatcgcagagttgagacccaatcagggtacactcagcctgttcaccaatgaggcgggaggcattttagatgacctgatagtgaccaacacatccgaaggacacctttatgtggtctccaatgccggctgttgggaaaaggatctggccttaatgcaagacaaggttcgagagctccagaatcagggaagagacgttggacttgaagtgctggacaacgctcttttagccctccaaggccctaccgctgcccaggtgcttcaggctggggtcgcagacgacttgcgcaaactccctttcatgacatcggccgtgatggaggtcttcggggtcagtggatgtcgagtgacgagatgtggatacaccggtgaggacggtgtggagatctcagtgcccgtagctggggcggtccacctggccaccgctattctgaagaaccccgaggtgaaactggcgggtctggccgcccgagactccctacggctcgaagcaggcctatgcctgtacggcaacgatattgacgagcacacaactccagtcgagggaagcctgtcctggactttaggcaagcgcagacgggctgctatggactttccaggcgccaaagtgatcgtacctcaattgaagggtcgtgtacagaggcggagggtgggcttgatgtgcgagggtgccccaatgagagcccactcgccgatattaaacatggagggtactaagattggcacagtgacatccggctgcccaagcccatcattgaagaaaaacgtagccatgggatacgttccatgcgaatacagccggcccggaacgatgttgttggtggaagtccgacgaaagcaacagatggctgttgtgtccaagatgccttttgtaccaacaaattactatacattaaaatag

SEQ ID NO: 108043 - DNA, 921 bp, synthetic construct
  misc_feature 1..921: note = Description of Artificial Sequence: Synthetic coding sequence
  source 1..921: mol_type = other DNA
atggagtccttggtggttggggacatcgccgagctgcgtccaaatcagggcactttgtctctctttacgaacgaagctggaggcatcctggacgacttaattgtgacgaacactagcgaaggccatctgtacgttgtcagtaatgcagggtgctgggagaaggacctcgccctgatgcaagacaaggtccgcgagcttcagaaccaaggccgcgacgtggggttagaagtactggacaatgcactcttggcgctgcagggacccaccgccgcacaggtgctacaagccggggtggccgacgacctgcgtaaactgccctttatgacctccgccgtaatggaagtgtttggcgtctctggctgtcgggtcacacggtgcgggtatactggtgaggatggagtggagatctcagtgcccgtggctggcgcagtccacctggcgactgcaatcctgaagaaccctgaggttaagttagcagggctggcggcccgagatagtctcagactcgaagccggtctttgtctttacggcaatgacatcgacgaacataccacaccagtcgagggctccctctcatggaccttgggcaaaagacgcagagctgctatggattttcctggagccaaagtgattgttccccagttgaaggggcgcgtgcagaggcgaagggtggggctaatgtgcgaaggagctcctatgcgagcacatagccccatcttgaatatggagggaacaaagatcggcactgtgacatccgggtgtccctccccctcccttaaaaagaacgtggccatgggctacgtcccctgcgaatactctcgacccggtaccatgctgttggttgaggtaagaaggaagcagcagatggccgtggttagtaagatgccattcgtcccaactaactactataccctcaagtag

SEQ ID NO: 108044 - DNA, 2760 bp, synthetic construct
  misc_feature 1..2760: note = Description of Artificial Sequence: Synthetic coding sequence
  source 1..2760: mol_type = other DNA
atgtggctagccgctgctgcaccgtcactagcgcgaaggttacttttcctgggacctccgccgcctcccctactgttacttgttttcagccggagtagccgcagacgtctgcactcacttggtctagcagcaatgcccgagaaacggcccttcgagcgccttcccgcagatgtcagtccgattaattacagcctctgcctgaagcccgaccttctcgacttcaccttcgaaggtaagttggaggccgccgcccaggtacggcaggcaaccaaccaaattgtgatgaactgtgccgatattgatatcattaccgcgagttacgcccctgagggggatgaggagatccacgctacaggctttaactaccagaacgaagacgaaaaggtgacactgtcattcccaagcaccctacagaccggtaccggcacgctgaaaatcgacttcgtgggtgaattgaatgacaaaatgaagggattctaccgcagcaagtatactactccttcaggcgaggttcgatacgctgccgtcacacagttcgaagctacagacgcaagaagagcttttccttgctgggatgaacctgccatcaaagctacatttgacattagtttggttgttccaaaggatagagtcgcattatccaatatgaatgtgattgatagaaagccctatccggatgacgagaacttggttgaagtcaaatttgctcgaacgcctgtgatgagtacctatctcgtcgccttcgtggttggagaatacgacttcgtggagacccggagtaaggacggtgtgtgtgtccgggtgtacacccctgtgggaaaagcagaacaaggtaagtttgccctcgaagtagctgcaaagacccttcccttttacaaagattacttcaatgtgccgtatccccttcccaagatcgatctgatcgccatagctgatttcgccgccggcgctatggagaattgggggttagtgacttacagagagactgccctgcttatagacccgaaaaatagctgtagtagttctagacagtgggtcgcccttgtggtggggcatgagctggctcaccagtggtttggcaatcttgtgaccatggagtggtggacacacctgtggctgaacgaaggctttgccagttggatcgagtacttatgtgtagaccactgcttccctgaatatgatatctggactcagttcgtttctgccgattatacccgggcccaagagctggatgcccttgataatagccatcctattgaggtgagcgttggacacccctctgaagtggatgaaatatttgatgctatatcatacagcaaaggtgccagcgtgatcagaatgttgcatgactatatcggagacaaggattttaagaagggaatgaacatgtacttgaccaagtttcagcagaagaacgctgccacagaggatctgtgggagtcacttgaaaacgcctccgggaaacccattgcagcagtcatgaacacttggactaagcagatgggattcccactaatttatgtagaggctgagcaggttgaggacgacagattattgagactgtcacagaaaaagttctgtgccgggggaagctacgtaggggaggactgccctcagtggatggtgccgatcaccatatccacttctgaggacccaaatcaggctaagttgaagatactgatggacaagccagagatgaatgtggttttaaaaaatgtgaagccggatcagtgggtaaagcttaatttaggaaccgtgggattttatagaacccagtactccagcgccatgctcgaatccttactgccagggatcagggacttaagtctcccaccggtggatcgactgggcttacagaacgacttattctctctggccagggcgggaataattagcactgttgaggtcctgaaggtgatggaagcctttgtaaacgaacctaactacacagtgtggagcgacctatcttgcaacctaggcattctgagcacattgttgagtcacacggacttttatgaggagattcaagaattcgttaaggatgtattctctccgatcggcgagcgccttggctgggaccccaaaccaggagaaggtcacctggacgcacttcttcgcggccttgtgctcggaaagcttggaaaagccggccacaaagccaccttagaggaggccagacgccgatttaaggatcacgtggaaggaaagcagatcctgagtgccgacctgcgcagccctgtgtaccttactgtattgaagcacggcgatggcaccacactggacatcatgctcaaattgcataaacaagctgatatgcaggaggagaaaaatcgcatcgagagggttcttggcgctactctattacctgatcttatccagaaggtcctgacttttgctttgtctgaagaagtacgcccacaagacaccgtaagtgtgattggcggggttgctggcggcagcaagcacgggagaaaagccgcctggaaattcatcaaggataactgggaagaactctacaatcgctatcagggaggctttctgatatcccggctgatcaagctgtcggtcgaaggctttgctgttgacaagatggcaggagaggtcaaggcctttttcgaatctcacccagctccatccgctgagagaacgatccagcaatgttgcgaaaatatccttctgaacgccgcatggctgaaacgggatgccgagtcaattcaccagtacctgctccagcgcaaggccagtcctccaactgtgtag

SEQ ID NO: 108045 - DNA, 1884 bp, synthetic construct
  misc_feature 1..1884: note = Description of Artificial Sequence: Synthetic coding sequence
  source 1..1884: mol_type = other DNA
atgtggctggccgcggcagcccccagcctagctaggaggctgctgttccttgggcctcccccgccacctttgctgcttctcgtttttagcaggagcagccgtcgcaggttacattcccttggactcgctgacgtcagccctattaactactctctgtgcttaaaaccagatctgctggatttcactttcgagggcaaactagaggcagccgcgcaggtgagacaggcgacaaatcagattgtaatgaattgcgccgatattgacataattaccgcatcctatgcaccagagggagacgaggagatccacgccacaggattcaattaccagaatgaagatgaaaaggtcacactgtctttcccatcaactcttcagacaggaaccgggaccctgaagattgattttgtgggcgagttgaacgacaaaatgaaaggcttctaccggtccaagtacactaccccaagtggcgaagtgcgatatgcagccgttacccagttcgaggctactgacgctaggcgagcattcccatgttgggatgagcctgctatcaaagcaacattcgacatttccctagtcgtgcccaaagacagggtggctctgtcaaacatgaatgtgatcgacagaaaaccataccctgacgacgaaaatctcgtcgaggtcaaattcgctagaaccccagtgatgagcacctacctggtagccttcgtagttggagagtacgatttcgtggagacacgaagcaaagatggcgtgtgcgttcgcgtgtataccccagtggggaaggcagagcagggaaaattcgctttagaggtggcggccaagactctgccattctacaaagactactttaatgtgccatatccactgccgaagattgacctcatcgctattgccgattttgcagctggggcaatggagaattgggggctcgtgacctacagggagaccgccctcctcatcgaccctaagaactcatgcagcagctctcgacagtgggtggctctggtggtaggccacgaactggctcaccaatggtttgggaacctggtaactatggagtggtggacacacctctggctcaatgagggctttgcaagctggatagaatatctgtgcgttgatcattgtttccccgagtatgacatctggacccaatttgtcagcgctgactataccagagcccaggagctggatgcactagataattctcatcctatagaggtctcggttggccatcctagcgaggtggatgagatttttgatgccataagttattctaagggggccagcgttattaggatgctgcacgactacatcggggataaggattttaagaaagggatgaacatgtatcttacaaaattccagcaaaaaaacgccgccactgaggatctgtgggagtcacttgaaaatgccagtggcaagcctatagccgctgtgatgaatacctggactaagcaaatgggtttccctttgatatacgtggaagcggaacaagtcgaggacgatcggctcctacggctgagtcagaagaagttctgcgccgggggatcctatgtaggggaagattgcccgcagtggatggtcccgataactatatccacgtctgaggaccccaatcaggcaaaactgaaaatcctcatggacaagcccgagatgaacgtggtgctgaagaacgtcaaacctgatcaatgggtcaaactgaaccttgggactgtgggcttctatcggacccaatactccagcgcaatgttagagtctctgctccctggtattcgcgatctgagtctgccgcctgtcgatcgactcggactgcagaacgatctgttcagtttgttcatcctgtgcgtgagggaagtgtcaggaaattgctgcagggcctag

SEQ ID NO: 108046 - DNA, 2520 bp, synthetic construct
  misc_feature 1..2520: note = Description of Artificial Sequence: Synthetic coding sequence
  source 1..2520: mol_type = other DNA
atgcccgagaagcggccttttgagagactccccgccgacgtcagtccaatcaactattccctctgtctcaagcctgacctcctggatttcaccttcgaaggaaagctggaagccgcagctcaggtcaggcaggcgacaaaccaaatcgtcatgaactgcgcagatatcgacatcattactgctagctatgcacccgaaggagatgaggaaattcacgccactggattcaactaccagaacgaggacgagaaagtaaccctatctttcccgtcgaccctgcagaccggtaccgggacattgaaaattgacttcgtaggggaactgaacgataagatgaaggggttttaccgctccaagtacactacccctagtggagaggttcgctacgctgccgtgactcaatttgagaatgtgatcgacaggaaaccatatccggatgacgagaatctcgtggaggtcaagtttgccagaacccctgtcatgtcgacatacctcgtggcctttgtggtgggggaatacgattttgttgagacaaggagcaaggacggcgtgtgtgtccgcgtatataccccagtcggaaaggctgaacagggaaaattcgcgttggaggttgcagccaagaccctcccattttacaaggactactttaacgtaccctacccgttgcctaaaatcgatttgatcgcgattgccgatttcgcagcgggggccatggaaaattgggggctggtgacataccgcgagactgccctattaatcgaccccaagaattcctgttcatcctccaggcagtgggtcgccctagtggtgggccacgaactagcacatcagtggttcggaaacctggtaacaatggagtggtggactcatctttggcttaatgagggctttgcttcatggatcgagtacctatgcgtggaccactgtttccctgagtacgacatttggacgcagtttgtctccgccgattatacaagggcgcaggagctggatgcactggataattcccatcccatagaagtgtccgtggggcaccccagtgaggtggatgagatttttgacgccatttcctattctaaaggcgctagtgtgatacggatgctgcatgattacataggcgataaggatttcaagaagggcatgaacatgtatttgacaaaattccagcagaaaaatgcggctaccgaagacctgtgggagtcgcttgaaaatgcctctggaaagcccatcgccgcagtgatgaacacatggacaaagcaaatggggttcccccttatttatgtagaagctgagcaagtcgaagacgataggctcctgcgtctctcccagaagaagttctgcgctgggggcagctatgtgggggaggactgccctcagtggatggtgcccattaccattagtacttcagaagaccccaatcaggccaagctcaagatcctgatggacaaacccgaaatgaacgttgtcctgaagaacgtgaagcctgaccagtgggttaagcttaatctcggcactgtggggttttatcggacccagtacagctcagctatgctagagagcctactgcccggaattagggacctctctttgccgcctgtcgacagattgggcctccagaacgacctgtttagtctcgcaagggccgggatcattagtaccgttgaggtcctgaaggtgatggaggcctttgtgaatgaacctaattacactgtctggtctgatctatcatgcaatctcgggatcctgagcactctcctgagccatactgatttttacgaggaaatccaggagtttgtcaaggatgtattttccccaatcggagaacgcttgggatgggaccctaagccaggtgaaggacatttggacgctctccttcgagggctggtgttagggaaactgggcaaagctgggcacaaagccacactcgaggaggcccggcggaggtttaaggatcatgtggaggggaaacaaatcttgtccgctgacctccgcagtcctgtgtatctaactgtccttaaacacggagatggcacgactctcgatattatgttgaagctacataaacaggccgatatgcaagaggagaagaacagaatcgagcgggttctgggcgccacgttgctgcctgacctcattcagaaggtcttaacgttcgctttgtccgaggaggtccgaccccaggatactgtgtccgtgattggtggagtggcggggggaagcaaacatgggcgcaaggccgcctggaagtttattaaagacaattgggaggaactctacaatcgctaccaaggcggcttcttgattagtcgactcattaagctgagcgtagagggtttcgctgtagataaaatggcaggtgaggtgaaggcattctttgagtctcatccagcaccatctgccgaacgtacaatccagcagtgctgtgaaaacattctgctcaacgccgcatggcttaaacgcgacgccgaatcaatacaccagtacctgctgcaacgcaaggccagcccgcctaccgtgtag

SEQ ID NO: 108047 - DNA, 1125 bp, synthetic construct
  misc_feature 1..1125: note = Description of Artificial Sequence: Synthetic coding sequence
  source 1..1125: mol_type = other DNA
atgcgatccccagctgtacccactccagctcgggggcagctcggagtcgctttcgtactgctgccccctcactctgagggagcccgcgtctttggcgctctgggccccattggcccctcgtcccctgggctgactctcggtggcctcgcggtttctgaacataggctatctaacaagctgctggcttggagtggcgtgttggagtggcaagaaaagcgccgcccatacagtgactctaccgcgaagcttaagaggactctcccatgtcaggcgtacgtgaaccagggagagaatcttgagacagaccagtggccccagaagctgataatgcagctcataccacagcagttgctgactacattgggccctttgtttagaaactcccaactggcccagttccacttcaccaatagagactgcgactcactgaagggactgtgcaggatcatgggcaatggttttgccggatgtatgctgtttcctcacatctccccctgtgaggtgcgtgtcctcatgcttctgtattcatcaaagaagaaaatcttcatgggactgattccttacgaccagtctggattcgtgagtgccattcggcaggtcattactaccagaaagcaagcggtcggacccgggggagtgaactctggcccagtccaaatagttaataacaagtttttagcttggagcggcgtcatggagtggcaggaaccccgacctgagccgaattcccgttcaaaaaggtggctgcctagccacgtatacgtgaatcaaggcgaaatcttgcgaacggagcagtggccccgcaaactgtatatgcagcttataccacaacagctgctgactacgctggttccgctgtttcgtaattcccggctggttcagttccattttacaaaagacttggaaacccttaaatccctctgtcgaattatggataacggctttcgacggaaaagcagcttagcaagctcccctatgacacgcgccacgctcagtaccgccagcggcgtgagtttgcccaccagtagcaggagctgctctgggacttggtccagatcaaattcaaacgagggctggggggggagcggttaccctggcttggggccatcacggtctcaccgatag

SEQ ID NO: 108048 - DNA, 594 bp, synthetic construct
  misc_feature 1..594: note = Description of Artificial Sequence: Synthetic coding sequence
  source 1..594: mol_type = other DNA
atgatgttccctcagagccgacacagtggctcctcccacctcccacagcagctcaagtttaccacctccgacagctgtgatcggatcaaggatgagtttcaactccttcaggctcagtaccactccctcaaacttgaatgcgataagctggcttccgagaaaagcgagatgcagcggcactacgtaatgtactatgagatgtcctacggactaaatatcgagatgcataaacaagctgagatcgtgaaaaggcttaatggcatttgtgcacaagtgctgccgtacctgtcccaggaacaccagcagcaggtgctcggggcgatcgagagggctaagcaagtgacagcccccgagctgaatagcataattcgacagcagcttcaggctcatcagctgtctcagttgcaggcattggctctgccacttacaccacttcccgtcggcctccagccaccctctctaccagccgtgtcagccggcacaggactactgagtctgtccgccttaggttcccaggctcatctgtctaaagaggataaaaatggccacgatggagatacacaccaggaagatgatggcgaaaaatctgactag

SEQ ID NO: 108049 - DNA, 1362 bp, synthetic construct
  misc_feature 1..1362: note = Description of Artificial Sequence: Synthetic coding sequence
  source 1..1362: mol_type = other DNA
atgggtgtgctggggcgggtgctgttgtggctgcagctctgtgccctgacgcaagccgtatccaaattgtgggtgcccaacacagatttcgatgttgctgccaactggtcacagaatcgaacaccatgtgcgggaggagccgtggagtttcctgcggataaaatggtttctgtgctggtgcaggaaggacacgcggtcagtgatatgctgctccccctagacggggaactggtgctggcgagcggagccggattcggcgtttccgatgtgggcagccatttggactgtggcgccggagagccagccgtctttcgtgactctgataggttttcctggcatgatccacatctgtggaggtctggggatgaggctccgggactctttttcgtggacgcagagcgggtgccgtgtcgccatgatgacgtgttttttcctccatctgcgagctttagagtcgggttgggccccggagcctctccagtgagagtgagatctatatccgccctcggccgaactttcacccgcgacgaggatttggcagtcttcctcgcttcgcgcgcaggtcgcttgaggtttcacgggcccggcgccctgagcgtggggcccgaggactgcgcagacccctctggctgcgtgtgtggcaatgccgaggctcagccatggatatgcgccgccttgctgcagccgttgggaggtaggtgcccccaagcagcctgccactctgccctgagacctcaaggacagtgctgcgacctctgtggggctgtggtcctgctgacacatggccccgcctttgacctcgaaagataccgggcaagaattctggatacatttctaggtttaccccagtatcatgggctgcaggtcgctgtttctaaagtgcctcggagttctagactgcgcgaggccgacacagagattcaggttgtgctggtcgagaatggtcccgaaaccgggggtgcaggccgtctggccagggccctgctggccgacgttgcagagaacggcgaggcgctcggagtgttagaagccactatgcgggagagtggggcccacgtctgggggtcctcagccgctggcctggcaggcggcgtggcggcggctgtgctgctcgcgctgctcgtgttgctcgttgcaccacccttgttgagacgagccgggaggcttaggtggagacgccacgaggctgccgccccagctggcgccccactgggttttcgcaacccagtttttgacgtgaccgcgtcagaagagcttcctttgccaaggaggctgtctctcgtccccaaagcagccgccgactctacctcacactcctatttcgtcaaccctctgtttgccggagcagaggctgaagcatag

SEQ ID NO: 108050 - DNA, 1962 bp, synthetic construct
  misc_feature 1..1962: note = Description of Artificial Sequence: Synthetic coding sequence
  source 1..1962: mol_type = other DNA
atggcagatattaagactggcatttttgctaagaatgtgcagaagcggctcaatcgcgcccaggagaaggtcctgcagaaactcggaaaggcggacgagactaaagacgagcaatttgaggaatacgtccagaactttaaacggcaggaggcggaaggcacgagacttcagcgggaactgagaggctacttagcggctatcaagggcatgcaagaagcttccatgaagctgaccgaatccctgcatgaggtgtacgagcctgattggtacggccgagaggacgttaaaatggtgggggagaagtgcgacgtgctctgggaagactttcaccagaagcttgtcgacggaagtctgttgacccttgacacgtaccttggtcagtttccggacattaagaacagaattgctaaaaggtctagaaagctcgttgattacgattccgcacggcatcacctggaggccctgcagtcctccaaaagaaaggatgagtctaggatatcaaaagctgaggaggaattccagaaagcgcagaaggtctttgaagaatttaacgtcgacctgcaggaagagttaccgtcattgtggagcagaagagtaggcttttatgtgaacacattcaagaacgttagctctcttgaggccaagtttcacaaagaaattgcagttctgtgtcacaagttgtatgaagtgatgacaaaactgggggatcagcatgccgataaagccttcacaatccagggcgccccctctgatagtggcccattgcggatcgccaaaaccccatcccccccagaggaaccttccccacttccctcgccaactgcttcccctaatcacacgctggctccagcctctcctgccccagcgagacctaggtctcctagccagacacggaaaggtcccccagtaccacccctgccgaaagtaacccccactaaagagctgcaacaggaaaatattatatcctttttcgaggacaatttcgttcctgaaattagcgtcactacaccctctcaaaatgaggtgcctgaggtgaagaaagaggaaacgctgctcgatctggactttgacccatttaagcccgaagtaacgcccgccggcagcgcgggcgtgacacatagcccaatgtcacaaacattgccctgggatctgtggactacctccacggatttagtccaaccagcctccggggggagctttaatgggttcacgcagccacaggatacatcgctgtttacaatgcagaccgatcagtcaatgatctgcaatctaattatccctggagcagacgctgatgccgccgtcggcacgctcgtctcagcggctgagggggccccgggcgaagaagctgaggctgagaaagccaccgtccccgccggcgaaggcgtcagcctcgaagaggccaagataggaaccgaaacgacggaaggagccgaatcagcacagcctgaggccgaagagctggaagctacagtgccacaagagaaggtcatcccttctgtggtgattgagcccgccagtaaccatgaggaggaaggagaaaatgaaatcaccatcggcgccgaacctaaagagacaactgaggacgcagctccaccaggcccgaccagtgaaactcccgaactcgcaacggaacaaaaacccatccaggatcctcagcctactccctccgctccagcgatgggtgctgccgatcagctagccagtgcacgggaggcatctcaggagctgcctcctggttttttatacaaagtcgagactttgcacgattttgaggcagccaattctgacgagctgaccttacaacgcggcgatgtagtgctcgtggtgcccagtgactccgaggcagatcaagacgccggctggctcgtaggcgttaaagaatcagattggctgcaataccgcgatctggccacatacaaaggcctgttccctgaaaacttcactcgacgacttgactag

SEQ ID NO: 108051 - DNA, 1794 bp, synthetic construct
  misc_feature 1..1794: note = Description of Artificial Sequence: Synthetic coding sequence
  source 1..1794: mol_type = other DNA
atgacaaagctgggcgatcagcacgccgacaaagcatttaccatacagggggccccatcagatagtggccctctgcgtattgctaagaccccatctcctcccgaagagccttcccctctcccatcaccgacagcgtcgcccaatcataccctggcgccagcatccccggcacctgcacgtccacgatcgccatctcaaactcggaaggggccacctgtgcccccgctccccaaggtcacacctactaaggagctgcagcaggaaaatatcatctcgttcttcgaggacaattttgtgcctgaaatttctgtgactaccccttctcaaaatgaggtccccgaagtgaagaaagaggaaacgcttctcgaccttgacttcgaccctttcaaacccgaggtgacacctgccggatccgcaggtgtcacacactccccaatgtcacaaaccctcccatgggatctgtggactactcatacattcaatgacgacatcactgattctagtgagagtctgagcttatgcaacctcattatggaggagaccccagattccggcttagctgaggaaatccagaggtctcagaacgatattggtgccttcacttggggtccggatgcttccactgatcgggtaagccaggaagtcactagcggcgggtttggtgaggattccgcttgtccctccgaaactgagcaggacatccgtctgagtacatctcttctctctagcgccgactggccaacagttgcagaagagtctgagcatgctcctggcccagcattccctggcggcaacgagcaactgcctcccaaaccagcccctgaggcgggagtggctatcgctgcatgtgtcgagatggagcagctgtatgatccgctcgatagtgacatgccagcaatggacacagccggcctgttcaaggaaagccacgaagatatgaaaaaatctgacgaggaggaggagaagcaaaaaatggaggatagcctgtgggccggagtagaagcctgtcaaaaagcctctggtggtagcttcaacggctttacccagccgcaggatacctccctgttcactatgcagactgatcaaagtatgatttgcaacctcattattccaggcgcggacgctgacgctgcagtgggaaccctcgtctcggccgccgagggggcccccggagaggaggccgaagcagaaaaagctaccgtgcctgcaggtgagggggtgtccctggaagaagcaaagattggcaccgagaccaccgagggggccgagtcagcccagcccgaggctgaagagttggaggctactgtccctcaggaaaaggtgataccttccgtggtcatcgagcctgcctcaaatcatgaggaagaaggagaaaacgagatcacaatcggggcggagccaaaagagacaaccgaggacgccgcccctccagggcctacatctgaaacaccggagctggctaccgagcaaaagcccatccaggatccccagccaacaccaagcgctcccgccatgggagcagccgatcagctggctagcgcaagggaggccagccaagaactccccccagggtttctctacaaggtggaaaccctgcatgatttcgaagccgctaattcagatgaactgacactccagagaggggatgtggtgctggtggtgccttccgactccgaagcagaccaagatgccggctggctggtaggcgtcaaggaatctgattggcttcagtatagggatttggccacttataaggggctcttcccggagaattttactcggaggttggactag

SEQ ID NO: 108052 - DNA, 2088 bp, synthetic construct
  misc_feature 1..2088: note = Description of Artificial Sequence: Synthetic coding sequence
  source 1..2088: mol_type = other DNA
atggccgacataaagactggcatctttgccaagaatgtgcaaaagcgactgaatagagcccaggagaaagtgctacagaaactggggaaagctgacgaaacaaaggacgagcagttcgaggaatacgtgcaaaacttcaagcggcaggaagctgaaggaacacgactccaacgcgaactgcgaggatatctcgcagccatcaagggcatgcaagaggccagcatgaagcttaccgagtctctgcacgaggtttatgaaccggattggtatggccgtgaggacgtgaaaatggtgggagaaaagtgcgatgtcctttgggaggactttcatcaaaaactagtagatggctctttactcacattagacacctacctagggcagtttccggatatcaaaaaccggatcgctaagcggtcacgtaagttggtggattatgactccgctcgacaccacctggaggcactgcagagctcaaaaaggaaggacgagagccgaatctcaaaagcagaggaggagttccagaaggctcagaaagtgtttgaggagtttaacgtcgatctgcaggaggagctcccaagtttatggtcacggcgcgtggggttctatgttaatacctttaaaaacgtgagttccctcgaagctaagttccataaagagatagcggtgctgtgtcacaagctttatgaggtcatgacaaaactaggagaccagcacgctgacaaagctttcacgatccagggtgcccccagtgacagcggtcctttgaggattgcaaaaactccttccccacccgaggagccatctcccctgccgagccccaccgctagccccaaccataccctggcacctgctagccctgcccccgcccggcctagaagtccctcgcagacccggaaaggccctcccgttccccctttgcccaaggtgactccaaccaaggaactgcagcaggagaatattatctcattttttgaggataacttcgtgccggagataagcgtgactacaccctctcagaatgaagtgccagaagtgaaaaaggaggagactttgttggacctcgacttcgatcctttcaaaccagaggtaaccccagcaggaagcgccggggtaactcactcgcccatgtcccagaccttaccatgggatctgtggactacatcaacagatctggtacagccagcatccgggggcagctttaacggttttacgcagccccaggacacaagcctgtttacaatgcagacagaccagagcatgatttgtaatctagcggagtcggaacaggcaccccctaccgagccaaaagccgaagagcctctggctgctgtgacgcccgcggttgggctggacctgggtatggacactagagccgaggaacccgttgaggaggccgtgattatccctggtgcagatgctgatgcagcggttggcactttggtctccgctgccgagggtgcaccgggcgaagaagctgaggccgagaaggccacggttcccgccggtgagggcgtttccttagaggaggcgaaaataggaaccgagacaacagagggggcagagtctgcccagccagaggccgaagagctggaagcgaccgtgccccaagagaaggtcatcccatctgttgtgatagagcctgcctcaaatcacgaggaggagggagagaacgagataaccatcggtgccgagcctaaggaaactacggaggatgccgcacctcccggacccaccagtgaaacgcccgaactcgcaactgaacagaagccaatccaggacccacagcccacacccagtgctccagccatgggggccgcagaccagctggcgtcagcccgggaagcctcccaggaactgcctcccgggttcctctacaaggtggagacccttcacgacttcgaagccgccaactccgacgagttgacgcttcagagaggagacgtagtcctggtcgtccccagcgactctgaggcagaccaggatgcgggatggctcgttggcgttaaagaaagtgactggctccagtaccgagatctcgcgacctacaaaggtctttttccagagaacttcactcggcggctcgactag

SEQ ID NO: 108053 - DNA, 591 bp, synthetic construct
  misc_feature 1..591: note = Description of Artificial Sequence: Synthetic coding sequence
  source 1..591: mol_type = other DNA
atggaagaaacccctgactctggattggcagaagagatccagcgaagtcagaatgacattggagctttcacttgggggccagatgcatccactgatagagttagccaggaagtcacttctggcggctttggggaagattctgcctgtccctcagaaaccgaacaggatatcagactcagcacttccttgctctcatccgctgactggccaaccgtcgccgaggaatctgaacatgcacctggccccgcatttcccggcggaaacgaacagctaccccccaaaccagcgccagaggcaggggtggctatcgccgcttgcgtcgaaatggagcaactctacgacccgctggacagtgacatgccagcaatggacaccgccggcctgttcaaggagtcccacgaagacatgaagaagagcgatgaagaagaggaaaaacagaagatggaggattccctttgggccggagttgaggcgtgtcaaaaagcttctggaggcagctttaacggatttacccagccacaggatacgtctctgtttacaatgcagactgatcagagtatgatctgtaacctggaaatcacagttaactag

SEQ ID NO: 108054 - DNA, 1962 bp, synthetic construct
  misc_feature 1..1962: note = Description of Artificial Sequence: Synthetic coding sequence
  source 1..1962: mol_type = other DNA
atggcagacatcaagaccggcatattcgctaagaacgtgcagaagagactcaaccgtgcacaggaaaaggtgctgcagaagctgggtaaggctgacgagaccaaagatgaacagtttgaggaatatgtgcaaaattttaaacggcaggaggctgagggcacccgtctccagagagagctccgcggctaccttgcggccatcaaagggatgcaggaagccagtatgaaattgaccgagtcattacacgaggtttatgaacccgactggtacggtcgcgaagacgttaaaatggtgggtgagaagtgcgatgtactgtgggaagattttcatcagaagctggtggacggatctttactcacattggacacatatcttggtcagttccccgacatcaagaaccgaatcgccaagagaagcaggaagctggttgactacgattcagccaggcaccacctcgaggcccttcagtctagcaagcggaaggatgagagccgaattagtaaggctgaagaggaattccaaaaggcccagaaggtttttgaggagttcaacgtcgacctgcaagaggaactgccatccctatggtcccggagagttggcttctacgtgaatacattcaaaaatgtgtccagcttggaagctaagttccataaggaaatagctgtcctgtgccataagctttacgaggttatgactaaactgggagatcaacacgccgacaaagcatttacgatacagggagcaccctctgactcgggcccccttagaattgccaaaactccttccccacccgaggagcctagtcccctgccatcaccaacggcaagccccaatcatacgttagctcccgcatctccagccccagcgcggccaaggagtccctctcagacacgcaaaggaccacctgttccacccctgccaaaggtaacccccaccaaggaactgcagcaggagaatattattagcttcttcgaggataatttcgtcccagaaatctcagtgacaaccccgagccagaacgaagtccctgaggtgaagaaggaggagactctgctggatttggactttgatcccttcaaaccagaggtcacaccggcaggttcagcaggagtcacgcactcgccaatgagccaaacacttccgtgggacctgtggaccgccggtgtggaggcctgtcagaaagcttcaggaggaagctttaatggattcacgcagcctcaggatacctccttgttcactatgcagaccgatcagagcatgatttgcaacttgattattccgggggctgacgctgacgccgcggtgggtaccctggtgtctgctgcagaaggggctccaggcgaggaggccgaggctgaaaaagctaccgtccctgctggagaaggggtcagcctcgaggaggcaaagatcgggacagaaacgaccgaaggagctgagagcgcccagccggaggcggaggagctggaggctacagtgccacaggagaaggtgatccccagcgtggttatcgagccagcgtccaatcatgaagaagagggcgagaatgaaattactattggtgctgaacccaaggagacaaccgaggatgccgcaccacccgggcccaccagtgaaacacccgaactggccaccgagcagaaacccatccaagatcctcaaccgactcccagcgcccccgcaatgggtgccgctgatcaactggcttccgctagggaggcaagtcaggaattgccaccgggatttctctataaggtggagacccttcacgatttcgaagccgccaacagcgacgaattaacactccagcgcggcgatgttgtgttagtggttcctagcgactccgaagcagatcaggacgccgggtggcttgttggagtgaaggagagcgactggctgcagtatagagatctcgcaacatataaagggctttttcctgagaacttcacccggcgacttgactag

SEQ ID NO: 108055 - DNA, 1158 bp, synthetic construct
  misc_feature 1..1158: note = Description of Artificial Sequence: Synthetic coding sequence
  source 1..1158: mol_type = other DNA
atggccgatataaagactgggatcttcgccaagaacgtgcagaagcgtctgaacagagctcaggaaaaggtgctgcagaagttgggtaaggcagacgaaacaaaggacgagcaattcgaggaatacgtccagaatttcaaaagacaggaagccgagggaaccagactgcagagagagctgcgtggatacctggcggccattaaagggatgcaggaagcctcaatgaagcttacagagtctttgcacgaagtttatgagccggattggtatggacgcgaggatgtgaagatggtcggagagaagtgtgatgtgctatgggaagactttcatcagaaactggtggacggctcattgttgaccctggatacatacctgggacagtttcctgacatcaaaaatcgtattgccaagagaagcagaaagctggtcgactacgatagtgccagacatcacctagaggcactgcagtcatccaaaagaaaagacgagagccgaataagcaaagccgaagaggaattccagaaggcccagaaggtgtttgaggagtttaacgtggacctgcaggaagaactgcccagcctatggtctagaagagttggcttctacgtaaatacattcaaaaacgtgagtagcctcgaggcgaagtttcataaggagatagctgtgctgtgccacaagctgtacgaagtgatgactaagttgggagatcaacacgcagacaaagcctttactatccaaggtgcccccaggcagtacctggacagcggtccactgagaatcgccaaaaccccttcacctcccgaagaacctagcccccttcctagtcccaccgcgtcccctaaccatacactggctcccgccagtcctgcacctgcacgcccacgctcacctagccagactaggaaagggcctcccgtgccgccccttccaaaggtgactcctactaaggagctacagcaggagaacattatttcattctttgaagataatttcgttcccgaaattagcgtgaccacacccagccagaacgaggtccccgaggtgaagaaagaagagactctgctcgatctggactttgatcccttcaagccggaggtgactcccgcaggaagtgcaggagtgactcactcaccaatgtctcagacggtgggatggtag

SEQ ID NO: 108056 - DNA, 759 bp, synthetic construct
  misc_feature 1..759: note = Description of Artificial Sequence: Synthetic coding sequence
  source 1..759: mol_type = other DNA
atgcgcgcccccctgcttcccccagctccagttgtccttagcttgctcattctgggaagtggacactacgccgccgggctcgacctgaacgacacctatagcggaaaacgagagcccttttcaggcgatcactccgcagatggcttcgaggtgacaagccgcagcgaaatgtcaagcgggtcggaaatctcccctgttagcgagatgccgagctcatctgaaccctcgtcaggcgctgactatgactattccgaggaatatgacaatgaaccccagatccccggatacattgttgacgattcagttcgggttgaacaggtcgtgaagccgcctcagaataaaactgagagcgaaaatacatcagataaacctaagcggaaaaagaaggggggcaaaaacggcaagaatcggaggaatcgaaagaagaagaacccatgtaatgccgagtttcagaatttctgcatccacggagagtgcaagtatattgagcatctcgaggccgtcacttgtaagtgccaacaggaatatttcggagaaaggtgtggcgagaaaagcatgaagacccatagcatgatcgactcttccctgtctaagatcgccctggctgccatcgctgccttcatgtcagccgtgatcctaacggcagttgccgtcattacagtccagctgagacgccagtatgtcagaaaatatgaaggcgaggcagaagaaagaaaaaagctccgccaggaaaacggcaacgtccatgcaatagcttag

SEQ ID NO: 108057 - DNA, 759 bp, synthetic construct
  misc_feature 1..759: note = Description of Artificial Sequence: Synthetic coding sequence
  source 1..759: mol_type = other DNA
atgagagcgcctcttttgccaccagcacctgttgtgttgagcctcctcatcctcggatctggacattatgctgcagggcttgatctcaacgacacatactcggggaagcgtgagccgtttagcggggatcactctgctgacggcttcgaggtgacctcgcggagcgaaatgtcaagcgggtccgaaatatctccggtcagtgagatgcctagctcgagcgaacctagtagcggcgccgattacgactattctgaggagtatgacaacgagcctcagatccccggatacatcgttgacgatagtgtacgagtggagcaggtcgtgaagcccccccagaacaagacagaaagcgagaatacctctgacaaaccaaagaggaaaaagaaaggtggtaaaaatgggaagaacaggaggaatcgcaaaaaaaagaatccctgtaatgcagagtttcagaatttctgcatccacggcgagtgtaagtatatagaacacctagaagctgtcacatgtaagtgccaacaagaatacttcggcgagcgatgcggagaaaaaagcatgaagacacactcaatgatcgattccagcttgagtaaaattgctctcgcagctatagccgcattcatgtccgccgtaatccttacagcagttgccgtgattaccgtgcagctgcgaaggcagtacgtcagaaagtacgagggagaggcggaagagcggaaaaagctcaggcaggaaaacgggaatgtgcatgccattgcctag

SEQ ID NO: 108058 - DNA, 1536 bp, synthetic construct
  misc_feature 1..1536: note = Description of Artificial Sequence: Synthetic coding sequence
  source 1..1536: mol_type = other DNA
atgaaactcttctggctgctgtttacaataggattttgttgggcgcagtacagcagtaatacacaacaaggccgtacctccattgtgcacctcttcgagtggcgctgggtggacattgcattagagtgtgagcgttatctagcaccaaagggcttcggaggcgtgcaggtaagtccaccaaatgaaaacgtggccatccacaacccatttagaccttggtgggagcgttatcagcccgtatcctacaaactctgtactagaagcggcaacgaggatgaatttcgaaacatggttacaaggtgcaataacgtcggggtgagaatatacgttgatgcagtcataaaccatatgtgtggcaacgctgtatcagctggtacatctagcacctgcggcagctacttcaatcctggtagccgggattttccggccgtgccctattccggttgggactttaacgatggtaaatgtaagactggttctggggacatcgagaattataatgatgccacgcaggtgagggattgtcggctatctggactgctcgatctggcattgggtaaggattacgtgcgctcaaagatcgcagaatacatgaaccatcttatcgatattggcgtggctggcttccgtatcgatgctagcaaacacatgtggcctggtgatatcaaggctatcctggataaactacataatctaaacagtaactggtttcctgaggggtccaagccattcatataccaggaggtaatagacctgggtggggagccaattaagtcctctgactactttggcaacgggagggtgaccgagtttaagtatggtgccaagctcggcacagttattcgaaagtggaatggtgagaaaatgagctatttgaaaaactggggtgaaggctgggggttcatgcccagcgaccgcgccctggtgttcgtcgacaaccatgacaatcagcgtggacatggagcagggggcgcatccattcttactttctgggacgccaggctgtacaagatggctgtcggcttcatgttggcacacccttacggttttactcgcgtgatgagtagttaccgctggcctcgttacttcgaaaatggaaaggatgtgaacgactgggttggaccgccaaatgacaatggagtgactaaggaggtaaccatcaatccagatacgacttgcgggaatgactgggtctgcgaacacaggtggcgtcagatacgaaatatggtaaatttccgcaatgtagtcgatggacagccatttaccaattggtacgacaatggtagcaaccaggtggcatttggccggggcaaccgtgggtttatcgtgttcaacaatgacgactggactttttccctcacactacagactggtttacccgctggcacgtactgtgacgttatctccggtgacaagatcaatggaaactgcaccgggatcaagatatatgtatccgacgacgggaaagctcatttctcaatctccaactctgcagaagatccctttattgcgatccatgcggagagtaaattgtag

SEQ ID NO: 108059 - DNA, 318 bp, synthetic construct
  misc_feature 1..318: note = Description of Artificial Sequence: Synthetic coding sequence
  source 1..318: mol_type = other DNA
atgaagctgttttggcttttgttcactatcgggttctgctgggctcagtacagctcaaacacccaacaggggagaacaagtatcgtgcatctgtttgaatggaggtgggtggacattgcactggagtgtgaaagatacctggcacccaaaggtttcggaggagtgcaggttagcccccctaatgagaatgtggccatccacaacccattccggccttggtgggaaagataccagcctgtatcatacaagctgtgcacacgaagtggaaacgaagacgagtttaggaatatggtgacccgatgcaataatgtgggatag

SEQ ID NO: 108060 - DNA, 681 bp, synthetic construct
  misc_feature 1..681: note = Description of Artificial Sequence: Synthetic coding sequence
  source 1..681: mol_type = other DNA
atgaaactcttctggctgcttttcactattggattctgctgggctcaatacagctctaacacacaacagggtcggacgagcattgtgcacctgttcgaatggaggtgggtagacatagcgttggagtgtgaacgctacctcgcccccaaaggcttcggcggcgtacaggtgagccctcccaacgagaacgtcgccatacacaatccatttcgcccgtggtgggagcggtatcagccagtgtcatacaaactgtgtactcgatcaggcaacgaagatgagttcagaaatatggtaactcgatgtaacaacgtgggagttcgcatctacgtggatgctgtcattaaccacatgtgcgggaatgctgtgtcggccggaaccagctcaacatgtgggtcctactttaaccccggcagcagggatttccctgctgtaccttattcagggtgggactttaacgacggaaagtgcaagacaggttcaggcgatatcgaaaattacaacgatgccacacaggttcgagattgtagactgagcggtctcctggacttggccctgggcaaagattatgtgcgctctaaaatcgctgagtacatgaaccatcttatcgatatcggcgtagccggctttaggatagatgcctcgaaacacatgtggcccggcgacatcaaagctatcctctag

SEQ ID NO: 108061 - DNA, 1536 bp, synthetic construct
  misc_feature 1..1536: note = Description of Artificial Sequence: Synthetic coding sequence
  source 1..1536: mol_type = other DNA
atgaaactgttttggttgcttttcacaatcggcttctgctgggcgcaatattcaagtaatacacaacaagggcgaacttccatcgtacatctcttcgaatggaggtgggttgacattgcgctggagtgcgaaagatacttggccccaaaaggctttgggggtgtgcaggtgtctccaccaaatgaaaacgtggccatccacaaccctttcaggccttggtgggagaggtatcagcccgtctcctataagctgtgtaccaggtcaggcaacgaagacgagttccgtaatatggtgaccaggtgtaacaatgtgggggttcgcatctatgtggatgcggtcatcaaccacatgtgtgggaatgccgtgagcgctgggacctctagcacttgcggaagctactttaaccctgggtctagagactttcctgccgtcccttatagcggatgggacttcaacgacggcaagtgcaaaactggcagcggcgatatcgaaaattacaacgatgcaacccaggtgcgagactgtagactatcgggcctgctcgatctcgccctgggcaaagactatgtgaggagcaaaatcgccgaatatatgaatcacctgattgatataggcgtcgcaggatttagaatcgatgcttctaaacacatgtggcctggggacatcaaagctatcctggacaagttacataacctcaattctaactggttccctgagggctccaagccttttatttatcaggaggtcatcgaccttggcggagagccgatcaaatcatcagattatttcgggaacggcagagtcactgagttcaaatacggcgcaaaactgggaaccgtgatccgtaagtggaatggagaaaaaatgagctacctcaagaactggggagagggctggggattcatgccaagcgatcgggcactggtgttcgtggacaatcatgacaatcagagggggcatggcgccggaggagccagcatcctaactttctgggatgccaggctctataagatggccgtcggcttcatgctggcccatccctacgggtttacccgcgtaatgagcagctaccgctggcccagatacttcgagaatggaaaagatgtgaatgactgggtggggccacccaacgataatggggtcactaaagaggtaacgataaaccctgacacgacgtgcggaaacgattgggtgtgtgagcacagatggcgacaaatacgaaatatggtgaatttccgaaatgtagtggacgggcagccattcactaattggtacgacaacgggtctaaccaggtcgcatttggcaggggaaaccggggcttcatcgtgttcaacaatgatgactggacctttagtttaactctacagacggggttgcctgctggaacttactgcgacgtgatcagcggcgacaaaataaacggaaactgtaccggcatcaagatctatgtgtcggatgatggcaaagcacactttagcatcagcaacagtgcagaggaccccttcattgccatacatgccgagtctaaattgtag

SEQ ID NO: 108062 - DNA, 1536 bp, synthetic construct
  misc_feature 1..1536: note = Description of Artificial Sequence: Synthetic coding sequence
  source 1..1536: mol_type = other DNA
atgaagctgttctggctcctctttactatagggttctgctgggctcaatactcctccaacactcaacagggccggacatccatcgtgcatcttttcgagtggaggtgggtggatatcgctcttgagtgtgaacgctatttagcacccaaaggtttcgggggcgtacaggtaagcccgcccaacgaaaacgtcgctatacacaacccattcagaccttggtgggagcgttaccagcccgtgtcatacaagctgtgcacgagatcggggaatgaagacgaattccgcaatatggtcacccgctgcaacaatgtaggagtgcgcatttatgtggacgctgtaatcaaccacatgtgtggaaatgctgtctccgctggaacctctagcacatgcggctcatattttaacccagggtccagagactttcccgcagttccttattccggttgggacttcaacgatggtaagtgcaaaacaggctccggtgacatcgagaactacaacgacgcaacccaagttagagattgccggctctctggtctgctagatctggccctcgggaaggattacgtgagaagtaaaatcgccgagtacatgaatcatttgatcgacattggtgttgcaggcttccggattgacgcttccaagcacatgtggcccggagatattaaggcaattttggataagttgcataatttaaacagcaactggttccccgagggttccaagccattcatctaccaagaggttatagatctgggcggagagccgatcaaaagctctgactatttcggaaacggacgggttacagagttcaagtatggagccaagcttggaacagtgatccgcaagtggaacggtgagaagatgagttacctgaaaaattggggggagggctggggctttatgccgtcagatagggctctggtgtttgtggataatcatgacaatcaaagagggcatggggcgggaggggcaagtatcctcaccttttgggacgctaggctttataagatggccgttgggtttatgttagcacacccttacgggtttaccagagtgatgtcatcttacaggtggcctcggtattttgagaacggtaaagacgtgaacgactgggttggccccccaaatgataacggagtgacaaaagaggtgacaatcaacccggacacgacctgcggaaatgactgggtttgtgaacaccgctggagacaaattcgcaacatggtcaacttcagaaatgtggttgatggacagccctttacaaactggtacgataacggcagcaaccaagtggccttcggacggggcaatagaggcttcatagtgtttaataacgatgactggaccttcagcctgacactgcagactgggcttcccgctgggacgtactgtgatgtgatctctggcgataagataaacggcaattgcacggggataaaaatctatgttagtgatgacggcaaggcccatttttctatctcaaattccgccgaggatcccttcattgcgatccatgctgagtccaagctgtag

SEQ ID NO: 108063 - DNA, 318 bp, synthetic construct
  misc_feature 1..318: note = Description of Artificial Sequence: Synthetic coding sequence
  source 1..318: mol_type = other DNA
atgaagctgttttggcttctatttacaatcggattctgttgggcacagtactcttccaatactcagcagggtcgcacatcaatagtgcaccttttcgaatggcggtgggtggatatcgcactagaatgcgagcgctatcttgccccgaagggatttggtggggtgcaggttagcccccctaacgaaaacgtcgcgattcataacccttttaggccctggtgggaacggtatcagcccgtgagttataagctgtgcacccggagcgggaacgaagatgagtttcggaacatggtaacccggtgcaacaacgtgggctag

SEQ ID NO: 108064 - DNA, 681 bp, synthetic construct
  misc_feature 1..681: note = Description of Artificial Sequence: Synthetic coding sequence
  source 1..681: mol_type = other DNA
atgaagctgttttggctgctctttacaattggcttctgttgggcccagtactcctctaatacgcagcaagggcggaccagcattgtgcacttattcgaatggcgctgggtcgacattgccttggagtgtgaacgctacctcgcccccaaaggttttggaggcgttcaagtctcaccccccaacgaaaatgtcgctatccataatcccttcagaccctggtgggagaggtatcagcccgtgagttataagctgtgcacccgctcaggcaacgaagatgaatttcggaatatggtgactagatgtaacaatgtcggagttcgtatctatgttgatgccgtcatcaaccacatgtgcggtaacgcagtatcggccgggacttctagcacttgcggatcctactttaaccccgggtcgcgagattttcccgccgtgccctatagtggatgggacttcaacgatggaaagtgcaaaacgggaagcggggacattgagaactataacgacgccactcaggtcagagactgtcggttgtctggtctgctcgacctcgcacttggcaaggactacgttaggtctaaaattgccgagtatatgaatcatctgattgacattggcgtcgctggattccggattgatgcctccaagcacatgtggccaggggacattaaggcaatcctctag

SEQ ID NO: 108065 - DNA, 1536 bp, synthetic construct
  misc_feature 1..1536: note = Description of Artificial Sequence: Synthetic coding sequence
  source 1..1536: mol_type = other DNA
atgaagctcttctggcttctttttaccataggcttttgctgggcgcagtacagtagtaacacacagcagggccgtacaagtattgtgcacctcttcgagtggaggtgggtcgacatcgctctggagtgtgaacggtatcttgccccgaagggttttggaggcgttcaggtgtcccctccgaacgaaaatgttgcgatccacaatcctttcaggccatggtgggagagataccagcccgttagttacaaactctgcacacgtagcggcaatgaggacgagttccgtaatatggtgacgcggtgcaataatgtaggcgttcgcatttacgtggacgcagtgattaaccatatgtgtggcaacgctgtatctgccggaacctcctcaacatgcggatcctatttcaatccagggagtcgggacttccccgcagttccatatagcggatgggacttcaacgatggcaagtgtaaaacagggtccggggatatcgaaaactacaatgacgcaacccaagtgagagactgcagactgagcggtttgctggatctagcccttgggaaggactacgtccgttcaaagatagccgagtacatgaaccaccttatcgacatcggtgttgccgggttccgaatcgatgcctcaaaacacatgtggcctggcgatataaaagctattctcgacaagctgcacaatcttaatagcaattggttcccagagggctccaagccgtttatctatcaggaagttattgatttggggggagagccaatcaagtccagtgactacttcgggaatggtcgcgtgaccgagttcaaatacggagccaaactgggtacggttatcagaaaatggaacggggaaaagatgtcctatctgaaaaattggggcgaaggttggggttttatgccgtctgatagggcactcgtgttcgtggataatcacgataaccaaagaggccatggcgcaggaggggccagtatactgacgttctgggacgcaagactgtacaagatggcagtaggtttcatgctggctcatccatacggctttacacgggtcatgtcctcctataggtggcccaggtattttgagaatgggaaagatgtgaatgactgggttggcccaccaaacgataacggggttaccaaagaagtaacgatcaatcccgacacaacctgtgggaacgactgggtgtgtgagcaccgatggcggcaaatcaggaatatggtgaacttcaggaacgtggtagacggtcagcccttcacaaactggtacgacaacggtagtaaccaagtcgcatttggcaggggcaaccgggggttcatagtcttcaataacgacgactggacattcagcctaactctgcaaaccggtctgcctgctggaacctattgcgatgtgatttctggcgacaaaataaacgggaattgtaccggcataaagatctatgtgagtgatgatggcaaagcacactttagtatttcgaattccgccgaggatccttttattgccatccacgctgagagtaagctatag

SEQ ID NO: 108066 - DNA, 1536 bp, synthetic construct
  misc_feature 1..1536: note = Description of Artificial Sequence: Synthetic coding sequence
  source 1..1536: mol_type = other DNA
atgaaattcttcctgcttttattcacaattggcttctgttgggctcaatattctcctaatactcagcaggggcggacgagtatcgtacacctgttcgagtggcgatgggtggacattgccctagagtgcgagcggtacctggcccctaaaggatttgggggggttcaggtgagtcctcccaacgagaatgtggccatatataacccctttcggccatggtgggaacgttatcagcccgtgagctacaaattgtgtactcgctccggaaacgaggatgaatttcggaatatggtgacacgttgcaacaacgtcggcgtacgtatttacgttgacgcagttatcaaccacatgtgcgggaacgccgtgtccgcaggcacctcttcaacctgcggatcttatttcaatcctgggagccgtgatttccccgccgtgccatacagtggctgggattttaatgacggcaagtgcaaaaccggatctggtgatatcgagaattacaacgatgcaactcaggtgagagactgcaggctgacaggcctcctcgacctggctcttgagaaggattacgttcgaagcaagatagccgaatatatgaatcacctgattgatatcggcgttgcagggttcaggttggacgcctctaagcatatgtggcctggcgatattaaggcgattctggacaaactgcataatctgaacagcaactggttccccgccgggtccaaacccttcatctatcaggaggtgattgatctgggaggcgaaccaatcaagagcagcgactactttgggaatggccgagtgacagagttcaagtacggagctaaactgggtaccgtaatccgtaaatggaacggggaaaagatgagctacctgaagaattggggcgagggctggggcttcgtcccatccgaccgcgccttggtttttgtggacaatcatgacaaccagcgcggccatggtgcgggaggcgctagcatcctgactttttgggacgcacgtctctataaaatggcagtgggcttcatgctagctcatccctacggatttactcgagtgatgagttcataccggtggccccggcagttccagaatgggaacgatgtgaacgactgggtgggccctcctaacaataacggagttatcaaagaggtcacaatcaatccagatactacgtgcgggaacgactgggtgtgtgaacataggtggcggcaaatcagaaatatggtaatcttccgcaacgtagtcgacggacagccattcactaactggtatgacaacggctcgaaccaggttgcattcggacgagggaatcggggcttcatcgtattcaataatgacgattggagtttctcattgacactccaaaccggccttcctgcaggcacatattgcgacgtgatctcaggggataagataaatggaaactgcaccggtatcaagatttacgttagcgatgacggaaaggcccacttctccatctccaatagtgccgaagaccccttcatcgctatccacgccgagagcaaactgtag

SEQ ID NO: 108067 - DNA, 1536 bp, synthetic construct
  misc_feature 1..1536: note = Description of Artificial Sequence: Synthetic coding sequence
  source 1..1536: mol_type = other DNA
atgaagttctttctcctgctattcacaataggtttctgctgggctcagtactcacctaatactcagcaggggagaacctctatcgtgcacttgtttgagtggaggtgggttgacatcgctctggaatgtgagcggtacttggcaccaaagggctttggcggggttcaggtgtctccacccaacgaaaacgtggcaatccacaatccgtttcgcccttggtgggagagataccaacctgtctcctataagttgtgcactagatcgggcaatgaagacgagttccgaaacatggtgaccaggtgcaacaatgttggcgtcagaatttatgtggatgcagtaatcaaccacatgagcgggaatgccgtatcggccggaacctcatctacgtgtgggagttattttaatccgggtagcagggacttccccgccgtcccatacagcgggtgggatttcaacgatggcaaatgtaaaactgggtccggagacattgagaattataacgacgccacccaagtgcgagattgtagactggtgggattgctagacctggcgctggaaaaggattacgtgagaagtaaaattgccgaatatatgaatcatctaatcgacatcggcgtcgccggcttcaggttggacgcttccaaacacatgtggccaggtgatatcaaggcgatcctggataaacttcacaaccttaacagtaactggtttcccgctgggagcaagccctttatttatcaggaggtgattgacctcggaggtgagccaatcaaatcctctgattattttggtaatggcagagtgacggaattcaagtacggagctaagctggggactgtgattagaaagtggaacggcgagaaaatgagctatctgaagaactggggagaaggttggggatttatgccctcggacagggccctggttttcgtcgacaaccacgataaccagcgcggccatggagccggaggagcttctattctcactttttgggacgcccggctgtataaaatggcagtcgggttcatgctggcccacccatacggctttacaagagtaatgagcagctatcgatggccaagacagttccagaatggcaacgacgtgaacgactgggtgggcccacccaacaataacggtgtcattaaagaggtgacaatcaaccctgacacaacgtgcggtaatgattgggtgtgcgaacataggtggagacagatcaggaacatggttaatttccgtaatgtggtagacggacagccatttacgaattggtacgacaacggctctaatcaggtcgcctttggaagaggaaatagggggttcattgtctttaacaacgacgactggacttttagtctgaccctccagacaggcctgcctgcgggaacgtactgtgacgtcatttccggagataagattaacggcaattgtacaggcattaagatttacgtgagcgacgatggtaaggcccacttctccattagcaacagcgcagaagacccctttattgccatccatgcggaaagcaagctgtag

SEQ ID NO: 108068 - DNA, 291 bp, synthetic construct
  misc_feature 1..291: note = Description of Artificial Sequence: Synthetic coding sequence
  source 1..291: mol_type = other DNA
atgaaattcttccttttgcttttcactataggattttgctgggctcagtacagccctaatacacagcaggggaggacaagcatcgttcatctctttgagtggaggtgggtagatatagccctggaatgtgagcgctacctcgcaccaaagggcttcggtggcgtgcaagttagccccccgaacgaaaatgtcgccatacacaatccattcaggccatggtgggaaaggtaccagcctgtgagctacaagttgtgcaccagatctggcaacgaagatgagttcaggaactag

SEQ ID NO: 108069 - DNA, 261 bp, synthetic construct
  misc_feature 1..261: note = Description of Artificial Sequence: Synthetic coding sequence
  source 1..261: mol_type = other DNA
atgaagttttttttactgctgttcacaattgggttctgctgggctcagtatagccctaacacacagcaggggcggacttctatagtgcacctttttgaatggcggtgggtcgacattgccctcgagtgcgaaagatacttggcacccaagggctttggcggggtgcaagtgtctcccccaaacgaaaacgtcgccatccacaacccgtttcgtccctggtgggagagatatcagcccgtgtcttacaaactatgtacctag

SEQ ID NO: 108070 - DNA, 2313 bp, synthetic construct
  misc_feature 1..2313: note = Description of Artificial Sequence: Synthetic coding sequence
  source 1..2313: mol_type = other DNA
atgcttccaggtcttgccctgctcttgctggcggcctggactgccagagccctggaagtcccaacagacggtaatgctgggctcctcgcagagcctcagatagccatgttttgcggacgactcaacatgcatatgaatgttcagaatggcaaatgggactccgacccaagtggaaccaagacatgtatcgatacaaaggagggaatactccagtattgccaggaagtctatcctgagctgcagatcacaaatgtagttgaggcgaatcagccagtcacgattcagaactggtgcaagcggggaagaaagcagtgcaagactcatccccattttgttattccatatcgctgccttgtcggtgagtttgtgagcgatgccttgttagtgcctgacaagtgtaagttcctgcaccaagagaggatggacgtttgtgaaacacatctgcattggcacaccgttgctaaggaaacctgtagtgagaagtcaacaaaccttcatgactacggtatgctcctcccatgtgggatcgacaaatttaggggagttgagtttgtgtgctgtccgctggccgaggagtctgataacgtcgattcagcagatgcagaagaggacgactctgacgtgtggtggggtggcgccgatactgattacgccgacggatctgaggataaggtggttgaggttgccgaagaagaagaggtagccgaagttgaagaagaggaggccgacgacgacgaggacgacgaagacggggacgaggtggaagaggaggcagaagagccttacgaggaagcgaccgagcgaaccacatctatcgcaacaaccacgaccaccaccacagaatcggtagaggaagtcgttagagaagtgtgttctgaacaggcagaaacggggccttgtcgcgccatgatctcccgttggtatttcgacgttactgagggtaagtgcgctccatttttttacgggggctgcggggggaatcggaacaatttcgataccgaggaatactgtatggctgtgtgcggctctgcaatgtcacaaagccttctgaaaacaacccaagaaccactggctcgcgatcctgtgaaattgccaaccaccgctgcaagcactcccgatgccgtggacaagtacctggaaactcccggggatgagaacgagcacgcccactttcagaaggctaaggaacgcctggaagcgaagcatagggaacggatgtctcaggtcatgagagagtgggaggaagctgaaaggcaggcaaagaacctgccaaaagctgacaagaaagctgtaatccagcactttcaggaaaaggtggagagcctggagcaggaggccgctaacgaacgtcaacagttggtggagacacacatggccagggtcgaagctatgttgaacgatcggcgacggttagcgcttgaaaactatatcactgccctacaggcggtgcccccacggcctagacacgtgtttaacatgctgaagaaatacgtacgggccgagcagaaagacaggcagcatacgctcaaacacttcgaacatgtgcggatggttgacccgaaaaaagccgcacaaatccggagccaagttatgacccacctacgcgttatctacgaaaggatgaaccaatcactttccctactgtataatgtacctgccgttgccgaggaaattcaggatgaggtcgacgaactgctacagaaggaacagaattactccgacgatgtattggctaatatgattagtgagccgcggatatcttatggtaatgacgcactgatgccatcccttacagagaccaaaacgaccgtggaactgctgcctgttaatggcgaattctccctggacgatctccagccttggcatagctttggggcggactcagtacccgcgaacactgagaatgaagtcgagcccgtagacgcccgcccagctgcagaccggggcctcacaacaagaccaggatccgggctcactaatatcaaaactgaagagatctccgaagtgaagatggacgccgaattccggcatgacagtgggtatgaggtgcaccaccaaaagcttgtgttcttcgcggaagacgtagggtctaataagggagcgataatagggctgatggttgggggagtggtgatcgcaaccgtgatcgtaatcacgctggtcatgctcaaaaagaaacagtacacttccattcaccacggcgtggtcgaggttgacgccgctgtgactccggaggagcgacacctttcaaagatgcaacagaacgggtacgagaaccccacctacaagttcttcgagcaaatgcaaaactag

SEQ ID NO: 108071 - DNA, 2088 bp, synthetic construct
  misc_feature 1..2088: note = Description of Artificial Sequence: Synthetic coding sequence
  source 1..2088: mol_type = other DNA
atgctgccaggccttgcgcttctcctcctcgcagcctggacagctagagccctggaggtgccaaccgacggcaacgcgggccttctggccgaaccacagatagcaatgttctgtggcaggctgaacatgcacatgaatgtgcaaaatggcaaatgggattcggacccaagtgggactaagacttgcattgacaccaaggagggaatactgcagtattgccaagaagtctatccagagctgcagattaccaacgtggtggaggctaaccagcccgtgactatacagaattggtgcaaacgtgggcggaaacagtgcaaaacccatccccattttgttataccttatcggtgtctggtcggagagtttgtttctgatgcacttttggtgccggataagtgcaagttcctccaccaggagcgcatggacgtgtgcgaaacacacctgcattggcataccgtagccaaagagacgtgttctgagaagagcacaaatctgcatgactacggaatgctcctcccttgtggtatcgataagtttcgcggagtggagtttgtgtgttgccccctggctgaggagagtgacaacgtggactctgctgacgcagaagaggacgactcagacgtctggtggggcggcgcggacaccgactatgcagacggatctgaagataaagtggtagaagtcgctgaggaagaagaggttgccgaggtggaagaggaggaagctgacgatgacgaagacgacgaagatggagacgaggtagaggaggaagcagaggaaccatatgaggaggcgaccgagcggactacatccatcgccacaactacgaccacaactaccgaatctgtggaggaggttgtccgcgttcccaccaccgccgcgagcacgcctgatgcagtggataagtatcttgaaactccaggcgacgagaacgagcacgctcactttcagaaagctaaagaaagactggaggcgaagcacagggaacggatgtcacaggtgatgcgcgagtgggaagaggctgagcgccaagcaaagaacttgccaaaagccgacaagaaagccgtaattcagcacttccaggaaaaagtcgaatccttagagcaggaagccgctaacgagagacagcagctagtggagactcatatggctagagttgaggccatgctcaacgatcggcgaagacttgcgctggagaattatattactgcactgcaggcagttccgcctagaccccgccacgtttttaatatgctcaaaaagtacgtgcgcgccgaacaaaaagaccgccagcacactctcaaacatttcgagcatgtgagaatggttgaccctaaaaaagctgcccagataagatcccaagtgatgacccacctgcgcgtgatctatgaaaggatgaatcagagccttagcctgttgtacaatgtcccagctgtcgccgaggagatccaggacgaggtggatgagctgctgcagaaggaacagaactatagcgacgacgtcctggccaacatgatttcggagccaagaatatcttatggcaatgatgccctgatgccctctctcacagagactaaaaccacagtggagttgttaccagtcaacggagagttctccttggacgatttacagccatggcatagctttggcgcagatagcgttccggccaataccgagaatgaggtcgaacccgtggacgcacgcccggctgcagatcggggcttgaccacaaggcctgggtcaggtctgacaaatatcaagaccgaggagatctctgaggtgaagatggacgccgagttccggcacgattcgggctatgaggtgcaccaccagaagttggtattttttgctgaggatgtggggtctaacaagggcgctattattggtctgatggtgggaggagttgtgatagccacagttatcgtaattactcttgtcatgctgaagaagaagcaatacacatccatacatcacggcgtggtcgaggtcgatgcagccgttacccccgaagagcggcacttgagtaagatgcagcagaacggatacgaaaacccaacttacaaattctttgaacagatgcagaactag

SEQ ID NO: 108072 - DNA, 1920 bp, synthetic construct
  misc_feature 1..1920: note = Description of Artificial Sequence: Synthetic coding sequence
  source 1..1920: mol_type = other DNA
atgctgccagggctggccctcctattgctcgccgcttggaccgccagggctttggaggtgtaccccgaactccagatcaccaacgtggtcgaggccaatcaacctgtgacaatacaaaattggtgtaagcgagggcggaaacagtgtaaaactcacccccactttgtaattccctacaggtgcctggtgggtgaatttgtgtccgacgcactcctggtgccagataagtgtaagtttcttcaccaagaaagaatggacgtctgcgaaacccacttgcattggcacacagtagccaaagaaacatgcagcgaaaaaagcaccaatctacacgactatgggatgctgttaccatgcggcattgataaattccggggggtcgagttcgtgtgttgcccattggccgaggaaagcgacaatgtggacagcgccgatgccgaagaggatgattccgacgtgtggtgggggggcgctgatacagactatgcagatgggtccgaggataaagttgtcgaggtcgcagaggaagaggaggttgcggaagtagaggaagaggaagcagacgatgatgaagatgatgaggatggggacgaagttgaggaagaagcagaggaaccttacgaagaagctacggaacgcactacatcaattgccacaaccactacgacaaccacagagagcgttgaggaagtagtgagggtgcccaccactgcagccagtacccctgacgccgtcgacaaatacttggaaacccccggcgacgagaatgaacacgcccacttccagaaggcaaaagagagactcgaggctaagcacagagagaggatgtcccaggtcatgcgggaatgggaggaggccgaacgacaggccaagaatctgcccaaagccgataagaaggccgtaattcagcactttcaggaaaaggtggagagtctggaacaagaggctgctaatgaaagacaacagttagtggaaacacacatggccagggtggaggctatgctcaacgaccgccgccgcctggcactcgagaactacattaccgcgctgcaagctgtcccacccagaccaaggcacgttttcaatatgttgaagaaatacgtgcgggcggagcagaaagatagacagcacacacttaagcacttcgaacacgtcagaatggtggaccctaagaaggccgcccaaatccggagccaggtaatgactcatctccgcgtgatttacgaacgtatgaaccagtcactgagtttgttatacaatgtaccggcagtggccgaagaaatccaggatgaggtggacgaactgctgcaaaaagagcagaactatagtgatgacgtcctggccaatatgatttccgagccccgaatatcatacggcaatgatgcgttaatgcccagcctcaccgagacaaagaccaccgtggaactgttgcctgtgaacggcgagttttcacttgacgacctgcagccatggcacagttttggcgcagacagtgtaccagctaatactgagaacgaggtggaaccagtggatgccagaccagcagcagatagagggttgaccacccgccccggtagcggcctgaccaacattaagactgaggagattagcgaggtgaaaatggacgccgagtttagacacgattcgggttatgaagtacatcaccaaaagttggtcttttttgcagaggatgtgggctctaacaaaggcgccatcattggtctgatggtaggaggagttgtgattgcaaccgttatcgtaataaccctggtgatgctcaaaaagaaacagtacactagcatccaccacggcgtggtggaggtggatgccgctgtgaccccggaggagaggcacttgtctaagatgcagcagaacggatacgagaatcctacctataagtttttcgaacagatgcagaactag

SEQ ID NO: 108073 - DNA, 2256 bp, synthetic construct
  misc_feature 1..2256: note = Description of Artificial Sequence: Synthetic coding sequence
  source 1..2256: mol_type = other DNA
atgctgcccggactggcccttctgttacttgctgcttggacggcacgggcacttgaggtgcctactgacgggaatgccggactgctggcagagccccaaatcgcaatgttctgtggaaggctcaatatgcatatgaatgtgcagaacggaaaatgggattcggacccctccgggacaaagacttgcattgacaccaaggagggtatactgcagtattgccaagaggtttaccctgagctgcagatcaccaacgttgtggaagcaaatcagccagtaacaatccagaattggtgcaagcgtggtaggaagcaatgcaagacccatccacattttgtgattccttaccggtgtctcgtgggcgaatttgtttctgacgctctgttggtacccgacaaatgtaaatttcttcaccaggaaagaatggatgtgtgcgagacgcatctgcattggcacacggtggcaaaggaaacatgttccgaaaaatcaacgaacttgcacgattacgggatgttattaccctgtggtattgataaattcagaggggtggagttcgtgtgctgtcccttggccgaggagtccgacaatgttgactccgctgatgctgaggaggatgattctgacgtgtggtggggcggggcggacacggattacgcggacggctctgaagataaagtcgttgaggtcgccgaagaggaggaggtggctgaggtggaggaggaggaagcagatgatgacgaggatgatgaggacggcgacgaggtagaggaagaagcagaggaaccatacgaagaggccaccgaacgtaccacatcaattgctacaacaacaactacaactaccgaatcagtggaggaagtggtgcgggaagtatgcagcgaacaggctgagaccgggccttgtcgggcaatgatttcgcggtggtacttcgacgtcacggaaggcaagtgcgctccctttttttatggcggttgcggcgggaaccgcaataacttcgacaccgaggagtattgcatggccgtatgcgggtccgccatacccaccacggccgcttctactcccgacgcagtcgacaagtatttagagactcccggcgatgagaacgagcacgctcactttcagaaagcgaaggaacggctggaggcaaagcacagagaacgcatgtctcaggtgatgagggaatgggaggaggcagagaggcaggctaaaaatctcccaaaagctgataagaaggccgtcatccagcattttcaagagaaggtggagtccctggagcaggaggctgccaacgagagacaacagctggtcgagacacacatggctagagtggaggccatgctgaacgatcggcgtcgcctagcccttgagaattacatcacggccttgcaggcagtgccgccacgtcctaggcacgtgttcaacatgctgaagaaatatgtgagagcagaacagaaagataggcagcacaccctcaagcattttgagcacgtgaggatggtcgaccccaaaaaagccgctcagattagatcacaggtcatgacccatttgagggtcatatatgaacggatgaaccagtcactgagcctcctgtacaacgtccccgctgtggccgaagaaatacaggacgaggtggatgagctgctgcagaaggaacagaactattccgatgacgttctggctaatatgatttcggagcctcgaataagctacggtaacgatgcactgatgccttccttaaccgaaacaaaaaccactgttgagctcctgcccgttaatggagagttttccctcgacgacctacaaccatggcattcatttggtgctgactctgtccccgcaaacaccgagaacgaggtggagcctgtcgacgcacgccctgcagcagaccgcgggctgactaccagacctggttctgggcttacaaacataaagaccgaagagatttctgaggtaaagatggatgcagagttccggcatgacagcggctatgaggtccaccaccaaaagctggtattcttcgccgaggatgtaggaagcaataagggagctatcatagggttgatggtcggtggtgtcgttatcgcaactgtaatcgtgatcacactggtgatgctgaagaaaaagcagtacaccagcatccaccatggagtggtggaggtagatgccgcggttactccagaggagaggcacctgtcaaaaatgcaacaaaacggatatgaaaacccgacgtataaattttttgagcagatgcagaattag

SEQ ID NO: 108074 - DNA, 2259 bp, synthetic construct
  misc_feature 1..2259: note = Description of Artificial Sequence: Synthetic coding sequence
  source 1..2259: mol_type = other DNA
atgctgcctggtctggctctgctgctcctggctgcctggacagcccgcgctctcgaagtgcccaccgacggcaatgccgggctgctggcagagcctcagatcgcaatgttttgtggacgactgaacatgcacatgaacgtccagaacggtaagtgggattccgacccttcaggtaccaagacctgtatcgatacaaaagaagggatccttcaatattgccaagaggtgtatcccgagcttcaaatcacgaacgtggtggaggccaatcaacctgttactatccagaactggtgcaaaagggggaggaagcaatgtaaaacccaccctcatttcgttattccctatcgatgcctggtgggcgaatttgttagcgacgccctgctggtgccagacaaatgcaagttcttgcatcaagaacggatggatgtttgcgaaacccacctccactggcacacggtggccaaagagacttgctcggagaaatccacgaacctgcacgactacgggatgctcctaccttgtggcatcgataaattccgaggggtcgagtttgtgtgttgtcccctggccgaggaaagcgataacgtcgactccgctgatgctgaggaggatgactctgatgtttggtggggtggggcagataccgactacgccgacggatcagaagataaggtggttgaggtggccgaagaggaggaggtggccgaggttgaagaggaagaggctgacgacgatgaggacgatgaggatggcgatgaggtcgaagaggaggcagaagaaccttatgaagaggccactgagcggacaacaagcattgctacaacgacaacaactactaccgagtccgtggaggaggttgtgcgggaagtatgttccgagcaggcagaaacaggtccctgtagggccatgatttcaagatggtacttcgacgttaccgaagggaaatgcgctcccttcttttatggagggtgcggagggaatcgcaacaacttcgacaccgaagaatattgcatggcagtttgtggttctgcaatgtctcagagccttctgaagacgacacaggagcccctagccagagatccagtgaaactgccaactaccgccgcctctacccccgatgccgtggataagtaccttgagacacccggcgatgagaacgagcacgcccacttccagaaggcaaaagaacgcttggaagccaagcaccgggaaaggatgagtcaagtgatgcgggaatgggaagaagcagaacgacaggccaaaaaccttccgaaggcagataagaaagccgtgatccagcactttcaggaaaaggtcgaatctctcgagcaggaggctgcgaacgaaagacaacagctagtggagacacacatggcgcgcgtggaggcgatgctgaacgatcgacggagacttgcactggagaactacatcacagccctacaagctgtcccaccgcggcccaggcacgttttcaatatgctgaagaagtacgttagggcggaacagaaggacaggcagcataccctcaagcacttcgagcacgttcgtatggttgaccccaagaaggcagcccagattcgctcccaagtgatgacacatctccgagtgatctacgaaagaatgaaccagtccctttctcttctttataacgtaccagccgttgcagaggaaattcaagatgaggtggacgagctactgcagaaagagcagaattactccgatgatgtcctggcaaacatgatctctgagcccaggattagctacgggaatgacgctctgatgccttcactgaccgaaacaaagacgactgtcgaactgctgccagtgaacggcgagtttagcttggatgatttacagccttggcatagctttggagccgatagcgtgcccgccaataccgagaatgagggatcaggcctcactaacatcaagaccgaggagatatctgaagtcaaaatggacgctgaatttagacacgactcgggctatgaagtgcatcatcagaaacttgtcttctttgcggaggacgtggggtcgaacaagggagcgataataggtctgatggtgggaggtgtcgtgatcgccacagtcattgtgattacactggtgatgctgaaaaaaaagcagtacacatcaattcaccatggcgttgtcgaggttgacgccgccgtcacgccagaggagcggcacctgtccaagatgcagcaaaatggctacgagaatcctacctacaagttctttgagcagatgcagaactag

SEQ ID NO: 108075 - DNA, 2145 bp, synthetic construct
  misc_feature 1..2145: note = Description of Artificial Sequence: Synthetic coding sequence
  source 1..2145: mol_type = other DNA
atgctccccgggctcgcacttctgctcctcgccgcatggactgcccgggcactcgaggtgcctacggacgggaacgcgggcttattagcagaaccacaaattgcaatgttctgtggccgactcaacatgcatatgaacgtgcagaacggcaaatgggactctgatcccagtggcaccaagacttgtatcgacacaaaggagggtatcctccagtattgtcaggaagtgtaccccgagctccagatcacaaacgttgtggaggccaaccagccagtgaccatccaaaattggtgcaaaagaggaagaaaacagtgtaaaacacatcctcactttgtgatcccttatcggtgcttagtaggggagttcgttagtgatgcactgttagtccccgataagtgcaaattcctgcaccaggagagaatggatgtctgcgaaacgcatctccactggcatacggtggctaaagagacgtgtagcgaaaagtccaccaatctgcatgactatggcatgcttctgccatgtgggatagataagtttcgcggagtcgagttcgtctgttgtccattggccgaagagtcagacaatgtggactcagcagatgccgaggaagacgacagcgacgtgtggtgggggggcgccgacaccgattacgccgacgggagtgaggacaaggtggttgaagtggccgaagaggaggaagtcgccgaggtcgaagaggaagaggccgatgacgacgaggacgacgaggacggcgacgaagtggaggaggaggctgaagagccatacgaagaagctaccgaacgaactacctccatcgcaacaactacgaccactactacggagtctgtcgaggaggtagtacgagtctcccagtctctcctaaagaccacccaggagccgctcgccagggatcccgttaagctccctacaactgctgctagtactcctgatgccgtcgataaatacctggaaacccctggagacgagaatgaacatgcgcactttcagaaagccaaagagcggcttgaggccaagcaccgggagcgcatgtcacaggtaatgcgtgagtgggaggaagctgagcgacaggctaaaaatctgcccaaagcggacaagaaagctgttatccaacactttcaggaaaaggtggagtctttggaacaagaggctgcaaacgagaggcagcagcttgtagagacacatatggcaagagtggaggcaatgttgaacgaccgaaggcgcctggccctggaaaactatattaccgctctccaggccgtccctccacgcccacgccacgtgttcaacatgctgaagaagtatgtgcgcgctgaacagaaagaccgtcagcacacgcttaaacattttgagcatgtgcgcatggtggaccctaaaaaggccgcccagattaggagccaggttatgacgcatctacgcgtcatttatgagcggatgaatcagtccttgagtctgttgtataatgtgccggccgtagccgaagaaatccaggatgaggtggacgaactgctgcaaaaggagcagaactacagcgacgatgttctcgcaaatatgataagcgagcctcgaatctcctatggcaatgatgcccttatgccctcccttacggagactaaaaccaccgtggaactgctgcccgtaaacggcgaatttagtcttgacgaccttcagccctggcacagctttggcgctgactctgtgccagcgaataccgagaatgaagtagaaccagtcgatgctcgcccggcagccgaccgcggcttaaccactaggcctggatcaggtctcaccaacattaagactgaagagatttctgaggtaaaaatggacgcagagttcaggcacgattctggctatgaggtacaccatcagaaactggtgtttttcgctgaagacgtgggctccaacaagggcgctattatcggcctcatggtcggaggtgtcgtcatagccaccgtcattgttattactctggtgatgctcaaaaagaagcagtacacttccatccaccacggtgtagtagaggtggacgctgctgttacccccgaagagagacacctctctaagatgcagcagaacggctatgaaaatccgacttacaaattcttcgagcagatgcaaaactag

SEQ ID NO: 108076 - DNA, 2145 bp, synthetic construct
  misc_feature 1..2145: note = Description of Artificial Sequence: Synthetic coding sequence
  source 1..2145: mol_type = other DNA
atgttacccggcttggcgcttctgctgctggctgcctggactgcccgggcacttgaggtgtatccagaacttcagattaccaatgtggtagaggctaatcaacctgtcaccatccaaaattggtgtaagcggggccgaaaacaatgtaaaacacatccacacttcgtcattccataccgttgtttggtcggggaatttgtgagcgatgctctattggtgccggataaatgtaaatttctgcaccaggagcgcatggacgtctgtgagacccatctacattggcatactgtggcgaaagagacctgtagcgagaaaagcaccaaccttcatgactatgggatgcttttaccctgtggaattgataaattccgaggagtagaattcgtgtgttgccccttagcagaagagtctgacaacgtggactctgccgatgcggaagaggacgactctgatgtctggtggggaggcgcagatacagattatgctgacgggtcagaggataaagtcgtagaggtggccgaagaggaggaagtcgctgaggtcgaggaagaagaggcggacgacgatgaggatgacgaagatggagacgaagtggaggaagaggctgaggaaccatatgaagaggcaactgaaagaacaacatcaatagcaacaaccacgaccactactaccgaaagcgtggaagaagtggtccgagaggtctgctccgaacaggccgaaacaggaccctgtagggccatgatatcacgctggtacttcgacgtgaccgagggtaaatgtgcaccatttttctatggtgggtgtggtggcaatcgcaacaacttcgatactgaggagtactgtatggcggtctgcggaagcgctatgtcccaatcgctgctgaaaacgactcaagagcccctggcgcgggaccccgtcaagctgcctactactgccgcgtcgacgccggatgccgtggataaatacttggagaccccgggagacgaaaacgaacatgcacactttcagaaggccaaggagagactagaggccaagcaccgggaacgcatgagtcaggttatgcgggagtgggaagaagcggaacgacaagccaagaacctgcctaaggccgacaagaaagcagtgatacagcatttccaggagaaagtcgagagccttgagcaggaggccgcaaacgaacgccagcagttggtcgaaactcatatggcgcgagtggaagcaatgttgaacgacaggcgcaggctggcactcgaaaattacattaccgcactgcaggctgtgccaccccggccacgacacgtcttcaacatgctgaagaaatatgtcagggctgagcagaaggatcgccagcacacattgaagcatttcgagcatgtcaggatggtagaccctaaaaaggcagcgcaaatcaggagccaagttatgacacatctgagagtgatctatgagaggatgaatcagagcctgagtctgctgtataacgtaccagcagtggcagaggaaattcaggacgaggttgacgagctgctacagaaagaacagaactatagcgatgatgttctagcaaatatgattagcgaacccagaatatcgtacgggaacgatgctttgatgccttccctgaccgaaacgaaaacgaccgttgaactcctgcctgttaacggagagttctcgcttgacgacttacagccctggcattccttcggggccgactccgtgcctgcaaatactgaaaacgaagtcgaacccgtcgatgcgaggccagcagctgacagggggctgacgacgcgccccgggtccggcctgactaacataaagactgaggagatctcagaggtaaaaatggacgctgaattccgacacgattcaggctacgaagttcaccatcagaagctagttttctttgccgaagatgtgggatctaacaagggtgcaataataggactcatggtcggaggtgtggtcatcgccaccgtgatcgtaattacacttgtgatgcttaagaaaaagcaatacactagcatccatcatggggtggtggaggtcgacgcggccgtgaccccggaggagcgccatctttcaaagatgcaacagaacggctatgaaaaccccacttacaaatttttcgaacagatgcagaactag

SEQ ID NO: 108077 - DNA, 2241 bp, synthetic construct
  misc_feature 1..2241: note = Description of Artificial Sequence: Synthetic coding sequence
  source 1..2241: mol_type = other DNA
atggatcaactggaggacctgctcgtccttttcattaactacgtgcccaccgacgggaatgcaggcctgctcgctgagccacagattgccatgttttgcggacggctgaacatgcatatgaacgtccagaacggaaaatgggatagtgatccttcaggaactaagacctgtattgatacaaaggagggcattttacagtattgtcaggaagtatatccggaactgcaaatcactaatgtagtggaggccaatcagcctgtgactatacagaattggtgtaagagaggccggaaacaatgcaaaacacacccacattttgtgatcccctatcggtgcctcgtgggtgagttcgttagcgatgctcttctggtcccggataagtgtaaatttctgcaccaagaacgaatggacgtatgtgagacccaccttcactggcatactgttgcaaaggaaacatgcagtgagaaaagtaccaacctgcacgattacggaatgttgctgccatgtggcattgacaaattccgaggcgtggaatttgtatgctgtcctctggcagaggagtccgacaatgtggactctgcagacgcagaggaggacgacagtgatgtgtggtggggaggcgctgacacggactatgccgatggttctgaagacaaagtggtggaagtggccgaagaagaagaggtggcagaggtggaagaagaggaggctgacgacgatgaggacgacgaggacggcgacgaggttgaagaggaggcagaggagccatacgaagaggccactgagagaactacttctattgccacaacaacaaccactaccaccgaaagcgtggaagaagtggtccgggaagtgtgttctgagcaggctgagaccggtccttgcagggccatgatatcccgatggtattttgacgtgacagagggaaaatgcgctccatttttttacggcgggtgcggcggtaaccgcaataatttcgataccgaggaatattgcatggcggtttgtggttctgcaatccccaccaccgctgcatctacccctgacgccgttgataaatacctcgagacccctggagacgaaaacgaacatgcacacttccaaaaggccaaggaacggcttgaagccaagcatcgagaacggatgagccaagtgatgcgagagtgggaagaggcagagcgccaggccaagaatctgccaaaagccgataaaaaggccgtcatccagcactttcaagagaaagtggagagccttgaacaggaggccgccaatgagcgtcaacaactcgttgaaacgcatatggctcgtgtggaagcaatgcttaatgaccgcagaaggctagcccttgagaattatatcacggcgctccaggccgtgcctccaagaccacgtcacgtgttcaacatgttaaaaaagtacgtgcgtgccgaacagaaggacaggcagcacaccttaaagcatttcgagcatgtgcgaatggtggatccaaagaaggccgcccagatccgctctcaggtgatgacccatctgcgagtgatttacgagaggatgaatcagagcctctccctgctgtataatgtccccgccgtggctgaggaaatccaagatgaagttgatgaactgcttcaaaaagagcagaactactcagacgatgtactggctaacatgatatccgagcctagaatcagttacggaaatgacgccctgatgccgtctctcacagaaactaagaccaccgtggaattgctacctgtaaatggagaattctcgctggatgacctgcagccttggcactcattcggcgcggatagcgtgcccgcaaatactgaaaatgaagtagagccagtcgatgccagaccggctgctgaccggggactgacaaccaggcctggatctgggctgaccaacatcaagacagaagaaatctctgaggtcaagatggatgcggagttccgccacgacagtggctacgaggtgcaccaccagaaactcgtcttctttgctgaggatgtgggcagtaataaaggagctattattgggctcatggtcgggggcgtcgttatcgcaacagtgattgtcattactctggtaatgctgaagaagaaacaatatacgtccatccatcatggagtggtggaagtagatgccgctgtcactcctgaagagaggcacctatccaaaatgcagcagaatggttatgaaaatcctacttacaagttcttcgagcagatgcagaactag

SEQ ID NO: 108078 - DNA, 1983 bp, synthetic construct
  misc_feature 1..1983: note = Description of Artificial Sequence: Synthetic coding sequence
  source 1..1983: mol_type = other DNA
atgttctgcggcaggctgaatatgcatatgaacgtgcagaacggaaagtgggattccgatccctctggcactaaaacttgtatcgatacgaaggaggggattctgcaatactgccaagaggtgtatccagagttacagattaccaacgttgtggaggcgaaccagcccgtcacgatccaaaattggtgtaagcggggccgtaaacaatgcaagacgcacccacactttgtcatcccttatcggtgcctcgttggggagttcgtgtctgacgctctccttgtgcccgacaagtgtaaattcttgcaccaggagcgtatggatgtgtgtgagactcacctgcattggcacaccgttgccaaggagacatgttccgagaaaagtaccaaccttcatgattacggaatgctgctgccatgtgggatagataaattccggggagtggaatttgtctgctgcccacttgcggaggaatctgacaatgtggattcagcagacgctgaggaggacgatagcgatgtttggtgggggggcgcagacacagattatgcagacggaagcgaagataaagtagtggaagtggctgaagaagaagaagtggcagaggtggaagaggaggaagctgatgatgacgaagacgatgaagacggagacgaggtggaggaggaagcagaggagccctacgaggaagcgactgaacgcaccacgagtatcgcaacgactaccactactacaaccgagtctgttgaggaagtggttagagtccccacaacggctgcttcaacgcccgacgccgtggataagtacctggaaacgcccggcgacgagaatgagcacgcacactttcagaaggcaaaggagcgcctggaagctaagcatcgtgaaagaatgtcccaggttatgcgcgagtgggaagaggcggagcgtcaggccaaaaacctccctaaagccgataaaaaggcagtcattcaacattttcaggaaaaggtggaatcacttgaacaagaggccgcaaatgaacgccagcagcttgtggaaactcatatggcccgagtggaagccatgctcaatgatagacggcggctcgctctcgagaattacattaccgccctgcaggccgtgcctccgagacctagacacgtctttaatatgttgaaaaagtatgtgagggcagagcagaaagataggcagcataccctgaaacacttcgagcacgtgagaatggttgaccccaaaaaggctgcccagatccgatcacaggtcatgacacaccttcgagtgatctatgaacggatgaatcagagcctctccttactgtacaacgtcccggctgttgccgaagagatacaggatgaagtggacgagttactgcagaaagagcaaaactactccgacgatgtgctcgctaatatgatatcggagcctagaatttcttatggtaacgacgcacttatgccatcactcacagagactaagaccaccgtggagctgctgcccgtgaatggagaattcagcctggacgacttacagccttggcacagttttggagctgactcagtgcccgcaaataccgagaacgaagtcgaacccgttgacgctcgcccagcagcggatcgaggactgaccacccggccagggtccggcctgacgaatattaagaccgaagaaattagcgaggtgaaaatggacgctgaatttcggcacgatagcggctatgaagtgcaccaccaaaaactggtcttcttcgccgaggacgtgggaagtaacaagggcgccattattggactcatggtcgggggtgtggtgattgctaccgtcatagtgataactcttgtgatgctgaaaaaaaaacagtatactagcatccatcacggagtggtagaggtggacgccgctgtgactcctgaggagcggcacctcagtaaaatgcagcagaatggatacgagaaccctacttacaagttctttgaacagatgcagaactag

SEQ ID NO: 108079 - DNA, 789 bp, synthetic construct
  misc_feature 1..789: note = Description of Artificial Sequence: Synthetic coding sequence
  source 1..789: mol_type = other DNA
atgcgcgtgcaggatacttcagggacttactattggcatatcccgacgggcaccacacagtgggagccccccggacgtgcatctccctcacagggaagtagcccccaggaagagagccaactgacctggacaggcttcgcacacggcgaggggtttgaggacggggaattctggaaggatgagccgtccgacgaggcaccaatggagctgggactgaaagagcccgaagaaggcaccctgaccttccccgctcagtctttatcgccagagcccctacctcaggaggaggagaaactgccccccaggaacaccaatcctgggatcaagtgctttgctgtgaggtctctgggctgggtcgagatgactgaggaggaattggccccaggacggtcctccgttgctgtgaacaactgcatcaggcagctctcttatcacaaaaacaacctgcacgatccaatgtcagggggatggggagagggaaaggatttgctattacaactggaggatgaaactctcaagctcgtggaaccacagagccaggcacttttacacgcgcaacctattatttccatccgggtgtggggtgtgggcagagattccgggcgcgacttcgcttatgtcgctcgtgacaaactgactcagatgttgaaatgccatgtgtttagatgtgaggcccccgccaagaatatcgccacatcgctgcatgaaatttgtagtaaggcccgcccaccacccttaccaggactggtcgctacttttgcgctgcagggctgcggttggggccattag

SEQ ID NO: 108080 - DNA, 1482 bp, synthetic construct
  misc_feature 1..1482: note = Description of Artificial Sequence: Synthetic coding sequence
  source 1..1482: mol_type = other DNA
atgctgggtaaggattatatgctcgcaattatcctggtcaactgcgatgatgacctgtggggagatcatagcttagaagtcgaggctggacttcctcccgggtggcggaagattcatgatgccgcaggtacctactattggcatgtcccctctggctcaactcaatggcagagacctacctgggagctgggcgacgccgaagacccaggcacaggcaccgagggaatttggggactgcgcccccccaagggtaggtcctttagttccctggagagcagcttggatcgaagcaattccctttcctggtacggaggggagagctacattcagtctatggagcctggagcaaaatgctttgccgtgcgctctctaggatgggtggaagtgcccgaggaggacctggctcctgggaaatcctctattgccgtgaacaattgtatccagcagctggcccagactaggagccggagtcagccgcccgatggcgcctggggtgagggccagaacatgcttatgatccttaaaaaagatgctatgagcctggtcaatccactggaccattccctgatacattgccagccgctggtccatattagggtctggggggtagggtcttctaagggccgcgactcacctataagtgctcccgcgagggattttgcgtttgtagcctctgacaaggactcgtgcatgctgaagtgtcacgtgttctgctgcgacgtacccgctaaagctatagcctccgccttgcatggactctgcgcacagatcctctcagaaagagttgaggtttccggagacgctagctgttgctcacccgaccctatttctccagaagacttgccacgtcaggtggaactactcgatgctgtgtctcaggctgcccagaaatacgaggcactgtacatgggcaccctgcctgttacaaaggcgatgggaatggacgtgcttaacgaggccattggaacactgacagcccgcggagatagaaacgcgtgggtacccacaatgctctctgttagtgacagcctgatgactgcccatccgattcaggcggaggcaagcacagaggaggagccactgtggcagtgcccagttcggctggtcacttttatcggtgtaggtagagatcctcacaccttcggactaattgctgatctaggtcgccaaagcttccagtgcgctgccttctggtgtcagccacacgctggcggcctgtctgaagccgtccaggccgcctgcatggtgcaatatcagaagtgtctggtcgccagcgcggcaagaggtaaggcctggggagcccaggctcgggctaggctccggctgaaacggaccagctctatggattccccgggaggcccgctccctctgcccctgcttaaaggtggcgtgggtggagcaggggctacaccccggaaaagaggagtgtttagcttccttgatgcctttcgcctcaagcctagccttctgcacatgccatag

SEQ ID NO: 108081 - DNA, 1377 bp, synthetic construct
  misc_feature 1..1377: note = Description of Artificial Sequence: Synthetic coding sequence
  source 1..1377: mol_type = other DNA
atgatcacaaaaactcacaaggtcgatctcggactcccagagaagaaaaagaagaaaaaggtcgtcaaagaacctgagacaaggtactctgtattgaacaacgatgactactttgcagatgtcagtcccctacgggcaacttcaccgagtaagtcagttgcacatggccaggcccctgagatgcctctcgtgaaaaagaaaaagaagaagaaaaaaggcgtgtcaactctgtgtgaggaacacgtggagcctgagactaccctgccagccagacgcaccgaaaagagtcctagcctgcgcaagcaggtgttcgggcatctggagttcctgtctggggagaagaagaacaagaaaagcccattagcaatgtcacatgcttctggagtcaaaacttcgccagacccccggcagggcgaggaagagactagagtcggaaaaaagctcaaaaaacataaaaaggaaaaaaaaggggcccaggacccaaccgcgttttctgtccaggatccttggttctgtgaggctcgcgaggctagggatgtgggtgatacttgtagcgttgggaagaaagacgaggagcaggcggcactgggacagaaacgaaagaggaagtcaccccgtgagcacaacggtaaagtgaaaaagaaaaagaaaatccaccaggagggcgacgcgctgcccgggcatagtaaaccttcccggtccatggagtcgtcacctaggaagggctccaagaagaagcccgtgaaggttgaagcaccggagtatattcccatctcagacgatccaaaagcaagtgctaagaagaagatgaaaagcaaaaaaaaagtcgagcagccagtgatcgaagaacccgccctgaagaggaagaaaaaaaaaaaacggaaggagtctggagtggcaggagatccatggaaagaagagaccgatacagaccttgaggtggtccttgagaagaaaggtaatatggacgaagcccacattgaccaagttagacgtaaggcattacaggaggaaattgacagagagagtggcaagaccgaggcctcagaaacacggaaatggacaggaacccagttcgggcagtgggacaccgcgggctttgagaatgaagatcagaaactcaagttcctgcgacttatgggaggattcaagaatctgagtccctcattctcaagaccagccagcactattgctaggccgaacatggccctcggcaagaaagccgcagattcactgcagcagaatctccagcgtgactatgaccgagctatgtcatggaaatactctcggggtgctggactggggttttccactgcccctaataaaattttttacatcgacagaaacgcttctaaatccgtgaaactagaagattag

SEQ ID NO: 108082 - DNA, 2214 bp, synthetic construct
  misc_feature 1..2214: note = Description of Artificial Sequence: Synthetic coding sequence
  source 1..2214: mol_type = other DNA
atggcacatcgaaagctcgagtcagtggggagtggaatgttggatcaccgggtgcgccctgggccggtgccccattctcaggagcctgagagcgaggatatggagctgccactggaaggatatgtgcctgagggcctggagttggcagctctgcgtccggagagtccagccccagaagaacaggagtgccacaaccacagccctgacggggacagcagttccgactacgttaataacaccagcgaagaagaggactacgatgagggcttacccgaagaggaggaggggatcacctactacatcaggtattgccctgaggacgactcctaccttgagggaatggattgcaatggcgaagagtacctggcgcactccgcccaccccgtagacacagatgagtgccaggaagcagttgaggagtggacggatagcgctggcccccacccgcatggacacgaggcagagggatcacaggattaccccgacggacagctgcccattcctgaggacgaaccgtccgtgctggaagctcatgaccaggaagaagatggacactactgcgcatccaaggaaggttaccaggattattaccctgaagaggccaatgggaataccggcgcctccccctataggctgcggcgcggagacggagacttagaggaccaggaggaggatatcgaccaaattgtggcagagattaagatgagccttagcatgacttctattacatccgcttccgaggcgtcccccgagcatgggcccgagcccggcccagaggattcggtggaggcttgcccccctatcaaggctagctgcagtccaagtcggcatgaagctaggccaaagtctctcaatttgctgcccgaagccaaacaccccggcgaccctcaaaggggctttaagcctaagaccagaacaccagaagagagactcaagtggccccacgaacaggtctgtaacggcctggagcaacccaggaagcaacaaagatcagatcttaacgggccagtggataataataacattccggaaacgaaaaaggtggcatcttttccatcctttgtggcggtgcccgggccctgcgaaccagaagatctgatcgatgggataatcttcgctgcgaattacctgggaagcactcagctgttgagcgaaaggaatccctcaaagaacatccgcatgatgcaggcacaggaagcggtgtcacgggtaaaaaatagcgagggagatgcgcagactctcacggaagtcgacctgttcatttccacacaacgaattaaggttttaaatgcggacacccaggagactatgatggaccatgccctgcgcacaatatcatacatcgcagacatcggtaatatagtggttctcatggctaggcgacggatgccccggtcagctagccaggattgcattgagacaacaccaggcgctcaggaagggaaaaaacagtataagatgatttgccacgtattcgaaagcgaggacgctcagctaatcgcgcaatccattggccaagctttcagcgtggcctaccaggagtttctgcgcgccaatggcattaaccccgaggacctgagccagaaggagtattctgatattatcaatactcaggaaatgtataacgatgacctcatccatttttccaatagcgaaaactgcaaggagctgcagttagagaagcataagggcgaaattctcggcgtggtggtggtcgaatctggctggggctcaatcttgccaaccgtgattctcgccaatatgatgaatggagggcccgcagctcggtctggtaaacttagcataggcgaccagatcatgagcattaatggaacatccctggtcggactgccgctggccacctgtcagggtattatcaagggtctgaagaaccaaacacaggtcaagttaaacatcgtgagctgcccccctgtgactacagtactaatcaagcgtcctgacctaaaataccaattgggattctcagtacagaacggcattatatgtagcctgatgcggggcggaatcgccgagcggggcggggtacgggttggacacagaatcatcgagatcaacggtcagtcagttgttgcgactgctcatgaaaaaatcgtacaggccctgagcaactcagtcggtgagattcacatgaagactatgcccgctgcaatgtttaggctccttacagggcaggaaacacccctatatatctag

SEQ ID NO: 108083 - DNA, 84 bp, synthetic construct
  misc_feature 1..84: note = Description of Artificial Sequence: Synthetic coding sequence
  source 1..84: mol_type = other DNA
atggcccaccgcaaactcgaatcagtcggtagcgggatgctcgatcatcgagtgcgccccgggcctgtgccgcacagccaatag

SEQ ID NO: 108084 - DNA, 2250 bp, synthetic construct
  misc_feature 1..2250: note = Description of Artificial Sequence: Synthetic coding sequence
  source 1..2250: mol_type = other DNA
atggctcaccggaaacttgaatctgtgggttcagggatgctagatcaccgagtccgccccgggcctgtgccccacagtcaggaaccggagtctgaagacatggaactgccactcgagggatatgtgcctgagggattagagcttgccgctctgagaccagaatctccggctcccgaagagcaagaatgccataaccacagtccggacggggactcttcgtctgattacgtcaacaacacgtccgaggaggaggactatgatgaagggctgccggaggaggaggaaggaattacgtactacatcagatattgccccgaggatgactcttatcttgagggcatggattgtaatggggaagagtacttggcgcatagtgcccaccccgtagacacagacgaatgccaggaggccgtcgaagagtggactgattccgcagggccccacccccacggccacgaagccgagggatcccaggattaccctgacggacagctacccattcctgaggacgagcccagtgtgctggaggcccatgatcaggaggaagatggacattattgtgcatctaaggagggttatcaggattattatcctgaagaagccaacggtaatactggggccagtccttaccgcctacgacgaggggacggtgatctcgaggaccaggaagaagacatcgaccaaatcgtggcagagataaagatgagcctgagtatgacatccattacctcagcatcagaagccagtcccgaacatggccctgagcctggtcccgaggatagcgtggaagcctgtcctccaattaaggccagctgttcaccgtcacgccatgaagcccgccccaagagtctgaacttgctaccggaggctaagcacccaggggacccccagaggggcttcaaaccaaagacccggacacccgaggaacggcttaagtggccacacgaacaggtgtgtaatggtctggagcagccacggaagcaacagcggagcgatttaaatggcccagtggataataacaatatcccggagaccaaaaaggtcgctagctttccttcatttgtcgcagttcctggaccctgtgaacccgaagatctaatagatggtatcatctttgccgccaactacttagggtctacccagcttctgagtgagcgaaacccttctaagaatattagaatgatgcaagcgcaggaagctgtttctagggtgaaacggatgcagaaagctgctaagatcaagaagaaggccaacagtgaaggtgatgcacaaaccctcaccgaagtagatctcttcatctctacccaacggatcaaggtgctgaatgctgacacacaagaaactatgatggaccacgccctgagaaccatatcctacatcgctgatattggcaacatcgtagttcttatggctaggagaagaatgcctcggtctgcttcacaggactgcatcgagacaacacctggggcacaggaagggaaaaaacagtataagatgatctgccatgtcttcgagagcgaggatgcccagctgatcgctcaatctattgggcaagctttttctgtggcctatcaggagttcctacgcgcaaatgggattaacccagaggatctctcccagaaagaatactctgacattatcaatactcaggaaatgtacaacgacgatctgatccacttctcaaactctgaaaactgcaaagaactgcagctagagaaacacaaaggggaaatcctgggggttgtggtcgtggaaagcggctggggtagtattctgcccaccgtgattctcgcaaacatgatgaatggcggccccgcagccaggtccggcaagctcagtatcggcgatcagatcatgagcatcaacggcacttccttggttggacttcccttggcgacctgccaaggcatcatcaagggtctgaagaaccagacccaagtgaagttaaacatcgtttcctgcccacctgttactactgtcttaatcaagcggccagacctgaagtaccaactggggttctccgttcagaacggcatcatctgttccctgatgcggggaggtattgcagaacgaggcggtgtgcgggtggggcaccgcattatcgagataaatgggcagtccgtggttgcaactgcacacgaaaaaattgtgcaggccctctcgaactccgtgggcgaaatacacatgaaaaccatgcccgccgctatgttcaggttgctgacgggccaagagacccccctgtatatctag

SEQ ID NO: 108085 - DNA, 2214 bp, synthetic construct
  misc_feature 1..2214: note = Description of Artificial Sequence: Synthetic coding sequence
  source 1..2214: mol_type = other DNA
atggcccacagaaaactggaaagcgtggggtctggtatgcttgatcacagggtgcggcctggtccagttccccacagccaggaacccgagagcgaagacatggaactcccccttgagggctatgtacccgagggtctagaactggctgctctgagaccggagagcccagcgcccgaggagcaagaatgccataaccactctcctgatggggacagtagtagcgactacgtcaacaatacctcagaggaggaggattacgacgagggactgccagaagaggaagagggtatcacatattacatccggtattgtcccgaagacgatagctatcttgagggcatggattgcaatggggaggagtacctcgctcacagcgcgcatcccgtcgacacagacgaatgccaggaggccgtcgaggagtggacagattctgcaggcccgcatccacacggacacgaagccgaaggttcacaagattaccctgacgggcaattgccaattcctgaagatgagccatcagtgctggaagcacatgaccaagaggaagatgggcattattgcgcgtccaaggaaggataccaggactattatcctgaagaggcgaatgggaacactggggcttccccatatcgactgcgccgaggcgatggcgacctcgaggatcaggaggaggacatcgatcagatcgtagcggaaattaaaatgtcgctttctatgactagtattacaagcgcgagcgaagccagccccgagcatggaccagaacctggacccgaagatagcgtggaagcctgccctcccatcaaagcttcatgctcaccatctcgccacgaagcaagacccaagtcactcaacctgcttccagaagccaaacatcctggagatcctcagcgcggcttcaagccaaaaacacgtacgccggaagaacggctgaaatggccacacgagcaggtatgcaatgggctggaacagcctaggaagcagcagagatcagatttgaacggtccagtggacaacaataacatacccgaaacaaagaaagtagcttccttcccatccttcgtggctgtacccggtccttgtgagccagaggatctcatagatggaattattttcgctgcaaattatctaggctcaacccagttgctgtccgagcgcaaccccagcaaaaatattaggatgatgcaggcacaggaagcagtgtcacgagtgaaaaatagtgaaggggacgcgcaaactcttacggaagtcgacttatttatctctactcaaagaatcaaggtgctgaacgcggatacacaggaaaccatgatggaccatgcattaagaacaatatcttatatcgccgacattggaaacatagtggtcctcatggctaggaggcggatgccacgtagcgcgtcccaggactgcattgaaacaactcccggcgcgcaggagggtaagaagcaatacaagatgatttgccacgttttcgaatcagaagacgcacaactgatcgcccagagcatcgggcaggccttctcagttgcctatcaggagtttctgagagcaaatgggataaatcccgaggatctgtcccaaaaagagtacagcgacataattaatactcaggaaatgtacaatgacgatctaatccacttttctaactcggaaaactgtaaggagctgcagctggagaaacataagggggaaatcctgggcgtggtggttgttgagtcggggtgggggagcatactgcccactgtgattttagctaatatgatgaacggcggtccggccgctcgaagcggcaaattgagtatcggcgatcagatcatgtccatcaacgggacttcgctggtaggtctgcctcttgcaacatgccagggtatcattaagggcctgaaaaatcagacgcaggtgaagctaaatattgtaagctgccctccagttacaaccgtcttgatcaaaagacctgatcttaaatatcagttgggattctccgtgcaaaatgggattatctgtagcctcatgaggggcggcattgccgagcgcgggggggtcagagtaggacacagaatcattgagataaacggacagtctgtggtggctaccgcccacgaaaagatcgtgcaagcactttcaaactctgtgggggaaatacatatgaaaaccatgcctgccgctatgttccgacttttgacgggccaggagacacccctctacatttag

SEQ ID NO: 108086 - DNA, 795 bp, synthetic construct
  misc_feature 1..795: note = Description of Artificial Sequence: Synthetic coding sequence
  source 1..795: mol_type = other DNA
atggcccaccggaagttggaatcagtggggagcggaatgctggatcaccgagtccgccccggacccgtgcctcacagccaggagccagagagtgaggacatggagctgccacttgagggttacgttcctgagggactcgaactggccgctctgaggccggaaagcccagctcctgaggagcaagaatgtcataaccactcccctgatggagactcatcttctgattatgtaaataacacatccgaagaggaggactatgacgagggcctgcccgaggaggaggagggaataacctattatattcgatattgcccggaggacgactcctacctggagggcatggattgtaacggggaggaatatctagcacatagcgcacaccccgtcgatactgatgaatgccaggaagcagtggaggaatggacagacagtgccggcccccatccccacggccatgaggcggaaggctcacaagattacccggacggtcagcttccaattccagaggacgagccgagcgttctagaggcacacgatcaggaagaggatggacactattgtgctagcaaggaagggtatcaggattactatccagaggaggccaacggtaatacaggggcctccccctacaggctgagaagaggggacggcgatcttgaggatcaggaagaagacatcgaccagatagttgccgagatcaagatgtctctctctatgacatcaattaccagcgcgagcgaggcctcccccgaacatggccccgaacccggacccgaagactccgtggaggcgtag

SEQ ID NO: 108087 - DNA, 2250 bp, synthetic construct
  misc_feature 1..2250: note = Description of Artificial Sequence: Synthetic coding sequence
  source 1..2250: mol_type = other DNA
atggctcaccgcaaactcgaatcagtcggatctggtatgctcgaccaccgcgtgcggccaggcccagtcccacattcacaagaaccagaatccgaggatatggagctcccgctcgaagggtatgtgccggaggggttagaacttgcagcgctacgccctgagtcgccagcccctgaggaacaagagtgccataatcacagccccgacggcgactcctccagcgactacgtgaataacaccagcgaggaggaagactacgatgagggacttccagaggaggaggagggcatcacctactacatacgctactgccccgaggacgatagttacctggaaggaatggactgcaacggagaggaatatctggcccactctgcccaccctgttgacaccgacgaatgtcaggaagctgtggaagagtggacagactcagccggtccacatccccacgggcacgaagcggagggcagccaggattatccagatggtcagcttcctattccagaagacgaaccatccgtcctcgaagcccatgatcaggaagaagacgggcattactgcgcctctaaagaaggttatcaggactattaccccgaagaagcaaacggtaatacgggcgcctcaccatataggctgcggagaggcgacggggatctggaagatcaagaggaagatatcgatcaaatcgtggcggaaatcaagatgtctctgtccatgactagtattaccagcgcctcagaggccagccccgagcatgggccagaacctggaccagaagatagtgtggaggcatgtcccccgatcaaagctagctgctctcccagtagacatgaggcccgccccaagtccctgaatctcctgcccgaagccaagcatccaggcgacccgcagcgcggttttaagcctaaaacaagaacccctgaagagcgcctcaaatggcctcacgagcaggtgtgtaatggactggaacagcctcgcaagcagcagcgctccgatctgaacggacctgtagacaataacaacattcccgaaacaaaaaaagtggcctctttcccaagcttcgtggctgtacccggtccttgtgaacccgaggatctaatagatggaatcattttcgccgccaactatctcggctccactcaattactgtcagaacgaaatccgtctaaaaacatccgcatgatgcaggctcaggaggcagtgagccgggtgaagagaatgcaaaaggctgctaaaatcaagaagaaggcaaattctgaaggagacgcccagacactgaccgaagtggacttatttatctccacacagaggatcaaggtcctgaatgctgatacacaggagacaatgatggaccacgcactgcgcaccatctcatacatcgctgatatcggcaacatcgttgtactgatggcaagaaggagaatgcctaggagtgcatcacaagactgtatcgaaacaacacccggggctcaagaggggaagaagcagtacaagatgatatgccatgtttttgaaagcgaagacgcacaactgatcgcgcagagtattggacaggctttttccgtggcctaccaggagttcttacgtgccaacggcattaacccagaggacctcagtcagaaagaatactctgacatcattaacacacaagaaatgtacaacgatgacctcatccatttttccaactctgaaaattgtaaggagcttcaactggagaaacacaagggcgaaatcctcggcgtggtagtggtggagtccggctggggatctatccttcccaccgttattttagctaacatgatgaacggtgggccagcagccagatccggtaagttgtcgattggcgaccagattatgagcattaatgggaccagcctggtgggcctccctttagctacatgccagggaattatcaaaggactgaagaatcagacccaggttaaattgaacattgtgtcatgtcctcctgtaaccactgtgttgattaagaggcccgatctaaagtatcagttaggtttttccgtccagaatgggattatctgctccctgatgagggggggcattgctgagcggggaggcgtgcgagtgggtcaccgcatcatcgagattaacggacagtcggtagtcgccaccgctcacgaaaagatcgtgcaggctttgagtaattccgtgggggaaatccacatgaagacaatgcctgctgccatgttccgactactgactggacaggagacccctctgtatatttag

SEQ ID NO: 108088 - DNA, 213 bp, synthetic construct
  misc_feature 1..213: note = Description of Artificial Sequence: Synthetic coding sequence
  source 1..213: mol_type = other DNA
atggcccatagaaaacttgaatccgtgggtagtggcatgctcgatcatagagtaaggcctgggcccgtgcctcacagccaagagccggagtctgaagatatggagctgcccctggagggttatgttccagagggcttagagttggccgctcttcgacctgagagtcctgcaccagaagaacaggagtgtcacaatcattctccagatgggtag

SEQ ID NO: 108089 - DNA, 15 bp, synthetic construct
  misc_feature 1..15: note = Description of Artificial Sequence: Synthetic coding sequence
  source 1..15: mol_type = other DNA
atggcccaccgttag

SEQ ID NO: 108090 - DNA, 339 bp, synthetic construct
  misc_feature 1..339: note = Description of Artificial Sequence: Synthetic coding sequence
  source 1..339: mol_type = other DNA
atggcccatcgaaagctagagtctgtgggatccggcatgctggaccatcgtgtgcggcctggacccgtgccccactcacaggagccagagtcagaagacatggagttgccattggaaggatacgtgccagagggacttgagctcgccgctctcagacccgagtcacctgccccggaggagcaggagtgccataaccatagtccagatggcgattcctcttccgattacgtcaacaacacgagtgaagaggaagactatgatgaaggactacccgaagaggaggaggggataacatactatatcaggtactgccctgaggacgacagctatttggagtag

SEQ ID NO: 108091 - DNA, 2250 bp, synthetic construct
  misc_feature 1..2250: note = Description of Artificial Sequence: Synthetic coding sequence
  source 1..2250: mol_type = other DNA
atggctcaccggaaactcgaatccgtgggatcaggtatgctagaccaccgtgtgcgccctggccctgtcccccattctcaagaacccgaaagtgaggatatggaactgcccttagaaggatatgtgcccgagggcttggagctggccgctctgcgaccggagtcaccagctcctgaagagcaggaatgtcacaaccacagcccagatggggattctagcagtgactacgtaaacaataccagcgaagaagaggactacgacgagggcctgcctgaagaggaggaaggcatcacctactatatcaggtattgcccagaagatgatagctatctcgaaggaatggattgcaacggagaagagtatctggcgcactctgcccaccccgtagacacagatgaatgccaagaggcagtagaagaatggaccgactccgctggcccccatccacacggacacgaagctgaaggcagccaggactaccccgatggacagctcccaatccctgaggacgagcctagtgtgctggaggcccacgatcaggaagaagacggtcactactgtgccagcaaggaaggttatcaggactattatcccgaagaggctaacggaaacaccggggcatccccttataggctccgacgcggcgacggagacttggaagatcaggaagaggacattgatcagattgtggcagagattaaaatgtccctgtcaatgacatctatcacctctgccagcgaggcttcaccagagcacgggcctgaaccaggacccgaggattccgtggaggcatgtccaccaattaaagcctcatgttcccctagcagacatgaggcccggcctaagtccctcaatctgttacctgaggccaaacacccgggagacccccagcgcggattcaagcctaaaacacgtactcctgaggagcggcttaagtggcctcacgaacaggtgtgcaatgggttggaacagccacggaagcagcaaaggtcggaccttaacggacccgttgacaataacaatattccagagaccaagaaagtcgcatcctttccctctttcgtagcggtccctgggccgtgcgaacccgaggacctgattgatggtataatctttgctgctaactacctcggcagcacccagctgctgagcgaaagaaatccttccaagaacattcgcatgatgcaggcccaggaggcggtttcgagggttaaacgaatgcagaaggcagctaaaattaaaaagaaagcgaattctgagggggatgctcaaactttaacagaggttgacctgtttatttcaacccagcggatcaaagtgctaaatgccgatacgcaggagaccatgatggaccatgctctacgcacaatttcttacattgcagatattggaaatattgttgttctcatggctaggagaaggatgccccggtcagcaagccaggattgcatcgaaacaacgccaggagcccaggagggcaaaaaacagtataagatgatttgtcacgtgttcgagtccgaagacgcccagttaattgcacaaagcattgggcaagcgtttagcgtcgcctaccaggagtttctgagggctaacgggattaacccagaggacctgagccagaaagaatactcagacatcatcaatacccaagagatgtacaatgatgacctcattcatttctcaaactccgaaaactgcaaggagttgcagctcgagaagcataaaggggagatactcggggtggtggtcgtagagagtggctgggggagcattttgcctacagttatcctggctaacatgatgaacggggggcctgcggcccgcagtgggaagttaagtattggggaccaaatcatgtctatcaatggtacgagtttggtggggctgcctctggccacgtgccaggggattattaaagggcttaaaaaccagactcaggtcaaattgaatatagttagctgtcccccagtgaccactgtgctgatcaagcgacccgacttaaagtaccagctcggctttagcgttcaaaatggcataatttgctctctgatgaggggcggcatagccgaaagaggcggtgtccgagttggacatagaattattgagatcaatggccagtcagtggttgctaccgcccatgagaagatagtccaggctctcagtaacagcgtgggagaaatccacatgaagactatgccagctgctatgtttaggctgctgactggccaggagacacctttatacatatag

SEQ ID NO: 108092 - DNA, 2127 bp, synthetic construct
  misc_feature 1..2127: note = Description of Artificial Sequence: Synthetic coding sequence
  source 1..2127: mol_type = other DNA
atgagcgtaccctcctccctttctcagtccgctattaacgccaattcccacggaggtccagcactctccttgccactgccccttcacgcagcccacaatcaactactaaatgccaagctgcaggcaactgccgtgggtccgaaggaccttagatctgccatgggagagggaggaggcccagaacctggtcccgcaaacgctaagtggctgaaggagggccaaaaccaattgcgacgcgcagctacagcacacagagatcaaaatcggaacgtgaccttaacactggcagaagaggcctctcaggagcccgaaatggcccccttgggaccaaaaggcctgatacacctgtactcagaactggaactctccgcccataacgctgctaaccgagggttacgaggacctggcttgatcatttccacacaggaacagggccctgacgagggtgaagagaaggcagctggtgaagcagaggaggaagaagaggacgatgacgacgaggaggaggaagaggacttgtcctccccgccaggcttgcccgagcccctcgagtctgtcgaggccccacccagaccccaggcacttactgacgggccacgcgagcactctaaatctgcatcccttctcttcggcatgcgcaactccgcagccagcgatgaagatagttcatgggcaacactgtcacaaggtagcccatcctatgggtcaccagaggatacagattccttttggaaccccaacgcatttgaaactgactccgacttgccggccggatggatgcgagttcaggatacttctgggacttactactggcacattcccacagggaccacccagtgggaacctccaggaagagcttccccatctcaaggctctagcccgcaggaggaatcacagctgacttggacaggatttgcgcacggggagggattcgaagatggagaattctggaaggacgaaccctcagacgaggccccaatggaacttggcctgaaggaacccgaagagggcacccttacattcccagcacagagtctcagtcctgaacctctgccccaggaagaggagaagcttccacctagaaatactaaccccggtataaaatgctttgccgtgcgaagccttggatgggtcgagatgacagaggaagagctcgctccgggccggtcttcggttgccgtgaataactgtatcaggcagctttcttaccataagaataacctccacgatccaatgtccggggggtggggcgagggtaaagatcttcttctccagctagaggacgagaccctgaagctcgtcgagccccaatctcaggctcttcttcacgcgcagcctattatatccataagagtatggggagtggggcgggacagcggacgtgactttgcctacgtggcgcgagacaagctcacacagatgctgaagtgtcacgtcttcaggtgtgaggccccagctaagaatatagctacgtccctccatgaaatttgcagtaagattatggccgaaaggagaaacgcacgctgtctggtgaacggcctgagtctggatcactccaagttggttgacgtccctttccaggtggagtttccagcccctaaaaatgaactggtgcagaaatttcaagtctactacctgggcaacgtgcctgtagccaagcctgttggcgtagatgtcattaacggggcactagagtccgtgctgagttcctcatcacgggaacagtggacaccaagccacgtctccgtcgcacccgcaaccctgaccatcctgcaccagcagactgaggcagtacttggcgagtgtcgggttcgattcttgagtttccttgcagttggccgcgacgtgcatacctttgcattcattatggctgctggtcccgcctcattctgttgccatatgttttggtgcgagcccaatgccgcgagtctgtccgaggcggtgcaggctgcctgcatgttaaggtaccagaagtgccttgacgcacggtcccaggcttcgaccagctgcttacccgccccacccgccgagagtgttgctcgcagggtcgggtggacagtcagacgaggggtgcagagtttgtggggatctctcaagcccaagcgtctcggtgcgcacactccctag

SEQ ID NO: 108093 - DNA, 2127 bp, synthetic construct
  misc_feature 1..2127: note = Description of Artificial Sequence: Synthetic coding sequence
  source 1..2127: mol_type = other DNA
atgagcgtgccaagctcactgtcccagagcgctattaatgccaactcccacgggggcccagccctcagcctccctcttcctctgcacgcagcccacaatcaactactgaatgccaagttgcaggccacagccgtcggacctaaagacctgcgaagcgctatgggcgagggaggcggacccgagcccggcccggccaatgccaagtggcttaaggaaggacagaatcagctacgtagagccgcaacggcccatcgggaccagaacagaaacgttacattgacactggccgaggaagccagccaggagccggagatggcccccctcggccctaaaggtcttattcacttatactcagaactcgagctcagtgcacacaatgcagctaatcgaggccttcgcggccctggactgattataagtacacaagagcagggcccagacgagggcgaagaaaaggctgctggagaggccgaagaggaggaggaggatgacgatgacgaagaagaggaagaggatttgtcctcccctcccggactgcctgagcccctggaaagcgtggaagcacccccgaggcctcaggccctgaccgacggccccagggagcattccaagagtgcttccctcctgttcgggatgcggaattctgccgcctctgatgaagacagtagctgggccacactgtcccagggtagcccgtcttatggaagccccgaagacaccgactccttctggaatcccaacgccttcgagaccgattcggatcttcctgctggctggatgcgggtgcaggacacttctggcacttactactggcatattcctactggaacaacccagtgggagccgcctggtagagcctctcccagccaggggtcctccccccaggaagagagccagcttacctggacgggttttgcacacggagaagggtttgaggacggtgaattttggaaggatgagccgagcgatgaagcccctatggagctgggactgaaagagccagaggaaggtacactgacctttccggcacagtctctgtcccccgaacctctgccccaggaagaggagaaactgcctcctcgcaataccaatcctggtatcaagtgttttgccgtccggtctttaggatgggtggagatgactgaagaggaacttgccccgggtcggtcttccgtcgcggttaacaattgcatccgccaactaagctaccacaagaataatttgcatgacccaatgtccggtgggtggggagaagggaaagatctcctgttgcaactggaagatgaaaccctcaagctggtggagccccagtcgcaagctttgcttcatgctcagccgatcatctccattcgcgtttggggcgtggggagggacagtggcagagattttgcatatgtcgcacgggacaaactgacccagatgctaaagtgccatgtgtttcgatgtgaggctcccgcaaaaaacattgctacgtcacttcatgaaatctgctctaagataatggctgagaggagaaatgcccgctgtctggttaatgggttgtcactagaccatagcaagctggtggatgtgccattccaggtggagtttccggcaccaaaaaacgagttagtacagaagttccaggtgtattatcttggaaatgtgcctgtggccaaacctgtgggcgtggacgtaataaacggcgccctggagagtgtgctgagctccagctcccgggaacagtggacaccctctcatgtgtctgtggcccctgcgacactgaccattttgcatcagcagactgaagcagtcctcggagaatgccgagtgcggtttctgtccttcctggccgtcgggcgcgacgtgcatacattcgctttcatcatggcagcagggcccgcctctttctgttgtcacatgttctggtgtgagcccaacgccgcctcattgagtgaggccgtccaggccgcatgcatgctacgctatcaaaaatgcttggatgcgaggagccaggccagtacaagctgcctcccagcccctccagcagaatccgtggcccgtcgagttggttggacagtgaggcgaggcgtccagtcactgtgggggagtctaaaaccaaagagactgggagcccataccccctag

SEQ ID NO: 108094 - DNA, 2133 bp, synthetic construct
  misc_feature 1..2133: note = Description of Artificial Sequence: Synthetic coding sequence
  source 1..2133: mol_type = other DNA
atgagcgtccctagttctctgagtcagagcgccatcaacgcaaattcccacggagggcctgccctgtctctgcccctgcctctgcacgccgcccacaatcaactgcttaatgcgaagctgcaggcgaccgccgtcggaccaaaagatctcagaagcgctatgggggagggcggtgggccggagccgggacccgcaaatgccaaatggttgaaagaaggccagaaccagttaagaagagctgcaacagctcatcgagaccaaaatcgaaacgttacactcacactcgcagaagaagctagccaggagcctgaaatggcgcctctgggtcctaaaggcttaatccacctgtacagcgaactcgaactttccgcacacaacgctgctaatagagggctgagggggccaggactcatcatttccacgcaggagcagggcccggatgagggtgaggaaaaggccgcgggagaagcagaggaggaggaagaggatgacgatgatgaagaagaggaagaggatttgagctcccctcctggccttcctgagcctctggagagcgtcgaggcaccaccccgtccacaggccctgacagacggccctagagaacatagcaaatccgcatctcttctgtttggaatgaggaactccgccgcatccgacgaggatagcagctgggcgaccctgtctcagggatctccctcttacggcagtcccgaagacacggactccttttggaatcccaacgccttcgaaactgactccgacctgcccgccggttggatgcgagtccaagacacgagtgggacatactactggcacatacctacgggtacaacacagtgggagccacctggccgcgcatcccccagtcagggcagtagccctcaggaggagagccagctcacgtggacaggcttcgcacacggcgagggctttgaagatggggaattttggaaagatgagccatctgatgaagcacccatggagcttgggctgaaagaacccgaggagggcactctaaccttcccagctcaaagcttgtctcctgagcctttgcctcaggaggaagaaaaactgccaccgcgcaataccaaccctggcatcaagtgtttcgctgtgagaagcctgggatgggttgaaatgaccgaggaggagcttgccccggggagatcctcagttgccgtcaacaattgcattaggcaattatcctatcacaagaataatctgcacgacccaatgtcgggcgggtggggagaggggaaagaccttctactccagctggaagatgagacactaaagctagtggaacctcagagccaggcgcttctccatgctcaaccaattatctccatacgcgtgtggggcgttggccgtgatagcgggtcaaaccgagattttgcctatgttgcgagggataaactcacacagatgctgaaatgccatgtgttccgctgtgaagcccccgctaaaaatattgctaccagcctccatgagatatgttctaaaatcatggccgagcgacgcaacgcccggtgtctcgtcaacgggctgagcctggaccactcaaagttagtagacgtgcctttccaggtggagtttcctgcgcccaaaaacgagctggtccagaagttccaggtctattacctcggcaacgtgcccgtcgcaaaaccagttggtgtggatgtgattaatggggctctcgaaagcgtgcttagttcatcaagtcgggagcagtggactccaagtcacgtttccgttgcacctgctactctgaccatcctccatcagcagacggaggctgttcttggggagtgtagagtaaggttcctctctttccttgctgttggcagggacgtgcacacattcgctttcattatggctgcaggacccgcctcattttgctgtcatatgttttggtgcgagcccaatgctgccagcttgtcggaagccgtgcaggcggcttgtatgttgcgatatcagaagtgtctggatgctcggagtcaggccagcacgagctgtttacctgcccctccagcagaatctgtggccagacgggtaggttggaccgtgcgacggggagtgcagtccctatggggctccctgaagcccaagaggctgggggcacatacgccctag

SEQ ID NO: 108095 - DNA, 1356 bp, synthetic construct
  misc_feature 1..1356: note = Description of Artificial Sequence: Synthetic coding sequence
  source 1..1356: mol_type = other DNA
atgagggtgcaggacacttccggaacttactattggcacatccccactggcacgactcagtgggaaccgcccggaagagcatcccccagtcagggctccagtccccaggaagagagtcagttaacctggacagggttcgcccacggggagggattcgaagatggcgagttctggaaggatgagccctccgatgaagcacctatggagctcggcctgaaggagcccgaagaaggtacactcacatttccagcacaatctctatcccccgagcccttaccgcaggaagaagagaagttaccgcctcgtaatacgaatcctggtataaagtgctttgccgtgcgttccctgggatgggtcgagatgacggaggaagaactcgcaccaggcagaagttcggtagctgtcaacaattgcatccgtcagctaagttaccacaagaacaatctacatgatcctatgtctggcgggtggggagagggcaaagatttgctgctgcagctcgaagacgaaaccttaaaactggttgagccccaaagtcaggccctgttacacgcacagcctattatcagcatccgtgtttggggagtgggaagggattcaggttctaatcgtgatttcgcctatgtggctagagacaaactgacccagatgctaaaatgtcacgtatttaggtgtgaggcccctgcaaagaatatcgcaacaagtctgcatgagatctgttcaaagatcatggccgagaggaggaatgcccgctgtttggtgaacggattgtcgctggaccacagcaaactggtggatgtgccgttccaggtggaattccccgcgccaaagaatgagcttgttcagaagttccaggtatattatctgggcaatgtcccggtcgctaaacctgttggcgtggacgtaatcaacggtgctctggaatcagtcctatcttcaagttcacgcgaacagtggacccctagccacgtgagcgtagctcctgccactcttactatccttcaccaacagacagaagctgttctgggcgagtgtcgggtgcgctttctgtccttcttggctgtgggaagggatgtgcacaccttcgcctttatcatggcagcgggccccgcaagcttttgctgtcatatgttctggtgcgaacccaatgctgccagcttatctgaggcagtgcaagcggcatgtatgcttcgttaccagaagtgcttggacgcacgctctcaggcaagtacttcttgcttgccggccccaccagcagaatctgtcgcccgaagggtgggatggacagtgcgacggggtgttcagtctctctggggatcattgaagcctaaacgcctcggtgcgcatacgccctag

SEQ ID NO: 108096 - DNA, 1680 bp, synthetic construct
  misc_feature 1..1680: note = Description of Artificial Sequence: Synthetic coding sequence
  source 1..1680: mol_type = other DNA
atgagtgtaccaagctctttgagccagtcagcgatcaacgcaaactcacatgggggacctgccctgagtctgccactgccactacacgccgcccacaatcagttactcaacgccaaactccaggccaccgccgtggggccgaaggacctgcatagtaagagtgcctctttgctgtttgggatgcggaactccgccgcctcagacgaagatagctcatgggcaacactgagccaggggtccccaagttacggtagccctgaggacactgattctttctggaatcctaacgccttcgagaccgactcagacctgcccgcaggatggatgcgcgtgcaggatacgagtggcacatattactggcatattcccaccggaacaacccagtgggaaccacctggcagagctagcccgtcgcaggggtcgagtcctcaagaagaatcccagttaacatggaccgggtttgcccacggggagggcttcgaagatggcgaattctggaaggatgaaccctccgacgaggcacccatggagctgggactgaaggaaccagaggagggcaccctgacgtttcctgcccagtctttatctcccgagccactcccacaggaggaggagaagctgcctcctaggaacaccaatcccgggattaaatgttttgccgtgaggagtcttgggtgggttgaaatgactgaggaggagctcgctcctggtcgttccagcgtggcagttaataattgcatccgccagttgtcctaccacaagaataacttgcacgaccctatgagtggaggttggggggaaggtaaagacctcctgctgcagcttgaggacgaaacgctaaaacttgtggaacctcagtctcaggctctgctccatgcccagccaatcatctccattagagtgtggggagttggtcgcgactcagggtcaaacagagactttgcgtatgtcgcccgcgataagttaacacagatgctgaagtgtcatgtcttccggtgtgaggccccggcaaaaaacatagctacctcactgcatgagatctgcagtaagatcatggccgagagacgcaacgcacgctgtttggtgaacggattgagtctggatcattccaagttagtggacgtcccttttcaagttgaatttcccgctcctaaaaacgagttagtacagaaattccaggtctactaccttgggaacgttccggtcgcaaagccggttggtgtggatgtaatcaatggggctttagaatcagtgctctcatcttcatctcgcgaacagtggaccccaagtcacgtgagtgtggcccctgccacactcacgatcctgcatcagcagacagaggcagtgctgggagaatgtcgagtacgcttcctcagctttcttgccgtgggtcgagatgtccatacgttcgcttttattatggccgccgggccagcatctttttgctgccatatgttctggtgtgaacccaatgctgcctccctttcggaggccgtacaggctgcatgcatgctccgctatcaaaagtgtttagatgcccgatcacaagctagcacctcctgtctgcccgctccgccagccgaaagtgttgcacggagagtggggtggactgttcggcgcggggtgcaaagcctttggggatcgctgaaacccaagcgacttggcgcacatacgccttag

SEQ ID NO: 108097 - DNA, 1428 bp, synthetic construct
  misc_feature 1..1428: note = Description of Artificial Sequence: Synthetic coding sequence
  source 1..1428: mol_type = other DNA
atgactcaaatgagggattcgttctggaatccaaacgcgttcgagacagattctgacctccctgcgggttggatgagggtccaagacacctccggaacctactactggcatattccgacgggcaccacacagtgggagccccctgggcgggctagcccaagccagggctctagccctcaggaggagtcccaactcacttggactgggtttgcccacggggagggcttcgaagatggggagttctggaaggatgagccatctgatgaggccccaatggagctcggcctgaaggagcccgaagagggaactctgactttccccgcccagtcactgtcaccagagccattacctcaggaagaggagaagcttcctccaagaaataccaatcctgggataaaatgcttcgctgtgaggtccctgggctgggttgagatgacggaagaggaactggcccctggtagaagctccgtcgccgtgaataactgcatcaggcaactcagttaccataaaaataatcttcacgatcctatgtccggagggtggggggaaggaaaagacctccttctgcagctcgaggatgagactctcaaactggtagagccacagtcgcaggccctccttcatgcccagccaatcatcagcattagggtttggggggtcggacgggattccggttctaatcgggattttgcctacgtggcccgagacaagctcacacagatgctcaagtgccatgtgtttaggtgcgaagcccctgccaagaacatcgccacaagtttgcacgaaatatgttccaaaatcatggccgaacgcaggaatgcaaggtgcctcgtgaatgggctgagcctggaccatagcaaactggtcgacgttcctttccaggtcgaattcccagctcccaagaatgaactggtgcaaaagttccaggtgtattacctgggcaacgtccccgtggctaaacccgttggggtggacgtcatcaacggagctttggagtcagtcttgtcgagtagttccagggaacaatggactccctcccacgtgtccgtggctcccgctacacttaccattcttcaccaacagactgaggcggtgctgggcgaatgtcgcgtgcgcttcttatcattcctggccgtgggacgtgatgtgcacactttcgcgtttattatggccgctgggccagccagtttttgctgccacatgttctggtgcgagcccaacgccgcttcgctgagcgaggccgtgcaggctgcttgtatgctgagataccagaagtgtcttgacgcgagatctcaggcatccacgagttgcctcccagctccacccgccgaaagcgtggcccggagagtaggttggaccgtcaggagaggcgtccagagcctgtggggaagcctgaaaccaaagcgcctgggtgcgcacaccccgtag

SEQ ID NO: 108098 - DNA, 2277 bp, synthetic construct
  misc_feature 1..2277: note = Description of Artificial Sequence: Synthetic coding sequence
  source 1..2277: mol_type = other DNA
atgtccgaggtattacctgccgactcgggcgtggataccctggccgtgtttatggcaagctcaggcaccaccgacgtgacaaacagaaactcgccagcgacacctccgaatacgctcaatctccggagtagtcataacgagctcctcaacgcagagataaagcacactgagacaaaaaatagcactcctcctaagtgccggaaaaagtatgctttgactaatattcaggccgctatggggttgagcgaccccgcagcccagccactgcttggcaatggttctgctaacattaaattagtgaagaatggtgagaaccagctgagaaaggccgccgagcagggccagcaagacccgaacaaaaacctctctccgactgctgtcattaacatcacctccgagaagttggagggcaaagaaccccacccacaggatagcagctcctgtgaaatcctcccttcccagcccagacggactaagtcttttttgaattattatgcggacttggagacttccgcccgggagttagagcaaaaccggggaaatcatcacgggaccgccgaagagaaaagccagccagtgcagggacaggcaagcacaatcatcggcaacggtgacttgctgctacagaagcccaataggccgcaaagcagtcctgaagacggccaggtggctacagttagcagtagtcctgagaccaagaaagatcatccgaagacaggcgccaaaaccgattgcgcacttcatcggatccagaacctcgctcccagtgacgaggagagtagctggactaccttgtcccaggacagcgctagcccctcatcccccgatgaaacagatatctggtcagaccactctttccaaactgacccggatctcccccctggctggaagcgggtatctgatattgccggaacatactactggcacatcccgaccggaactactcagtgggaaaggcccgtgtctatcccggcagatctgcaggggagccggaaagggtctttatcatccgtgacaccgtcccccacaccagagaatgagaagcagccttggagcgatttcgcagtactcaacggcggaaaaataaatagcgacatttggaaggacttgcacgcagccaccgtcaaccctgatccatccctgaaagaattcgagggcgccaccttgagatatgcatccttaaagctgcgaaatgcaccccatcccgatgatgacgactcatgttcaattaactccgatcccgaggcaaagtgtttcgctgtgaggtcactcggatgggtggagatggcagaggaggatcttgctccaggcaagtcctcagtcgccgtcaataactgcattcgccaactgtcctactgcaaaaacgacatccgagacacagtcggcatttggggcgagggcaaagacatgtatctgatccttgagaacgatatgttgtcattagttgatcctatggaccgttctgtcctgcattcccagccgattgttagcatccgggtctggggcgtggggcgcgataatggccgcgactttgcttacgtggctcgagacaaggacactaggatcctgaagtgtcatgtcttcagatgtgacacacctgccaaggccatcgctacatctcttcatgagatctgctcaaaaatcatggcggaaaggaaaaacgctaaagcactcgcctgctcctccctgcaagaaagggctaacgtgaacctcgacgtcccactacaggtagacttccctactccaaagaccgaactagtgcagaaatttcacgtgcaataccttggaatgctgcccgttgataagccagtagggatggatatcctaaattccgccattgagaacttaatgacttctagcaacaaggaggactggctatctgtgaacatgaatgttgcagacgctacagtgacagtcatctcagagaagaacgaggaagaggtgctggtagagtgtagagtacgcttcctcagcttcatgggggttggcaaggacgtgcacacatttgcttttatcatggacaccggaaaccagagatttgagtgccacgttttctggtgtgagcctaatgctggcaatgtgagtgaggcagtccaggccgcctgcatgcttaggtaccaaaagtgcttggtggccaggcccccctcccaaaaagtcaggccccctccaccacccgcagattcggttacccgaagggtcaccacaaatgttaaaaggggtgttctttctctgatagatacacttaaacagaagaggcccgttaccgagatgccttag

SEQ ID NO: 108099 - DNA, 2274 bp, synthetic construct
  misc_feature 1..2274: note = Description of Artificial Sequence: Synthetic coding sequence
  source 1..2274: mol_type = other DNA
tcccattgtatacccgcagattccggggtagataccttggccgtttttatggcctcaagcggtacaaccgacgtgaccaatcggaattcacccgccacccccccgaatacgctgaacctccgctcctcccataatgagctcttaaatgcagagattaaacacaccgagactaaaaatagtacacctccaaaatgccgaaaaaagtatgccctaaccaacatccaggcagccatgggtctttccgatccagcagctcagcctctgttgggcaatgggtcggctaatatcaaacttgtaaaaaacggcgagaaccagctgcgcaaggccgccgagcaggggcaacaggatcccaacaagaatctgtcccctaccgcagtgattaacattacatccgagaaactggaaggcaaggaaccgcatccccaggactcatctagctgtgagatattacctagtcagcctcggagaactaaatctttcctcaactattatgccgacctggaaacctcagccagagagctggagcagaacagaggaaaccaccacggaacagccgaggaaaagagtcagccagtgcagggccaagcaagtaccatcatcgggaatggcgacctcctcctgcagaagcctaacaggccccaaagctctccggaagacggccaggtggccactgtgagttccagccccgagaccaaaaaagaccaccccaagacaggggctaaaacagactgcgcgctccaccgcattcagaatctggccccttccgatgaagaatcatcatggaccaccctcagccaggacagcgcctccccctcgtccccggacgagacagacatttggtctgatcactcattccagaccgacccagacttgcctccaggatggaagagagtgtctgatatagccggcacatattactggcacatcccgacaggcactacccagtgggaacggcctgtaagcatcccagcggatctgcagggtagccggaaggggagcctctccagtgtcaccccaagtcccactcctgagaacgaaaaacagccctggtctgatttcgccgtgctgaatggtgggaagataaactctgacatatggaaagacctccatgccgcaacagtcaatcccgatccatcacttaaggagttcgagggggccactctccggtacgcctcacttaaactgcggaatgcccctcatcctgatgacgatgactcctgctctataaattctgatccagaggccaagtgctttgcagtgagatccctgggttgggtcgaaatggctgaggaggatctcgctccgggaaaatccagcgtggcagtcaacaattgcattaggcagctaagctactgcaagaacgacatcagggatactgtcggtatatggggcgagggcaaagacatgtatcttatactggaaaatgacatgctgtctctggtggaccctatggacaggagtgtgctccactcccagccaattgtatctatccgcgtgtggggcgtgggtcgcgacaatgggcgcgacttcgcctacgtggcaagagacaaggacacgcggatccttaagtgtcacgtgttccgatgtgatacaccggctaaagctattgccacctccctgcacgagatctgtagcaaaataatggcagaacgaaagaatgccaaagcactggcctgcagctctctgcaagagcgcgctaatgtcaacctggatgtaccccttcaggtggatttcccaaccccaaagacggagcttgtacaaaaatttcatgttcagtaccttggaatgctccccgtcgacaagcctgtgggtatggacattctgaacagcgcaatagagaacttgatgacgtccagcaacaaggaagactggttgtctgtgaatatgaacgtggccgacgctactgtcaccgtcatcagcgaaaaaaatgaggaagaagtgctggttgagtgtcgggtgagatttcttagcttcatgggagtggggaaggatgtacataccttcgcttttattatggatactggcaatcaacggtttgagtgtcatgttttctggtgcgagcccaatgcaggcaatgtcagtgaagccgttcaggctgcatgtatgctgagataccagaaatgcctcgttgctcgacctccaagccagaaggtccggccacctccgcctcctgctgattccgtcacccgcagagtgaccacaaacgtgaaacgcggggtattgtctttaatagatacactcaaacaaaaacgcccagtgacagagatgccctag

SEQ ID NO: 108100 - DNA, 633 bp, synthetic construct
  misc_feature 1..633: note = Description of Artificial Sequence: Synthetic coding sequence
  source 1..633: mol_type = other DNA
atggccgagcgcaagaacgccaaagctctcgcttgttccagtctgcaggaacgggcaaacgtgaatctggacgtacccctgcaggtggacttcccaacgccaaaaacggaactcgtccagaaatttcatgtgcaatacctgggtatgctgcctgtcgataagcctgtgggtatggacatcctgaattcagccattgaaaacctcatgacatcttcaaataaagaggactggctcagcgtgaacatgaacgttgctgacgccacagtcactgtaatatctgagaagaacgaggaggaggtgttagtagagtgtcgagtgcggtttttgtcttttatgggtgtaggcaaggatgtgcacacattcgccttcatcatggatactggcaaccagcggtttgagtgtcacgtgttctggtgcgagcctaacgccggaaatgtttcggaggcggtacaggcagcttgcatgctgcgataccagaagtgtcttgtcgcacgcccacccagccagaaggttagacctccccctccgccagccgattccgtcacccgccgtgtgactaccaatgttaagagaggcgtgttaagcctgatcgacacgcttaaacagaagcgacccgtaacagagatgccttag

SEQ ID NO: 108101 - DNA, 33 bp, synthetic construct
  misc_feature 1..33: note = Description of Artificial Sequence: Synthetic coding sequence
  source 1..33: mol_type = other DNA
atgtcagaagtgctcccagccgatagtggctag

SEQ ID NO: 108102 - DNA, 633 bp, synthetic construct
  misc_feature 1..633: note = Description of Artificial Sequence: Synthetic coding sequence
  source 1..633: mol_type = other DNA
atggcagagcgcaagaatgccaaggccttggcctgcagttccctccaggaacgcgctaacgtgaatttggatgtgccactgcaggtcgatttcccaacccctaaaactgaactcgtccaaaaatttcacgtgcagtatttaggcatgctgcctgtggacaaacctgtgggcatggatattctcaatagcgccatcgaaaatctgatgacgtctagcaataaggaagattggctttccgtgaacatgaacgtcgcggatgcaaccgttacagtgatcagcgagaaaaacgaggaagaagtgctggttgaatgtagagttcgctttctgtccttcatgggtgttggaaaagatgtccacacattcgcattcatcatggacacagggaatcaaagatttgaatgccacgtgttctggtgtgaaccaaatgctgggaacgtttccgaggcagtccaggctgcctgcatgttacgctaccaaaaatgcctcgtcgccaggccaccttcacaaaaggtgcggcccccccctccccctgcagacagtgtcactaggcgcgttactacaaacgttaagcgcggcgtgctgtccctgattgacactctgaagcagaaaagacccgtaacagagatgccctag

SEQ ID NO: 108103 - DNA, 2214 bp, synthetic construct
  misc_feature 1..2214: note = Description of Artificial Sequence: Synthetic coding sequence
  source 1..2214: mol_type = other DNA
atgagcgaagtcctgccagctgattctggagtggataccctcgctgtttttatggcctcatcaggcacgacagacgtgactaatcgcaacagcccagccactcctcctaacactctcaaccttcgatcatcccacaacgagctactcaacgcagagattaaacataccgaaacaaagaatagcacaccgccaaagtgtaggaaaaaatatgcccttacaaatatacaggctgctatgggactcagcgatccagccgcccaaccactgctgggcaatggcagcgccaatatcaaactggtgaagaacggggaaaaccaattgaggaaggccgcagagcaggggcaacaggatccaaacaagaatctgagccccaccgcagtgattaatattacgtccgagaagcttgaaggcaaagagccacatcctcaggattcatctagctgcgagatactccccagccaaccacgtagaacaaaatcatttctgaattactatgcagatttggaaaccagcgcgcgggaattggagcaaaatcgaggtaaccaccacggcactgcggaagagaagagtcagcctgtgcagggccaggctagtacaataattgggaatggcgatctgcttttgcagaaacccaaccgcccacagtccagccctgaagacgggcaggtggcaaccgttagctcctcacccgaaactaagaaagaccatcctaaaactggggccaagaccgattgcgccttacatagaatccaaaatctcgctccctcagacgaagagagctcatggacgactctaagccaggatagcgcgtcaccgtctagccccgatgagaccgacatctggagtgaccactctttccagaccgatccggacctcccaccaggttggaagcgcgtaagcgacatagctggcacctattattggcacattccaacaggtaccactcagtgggaacgccccgtgtcaattccggccgatctgcaagggagccgaaaaggctcactctcgtccgtgaccccttcaccgacaccggaaaacgaagatctgcacgccgccacggtaaacccagatcccagcctgaaggagttcgagggtgccactctgaggtatgcatccctgaaattgcgtaatgcaccacatcccgacgacgatgattcatgttccattaactcggatcccgaagccaagtgctttgccgtgcgctcgctgggatgggtggagatggctgaggaagacctggcacccggcaagtcctccgtggccgtgaacaactgtatcaggcagctgtcgtattgcaaaaacgatattcgggatactgtcgggatttggggggagggtaaggacatgtacctcatcctagaaaatgacatgcttagtctggttgatcctatggaccggagtgtgctacactcccagcctattgtgtctatacgggtgtggggagttgggcgagataacgggcgagactttgcttacgtcgcgcgggacaaagatactcgtatcttgaagtgtcatgttttccgctgcgacacacccgctaaggccattgctacatcactccacgagatatgtagcaaaatcatggctgagaggaagaacgcaaaggcactggcttgctcctctttgcaagaacgcgccaatgtgaatctggatgttcccttgcaggtcgattttcccacccctaagaccgagctggtacaaaagtttcatgtgcaatacttgggaatgctcccagttgataagccggtgggaatggatatcctgaactctgccattgagaacctaatgacgtcaagcaacaaggaagattggctcagcgtaaacatgaacgtggctgatgccacagtgactgtcatcagcgaaaagaatgaggaggaagtcctggtcgaatgccgcgtgcggttccttagcttcatgggagttggcaaggacgtgcataccttcgctttcataatggataccggcaatcagaggttcgagtgtcacgtgttctggtgtgaaccgaatgccgggaatgtgtctgaggccgttcaggccgcttgtatgctgcgttaccaaaaatgcctcgtcgctcgccctccgagccagaaagtacgccctcctccgccacctgccgattccgtcaccaggcgggtcacaaccaatgtgaaaagaggagttctctctctgattgacaccttgaagcaaaaacgcccagtgaccgaaatgccttag

SEQ ID NO: 108104 - DNA, 2280 bp, synthetic construct
  misc_feature 1..2280: note = Description of Artificial Sequence: Synthetic coding sequence
  source 1..2280: mol_type = other DNA
atgtctgaagtcttgccagcagattccggtgtagataccctcgcagtctttatggctagcagtggaacaaccgacgtgacaaaccggaattccccagctactcccccgaataccctgaacctccggagtagtcacaacgagctgctaaacgctgagatcaaacatacggaaacaaagaactcaacccccccaaaatgtagaaagaaatacgcactgacaaacatccaggccgccatgggactgtccgaccccgctgcacaaccgcttctgggaaatgggagcgctaacatcaaacttgtcaaaaatggagaaaaccagctgcgcaaagccgcagagcagggacagcaggatcctaacaagaatctctcaccaactgccgtgattaacatcaccagcgagaagctcgagggaaaggaaccgcatccccaggatagctccagttgtgaaatcctcccatcccagccccgaagaaccaaatcatttttaaattactacgctgatcttgaaacgtctgcccgcgaactggagcagaacaggggtaaccatcacggcacagccgaagagaagtcacaacctgtgcagggacaggcaagcactataattggaaatggagacctacttctacagaaaccgaaccgaccccagtcctcccccgaggatggacaagttgccactgtgtcttctagtcccgagaccaagaaggaccaccccaagactggcgctaagaccgactgtgcccttcaccggattcaaaacttggccccatctgacgaagagtcctcttggacaactctctcacaggactcagcatcccctagctctccagacgagactgcagacatctggtcagatcattcattccaaacagaccccgatctgcctcctgggtggaaacgtgtgtctgacatagccggcacgtattattggcacattccgacaggcacgacacagtgggaaaggccagtgtctatcccagcagacctgcagggatctagaaagggcagcctgtccagcgtgaccccctctcctactcctgaaaacgagaagcaaccctggtctgatttcgctgtactaaacgggggcaagattaactccgatatttggaaggacttgcatgccgcgaccgtgaaccctgatcctagcctaaaggaatttgaaggggccacacttcggtatgccagtcttaagctgaggaacgcaccgcatcctgacgatgacgattcctgtagtattaatagcgatcccgaggccaagtgctttgccgtgcggtccctcggatgggtggagatggccgaagaggatctggccccgggaaagagctcagttgcggtgaataattgtattcgacagctgtcttattgcaagaacgacattagagatacagtgggtatctggggggaaggcaaagatatgtatctcatacttgaaaacgacatgctttccctcgtggatcctatggaccgaagcgttctccactctcaacccattgtgtctatccgcgtgtggggagtgggccgggataatggtagggattttgcgtacgtggctcgagacaaggatactagaatactcaaatgccacgtcttccgatgtgatactcctgccaaggccatcgcgaccagtctccacgaaatttgcagcaaaatcatggcggagcgaaagaacgcgaaggctttagcatgttcaagcctgcaggagagggccaacgtcaatcttgacgtgccactgcaggtagacttccctactcccaaaacagagctggtccagaagtttcacgtgcagtacctcggcatgctgcccgtggacaaacccgtgggcatggatatcctgaattcagccatcgaaaacctgatgactagcagtaacaaggaggattggctctcagtaaatatgaacgtagccgacgctaccgtcactgtgatcagcgagaaaaatgaggaagaggtgttggtggagtgcagagtgcgctttctctcctttatgggcgttggaaaagacgtgcacactttcgcattcattatggacacagggaatcagcgcttcgagtgtcatgtattttggtgtgagccaaatgctggaaacgtctctgaggccgtacaggcggcatgtatgctgcggtaccagaaatgcctggtggcacgacccccttcacagaaagtccgaccacccccacctcctgccgactctgtgacaaggcgagtaacaactaatgttaaacggggggtattgagtctgattgataccctcaagcaaaagagacctgtgaccgaaatgccctag

SEQ ID NO: 108105 - DNA, 84 bp, synthetic construct
  misc_feature 1..84: note = Description of Artificial Sequence: Synthetic coding sequence
  source 1..84: mol_type = other DNA
atgtcggaggtgctgcctgcagactcgggcgttgacactctggctgtctttatggcctcctctggtactacagacgttacgtag

SEQ ID NO: 108106 - DNA, 207 bp, synthetic construct
  misc_feature 1..207: note = Description of Artificial Sequence: Synthetic coding sequence
  source 1..207: mol_type = other DNA
atgtcagaggtgctcccagccgatagcggtgtcgacacactggcagtgttcatggcttcctcgggcactacagatgtcaccaaccggaactccccagcgacacctcctaatactcttaacctgcgctccagtcacaacgagctcctgaacgccgagatcaagcatacagaaacgaagaactccactccccctaaatgtaggaaatag

SEQ ID NO: 108107 - DNA, 2211 bp, synthetic construct
  misc_feature 1..2211: note = Description of Artificial Sequence: Synthetic coding sequence
  source 1..2211: mol_type = other DNA
atgtctgaagttctccctgccgacagtggagtggacacacttgccgtgtttatggccagcagcggtacaactgatgttactaaccgaaatagcccggcgaccccacccaatactctcaacctcagatccagccataacgagctgttgaatgctgaaatcaagcacacggagacaaagaactccacgccccctaaatgtcgtaaaaagtatgccttgaccaatatccaagccgcaatgggcctctctgaccctgctgcacagccccttcttggcaacgggtccgccaacattaaactggtgaagaatggtgaaaaccagttgcggaaggccgctgaacagggtcagcaagaccccaacaagaacctgtcccccaccgcggttataaatattaccagcgagaagctcgagggcaaagagcctcacccccaagattcatcatcttgtgaaattctgccatcccaacccaggaggactaaatctttcttaaactattacgctgacctcgagacatcagcccgcgagctagagcagaatcgaggcaaccaccacggtaccgcggaggaaaagtcccaaccagtccagggacaggccagcactatcattggcaatggcgacttattgttgcagaaaccaaaccggccccagtcatcgccagaagacggccaggtggctaccgtgtcgagctcccccgagaccaagaaagatcatcccaaaaccggcgctaagactgattgcgccctacaccgtatacaaaacctggctccatccgacgaggaatccagctggacaacgctaagtcaggacagcgcctctcccagtagcccagacgagactgacatctggagcgaccacagttttcaaactgatcccgatttgcccccagggtggaagcgggtctctgatatagcgggcacatattactggcatatacccaccggcactacccagtgggaaaggccagtgtcaatccccgctgatctccaaggcagtaggaaggggtctctgtcatccgttacaccctcccctactccggaaaacgaagatttgcacgcggctacggtgaacccagaccctagcctgaaggaatttgaaggggccacccttaggtacgcctcgctaaaactcaggaatgcgccacatcctgacgatgacgattcttgctccattaactcagatcctgaggcgaaatgtttcgcagtcagaagcctgggatgggtggagatggcagaagaggatttagctcctgggaagtcaagcgtagccgtcaacaattgcattagacagctgtcctactgcaaaaacgatattagagataccgtcggcatctggggtgagggcaaagatatgtatctcatacttgagaatgatatgctctctcttgttgatccaatggatagatctgtcttgcactcacagcccatagtctcgataagggtctggggagtaggcagggataatggaagggatttcgcctatgtcgcccgcgacaaagataccagaattttgaaatgccatgtcttccggtgcgacaccccagccaaggcaatagcgacaagcttgcacgagatctgctcaaagattatggccgagcggaaaaacgcaaaagcgctggcttgcagctccctgcaggagagagcaaatgttaacctcgacgtgcccctgcaggactttccgacacccaaaactgagctggtccagaagttccacgtgcagtatctggggatgctccctgtcgataaacccgtcgggatggacattcttaacagcgcaatcgagaatctcatgacctcctcgaataaggaggactggctcagcgtaaatatgaacgtggctgatgccactgttactgtgatcagcgagaaaaacgaagaagaagttctcgttgaatgcagagtgcgcttcttatcattcatgggggtcggaaaagacgtgcatacattcgcctttattatggacacgggaaatcagcggtttgaatgccatgtcttttggtgcgagcccaatgcaggaaacgtgtcagaagctgtgcaggcagcctgcatgctgcgttatcagaaatgtctcgtggcccgtcctccatcacagaaggtcagaccgccaccgcccccagccgactccgtgacccgacgggtaaccaccaatgtgaagaggggggtgctgtctctgattgacacccttaagcagaagcgtcctgttacggagatgccgtag

SEQ ID NO: 108108 - DNA, 2187 bp, synthetic construct
  misc_feature 1..2187: note = Description of Artificial Sequence: Synthetic coding sequence
  source 1..2187: mol_type = other DNA
tgagacactctcgccgtctttatggcatcctctggtacaaccgacgtcaccaatcgcaatagcccggccacccctcctaatacattaaacctccgatcttcgcataacgagttacttaacgcagagatcaagcacaccgagacaaagaactccacccccccaaagtgtcgaaagaagtatgctctcaccaacatccaagctgcgatgggtctttctgaccccgcagcacagcctcttctcggcaatggcagcgccaatattaaattagtgaaaaacggagaaaatcaactgcgaaaggccgcagagcaaggccagcaagacccaaacaaaaatttaagtcctaccgctgtgataaacataaccagtgagaaactggagggcaaggagcctcaccctcaagacagctccagctgtgaaattctcccatctcaacctaggcggacaaagtcttttctgaactactacgccgacctcgagactagtgccagggagctagagcaaaaccgcggaaaccaccatggtactgctgaggagaagtctcagcctgtgcagggccaggcatctaccataatcggaaatggcgatctccttttgcaaaagcccaatcgtccccaatcatctcctgaagatggccaggttgctactgtgtcttcttcccccgagactaagaaggaccaccccaaaaccggcgctaagacagactgtgccctgcaccgcatccaaaacttagctccttctgacgaagaaagttcttggaccacactgtcccaggattccgcctcaccttcttctcccgatgagactgccgacatctggtcagaccattctttccagaccgatccggatctgcccccagggtggaagcgagtatccgacattgccggtacctactactggcatattcctaccggcaccacgcagtgggagcgccccgtctccataccagccgaccttcaaggatcacgcaagggcagcctgtcaagtgtcacacccagtcctaccccagagaatgaggacctgcacgcggccacagtcaaccccgatccaagtttgaaagagttcgaaggcgctactctgagatatgcctctctgaagctgagaaatgccccccaccccgatgatgacgactcttgttctataaacagtgatcctgaagctaagtgtttcgccgttcgaagtctgggatgggtggaaatggccgaggaggacctcgcccccggcaagagctcagtcgcggtgaataattgcatacggcagctgtcatattgtaagaacgacatccgagatactgtgggtatctggggagaaggtaaggatatgtatctgattttggagaacgacatgctaagtctggtggaccccatggataggtcagtactgcatagtcaacccattgtgtctatccgtgtctggggcgtgggccgggataatggccgcgatttcgcctacgtcgcccgcgacaaggatacgcggattctgaaatgtcatgtgtttaggtgcgacactcctgcaaaggccatcgccacttctctgcacgaaatctgttctaagataatggcagagaggaagaatgcaaaggcgctggcatgttcatcattacaggagcgagccaacgtcaatctcgacgtccctttacaggtggacttcccaacaccaaagaccgaactggtgcagaagtttcatgttcaatacctgggtatgctgccagtagataaacccgttggcatggatatcctgaactcggccatcgagaatctgatgacttcttcaaataaggaggactggctgtcagtcaacatgaacgtcgcagacgccaccgtgaccgtaatcagcgagaagaacgaggaggaagttctggtcgagtgtagggttcgcttcctttccttcatgggcgtcggcaaggacgtgcacacctttgcattcatcatggacacgggcaaccagcgcttcgaatgtcacgtgttttggtgcgaaccaaatgccgggaatgtctcagaagcagtgcaggctgcttgtatgctcaggtaccagaagtgcctcgtggcaagaccaccctcccagaaggtgcgacccccaccccccccggctgattcagtaacacgtagggtcactaccaacgtcaagaggggagtcctgagccttatcgacaccctgaagcaaaagaggcccgtcactgagatgccttag

SEQ ID NO: 108109 - DNA, 633 bp, synthetic construct
  misc_feature 1..633: note = Description of Artificial Sequence: Synthetic coding sequence
  source 1..633: mol_type = other DNA
atggccgagcgtaaaaacgcgaaagctcttgcttgcagctcactgcaagaaagagctaatgtgaacctggacgtgcccttgcaggtggatttccctacgcccaagactgaactggtgcagaaattccatgtacagtacctcggcatgctgccagtggataagccagtgggcatggatatccttaattccgccatagaaaatctgatgaccagctcgaacaaagaagactggttatctgtaaatatgaatgtggccgacgctacagtaaccgtaataagtgagaaaaacgaggaagaagtgctggtcgaatgcagagtgagattcctgagctttatgggcgtcggtaaagatgtgcacaccttcgcatttatcatggacaccggtaaccagcggtttgagtgtcatgtgttctggtgcgagccaaacgctggcaatgtgagcgaggccgtgcaggcagcatgcatgctgagataccagaaatgtctagttgcaagacctccctcccagaaagtaagaccgccaccaccacccgcagacagcgtgacgcgcagggtcacaacaaatgtcaagaggggagtgctgtccctgatcgacactctgaagcagaagagaccggtaacagaaatgccttag

SEQ ID NO: 108110 - DNA, 1476 bp, synthetic construct
  misc_feature 1..1476: note = Description of Artificial Sequence: Synthetic coding sequence
  source 1..1476: mol_type = other DNA
atgctagggaaggattatatgcttgcgatcatactggtgaattgcgacgacgacttgtggggagaccattctctcgaggtggaggcgggtctgcccccaggctggagaaagatacacgacgcagccggtacatattattggcatgtcccttctggctcaacacaatggcaacgtcccacttgggagctgggagatgccgaagatccaggcaccgggacagaaggaatctggggactaaggcctccgaaagggaggagcttcagttccttggagagttccctggatagaagcaattccctgtcgtggtatggaggcgaaagctatattcaaagcatggaacctggagccaaatgttttgccgtaagatcgctaggatgggtcgaggttccagaggaggacctagcacctggaaagtcctctatcgcagtaaataattgcatccagcagctggctcagactaggtctcgatcccagccccccgacggggcgtggggcgagggacagaatatgctgatgattctgaagaaggatgcaatgtccctggtgaatcctttggaccactcacttattcactgccaacctcttgttcatatacgcgtgtggggtgtgggaagcagtaaaggtaggcctatctcagccccggctcgagactttgccttcgtcgcatccgacaaagacagctgtatgttgaagtgccacgtattttgctgtgatgtgcctgcgaaagcgatcgccagcgccctgcacggcctgtgcgctcagatactttcagaaagagttgaagtatccggcgacgcaagctgttgttctccggatccaatttctccggaggacctcccccggcaggtggagctcttggacgctgtatcacaggctgctcaaaagtacgaggccctgtacatgggcactcttcccgttactaaggctatgggaatggacgttttaaatgaagcgataggtaccttgactgcaaggggcgataggaatgcttgggtgcctacaatgctttctgtttcagatagcctgatgactgcccatcccattcaggctgaggcctcgacagaggaggaaccactctggcagtgtcccgtgcgccttgtcacattcatcggagtcgggagggatcctcacacttttgggctgatcgccgacctgggtcggcagagttttcaatgcgcagctttctggtgccagccccacgctggcggactctccgaggccgtgcaggccgcgtgtatggttcagtaccagaagtgtctcgtggccagcgccgcccgcggcaaagcttggggcgcacaggcgcgggctcggttgagacttaagcgcacatctagtatggattcacccggcggcccactgccattgcctcttttaaagggcggtgtggggggggctggtgcgacgccgaggaaacgcggggttttctcgtttctggacgcctttagactcaaacctagtcttttacacatgccgtag

SEQ ID NO: 108111 - DNA, 1461 bp, synthetic construct
  misc_feature 1..1461: note = Description of Artificial Sequence: Synthetic coding sequence
  source 1..1461: mol_type = other DNA
atgttgggcaaagattacatgcttgctattatacttgttaattgcgacgatgacttatggggtgaccacagtctggaggtagaagcggggttgcctcctggatggaggaaaatccacgatgccgccggtacttactactggcacgtgccatcaggaagcactcagtggcagcgccctacatgggaactgggcgacgcagaagatccgggcaccggtacagagggcatctggggtctacgccctccaaaaggccggtccttctcatccttggaatcttctcttgaccggtcgaactccctgagctggtatggcggcgaaagctatattcagtccatggaaccaggagcgaaatgcttcgccgtgcggagcctgggctgggtagaggttcccgaggaagatttggcccccgggaagagctctattgctgtgaacaattgcatacagcagctggcacagactcgaagtagaagccagcctcctgatggggcctggggtgaaggccagaacatgctaatgattcttaaaaaggacgcaatgagcctcgtcaatccactcgatcactccctgatacactgccagcccttggtacacatacgcgtttggggcgtgggctcttccaaagggcgagatagggatttcgcttttgtggctagtgacaaggattcctgtatgcttaagtgccacgtcttctgctgcgacgtgccagccaaagcaatcgcctcagccctccacggcttatgcgcacagatcctgtccgaacgcgtagaagtgtctggcgacgcatcatgttgcagccccgacccaatcagtccagaggacctcccacgccaggtggaactgcttgacgccgtgtcccaggcggcgcagaaatatgaggccctctacatgggaactttacctgttacaaaggctatgggaatggatgtgctgaacgaagctataggtaccctgactgcaagaggggaccgtaacgcttgggtgccaaccatgctctcagtgagcgattccctgatgacggcacaccctatccaggccgaggcctcgacggaggaggagcccctctggcagtgtcctgtccggttggtgacctttatcggggtcggccgggatccgcacacgttcggtctgattgcagatctggggaggcagagctttcagtgcgctgctttctggtgtcagccacacgccggcggactctccgaggccgttcaggccgcttgtatggtgcagtaccaaaagtgtcttgtggcaagcgcggcgcgggggaaagcctggggggcacaagcccgtgccagactgaggctgaagcgcacctctagcatggattcccccggaggccctctcccactccctctgttgaagggcggagtggggggggcaggggcgaccccacgcaagcgcggcgtgttcagcttcctcgatgcattccgcctgaaaccctccctgttacatatgccctag

SEQ ID NO: 108112 - DNA, 1020 bp, synthetic construct
  misc_feature 1..1020: note = Description of Artificial Sequence: Synthetic coding sequence
  source 1..1020: mol_type = other DNA
atgttgggtaaagattatatgctggccataatccttgtaaactgtgacgacgacttatggggcgatcactcgctggaagtggaagccgggctgccaccagggtggaggaaaatccacgacgccgccgggacttattattggcatgtgccatctggttccactcagtggcagcggcccacatgggaactgggcgacgcggaggaccctggcacggggactgaaggcatctggggcttacgaccccccaaaggcaggagcttttctagcttggaaagttctctcgacaggagtaattccttaagttggtacggcggcgagagttatatccaatcaatggagcctggcgctaaatgcttcgccgttaggtctttagggtgggtcgaagtccctgaggaagatctcgctccaggaaagagctccatcgccgttaacaactgtatccagcaactggcgcagacacggtctcggtctcaacccccggatggagcctggggtgaggggcagaatatgttgatgatcctcaagaaagacgccatgagtcttgtcaaccctttggaccactccttaattcattgccagcccctggtacatattagggtgtggggcgtgggctcctccaaaggcagagacagagacttcgccttcgttgccagcgacaaggatagctgcatgctgaaatgtcacgtgttctgttgtgatgtgcccgccaaggccatcgcatctgccctgcacgggttgtgcgcccagatcctctctgagcgcgtggaggtgtcaggagacgcctcctgttgtagccccgatccgatatctccggaggaccttcctcgccaggtcgagctcctggatgcagtctcgcaggccgcccagaagtacgaggcattatacatgggtaccctgcccgtcaccaaggctatgggccgcggacaatatagaggaggagccatagtcgcagtgccttgcgctccctgtgatatttactggtgttggccaaggccaacacacctgtggccccaccggtag

SEQ ID NO: 108113 - DNA, 1455 bp, synthetic construct
  misc_feature 1..1455: note = Description of Artificial Sequence: Synthetic coding sequence
  source 1..1455: mol_type = other DNA
atgctgggcaaggactacatgctagcgatcatccttgtcaattgcgatgatgatctctggggcgaccactccctggaagtagaggccggccttcctcccggctggcggaagattcatgacgcagctggcacatactactggcacgtgcccagtgggagcactcaatggcagcgacccacatgggagttgggagacgcggaggatccgggtacgggaaccgagggcatctggggtttaagaccacctaaaggacgcagcttctccagcctggagagcagtctcgacagatctaactcattatcctggtatggaggggaatcctatatacagtccatggagccgggagccaaatgcttcgccgtgaggtctttgggatgggtcgaagtgcccgaagaggaccttgcccctgggaaaagctctatcgccgtgaataactgtattcaacaactggctcagacccgctctcgaagtcagccccctgacggagcatggggtgaggggcaaaatatgctcatgatcctgaagaaggacgccatgtcacttgtcaatccgttagaccattctctgatacattgccaacccctcgtgcacatccgcgtttggggagtgggcagcagcaagggaagggacttcgcgttcgtcgctagcgataaggacagctgcatgctaaaatgccacgtcttctgctgtgacgttcccgcgaaggccatcgctagtgctctccacggtctttgcgcccaaattctgtccgagcgtgtcgaagtttccggagacgctagttgttgcagccctgacccaatatccccagaggatctgcctagacaggtggaattactcgacgccgtatctcaggctgcccagaagtatgaagctctgtacatgggaacactacctgttacaaaagccatgggaatggacgtcctgaatgaggcgatcggcacactgactgccagaggggaccggaacgcatgggtcccgactatgctctccgtctcagacagcctcatgaccgcccatcctatccaggccgaagcctcgacggaggaggagccgctctggcagtgtcctgtgcgattggtgacctttattggtgtggggcgagaccctcatacgttcgggttaatcgcggatctgggacggcaaagttttcagtgtgccgcgttttggtgccagccgcacgctgggggattgtcagaggccgtgcaagccgcttgtatggtccaataccaaaagtgcctggtcgcaagtgcagccagagggaaggcctggggtgctcaggccagagctaggctcaggctaaagcggaccagctcaatggattcacccggcggccccctgcctctgcctctgttaaaaggcggcgtgggaggtgcgggagctaccccgcggaagagaggcgtgttttcgtttcttgacgcttttcgcttaaagccttccctcctacacatgccatag

SEQ ID NO: 108114 - DNA, 738 bp, synthetic construct
  misc_feature 1..738: note = Description of Artificial Sequence: Synthetic coding sequence
  source 1..738: mol_type = other DNA
atgctggggaaggactacatgttggccatcatcctagtcaactgtgatgacgacctctggggagatcacagcctcgaagtggaggctggcctcccacccggttggcgcaagatccatgatgctgccggcacctattactggcatgtacccagcggcagtacccaatggcagagaccgacatgggagctcggcgatgccgaggaccccggcaccggcaccgaaggaatttgggggctaaggcccccaaagggaagatcattttctagcctcgagtcatcactagacagatcgaatagcttaagctggtacggaggtgaatcctacatccagagcatggaacccggggccaagtgtttcgccgtgcgctctctgggatgggtggaagtgcccgaagaggaccttgctccaggaaaaagctcgattgccgtgaacaattgcattcagcagctggcccaaacaagatcacgctctcagcccccagacggtgcatggggggaaggacaaaacatgctgatgatactgaagaaagacgcgatgagtctcgtaaatccgctcgatcacagtttgatccattgccagccgctggtccacatcagagtgtggggcgttgggtctagtaaggggagaagcagcgatgtggatccagggctccttcccttgcccggccctgctctggtaggggagggaggcccaagtagcgccggaacggtgtggggcgagtctgagcgtctcggatag

SEQ ID NO: 108115 - DNA, 792 bp, synthetic construct
  misc_feature 1..792: note = Description of Artificial Sequence: Synthetic coding sequence
  source 1..792: mol_type = other DNA
atgctaaagtgccacgtgttttgctgcgatgttcccgccaaggcaattgcatccgccctgcacgggttgtgtgcccagattttatcagagagagttgaagtcagcggagatgcttcttgttgttctcccgatccaatcagtccagaggaccttccgcgccaggtagagctgctagatgctgtttctcaagctgcccaaaagtacgaagcgttgtacatgggcacactgcctgtgacaaaggcaatgggtatggacgtgcttaacgaagccatcggtaccctgacagcgcggggagacaggaacgcctgggtgccaaccatgctctcagtgtccgactctctgatgactgctcatcctatccaggcagaggccagtactgaggaagaaccactctggcagtgccctgtccgattagtcactttcattggggtaggacgggatccacatactttcggactgattgcagatttaggcaggcagtctttccagtgtgccgccttttggtgccagccccacgcagggggacttagcgaggccgtacaagccgcctgcatggtgcagtatcagaagtgcctggtagcaagcgccgcacggggaaaagcctggggagctcaggccagagcccggctccggttgaaaaggacctctagcatggattctcctggaggcccgctgcctctccctctgctcaaagggggcgtgggaggggctggtgccactccaagaaagcggggggtcttcagctttctggatgctttcaggctgaagccctccttactgcacatgccctag

SEQ ID NO: 108116 - DNA, 645 bp, synthetic construct
  misc_feature 1..645: note = Description of Artificial Sequence: Synthetic coding sequence
  source 1..645: mol_type = other DNA
atgctgggcaaagactatatgttggctattattctggtcaactgcgatgacgacctgtggggtgatcactcactggaggtggaggcgggcctgccacctggctggcgaaagattcacgacgccgcggggacctactattggcatgtgcccagcggctcaacccaatggcaaagaccaacttgggagctgggcgatgccgaggatcccgggactggaacggaaggcatctgggggctgcggcctcctaaggggaggtctttttcctctctggaaagttccctggacaggtccaattcattgagttggtacgggggcgagtcatacatccagtccatggagcccggcgcgaaatgctttgcagttaggtctctgggctgggttgaggttcctgaggaggatctggcacctggtaaatcgagtatcgcggtcaataactgcattcagcagctcgcacagactcgttcacgctcccaacctcctgacggggcctggggcgaggggcagaatatgttgatgattctaaagaaagacgccatgtcgcttgttaatcccttggatcattcccttatccactgtcaaccgctggccgtcatccccacggacgctgacccccagtacctaaatccatggacccagattctgtag

SEQ ID NO: 108117 - DNA, 378 bp, synthetic construct
  misc_feature 1..378: note = Description of Artificial Sequence: Synthetic coding sequence
  source 1..378: mol_type = other DNA
atggagcctgatgggacctacgagcctggtttcgtcggaattagattctgccaggaatgtaacaacatgctctaccccaaagaagataaggaaaatcggattctcctgtatgcatgtaggaattgtgactatcagcaggaggcagataattcttgcatctatgtgaacaaaattacccatgaagtcgatgagttgactcagattatcgccgatgtttcacaagacccgacactgccgcggacggaagaccatccatgccagaagtgtggtcacaaggaggccgtgttttttcagagtcatagcgcccgtgcagaggatgctatgcggttgtattacgtgtgtactgcgccccactgcggacacaggtggacggaatag

SEQ ID NO: 108118 - DNA, 1836 bp, synthetic construct
  misc_feature 1..1836: note = Description of Artificial Sequence: Synthetic coding sequence
  source 1..1836: mol_type = other DNA
atgttagcatctctagagaaagacaaaacagcacccgggagcgcccaggtggcgggcctgtgcggcagattaaccctccaccgcgacttaaggaccggacgatgggagcctgacccacagcgctcccgccggtgcctgcgagaccctcaacgagtgctggaatattgtcggcagatgtaccctgagctgcagatcgccagggtagagcaggccacgcaggccattccaatggagcggtggtgcggtggctctcgcagcggatcttgtgcacaccctcaccaccaggttgtgccctttagatgcctgccgggtgaattcgtatcagaagcacttctcgtcccagagggatgtcgtttccttcaccaggaacggatggaccaatgtgagtcaagcacccgaagacatcaagaagcacaggaagcttgtagctcccagggactcattctgcacgggtcaggcatgctgctgccttgtggctcggataggttccggggagtagagtacgtgtgctgccctccacctggcactcccgacccaagcggaacagccgtgggcgatccctcaaccaggtcatggccccctggatctcgggtggaaggggccgaagatgaggaggaggaagagtctttcccccagccagttgatgactatttcgtggaacccccgcaggccgaagaagaggaagagactgtccccccaccctccagtcacacactagccgtagtgggcaaagtcaccccaactcctaggcccaccgacggcgtagacatttacttcggcatgccaggtgaaataagcgaacacgagggtttcttgcgggccaagatggacctggaagaaaggaggatgcgacagattaacgaggtgatgagggaatgggccatggcggacaatcaatcgaagaacctgcccaaggctgatagacaggcattgaatgaacacttccagtccattcttcagacgctcgaagagcaagtaagcggagagcgccagcggctggttgaaacccacgccactagagttattgccctcattaacgaccagcgcagggcagccttggaaggattcttggctgcactccaggcagatcctcctcaggccgagcgcgttctcttagctttgcgcaggtacctacgagctgagcagaaggaacaaaggcacactctaagacattaccagcatgtggctgccgtggaccctgaaaaagcccagcagatgcgctttcaggtccatacacacctccaagtgatcgaggagcgggttaatcagagcctcggactgcttgaccagaatcctcacctcgctcaggaattgagacctcagatccaggaattgctgcacagtgaacacctaggaccatctgaactggaggctcctgcgccaggcggcagcagtgaggacaaaggcggactccaaccccctgacagcaaagacgatactcccatgaccttgcccaagggttctacggaacaggacgccgcctctcctgaaaaagagaaaatgaatcccctggagcagtatgagagaaaagtgaacgcttctgtgccaaggggatttcccttccactcaagtgagatccagagggacgagctggcccccgccggcactggggtgtcgcgcgaggcggtgtctggactgctgataatgggtgccggcgggggaagcctcatagtgctgtctatgttactgttgaggcgaaagaagccctacggggccatatctcacggagttgtggaggttgaccccatgttgactcttgaagagcaacagttgagggaattgcagaggcatggatacgagaatccaacctatcgttttctggaggagcggccttag

SEQ ID NO: 108119 - DNA, 2292 bp, synthetic construct
  misc_feature 1..2292: note = Description of Artificial Sequence: Synthetic coding sequence
  source 1..2292: mol_type = other DNA
atggccgccacagggacagcagctgccgcagcaaccggaagactcctcctgctattgctcgtaggactaaccgcacccgccctagcacttgcggggtacattgaggccctggcagctaacgcaggcacaggatttgctgtcgccgagccccagatcgcaatgttctgcgggaagttaaacatgcacgttaatattcagaccgggaaatgggaacccgatcctaccggcactaagagctgtttcgagaccaaggaagaagtcctgcaatactgtcaggagatgtaccctgagctgcagatcacgaacgttatggaggccaaccagagagtgtccattgacaattggtgtaggcgggataagaagcagtgtaaatcccggtttgttactcctttcaagtgtcttgtgggggaattcgtgtccgacgttttgctcgtgccggaaaaatgccagttctttcacaaggagcggatggaggtgtgcgagaatcaccagcattggcatactgtggtgaaggaggcgtgtctgacccaggggatgacattatattcctacgggatgctgctcccatgtggagtagaccagttccatggaacagaatacgtatgctgtccccagaccaaaataatcgggtcagtttccaaggaagaagaagaggaggatgaagaggaagaggaagaggaagatgaagaagaagactacgacgtgtataagtcggagttccctaccgaggccgacttagaggactttacggaggctgcggtcgacgaggatgatgaggacgaggaggaaggcgaggaagtagttgaggatcgagactattattatgataccttcaaaggagacgactacaatgaagagaaccccactgaacccggatcagatgggaccatgtccgacaaagagatcacgcatgacgtcaaagcggtctgcagtcaggaggccatgacaggaccttgtcgagcagtgatgcccagatggtactttgatctttcaaagggcaagtgtgtcagatttatctatggtggttgtgggggcaaccgcaacaacttcgagtctgaggactactgtatggctgtttgtaaggctatgatccctcctacaccactgccgacgaacgacgtcgacgtgtatttcgagactagcgctgatgacaatgagcatgcgagattccaaaaggcaaaagagcagctcgaaatcaggcacagaaacagaatggatcgggttaagaaagaatgggaggaagctgaactacaggccaagaaccttcccaaggccgaacgacagaccctcatccagcactttcaggcaatggtgaaggccctggagaaggaggccgctagtgagaaacagcaattggtggaaacacacctggccagagtcgaagcaatgctgaatgaccggaggcgcatggcactggagaactatctcgcagcgcttcagagcgatccaccccggccacaccgcatcctgcaagccctgcggaggtacgtcagggccgagaacaaggacagactgcatactattcggcattaccagcacgtactcgcagtagacccagaaaaagctgcccagatgaaatcacaggtgatgacacaccttcacgtaatagaggagcgtagaaaccagagccttagccttctgtacaaggttccgtatgttgcgcaggaaattcaagaggaaatcgacgagctgctccaggaacaaagagcagatatggatcaatttacggcgtctatctccgaaaccccagtcgatgtgagggtgtcttcggaggagagcgaggaaatccccccattccacccatttcatccttttccggccctgccagagaatgaagatacccagcccgaactctaccaccctatgaagaagggttcgggcgtgggggaacaggacggcggtcttatcggagctgaggagaaggtcatcaacagtaaaaacaaggtcgatgagaacatggttattgacgaaactctggatgtcaaagagatgatctttaatgctgaacgggtggggggcctggaggaggaacgtgagagtgttgggccacttagggaagatttcagtctcagctcttcggcacttatcggactcctcgttatagccgttgccatcgccacagtgatagtgatctctctggtcatgctgcgaaaaaggcaatacggaacaatttctcacggaattgtggaggtcgatccgatgctgactcccgaggagagacatttgaacaaaatgcagaatcatggttacgagaatccaacctataaatacctcgagcaaatgcaaatatag

SEQ ID NO: 108120 - DNA, 2286 bp, synthetic construct
  misc_feature 1..2286: note = Description of Artificial Sequence: Synthetic coding sequence
  source 1..2286: mol_type = other DNA
atgctgagggctccaggagaattgcccaggcaggcagctcgctgtagcctgtgccggctcggaccagggcggggacgcgctttcttcaagtggcgttgcctccccgcaagtgtagatcgtggaaaccccttgtgggcacttgccgccaacgctggaactggattcgcagttgccgaaccacagatcgctatgttttgcggcaaactcaacatgcatgtcaatatccagaccggcaagtgggagccagatcccaccggcacgaagtcctgctttgagacaaaggaggaggtgctgcagtactgccaagaaatgtaccccgagctgcaaatcacaaacgtcatggaagccaaccaaagagtgtctatcgataattggtgcaggagagataagaagcaatgcaagagcaggttcgtgacgccctttaagtgcctcgtcggtgagtttgtttccgacgtactcctggttcctgagaagtgtcagttcttccacaaagagcgaatggaggtttgcgaaaatcatcagcattggcataccgtggtaaaggaggcctgcctgacccaggggatgacgctatattcatacgggatgctgctgccgtgtggtgttgaccagttccacggcaccgagtacgtatgttgtccccagacaaagattattgggtctgtgtctaaagaagaggaagaagaggacgaggaagaggaggaggaagaggacgaggaagaagattatgatgtttacaagagcgaatttcctacagaggccgatctcgaggactttaccgaagcagctgtggatgaggacgacgaagacgaagaagagggggaagaagtagttgaggatcgggactattactatgatacttttaagggagacgactataacgaagagaaccccaccgagcctggtagcgatggaaccatgtctgacaaggagatcacccatgatgtgaaagcggtctgcagtcaggaggcgatgaccgggccttgcagggccgttatgcctcgctggtatttcgacctgagcaaaggaaaatgcgtgaggtttatatacggaggatgcggcggaaatcggaacaatttcgaaagcgaagactattgcatggcagtatgtaaagctatgatcccccccacaccacttcctacaaacgatgtagacgtttatttcgaaaccagcgcagatgacaacgaacacgcaagattccaaaaagctaaagagcagcttgagattcgccatagaaatagaatggacagagtaaaaaaagagtgggaggaagccgagttgcaggcgaagaatttgccaaaggccgagcgtcagaccctcattcagcacttccaagccatggtgaaagcccttgagaaagaagctgcctctgagaagcagcagttagtggaaacccacctggcccgggtcgaggctatgttaaacgaccgtcggcgtatggctctggagaattacttggccgccctgcagtctgaccctcctaggccccataggatcctccaggcacttaggagatacgtgagggccgagaataaggataggttacatactatcaggcactaccagcatgttcttgcagttgatcccgagaaagccgcgcagatgaaatcgcaagtgatgactcacctgcatgtaatcgaggagaggcgaaaccaaagtttaagcctcttgtacaaagttccgtatgtcgcccaagaaatacaggaggagattgatgagctgctgcaagaacagagagctgacatggaccagttcacggccagcatttctgagaccccagttgatgtgcgtgtgtcgtccgaagaatcagaggaaattccccctttccatccttttcatccctttcccgcactcccagagaacgagggcagtggtgtgggagagcaggatggtggactcatcggcgccgaggaaaaagtaatcaacagcaaaaacaaggttgatgagaacatggtcattgatgaaaccctggacgtcaaagagatgatctttaatgctgagcgcgtcggaggacttgaggaggagcgagagagcgttggacccctcagagaagacttctccctcagctcttccgccctcatagggctgctcgtgattgcagttgccattgccacggtgatcgtcatctccttggtgatgctgcgaaagaggcagtacggaaccatcagccacggtatagtggaggtagacccaatgctgacacccgaggagagacacttaaacaagatgcagaaccatggctatgaaaacccaacttacaagtacctggagcagatgcagatttag

SEQ ID NO: 108121 - DNA, 2256 bp, synthetic construct
  misc_feature 1..2256: note = Description of Artificial Sequence: Synthetic coding sequence
  source 1..2256: mol_type = other DNA
atggcggctactggtacagccgctgccgccgctacgggccgcttgttactcctgttactggtcgggctgaccgccccagccctggccttagccggttacatcgaggctctggccgcgaatgccggtacaggattcgccgttgctgaacctcaaattgccatgttctgcggaaagctgaatatgcacgtcaacattcagaccggtaaatgggagcccgacccaactggaaccaagagctgtttcgagacaaaggaagaagtccttcaatattgccaggagatgtacccagaattgcaaatcacgaacgtcatggaagccaaccagcgagtatccatagataactggtgtaggcgggataaaaaacagtgtaaatcgcgctttgtgactccatttaagtgcctggtgggtgagtttgtatcagatgtgcttctagtgcctgaaaagtgccaattcttccacaaggaaaggatggaggtttgcgagaatcatcagcactggcataccgtcgtgaaggaagcatgtctgactcagggcatgaccctgtattcgtatggaatgctactgccctgcggagtcgatcagttccacgggactgaatacgtgtgctgcccacagaccaagattatcggtagtgtctctaaggaagaagaggaagaggatgaggaggaggaagaggaagaagacgaagaagaagattacgatgtgtataagagcgagtttcccaccgaagccgacctggaagactttaccgaagcagccgttgatgaggatgatgaggatgaggaagagggcgaggaggtggtagaagatagggattattactatgatacctttaaaggcgatgattacaatgaggaaaacccaacagagccgggcagtgacggcacaatgtctgacaaagagatcacacatgacgtcaaggcagtgtgcagtcaggaagccatgaccggaccatgccgggccgtgatgccaaggtggtacttcgatttgtctaaaggcaagtgcgtccgcttcatatatggaggatgcggtggtaaccgcaataatttcgagagtgaagactactgcatggcagtctgtaaagcaatgataccccccacgccacttcctacaaatgatgtcgacgtctatttcgagacatcagccgatgacaatgagcatgcccgcttccagaaagcaaaggagcagctcgaaatccgccatcgcaatagaatggaccgggtgaagaaggagtgggaagaggccgaactacaggcgaagaacctgccgaaggccgagcgtcagactcttatccagcattttcaggcgatggtaaaagctctggagaaagaggcggcttccgaaaagcaacaacttgttgaaacacacttagccagggtcgaggccatgcttaacgaccggaggcggatggccctggaaaactatctggccgcgctccagtcagacccgccccgcccccatcggattctgcaggccctcaggcgatatgtccgagcagaaaacaaggaccggctgcataccatcaggcactatcagcacgtcctggctgtcgacccagaaaaggccgctcaaatgaaatcacaagtcatgactcaccttcatgttatagaggaaaggagaaatcagtcattgtctttactgtacaaagtcccctacgttgcacaagagattcaagaggaaatcgacgagttattgcaggagcagcgagcagatatggaccagtttactgcttccataagtgagacccctgtagacgttcgggtgagcagtgaggagtctgaagagatccctccattccaccccttccatccatttccagccctgcccgagaatgagggcagtggagtgggggaacaggacggagggcttatcggcgctgaagagaaggtgatcaattccaaaaataaggtggatgagaatatggttatcgacgagacgctcgatgtgaaagagatgattttcaatgccgagagggtgggaggcctcgaagaggagcgggagtcagtgggccccctgcgagaagacttctctttgtcaagttctgcccttatcggtctgcttgtgatcgctgtggccatcgccaccgtcattgttatcagtttagttatgttgagaaaacgccagtacgggacgatctcccacggaatagtcgaagtcgatcccatgctcacaccagaagagaggcatcttaataaaatgcagaatcacggatacgagaatccaacttacaagtacctggaacagatgcaaatctag

SEQ ID NO: 108122 - DNA, 1569 bp, synthetic construct
  misc_feature 1..1569: note = Description of Artificial Sequence: Synthetic coding sequence
  source 1..1569: mol_type = other DNA
atggctgccaccggcactgccgcagccgctgctactgggcgcttgctcttactgctgttggtggggctcactgctcccgcactggctctcgcaggctatattgaggcactcgctgcaaacgctggaacgggatttgcagtcgccgaaccccagattgccatgttttgtggcaaactgaacatgcatgtgaatatacagactgggaagtgggagcctgatcccacgggcactaagtcgtgttttgagacaaaggaggaggttctacagtactgccaggagatgtaccccgagctccagatcactaatgtcatggaggctaaccaacgggtctctatcgataactggtgccgaagggacaaaaaacagtgtaagtctcgattcgtgacaccatttaaatgcctcgtacccccaactccactccctacaaatgatgtggatgtctattttgagacctccgctgacgataacgagcatgcccggttccaaaaggccaaagagcaactggagatccgacatagaaataggatggaccgtgtgaagaaggaatgggaggaggcagaactccaggcgaagaacctgcccaaggctgagcgccagacccttatacagcacttccaggctatggtcaaagccttagagaaggaagcagcgagcgaaaagcagcaactagttgaaacacacctggcacgggtagaagcgatgctgaatgaccgacggcgcatggcattggaaaactacctggcggccttgcaatcagatccccctcgcccccatcgcattctacaggctctgcgccgctatgtgcgggccgaaaataaagatcgtctccatactatccgccattaccagcatgtgttggcagtcgatccggagaaggctgctcagatgaagagccaggtgatgacgcacctgcacgtgatcgaggagcggaggaatcagtccctgagtctcctttacaaggtcccatatgtggctcaggagattcaggaggagatcgatgaattactgcaggagcagagagcggatatggatcaatttacagcgagcattagcgaaaccccagttgacgtgcgcgtgagctcggaggagtcagaagagatcccccctttccaccccttccacccgttcccagccctaccggaaaatgagggttccggcgtgggggaacaggatgggggactgataggagccgaggagaaggtgatcaattccaaaaataaggtagatgagaatatggtgatcgatgaaactcttgatgtgaaggaaatgatcttcaacgccgaaagggtgggtgggttggaggaggagagagagagcgtggggcccctgagggaagatttctccctgagctcctccgcattgatcggtctgctcgtgatcgctgttgctatcgccacagttatcgtgataagcttggttatgctccgcaaaagacagtacggaaccatcagccacggcatcgtggaagtggacccaatgctcacacctgaagagcggcatctcaacaaaatgcagaatcacgggtatgaaaaccctacctataaatatctcgagcagatgcagatatag

SEQ ID NO: 108123 - DNA, 2088 bp, synthetic construct
  misc_feature 1..2088: note = Description of Artificial Sequence: Synthetic coding sequence
  source 1..2088: mol_type = other DNA
atggcagccactgggaccgcagcagctgccgcaactggccgtcttcttctcctgctgctagttggtctcaccgcaccggcactggctttagctggctacattgaagctctggccgcaaacgcgggcacgggatttgccgtagccgaaccgcagattgcaatgttctgcggaaagctgaacatgcatgttaacatccagactggcaagtgggaacctgacccaacaggaacaaaatcttgcttcgaaaccaaggaggaggttttgcaatactgccaggagatgtacccggagctacagataactaacgtaatggaggcaaaccaaagagtatcaatcgataactggtgtagaagagacaagaagcaatgtaagagtcgattcgtcacccctttcaaatgcctggttggggaattcgtatctgacgtgctgctcgttcctgaaaagtgccagtttttccacaaggaacgtatggaggtttgcgagaatcaccagcactggcataccgttgttaaggaggcttgtctcacacagggcatgacgctgtactcctatgggatgctgttgccctgcggagtggatcagttccacggcacagagtatgtctgttgccctcaaaccaaaattatcggttcggtttcgaaggaggaggaggaagaagacgaggaggaggaagaagaagaggacgaagaggaggattacgatgtgtacaaatctgaatttccaaccgaagcggatctcgaggacttcacggaagctgccgtggatgaggatgacgaagatgaagaagagggagaagaggtcgtcgaagaccgggattattattatgacaccttcaagggtgatgattataacgaagagaaccctacggaaccgggatcggatggtaccatgtccgataaagaaataactcacgacgtaaaagtgccccctacccctctgccaactaatgatgttgatgtctacttcgaaacgtctgctgatgataatgagcatgctcgatttcaaaaggcaaaagaacagctcgaaatccgacatcggaaccgaatggatcgtgtcaagaaggagtgggaagaagcagaactgcaagctaaaaacttgcctaaggcggagagacagaccctgatccaacactttcaggccatggtgaaagccctcgaaaaggaggccgcaagcgagaagcaacaacttgttgagacgcatttggctcgggtggaggcaatgcttaatgatagaaggaggatggcccttgagaattatctcgccgccctgcagagtgacccaccccggcctcatcgcattctccaggccctgcggaggtatgtgcgggccgagaataaggatcgacttcacacaatcagacattaccagcatgtgctggcagtagaccctgaaaaagcggcccagatgaagtcgcaggtgatgacacacctgcatgtgatagaggagaggagaaaccagagtctgagcttgctttataaagtgccgtatgttgcacaagagattcaggaggaaatcgatgaattgctccaggaacaacgcgcagatatggatcagttcacagccagtatatctgaaactccggttgatgtacgagtcagcagtgaagagagcgaggagattcctccattccacccattccacccattcccagctctgcctgaaaatgaaggcagcggagtgggcgaacaggatggaggtttgatcggcgccgaggagaaggtgatcaattctaaaaacaaagtggatgagaacatggtgatagacgagactctcgacgtgaaggagatgatctttaacgccgagcgagtcgggggtcttgaggaagaacgcgaaagtgtaggtcctctcagggaagactttagcctctctagttccgctcttattggtctcctggtcatagcagtggcaatcgctacagtgattgtgatctccctggtgatgcttcgcaaacggcagtacggcactatttctcatggcattgttgaggtggaccccatgttgactccagaagagcgccacctcaacaagatgcagaaccacggatacgaaaaccctacttataagtacctggaacagatgcagatatag

SEQ ID NO: 108124 - DNA, 480 bp, synthetic construct
  misc_feature 1..480: note = Description of Artificial Sequence: Synthetic coding sequence
  source 1..480: mol_type = other DNA
atggcagctaccggtacagccgcagccgctgccaccgggaggctcctgttgctcctgctggtcggcctgactgcgcctgcacttgcccttgctggctacattgaatctagccagatctgctgctccccgagaagctttcttatcagcactcttaagtgtttgatcgtcgacgagatcaatgcactcgccgcaaatgctggcactgggtttgccgtggctgaaccacagattgctatgttctgtggcaagcttaatatgcacgtgaacattcaaaccggcaagtgggaacccgaccctaccggaactaagtcttgcttcgaaactaaagaagaagttttacagtattgtcaggagatgtatcccgaactgcagatcactaacgtgatggaagcaaaccagagagtgtctatcgataattggtgtagaagagataagaagcagtgtaagtcacgatttgtgaccccattcaaatgcttatag

SEQ ID NO: 108125 - DNA, 351 bp, synthetic construct
  misc_feature 1..351: note = Description of Artificial Sequence: Synthetic coding sequence
  source 1..351: mol_type = other DNA
atggctgcaaccggaaccgctgctgcagctgccacagggcgtctgctcctccttctgctagtgggtctgactgctccagcactggccctggccggatatattgaagcccttgcggcaaatgctggaaccggctttgccgtcgccgagccacagatcgctatgttttgtgggaaattaaacatgcatgtgaacatccaaacggggaaatgggagccagacccgactgggacaaaatcttgtttcgaaactaaggaggaagtgctccaatactgtcaagaaatgtatcctgaactgcaaataactaactcgggctggagatgcgtgcggattactagcacggggacacgttag

SEQ ID NO: 108126 - DNA, 1656 bp, synthetic construct
  misc_feature 1..1656: note = Description of Artificial Sequence: Synthetic coding sequence
  source 1..1656: mol_type = other DNA
atggaagtgtgcgaaaatcaccaacattggcacactgtagtgaaagaggcttgccttacccaagggatgaccctatatagctatgggatgttgctgccttgtggcgtggatcagttccacggcactgagtatgtgtgctgtccccagactaaaatcattggtagcgtgtccaaggaggaggaagaggaggacgaagaagaagaagaggaggaggacgaggaggaggactacgacgtttacaaatccgaatttcccactgaggccgacctggaggacttcaccgaggccgcagttgatgaagacgacgaggacgaggaggagggggaggaggtggtggaggatcgcgactactactacgatactttcaagggcgacgactataacgaagagaatccaacggagccaggctctgacgggaccatgagcgacaaggaaattacccacgacgtgaaagtgccccctacaccgcttcctaccaatgatgtagacgtctacttcgagaccagcgccgatgacaatgagcatgcacggttccagaaggcgaaagaacagttggaaatccgtcatagaaaccgcatggacagggtcaaaaaggaatgggaagaggcagaattgcaggcaaagaatctgcccaaagccgagcgacagaccctcatccaacactttcaggcaatggtgaaagccttagaaaaggaagcagccagcgagaaacagcaattggtcgagacccacttggcccgggtcgaagccatgttaaacgacaggagacgaatggcacttgagaattacttggctgcactgcagtctgatccccctcggccacatcgtatcctccaggccctgcggcgctatgtccgagccgagaataaggatcgactccacactatccgacattatcagcacgtcctcgccgtggatccggagaaagctgcccaaatgaaatctcaggtgatgacacacctgcacgtaatagaagaacgacgcaaccagagcctgtctctcctatataaagttccttacgtggcacaggaaattcaggaggaaattgatgagctgctgcaggagcagcgagcggacatggaccagttcaccgcctccatatctgaaacccctgtagacgtaagggtaagttcagaggagtcagaggagatcccccctttccacccgttccatccatttcccgcgctgcctgagaatgaggacacgcaacctgagctttaccatccaatgaagaaaggctcaggggtgggcgaacaggatggcgggctaattggtgcggaagagaaagttatcaattctaagaacaaagtcgatgagaacatggttattgatgagacactcgatgtcaaagaaatgattttcaatgctgaaagggtgggagggcttgaagaagaaagggagtcagtggggccactgcgggaggacttctcactgagctcttccgcccttatcgggttactggtgatcgcggttgccattgcaactgtcatcgtcattagcctggtgatgctccgaaagcggcagtatggaaccatctcacacgggatcgtagaagtcgaccccatgttgactccagaggagcgtcatcttaacaagatgcagaatcacggttatgaaaacccgacatataagtacctggagcaaatgcagatttag

SEQ ID NO: 108127 - DNA, 1977 bp, synthetic construct
  misc_feature 1..1977: note = Description of Artificial Sequence: Synthetic coding sequence
  source 1..1977: mol_type = other DNA
atgtaccccgagctgcagataacaaacgtaatggaagcaaatcagcgggtaagcatcgataattggtgtcggcgagacaagaaacagtgtaagtcgagattcgtgacaccattcaagtgcttggttggggaatttgtttctgatgtgctactcgtacccgagaagtgtcaatttttccacaaggagcggatggaggtgtgtgagaatcatcagcactggcacacagttgtgaaggaggcctgcctgactcagggaatgacgctctactcctatggaatgttgctcccttgcggtgtggatcagtttcatggtacagagtatgtgtgttgtccccaaaccaagattattggcagtgtctctaaggaagaggaggaggaagacgaagaggaagaggaggaagaagacgaggaggaagactacgatgtgtataagtccgagttcccgaccgaggcagatctggaggactttactgaggcagccgtggatgaggatgacgaagatgaagaagagggggaagaggtggttgaagatcgtgattactattacgatacatttaaaggagacgactacaacgaagagaatcccaccgaaccgggaagtgacggaaccatgagcgacaaggagattacccatgacgtcaaggccgtctgttcccaagaagccatgactggtccttgtagggctgtcatgccccggtggtactttgacttatctaaaggaaagtgcgtgcgattcatttatggcggatgtggcgggaacagaaataactttgaatcagaagattactgtatggctgtttgcaaagcaatgattcctcctacacctctgcctaccaacgacgtagatgtgtattttgaaacctcagccgatgataacgagcacgctaggttccaaaaggcaaaggagcaactggaaatcaggcaccggaaccgaatggatcgggtgaaaaaagagtgggaagaggcagaattacaggccaagaaccttccaaaggccgagcgccagacactgatccaacattttcaagcgatggtcaaggcgctcgagaaggaggcagcctcagagaaacaacagctcgttgagacccatctggcccgtgtcgaagccatgcttaatgatagaaggaggatggctcttgagaactatctggccgctcttcagtccgatccacccaggcctcaccggatactgcaggccctgagaagatacgtgcgagctgaaaataaggatagacttcacaccattcggcactatcagcatgtgcttgccgtggacccagagaaagctgcacagatgaaatctcaggttatgacccacttgcatgttattgaggagcggcgcaatcaatctctaagcttactctacaaagttccctacgtggcccaagagatccaggaagaaatagatgagttgctgcaggagcaacgggctgacatggatcagttcaccgcctccatcagcgaaacgcccgttgacgtgcgggtctctagtgaagagagtgaagaaataccgccttttcacccctttcatcccttcccagccctcccagaaaacgaaggctcaggcgtcggcgaacaggatggggggctgatcggtgcagaggagaaggttataaacagcaaaaacaaagttgatgagaatatggttatcgacgagaccctcgacgtgaaggagatgattttcaatgcggagcgcgtaggagggttggaggaagagagggagtccgtcggacctctgcgtgaggatttctccttgtcatctagcgccctgatcggactcctggtaatagcagtcgctattgcaaccgtgatagtgatctcacttgttatgctgaggaagaggcagtacggcacaattagtcacggcatagttgaggttgacccgatgcttacccccgaggagcgtcacctgaacaaaatgcagaaccatgggtacgaaaatcctacctataaatacctggaacaaatgcagatctag

SEQ ID NO: 108128 - DNA, 1758 bp, synthetic construct
  misc_feature 1..1758: note = Description of Artificial Sequence: Synthetic coding sequence
  source 1..1758: mol_type = other DNA
atggccgctgttgaactcgagtggatccccgagacactgtacaataccgctattagtgccgtggttgacaattacatccgttccaggcgcgatatacgctctctgcctgagaacattcagttcgatgtctactacaagctctaccagcaaggcaggctctgtcagctcggctcggaattctgtgaactggaggtttttgccaaggtcctgcgcgccttggacaagcgacaccttctgcatcactgcttccaagctctaatggaccatggggtaaaagtagcgagtgtgctggcgtattcattttctagacggtgctcttatatagcagaaagcgacgccgcggtcaaagaaaaggctattcaagtgggctttgtgttgggcgggtttctgagcgatgcaggctggtacagcgatgctgaaaaagtattcctcagctgccttcaactctgtaccctgcacgacgagatgctgcactggttccgggctgtggagtgttgcgtaaggctgttgcacgtgagaaacggaaattgtaaatatcacctgggcgaagaaacgttcaaactcgcgcagacatacatggacaaactgagtaaacatggacagcaggctaataaggcagccctgtacggagaattgtgcgcgttacttttcgctaaaagccattatgatgaggcttacaaatggtgcatcgaagcaatgaaagagattacagctgggcttcccgtcaaggtcgttgtggacgtactgcggcaagcatcaaaggcttgcgttgtgaaacgcgagttcaagaaagcagagcaactcatcaaacacgccgtctacctggcacgggatcattttggatctaagcatccgaagtactccgatactctgctggattacggtttttacttgctaaacgtggataatatttgccaaagcgtggctatttatcaggctgccttagacattagacagtccgtgttcggcggaaaaaatatacatgtggccactgcgcacgaggatctggcatactccagttacgttcatcagtattcctccgggaagttcgacaacgccttattccatgccgaacgggctataggtattataacgcacatactccctgaggaccatctgctgctggcaagcagtaaacgcgtgaaggccctcatactggaggagatcgctatcgattgccataacaaagagactgaacagaggctcctgcaggaggcccacgatctacatctgtcatcactgcagctagctaaaaaggcatttggcgaatttaacgtccagacagcaaagcattatggtaacctggggcggctatatcagtcaatgagaaaattcaaagaagccgaggaaatgcatattaaagccatacaaattaaggaacagctcctcggacaagaggactatgaggtggcattgagcgtgggacacctagcttctctttacaactacgatatgaatcaatacgagaatgcagagaagctatacctgaggtctatcgcaattggaaaaaaactgttcggcgagggttacagcgggttggagtatgattacaggggactgatcaaactgtataatagcataggcaattatgaaaaagtgtttgagtatcacaatgtactaagcaattggaatagattacgcgaccgccagtattcagtgacagatgccttggaggacgtctcaacttctcctcagtccactgaagaggtagttcaatcattcctcatttcccagaacgtggaaggaccttcgtgttag

SEQ ID NO: 108129 - DNA, 4974 bp, synthetic construct
  misc_feature 1..4974: note = Description of Artificial Sequence: Synthetic coding sequence
  source 1..4974: mol_type = other DNA
atggactccaagaagcggtcgtcaactgaagccgagggctccaaggaaaggggcttagtccacatctggcaagccgggagcttccccataactcccgagcggctccccggttggggcgggaagacagtgttgcaggccgcgcttggggtgaaacacggagtgctgctcactgaggacggggaagtctactctttcggcactctgccatggcgatcaggccccgttgaaatctgcccatcttcgccaattctggaaaacgcgctggtcgggcagtatgtcattactgtcgccacgggctccttccactccggagccgtcaccgacaacggcgtggcatatatgtggggggagaacagcgcaggacagtgcgccgtggccaatcagcagtacgttccagaaccgaatcccgtgtctatagccgactcggaggcctctcctttgctcgctgtcagaattctccaattagcctgtggcgaagagcacactttggctctcagcatttctcgcgagatttgggcctggggcactgggtgtcagttaggcctgatcaccacagcattccccgtcacaaaacctcaaaaggtcgagcacttggcgggccgagtggtgctacaggtcgcatgcggtgctttccactctctggcccttgttcagtgtctgccgagccaggatttgaagcccgtgccagaaaggtgtaaccagtgctctcaattgctgatcaccatgacggataaggaggaccacgtgataataagtgattcgcactgttgtcccttgggggttactcttactgaaagtcaagctgaaaaccatgccagtaccgcactgagcccttccacggaaaccctggatagacaggaagaagtattcgaaaacactctggtggccaacgaccagagtgtcgccactgaactcaacgctgtttccgctcagatcacaagcagcgacgccatgtcttcacaacagaacgttatggggacaacagaaataagctctgctcggaatattccatcctaccccgacacacaggccgtgaatgaatacctgcggaagttgtccgaccactcagtgcgcgaagacagcgagcatggggagaaacctgttccgagtcagcccctcctggaggaggcaatccctaacctgcacagcccaccaacaacttcaacgagtgcactaaattctttggtcgtgtcatgtgcaagtgccgttggagtcagagtcgcagccacttatgaggcaggcgcactgtccctcaagaaggtcatgaacttttatagtacgacaccttgcgaaacgggcgctcaggcaggctctagcgctatcggccctgaggggttaaaggactccagagaggaacaggtgaaacaagaatccatgcagggcaagaagtccagctcactcgtggacataagggaagaggaaaccgagggcgggtcccgacggctgtcccttcctggattacttagtcaggtttccccgcgcctgctgcggaaagctgcccgcgtgaagactcgaactgtggttctaactccgacctattcaggagaagctgatgccttgctcccttccctgcggacggaggtttggacctggggaaagggaaaggagggccagctgggacacggcgatgtgctaccacgactacagcctctgtgtgtcaagtgcctcgacgggaaggaagtcattcatctggaggcgggaggatatcatagcctcgctttaaccgccaagtcacaggtgtatagctggggctccaatacctttggacagctgggtcacagcgatttcccgactaccgtgcctaggctggccaagatctcgagcgagaatggggtgtggtccatagcagccggacgtgactactcccttttcttggttgacaccgaggattttcagccaggcctctattattccggaagacaagacccaaccgaaggggacaaccttcctgagaaccactccggctccaaaactccagtcctactaagctgcagcaagctgggttatattagtcgggtgacagctggtaaagattcctatttggcactggtcgacaagaatataatgggctatatcgcctcactccacgagctggcaaccaccgagagacggttttattctaagttgagcgacatcaaaagccaaatcttgagacctctcctgagcctggagaacctcgggactacaacaacagtccagctgctccaggaggtcgcttctagatttagcaagttatgttatctgattggccaacatggggcctccctgtcttcttttctccatggggtgaaagaggcgcgctccttggtcatccttaagcattcttccctctttctggacagctacacagagtactgtacatcgatcaccaatttccttgtcatgggaggattccaactcttagccaaaccagcaattgacttcctgaataagaatcaggagttgttgcaagatttgtctgaggtcaatgacgaaaatactcagctgatggagatcctgaatactctattttttcttcccatacggcggcttcacaactacgccaaggtgttattgaagttggccacttgtttcgaggttgcctcccctgagtatcagaaactgcaggacagttcctcttgctatgaatgcctggcactccacctgggccgaaagcggaaggaagccgagtataccctgggtttttggaaaaccttccccgggaaaatgactgatagcttgcgaaaacccgagaggcggctgctctgtgaatcttctaatcgcgccctgtccctgcagcacgccgggagattctcggtgaactggttcatcttattcaatgatgcgctggtacacgcccaatttagtacccaccatgtgtttcccctggcaacgctttgggccgaaccactatcagaagaggccggtggggtgaacgggctcaaaatcacgacacctgaagaacagtttacgttgatttcctctaccccacaggaaaaaacaaagtggctgcgcgccatcagccaggctgtggaccaggccttaaggggcatgagtgatttacccccatatgggtcggggagcagcgtgcagcgccaggagccaccaatttctagatcagcaaaatatactttctacaaggaccccagacttaaggatgcgacttacgacggcagatggctcagtggaaagccacacgggagaggagtgctgaaatggcccgacgggaaaatgtattccggcatgtttaggaacggtctggaggacggatatggcgagtaccgcattcccaacaaagctatgaacaaggaagaccactacgttgggcactggaaagaaggaaaaatgtgcggccaaggtgtgtatagctatgcatccggagaggttttcgagggctgcttccaggataatatgcgccatggccatggcctcctacgcagcgggaagttgaccagttcctcaccctctatgttcattgggcagtgggttatggacaaaaaagcggggtacggagtcttcgatgacatcacccgtggtgagaagtacatggggatgtggcaggacgatgtgtgtcaggggaacggtgtggttgtgactcagtttgggctgtactacgaggggaattttcacctcaacaagatgatggggaacggcgtgctccttagcgaagacgatactatctatgagggggaattcagtgacgattggacgcttagcggcaaggggacgctcactatgcccaacggcgactatattgagggctatttctcaggggagtggggcagtggtatcaaaatcactggcacctatttcaagccttctctatacgaatcagataaggataggccaaaggtatttcgcaagctgggcaatctggccgtgcctgccgacgaaaagtggaaagccgtatttgacgagtgctggaggcagctgggctgtgagggtccaggccagggcgaggtttggaaagcgtgggacaacattgctgtggccctgacaacttcacgtcgccagcaccgcgattctcccgagatcttgtcgcgtagccaaactcagaccttagaatctctagaattcataccccagcacgtaggagccttttcagttgagaagtatgacgacatacgaaagtacttgatcaaagcttgcgacaccccactgcatcccttgggaagattggtggaaactctcgtggctgtctacaggatgacctatgtgggagtaggggccaatcggcgtctgctgcaggaagctgtgaaagagatcaagtcttatctgaagcgaatctttcaactggtgaggtttctgtttccagagttacctgaagaaggatcaacaatccctctgtccgctcctctgcctaccgaaagaaaaagcttttgtaccggcaaaagcgattcccggtccgaatcacccgagcctggatacgtggtcacttcctcgggcctactgctgcctgtgttgctgcctcgcctttaccctccattgttcatgctgtacgctctggataatgaccgtgaagaggacatatactgggagtgcgtccttcggctaaataagcaaccggacatcgctctgctcggcttcctcggggtccagagaaaattctggccagcaacgctgtcaatccttggagaaagcaaaaaagttctgcctacaaccaaggatgcgtgtttcgcctcggctgtcgagtgtcttcagcagatctccacaaccttcacaccgtctgacaaacttaaagtcattcagcagacattcgaggaaattagccagagtgtcctggcttcactccacgaggattttttatggagtatggacgacctcttccccgtgttcctgtacgtggtgctcagggcacgtatccgaaaccttggcagcgaggtgcatctcatcgaagatctgatggatccctacttacagcacggagaacaaggcatcatgttcaccactctgaaagcttgttactatcagattcagcgcgagaaattaaattag

SEQ ID NO: 108130 - DNA, 420 bp, synthetic construct
  misc_feature 1..420: note = Description of Artificial Sequence: Synthetic coding sequence
  source 1..420: mol_type = other DNA
atggacagcaagaagcggtcaagcacggaggcggaaggctcaaaggaacgaggactggtccatatctggcaagctggtagcttccccattacaccggagagactcccgggctgggggggtaaaacagtgctgcaggcagcacttggggttaaacatggtgtgctgctgactgaagacggtgaggtgtacagcttcggaacattgccctggcgcagtggccctgtggagatctgtccatcatcccctattctggaaaacgcgctggtgggacaatacgtaatcacagttgctaccggcagcttccactctggtgccgtaactgacaacggtgtggcttacatgtggggtgaaaatagcgctgggcaatgcgcagtggccaatcaacagtacgtgccagaacccaaccccgtgtctatctag

SEQ ID NO: 108131 - DNA, 321 bp, synthetic construct
  misc_feature 1..321: note = Description of Artificial Sequence: Synthetic coding sequence
  source 1..321: mol_type = other DNA
atggacagcaagaagcgatcctcaaccgaggccgagggttcaaaggagagagggctggtgcacatctggcaggctggctcatttcccattactcccgaaaggctgcctgggtgggggggaaagactgttctccaggccgcattaggcgttaaacatggcgtgctcctgactgaagacggagaggtgtacagctttggaacactcccgtggaggtcaggtcctgtagagatctgcccctcaagcccaatcctcgaaaacgccctggtgggacagtatgtgatcactgtggcaacagggtcatttcatagcggcgccgtatag

SEQ ID NO: 108132 - DNA, 1758 bp, synthetic construct
  misc_feature 1..1758: note = Description of Artificial Sequence: Synthetic coding sequence
  source 1..1758: mol_type = other DNA
tgacttgccctcgtcgacaaaaatataatggggtatatagcatccctccacgaactggcaacaaccgagcgccggttttactccaagctgagcgacatcaaatcccaaatcctcaggccactgctaagcctggagaatctgggaacgaccacgaccgttcaactgttgcaggaggtggccagcaggttttccaagctctgctatcttatcggtcaacatggtgcgtccctgtcgtccttcctgcacggggttaaagaagccagatctctggtgattctgaaacacagttcactctttctggacagctataccgagtactgtactagtattaccaactttctagtgatgggtggtttccagctgttagccaagcctgcgatcgacttcttgaacaaaaaccaggagctgttacaagatctctcggaagttaacgatgaaaacacccagttaatggaaatccttaacacccttttcttcttaccgatccgtagacttcataactatgcgaaggtgctgctgaagttggccacgtgcttcgaagtggctagtcccgaataccagaaactccaggattccagtagctgctatgagtgcctagcgcttcatcttgggcggaaaagaaaggaagcggaatacacattaggattctggaaaacatttcccgggaaaatgactgacagtctgcgcaaacctgaacggagactcctttgcgaaagttccaatagggccctctccctgcagcacgcggggcgattctctgtgaattggttcatattgtttaatgacgcattggtgcacgcccagtttagcacacatcacgtcttccctctcgcaacactctgggccgagccactgagcgaggaggccggaggggtgaatggattgaaaattacaacaccagaagaacagtttacacttatatcctcgacgcctcaggaaaaaaccaagtggcttagagccatctcccaggccgttgatcaggcccttcggggcatgtctgacttgccgccctacgggagcgggagttcagtgcagagacaggagccgcccatctcaagatcagccaaatacactttctataaagaccccagactgaaagacgccacttacgatggacgatggctctctggaaagcctcacggacgcggagtcctgaagtggcctgatggcaaaatgtatagtggcatgttcagaaatgggcttgaggacggctacggggagtaccggattccaaataaagcaatgaataaggaggatcactatgtggggcactggaaggaggggaaaatgtgcggccagggcgtatattcttatgcctccggcgaagttttcgagggatgtttccaggataatatgcggcatgggcacggcttgctgcgttctggaaagctaacttcctctagcccttcaatgttcatcgggcagtgggttatggacaagaaagccggctatggagtgtttgacgacattacccgcggtgagaagtatatgggcatgtggcaagatgacgtgtgccaggggaatggcgtcgtagtgacccaattcggattgtactacgaaggaaatttccacctgaacaaaatgatgggaaatggcgttttgctctccgaggacgataccatttacgaaggagagttctcagatgactggacactgtccggaaaggacaacagcgggctcattgagcaggtcggaaagtgcagtctcctgccttacttcttgaaggtttgtgaggctctagttctgttcctgctgtag

SEQ ID NO: 108133 - DNA, 1731 bp, synthetic construct
  misc_feature 1..1731: note = Description of Artificial Sequence: Synthetic coding sequence
  source 1..1731: mol_type = other DNA
atgggctacatcgcttccctacacgagcttgcaactacagagcggcgcttttacagcaagctgagtgatataaagagtcaaattctccgccccctgttgtcactcgagaatctggggaccacgacaacagtgcagctgcttcaggaagtggctagtcgtttttctaaactctgttacctgatcgggcagcacggtgcctctttgagcagctttctccacggcgtcaaagaggccaggagtttggttattctgaagcacagttccttgttcctggacagctacactgagtactgtacatccatcaccaattttttggtgatgggaggcttccaactcctggcgaaaccagccattgactttctcaacaagaaccaggaactgcttcaggatctgagcgaagtcaacgacgagaatacccagctgatggaaatacttaatacattgttctttctgccgattaggcgactgcataattatgctaaggtgctattgaagttggccacctgtttcgaggttgcctcacccgagtatcagaaacttcaggatagctcatcatgttatgaatgtctggctctacatttgggccgcaaacggaaagaagccgagtacacactaggattttggaagaccttccccggaaaaatgactgattcccttcgcaagccagaacggcgattgctctgcgaaagtagtaacagagctctctctctgcagcatgcaggccggttctccgtgaattggtttatactgttcaacgacgccctcgtgcatgcccagttttctacgcaccacgtattccccctcgctacactgtgggccgagcccctgtcagaagaggcaggaggggtcaacggactgaaaataacgacccccgaggagcagtttactcttatatcctcaacaccccaagagaaaaccaaatggttgagggcgatcagccaggccgtcgaccaggccctgaggggcatgagcgatctgcccccatacggctccggatcatccgtgcagaggcaggagccacccatctctcggtccgccaagtacactttttacaaagatccacgtctgaaggacgctacctatgacggacgatggctctccgggaaacctcacggccggggagtgttgaagtggccagacggaaagatgtattcaggaatgtttaggaacggcctggaagacggctacggagagtaccgaatcccaaataaggcgatgaacaaggaagatcattatgttggccactggaaggagggaaagatgtgcgggcagggcgtatatagctatgcatccggtgaggtttttgaggggtgctttcaggacaacatgagacacggtcacggcctgctcagatcaggcaagctgacatcttcttcccctagtatgtttattggccagtgggtgatggacaaaaaagcgggttacggggtctttgacgatatcacgagaggcgagaaatatatggggatgtggcaagatgacgtgtgccagggcaacggcgtggtggtgacgcagtttggcctgtattacgaaggaaactttcacctgaacaagatgatgggtaatggtgtgctgctcagcgaagacgacacgatctacgagggtgagttttctgacgactggacactgagcggcaaggacaacagcggcctgatcgaacaggtgggcaaatgttcgctgctaccatacttcttgaaggtatgtgaagccctggtgctgttcttgctttag

SEQ ID NO: 108134 - DNA, 1191 bp, synthetic construct
  misc_feature 1..1191: note = Description of Artificial Sequence: Synthetic coding sequence
  source 1..1191: mol_type = other DNA
atggactccaaaaagcggtcttccacagaagccgaaggatctaaggaacgtggactggtgcacatttggcaggccgggtcattccccatcactcctgagagactccccgggtggggaggaaagaccgtgctccaggccgctttaggtgtgaagcacggagttttgctgactgaagacggagaagtgtattcttttgggacactcccctggcggtccggtcccgtggagatttgccccagctctccgatcctggaaaatgcactggttggccagtatgtgattaccgtggctaccggctccttccactctggggcggtgacagacaatggcgtagcttacatgtggggcgaaaattccgcaggccagtgtgctgttgctaaccagcagtacgtcccagagcccaacccagtgtctatcgcggatagtgaggctagcccactgctggccgtgaggatccttcagctggcctgcggtgaagaacatactctggctctgtcaatcagtcgggaaatatgggcgtggggaaccgggtgtcagctgggccttatcactaccgccttccccgttactaagccgcagaaggtagaacacctggccggacgagtggtgctgcaggtggcttgtggggccttccatagtctcgcactcgtgcagtgcctcccatcccaggacctgaagcccgttcctgaacgctgcaaccagtgctcgcaactcctcatcacaatgaccgacaaagaagaccatgtgattatctctgattctcattgctgtcctctgggtgtgacgttaactgaaagccaggccgaaaatcacgcctctaccgccctgagtccttcgacggagactttggatcgacaggaggaggtattcgaaaataccctggtagccaacgatcagtccgtggcaaccgagcttaacgctgtgagcgcccagataacttcatccgatgcaatgtcaagtcagcagaatgtgatgggaaccaccgaaatatcttctgcccgtaatattcctagctatcccgatacacaagctgtcaatgaatatttaaggaagttaagcgaccactcggtgcgcgaagactccgaacacggtgaaaagcctgtcccttctcaagtaccagcacaattctataaaataaaggtgtgcctcgaactcaactgtatgggcttctccctggaaacacttaaatag

SEQ ID NO: 108135 - DNA, 2178 bp, synthetic construct
  misc_feature 1..2178: note = Description of Artificial Sequence: Synthetic coding sequence
  source 1..2178: mol_type = other DNA
atggagcagagcaatgattccttgcgtgttaaccataatgacggagaagaatccaagacttcagcacaagttttcgagcaccttatctgcatggatagccgggactctagttttgggcagaatgattcacccactgtcctgcccatcaccacacgtgaggctaacaattcccttatctctcagaatatccccggtccacttactcaaactcagacactcagcgccgagcagtttcaccttgtcgatcagaatggacaggccattcagtacgagcttcaaagtctgggggaatccaacgcccaaatgatgattgtggcctcccccactgaaaacggacaggtcctcagagtcattcctccaacccagaccgggatggctcaagtgatcatcccccaagggcagctggtggacgtgaattctccaagagacgtgccagaagaaaagcctagcaaccggaacctgccaaccgtgagggtggacacactggcggacaataccagcaactacatcctccatccacaaaccagttttcctctgcccaagaagtctgtgactggaatgcttgaagagcccctgttaggccctttacagccactgagctctaacacccccatttgggcctgtcgcctgcggagctgtgagaaaatcggagattcgtatcggggatactgtgtcagtgagactgagctggagtccgtgctgactttccacaagcaacagactcagagtgtgtggggcacaagacagagcccaagccccgcgaagcctgccactaggctaatgtggaaatcacaatatgttccttatgacggtattccctttgtaaacgcaggctcaagagcagtggtcatggagtgccagtatggaccaaggcgcaaaggattccagttgaaaaaggtcagcgagcaggagtctcgtagttgtcagttgtacaaggcaacatgcccggcccggatttacatcaagaaggtgcaaaaattccccgagtacagggttcccactgaccccaaaattgataagaaaatcatccggatggagcaggagaaggcttttaacatgctgaagaaaaaccttgtggatgctggcggcgttttacgatggtacgtacagctgccgacccaacaggcccatcaataccatgagctggagacgccatgcctgacactgagcccctcccccttcccagtgagctcattggaagaagaggaaactgcagtcagggacgaaaactgcgcattgccgtctcggttgcatccgcaggtggctcataagatccaggaactagtgtcccagggcattgaacaggtctatgctgtgaggaagcagctaagaaaatttgtggagagggagctgttcaagccagacgaagtccctgagcggcataatctcagcttcttcccaaccgtcaacgatatcaaaaatcatatccacgaagtgcagaaaagtctgagaaacggcgacactgtgtacaattctgaaatcattccggccaccctgcagtggaccacagacagtggcaacatcctgaaagaaacgatgaccgtcacgtttgcagaagggaattcacccggtgagtcaattactaccaaagtggagacgaatcagacccgtggtagtctgtcaccagagcccacccatctactctcttctctctctagctttcagccgaagatcttcacacaactgcaaggacttcaattgcagccacgctacacttccccagatgaatcccccgccgtcgtaagcgtgaataatcaaccttcttccagcccctctggactgcttgacactattgggtcagccgttatgaataataattctctcctgcttggccagtcacatagtctccagcgggacacttgcctcactcagaacaactctacagccagtaccatgggcaaccttcctgagccagatcagaacctagtggccatggacgaacttgtcgaggtgggagacgtggaagacactggaaatcttgagggaacagttcatcggattctcctaggggacgtccaaactattcctatacagattatagacaatcacagcgccctaatagaggaaaacccagaatccacaatcagcgtctcccaagttaaacaggagcccaaagaacctgcgttgtcgatggaagccaaaaagactgtggactataaaaagttgtccgcgacctag

SEQ ID NO: 108136 - DNA, 2178 bp, synthetic construct
  misc_feature 1..2178: note = Description of Artificial Sequence: Synthetic coding sequence
  source 1..2178: mol_type = other DNA
atggaacagtccaatgattcccttcgcgttaatcataatgacggcgaagagtcaaaaaccagcgcacaggtgtttgagcacctcatctgcatggattctagggatagtagttttgggcagaatgactctcctacagttctgccaattacaacaagggaggcgaataattccctgattagccagaatatacctgggccgttaactcagactcagactttaagtgcagagcaatttcacctcgtggatcagaacgggcaagcaatccagtacgagctccagtcactcggggagagcaacgctcaaatgatgattgtcgctagtcccaccgagaacggccaggtgctacgcgtgattccccccacacagactgggatggcccaggtgatcatccctcaaggccaactcgtagatgtcaacagccctcgagatgttccagaggaaaagccctcaaacaggaatttacccacagtgcgagtggatacactggctgacaacacaagcaactatatcctccaccctcagacaagtttcccactgcctaagaaaagtgtgacgggcatgctggaggagcccctcttgggtcctctgcagccgctgtcctctaatactccaatctgggcttgccgtctgaggtcttgcgaaaaaattggcgattcctataggggctactgtgtaagcgagacagaactggagtcagtgctgactttccacaagcaacaaacgcagtccgtgtggggtacacgccagtctccatcgcccgctaagcccgcaacccgactgatgtggaaatcacagtatgtgccctacgacggcatacccttcgttaacgctgggagtcgcgctgtagtcatggaatgccaatatgggccacgtcgcaaaggcttccagttgaagaaggtaagtgaacaagaatcgaggagttgccaactatacaaagccacatgtcccgccagaatctacataaagaaggttcagaaattcccagaatatcgggtccccacggatccaaagattgataagaaaattatccgcatggagcaagagaaggccttcaatatgctgaaaaaaaatctggttgacgcaggcggagtgcttaggtggtacgtgcagctgccgactcagcaggcacatcagtaccatgagctggagacgccctgtctcaccctctctcccagcccatttccagtgtcatccctggaagaagaagagactgctgttcgtgatgaaaactgtgcgctgccaagccggcttcaccctcaggtcgcacataagattcaggaacttgtatcccagggcatcgagcaagtttatgccgtgagaaagcagctgcggaaattcgtggagcgggagctcttcaaaccagatgaagtgcctgaaagacacaacctgtccttcttccctacggtgaacgacataaagaaccacattcatgaagtgcagaaaagcttgagaaacggcgacactgtctacaattcagaaataattccggcaaccctgcagtggactaccgactccggaaatatcctgaaggaaactatgacggtgactttcgccgagggaaactctcccggagagtccataactacgaaggtcgagaccaaccaaacccgcggctcactgtctccagagcctacccacttattgtcatcgctgtcaagctttcagccaaagattttcacccagcttcagggtctacagctccagcccaggtatacctcccctgacgagagtcctgcagtagtgtccgttaacaatcagccatcatctagccccagcggccttctcgataccatcgggtcggcagtcatgaacaacaactccctgctgttgggacagtcccattccttacagagggatacatgcctgacccagaacaatagcaccgcaagcacaatgggtaatctccccgaacctgatcagaatttagtcgcaatggatgagctggtcgaagtgggcgatgtagaggacaccggaaaccttgaaggcaccgttcatcgaattctgctcggagacgttcagaccatccccattcagatcattgacaaccactctgccttgatcgaagagaaccctgagtccaccatttccgtatcgcaggtcaaacaagaacccaaggagccagcactcagtatggaggctaaaaagacggtggattataagaagcttagcgccacgtag

SEQ ID NO: 108137 - DNA, 165 bp, synthetic construct
  misc_feature 1..165: note = Description of Artificial Sequence: Synthetic coding sequence
  source 1..165: mol_type = other DNA
atggaacagtctaatgactctctgcgggtaaaccataacgacggcgaggaaagcaagacttctgctcaggttttcgagcatctaatttgtatggatagccgtgactcaagttttggccagaatgactcccccacagttttaccaataactactcgggaggcatag

SEQ ID NO: 108138 - DNA, 396 bp, synthetic construct
  misc_feature 1..396: note = Description of Artificial Sequence: Synthetic coding sequence
  source 1..396: mol_type = other DNA
atggaacagtctaatgacagcctgagggtaaaccacaatgatggggaggagagtaagacttctgcgcaggtgttcgagcacctcatctgcatggatagtagagacagtagcttcggtcagaacgactctcccactgtcctgccgataactacacgtgaggctaataattctcttataagccaaaacattccaggtcctctgacccagactcagacgctcagtgccgaacagttccacctcgtggaccagaatggccaggccatccaatacgaactgcagagcctcggggaatccaacgcgcagatgatgatcgtagcatctcccaccgagaacggacaggtgcttcgggtgatccccccaacacagactggcatggcccaggtgattattccatag

SEQ ID NO: 108139 - DNA, 66 bp, synthetic construct
  misc_feature 1..66: note = Description of Artificial Sequence: Synthetic coding sequence
  source 1..66: mol_type = other DNA
atggaacagtcgaatgatagcctgagagtcaaccataatgatggcgaagagtctaagacatcctag

SEQ ID NO: 108140 - DNA, 222 bp, synthetic construct
  misc_feature 1..222: note = Description of Artificial Sequence: Synthetic coding sequence
  source 1..222: mol_type = other DNA
atggagcagagcaatgactcccttcgcgtgaatcacaatgacggtgaggagtctaaaacttccgcacaggttttcgagcatcttatttgcatggattctcgggatagctcattcgggcagaacgacagccccactgtcttgccgatcacgacaagggaggccaacaatagcctgatttctcagaatatccccggcccactgacccagacccaaacactgtag

SEQ ID NO: 108141 - DNA, 2178 bp, synthetic construct
  misc_feature 1..2178: note = Description of Artificial Sequence: Synthetic coding sequence
  source 1..2178: mol_type = other DNA
atggagcagagcaacgatagcctaagagtcaaccacaatgacggcgaggaatccaagaccagcgcccaggttttcgagcacttgatctgcatggattctcgggactcatctttcggccagaatgactctccaaccgtactccccattacaacccgggaagccaacaacagtcttataagccagaacatccctgggcccttgacccaaacccagaccctctcggccgagcaattccacctggttgatcagaacggccaagccatacagtatgagttgcaatcactaggggagtccaatgcacagatgatgattgtagcctcgcccaccgagaatggtcaggtgctccgtgtgatccctcccacccagaccggaatggcccaggttattattccacaagggcagttggtagacgtcaattccccgcgcgatgtcccagaagagaaacctagcaaccgtaacctgcctacagtccgggtggacacgctggccgataacaccagcaattacatcctccaccctcagactagctttcctctgcccaaaaagagcgtgactggcatgctcgaggaacctctgctgggaccacttcaacccctgtcttcgaatacaccaatctgggcctgccgactgaggagctgcgaaaaaatcggcgactcttatagggggtactgtgtgtctgagaccgaactggagagcgtccttacgtttcacaagcagcagactcagtccgtttgggggacacggcagagcccatcacccgcaaagccagccacacgcctgatgtggaaaagccagtatgttccctacgacggaattcctttcgttaacgccggtagtagggctgtggttatggaatgccagtacggccctcgtagaaaggggttccagctcaaaaaggtgagcgaacaggagtcgcgcagctgccaactctataaagctacctgccccgctagaatttacattaagaaggttcagaagttccccgagtacagggtgccaacagatcccaagattgacaagaagattatccgaatggagcaagaaaaggcatttaacatgcttaagaaaaacctagtggatgccggtggcgtcctaagatggtacgttcagcttcccactcagcaggctcatcagtatcatgaactcgagaccccatgcctgacgctttctccaagccccttccccgtcagctccttggaagaagaggagactgctgtgcgggatgaaaactgtgccttgccaagccgattgcatccgcaggtcgcgcataaaattcaggagttggtttcccaggggattgagcaggtctacgctgtgagaaagcagctgaggaagtttgtggagcgagaattgtttaaacctgacgaggtgcccgagcggcataacttgagcttcttccccaccgtgaatgatatcaagaaccatattcatgaggtgcagaaatcactccgaaacggggacaccgtatacaattcagaaataattcccgcgacgctgcagtggacaacagatagtggaaatattttaaaggagaccatgacagtcactttcgctgaagggaattcaccaggcgaatccattacaactaaggttgagactaaccagacacgcggatccctcagccctgagccaacacacctgttgtcttccttatcatccttccaacctaagatcttcactcagctacaggggctacagctacaacctcgttacactagccctgatgagtctcctgccgtggtatcagttaacaatcagcccagcagctcaccctctggactccttgataccataggcagcgccgtgatgaataataattctttgcttctgggacaaagtcattctttacagagagacacttgcctgacccagaataactccactgcttctactatgggtaatctgcctgaacctgaccagaatctcgtcgccatggatgagcttgtcgaagtaggtgacgtggaagacacagggaacctggaaggcactgtgcacaggattctgctgggggatgtccagactatccctattcagataatcgataaccatagcgcactaatagaggaaaatccagagagtacaatatccgtgtcacaggttaagcaagaacccaaggagcccgccctgagtatggaggctaagaaaactgtcgactataagaaattgtctgccacctag

SEQ ID NO: 108142 - DNA, 222 bp, synthetic construct
  misc_feature 1..222: note = Description of Artificial Sequence: Synthetic coding sequence
  source 1..222: mol_type = other DNA
atggagcaatccaacgactccctacgcgttaaccacaatgacggtgaagagtccaagacttctgctcaagttttcgaacacctgatctgtatggacagccgtgattcttcatttggccagaatgactctccaacagtgctgcccatcaccactcgtgaggcaaataattccttaattagccagaacattcccggcccgttgacccagacccagaccttgtag

SEQ ID NO: 108143 - DNA, 288 bp, synthetic construct
  misc_feature 1..288: note = Description of Artificial Sequence: Synthetic coding sequence
  source 1..288: mol_type = other DNA
atggaacaatccaacgacagtctgcgggtaaatcacaacgacggcgaagagagtaagacaagcgcccaggtattcgagcaccttatttgtatggactctcgtgactcctccttcggacagaacgattctcctacagtgcttcctataactacccgtgaggccaacaactctttaatctcccagaacattccgggccccctcacacagacgcagactctctccgcggagcaatttcacctcgtggatcagaacggccaagcaatccagtacgaacttcagagcctgtag

SEQ ID NO: 108144 - DNA, 624 bp, synthetic construct
  misc_feature 1..624: note = Description of Artificial Sequence: Synthetic coding sequence
  source 1..624: mol_type = other DNA
atgctggaggcctggaatctgaacctgagccactatctgaagcaccttatctgtatggactcaagagacagcagcttcggccagaatgatagcccaactgtccttcccatcactactagagaggctaataatagcttaatcagccagaatatcccaggtcccctgacgcagacccagaccctctcagcagagcagttccatctcgtggaccagaatggacaggccattcagtacgagctgcagagcttaggcgaatctaacgcccaaatgatgattgtagcaagccccaccgaaaatggacaggtcctccgagtgattcctcctacccagaccggaatggcccaggtgattattccccaggggcagctggtggacgtcaatagcccaagggatgttccggaagaaaaacctagcaaccggaacctcccgaccgtgagagtcgacactctggcggacaatacctcgaactacatcctgcatccccagacctcctttccattgcccaaaaagtctgtcactgggatgttagaagaaccattgctcgggccattacaacccctgtcaagcaacactccgatttgggcttgtcgcctgagatcttgcgaaggcgtcgaactgtggtag

SEQ ID NO: 108145 - DNA, 1914 bp, synthetic construct
  misc_feature 1..1914: note = Description of Artificial Sequence: Synthetic coding sequence
  source 1..1914: mol_type = other DNA
atgctggaagcgtggaacttaaacctctctcattaccttaaaatgatagtggccagtccaacggagaacggtcaagtgctcagggtgatcccacccactcagacaggaatggctcaggttataataccccagggccagctggtggatgtcaactctcctagggacgtcccggaggagaaaccctctaacagaaatctgccaacggtacgtgttgacacgttagcggacaacactagcaactatatactccacccccagaccagcttcccactgccaaagaagtcagttacggggatgctggaagaacccctactgggcccgctccagccccttagctccaatacgccaatctgggcctgtcgtctgaggagttgtgagaagatcggcgatagttacagagggtactgcgtgagcgagactgaactggagtcagtcctgaccttccacaagcaacagacacagtctgtctggggaacaagacagtccccatcccctgccaaaccagccactcgtctgatgtggaagtcgcagtacgtgccttatgatggaataccctttgtgaacgccggaagccgcgccgtagtgatggagtgccagtatggtccacgaagaaagggctttcaactgaagaaggtgtctgagcaagagagcagaagctgtcagctgtataaagccacttgtcctgcacgaatctatattaaaaaggtgcagaagttccccgagtaccgagttcctacagatcccaagattgacaagaaaatcattcgaatggagcaggagaaggcatttaacatgctgaagaagaacctggttgatgcaggcggcgtgctgcggtggtacgtacaacttccaactcagcaggctcatcagtaccacgaactggaaacaccatgcctgactctgagtcctagtccgttcccagtctccagtctcgaagaagaggagacagcagtgcgagacgagaattgcgccctgccatcgcggctgcatccgcaggtggcacacaagatccaggaacttgtgtcgcaagggatcgagcaggtgtacgccgttcggaaacagctgcgaaagttcgtggaacgcgagctgttcaaacctgacgaggtgcccgagaggcataacctctctttctttcctaccgtcaatgacattaaaaaccacattcacgaagttcagaagtccctgaggaatggggataccgtgtataatagcgagatcatccccgccacactgcaatggactacggacagcggcaacattttaaaggaaactatgacggttacttttgctgaaggtaatagcccgggggagagcatcaccaccaaggttgaaactaaccagactcgaggatctctgagcccggagcccacccatctgttgagttcgttgagctctttccagcctaagatcttcactcagttacagggcctgcagttgcaaccacgctacacaagtccagacgagagcccggcagtcgtgtcagtcaataaccagcctagttcgtctcccagcggcctgttggacacaatcgggtcggctgttatgaataataacagccttctgttgggccagagccactctttgcagagggacacatgtctgactcagaataacagcacagccagcaccatgggcaacctcccagaacctgaccagaatctagtggccatggatgagctggtggaggtaggagacgtcgaggatactggcaatctggagggcaccgttcatcgcatattgcttggcgacgtgcagacgatccccatccaaatcatcgataaccattccgcccttatcgaggagaaccctgagagcactatttccgtgtcacaagtcaagcaggagccgaaagaacccgccctgtccatggaagctaaaaaaacagtggactataaaaagctttccgccacctag

SEQ ID NO: 108146 - DNA, 1950 bp, synthetic construct
  misc_feature 1..1950: note = Description of Artificial Sequence: Synthetic coding sequence
  source 1..1950: mol_type = other DNA
atggaacagtctaacgattccctgagggtgaatcataacgacggggaagagtctaagacttccgcccaggtgttcgaaatgatcgtggcctcccctacagaaaatggtcaagtactgagagtgatcccccccactcagacaggcatggcccaggtgataattccacagggacagctagtggatgtgaatagcccgagggacgttcccgaagagaagccctccaaccgcaacctgccgactgtgcgagttgatacgctcgccgacaatacctccaactacatcctgcatccccagacttcattccctctacccaagaaatcagtgaccggcatgctggaggagcctctattgggacctcttcaacccctttcttcaaatactcctatctgggcgtgtcgcctgaggagctgcgagaaaataggggacagttatagagggtactgcgtgagtgagaccgagcttgagtccgtgcttacttttcataaacagcagactcagtctgtctgggggacaaggcagtcccctagccccgccaagcctgcgaccaggttaatgtggaagtctcagtacgtaccctacgacggaattccattcgtgaacgccgggtcccgggctgtcgtaatggagtgtcagtacggtccaagacgcaaaggtttccagttgaaaaaggtgtctgagcaggagagtcgttcttgtcagctgtacaaggctacttgtccggctaggatctacatcaagaaggtgcaaaaattccccgagtaccgggtccctacagaccctaagatcgacaagaaaattattagaatggaacaggagaaagcatttaacatgctgaagaagaaccttgtggatgctggcggtgtgctgagatggtacgtgcagctgccaacgcagcaagcccaccagtatcatgagctcgaaaccccttgcctcaccttgagtccctccccatttccagtgtcttcacttgaggaagaggagaccgctgtgagagatgaaaactgcgctttacccagtcggttgcatccccaggtcgctcataagattcaggagttggtttcccaagggatcgaacaagtgtatgcagtgcgcaaacagcttagaaagtttgttgaaagggaacttttcaaaccagacgaggttccagagcggcacaatctcagctttttccctacagtgaacgacatcaagaaccatatccatgaggttcagaagtctctccgcaacggtgatacagtgtacaatagtgagattatccctgccactctccagtggacaacagattcgggcaacatcctgaaagagacgatgacagtcacttttgcagaaggcaactcacccggcgagtccattactactaaagtggaaacgaaccagacgcgagggagtttgagcccagaacctacccacttgctctccagtctctcaagcttccagcccaagatctttacccagctgcagggcttacagttgcagcctcgctacacttcacctgacgaatccccggcggtggtatctgtgaacaatcagccctcatcctctccaagtggtctgttagacaccatcggtagtgccgtgatgaacaataactccctcctcctcggacagtcgcacagtttacaacgggatacctgtctcacgcagaataacagcacagcctccacaatgggcaacctgcccgagcctgatcagaatctggtcgctatggatgaactcgtggaagtgggtgacgtcgaagacaccggcaatctcgaggggaccgtgcaccgcatcctgctaggcgatgtgcagacaattcccatccaaattattgacaatcactcagctctgatcgaggagaatccggagtcaactatttccgtgagccaggtaaagcaggaacccaaggagcctgcccttagtatggaggccaagaagactgtcgattataaaaaattatcagcgacatag

SEQ ID NO: 108147 - DNA, 558 bp, synthetic construct
  misc_feature 1..558: note = Description of Artificial Sequence: Synthetic coding sequence
  source 1..558: mol_type = other DNA
atgacaacccctaataaaacaccccctggcgcggatccaaagcagctcgagcggacaggtacagtccgcgaaattggttcacaggcagtatggtccttatcttcatgcaaacccggatttggcgtagaccagctgcgggatgataacctcgagacatactggcaatctgacggctctcagcctcacttggttaacatccaattcaggaggaaaacaaccgttaaaacactctgcatttacgccgactacaagtctgacgagtcttacactccctccaagatctccgtcagagtagggaataacttccacaatctgcaggagattaggcaattggaactggttgagccatctgggtggatacacgtgcctttaacagataaccacaaaaaaccaacccgaacgtttatgatccaaattgcggtgctggccaaccatcagaacgggcgtgatacacatatgcgccagatcaagatttacacccccgtcgaggagtccagtattgggaagttccctagatgcactacaatagactttatgatgtatagaagcattcgctag

SEQ ID NO: 108148 - DNA, 558 bp, synthetic construct
  misc_feature 1..558: note = Description of Artificial Sequence: Synthetic coding sequence
  source 1..558: mol_type = other DNA
atgacaacccccaacaagactccccccggcgccgaccccaagcagctggagcgaactggcactgtccgtgagattggcagccaagccgtctggagcctgtcatcttgcaagccggggttcggggttgaccagctgcgtgacgataatctggagacctattggcaatctgacggatctcaaccccatttggtgaacatacagtttagaagaaaaactacagtgaaaacactgtgcatttatgccgactataagtccgacgagagttacacccctagcaagatcagtgtgagggtcgggaataattttcacaatctccaggagatccgccaactggaactggtggagcccagtggctggattcatgttcctttaacagacaaccataagaaaccaacacggacattcatgattcaaatcgccgtgttggctaatcaccagaacggtagggatactcatatgagacaaatcaagatttacacgcctgtggaggaaagttccatcgggaaattcccccggtgtaccacaatcgactttatgatgtatcgtagcatccggtag

SEQ ID NO: 108149 - DNA, 207 bp, synthetic construct
  misc_feature 1..207: note = Description of Artificial Sequence: Synthetic coding sequence
  source 1..207: mol_type = other DNA
atgactacccctaacaagacgccaccgggagcggatcctaaacagttagaacgcaccgggacagtccgagaaatcgggtctcaagctgtgtggtccctgtcttcctgcaagcctggatttggcgtggatcaactgcgcgatgataatcttgagacctattggcagtctgacgggagccagccccatttggtgaacattcagttctag

SEQ ID NO: 108150 - DNA, 330 bp, synthetic construct
  misc_feature 1..330: note = Description of Artificial Sequence: Synthetic coding sequence
  source 1..330: mol_type = other DNA
atgactacccctaataagacaccacccggggccgatccaaagcagctggagagaacggggacggtaagggagataggaagtcaggctgtttggtctcttagttcatgcaaacccgggttcggtgtagatcaactgagggacgacaaccttgaaacatattggcagtcagatggctcgcagccacacctggtcaacatacagttcaggcggaaaacaacagtaaaaactctgtgtatctacgccgattataagtccgacgagagctataccccctccaagatctcagtgcgcgtaggtaacaattttcataacctgcaggaaattagatag

SEQ ID NO: 108151 - DNA, 558 bp, synthetic construct
  misc_feature 1..558: note = Description of Artificial Sequence: Synthetic coding sequence
  source 1..558: mol_type = other DNA
atgaccacgccgaacaaaacgcctcccggggcagatccaaaacagttagagcgcactggcactgtgagggaaatcggctcacaggccgtatggagcctgtcctcttgcaaacccggatttggcgtggaccagctgagagacgacaacttggagacatactggcagagtgatgggagccagccacatctcgtgaacatccaattccgcagaaagactacagtgaaaacattgtgtatttatgccgattataaatctgacgagtcttataccccttctaaaattagcgtgcgcgtagggaataactttcacaatttgcaggaaattcggcagctggagttagtagaaccctcaggctggattcacgttccactgactgacaaccataagaaaccaacacgcacatttatgatacagatagcggtgctagcaaatcaccagaatggccgcgacacacatatgcgtcaaataaaaatttacactcctgtggaggagtcctcaatcgggaaattccctcgctgtaccaccatagatttcatgatgtatcggtctattagatag

SEQ ID NO: 108152 - DNA, 477 bp, synthetic construct
  misc_feature 1..477: note = Description of Artificial Sequence: Synthetic coding sequence
  source 1..477: mol_type = other DNA
atgacaacaccaaataagacccccccgggcgcagatccaaagcaactggaacgaacaggaaccgtccgggagatcggaagtcaggccgtctggtctttgagttcttgcaagccaggattcggtgtggatcaactccgcgacgacaatctggagacttactggcagagtgatggttcccaacctcacctcgtgaatatccagtttcgaagaaagaccacagttaagactctgtgtatctacgcggattataagtccgacgagagttataccccaagcaagattagtgtgcgggtgggcaacaacttccacaatctccaagaaatcaggcagcttgaactggtggagcctagcggatggatacacgtgccactgacagacaatcacaagaaaccaactcgaacgtttatgattcagattgccgtgctggctaatcaccagaatggcagggatacccacatgcggcaaatcaagatatag

SEQ ID NO: 108153 - DNA, 477 bp, synthetic construct
  misc_feature 1..477: note = Description of Artificial Sequence: Synthetic coding sequence
  source 1..477: mol_type = other DNA
atgaccacccccaataaaactccacctggcgccgacccaaaacagttagagcgcaccggcaccgttcgggagatcggtagccaggcagtgtggtccctatcaagctgtaagcctggctttggtgtggatcagctacgagacgataacctggagacttattggcaatctgatggctcacagccacatttggtcaatatacaattccggaggaaaacaaccgttaaaactctgtgcatctatgctgactataagtccgatgaatcctatactccatccaaaatttccgtgagggtgggtaataattttcacaacctgcaagagatccgtcagcttgaattggtggaaccctccggctggatacacgtgcctctgacagataaccacaaaaaaccaacaaggaccttcatgatccagatcgccgtactggctaatcatcaaaatgggagggatacacacatgaggcagatcaaaatctag

SEQ ID NO: 108154 - DNA, 333 bp, synthetic construct
  misc_feature 1..333: note = Description of Artificial Sequence: Synthetic coding sequence
  source 1..333: mol_type = other DNA
atggccgcctcatccagttcatcaagcgcaggaggagtgagcggcagctccgtaactgggtcaggtttctccgtttctgatcttgctcctccacgtaaggctctctttacatatcctaaaggcgcaggggaaatgctcgaggacggcagtgagagatttttatgtgagagtgtgttctcttatcaggtggctagtactctgaagcaggttaaacatgaccaacaggtggcacgtatggagaagctggccggactagtggaagagctggaggcagatgaatggaggttcaaacccatcgaacagttactaggattcacccctagttcaggctag

SEQ ID NO: 108155 - DNA, 2427 bp, synthetic construct
  misc_feature 1..2427: note = Description of Artificial Sequence: Synthetic coding sequence
  source 1..2427: mol_type = other DNA
atgctgagattcccaacatgcttcccaagcttccgggtggtaggggaaaagcaactgccccaggaaattatctttttggtgtggtcccccaagcgcgatctaattgcccttgcaaacactgccggcgaggtgttgctgcatcgcctggcttcgtttcaccgggtgtggtctttccccccaaatgagaacaccggcaaagaggtcacttgtcttgcctggagaccggacggtaaactgttagctttcgcgttggccgataccaagaaaatagtcctctgtgacgtagaaaagccagaatccctgcactccttctctgtggaggcgcctgtgagttgcatgcattggatggaggtcaccgtggaatcctctgtcctgacgtctttctataatgctgaggatgagtctaacctgctccttcccaaactgccgactctccctaaaaactactctaacacctctaaaattttttctgaggagaatagcgatgagatcataaagctgctcggcgacgttcgtctgaatatactggtgttaggagggtcttcaggattcatagagttatacgcctatgggatgttcaaaatcgctcgggtcactggcattgcgggtacttgtctggcgctttgcctttctagtgacctgaagtccctcagcgtagttacagaagtttccaccaatggtgccagtgaagtaagttactttcagctggagaccaatctgctatactccttcctccccgaagttactcggatggcgaggaaattcactcacattagtgcccttctccagtacattaacctaagcctgacctgtatgtgcgaagcttgggaggagatcctcatgcaaatggattcccgcctaacgaaattcgttcaggagaagaatacaaccacaagtgtccaagatgagtttatgcatctgcttctctggggcaaagcatctgccgagctgcagacattgttgatgaatcagctcacagttaagggtctgaagaagttaggtcaatccatcgaatcttcctactccagtattcaaaagcttgtgatatctcatctccaatcaggaagcgaatcactcttgtaccatttatccgagctgaaaggtatggcgtcctggaagcagaagtacgagcctctgggtttggacgccgccggtattgaggaggctataacagcagtgggctctttcatcttgaaagctaatgagctcttacaggtcatcgattcctcaatgaaaaatttcaaggcatttttccggtggctatacgtggcgatgctccgcatgactgaagaccacgtactgccggaattgaataaaatgacccaaaaggacatcacttttgtggccgagtttcttaccgagcatttcaatgaggcacccgatctctacaataggaagggcaagtacttcaacgtcgagcgggttggccagtacttaaaggacgaggatgatgaccttgtaagtccacctaacacagaaggtaaccagtggtacgattttttgcagaattctagccatctgaaggaaagccccttactgttcccctactaccctcggaaaagcctgcatttcgtaaagaggagaatggaaaacataatcgaccagtgcctccagaaacctgccgatgtcatcgggaagagcatgaatcaagcaatttgcattccgctgtacagagatacacgatctgaagattccactaggcgtctattcaaatttccgttcctttggaacaataagacatctaatctgcactatctactgtttaccatcctggaagatagcttatacaagatgtgtattctaaggagacacacagatatcagccagtccgtgtctaatggcctgatcgcgattaaattcggtagcttcacctatgctactactgagaaagtccgtcgctcgatctacagctgtttggatgctcagttttatgacgatgaaaccgtcaccgtggtactgaaggatacagttggccgagagggaagggaccgcctgctggtgcagctgccgttgtcactagtgtacaatagcgaggactccgcggagtaccaattcacgggcacatactccacgaggctggacgagcagtgtagcgcaatccccacccgcaccatgcactttgaaaaacattggaggttgttggaatctatgaaagctcagtatgtggccgggaatggctttcgaaaagtgtcatgtgttttgagctctaacctgaggcacgtgagagtgttcgaaatggatattgacgacgagtgggagcttgacgagtcaagtgacgaggaagaagaggcttccaacaagccggtgaagataaaggaagaagtgttgagcgagtctgaggctgagaatcagcaagccggagccgctgcactggctcccgaaatcgtcatcaaagtggagaaattagatccagagttagactcatag

SEQ ID NO: 108156 - DNA, 489 bp, synthetic construct
  misc_feature 1..489: note = Description of Artificial Sequence: Synthetic coding sequence
  source 1..489: mol_type = other DNA
atgctgaggttccccacctgcttccccagttttagggtggtcggcgaaaagcagctgccacaagaaatcatcttccttgtgtggtcccctaagcgtgatcttattgccctcgcaaacactgctggcgaagtcctcctgcataggctcgctagtttccatagagtgtggtcctttccgcccaacgagaacacgggaaaagaagtaacctgtctggcctggcggcccgatgggaagctgttggcgtttgcgctggccgacactaagaagattgtcctgtgtgacgttgagaagccagaatccctgcatagcttttctgtcgaggcccctgtgtcgtgtatgcattggatggaggtgaccgtcgaatcctctgtgcttacatctttttacaacgcagaggacgagtccaacttgttattgcccaagctacccacattacccaaaaactattccaatacctctaagatctttagcgaagagaactcagattag

SEQ ID NO: 108157 - DNA, 2430 bp, synthetic construct
  misc_feature 1..2430: note = Description of Artificial Sequence: Synthetic coding sequence
  source 1..2430: mol_type = other DNA
atgcttcggttcccgacatgttttccctcgttccgcgttgtgggggagaaacagcttccgcaagaaatcatttttctcgtgtggtcacctaagagggacctgatcgcattggccaacacagctggcgaagttctgctccacagattggcttcctttcaccgcgtgtggtcctttccgcccaatgagaacactggtaaagaagtaacctgcctggcatggaggccagacgggaaactcctggctttcgccctggcagacacgaaaaaaatagtgttatgcgatgtggaaaagcccgaaagtttgcattccttcagcgtcgaagctccagtgagttgcatgcattggatggaagtgacagtggaatcatctgtgctcacctcattctacaacgcagaggatgaaagtaacctgcttctgccaaaactcccgaccctgcctaagaattatagtaacacttccaaaatcttcagcgaggagaattccgacgagatcataaagcttcttggcgacgttcggcttaacattctcgtgctaggcggaagctctggcttcatcgaattatacgcctacggcatgtttaaaattgccagagtgaccggtatagccggcacgtgtctggctctgtgcttatcatcagacctgaagtccctgtccgtggtcacagaggtgtcgacaaatggcgcctctgaggtatcttactttcagctggagacgaacctgctttattcattcctgcctgaggttacgcgcatggcaaggaagttcacccatatctctgcactcctacaatatataaacctgtccctcacatgcatgtgcgaggcctgggaagagatcctcatgcaaatggatagtaggcttaccaaatttgtgcaggaaaaaaatactaccacctcggtacaggatgaattcatgcatctactgctgtgggggaaggcttcggcagagctgcagactctgcttatgaaccaactgacagtgaaaggactgaagaaactcgggcaaagcatcgagagttcatatagttctatccagaagcttgtaatatctcacctccaaagtggaagtgaaagtcttttgtaccacctcagcgaactgaagggtatggcaagctggaaacaaaaatatgagccactcggtcttgacgcagctggcattgaggaagcgatcactgcagttggatcctttatattaaaagccaatgagctgctgcaggtgattgatagcagtatgaaaaattttaaggctttcttcagatggttgtacgtggctatgctgaggatgacagaggaccacgtactgcctgaactgaataaggtgatgactcagaaagatattactttcgtggctgaattccttacagagcatttcaatgaggccccagatctttacaatcgcaaagggaaatatttcaatgtggaaagggtgggtcagtacctgaaggacgaggacgatgacctcgtcagcccaccgaacacggaaggaaaccaatggtacgactttctacaaaacagcagtcacttaaaagaatccccactcctcttcccctattatcctcggaaaagcctgcattttgtgaagagacgaatggagaatatcattgaccagtgtctgcaaaaacccgccgacgtgatcgggaagtccatgaatcaggcaatttgtatccccctttatagagatacgaggtccgaggactcaacgaggcgactctttaaattccctttcctctggaataacaaaacgtccaatcttcactatttgttattcacgatcctagaagactcactatacaagatgtgcattttgagacgtcacacggatatttctcagtccgtcagcaatggactaattgcaattaaatttgggagtttcacgtacgctaccactgaaaaggtgcgtcgcagcatctattcatgtctggatgctcagttctatgacgatgaaactgtaactgtagtccttaaggacacagtcggaagagaggggcgagaccgtttactggtacagctccccctgtctctggtttacaatagcgaggactccgccgaatatcaattcacgggcacctactctaccaggttggacgagcaatgctccgccatcccgacccggactatgcacttcgagaaacactggcgcctcctggagtccatgaaggctcaatacgttgccggaaacggcttccgtaaagttagctgcgtgctatcttctaatctgagacatgtccgagtctttgaaatggacattgatgacgagtgggaacttgatgaatcaagcgacgaagaggaggaagccagcaataagcctgttaagatcaaggaagaagtgctgagtgaaagcgaagccgagaatcagcaagcaggtgccgctgcactcgcccccgagatcgtcataaaggtcgagaaactggaccctgaactggactcatag

SEQ ID NO: 108158 - DNA, 2268 bp, synthetic construct
  misc_feature 1..2268: note = Description of Artificial Sequence: Synthetic coding sequence
  source 1..2268: mol_type = other DNA
atggcctctgtccacgagagcctgtatttcaatccaatgatgaccaatggtgttgttcacgccaacgtctttggcatcaaagactgggtgacaccctacaaaattgctgtattggtgctgctgaatgaaatgtcacggaccggtgagggggctgtaagcctgatggaaagacggaggttgaaccagctgcttctccctctgctccaggggccagatattaccttatctaaactctataaactaatagaggagtcctgtcctcagctcgctaactctgtgcagattcgcatcaagctgatggcggaaggtgaattgaaggacatggagcagttttttgacgacctcagtgactctttttcggggaccgaacccgaagtgcacaaaaccagcgttgtgggcctgttcctccgccacatgatacttgcatattcaaagctgtcctttagccaggtgtttaaactctacactgcactccagcagtacttccagaacggcgagaagaaaacagtcgaggacgcagatatggagttgaccagccgtgacgagggagaacgcaagatggaaaaggaggaacttgacgtgtccgtgcgggaagaagaagttagctgtagcggtccactgtcccagaagcaggctgagttctttttgtctcaacaggcctccctgctgaagaatgacgagacaaaggcccttacccctgcctccctgcagaaggagctgaacaaccttctgaagtttaatccagactttgccgaggcgcattacttaagctatctcaacaacctcagagtgcaggatgtgtttagcagcacccattctcttttgcactacttcgatagactgattcttacaggggctgaaagcaagtccaatggcgaggagggttacggcaggagcctgcgctacgccgcactcaacctggccgcccttcactgtagattcggccactaccagcaggccgagctggccctgcaggaggcaataaggatcgctcaggaatccaatgaccatgtgtgcctacagcattgtcttagttggttatatgtgctcggccaaaagcggtctgattcttatgtgttgcttgagcacagtgtgaagaaggccgtccactttgggctgccctacctggcttcactcggcattcagagtctggtacagcaaagagccttcgcgggaaaaacagctaacaagcttatggatgcactgaaggatagcgatctgctgcattggaaacacagccttagcgagctcattgatatcagtattgctcaaaagacagcgatatggagactatacggccgcagtactatggcccttcagcaggcacaaatgctactgtccatgaatagtctggaagctgttaatgcaggggtacagcagaataacaccgagtcatttgctgtcgcattatgtcatctcgccgagcttcacgcggagcaaggatgttttgcagccgcttccgaggtgttaaagcacttaaaagagcgattcccacctaactcacagcatgcccagctttggatgttgtgcgaccaaaaaattcagtttgaccgagctatgaatgacggaaagtatcatttagctgatagtctcgttaccgggatcacggcgctcaattcaatcgaaggggtgtataggaaagccgtggtcttgcaggctcagaaccagatgagtgaagctcacaaactgctccagaagttgctcgtgcattgccagaagctgaaaaacacggaaatggttatatctgtcttgttgtcagtggctgagctgtattggcggagctcttctcctactatcgctttgccgatgctgctacaggcgctggctctgagcaaagagtaccgcttacagtatctcgcatctgagactgtgttaaacttggctttcgcacaactgatcctcggcatacccgaacaagcattatccctgctgcatatggctattgagcccatcctggctgacggcgccattttagataagggacgtgccatgttcctggtggcgaagtgccaggttgcgagcgccgcctcatatgaccagcccaagaaagcggaagccctggaagccgcaatcgagaacctcaacgaggcgaaaaattatttcgctaaggtcgactgtaaagagcggatcagagatgtggtttactttcaagcgcggctgtatcacacattgggcaaaacgcaggagcggaaccgctgcgcaatgctgtttcgacaactgcatcaggagctgcctagccacggcgtgcctctgattaatcatctttag

SEQ ID NO: 108159 - DNA, 1932 bp, synthetic construct
  misc_feature 1..1932: note = Description of Artificial Sequence: Synthetic coding sequence
  source 1..1932: mol_type = other DNA
atggcggagggtgagttaaaggatatggagcagttctttgacgatttgtccgattcattcagtgggactgaacccgaggtgcataaaaccagcgtcgtcggtctgttcctccgacatatgatcctagcctatagtaaactgtctttcagccaagtgtttaagctatatactgcattacagcagtactttcaaaacggggagaagaaaacggttgaagacgccgatatggagctaacgagcagggacgagggagagaggaaaatggagaaggaggagctggacgtcagcgtcagagaagaagaggtttcctgtagtgggcccctgagccagaagcaggctgagttttttctttcccagcaggccagccttttaaagaacgacgaaactaaagctcttacaccggcatctctccagaaagaactgaataatttactgaagttcaaccctgatttcgcggaggctcattacctctcctaccttaataatctcagggttcaagatgtcttttctagtactcatagcctgttgcattatttcgataggctgatcctgacgggcgctgaaagcaagagtaatggtgaggaagggtatgggaggtctttgagatatgctgcgttgaatctggcagccctgcactgccggttcggtcactaccagcaggccgaactggcgctccaagaagccattcggatcgcacaggagtcaaatgaccacgtgtgtctgcagcattgtctgtcatggctgtacgtgctgggccagaagcgcagcgattcttatgtgttgctcgagcattcagtgaaaaaagccgtgcatttcgggctcccacgcgcctttgccggtaagacagccaacaagctgatggacgcactgaaggactccgatctgcttcactggaagcacagtctctccgagctgattgatatctcaattgcccaaaagaccgctatttggcgcctctacggaagatctacaatggctttgcagcaggctcagatgctgctgagcatgaatagcctggaggctgttaacgctggtgtgcagcagaataataccgagagctttgcggttgcactttgtcacttggctgagctgcatgcagaacaggggtgtttcgccgctgcgtccgaggtactcaaacaccttaaggagagattcccaccaaacagccagcacgcgcagctctggatgctatgtgaccaaaagattcagtttgatcgcgcaatgaatgatggtaaataccacctggctgattcccttgtaaccgggataaccgctctgaattctatcgaaggagtgtaccgaaaagccgtggtgctgcaagctcagaaccagatgagcgaggcccataagctgctgcaaaagctgctcgtgcactgccagaaactgaaaaatacggagatggtgatctctgtactgctgtcagtggcggagctttattggcgcagctcttcccccactattgcgctgcctatgctgctccaggcactggcactgtctaaagagtaccgcctccagtacttggcatcagagactgtcctgaacctggcatttgcccaacttattctgggaatcccagagcaggcactgagcttacttcatatggctattgaacctatattggctgacggcgctatacttgacaaaggccgcgctatgttcctcgtcgcgaagtgtcaggtggccagtgctgcctcctacgaccagcccaagaaagctgaggcactcgaggccgccattgagaatcttaacgaggcaaagaattatttcgccaaagtcgactgtaaggaacggattcgggatgttgtctacttccaagctaggctctaccataccttaggtaagactcaggaacgcaatcgttgcgccatgcttttccgacagctccaccaggagctgccgtcacacggcgttcctttgattaaccatttgtag

SEQ ID NO: 108160 - DNA, 1932 bp, synthetic construct
  misc_feature 1..1932: note = Description of Artificial Sequence: Synthetic coding sequence
  source 1..1932: mol_type = other DNA
atggctgagggggagctgaaggacatggagcagttctttgatgatctgtccgactcctttagtggcaccgaaccagaagtacataagaccagtgtggtgggactttttctgcggcacatgatcctggcctactcgaaactgagctttagtcaggtgttcaagctgtatacggccttgcagcagtactttcagaacggggagaagaagaccgtcgaggacgccgatatggaactgacctcaagagacgaaggcgagaggaagatggagaaggaggagctagacgtctctgtcagagaagaggaggtgtcatgctcaggccccctgtcgcaaaagcaggccgaattctttttgtcccagcaggcctccttgcttaagaatgatgagacgaaagccctaactcctgcaagcttgcagaaggagctgaacaatttgctcaagttcaaccctgacttcgccgaggctcattacctgtcctatttgaacaatctcagagttcaggacgtcttttcaagcacacattctttgctccattacttcgaccgtctgatccttaccggcgccgagtcaaagtcgaatggggaagagggttatggtagatcactgagatatgcagccttgaatctggcagcactccactgtcggtttgggcattaccagcaggctgagttagcccttcaggaagctatccgaattgcacaggagagcaacgatcacgtgtgtctgcagcactgcctaagctggctgtacgtgctgggacagaagcgatccgacagctacgtgcttttagaacactcagttaagaaagctgtgcattttggtctgccaagggcgtttgcgggtaagacagctaataagttgatggacgccctaaaagactcggatctgctacactggaaacactccttgagcgagctgatcgatatttctattgctcagaaaaccgcaatatggcgactgtacggcagaagtactatggctctgcagcaggctcagatgctgctgtcaatgaactcgctagaggcagtgaacgccggcgtgcaacagaataacaccgaaagctttgctgtggccctctgtcacctggcagaattgcatgccgagcagggctgtttcgccgccgcgagcgaagtgctcaagcacttaaaagaacgcttccctcccaactcccagcatgcgcagctgtggatgctttgtgatcagaaaattcaattcgatagggctatgaacgacggcaagtaccacctcgccgattccctcgtgaccggaatcacagccctgaattccattgaaggcgtctatcgcaaggctgtggtgttacaggcgcaaaaccagatgagtgaggcccataagctgctccaaaagctcttagttcattgtcaaaagctgaaaaacacggagatggtcatctcagtgctgttgagcgttgcggagctgtactggcgttcaagttcgcccacaattgcattgccaatgctgctgcaagccctcgcactaagtaaagaataccgcctgcaatatttggcctccgaaacagtgctcaacttagctttcgcccaactgatcctggggataccggagcaggcacttagcctactccatatggctattgagccaatcctggctgatggggccattcttgacaaaggtcgggccatgttcctggtggccaaatgccaggtggccagcgctgcctcctatgaccaacccaaaaaggccgaggcactggaagccgccattgaaaacttgaatgaggctaaaaattattttgcaaaggtagactgtaaggagcgaatccgtgatgtggtgtacttccaggccagactctaccataccttggggaaaacccaggaaagaaaccgatgcgccatgctcttccggcagcttcatcaggagctccctagccatggggtgcctctgatcaaccacttgtag

SEQ ID NO: 108161 - DNA, 660 bp, synthetic construct
  misc_feature 1..660: note = Description of Artificial Sequence: Synthetic coding sequence
  source 1..660: mol_type = other DNA
atgttatctccctgccttagttcttactttgtgggccttttcttaagacatatgattttagcctattcgaagctttctttctctcaggttttcaaactttacaccgctctgcagcaatactttcagaacggtgaaaagaagaccgtggaagatgctgatatggaactgaccagtcgagacgaaggggagcggaaaatggaaaaggaggaactggacgtctctgttcgggaggaggaagtcagctgctccggcccactgtcccaaaaacaggctgagttttttctcagccagcaggcctctctattaaagaatgacgaaacaaaggcacttacgcctgcctctttgcagaaggagttaaataacctgcttaagttcaacccagactttgcagaggcgcactacctatcctacctgaataatctccgagtacaggacgtcttttccagcacacacagcttgctccattactttgataggctaatcctcaccggtgctgagtcaaaaagcaatggcgaagaaggctatgggaggtccttgcgatatgccgccctgaatctagcggcactccattgcagatttggacactataccagcccaccttgggagtacagccccctgttcaatcgggaactactgttgggacgccgtcagacctcatag

SEQ ID NO: 108162 - DNA, 135 bp, synthetic construct
  misc_feature 1..135: note = Description of Artificial Sequence: Synthetic coding sequence
  source 1..135: mol_type = other DNA
atggccgagggcgagctgaaagacatggagcagttctttgacgacctgtctgatagcttctcagggaccgaacctgaggtacataagacgtccgtagtgggactctttctgcggcatatgattcttgcgtattag

SEQ ID NO: 108163 - DNA, 1074 bp, synthetic construct
  misc_feature 1..1074: note = Description of Artificial Sequence: Synthetic coding sequence
  source 1..1074: mol_type = other DNA
atggacgccctgaaggactctgacttgttgcactggaagcattctcttagcgagctgattgacatcagtattgcccaaaaaaccgcaatttggagattgtacggaaggtccaccatggccttgcagcaggcacagatgcttctgagtatgaactctctcgaggccgtgaacgctggggtgcagcagaataacacggaaagcttcgccgtggcgctgtgccacctggccgaactgcacgccgagcaaggttgcttcgccgctgcgtctgaggtgctgaagcatttgaaagaacgctttccccctaattctcagcacgcccaactgtggatgttgtgcgatcagaaaatccagtttgaccgagccatgaatgatgggaagtaccacctggctgattcccttgtgacgggcatcaccgctcttaacagcatcgaaggcgtctatcggaaagccgttgtgctccaggcccagaaccaaatgtctgaagcccataagctgctacagaagctgttggtgcactgccagaagcttaaaaatacagaaatggtgatcagcgtgctgctcagcgtggcagagctctactggagaagtagctcccccaccatcgccttacccatgctcctgcaggccctcgccctctctaaagagtaccgcttgcagtacctggcctctgaaacagtcctcaatttggcttttgcgcagctcattctgggaatcccagaacaggccctgtctcttcttcatatggccatcgaaccaattttagctgatggtgcaatactggataaaggacgcgccatgtttctggtggctaagtgtcaggtcgcatctgcagccagttatgaccagcccaagaaggcagaggctctggaagcagccattgaaaatctgaacgaagccaagaactatttcgccaaagtggattgtaaggagagaattagagacgtcgtttactttcaagcacgcctctaccacactttggggaaaacccaggagagaaaccgttgcgccatgctatttagacaactgcaccaagagctgccaagtcatggcgtacctctgattaatcacctgtag

SEQ ID NO: 108164 - DNA, 2229 bp, synthetic construct
  misc_feature 1..2229: note = Description of Artificial Sequence: Synthetic coding sequence
  source 1..2229: mol_type = other DNA
atggcgtctgtccacgagtccctgtatttcaacccaatgatgactaatggggtggtgcacgcaaatgtcttcggcataaaggattgggttactccttacaagatcgccgtcctagtactgctgaacgaaatgtctcgaactggtgagggcgccgtgtccctcatggaacgccgaagactgaatcagttactacttccgctgctgcagggacccgatatcactctgtctaagctgtacaagctcatcgaggaaagctgtccacagttagctaactctgtacagatcaggatcaagttaatggctgaaggtgagctcaaggacatggagcagttctttgacgacctgtctgacagctttagcggcactgagcctgaagttcacaagacgtccgtcgtggggctgttcttgagacacatgatactggcatatagcaagctgtcgttcagtcaggtttttaagctgtacactgcattgcagcagtatttccagaacggcgagaaaaagacagtggaggacgcagacatggaactgacaagtagggacgaaggcgagcgtaagatggagaaagaggagctggacgtcagtgttagggaagaggaagtcagttgttcaggaccactttcacagaaacaggccgagttctttctgtcacagcaggcatcactgctgaagaatgatgagacgaaagccctgacccctgccagcctccaaaaggaactgaacaaccttttgaagttcaaccctgactttgcggaggcacactatctgagttacctcaataacctcagggtacaagatgtgtttagcagcacacacagcctcctgcactattttgaccgccttatcctaactggagctgaatctaaaagcaacggtgaggagggctacggacgcagcctgagatatgcagccctcaacctggccgcgctacactgccgatttgggcactaccagcaggccgagctggccctccaagaggccatccgaattgctcaggagagtaacgaccatgtgtgtttgcagcattgccttagttggttgtatgtgttgggccagaagagaagcgattcctatgtgctgttagagcattcagtgaagaaggctgtgcacttcgggctgccgagagctttcgctggtaagaccgccaacaagctcatggatgcccttaaggactccgatttgctacattggaaacactccctctctgagctgattgacatcagcattgctcaaaagaccgctatttggcgactgtacggcagatccaccatggcccttcagcaggcacagatgctgctgagtatgaattccttagaagccgtgaacgcgggagtacaacagaataatacagagtcctttgctgttgctctctgtcatctggccgaactccacgccgagcaagggtgttttgccgcagcttccgaggtgcttaaacacctgaaagaacggttcccaccaaattctcagcacgctcagctatggatgttgtgcgaccagaagatccagttcgaccgggctatgaacgacggaaaatatcacttggcagactccttggtgacaggcatcacagcattgaatagcatcgaaggggtgtaccgcaaggccgtcgtgctccaggcccaaaatcagatgtcagaagcccacaaactgcttcagaagctgctcgtgcactgtcagaaactgaagaacaccgaaatggtaatcagcgtgctgcttagcgtcgccgaactgtactggaggagctcttctcccacaatcgcactgccaatgcttctgcaggcacttgccttatctaaagagtatagattacagtacctagcctcagaaactgtactgaatctggctttcgcccagctgattctgggaatcccagaacaggctttatctctgcttcacatggccattgagcccattcttgccgatggggctatcttagacaagggacgagccatgttcctggtcgctaaatgtcaggtggcatctgctgccagctatgaccaacccaaaaaagcggaggccctcgaagccgcaatcgaaaacctcaacgaggccaagaactatttcgcaaaggtagattgcaaggagcggatccgcgacgtggtgtactttcaagctagactttaccatactctgggcaagacacaggagcgtaaccgctgtgctatgctgtttcgccagctgcatcaggagttaccgtcccacggcgtgcctctcataaatcacttatag

SEQ ID NO: 108165 - DNA, 1425 bp, synthetic construct
  misc_feature 1..1425: note = Description of Artificial Sequence: Synthetic coding sequence
  source 1..1425: mol_type = other DNA
atggagctgccaagcggtcccggacctgagcggctgtttgattcgcaccgtctgccaggcgactgcttcctacttctcgttcttctgctctacgcgccagtgggattctgtttactggtactgaggctctttctcgggatacacgtcttccttgtgagttgtgccttgcccgattctgtcttgcgtcgcttcgtcgttaggactatgtgtgccgtcttagggctcgtggcgaggcaggaggacagtggcctccgggatcacagtgttcgtgtcctcatttctaaccacgtgacaccatttgatcataacatcgttaacctgttgacaacgtgcagcacggtgagcgagagcgaggcggagagcgcaaccgggaggtttcccggggcccaattaaaggcccccctttcacctctcgctttccccatggaagacacagagcttccattgaccccaattctgtatcctacatgccagttttttttcatcttcctgaacattttcctgcttgccttttcaagccctggtagccagccattactcaactccccaccttcatttgtgtgttggagccgtggcttcatggagatgaatggtcgcggcgagctggttgaaagcctgaaacgcttctgtgcttccactcgactgccccccacccccctactgttattcccggaggaggaagctacaaacggacgcgaggggcttctgagattttcctcttggccgttctctatccaggatgttgtgcaaccgcttactcttcaagtgcagcggcccctggtctctgttaccgtgtcagatgcttcatgggtctccgagctgctgtggagtctgtttgtgcccttcaccgtctatcaagttagatggctgcggcccgtgcataggcagttaggcgaggctaacgaggaattcgccttacgtgttcaacagctcgttgccaaagagttagggcagactggcacccggctgacgcccgcggacaaggccgaacatatgaaacgtcagcggcacccgcgtttgcgaccccagtccgcccagtcttctttcccccccagcccagggcctagccctgacgtgcagctggctactctggcacagagggtgaaagaagtcctccctcacgtcccgcttggggtaattcagagagacctggcaaagaccggatgcgtggacctgacgatcaccaatctactggaaggcgctgtggctttcatgcctgaagatataactaagggaactcagtctcttccgactgcgtcagcaagcaaattcccttctagtggccctgtcaccccacagcctaccgccctgaccttcgcgaagtcatcctgggctaggcaggaatccttgcaagagcgcaaacaggccttgtatgaatacgcccggcggcgttttacagaaagaagagctcaggaggccgactag

SEQ ID NO: 108166 - DNA, 1233 bp, synthetic construct
  misc_feature 1..1233: note = Description of Artificial Sequence: Synthetic coding sequence
  source 1..1233: mol_type = other DNA
atggaactgccttccgggccagggccagagaggctgtttgattcacacaggctcccaggcgactgcttccttctgcttgttctcctgctgtacgctcccgttggattttgcctgcttgtcctgcgcttgtttctgggtatccatgtatttttggtctcctgtgcacttccagactccgtcttgagacgttttgttgtgcgaactatgtgcgccgtcttagggctcgttgcaaggcaggaagactccggtctgagagaccattccgtccgtgtcctcataagtaatcacgtgacaccgtttgaccacaacatcgtgaacctgctaacaacctgcagcaccccgctgcttaattcccctccatcattcgtatgctggtctcggggatttatggaaatgaacgggaggggcgaactcgttgaatcattaaagcggttttgcgcctcaacacggcttccccctacccccctgctgctgtttccggaagaggaggccaccaatgggcgggaaggtctgttacgattttcaagttggcctttctcaatccaggatgtcgtccagcccttgactctgcaggtccaaaggcctctggtaagcgtgaccgtttccgatgcaagctgggtctcggagctcctgtggtctttatttgtccccttcacagtctaccaggtccgatggctcaggcccgtccatcgacagctgggcgaagcaaacgaggaatttgccctgagagtgcagcaactggtcgcgaaggaactcggccagaccggcaccaggttgacacctgctgataaagcagaacacatgaagaggcagcggcacccccggctgcgcccccagtccgcccaatcatccttccctccctctccaggcccgtcccccgacgtccagttagcaacccttgcacagagagtgaaggaggtcctgccccacgtgccactaggggtgatccagagagacctggccaagaccggttgtgtggacttgactattacaaaccttctcgagggggctgttgcattcatgcctgaagacatcaccaagggcacgcagtccctaccaacagcctctgcttcgaagtttccctctagcggacctgtcaccccccagcctaccgcactgacgtttgccaagtcttcttgggctagacaggagtcgctgcaagagcgcaagcaggctctgtatgaatacgctcggcggcgcttcaccgagaggcgagcccaggaagcggactag

SEQ ID NO: 108167 - DNA, 1128 bp, synthetic construct
  misc_feature 1..1128: note = Description of Artificial Sequence: Synthetic coding sequence
  source 1..1128: mol_type = other DNA
atggagctgcctagtgggcccggtcccgagagactgtttgactcacaccggcttcccggagactgcttcctgctgttggttctcttgttatacgcgccagttgggttctgtctgcttgtgctgcgcctctttctcggtatccacgtgttcctggtctcttgtgccctgccagatagcgtgctccgccgtttccggttcgtggtcaggacaatgtgcgccgtgctgggattagtcgcaagacaggaggatagcggactgcgtgaccattccgttcgggtcttgatctccaaccacgtgacccctttcgatcacaacatcgtcaacctgctcacaacttgctccactcctctgctgaacagccctccgtcctttgtgtgctggagcaggggcttcatggagatgaacggacgtggcgaactcgtagagagtcttaagcggttctgcgctagcacccgcctccctcctacaccacttctgctgtttccggaagaagaggcaaccaacgggagggagggactgctgaggttcagctcatggccattctccatccaggacgtcgtgcagccgttaacgttacaagtgcagagacctctggtgagcgtgactgtctctgacgcaagctgggtatcagagcttctgtggtctctgttcgtcccctttaccgtgtatcaagtgagatggttacgcccggtgcatcgacaactgggggaagccaacgaagaattcgccttacgggtacagcagctcgtcgcgaaggagctcggccagaccgggacaaggcttacacccgccgacaaggcagagcacatgaaaaggcagcgtcacccccggctcagaccacagtccgcacaaagcagctttcctccgtctccaggcccgagccccgacgttcagctggctacactggcacagagggtaaaagaggtgttaccccacgtgcctctaggggttattcaaagggatctggccaaaactggatgcgttgacttgaccatcacgaatttactggaaggcgcagtcgcctttatgccagaggatataacgaaaggcacacagtccctacctaccgcttcagcgtcaaaagcttttgacgcctgcttgatgatgatgaccccacaggctttgtag

SEQ ID NO: 108168 - DNA, 2145 bp, synthetic construct
  misc_feature 1..2145: note = Description of Artificial Sequence: Synthetic coding sequence
  source 1..2145: mol_type = other DNA
atggcctcggaggccccatctccacctagaagccctcccccaccaaccagtcctgaacccgaactggctcagctccgcagaaaggtggagaagttggagagagaacttaggagctgcaaaaggcaagtgcgcgaaatcgaaaagctgctccatcacacagaacggctttaccagaacgctgaatctaataaccaagaactgcgtacccaggtagaggaactgtccaagattttgcagcgagggagaaatgaagacaacaagaagtcagatgtcgaagtgcaaaccgaaaatcacgcgccatggtccatcagcgactatttttaccagacatactataatgacgtgtcacttcctaacaaggttactgagttatccgaccaacaagaccaggctatcgagacatctattctcaattccaaagatcacctgcaggtggagaatgatgcataccctggaactgaccggaccgaaaatgtcaaatatagacaggtggatcattttgcaagcaactctcaggagcccgccagcgccctcgcaaccgaggatactagcctagagggctctagtttggccgaaagtttgagggccgcagcagaagcggccgtcagccagacgggcttttcgtacgacgagaataccgggctgtattttgaccactctacgggtttttactatgattctgagaaccagctgtactatgacccctcaacgggaatctattattattgtgatgtggagagcggcagatatcaatttcactcccgggtggacctccagccctaccccacgagtagcactaagcaatctaaggataagaaacttaagaagaaacgtaaggatccagattcttcagctactaacgaagagaaggacttgaacagcgaagatcagaaggcgttcagcgtggaacacacctcctgcaacgaggaagaaaactttgccaacatgaaaaagaaagcgaagatcggaatccaccacaaaaatagtccgcccaaggtcacagtgccgacaagtggaaatacaatcgagagcccactgcacgaaaatattagtaatagcacctctttcaaggacgagaaaataatggagacagactcagagccagaggagggggaaatcactgatagccagacagaggattcctacgatgaggctatcacatctgagggaaatgtaacggccgaggactctgaggacgaagacgaggataagatctggccaccttgtataagggttatcgtgattaggtctcctgtccttcaaattggctctttattcattatcaccgccgtcaatccggccactattgggcgagagaaagatatggaacatacattacgcatccctgaagtgggagtctccaagtttcatgccgaaatatacttcgatcacgatttgcaatcgtacgtgctggtggaccaagggtcccagaacggaaccatcgtcaatggtaagcagatcctgcagcctaagacaaaatgtgatccttatgtcttggagcacggagacgaggtcaagatcggagaaactgtgctatcattccacatccacccaggttccgacacatgtgatggctgcgaaccaggtcaggtcagggcccacctgcggctggacaaaaaggatgagtctttcgttgggccaacactgagcaaagaggagaaggagctcgagagacgaaaggaactcaagaaaatcagggtgaagtacggcctccagaacaccgagtacgaggatgagaaaactcttaagaacccgaaatataaagacagagcaggcaagcgccgggaacaggttggctccgaagggacttttcagcgagatgacgctcccgcttcagtgcacagcgagatcaccgatagtaataaaggtaggaagatgctagaaaagatgggttggaaaaagggggagggcctgggaaaggacggaggcgggatgaagacccctattcagctccagctacggcgcactcacgccggtctcgggacggggaagcctagtagcttcgaagacgtccacctattacagaataagaacaaaaaaaactgggataaagctagggaacgcttcacagaaaatttcccagaaaccaagccacagaaagacgacccaggtaccatgccttgggtgaagggaaccttggaatag

SEQ ID NO: 108169 - DNA, 531 bp, synthetic construct
  misc_feature 1..531: note = Description of Artificial Sequence: Synthetic coding sequence
  source 1..531: mol_type = other DNA
atggctagcgaggctccctctcctccacgttctccacctccaccgacaagccctgagccagaattagcacaactgcgccgaaaagtggaaaaactcgaaagggagctgagatcatgtaagcggcaggtaagagaaattgagaagctactccaccacaccgagcgcctctaccagaacgcagaaagtaataatcaggagctgcggactcaggttgaagagctcagcaagattcttcaacgcggcaggaatgaagacaacaaaaagagtgacgtcgaagttcagaccgagaaccatgctccctggtctatctccgattacttttaccaaacatactataatgatgtgtccctccccaataaagtgaccgagctttctgatcaacaagaccaggctattgaaacttcaattcttaattccaaagatcacctgcaagtagagaatgacgcttatcccggaacagacaggacggagaacgtcaagtatagacaagtggatcattttgctagtaacagccaggtgataaaatgttag

SEQ ID NO: 108170 - DNA, 2028 bp, synthetic construct
  misc_feature 1..2028: note = Description of Artificial Sequence: Synthetic coding sequence
  source 1..2028: mol_type = other DNA
atgccccgggctcaaccttcttccgcttcctaccagccagttccagctgacccatttgctatcgtgtctagagcacagcagatggtggagatactcagtgacgagaaccgaaatctgaggcaggagctggagggctgttacgagaaagtggcccgactacagaaggtcgaaacagagatccaacgggtatccgaagcctatgaaaatctggtgaagtcctctagtaaaagggaggctcttgaaaaggcaatgaggaacaaactagaaggcgagattcggagaatgcacgacttcaaccgagatttgcgggaacgcctggagactgccaataagcagctggcagagaaggaatatgagggctctgaggataccagaaagaccatttcacaactgttcgccaaaaacaaggagagccagcgtgaaaaggaaaagctagaagccgagttggctaccgctcgctcgaccaatgaagaccagcgtcgtcacatcgagatccgtgatcaggcgcttagcaacgcgcaagccaaggtggtgaaactggaggaagaactgaagaagaagcaggtgtatgtggataaggtggagaagatgcaacaggcactagtgcagctgcaggcggcctgcgagaagcgcgagcagttagagcaccgattgagaactcggctggaacgcgaactggaatccctgcggatccagcagcgacagggcaattgccaacctacgaacgtgtcagagtacaatgccgctgcactgatggagttgctgcgcgaaaaggaagagagaatcctagcgctggaggcggatatgaccaagtgggagcagaagtatttagaagaaaacgttatgcgacattttgcgctcgatgcggcggcaacagtcgctgcacaacgcgatactaccgttataagccatagtccaaatactagttacgatacagccctggaggctagaatccagaaggaggaggaagaaatcctgatggctaacaaaaggtgcctggatatggagggtcgcattaagaccctccacgcacagatcattgagaaagatgcaatgattaaggtacttcagcagcgaagtcggaaagagccctcaaagacagagcagctgtcttgcatgcggcccgctaagagcctaatgagtatttctaacgccggaagcggactcctttcccactcttctaccttaaccggatctccgattatggaagagaaacgggatgacaagagctggaagggtagtctaggaattcttctgggtggagactatcgcgccgaatacgtgccctcaaccccgtcacccgtcccaccatctacccctctgctgagcgctcattccaaaaccggctctcgcgattgttctacccaaacggagagggggaccgaaagcaacaagactgcggcagtcgctcccatttccgtgcccgccccagtggcagcagccgctactgctgcggcgatcacagctactgccgccacaataaccactaccatggtggcagccgccccagtagccgtggccgcagccgccgctcccgccgccgctgccgcaccctctcccgcaaccgccgccgccactgccgccgccgtgagccccgctgcagctggccagatccctgcagcagccagtgtcgccagtgctgcagctgttgccccgagtgcagccgcagccgcagctgtgcaagtggcaccggcagcacccgcccctgtaccagcgcccgcccttgtgcccgtaccagctccggccgcagcccaggcatccgcaccagcacaaacccaagcaccaacttcagcccccgcggtggcaccaaccccagcgccaaccccgacccccgccgtggctcaggccgaggtacctgcctccccagctacggggccagggcctcaccggctgtctatcccttcactgacttgcaatcctgataaaactgatgggccagttttccattcgaataccctggaacggaaaacacccattcagatacttggccaggagcctgatgcggaaatggtggaatacctcatttag

SEQ ID NO: 108171 - DNA, 1794 bp, synthetic construct
  misc_feature 1..1794: note = Description of Artificial Sequence: Synthetic coding sequence
  source 1..1794: mol_type = other DNA
atggagcacagaggtccgccgcctgagtatccttttaaaggcatgcctccccagagcgtggtgtgcaagccccaggagcctggacacttctactctgaacaccgactaaaccagcctgggagaaccgagggacagttgatgcgctatcaacacccccctgaatacggcgccgcgcgcccagcccaagatatatccctaccgcttagcgcaagaaactctcagccccattccccaaccagcagcttgacatctggaggtagtctcccccttctacagtcacctccttccactagactgagcccagctcgccaccccttggttcctaaccagggggaccactctgctcacttgcctcgcccacagcagcactttctccctaaccaagcccatcagggggatcactaccgcctctcccagccagggctgtcccagcagcagcaacagcagcagcagcagcatcaccaccaccaccaccatcagcagcaacagcagcaacaaccacagcaacagcccggcgaagcatatagtgcgatgccgcgcgcccagccaagctccgccagttatcagcccgtgccggcagatcctttcgcgatcgttagcagggcgcaacaaatggtggaaattttgagcgacgaaaaccggaacctccgccaggagcttgaaggttgctacgagaaggtggcccggctccaaaaggtagagaccgagatccaacgtgtgtctgaggcctacgaaaatctggtaaagagcagtagcaagcgggaggcactcgagaaagcaatgcggaacaaactggaaggggaaatccgtcgcatgcatgatttcaacagggacttgcgtgagagacttgagacagctaacaaacaactggccgaaaaggaatatgagggcagcgaagatacaagaaaaacgatctctcagctgtttgccaagaacaaagagtctcaacgcgaaaaagaaaaattggaagcggaattagccactgccagaagtacaaatgaggatcagcggagacacatcgaaattcgagatcaggccttaagtaacgcgcaggcaaaggtggtgaagttagaggaggaactgaagaaaaagcaagtgtatgtggacaaagtcgagaagatgcaacaggcgctggttcagctgcaggcagcatgtgaaaagagggagcagctggagcatcggctgagaactcgcttggaaagggaactcgagagtctgcgcattcagcagaggcaaggaaactgtcagcccaccaatgtgtcagagtacaacgccgcggctcttatggaactactgagggaaaaagaggaaaggatcctggccctcgaggccgacatgaccaagtgggaacagaagtatctagaagagaatgtcatgcgtcattttgccctggacgctgctgccaccgttgctgcccaacgcgacactacagtcatctcccattctcccaacacctcctatgacacagccctggaggctcgaattcagaaggaagaggaagagatcttgatggctaacaaacgctgcttggacatggagggacgcatcaagaccttgcacgcgcagattatcgagaaggatgctatgattaaggtcctgcaacagcgaagccgaaaagagccctcaaaaacagagcagctctcctgtatgagaccggccaagtctctgatgtctatttcaaacgctgggtcaggcctgctgtcccattcctccactctgaccggctcccctatcatggaagagaagcgggacgacaagagttggaaggggtccctagggaatgactctaaatag

SEQ ID NO: 108172 - DNA, 3255 bp, synthetic construct
  misc_feature 1..3255: note = Description of Artificial Sequence: Synthetic coding sequence
  source 1..3255: mol_type = other DNA
atgcgcaacagcgaggaacagccttctggaggaactactgtgctgcaacggctgctgcaggaacagctcagatacggaaatccttcagaaaaccgttctctgctggcaattcaccagcaggctaccgggaacggccccccctttccatcaggctcgggcaaccctggcccacaaagtgacgtgctaagcccacaggaccatcatcagcagttggtggctcacgctgcgcgacaagagcctcaaggtcaggagatccagagcgaaaatctgatcatggaaaagcagctgagtcctaggatgcagaataacgaggagctgcctacctacgaggaggccaaggtgcagtcccaatacttccgagggcagcagcacgcctccgttggggcggcgttctatgtgaccggcgtcactaaccagaagatgaggacagagggtagaccttcagtgcagcgcctgaaccccggtaagatgcaccaggacgagggcttacgagacctcaaacagggtcacgtccggtcactgagcgagaggttaatgcagatgtctcttgcaacaagcggcgtgaaggcacatccaccagttacatcagcaccactgagtcctccacagcctaacgacctgtataagaacccaactagctctagtgagttctacaaggcccagggacctctgccaaaccaacacagtttaaagggaatggaacacaggggccctcctccggaatacccgttcaaagggatgcctccccagtccgtggtctgtaaaccccaagagccagggcacttctattccgagcatcgactgaatcagcctgggcgaacggagggtcagcttatgcgttatcaacatcctcctgagtacggcgctgctagacccgcgcaggacatatcccttcctctctccgctcgcaacagtcagccccactcacccacctccagtctcacatccggaggctccttgcccctgctccaatctcctccttctacacggctttcccccgctcgacatcctttggtccctaaccaaggcgatcactcagcccacttgcccaggccccagcaacactttttgccgaaccaggcgcatcagggagaccattatcgtttgtctcagcccggcttaagccaacagcagcagcagcaacagcagcagcaccaccaccaccaccaccatcagcaacagcaacagcaacagccccagcagcaaccgggcgaagcctatagcgcaatgccccgcgcacagccttctagcgcctcatatcagcccgtccctgccgatccattcgctattgtttcacgggcccagcagatggtggaaatcctcagtgatgaaaatcgtaatttgcgacaagagctggaaggatgctacgaaaaagtggcacggctgcagaaagtggagaccgaaatccaacgcgtctccgaagcgtacgaaaacctggttaagagtagctctaagcgggaggcccttgagaaagctatgaggaataaactggaaggagaaatcaggcgcatgcacgacttcaacagggatctccgggagcgtctggaaaccgcaaataagcagctggccgagaaggagtacgaaggctcagaggatacccgcaagaccatttcacagttattcgctaaaaataaagaatcccagagggaaaaggagaaattggaggctgagctggcaacagccaggagtaccaatgaggatcaaagaaggcatattgaaatccgagaccaggcattatccaacgcgcaggccaaggtagtcaagttagaggaggaactgaagaagaagcaggtttacgtagataaggtagagaagatgcagcaggctttggtgcagttacaggcagcctgtgagaagcgagagcaactggagcatcgcctgaggactaggctggagcgcgagttagagagtctacggattcagcaacgacagggcaattgccagcccacaaacgtctctgaatataatgccgcagcattaatggagcttcttcgcgaaaaggaggagcgcatcctggctttggaggccgatatgactaaatgggagcaaaaatacctggaagaaaacgtgatgcggcactttgctctcgatgcggctgcgacagtggctgcccagcgggatacgaccgtcatctcccactcacccaacacctcctacgatacagcacttgaggcccgaattcaaaaagaagaagaagaaatcctgatggccaacaagcgttgcctggacatggaaggaaggataaagacactacacgcccagataattgaaaaagacgcaatgatcaaagtactgcagcagaggagcaggaaggagcctagcaagacggaacagcttagttgtatgaggcccgcgaagtctctgatgagtatctctaacgccgggagtggacttttgtcccacagctctaccctgacaggcagtccgatcatggaggagaagcgcgacgacaaatcctggaagggttcactgggcatactgctcgggggggactatagagcagagtatgttccctcaacaccgagtcccgtgcccccctccacacccctcctgagcgcgcactcaaaaacaggatcacgggattgttccactcaaactgaacgcgggacagagtcaaacaaaacagccgcagtggcacctattagtgtcccagcacccgtcgctgccgcggctactgccgcagcgattacggcaacggcagctaccatcaccacaactatggtcgctgcagcccctgtcgcagtggcagccgctgccgctcccgctgccgctgctgccccgtctcccgcgacggcagcagctactgccgccgctgtgagccccgcagccgcgggacagatacccgctgccgctagcgtggcttctgctgcagccgtcgccccatctgctgccgccgccgccgccgtacaggtggcacctgctgctccagcaccagtgccagcccccgcattggttccagtgcccgcccccgcagcggcccaggcctccgcgcctgctcagactcaggctcctacgagcgcacctgcagtggcacctacaccagctccaacaccaactcccgcagtggcacaagccgaggttcccgcctctcctgcaactggacccggtcctcatcggctgagtattccctcgctgacttgtaacccagacaagacggatgggcccgtgttccatagtaacactctcgagagaaaaactcccatccagatcctagggcaggagcctgatgcagaaatggtcgagtacttgatctag

SEQ ID NO: 108173 - DNA, 2559 bp, synthetic construct
  misc_feature 1..2559: note = Description of Artificial Sequence: Synthetic coding sequence
  source 1..2559: mol_type = other DNA
atggaacatcggggacctccccccgaatacccattcaagggcatgcctcctcaaagcgtagtgtgcaaaccacaggagcctggacatttctactcagaacaccggcttaatcagcccgggcgcacagagggccagctcatgcggtatcagcaccctccagagtatggcgctgccaggccggcacaagacattagcctgccactcagcgccaggaattcccagccacactctcccacctctagtcttacttccggtgggtctctacccttgttacagtcgcctccaagcacacgcctgtctcccgcccgccatcccctggttcctaatcagggcgaccactccgcacatctgccccgacctcagcaacacttcttaccaaaccaagcccatcagggggaccactacagattgtcccaaccagggttgagccagcagcaacagcaacagcaacagcagcatcaccatcatcatcaccatcagcaacagcagcagcagcagccacagcagcagcccggcgaggcctattccgcgatgccccgtgcacagcctagtagcgccagttatcaaccagtgcccgccgacccgttcgcaatagtgtcccgggcacagcagatggtagaaattttgagcgatgagaatagaaatctgcgccaggaattggagggctgctatgaaaaggttgcacgcctgcagaaggttgaaacagagatccagagagtgagcgaagcctatgagaatctcgtgaagtcgtcctctaagcgtgaagctttggagaaggcgatgcggaacaaactggaaggggaaatccggagaatgcacgattttaaccgcgatttacgggaacgcctggagacagcaaataagcaactggctgagaaggagtatgaaggcagcgaagatacccggaagacaatctctcaattgtttgcaaaaaacaaggagtctcaaagagagaaagaaaaactggaggcagaactcgccacggcccggagtactaatgaagaccaaaggcggcacatagaaattagagaccaggctctgtcaaacgcccaggccaaagtggtcaagctggaagaagaactgaagaagaaacaggtctatgtggataaggttgagaagatgcagcaggccctggttcagctgcaggccgcatgcgagaagcgcgagcagctagaacataggctgaggactcgccttgaacgcgagctggagagcctgcgaattcagcagcgtcagggaaactgtcagcctaccaacgttagtgaatacaatgctgccgcgctcatggagttgttgagagaaaaggaagaacgaatattggcactggaggcagacatgaccaaatgggagcagaagtaccttgaagagaatgtgatgcgacatttcgctctcgacgctgcggccacagtggctgcacagcgagataccaccgtgataagccacagcccaaacacatcatatgatactgccttagaggcccgaatacagaaggaggaggaggaaattctgatggcgaacaagaggtgcctcgatatggaaggacgaattaaaactctacatgcccaaattatagaaaaggacgcaatgataaaggtgctgcagcagcgatcccggaaagagccgagcaagacagaacagctttcctgcatgaggcccgccaaaagcctgatgagcatctcaaacgcagggtccggcctactgtcccactcgtctactctgacaggctcaccaatcatggaagaaaaacgggacgacaagtcctggaaggggagtctgggtatactgcttggcggagactacagagctgagtatgtgccctcgacaccaagtcccgttcctccgagcacacccctgctgagtgcccattctaaaaccggttcacgcgactgttccacccaaactgagcgtggtactgagagtaataaaactgctgcggtggccccaatttccgtgcctgcaccagtggctgccgcagccaccgccgcggccatcacagctacggctgccactatcacaaccacgatggtggccgcggccccagtcgcggtcgctgccgccgctgcacccgccgccgcagctgctccaagtcctgccaccgctgcagctaccgccgcggcagtctcgcctgctgccgctggccagattcctgctgcagccagcgtagcaagcgccgctgccgtggccccatcggccgccgctgctgctgcggtccaggttgctccagcagctccagcccctgtgcccgctcccgctctggtcccggtgccagccccggccgcggctcaggcctccgcccctgctcagacccaggcgcccacatctgcgcctgctgttgcgcctacaccagctcctacaccaacaccagctgttgcccaggccgaggtcccagcttcacccgccacaggacccggcccccaccgactcagtattcctagccttacctgcaaccctgacaaaacggacggccccgttttccatagcaataccttagagcggaagactccaattcagattctcggccaagagccagatgcagagatggtggaatatctgatttag

SEQ ID NO: 108174 - DNA, 549 bp, synthetic construct
  misc_feature 1..549: note = Description of Artificial Sequence: Synthetic coding sequence
  source 1..549: mol_type = other DNA
atgataaaggtcctgcagcagcggagtagaaaggaaccatccaagactgaacagttgtcctgcatgagaccagctaagagtctgatgagcatctcaaacgctgggtctgggttactgagtcattcgtctacactgaccggatctccgatcatggaagagaaacgagatgacaaatcttggaagggtagtctaggaattctgcttggcggagactatagggccgaatacgtgccttcaaccccgagccccgtacctccatctactccgcttctgagcgctcatagcaaaacaggtagcagggactgttccacccagactgagcggggtaccgaatctaacaaaacagccgctgtggcccccatctcagtgcccgctccagtcgccgcagcagctaccgcagccgccatcactgctactgcagcaaccataaccactaccatggccgctgccgccgcgccaagccctgcaacggcagctgcaaccgccgctgccgtgtcccccgctgccgccgggcaaatcccagcggccgcctctgtggcttcagcctag

SEQ ID NO: 108175 - DNA, 3255 bp, synthetic construct
  misc_feature 1..3255: note = Description of Artificial Sequence: Synthetic coding sequence
  source 1..3255: mol_type = other DNA
atgagaaattctgaagagcagccgtcaggagggaccacggtgttgcagagactattgcaggagcagttgagatacgggaacccctccgagaatagaagccttctggcgatccatcagcaggccacaggaaacggcccgccgtttccctcaggctcaggtaacccggggcctcagagcgatgtgctctcccctcaggatcaccatcagcagcttgtggcacatgcagcacggcaagagccacaagggcaggaaattcagagcgaaaatctgatcatggagaagcagctgtcacccagaatgcagaacaacgaggaactgccaacgtatgaagaagccaaggtacaatctcagtatttcaggggacagcaacacgcctctgtcggtgcagcattctacgtcacaggcgtaactaaccagaagatgcggaccgagggcagaccatcagtgcagcgtcttaaccccggtaagatgcaccaggacgaaggcctgcgggatttaaaacaaggccatgtcagaagcttgagcgagagactcatgcagatgagcctggcaacaagcggtgtcaaagctcacccccccgtcacgtctgcgccattatctccaccgcaacctaacgacctttataagaacccaaccagttcatctgagttctataaggcccaggggcccctccctaaccagcactcactgaaagggatggaacaccgcggcccccctccagagtaccctttcaagggcatgccaccccagtccgttgtctgcaagccacaagagcctggtcacttctattcagagcaccgcttgaaccagccaggacgtaccgaaggccagctcatgaggtatcaacacccccctgaatacggagctgctagacccgctcaggatattagccttccactatccgccaggaactctcaaccacattcccccacctcatccctgacatccggtggttcattgcccttactgcaaagccccccctctacccgcctttcccctgcccgccacccattagtaccgaaccagggcgaccactccgcgcatttgccgagaccacagcagcacttcctgcctaaccaggctcaccaaggcgatcactatcgtctgagtcagcccggcctctctcagcagcaacagcagcaacagcagcagcatcatcaccatcatcaccaccaacaacagcagcaacaacagcctcagcagcagcccggggaggcctattcagcaatgccaagggcgcagcccagttctgcctcatatcagccggtgccagccgatccctttgcgatcgtatcacgcgcacaacaaatggtcgagatcctgtctgatgagaatcgaaatctacgacaggaactggaaggctgttatgagaaggtcgccaggctgcaaaaggtggaaacggagatacagcgtgtaagtgaggcctacgagaatctggtgaaatcctcatcaaagcgagaagccttggagaaggcgatgcgtaataagctcgagggggagatcagacgcatgcacgacttcaatagagacttacgagagaggcttgaaactgctaacaagcaactcgccgagaaagagtatgaggggtccgaagatactcgcaaaactatcagccagctgttcgccaagaacaaggaatcccagagagaaaaggaaaagctcgaggccgagctagcaacggcaaggtccaccaatgaggaccagcggagacacatcgagatccgggaccaagctctgtccaacgcacaagcaaaagtggtcaagctggaggaggagctcaaaaagaaacaggtgtacgttgacaaggtagagaaaatgcaacaggcgcttgtgcagctccaggctgcatgcgaaaaaagagaacaacttgagcaccgactccgtacacggctggagagagaattagaatccctcaggattcaacagcgccaggggaattgccagcctaccaacgtctccgagtacaatgctgccgctctgatggaattgctgagagagaaagaggagcggattttagccctcgaagccgacatgaccaagtgggagcagaagtatcttgaagaaaacgtcatgcgtcactttgcactcgatgccgcggcaactgttgctgcccagcgcgatacaactgtaatttctcactctcctaacacaagttatgacaccgcactcgaggcacggatccagaaggaggaagaggaaatactcatggcaaataaacgatgcctggatatggaaggccggatcaaaaccctgcatgcccagatcatcgaaaaagacgccatgatcaaggtactgcagcagaggtcgcgtaaagaacccagcaagactgaacagctgtcttgtatgaggcccgctaagtccctgatgtcaatctctaacgcagggtctggcctgttatctcattcgtcaacactgaccggaagccctatcatggaagaaaaacgtgatgataaatcgtggaagggttccctgggtatccttctgggaggagattatagagccgagtatgtgccttccactcccagtccagttccacctagtacaccgctgttgagcgctcattcaaagacaggttcgcgcgactgctcaacccagaccgagcgaggaacggaatccaacaaaaccgcagcagtagcccctatcagcgtccccgcccctgtcgcagctgccgcgacggcagctgcaattaccgctaccgccgcgactatcacgacgaccatggtggcggcggccccggtggccgtagccgccgccgctgcacccgctgcagctgcagccccctcacccgctaccgcagcagcgaccgctgcagcggtgtccccagcagctgcaggccagatacctgctgccgcttctgttgccagcgccgcggcagtggctccatccgccgctgccgcagccgccgtacaggttgcccctgcagccccagctccagtacctgcccccgcgctagtgcccgtccctgctccagccgctgcacaggcctctgcgcctgcccagacccaggcccctacatcagcgccggccgtcgcccccacccctgcccctacgcctactccggccgttgcccaggcagaggtgcctgcttcccctgcgaccgggccagggcctcatagactctccatcccaagcttgacctgcaatcccgataaaaccgatggacccgtctttcactccaatacactcgaacggaaaacaccaattcagattctgggccaggagccggacgccgagatggtggagtacctgatctag

SEQ ID NO: 108176 - DNA, 1512 bp, synthetic construct
  misc_feature 1..1512: note = Description of Artificial Sequence: Synthetic coding sequence
  source 1..1512: mol_type = other DNA
atgctttctcagttagccatgctccagggaagcctgctgctggtggtggccacaatgagcgtcgctcagcagaccaggcaggaagctgaccgggggtgcgagacattggtagttcagcacggacactgctcgtacacatttttgcttccgaagtccgagccatgtcctcctggtcccgaagtcagcagggactctaacaccctccagcgtgagtcgctcgcaaatccgctgcacctcgggaaactgcctacgcagcaggtcaaacagctcgaacaggcccttcagaataatacacagtggcttaagaagctggaacgcgctatcaagactattcttcgttcaaaattggaacaggttcagcaacagatggcccagaaccagaccgcgcccatgctcgaactggggacgtccctcctcaatcagacaacagcgcagatccgcaagctcacagacatggaagctcagctactgaaccagacttcccggatggatgcacaaatgccagagacttttctgtcaactaataaacttgagaaccagctcctgctacagcgccaaaaattacagcagctgcagggtcagaactctgctctcgaaaagaggctccaggccctggagaccaaacaacaggaggagttggcctccatcctatcgaagaaagccaagctgctgaacaccctgtcccgtcagtccgccgcactaacaaatatcgaacgcggcctgcggggcgtaaggcacaacagcagcctgctgcaagaccagcaacatagtctgcgtcagcttctcgttttactgcgacacttggtgcaggagagggcaaacgcttctgcccctgccttcatcatggctggagaacaagttttccaggactgtgccgagatacagcgatccggcgcctcagcgtccggtgtctataccattcaagtgtcaaatgcaaccaagcctcggaaggtattctgcgacttgcagagctctgggggtaggtggactctgatacagcggcgtgaaaacggtactgtgaacttccagagaaactggaaggattataagcaaggtttcggagatcccgccggcgagcactggctcgggaatgaagtcgttcaccaattaacccgcagagccgcttactctttgagggtagaactccaggattgggagggacatgaggcatacgcacaatacgaacactttcacctaggatcagaaaatcagctgtatcgcttgagcgtcgtcgggtactcgggatcggccggaaggcagtcttcactggtgttgcaaaacacctcctttagtactttggacagcgataatgaccactgtctgtgtaaatgcgcccaagtgatgtctggtggatggtggttcgacgcctgtgggctgagtaatctaaatggtgtctactatcatgctcctgacaataagtacaaaatggatgggatcaggtggcactacttcaaagggcccagctattcccttcgcgcttcgagaatgatgattagacccctcgacatttag

SEQ ID NO: 108177 - DNA, 1233 bp, synthetic construct
  misc_feature 1..1233: note = Description of Artificial Sequence: Synthetic coding sequence
  source 1..1233: mol_type = other DNA
atgctctctcagcttgccatgctgcagggctcgctgctccttgtagtggctacgatgtccgttgcccaacagacacggcaagaagccgacaggggatgcgagacactggtagtccagcatgggcattgttcatacacctttctgctgcccaaatccgagccctgtccacctggaccagaggtgtcccgcgactccaatacgctgcagagagaatctttagcaaaccccctgcacttgggaaagctgccgactcaacaagttaagcagctggaacaggctctacagaataacacacagtggctaaagaagctcgagcgcgcaattaagactatcttgagatcgaaactcgagcaagtccaacaacagatggctcaaaaccagactgcacccatgcttgagctcggaacttcccttcttaaccagacgactgctcaaataagaaagcttacagatatggaggctcaactgttgaaccagacctctcgtatggacgcccagatgccggaaacctttctatcgacaaataagctcgagaatcagctgctgctccagagacagaaactgcagcagctgcaggggcagaattctgcactcgaaaaacggctgcaagcactcgagaccaagcagcaggaggagttggctagcattttgtccaagaaggccaagttgctgaataccctgtctaggcaatccgcagcgcttacgaacatagagcgtggattgaggggcgttaggcacaactctagcctactgcaagaccaacaacactccctgcgtcagctgctggtgctgcttcggcatttagtgcaggagagggccaacgcctctgcgccagcctttattatggccggtgagcaagttttccaggattgtgcggagatccagcggtcaggcgctagcgcatccggggtgtacaccattcaggtctccaatgccacaaaaccccgcaaggtgttctgtgacctgcagagctctggagggaggtggacactgattcagaggagggagaacggcacagttaactttcaacgaaattggaaagattataagcagggatttggcgatccagctggcgaacattggctggggaatgaagtggtgcaccagctgactcgcagggcggcttatagtttacgcgttgaattgcaggactgggagggccacgaggcctacgcccagtatgagcacttccacctcgggtccgagaatcagctgtacagagtcgtggtgtag

SEQ ID NO: 108178 - DNA, 1383 bp, synthetic construct
  misc_feature 1..1383: note = Description of Artificial Sequence: Synthetic coding sequence
  source 1..1383: mol_type = other DNA
atgttcacaataaagctcttgctgtttatagtgcctctggttatttccagcaggatcgatcaggacaatagtagctttgacagtctctcacccgaacctaagtcacgttttgccatgctagacgatgtaaaaattttagcaaatggcctgctgcaactgggtcatgggcttaaagacttcgtgcacaagacaaagggccagatcaatgacatattccagaagctgaatatctttgaccagagtttctatgatctgtccctgcagacttccgagattaaggaagaggagaaggagctccggcggaccacctataaactccaggtgaagaacgaggaagtgaagaatatgagtcttgagctaaatagcaaactcgagtctctgctggaggaaaagatactgttacagcagaaagtgaagtatttggaagagcagttgaccaacctgattcagaaccagcccgagacccctgagcacccagaggtaacttcgctaaaaacctttgtagaaaaacaggacaattccattaaagacctcctccagaccgtggaagaccagtacaaacaattaaaccagcagcattctcagataaaagagattgaaaatcagctgcggcgtacatcaatccaggaacccacagaaatttctcttagttctaaacccagagcacctaggacaaccccatttctccaacttaacgagatccggaacgtcaagcacgatggcatacctgccgagtgtaccacaatttataacagaggggagcacacatcaggcatgtatgctattcgacctagtaattcacaggtttttcatgtgtattgcgacgtcatctccggtagtccttggacactgatccagcacagaatcgacggctcgcagaactttaatgagacatgggagaattacaaatacggcttcggccggttggacggagaattctggcttggtctcgagaagatatatagtatagtcaaacagagtaattacgtgctgcgaatcgagctcgaggactggaaagataacaagcactacatagagtatagtttctacttggggaatcacgagacgaattatactctgcatctggtcgcaataacagggaacgtgccaaacgctatccctgagaacaaagacttggttttctccacttgggatcataaagctaaagggcacttcaattgccccgagggttacagtggcggctggtggtggcacgacgagtgcggtgagaacaacctcaacgggaaatacaacaagccgcgcgcgaagtcgaagcctgagcggaggaggggcctatcatggaaatcacagaacggtcgactatactccattaagtctactaagatgttgattcacccaacagattctgaaagcttcgagtag

SEQ ID NO: 108179 - DNA, 1167 bp, synthetic construct
  misc_feature 1..1167: note = Description of Artificial Sequence: Synthetic coding sequence
  source 1..1167: mol_type = other DNA
atgatgtcaccgtcacaggccagtcttctgttcctgaatgtgtgcatattcatctgcggggaagctgttcagggtaactgtgtgcaccattctactgactcttctgtggtcaatattgtggaggacgggtccaatgcgaaggacgagtcaaaatcaaatgacaccgtttgtaaggaagactgcgaagaatcatgcgacgttaagactaagatcactcgagaagagaaacatttcatgtgcagaaatctacagaattctatcgtgagctacacgaggtctaccaagaaactgctgaggaacatgatggatgaacagcaggcttccctggactacctgtcaaatcaagtcaatgagttaatgaaccgagtgttgctgctcacaactgaggtgttcagaaagcagctggaccctttccctcaccgtcccgtccagtcccacggcttggactgtaccgacattaaagatacaatcggttcggtcaccaagacaccctcaggactttacatcatacatcccgaaggaagtagctaccccttcgaggtcatgtgcgacatggactacagagggggcggacgtaccgtaatacagaagaggatcgatggtattattgatttccaaagactgtggtgcgactacctggacggattcggggacttgcttggtgagttttggctgggtcttaaaaagattttctacattgtaaaccagaaaaacactagctttatgctttatgtcgctctggagtctgaggacgatacgctagcttatgctagttatgacaatttctggctagaagatgaaacccggttctttaagatgcatcttggccgctactcaggcaacgccggggacgccttccgtggcctgaaaaaggaagacaaccagaacgctatgccttttagcacctccgatgtggacaacgacggctgccgcccagcctgcctggtcaatggccaaagcgtcaaatcttgcagccacttgcacaataaaacaggatggtggtttaacgaatgcggcttagctaatctaaacggaattcaccacttctcaggaaagctactcgctacagggatccaatgggggacttggaccaagaataattcccccgttaaaataaaaagtgtgagcatgaaaatacgtcggatgtataacccttactttaaatag

SEQ ID NO: 108180 - DNA, 1413 bp, synthetic construct
  misc_feature 1..1413: note = Description of Artificial Sequence: Synthetic coding sequence
  source 1..1413: mol_type = other DNA
atggggaaaccctggctacgcgctttgcagcttttactgctgctgggggcgtcttgggcacgggccggggcccctagatgtacgtacactttcgttctgccgccccagaagttcacaggagcagtttgttggagtggacccgcatcaacccgcgcaacacccgaggccgcgaatgcctccgagctggctgctcttaggatgcgggtggggcgccatgaggagcttcttagagagctgcagcgacttgctgcagctgacggcgcagttgccggcgaagtaagggccttaaggaaggagtcccggggtctttcagccaggctgggacagctacgcgcccaattgcagcatgaggctggaccaggagccgggcctggagctgatcttggtgctgagcccgctgccgcactggccctgctgggagagcgagtcttaaacgcctctgcagaagcacaaagggctgccgccaggtttcatcagcttgatgtgaagtttcgcgaactcgcgcagctggtgacacagcagagtagtttgatagcgaggctggagaggttgtgcccgggaggtgctggaggacagcaacaggtactgcctccaccacctcttgtaccagtcgtccccgtccgactcgttggttctacatcagatacctcgcgaatgcttgacccagcgccagaaccacagcgtgatcagacacaacgacagcaggagcctatggcatcaccaatgcccgcaggtcatcccgccgttcctacgaagccggtgggcccctggcaggattgtgctgaggcccgccaggccggccacgaacagtccggcgtctatgagttaagagtaggcagacacgtagtgtctgtgtggtgcgaacagcagcttgaagggggaggatggacggtgattcagagaagacaggatggctcagtgaatttttttacaacatggcagcactacaaagcagggttcggtcgccccgatggagaatactggttaggcttggaacccgtgtaccaactgacgtcacgcggcgaccacgagctgttggttctccttgaagactggggcgggcgcggtgctcgtgcccattatgatggtttttcactcgaaccagaatcagatcactaccggttaagactcgggcagtatcacggagacgcaggcgactctctctcctggcacaacgacaaacctttcagtaccgtggacagagaccgcgattcttatagtggaaactgtgcgctctatcagcggggaggctggtggtaccatgcctgtgcccactccaatttaaacggagtgtggcaccacggtggccattaccgcagcaggtaccaggacggtgtctactgggctgagtttcgtggcggagcttacagccttcggaaggccgcgatgctgatccggccactgaagctatag

SEQ ID NO: 108181 - DNA, 2199 bp, synthetic construct
  misc_feature 1..2199: note = Description of Artificial Sequence: Synthetic coding sequence
  source 1..2199: mol_type = other DNA
atggggcaggggtgggcaacagctgggcttccttccttgctgttcctgttgctttgctacggccatcccctgctggttccttcccaagaagcctcacagcaggtgaccgtcacacacggaacctcctcacaggcaacgacatcttctcagacaactacccaccaagccaccgcacaccaaacctctgctcagtcccctaatctggtcaccgacgaggctgaggccagcaagtttgttgaggaatacgaccggacctcacaggtggtgtggaatgagtacgcagaagccaattggaattataacacaaacattactaccgaaacatccaaaatcctgttgcagaaaaatatgcagattgccaaccacaccctgaagtacgggactcaggctcgcaaattcgacgttaatcagctgcagaatacgacaatcaagagaataataaaaaaagtccaggatttggaacgagcggctctcccagcccaagagcttgaggaatataacaagattttgctggatatggaaactacctactctgtagccacagtgtgccaccccaatggatcatgcctgcagctggaacctgatctcactaatgttatggctacgtctcgcaagtatgaggacctattatgggcatgggagggctggagagataaggctggaagagctatcttgcagttttaccctaagtatgttgagctgattaatcaggcagcacggctgaacggttacgtcgatgctggtgattcctggcgttcgatgtacgaaaccccctctttagaacaggatctggagcggctgttccaggaattacagccattatatctcaatctccacgcgtacgtccggcgtgccctacacaggcattatggcgcccagcacatcaacttagaaggacctatcccggcacacttgctcggaaacatgtgggcccagacgtggtcaaacatttatgatttggtggttcccttcccaagtgcgccctccatggatacgactgaggccatgctgaaacagggctggacacctaggagaatgtttaaagaagcagatgatttcttcactagtttgggactgctacccgtaccccctgagttttggaacaagtctatgctggaaaagccaacagatgggcgggaggtagtgtgccacgccagcgcctgggacttctacaacgggaaagacttccgaataaaacagtgtaccaccgtaaacttggaggacctggttgtggcacaccatgagatgggacatattcagtactttatgcagtacaaagacctgcctgtggcactgcgggagggtgccaatcccgggtttcacgaagccattggcgacgtgttggccctcagtgtgagcaccccaaaacacctccactccttaaacttactcagttcagaaggcggctctgacgaacacgatataaatttcctgatgaagatggctctagacaaaatagctttcataccctttagctacttagtggatcagtggagatggcgggtctttgacggcagtattaccaaggagaattataaccaggaatggtggagcctcagactcaagtaccaaggactttgtcctccagtccctcgtactcagggggacttcgatccaggagctaaatttcatataccttcttccgtcccatatatccgttattttgtgtcctttattatacagttccaattccacgaggccctttgccaagctgccggccatacaggccccttgcacaaatgcgatatataccagtcaaaagaggccgggcagcggcttgctaccgcgatgaagttaggcttctctaggccctggcctgaggcaatgcagctgattacgggtcagcccaacatgagcgccagtgccatgctgagctattttaagccacttctggactggctgaggactgagaatgagcttcacggtgagaagctgggctggccacaatataattggactcctaattccgcgcgcagcgagggcccgctgccagactccggtcgcgtcagttttctgggactggacctcgatgcccagcaagcacgagtcggccagtggcttttgctgtttctcggcatcgcgctccttgttgcgaccctcgggctatcccagcggctcttttccatccgtcaccggtccctgcacagacactcccatggaccccaatttggatctgaagtggagttgcgccacagctag

SEQ ID NO: 108182 - DNA, 3921 bp, synthetic construct
  misc_feature 1..3921: note = Description of Artificial Sequence: Synthetic coding sequence
  source 1..3921: mol_type = other DNA
atgggggcggccagcgggcggcgcggacccgggctcctgctgccactgccgttgcttctgctgctgcctccccaaccagcgctggccctcgacccaggcctccaacctggcaacttctctgcagatgaagctggtgctcagctcttcgctcagtcatacaactcctctgccgaacaagtgttattccagagcgtggccgcttcctgggcccacgatacaaatatcactgcggagaacgccagacggcaggaagaagcagcgctgctgtcccaagagttcgctgaagcatggggccagaaagccaaagagttatatgagccaatctggcagaactttacagacccccaattgcgcagaatcatcggcgccgtccgaacccttggctccgcaaacctgccgctagctaaaagacagcagtacaatgccctgctatcaaacatgtcccggatctactcaacagcaaaggtgtgtttgcccaataaaaccgccacctgctggtctctcgaccctgacttgactaacatccttgcgagctctcggagttatgccatgcttctgtttgcctgggagggatggcacaacgcagctggcattccactgaagccgctgtacgaagacttcaccgcactgtccaatgaggcttataagcaggacgggttcaccgacaccggggcctactggagaagctggtataattcgccaacattcgaagacgacctggaacatctgtaccaacagctggagccactctatttaaatctccacgcgttcgtccgtcgggccttacatcggaggtatggcgacaggtatataaatctgcgggggcccatcccggcgcacttgctcggggacatgtgggcacagagttgggaaaatatttacgacatggtcgtaccattccccgataagccaaacctggacgtgacaagcaccatgcttcaacaaggatggaacgccacacatatgttccgcgtcgcagaggaattctttacctccctagagctgtcacccatgcccccagagttttgggaaggctcgatgctggagaagccagccgatggcagagaggtagtctgccatgcctcagcctgggatttttacaaccggaaggacttccggatcaaacaatgtacgcgcgtgacaatggatcagctgtccaccgtacaccacgaaatgggccacatacagtattacttgcagtataaagacttgccagtgtctttgcgccgcggagcgaatcccgggttccatgaggcaatcggtgatgtcttagccctgtcagtgtcaacaccagagcatctgcataaaattggcctgttggaccgcgtgactaacgacaccgagagcgacattaattacctacttaagatggcccttgaaaagatagccttcttgccttttggatacttggtggaccagtggagatggggagtgttctccgggaggacaccccccagtcgctataacttcgactggtggtacctccgtaccaagtaccagggcatatgccccccagtgacacgcaatgagacccacttcgatgcaggagccaaattccacgttcccaatgtgaccccttatatccgctatttcgtttcttttgtactccagttccagtttcacgaggctttatgcaaggaagcaggatacgaggggcctctgcatcaatgtgatatctaccgatccaccaaggcgggagcaaagctgcgaaaagtgctgcaggcaggctcctccagaccttggcaggaagtcttaaaagacatggtggggctggacgccctggatgcacagccactcctgaagtattttcagcccgtgactcagtggctgcaggagcaaaaccagcagaacggcgaagtgctgggatggcccgaataccagtggcacccgccattgcccgataattacccagaaggcatagatctcgtgaccgacgaagcagaagcatccaaatttgtggaagaatatgatcgcacctcccaggtcgtgtggaacgagtacgccgaggccaattggaattataataccaatataaccacggagaccagtaaaatcctgctacaaaagaatatgcaaatcgctaaccacacgttgaaatacggcacacaggccaggaaattcgatgtgaatcagctgcaaaacaccaccattaaaaggattataaaaaaggtccaagacctggagcgagcagctttaccagcacaagagctggaagaatataacaagatcctgctggacatggagacaacctacagcgtcgcaaccgtgtgtcatcccaatggttcttgtctgcagctggagcctgatttgactaacgtcatggccacttcccggaagtatgaggacctcctctgggcctgggaaggatggagggataaggccggaagggctatcctgcagttctaccccaagtatgttgaactcatcaaccaagctgcaaggctcaacggatatgttgacgcaggtgactcctggcgcagcatgtatgaaacacccagcctggaacaggatctcgagcgactcttccaggagctccagcccttgtacctcaatttgcacgcttatgtgcgcagagccctgcacaggcattatggagcacagcacattaatctggagggtcctattcccgcccatctgcttggaaacatgtgggctcaaacctggtcaaacatctacgacctggtagttccttttccatctgctcctagcatggacaccacggaagctatgcttaagcagggctggacaccaagacgtatgttcaaggaggccgatgactttttcactagcttaggacttctcccagtccctccggagttctggaataaatcaatgctggaaaagccaacagacggacgagaggtcgtttgtcatgcaagtgcctgggatttttataacggcaaagacttccgtatcaaacagtgtacgactgtcaacctcgaagatctggtcgtcgcccaccacgagatgggacacattcagtactttatgcagtacaaggatctgcccgtggctctgcgggaaggagcaaatccaggcttccacgaggctatcggtgacgttctcgccctgtccgtttctaccccgaaacatttgcacagcttgaatctactgtcatcggagggcggaagtgacgagcatgacatcaattttctcatgaagatggcactcgataagatcgctttcatcccttttagctacttggtggaccaatggaggtggcgcgtgtttgatggttctattacgaaggagaactataatcaggaatggtggtcactcagacttaaataccaaggactgtgcccgcccgtcccgaggacccagggagactttgatccgggcgccaagtttcatattccctcaagcgtcccatatattagatattttgtgagcttcattattcaattccagtttcatgaggcgctgtgtcaggccgcaggccacaccggacccctgcataaatgtgacatctaccagagtaaggaagccggacaaagactggctactgcaatgaaactgggcttcagcagaccatggcccgaagctatgcaactgataaccggccagcctaatatgagtgccagcgctatgctctcctactttaagccgctgctcgactggctcagaactgagaacgagctgcacggagagaaactggggtggccccaatataattggacacctaatagcgcacggtccgaagggccccttccagacagcggacgcgtgtccttcctgggccttgaccttgatgcacagcaggcccgcgtcggtcagtggttgttgctttttctgggcatagccctgctcgtggcgactctggggctgtcccagaggcttttctccatcagacacaggtcacttcacaggcattcccatggaccccaattcgggtcagaggtcgaactaaggcacagctag

SEQ ID NO: 108183 - DNA, 2076 bp, synthetic construct
  misc_feature 1..2076: note = Description of Artificial Sequence: Synthetic coding sequence
  source 1..2076: mol_type = other DNA
atgggacagggttgggctacagcaggtctaccttccctgctattcttgctgctttgctacgggcaccccttgctcgtcccaagccaggaagcctctcagcaagtcaccgtcacccatggaactagcagtcaggctacaacgtcctctcagaccaccacccaccaggccaccgctcatcagacatctgcacagagccctaacctcgtgactgatgaggcagaggcaagcaagttcgtggaagagtacgaccgaacatcccaggttgtgtggaacgagtacgccgaggctaactggaactacaacacaaatatcacgaccgaaacgtccaagattcttttgcaaaaaaatatgcagatcgcaaatcatacactaaaatacggtacacaggcgcggaagtttgatgtcaaccaactgcaaaatacaactatcaaaaggattatcaaaaaggtgcaagatttggaaagagcagcgctcccagctcaggaactggaggagtacaacaagatcttgcttgatatggaaaccacgtacagtgtggctactgtgtgtcatcccaatggcagttgtttgcagctcgaacctgacctgacgaacgttatggccacatcccgaaagtatgaggatctgctgtgggcatgggaagggtggagagataaagccggaagggctatacttcagttctacccaaaatatgtcgagctgatcaatcaggccgcacggctcaacggatatgtagatgcgggtgattcttggcgaagtatgtatgaaactccctcgctggaacaagatctcgagaggttgttccaggagctgcagcctctgtatctgaacctgcacgcgtatgtcaggagggccctccaccgccactatggcgcccagcatatcaacctcgaaggacccatccccgcgcacctgctgggcaacatgtgggcacagacctggtccaatatttacgacctggtggtgccattcccttcggcccctagcatggacacaacggaggccatgctaaaacagggctggaccccgagacggatgttcaaagaagctgatgatttcttcactagcctgggattacttccagtgcctcccgaattctggaacaagtctatgctggagaaaccaaccgatggtcgggaggtcgtctgccacgcaagtgcctgggacttttataatgggaaagacttcaggattaagcagtgtaccaccgttaatctggaggatctcgtggttgcccaccatgagatgggacatatccagtactttatgcagtataaagacttacccgtggcactccgagaaggggcaaatccaggctttcacgaggcaatcggagatgtcctggcactaagtgtctccactcctaagcacttgcacagcctgaacctgctgagtagcgaaggggggagcgatgagcacgatatcaactttctgatgaaaatggcgctggacaagattgcctttataccgttcagctacctggtagaccagtggaggtggcgcgttttcgacggttcgataaccaaggagaattataatcaggaatggtggagtctgcggttaaagtatcagggtctgtgtccaccagtgcctcgcacacagggtgacttcgaccctggcgcgaaattccacatccccagttctgtgccttatatacgcactgccatgaaactgggattttccagaccttggcctgaagcgatgcagcttattaccggccagccaaacatgtcagcgtcagcaatgctgagctattttaaacctttgctggattggctgaggaccgagaacgaattgcacggcgagaaattaggatggccccagtacaactggaccccaaacagcgctagaagtgaagggcccctaccagattccggccgcgtctctttcctcgggctggacctggatgctcaacaagcgagagttggacagtggttactgcttttcctgggcatcgcgctgttagtggccactcttggcctgtcacaaaggctgttcagcatacgtcaccggagccttcacagacactcacatggtccccagttcggatccgaagtggagcttaggcacagctag

SEQ ID NO: 108184 - DNA, 1536 bp, synthetic construct
  misc_feature 1..1536: note = Description of Artificial Sequence: Synthetic coding sequence
  source 1..1536: mol_type = other DNA
atgcagattgcaaaccatacactgaaatatggtactcaggctcgcaaatttgatgtaaaccagttacagaacaccacaattaagcggattattaagaaagtgcaggacctggaacgggccgccctgccggcgcaggaactggaagagtataataagattctgctggatatggagaccacttacagtgtggcaacagtttgccaccccaatggtagttgtttgcagctggagccggacctcaccaacgtcatggctacgtcccgtaaatatgaagatctgctgtgggcttgggaaggctggagagataaggcggggagagccattttacagttttacccaaaatacgtggaactgattaatcaggccgctcggctgaacggaaatatgtgggcacagacttggtccaatatttatgatcttgtggttcccttcccttccgctccctcaatggacaccactgaagccatgctgaaacaggggtggacccctagaagaatgtttaaggaagccgatgacttctttacttccttggggctgctcccggtgcctcctgaattttggaacaagagtatgctggaaaagcccactgacggaagagaggtcgtgtgccatgctagcgcctgggacttttacaatgggaaggattttcggatcaagcagtgcaccacagtgaacttagaggatctggtggtggcccaccacgagatgggccacatacagtactttatgcagtacaaggacttaccagtcgcactgagagagggcgcaaatcccgggtttcatgaggctattggggatgtcctggcactctctgtgtccactcccaagcaccttcactccctcaacctcctgtcttccgagggcggctcagatgagcatgatatcaatttccttatgaagatggcgttagacaagatcgcattcattcccttctcctacctggtggaccagtggagatggcgcgtctttgatggcagcatcaccaaggagaactacaaccaggagtggtggtcactacgcctaaaataccaagggctgtgcccaccggtgccacgtacacaaggggacttcgatccaggggcgaagtttcacatccccagttcagtgccatacattaggacagcaatgaagttaggcttcagcaggccttggccggaagccatgcagctgatcacgggtcaaccaaatatgtcggcatccgcaatgctgtcttatttcaagcccctgcttgactggctcaggactgaaaatgaactccatggggagaagctggggtggccccagtataattggactcccaattcagctaggagtgaaggaccgctacccgatagtgggagagttagttttctcgggcttgacctggacgcacaacaggcaagggtggggcagtggctccttcttttcttaggcatcgctctgctcgtcgcaacactaggcctctctcagaggcttttttccattcgccaccgatccctgcaccggcacagccacgggcctcagtttgggtcagaggtggaactgcgccatagctag

SEQ ID NO: 108185 - DNA, 3438 bp, synthetic construct
  misc_feature 1..3438: note = Description of Artificial Sequence: Synthetic coding sequence
  source 1..3438: mol_type = other DNA
atgggggctgcttctggaagaaggggacccgggctgcttcttcccctgccgctgctgctcttgctccccccacagccagctcttgccctcgaccccggcttacagccgggcaacttctccgccgatgaggcaggggctcagctcttcgcccagtcgtataattcctcagctgagcaggtcctatttcaaagcgtagccgctagctgggctcatgatacaaatatcaccgctgagaatgctcgccgacaggaggaggccgccttgctgagtcaagaatttgcagaggcctggggtcagaaggccaaggaactgtatgagccaatttggcagaacttcacagacccccagcttcggcgaattataggagcggtgcggactctgggttcggcaaatttacccctggcgaagcgccagcaatacaacgcccttttgagtaacatgagccggatctactcgaccgccaaggtttgcctccctaataagaccgctacctgctggagcctggaccctgacctgacaaacattctggcaagctctcgatcgtatgcaatgctcttattcgcgtgggaagggtggcacaacgcggcaggcattcctctgaagccattgtatgaggactttaccgccctgagtaatgaagcttacaaacaggacggcttcactgatacaggtgcctattggcgcagttggtacaactcccccacgtttgaggacgacctggagcacttatatcagcagctggagcccctgtatctcaacttgcacgcgttcgtacgccgtgcacttcaccggaggtacggggacagatacatcaatctccggggtcccatacccgcccacctgctgggagatatgtgggctcaaagttgggaaaatatatacgatatggtggtcccatttcctgataagcctaatctggatgtgacctctacgatgttgcaacaaggttggaacgccacacacatgttcagggtggccgaggagttttttacaagcttggaacttagtcctatgcctccagagttctgggaaggaagtatgttggaaaagccagcagacggtagagaagtagtctgtcatgcttctgcatgggacttttataataggaaggatttccgcatcaagcagtgtacgagagttactatggaccaactcagcaccgtccatcatgagatgggacatatacagtattatttacagtacaaagaccttccagtgtctcttcggcgtggagccaatccaggcttccacgaggcaataggcgatgtgttagccctttctgtgtctactcctgagcatttgcataaaatcggactcttggatagagtcactaatgacacagagagcgacatcaactacctgctcaagatggcactcgagaaaatagcttttctaccgttcggatacttagtggaccagtggcgttggggagtgtttagtgggaggacacccccttcccgttacaattttgattggtggtatctgcgcaccaaataccaaggaatttgcccgcctgtgaccaggaacgaaactcactttgatgccggggccaaattccacgtgccaaatgtgacaccatatattaggtatttcgtgtcctttgtgttgcagtttcagtttcacgaagccctgtgtaaggaagccggctacgaaggacctctccaccagtgtgacatctaccggagtactaaggcaggcgctaaactccgaaaagtgcttcaggctggctcttcaaggccatggcaggaagttttgaaagacatggtgggcttagacgcactggatgctcagccactattgaagtattttcagcctgtgacccagtggctgcaggaacagaatcaacaaaacggcgaagtgctgggctggccagagtaccagtggcacccaccactgccagacaattaccccgagggtatcgatcttgttaccgatgaagctgaggcctcaaaatttgtggaagaatatgatagaacgagtcaggtcgtgtggaacgagtacgccgaggcaaattggaactataatactaatataacaaccgagacatctaaaatcttgctgcaaaaaaacatgcagattgccaatcacaccctgaagtatggcacacaggccaggaagttcgatgtgaaccagctccagaacacaactatcaagcggataattaagaaggtgcaagacttagaacgggctgctctgcctgcgcaggagctggaggagtacaataagatcctcttggacatggagacgacatacagtgttgccactgtgtgccatcccaacggatcatgtctccagctggagccggatttgacgaatgtaatggccaccagtaggaaatacgaggacctgttatgggcatgggagggatggcgggacaaagctggccgcgctatcctccagttttaccccaaatacgtggagctgatcaaccaggccgccaggttgaatgggtatgtggatgccggtgactcatggcggtcaatgtacgaaacccctagccttgagcaggatctcgagaggctctttcaggagctacagcctctgtacctgaacctccacgcttacgtacgaagggcactgcataggcactatggcgcacagcatatcaacctcgaaggacctattcccgctcacctgttggggaacatgtgggcgcaaacctggagcaatatatatgatcttgtggttccattcccatcagccccatcgatggacacaaccgaggcaatgctgaagcaaggctggacacctagacgcatgtttaaggaagccgacgattttttcacgagtctgggactccttcccgttccccctgagttctggaacaagagcatgcttgaaaagcctacagacggtagggaggtggtctgccacgcatctgcctgggatttctataatggtaaagattttcgaatcaaacagtgtaccaccgtgaacctggaagatctggtagtggctcatcacgaaatgggacatatacagtacttcatgcagtataaagacctgcctgtggcactccgcgagggcgcaaaccccggattccatgaagcaatcggcgacgtgcttgctttatccgtctctactcccaagcatctccactccctgaatctcttaagctccgagggcgggagtgacgaacatgacataaactttctaatgaaaatggccctcgacaagatagctttcatccccttttcgtacctggtagatcagtggcggtggcgggtgttcgacgggagcatcacgaaggagaactacaatcaggaatggtggagtttgcgactgaagtaccagggtttatgtccacctgtgccccggactcaaggcgatttcgaccctggcgccaagttccacatcccaagcagtgtcccatatatccggtacttcgtaagcttcatcattcagttccacccattctctcagcataccgcagcttag

SEQ ID NO: 108186 - DNA, 1428 bp, synthetic construct
  misc_feature 1..1428: note = Description of Artificial Sequence: Synthetic coding sequence
  source 1..1428: mol_type = other DNA
atgggggctgcctccggcagacgcgggcccggcttactgctgccattaccgctcctgctgctgctgcctccccagccagctctagctttagatccggggctccagcccggcaatttcagcgccgacgaagccggagcgcaactgttcgcccagtcttataactccagtgccgaacaagtgttgtttcagtcggtcgcagcaagctgggcacacgacaccaatattaccgcagagaatgcccgcagacaggaagaagctgccctcctatcccaggaattcgctgaggcatgggggcagaaagctaaggaactatatgagcctatttggcagaattttacagacccccaacttaggcggatcattggagctgtcaggaccctgggatcagcgaacctgccactggccaagaggcagcagtataatgcccttctgagcaatatgagtaggatttactccacagcaaaagtatgcctgccgaacaaaacagctacctgctggagcctggacccagatctgacaaacatcctggcttcctccaggagttacgcaatgcttctttttgcctgggagggttggcataacgcggccgggatccccttgaaaccactctatgaagatttcaccgcgcttagcaatgaagcgtataaacaggatggcttcactgacactggtgcttactggcgctcttggtataattctccgacttttgaggacgatctggagcacctctaccaacagttagagcccctttatctgaacctgcacgcatttgttcgccgagccctgcaccggcggtacggcgatcggtacatcaatctgagaggccctatccccgcacacctgctaggggatatgtgggcacagtcatgggaaaatatatacgacatggttgttcccttccctgataaacctaacctcgatgttaccagtactatgctgcagcagggatggaatgctacccatatgttcagagtggctgaggaattcttcacgagtctagaactgagtcccatgccccctgaattttgggagggcagtatgctggagaagccagccgacggtcgcgaggttgtgtgtcatgcatccgcttgggatttctataatcgcaaagatttccggatcaaacagtgtacgagggtgactatggaccaactgtcgaccgtacatcacgaaatgggccacatccagtattatcttcagtacaaagacctgcccgtatccctgcggcggggggctaatcctgggtttcacgaagccattggcgatgtgctggcactttcggttagtactcccgaacacctccacaagatcggattgctcgaccgtgtaaccaatgacaccgagccctctatacgtggaagcgtcctcttgctccccgaaactaaacccacactgatgcttgagctgtcctttatgtttcagatgtag

SEQ ID NO: 108187 - DNA, 1080 bp, synthetic construct
  misc_feature 1..1080: note = Description of Artificial Sequence: Synthetic coding sequence
  source 1..1080: mol_type = other DNA
atgattctgaattcctctacggaagatggaataaagagaattcaagatgattgccctaaggccggacggcacaattacatctttgttatgatcccaacgctgtacagcatcattttcgtggtgggcatcttcgggaacagtttggtggtaattgttatttacttttacatgaaactgaagaccgtcgcatccgttttcctgctcaatttggccctggcggacctatgctttctcctcacccttccgctgtgggctgtctacaccgctatggagtatagatggcctttcggtaactacctgtgcaagattgcaagtgcttccgtctcttttaatctgtacgcctcggttttccttttgacctgcctttctatagacagatacctagccatcgtgcacccaatgaaatccaggctcaggcgcaccatgctggtggcaaaggttacctgtattataatctggctgctcgcgggactggcttcccttcctgctatcattcaccgcaacgtgttcttcattgagaatacaaatattacagtgtgtgccttccactacgagtcccaaaacagtactctgcccatcgggctcggcctgaccaagaacattctgggctttctttttccttttctcattatactcacctcttacacgctgatttggaaagcacttaagaaggcatatgaaatacagaagaacaaaccccgaaacgatgatattttcaagatcattatggcaattgtcctctttttttttttctcgtggataccccatcaaatttttacatttctcgacgtcctcatacagctggggatcatacgtgactgcagaatcgccgatatcgtcgacacggccatgccaataacgatctgtatcgcctactttaacaattgcctgaatcctctgttttatggcttcctgggtaaaaagtttaaacgctactttttgcaacttctgaagtacattccacccaaagccaaaagtcacagtaatctgtctactaagatgtccaccttgtcctaccggcctagtgacaacgtgagctcctcaactaagaagccagccccatgtttcgaagtggaatag

SEQ ID NO: 108188 - DNA, 1080 bp, synthetic construct
  misc_feature 1..1080: note = Description of Artificial Sequence: Synthetic coding sequence
  source 1..1080: mol_type = other DNA
atgatcctcaattccagcactgaggacggtatcaaacgaattcaagatgattgtccgaaagccggcaggcacaattacatattcgtcatgattcctaccttgtactctatcatttttgtcgtggggatctttggaaactcgctggtagtgatcgtgatttatttctacatgaaactcaagaccgtcgcctccgtgttccttctgaacctagcccttgccgatttgtgtttcctgctcactctcccgctgtgggccgtctacaccgcaatggagtataggtggcctttcggtaattatctgtgcaagatcgcctccgcctcagtcagcttcaatctatatgcctctgtttttctgctgacgtgtctttctatcgataggtatctggctatagtccaccctatgaaatccagactccgccgcacaatgcttgtagctaaggtcacttgtatcattatctggctcttggctggtttggccagtctgccggctattattcaccggaatgtcttttttatcgagaatactaacatcacagtatgtgcattccattacgagtcccagaactcaaccctgccgatcggcctgggcctcacgaagaatattctaggattcttgtttccattcctgatcatacttacgtcctataccctgatttggaaggctttaaaaaaagcttacgaaatccaaaagaacaagccgcggaacgatgatatcttcaagataatcatggcgatcgtacttttcttcttcttcagctggatacctcaccagattttcacttttcttgacgttcttatccagctgggcattatccgggattgcaggatcgcggatatagtagataccgccatgcctataacaatttgtatcgcctatttcaacaattgcctgaatcccctgttctacggctttttgggaaaaaagtttaagaggtactttctgcagttattaaaatacatccctcccaaagctaagagccattctaatttatctaccaaaatgtcgacactgtcctacaggccttccgataacgtgagctcgtccacaaaaaagcctgctccgtgcttcgaggtggaatag

SEQ ID NO: 108189 - DNA, 1080 bp, synthetic construct
  misc_feature 1..1080: note = Description of Artificial Sequence: Synthetic coding sequence
  source 1..1080: mol_type = other DNA
atgatcctgaatagctccactgaggacggaatcaagcgaattcaggacgactgtcccaaggcaggccgtcacaactatatttttgttatgatacccaccctgtattccattatctttgtggttggaattttcggaaattccctggtagtcatagtcatctatttctatatgaagcttaagacagttgcctctgtgtttctgcttaacttggctctggccgatctctgtttcctcctcaccctcccactgtgggccgtgtatactgccatggagtaccgctggcctttcggcaattacctgtgcaagattgcctcagccagcgtgtcatttaatctgtacgcctcggtgtttctgcttacctgcctgtccatcgatcgttacctggctattgttcacccgatgaagtccaggctgcggagaactatgttagtggccaaggtgacatgcatcatcatttggttgctggcagggttagccagtcttccagccataatccaccggaatgtctttttcatagagaatacaaatataaccgtgtgtgcatttcactacgagagccaaaactctactctgcctatcggcttgggcctgaccaagaatattttggggtttctttttccctttctgattattctgacttcatacacattgatctggaaggcgcttaaaaaggcctacgaaatccagaaaaacaaacctcggaacgacgacatttttaagatcatcatggcaatcgtgctctttttttttttctcttggatcccccaccagatatttacattcttggatgtgctaatacagctcgggataatccgcgactgccgcattgccgacatagtagacactgccatgccgattaccatctgcatcgcatacttcaataattgcctaaaccctttgttttatggcttcctggggaaaaaatttaaacggtatttcttacagttgctaaaatacattccgcccaaggcgaagtcacattctaatctgtccacaaaaatgagcaccttgtcttaccggccatcagataacgtgagttccagcaccaagaaaccagccccctgctttgaggtggagtag

SEQ ID NO: 108190 - DNA, 1080 bp, synthetic construct
  misc_feature 1..1080: note = Description of Artificial Sequence: Synthetic coding sequence
  source 1..1080: mol_type = other DNA
atgattctcaattcctcaacagaggatggaataaaacgaattcaggacgattgcccgaaggcagggcgacacaactacattttcgtcatgattccaacattgtacagtatcattttcgtggttggcatctttggcaattctctggtggtaatcgtaatttatttctacatgaaactgaagaccgtggcctccgtctttctgcttaacctggcactagccgacctgtgctttttgcttacccttccattgtgggccgtctacacagccatggaatatagatggccattcgggaattacctgtgtaaaatcgcatccgctagcgtgagtttcaatctctacgctagcgtctttcttctgacgtgcctgtcaatcgacaggtacctggccatcgtacaccctatgaaatcaaggctgcgtaggactatgcttgtggctaaagtgacctgtataattatttggctgctcgctgggcttgcctctctgccagctatcatacataggaacgtattttttatcgaaaacactaatatcacggtatgcgcgttccactatgaatctcagaactccaccctcccaattgggctcgggttgactaagaatatactgggtttcctatttcccttcttgattatcctgacctcctacaccctgatttggaaggctctcaagaaagcgtatgaaattcagaaaaacaaaccaaggaacgatgatatatttaagattattatggcaatagtcttgttcttcttcttttcttggattcctcatcaaatattcacgtttctcgacgttttaatccagctcggcatcattagggattgtagaattgcggacatcgtcgacacagcaatgcccattaccatctgcattgcttatttcaacaactgtctcaatcctctgttctatgggtttctggggaagaagttcaaacgctacttcctgcaactgctgaagtatatccccccaaaagcaaaaagtcattccaatctgtccactaaaatgagtacactgtcgtaccgtcccagtgataacgtgagctctagcaccaaaaagcctgcaccttgttttgaagttgagtag

SEQ ID NO: 108191 - DNA, 1080 bp, synthetic construct
  misc_feature 1..1080: note = Description of Artificial Sequence: Synthetic coding sequence
  source 1..1080: mol_type = other DNA
atgatacttaatagctcgaccgaagatggcatcaaaagaattcaggatgattgtcctaaggctgggagacataactatatcttcgtcatgataccgacgctctactccattatcttcgtggtaggcattttcggtaacagtttggtcgtcatcgtcatttacttctacatgaaactcaaaaccgtggcgtcagtcttcctgctgaacctcgcactcgccgatctgtgtttcctcctgactttgcctctgtgggctgtctatacagccatggagtacaggtggcccttcggtaactacctctgtaaaatcgcttctgcaagcgtgtcctttaacctatacgcttctgtttttctgctgacatgtctgtcaatagaccgctatttagccatcgttcatcccatgaaaagcaggttgcgcagaacgatgcttgtcgccaaggtgacttgtatcataatttggctattggccggcttggccagtctgcccgcaattattcatcggaatgttttcttcatcgaaaatacaaatatcaccgtctgtgcatttcattacgagagccagaattccacactaccaattggtctgggactgactaagaacatcctcgggtttctgtttcccttccttattatcctgacttcatatacactcatctggaaggccctgaagaaagcttacgagattcaaaaaaacaagccaaggaatgacgatatttttaaaattattatggcaattgtgttgttctttttcttcagctggattccccaccaaatctttacatttctggacgtgttgatccagttggggataatccgggattgccgaattgccgatatcgttgatacagccatgccaatcactatctgtatcgcgtatttcaacaactgtctaaaccccttgttttacgggttcctcggcaagaaattcaaaaggtacttcttgcaattattaaaatacatccctccaaaagcaaaaagtcattccaatttatctaccaaaatgtctacactctcatataggccctctgacaatgtgagcagctcaaccaagaaacctgcaccatgtttcgaagtcgagtag

SEQ ID NO: 108192 - DNA, 1080 bp, synthetic construct
  misc_feature 1..1080: note = Description of Artificial Sequence: Synthetic coding sequence
  source 1..1080: mol_type = other DNA
atgatacttaactcatctacagaagacggcattaagaggatccaggatgattgccctaaggcagggcggcataactatatcttcgtcatgatcccaacactttacagcataatcttcgtggtcggtatattcgggaattcactggtggtgatcgtgatctatttctatatgaaacttaaaactgtagcctccgtgttcctcttgaacctagcgctcgccgacctatgttttctgctaacattacctctttgggcggtgtacactgcgatggaatacaggtggcctttcggaaattacctctgtaaaatagctagcgcatcggtgagctttaacctatacgcaagcgttttcctgctgacctgtctatccatcgatcgctatctggcgattgtccacccaatgaaatcccgtctgcgccgaactatgcttgtagccaaggtcacctgtattattatatggctcctggctggcctggcttctctgcctgccataattcacaggaatgtgttttttatagagaataccaacataacagtttgcgcgttccactacgagtcccagaattcaacgctgcctataggtttgggtttgactaaaaacatcctagggttcctgttcccatttttgatcatccttaccagctacacactgatatggaaggctctcaaaaaagcttacgagatccaaaagaacaagcctagaaacgatgacatctttaagatcataatggcgatcgtgctgttcttctttttctcgtggatcccccatcaaatttttaccttcctggacgttttgattcagttaggtatcattcgcgactgtcgaatcgccgacatcgtcgacaccgcaatgcccatcaccatctgtatcgcctattttaataactgtctcaacccattattttacggcttcctgggtaaaaagtttaagcgctatttcctgcagctgttaaagtatatcccccccaaggccaaatctcacagcaatttgagtactaaaatgagtacgctgtcctaccgtccttcagataatgtcagtagctctaccaagaagcctgccccttgcttcgaggttgagtag

SEQ ID NO: 108193 - DNA, 1080 bp, synthetic construct
  misc_feature 1..1080: note = Description of Artificial Sequence: Synthetic coding sequence
  source 1..1080: mol_type = other DNA
atgatcctaaacagttctacagaggatggaattaaacgaatacaagacgattgccccaaggctggtcgccacaattatatctttgtaatgatcccaactctctattccatcatatttgttgtcgggatttttggcaactctttggttgtaatcgtcatctatttttatatgaaattgaagaccgtcgcctcagttttcctcttaaatttggcactagcagatctgtgctttttgctgacattacccctgtgggccgtctacactgcaatggagtaccggtggccctttggaaactacttatgcaaaatagcaagcgcttcagtctcttttaatctctatgcgtccgtgtttcttctcacttgccttagcatagacagatacctggcgatcgtgcaccctatgaagagtcgccttcggcgtaccatgttagtagctaaggtcacctgcatcataatctggcttctggccgggctggcttcactgcccgctattattcaccgaaacgtcttctttatcgagaacacaaatatcactgtgtgcgccttccactatgaaagccagaattcaactcttcctattggcttggggctaaccaaaaacatcctgggattccttttcccctttctgatcatcctcacgagctataccctgatttggaaggcactgaagaaggcctacgagatccagaagaacaaaccaagaaatgatgatatcttcaagattattatggccattgttctcttcttttttttcagctggatcccacatcagatctttaccttcctggatgtactgatccagttgggcattatccgggactgtagaattgccgatatcgtcgacacagccatgcctattaccatatgcattgcttacttcaacaactgcctgaacccgctgttttatggattccttgggaaaaaatttaaaagatatttcctccagctccttaaatatatccccccaaaagcaaaatcacatagtaacctttccaccaagatgagcaccctctcctataggccatcagataacgtgtcctcatcaacaaagaaacccgcgccttgctttgaggtggagtag

SEQ ID NO: 108194 - DNA, 1080 bp, synthetic construct
  misc_feature 1..1080: note = Description of Artificial Sequence: Synthetic coding sequence
  source 1..1080: mol_type = other DNA
atgatcttgaacagctccaccgaagacggaataaaaaggatacaagatgactgccctaaagcgggtcggcataactacattttcgtgatgattccgaccttgtattccattatatttgtggtgggaatcttcggcaattccctcgtcgtaatagtgatttacttttatatgaagttaaagactgtcgcatcagtgttcctgctaaacctggcactggccgatctgtgcttccttctaacactccccctgtgggccgtgtacaccgctatggaatataggtggcccttcgggaactacttatgcaaaattgcctctgcctccgtgagctttaacttatacgccagcgtattcctgctgacatgcctgtccatcgataggtacctggcaattgtgcatcccatgaaatctcgcctcaggagaaccatgttggtcgccaaagtgacgtgtatcatcatctggctcctcgcaggtctggcctctcttcctgcaattatccacagaaatgtctttttcatagagaacaccaatatcacagtgtgtgcatttcattatgaaagtcagaacagcactcttcccataggcttggggctaactaaaaatattctcggctttctctttccttttttaattatattgacgagttacacactcatatggaaagctctgaagaaagcatatgaaatccagaaaaacaaacctcgcaatgatgatattttcaagattattatggctattgtgctcttcttttttttttcgtggattccgcaccagatctttacattcttggacgtgctgatccagttggggatcattagggattgtcgtattgcagacatcgttgacaccgccatgccaattaccatctgcatcgcttatttcaataattgtcttaaccctctgttctatggtttcttgggaaagaagttcaagaggtatttccttcaactgctgaaatacattcctcctaaggccaagtctcactcaaacctttcaaccaagatgtcaaccctttcttaccggcccagtgataatgtgagctcatctacaaagaaaccggccccctgcttcgaggttgagtag

SEQ ID NO: 108195 - DNA, 1080 bp, synthetic construct
  misc_feature 1..1080: note = Description of Artificial Sequence: Synthetic coding sequence
  source 1..1080: mol_type = other DNA
atgatcttaaacagctccacagaggatgggatcaagcgaatccaggacgactgcccaaaggcaggaagacacaactacatattcgtgatgataccaacactgtactctatcatcttcgtagttggaatcttcgggaattcactagtggtgattgtgatttacttctatatgaagctcaagaccgtcgcaagcgtgttcctgctgaatcttgcgctagccgacctgtgctttcttctgaccttaccactctgggccgtctacacagcgatggaatatcgctggccattcggtaattatctttgtaagattgcgtcagcgagtgttagcttcaacctgtacgccagcgtgtttctgcttacctgtttgtctattgatcgttacttagccatagtccatccgatgaagtcaagactgcgccgaacaatgctggtggcaaaagtcacatgcatcattatatggctgctggcaggcctggctagtttacccgcaatcattcacaggaatgtctttttcatagagaacacaaatataaccgtttgtgcctttcattacgagtctcaaaacagcacattaccaataggcctgggccttacaaagaatatactgggcttcctcttcccatttttaatcattcttaccagttacacgctgatctggaaagccctgaagaaggcatatgagatccaaaaaaacaagcctcggaacgacgatatctttaagatcataatggcgatcgtcctgttcttcttttttagttggattccccaccagatcttcacattcctggatgtgttgatccagctcggtattatccgcgattgtcgaatcgcggacattgttgacaccgctatgccaatcactatctgcatcgcttacttcaataactgccttaacccgttattttatggcttcctgggcaaaaagttcaagaggtactttctccagctcctgaaatatatccctccaaaggcaaagtcacactccaaccttagcaccaagatgagcaccctcagttaccggcctagcgataacgtgtcgagttctactaaaaaacccgcaccctgctttgaagtggaatag

SEQ ID NO: 108196 - DNA, 1092 bp, synthetic construct
  misc_feature 1..1092: note = Description of Artificial Sequence: Synthetic coding sequence
  source 1..1092: mol_type = other DNA
atgaaagggaacagcacgctggcaaccacgagcaagaacatcacgagcggccttcattttgggctggttaatatatccggcaacaatgaatctacactcaattgcagccaaaagccttccgacaagcacctggacgcaattccaattctttactacattatctttgtgattggctttctggtgaacatagtcgtggttactctgttttgttgtcagaaaggtccaaaaaaggtgagcagtatttacatcttcaaccttgctgtcgctgacttgttactgctggccactctgcctctatgggctacctactactcctaccgatatgactggctcttcggaccagtcatgtgtaaggtgttcggctccttcttaactttgaacatgttcgctagtattttctttatcacctgcatgagtgtggatcgataccagtccgtgatctatccctttctttcgcagagaaggaatccatggcaagcctcttacatagtccctctcgtatggtgcatggcttgtctgtctagcttgcccactttctacttccgcgatgttcggactatagagtatctcggagtgaatgcatgtattatggcctttccccctgagaaatatgcccagtggagcgcaggcattgcattgatgaagaacatcttgggctttattatcccacttatcttcatagcaacctgttattttgggatcagaaaacatctgctgaagaccaatagttacggaaagaaccgcatcaccagagatcaggtgctaaaaatggctgcagcagtagtacttgctttcattatttgttggctgcctttccacgtcttaacattccttgacgcacttgcatggatgggagtgataaactcctgcgaggtgatagctgtgatcgacctggccctgcccttcgccatattgctaggattcacgaacagttgtgtgaacccttttctctattgcttcgttggcaaccggttccaacaaaagctccgttccgtcttcagggtgcccattacctggttacaggggaaaagggagtccatgagctgccgcaaaagctcatctttgagagaaatggaaacctttgtttcatag

SEQ ID NO: 108197 - DNA, 1458 bp, synthetic construct
  misc_feature 1..1458: note = Description of Artificial Sequence: Synthetic coding sequence
  source 1..1458: mol_type = other DNA
atgcgaaagcgtgcaccgcagtcagagatggctccagccggggtttctctgcgtgcaaccatactgtgcctgctggcgtgggctgggttggctgccggtgaccgcgtgtacattcatcccttccacttggtgatccataatgagtctacttgcgagcagctagctaaggcgaatgccgggaaacctaaagacccaaccttcatacccgccccaattcaggcaaagacctcgccagtggacgagaaagcattacaggaccagctggtcttagtcgcagccaagctggatactgaagataagctgagagctgctatggtgggcatgcttgccaacttccttggattccggatctatggcatgcacagtgagctttggggggtggtccacggtgctacagtgctcagtcccacagccgtcttcggaacactggccagtctgtacctcggcgctctggatcacacagctgaccggctgcaagcaattctcggggtcccctggaaggacaaaaactgtaccagcaggctcgacgcccacaaagtgctgtccgccctgcaggctgtgcagggcctgctagttgcgcagggccgtgcagatagccaagcccagttactgctgagtacggtggttggtgtctttacggcacccggactccatctgaaacagccatttgtccaaggattggcactctataccccagtggtccttcctagatcactggacttcaccgaactcgacgttgcagcagagaagatcgaccggttcatgcaggcagtaaccggctggaaaaccgggtgttccctgatgggggccagcgtggactctaccttggcgttcaacacctacgtgcacttccaggggaagatgaagggatttagcctcctggccgagccgcaggaattttgggtcgacaactctacaagcgtgtccgttcctatgctcagtggcatgggcaccttccaacactggtctgacatccaagataatttctcagtaactcaagtgccctttaccgagtccgcctgccttcttctgatccaaccccactacgcctcagatctggataaagtagaaggccttacctttcagcagaacagccttaattggatgaaaaaactgtcacctagaaccatccacctgacaatgcctcagctcgtactccagggctcatatgaccttcaggatctcctggcccaagccgagttgcccgctatcttacatacagaacttaatctgcagaaattgtctaacgataggatcagggtgggagaagttctgaattccatcttttttgaactggaggcagatgagcgggagcccactgagagcacccagcagctcaacaaacctgaagtgttggaagtgaccctaaaccgcccgtttctctttgccgtatacgaccagagcgccacggccttacacttcctcggccgagttgctaatcccctaagcactgcttag

SEQ ID NO: 108198 - DNA, 1212 bp, synthetic construct
  misc_feature 1..1212: note = Description of Artificial Sequence: Synthetic coding sequence
  source 1..1212: mol_type = other DNA
atgcggaaaagagcacctcaatccgagatggccccagctggcgtctccctgcgggcaaccatcctgtgcctgctggcatgggccggattagcagcaggtgaccgggtgtatatacatccgttccacctggtcatccataatgagagcacatgcgagcagttggcaaaagccaatgctgggaagcctaaagatcctacctttatccccgctcccatccaggccaagacaagtccagttgacgaaaaggccctacaggaccaacttgtgttagtggcagcgaaactcgataccgaagataagctcagggccgcaatggttgggatgctggccaacttccttggattcaggatttacgggatgcacagcgagctgtggggtgtggttcacggagcaaccgtccttagccctacagccgttttcggaaccttggccagcctctaccttggtgccctcgaccatacagccgaccgcctgcaggcaatcttagatgtggccgccgaaaaaatcgaccggtttatgcaggccgtgacgggatggaaaacgggttgctcccttatgggagcctcagtggattctacactggccttcaacacctacgtgcacttccaagggaagatgaagggattttccctcctcgcagagcctcaggagttttgggtcgataactctacgagtgtgtcggtgccaatgctctccgggatgggcacttttcaacactggtccgacattcaggacaacttctccgtcacccaagtgccttttacggaatcagcttgtctactcctgatacagccacactatgcctcagatctcgacaaagtcgaaggtttaacctttcagcagaactctctcaattggatgaaaaaattatcaccgcgcacaatccatctgactatgcctcaacttgtgcttcagggatcctacgacctccaggacttgctggcccaggctgaattacccgctattttgcacacggagctgaacctccagaagctttccaacgatcgaatcagggtaggagaagtgctgaactcgatattcttcgagctggaggccgacgaacgcgaaccaacagaatcaacccagcaactgaacaagcccgaagttctggaggtgaccttgaatcgcccctttttgtttgccgtgtatgaccagtctgccactgctctgcactttctgggtcgggtcgccaaccccctgtctactgcctag

SEQ ID NO: 108199 - DNA, 1479 bp, synthetic construct
  misc_feature 1..1479: note = Description of Artificial Sequence: Synthetic coding sequence
  source 1..1479: mol_type = other DNA
atggtaaagtttccagcactgacacactactggccattaatccgctttttagtgcccctgggtatcacaaatatcgccattgactttggggagcaggcccttaaccgcggaattgcagctgttaaagaagacgccgtcgagatgctcgcgagctatggactggcctattcattgatgaagttctttaccggcccaatgtctgatttcaaaaacgtgggccttgtattcgttaactccaaaagagaccggacgaaggctgtgctgtgcatggtcgtcgctggcgccattgctgctgtctttcatacacttatcgcctattccgacctgggatattacattatcaacaagctgcaccatgttgacgaatctgtcggctccaaaacgagaagggcattcctgtatttggctgccttccctttcatggatgctatggcatggacgcacgcaggcattctgctgaagcacaagtattccttcctggtggggtgtgcatctatatccgatgtcatagcccaagtggtctttgtggcgattctcctccactcccaccttgaatgccgtgaacctctcctgatccctattctctccttgtatatgggagccttagtgcggtgcaccacgttgtgtctcggttactataaaaatatccatgatattattccggatcgcagtggccccgaactgggcggggatgcgacaattcggaagatgctcagtttttggtggccccttgccctcatcttggctacccaacggatctctcgccctatcgttaacctgtttgtatcacgggatctgggaggcagctctgctgcaaccgaggccgtggccatcctgaccgctacctatcccgtggggcatatgccatacggatggctcaccgaaattagggcagtctacccggccttcgacaaaaacaatccaagtaataaactggtcagtacctccaataccgttacagcagctcacatcaaaaagttcacttttgtatgcatggctctatcactaactctgtgtttcgtaatgttctggacccccaatgtgagcgaaaaaattcttatcgatattatcggcgtagattttgcattcgcagagctctgtgtagtgccacttcgtatcttctccttcttcccagtacccgtcacagtcagagcccacctaacgggctggctgatgactctgaaaaagacattcgtgcttgcaccaagctcagtgttgagaatcattgttctgattgcatcactggtcgttcttccgtatttgggagtacatggtgctacgctcggcgtcggtagtctgctggcagggtttgtgggggagagcactatggtagctatcgcagcctgctacgtgtatcggaagcaaaagaagaagatggagaacgagtctgccactgagggagaagacagcgccatgactgatatgccgccaaccgaagaagtgactgatattgtggaaatgagagaggagaacgaatag

SEQ ID NO: 108200 - DNA, 885 bp, synthetic construct
  misc_feature 1..885: note = Description of Artificial Sequence: Synthetic coding sequence
  source 1..885: mol_type = other DNA
atgggcgctctggtcaggtgcaccactttatgcctgggttactacaaaaacattcacgacatcattcccgatcgatccggcccagagctaggcggggacgcaacaatccgtaagatgctgtccttctggtggcccttggcactgattttagcaacccagcggatcagccggcctattgtgaatctatttgtctctagagatcttggcggctcctccgctgccacggaggctgtcgccatcctcacggccacataccccgtggggcatatgccctacggctggttgacggagattcgggcagtgtaccctgcctttgacaagaacaatcccagtaacaaacttgtgtctacctctaataccgttactgccgcccatattaagaaatttacattcgtctgcatggccctgagtctgactctgtgcttcgttatgttttggacgcctaacgtatccgagaaaattctgatagacattattggagtggacttcgcctttgctgagttatgcgtcgttccgctgcgtatattctctttcttccccgtcccggtgacagtgcgggcgcatctcaccggttggctcatgacactcaagaaaactttcgtcctcgccccaagcagtgtgttgagaattatagtcctgattgcatccctcgtcgtgctcccatatttgggggtccacggcgcgaccctgggtgtgggaagtctgctggcagggtttgtgggtgaatctaccatggtcgctatcgccgcttgctacgtctaccggaaacaaaagaaaaaaatggaaaacgagtcagccactgagggagaggacagcgctatgacagatatgcctcctacggaggaagttactgatatagtggagatgcgagaggagaacgagtag

SEQ ID NO: 108201 - DNA, 471 bp, synthetic construct
  misc_feature 1..471: note = Description of Artificial Sequence: Synthetic coding sequence
  source 1..471: mol_type = other DNA
atgtggaccttcgtcacccagctcctggttacgcttgttctgctcagtttctttctggtctcatgtcagaacgtgatgcacatcgtgcggggctctttatgtttcgtgctgaaacatatccatcaggagcttgacaaagaattgggcgaaagtgaggggctttccgacgatgaagagacaatttctacacgtgtggtgcgccggagggtgtttcttaagggaaatgaatttcagaacattcctggggagcaggtgaccgaggaacagtttaccgacgagcagggcaatattgtcactaaaaagatcattaggaaggtcgttaggcaaattgatctcagctctgcagatgccgcccaggagcacgaggaagtgactgtggaaggtccactcgaggatcctagtgaattggaagttgacattgattattttatgaagcattccaaggatcatacctctacacctaatccttag

SEQ ID NO: 108202 - DNA, 5694 bp, synthetic construct
  misc_feature 1..5694: note = Description of Artificial Sequence: Synthetic coding sequence
  source 1..5694: mol_type = other DNA
atggcccaggccgctaaacagctgaagaagattaaggatattgaagctcaggcacttcaagagcagaaagaaaaagaagagtcaaacaggaagcgccggaaccgcagccgcgaccgcaaaaaaaaagccgacgccgctacatcatttttacgggcggccagatcaggaaacctagataaggccctcgaccacctccgaaacggagtcgatatcaatacctgcaatcagaatggtctgaacgggcttcacctcgcttctaaagaaggacacgtgaagatggttgtggaactcttgcataaagagatcatcctggaaaccaccactaaaaaaggtaatacggcactgcacattgcggcactagcaggtcaggatgaagtggtgcgagagctcgtgaattacggggccaacgttaatgcacagagccagaaaggtttcacacccctttatatggccgcccaggagaaccatctcgaagtcgtcaagtttctgcttgagaacggagcaaatcaaaacgtggccacagaagacggattcactcctctggctgtggcgctccagcaaggtcacgagaacgtcgtcgcacatttgattaattatggaaccaaggggaaggtgcgcttgccagcccttcatattgcagctagaaacgatgataccagaaccgccgcagttctgctgcaaaacgatccgaacccagacgtcctgagcaagaccggctttacacctctgcacatcgccgctcactatgaaaacctgaatgtggcgcaactcctgctgaacaggggagcctcggtgaatttcacacctcagaacggcatcacccctttgcatatcgcttccaggaggggcaatgtgatcatggtgcggctcctcctggacagaggggcgcagattgagaccaagaccaaggatgagctcacccccttgcactgcgccgcgcggaacggacacgtgagaatcagcgagatcctgctggaccatggagcccccatccaagccaagacgaaaaatggattgtcccctattcatatggccgctcagggagatcacctcgactgcgttagactgttactgcagtacgacgctgagatcgatgacatcactttggaccacttgactcccttgcacgttgcagcccattgtggtcatcaccgggttgccaaagtgctgcttgataaaggcgccaaaccaaactcacgtgcattgaatggatttacacctcttcacatagcatgcaaaaagaaccacgtgagagttatggagctgctgttgaagaccggggctagcatcgacgcagttacagagtccggcctgaccccattacatgtggcctccttcatggggcacctgcctatcgtcaagaatctgttgcagcgtggggcgagccctaacgtgagcaatgtcaaagtcgaaacccctctccacatggccgccagagcaggccacaccgaagtcgcgaagtatttgttgcagaataaggcgaaagtgaacgccaaagctaaagatgaccagactccgttacattgcgcagcccggataggccacacaaatatggtgaaactcctcctcgagaacaacgccaatccaaatctggctacaacggcagggcacacccctcttcacatagccgcacgggaaggtcacgtagaaacggtgctcgcactgcttgaaaaagaagctagtcaggcttgcatgacaaaaaaggggtttaccccactgcatgtggccgccaaatacggtaaggtccgggtcgctgagctgctgctggagcgtgacgctcacccaaatgccgcgggaaagaatggtttgacccctcttcatgtggcagtacaccacaataatttggatattgtaaaactcctcctaccacggggaggaagtcctcattcccctgcctggaatggttatacacctctccatattgccgcgaagcaaaatcaggtggaagtggccagatccttactgcagtacggcggctctgctaacgccgagtcagttcaaggagtcacgccactacatttggccgcccaggagggacacgcagagatggtagccttgctgctgtccaagcaggctaacgggaatctggggaacaagtcaggcttaacccccttgcatctggtagcccaggagggtcacgttcctgtggcggatgtcctcataaaacatggagtgatggtggatgccacaacacggatgggttatacacccctgcacgtggcaagtcattacggcaacatcaaattggtcaagtttctgctacagcaccaggccgatgtaaacgctaagactaaactcggttactcaccgctgcaccaagcagcacaacagggtcacacagacattgtgaccctgttgctgaagaatggggcctctcccaatgaggtgagcagtgacgggactacaccccttgctatcgctaagcgcctggggtatatctccgttacagacgttctgaaagtcgtgaccgatgaaacgtcgttcgtgttggtcagtgataaacacaggatgtcttttcccgagactgtggacgagatattggacgtgtcggaggacgaaggcaccgctcatatcaccattatgggtgaggaactgatcagttttaaggccgagcgccgggactcccgggacgtggatgaagagaaagagctactcgatttcgtccctaagttggaccaagtggtggagtcgcccgctatcccaagaataccctgcgctatgccagagacagtggtcatacgtagcgaggagcaggaacaggcttccaaggagtacgatgaggattccctaatcccttccagtccagccaccgagacatcagacaacatttcgcccgtagcgagtccagtgcataccggtttcctagtgtctttcatggtggacgctagaggcggatcaatgaggggttccagacacaacggccttcgagtggtcatcccaccgcgtacttgcgctgctcccacaaggatcacttgtcgattggtgaagcctcaaaagctctcgacccccccccctttggccgaagaggaaggattggcgagcagaattatagcactgggcccaaccggagcgcagtttctgtctcccgttatcgtggaaattccacattttgccagccacgggcgtggcgaccgcgaattggtggttctgcgctccgaaaacgggagcgtctggaaggagcaccggtctagatatggggagtcttacttagaccagattctaaatggaatggacgaagaactgggcagtttggaggagttagaaaaaaaacgagtctgtagaatcatcaccaccgattttcccctctacttcgtcatcatgtctcggctttgtcaagactacgatacaataggacccgaaggcggctcgctgaaaagtaaactggtacctctcgtacaggccacctttccagagaacgctgtcacaaagcgggtgaagctcgctttgcaggcccagcctgtgcccgatgaactggtgaccaagttactgggaaatcaggctacctttagtcctatcgtaaccgtcgagccccggcgccggaaatttcatagaccaataggcctgagaattcctttgcctcctagttggaccgacaatcctcgggatagtggtgaaggagatactacatcgctccgcctgctgtgtagtgtgattggtggtaccgatcaggctcagtgggaagacatcaccggcaccactaagctcgtttacgcaaacgaatgcgccaactttactaccaatgtgagcgccagattctggttgtcagattgtccgcgcactgccgaagctgtgaactttgcaactttactgtacaaggagctgaccgcagttccgtacatggcgaaattcgtcatatttgccaagatgaatgaccctagagagggccgccttcgctgttactgtatgactgatgacaaggtcgataagacgcttgaacaacatgagaattttgtggaggttgcaaggtctcgggacattgaagtgctcgaggggatgtctctctttgctgaactttccggcaatttggtccctgtcaaaaaagcggcccagcagaggagcttccattttcagagctttcgggagaatagattggccatgcccgtgaaggtgagagacagttccagagagccgggggggagcctaagcttccttcgcaaggctatgaagtatgaagatactcagcacattctgtgccacctcaacattacaatgcctccatgtgccaaagggtctggcgcagaggatcggcggagaactccgacgccccttgccttaagatacagcatattgtcagaatccaccccaggatcattgagtggtaccgaacaagcagaaatgaagatggcagtcatcagcgagcatcttggactaagttgggctgagctcgcacgggagctgcagttttctgtggaggatattaacagaatcagagtcgaaaatcctaactcactgttagagcaatctgtggcactgctcaatctgtgggtgattagggaaggacagaacgccaacatggagaacctgtatactgccctgcagagcattgataggggagaaatcgtgaacatgttggagggaagtgggcggcagtcaaggaacttgaagcccgatcggcgccacacggacagagactacagtctgtctcccagtcagatgaacggttactcgtctctgcaggatgaactgctgtcccccgcctctctaggctgtgccctttcgagcccccttagggctgaccaatactggaatgaagtcgctgtgctagacgcgatccccctggcggccaccgagcacgacacaatgctcgaaatgtcagacatgcaggtctggtcagccggcttaacaccaagtctcgtgaccgcagaagatagcagtttagaatgtagcaaggccgaagattccgatgccactggacacgaatggaagctcgaaggagccctgagcgaagagcccaggggaccggagcttgggtctctagaattggtggaggacgacaccgttgatagcgacgctaccaacgggctgatcgatctcctggagcaggaagaaggacagcgcagcgaggaaaagctgccgggtagtaagcgccaggacgacgcaacgggggccggccaagactccgagaatgaggtttccctcgtgtccggccatcagaggggccaggctaggatcacacattctccgaccgtcagtcaagtaaccgaacgttcacaggataggctccaggactgggacgccgacggaagcatcgtttcttatctccaagatgccgcacagggctcttggcaagaagaagttacgcaaggaccccacagtttccaggggacttcaacaatgacggagggcttggaacccggtggctcacaggaatacgagaaggtccttgtctcagtatcggaacatacctggaccgaacagcccgaggctgagtcctcccaagcagaccgcgatcggaggcaacagggtcaagaggagcaggtgcaagaggccaagaacacgtttacccaggttgtacagggcaatgagttccaaaacatcccgggggagcaggtcactgaggagcagttcaccgacgagcaaggaaatatcgtgaccaagaaaatcatcagaaaggtggtgcggcagatcgacctgtcttctgcggatgcagcccaagagcatgaggaagatcacactagcaccccaaatccctag

SEQ ID NO: 108203 - DNA, 5643 bp, synthetic construct
  misc_feature 1..5643: note = Description of Artificial Sequence: Synthetic coding sequence
  source 1..5643: mol_type = other DNA
atgccctattcagtaggcttcagggaggcagacgcagccacttcttttctgagggcagccaggtccggcaatctggacaaggccctcgatcatcttcgcaatggagttgacataaacacttgtaaccagaatggactgaacgggctccatctagcttctaaagaaggtcatgttaagatggtcgttgagttgcttcacaaagagatcatcctggaaaccaccactaagaaaggaaatacagccctgcacatcgctgccctcgccggacaagacgaagtcgtgcgggagctggttaactacggagccaacgttaacgcacagagccagaagggattcaccccactttacatggccgcccaggagaatcatctcgaagtggtgaagttcttgctggagaatggcgccaaccaaaatgttgccaccgaggatggatttacacctcttgctgtagccttacagcagggccacgaaaacgtggtggcccatctgatcaattacggaaccaagggtaaagttcgtcttcccgctcttcacatcgcagcaagaaacgatgacacgaggacagcagctgtgttattgcagaatgacccaaatccggacgttctttccaagactggtttcactcccctgcacatcgctgcccactatgagaacttgaatgttgcacagcttctgctcaacagaggcgcaagcgtaaacttcacgccgcagaatggcatcacccccttgcacatagcgtccaggcgcggcaatgtgatcatggtgcgcctactgctggataggggcgcacaaatcgaaactaaaaccaaggatgaactgacccccctgcactgcgccgcgcgtaatgggcacgtcaggatctccgagattctgcttgatcatggcgctcccattcaggccaagacaaagaatggactgtcccccatccacatggccgcgcaaggggaccatctcgattgtgtccggctgctccttcagtatgatgcggagatcgatgatattacactggaccatttaacccccctgcacgtggccgctcactgtggacatcaccgggtagccaaagttctgctcgacaaaggggctaagcccaattcacgtgccctcaatggctttactcctcttcatattgcttgtaagaaaaaccatgtgcgggtgatggaactgcttctcaagaccggagcttcgatcgatgccgtgaccgagtccggcctgaccccgctccacgtggcttctttcatggggcacctccctattgttaagaacctccttcagcggggtgcatcccccaacgtgagtaatgtcaaagtggaaacgcctctccacatggctgctcgagcagggcatacagaagttgctaaatatttactgcagaacaaggctaaggtcaatgccaaagcaaaagacgatcagacacctctccactgtgccgcccgaatcggccacaccaatatggtgaagctcctgctggaaaataatgctaacccaaacctcgcaactaccgcggggcatacaccactgcatatcgccgctcgggagggtcatgttgaaacagtattggcactgcttgagaaagaggcatcacaggcctgcatgaccaaaaagggcttcacaccccttcacgtcgccgccaagtatggaaaggtcagagtagctgagctcctgctcgaacgggatgcacaccctaatgccgcggggaaaaacgggctgacacctttacacgtagccgtgcatcacaataacctggatattgtcaagctcttgcttcctcgtggaggcagccctcactccccagcctggaacggttacactccattgcacattgctgctaagcaaaaccaggtggaagtggcaagatcactgctgcagtatggcggcagcgcaaacgcagagagcgtgcagggcgtgacaccactgcacctcgccgcccaggagggccacgcagagatggtggccctgctcttgtctaagcaggcgaacggaaatctcggaaacaaatctggattgactcctttgcatcttgtggcccaggagggccatgtgcctgtagccgatgttctaataaagcacggtgtgatggttgatgccaccacacgcatgggatacacacccctccacgtggcctcccattatggcaacatcaagctcgtcaagtttctgcttcagcaccaggcggacgtcaatgcgaagactaagttgggctactctccgcttcatcaagcagctcagcaggggcacactgatattgtaaccctgttactaaagaatggcgccagccctaacgaggtctcaagcgacgggactactccactcgctatcgctaaaaggttggggtatatctctgtgaccgacgtccttaaagtggtcaccgacgaaacaagtttcgtcctcgtaagcgacaagcaccggatgtctttccctgaaacagtggatgagattctggatgtgtcagaggatgaaggggaggagttaatctcgttcaaggccgaaaggcgtgactccagggatgtagacgaggagaaggaactcttggattttgtgcccaagctggaccaggtggtggagtcacccgcgatccctagaatcccgtgtgcaatgcctgagaccgtggttattcggtctgaggaacaggagcaggcgtctaaggaatatgatgaagacagcctgatcccgtcatcacctgctactgaaacatccgataacatcagtccagtcgcttcacccgtccacacagggtttcttgtcagctttatggtggatgcccggggcggtagcatgaggggttccagacataacggactacgcgtggtgatcccacctagaacatgcgctgccccaaccagaatcacctgtcgcctggtgaagccacaaaagctgtctaccccccctcctcttgctgaggaagagggtcttgccagcaggatcatagccttgggtcccacaggcgcccagttcctgtctcccgtcattgttgagatacctcatttcgcgtcccacggcaggggtgatagggaattggttgtgctccggtccgaaaacggatcagtttggaaagagcatcggtcacgttatggggaatcttatctcgaccagatccttaatggcatggacgaggagctgggttcgctggaagagttggagaagaagagagtctgtcggattataaccaccgacttcccactgtactttgtcataatgtcccggttgtgccaggattatgataccatcggaccggagggtggaagcttaaaaagcaagctggtgcctttggtccaggccactttccctgagaacgccgtcaccaagcgcgtaaagctggcactacaggcccagcctgtgcctgatgagctcgtaaccaagcttctcggaaaccaagccacatttagtcctattgtcaccgtcgagcctagaagacgcaagtttcatagaccgatcggtctgaggatcccccttcccccttcttggactgacaaccccagggacagtggtgaaggagatacgacatccttaaggctgctttgttctgtcatcggcgggacagaccaagcccaatgggaggatatcacgggtacaaccaaactggtatacgccaacgagtgtgccaatttcacaactaacgtctccgccaggttttggttatccgactgtcccaggacagcggaggctgtcaactttgctaccctgctgtataaagagctaaccgccgtgccctatatggcgaagttcgtgatttttgcaaagatgaatgaccctcgcgaaggtagactgcggtgctactgcatgacggatgacaaagtcgataaaacactggagcagcatgaaaacttcgtggaagttgccaggtccagagatatagaggtgctggaggggatgtctttgtttgctgagctcagtggtaacctagttcccgtcaaaaaggctgcccagcagaggagtttccacttccagtcttttcgtgagaaccgattggccatgcccgtcaaagtacgggatagctcccgtgaaccaggtggctcattgagtttcttgagaaaggccatgaagtatgaggatacacaacatatactatgtcatctgaacatcaccatgcctccgtgtgccaagggatctggggctgaagatcgtagaaggacaccaactccccttgccctcaggtattcgatcctcagtgagagcacaccaggcagcctgtctgggaccgagcaggcagaaatgaaaatggccgtaatcagcgagcacctcggcctttcctgggcagagttggcccgtgaactccagttttccgttgaggatataaatcgaatccgagtggagaaccccaacagcctcctggagcagtccgtggcgctgctcaatctgtgggtcatacgtgagggacagaatgcaaacatggaaaacctgtacaccgcactgcagtctatagaccgcggagagatcgtgaacatgctggaaggctcagggcgtcagtcaagaaatctgaagccagaccgcagacacaccgatagagattactcactatccccctctcagatgaacgggtattccagcctgcaagatgaactgctctctcctgcctccctagggtgtgccctatctagcccactgagagcagatcagtattggaacgaagtcgcggttcttgacgctattccccttgccgctaccgaacacgacactatgctggagatgtcagacatgcaggtatggtcagccgggctcactcccagtctcgtaacggccgaggactcatccctggaatgctctaaggctgaagattccgatgccacgggtcacgaatggaagctggagggagccctgtccgaagagcctcgtggacccgagctgggcagtctggagctagtagaagatgacaccgtggactccgatgctactaacggccttatcgacctactggagcaagaagagggccagcggtccgaagagaagctgccgggctcaaagagacaggatgatgcaacgggcgccgggcaggactcagaaaacgaggtgagcctcgtgagcgggcatcaacgaggacaggcccgaattacacactcccctactgtatctcaggtgacagaacgttctcaggaccgcttacaggattgggatgccgatgggtcaatcgtttcatatcttcaggacgccgcgcagggttcttggcaggaagaggtcactcaagggccgcacagctttcagggtacctcgacaatgacagagggtctggagcctggcggcagtcaagagtacgaaaaagtcctggttagcgtgtcagagcatacatggaccgaacagccagaagctgagtcctcccaggccgatagggatagaaggcaacaaggacaggaagagcaggtgcaggaagctaagaataccttcacgcaagtggtccaaggaaatgagttccagaatatccccggtgaacaggtcacagaggaacagttcaccgatgaacagggaaacattgtcaccaagaaaatcattcgcaaggtggttcgacagatagatctatcatcagctgatgccgcccaggaacacgaagaggtagaactacgcggctctggtctgcagccagacctgatcgagggacgcaaaggggcccagattgtgaagagagcgagtctcaaacgcggcaaacaatag

SEQ ID NO: 108204 - DNA, 468 bp, synthetic construct
  misc_feature 1..468: note = Description of Artificial Sequence: Synthetic coding sequence
  source 1..468: mol_type = other DNA
atgtggacatttgtgacacaactgctcgtgactcttgtgctcctatctttcttcctggtctcttgtcaaaatgtcatgcacattgttaggggctctctgtgcttcgtgctgaaacatattcaccaggaactcgataaagaacttggtgaatctgagggtcttagcgacgatgaagaaacaatttccacacgagtagtcagacgtcgggtgttcttaaaaggtaatgaatttcaaaacattcccggagagcaagtaacagaggagcaattcaccgacgagcagggcaatattgttaccaagaagatcataaggaaagtagttcgacagattgacctgtcctctgcagatgcagcccaggaacacgaggaagtggagcttagaggatcaggcttgcagcctgaccttattgagggcaggaagggcgcccagatcgtgaaacgcgctagcctgaagcggggtaagcagtag

SEQ ID NO: 108205 - DNA, 5646 bp, synthetic construct
  misc_feature 1..5646: note = Description of Artificial Sequence: Synthetic coding sequence
  source 1..5646: mol_type = other DNA
atgccttatagcgttggttttcgagaagcggacgcggccacttctttcctacgtgccgccaggagcgggaatctcgacaaggcactagaccacctacgcaacggcgtagatattaacacatgcaaccagaatggattgaacggtttgcacctggcaagcaaagagggacacgtgaaaatggttgtggaactcctacacaaggagatcattctcgaaactaccacaaagaagggtaacacagccctgcacattgccgctctggccggccaggacgaagttgtacgtgagctagtgaactatggcgctaatgtcaacgcccaaagccagaagggctttactccactttacatggcagctcaggagaaccacctggaagtcgtgaagtttctgttggagaatggtgctaatcagaatgttgcaactgaggacggatttactccactggccgtggcgctccagcaggggcatgagaacgtggtggcacacttgattaactacggcacgaaaggcaaggtaagactgcctgcattgcatattgccgccaggaatgacgatacccggactgctgctgtgcttctccagaacgaccccaatccggacgttttgagtaaaaccggcttcacacctctacatatcgcagcccattatgaaaatctgaacgtagctcaattgctattgaaccgcggggccagtgtcaattttaccccccagaatggcattacacccctgcatattgcctcacgaagaggaaacgttataatggttagactgttattggaccgaggtgcgcagattgagactaagaccaaagacgaacttacaccattacactgcgcagcacggaatgggcacgtgcggatatctgagattctgcttgatcacggcgctcctatccaggcaaagacgaagaatggcctgtctcctatccatatggccgcacagggcgatcacctcgattgtgtgcggctgctgttgcaatacgatgccgagatcgacgacattacacttgaccatctcacacctctgcacgtagccgcgcactgtggccaccatcgggttgctaaggttctgttagacaagggagcaaagcctaactcccgcgccttaaacggctttaccccactccatattgcatgtaaaaaaaatcacgtacgcgtcatggaactgctgcttaagaccggcgcctccattgacgctgtgaccgagtcagggctgacaccccttcatgtggcgagttttatggggcacctgcctattgtaaagaacttgctccaacggggggcgagcccaaacgtatcaaatgtgaaggtggagactcctctgcatatggctgcccgggctggacatacggaggtggctaaatatctgctccagaacaaggccaaggtgaatgctaaggccaaagatgaccagacacctctccactgcgctgcccgcattgggcacacaaatatggtaaaactgcttctggagaacaatgcaaatccaaatttggccactacagcaggtcacacccctctacatatcgcagccagggagggccacgtcgaaaccgtgttagccctgctcgagaaggaggcctctcaggcctgcatgaccaagaaagggttcactccactgcatgttgctgcaaaatacggaaaagtgagagtggctgagcttctccttgagcgcgacgctcacccgaatgcagcagggaaaaacggcctaactccgttgcatgtggccgtgcaccacaacaaccttgatatcgtgaaattgctactgcctcggggtgggagcccacactcacctgcatggaacggatataccccccttcacatcgccgcgaaacagaaccaagtcgaggttgctcgatctcttcttcagtatggcggatccgccaacgctgagtccgtgcagggcgtgaccccattgcatctggctgcccaggagggccacgccgagatggttgctctgttgttaagtaaacaggctaatggcaacctgggaaataagtccggcctgacacccctgcaccttgttgcacaggaagggcatgtacccgtggccgacgtcctgataaagcatggcgtcatggtcgacgccacgacacgaatgggctatacaccattgcatgtggcgagccattacggtaatatcaagctcgtcaagttcctgttgcagcaccaggcagatgtcaatgctaaaacaaaactggggtacagcccactgcaccaggcagcacaacaaggacacacagacattgttacgctcttactaaagaacggtgcgtctcccaacgaagtaagcagcgacgggacaacccccttagctattgcgaaaaggctcggctatatctctgtcactgacgtgttgaaagtggtcacggacgagacctcatttgtactggtgagcgacaagcaccgcatgtcctttcccgaaacagtggatgagatacttgatgtctccgaggacgagggtgaggagctgattagtttcaaagccgagaggcgcgatagcagagatgtcgatgaagagaaagaattgctagattttgttcccaagttggatcaagttgttgagagtcccgccatcccgagaatcccttgcgctatgccggaaaccgttgtaataaggtctgaggaacaagagcaggcttctaaagagtacgacgaagactctctgattccttcttcccctgctaccgagacttccgacaacatatccccagttgctagtccagtccataccggctttttggtcagctttatggttgacgccagaggcggctctatgagaggtagcaggcacaatggactgagagtcgttatccccccgcggacttgtgccgcccccacgcgaatcacctgccgcctggtgaaacctcagaaactgtcaactccaccacccctcgctgaagaagaaggattggcctcacgcatcattgctctgggccccaccggagctcaattcctctccccggttatcgtggaaattcctcacttcgcttcacatggtagaggtgacagagagcttgtagtgctgcggtccgaaaacggatcggtttggaaagaacacagatcgagatacggagaatcttacttagatcaaatcctgaacggcatggacgaggaattgggctctctcgaggagttagagaaaaaaagagtgtgtcggatcattaccactgattttccattgtactttgtcattatgagccgcctctgtcaagactatgacacaattggtcccgaaggtggctcactcaagtctaaattggtccctttagttcaggccacgtttcccgaaaacgccgttacgaagagggttaaattggccctccaggcccagcccgtgcccgacgaactggttacaaaattgttaggaaaccaggcaaccttctcgcctatagtgactgtggaaccccgtcggaggaagtttcatagaccaatcggattgaggatcccactgcctccgagctggactgacaatccgagggactccggcgagggagatacaacatcattgcgcctgttatgcagcgtcatcggcggaaccgatcaggcccaatgggaagacatcacgggcacaacaaagctggtttacgccaacgaatgtgcgaacttcacaaccaatgtttcagccagattctggttgtctgattgcccccgaactgccgaggctgtcaactttgctacactgctgtacaaggagctgacggcagtgccttacatggctaaatttgtgatattcgccaaaatgaacgaccctagggagggtaggctgcgatgctactgtatgactgacgataaggtggacaagactttggagcagcatgagaattttgtcgaagtagcacggtcacgcgatatcgaagtcctcgaaggaatgtccctgttcgccgagctctctggcaatctagtaccggtaaagaaggctgcacagcagcggtctttccactttcaaagttttcgtgaaaaccgactcgctatgccagttaaggtgcgggactccagccgggagccgggcgggagtctgtcttttctccggaaggctatgaaatatgaagatacccagcacattttgtgccacttgaatattaccatgccgccttgcgccaaggggtcaggcgccgaagaccgcagacggactcccacgccactggccctgcggtactccatcctctcagaaagtacgcccggttccctgagcggcaccgagcaggccgaaatgaagatggccgtaatctctgaacacctggggctcagctgggccgagctggcacgggagttacagttttccgttgaagatatcaacagaatccgagttgaaaaccctaattctttgctggaacagtccgttgcattgctgaatctgtgggtcattcgggagggtcagaacgccaatatggaaaatctttacacagcgttgcagagcatcgacagaggcgaaatcgtgaacatgctggagggcagcgggcggcaatccaggaaccttaaacctgacaggaggcacactgatcgcgattatagtctgagcccttcccagatgaacggttattcatctcttcaagacgaactgctgtctcctgccagcttgggatgtgcccttagcagcccgttacgcgccgaccagtactggaacgaggtggccgtgctcgacgccataccactcgccgcaaccgagcatgatactatgcttgagatgtccgacatgcaggtctggtctgcgggactgactccgtctttggttacagcagaagattctagccttgagtgcagcaaggctgaggactcggacgcgaccggtcatgagtggaaactggagggagcactgagtgaggaacctcgaggacccgagctgggaagtctggagctggtcgaggacgataccgtggatagcgatgccactaacggccttattgacttactcgagcaggaggagggacagcgaagcgaggaaaagttacctggctctaaacgacaggacgatgccacgggagcgggtcaggacagcgagaacgaggtgtcactcgtgtccggacatcaacgaggccaggctcgtatcacacattcccccacagtcagccaggtcacagagcgatcacaggaccggctgcaggactgggacgctgacggatcaatcgtttcctatctacaggacgctgcccagggttcttggcaagaagaagtcacacagggaccccatagctttcaaggtacaagcacaatgacagaaggactagagccaggcggctcccaggaatacgaaaaggtcttggtttctgtctcggaacacacatggaccgaacagcctgaagcagaatcttcacaggcggatcgcgaccgcaggcagcagggtcaggaggagcaggtgcaggaggcaaaaaacaccttcacccaagtggtgcaggggaacgaattccagaacatccccggtgaacaagtcacagaagagcagttcaccgacgagcagggaaacattgtaacaaagaaaattatccgtaaagtggtgagacagatcgatctgtcatccgccgacgccgctcaggaacacgaagaggtgacagttgagggtccattggaggatccatcagagctggaagttgacatcgattattttatgaaacacagcaaggaccacaccagcaccccgaatccttag

SEQ ID NO: 108206 - DNA, 330 bp, synthetic construct
  misc_feature 1..330: note = Description of Artificial Sequence: Synthetic coding sequence
  source 1..330: mol_type = other DNA
atgtggacatttgtaactcagctgctggtgaccctggttctactgtcattctttctggtatcctgccagaacgtaatgcacattgtgaggggtagtctgtgctttgtattgaagcacatccaccaggagctagacaaggagctcggggaatctgagggtctttccgacgatgaggaaacgattagcaccagagtggtgcgtcggagagtgttcctgaaaggcaacgaattccagaacatcccaggcgagcaggtcactgaggagcaattcaccgacgaacagggcaatatcgtgacaaaaaaagaccacacatccacccccaacccttag

SEQ ID NO: 108207 - DNA, 5577 bp, synthetic construct
  misc_feature 1..5577: note = Description of Artificial Sequence: Synthetic coding sequence
  source 1..5577: mol_type = other DNA
atgccatactcggttggattccgcgaggctgacgccgctactagctttctgagagcggcccgcagtgggaacttggataaagccttggaccatttgcggaatggcgtagacatcaacacttgcaatcagaacgggctgaacggactgcatctggctagtaaggagggacatgtcaagatggtcgtggaactcctacacaaagagatcatccttgaaactacgacgaagaagggaaataccgctcttcatatagctgcgctggcaggacaggacgaagtggtcagggagttggtcaactacggagccaacgtgaatgcacagtcccaaaagggcttcactccactgtatatggcagcccaggagaatcatcttgaggttgtgaaattcctactcgaaaacggagcaaaccaaaatgtggccactgaggacggttttactccactcgctgttgcactccagcagggccatgagaacgtggttgcccacctgatcaattacggcacgaaaggcaaggtccggctgccagccttgcacatcgccgccagaaatgacgacacgcggacagcggcggtattgctccagaatgatccaaacccagatgttctatccaagacaggcttcaccccactgcacattgccgcacactatgaaaacctaaacgttgctcagctgttgctcaaccggggagctagtgtgaatttcacaccacaaaacggaattactcccctgcacatcgctagccggagaggcaacgtgataatggttagactactgttggatcggggagctcagatagagacaaagaccaaagatgagctgacacctctgcactgtgcagctagaaacggacatgttagaatttcagagattctgctggatcatggagctcccattcaggctaaaactaagaacgggctgtcaccaattcacatggctgcccagggggatcatttagattgcgtgcgtctcctcttgcagtacgacgcggagatagacgacataacactggatcacctgacccccctgcacgtggccgcccattgcggccaccatcgagtcgccaaggttttgttggataagggagcaaagcctaacagcagagctctcaacggattcacaccactccacatcgcctgtaagaaaaaccacgttagggtgatggaactgctcctgaaaactggagccagtatagatgctgtcaccgaatcggggctgactccactccacgttgcctcatttatgggccatctccctatcgttaaaaacctgctgcagagaggggcttccccaaacgtctccaatgttaaagtggagacgcccttacacatggctgctagggccggacatactgaagtggccaagtacctgctccaaaataaagctaaagtcaatgcgaaagctaaagatgaccagacacctctccattgtgcggctaggatagggcatacaaacatggttaaattactcctggagaacaatgccaatcctaacctggctacgaccgccggccataccccacttcacattgccgcccgtgagggccatgtggagactgttctggccctgttggagaaggaagcctcacaggcatgtatgaccaaaaagggttttacgcccctgcatgtggcagcaaagtacggaaaagtccgggtggctgagttgctattggagcgtgacgctcatccgaacgccgcgggaaagaatgggctcacacctctccatgtggcggtgcaccacaacaatttggacattgtgaaactgctcctcccccgaggtggctctccacacagcccggcttggaatgggtatacgcctctacacatagctgcaaagcagaatcaggtggaggtggcccgttcactactgcagtatggaggctctgccaacgccgaatctgttcaaggagttacacctctgcatctcgccgcacaggaaggccatgccgagatggtcgccttgctgctgtccaaacaagcaaatggaaacctgggcaataaaagcggactgaccccacttcaccttgtggcacaagaaggacatgtgcccgtcgctgacgttctgattaaacatggcgttatggtggatgcaacaacgagaatgggatataccccattacacgttgcatctcattatggcaatattaaacttgtgaaatttttgctgcagcaccaggcagatgtgaatgccaagaccaagttaggctattctcccttgcatcaggcagcacagcagggacataccgatatcgtgaccttgctacttaaaaacggagccagcccgaatgaggtctctagcgacgggaccaccccactggctatcgcaaagaggctgggctacatctccgtcacagatgtgctgaaggtcgtaaccgacgaaacatcgttcgtactggtcagtgataagcatcggatgtccttccccgaaaccgtcgacgagatcttagacgtaagtgaggatgagggcgaagagctgataagtttcaaggctgaaagaagagatagcagagatgtagacgaggaaaaagagctcttggacttcgtccctaagctagatcaggtggtggaaagccctgcaattccaagaatcccatgtgccatgcccgaaaccgttgtgattcggtcagaggaacaggagcaggcctcgaaagaatacgatgaggatagtttgattccatcgagccccgctaccgaaacaagtgataacatatcccctgtggctagccccgtgcacacagggttcctggtgagcttcatggtggatgcaaggggcggcagtatgaggggctctaggcataacggactgcgcgtcgtcatacccccccggacctgcgcggcgcccacacgtattacctgtaggctggtaaagcctcagaaactgtcaactcctccccctttggctgaagaagaagggctggcatcacgcataatagcccttggccctacgggagcacagtttttatctcccgtgatagtagaaattccacactttgcaagtcacgggcggggcgacagagagttggtggtgttaagatccgaaaatgggtctgtgtggaaggagcaccggtctcggtatggggagagctatctggatcagatattgaacggcatggacgaggaactgggtagtctcgaggagctggagaaaaaacgggtgtgtcgcatcattacaacggatttcccactatattttgtgatcatgagcagattatgtcaggattatgacaccatcggccctgagggtggatctcttaaatccaagctggtcccactcgtccaagccactttcccagagaacgccgtcacgaaacgggtgaagcttgccctgcaggcacaacccgtgcctgacgaactggtcactaagctgcttgggaaccaggccacgttctcccccattgtcactgtggagcctcggcggcgcaagttccataggccaatcgggctcaggattccacttcccccgtcttggaccgataatcctcgggacagtggggaaggtgatactaccagcctgcgactgttgtgcagcgtcattggaggtactgatcaggctcagtgggaagacataacagggacaaccaaattagtttatgcaaatgagtgtgctaatttcactactaatgtgtccgcaaggttttggctgagcgactgcccgcgcactgctgaagcagtgaacttcgcaactctcctttataaggaattaaccgcagtcccttatatggccaagtttgtcatttttgctaagatgaacgatccgcgcgaagggcgcttgcggtgctactgtatgactgatgataaggtggacaaaaccctggagcaacatgaaaactttgtggaggtggcacggtctagagacatcgaggttctggagggcatgagcctctttgctgagctgtccgggaaccttgtgccagtgaaaaaggctgcccaacagcgctcctttcacttccagtccttccgggagaatcgactggccatgcctgtaaaggtaagagatagctcgcgtgagccagggggttctctgtccttccttcggaaagccatgaagtatgaagatacacaacacattctgtgtcatctgaatattactatgccaccttgcgccaaaggatccggagccgaagaccgccggaggacccctacacctctggcactgaggtattccatcctgagtgagagcaccccggggagccttagcggtactgagcaggccgaaatgaagatggccgtgatcagcgagcacctgggcctgagctgggccgaactggcgcgtgagctgcagtttagcgttgaggacatcaaccgtatccgggtggaaaatcctaatagcctcctggagcaaagtgtggcgttgctgaatctgtgggttattcgagaaggtcaaaacgccaacatggagaatctttacactgctcttcagtctatcgacaggggagaaatcgtcaacatgctcgaagggtccggacgccagtcacggaacctcaaacccgaccggagacatactgacagagattactcgctatcaccgagccaaatgaacgggtactcctcactccaagatgaactgctatcacctgcgagcctagggtgtgctctctccagccctcttcgagctgatcaatactggaacgaagtggctgtgctggatgctatccctttggctgccactgagcacgatacaatgctggagatgagtgacatgcaggtctggtctgctggattaacaccaagcctggtcactgccgaggattccagccttgagtgctccaaagccgaagattctgacgccaccgggcatgagtggaagcttgaaggcgcactgtccgaagaacctagaggcccagaattggggtctctggaacttgtcgaagacgacaccgtagacagcgatgcgaccaatggattaatcgacctcctcgagcaggaggaggggcaaagatcagaagaaaagctgcccgggagcaagaggcaggacgatgccacaggcgccgggcaggattccgaaaatgaggtttctttggtcagcggacatcagagaggccaggctcggattacgcacagcccaacagtttcacaggtgacggagcgatcccaggaccggctgcaggactgggacgctgatgggtcaatcgtgtcctacctccaggatgctgcccaaggctcatggcaagaagaagttacacagggcccccattccttccaggggactagcaccatgacagaaggccttgagccagggggaagccaggaatacgaaaaagtcctggtgtccgtgagtgaacacacctggaccgagcaacctgaggcagagtcatcccaagccgatcgcgaccggagacagcagggccaagaagagcaggtgcaggaggctaagaatacgtttacccaggtcgtgcagggaaacgaatttcaaaacatccccggagagcaggttacagaagaacaattcactgacgagcagggaaacatcgttacaaaaaaggttgaacttcggggtagcggattacagcctgatctgatagagggtcgcaaaggagcacagatagtcaaaagggcatcactcaaacgcgggaagcagtag

SEQ ID NO: 108208 - DNA, 4560 bp, synthetic construct
  misc_feature 1..4560: note = Description of Artificial Sequence: Synthetic coding sequence
  source 1..4560: mol_type = other DNA
atgccttactctgttggctttagggaggccgacgccgcgacttccttcctgagagctgcgaggtccggaaacctcgacaaggccctggaccatctgagaaacggcgtagatattaacacctgcaaccagaacggtctgaacggactgcacctcgccagtaaggaaggccacgttaaaatggtggtggagctgcttcataaggagatcatcctggagacaacaactaaaaagggtaatactgccttgcacatcgccgcacttgccggacaggacgaggtagtccgcgagctggtgaactacggcgctaacgtcaatgcacagagtcagaaggggttcacacccctctatatggcggcccaggaaaaccacctggaagtggtgaagttcctgctcgagaacggcgcaaaccagaacgtcgctacagaggatggctttacacctctggccgtcgccttgcaacagggccacgagaatgtagttgctcaccttattaactacgggacaaagggcaaagtgcggcttcctgcccttcatattgcagcccggaacgatgacacaaggacggcagccgtcctcctgcagaatgaccccaacccggatgtgctgagcaaaactggatttactcccctccatattgccgcgcattacgaaaatctcaatgtggctcagctgttgttaaatcgtggcgcaagcgttaacttcacaccgcagaacggaattacccccctgcacatagccagtagacggggcaacgtgatcatggtgaggcttttgttagatcgtggggcccagattgagacaaaaaccaaagatgaattgacacccctgcattgtgcggcccggaatggccacgtgaggatcagcgagattctgctggatcacggcgcacccattcaggccaaaaccaaaaacgggttgagccccatccacatggctgcgcaaggggaccatctagattgtgttaggctcctactgcaatacgatgcagagattgatgacatcactttggaccatttaaccccgttgcatgttgccgcacattgtggtcaccacagggttgccaaggtcctgctggataaaggagcaaaaccaaactctcgcgctctgaacggatttacgcctcttcatatcgcctgtaagaagaaccatgtcagagttatggagctcctcctcaagaccggcgctagcatcgatgcagttactgagagcggtctcactcccttacacgttgcaagctttatgggccatctgccaattgtcaaaaacctgctgcagcgcggtgcatccccaaacgtaagcaatgtgaaggtcgagactcccttgcacatggctgcccgcgcaggtcacactgaagttgcaaaatatctgttgcaaaacaaagccaaggtcaacgcgaaggcaaaagacgatcagacccccctccactgtgccgctaggattggacacacaaatatggtgaagctgctattggagaacaatgcaaacccaaatcttgctacgacagccggccatacgccgcttcacatagccgctagagaaggccacgtcgaaactgttctagccttgctggagaaggaagcatcacaggcatgcatgacgaaaaagggattcacacctctacacgttgcagcaaaatacgggaaggtgagagtcgccgagctactcttggagagggacgcgcaccccaatgccgccgggaagaatggtctgaccccactgcacgtggccgtacaccacaacaaccttgacatagtcaagctgcttctcccgcggggaggttcacctcatagccctgcctggaacggctatacaccattgcacatagcggcgaaacagaatcaggtggaggtagcacggtcgctcctgcagtatggaggctcagccaacgctgaatctgtccagggggtgactccgttgcatctggccgcgcaagaggggcatgccgagatggtcgctcttctgctctctaagcaagctaatggtaacctaggcaacaaatccgggttgactcccctgcatctggtggcacaggagggccacgtccccgtggcagacgtcctgatcaaacatggggtgatggtcgacgcgaccacacgcatgggctatacccctctccatgtcgcttcacattatggtaatattaagctcgtaaaatttctgctgcagcaccaggccgacgtaaacgccaagacgaagctggggtacagccccctgcaccaggccgcccagcaagggcacaccgatatagtgacccttttactgaaaaacggagcttcacccaatgaagtatcaagcgatggaactacccctctggccatagccaaaagattggggtatattagtgtcacagatgtacttaaagttgtaacagacgagacgtccttcgtccttgtgagtgacaagcatcgcatgtcctttccagaaacagtggacgaaattttagatgtatcggaggacgagggagaggagctcatctcgttcaaagcagagcgcagggactctagggatgtggacgaagaaaaggagcttctggatttcgtcccaaagctcgaccaagtggtggaatctccagcaatcccgcgaattccctgtgctatgcctgaaactgtggtaatccgctcagaggagcaggagcaggctagcaaggaatacgatgaggatagtctcattccctctagtccagctacagagacctccgacaatatcagccccgttgcgtcccctgtccatacaggttttttagtttctttcatggtggacgcccggggtgggtctatgcgtgggtcaaggcataacgggcttcgcgtggttataccccccagaacctgcgctgcccccaccagaatcacctgcagacttgttaaaccacagaagctgagcacacccccaccccttgccgaagaagagggtctcgcctctaggatcattgctctcggaccaacaggagcccaattcttatcccctgtcattgttgagattccccactttgcttctcacgggaggggggatcgcgagcttgtggtgttaagatcagaaaatggtagtgtgtggaaagaacacaggagccgttacggagagtcctatctggaccaaatcctaaatgggatggacgaggaactcggaagtctggaagagctcgaaaagaagagagtgtgcagaattattacaacagattttcctctgtactttgtgattatgtccaggctttgccaagattacgacaccattggtcccgagggcggatccttgaaatccaaactggtgccgttagtgcaagctacattcccagagaacgcagtcactaagagggtgaagctggccttacaagctcagcccgtacccgacgaattggttactaagttgctcggtaaccaggcgacgttctcacccatcgtcaccgtggagcctagacgacgtaagtttcatcggccaattgggctgaggatccctctgcccccctcatggaccgataaccccagagacagcggggagggcgatactacatcactacgcttgctgtgcagcgtaatagggggtactgatcaggcccaatgggaggatataaccggcacaacgaaactggtctacgccaacgagtgtgctaacttcaccacaaatgtgagcgcgcgtttctggctgagcgattgcccgagaacagcagaggcagtaaacttcgctactctcctgtacaaagaactgacagctgtgccctacatggcaaagttcgtgatcttcgctaaaatgaacgatccccgggaggggcgacttcgctgctattgcatgaccgatgataaagtcgataaaacactggaacagcatgagaactttgtagaggtagcaagaagtcgggatatcgaggtgctcgagggcatgtctctcttcgctgagttaagtgggaacctcgtgccggtcaaaaaagccgcccagcagcgctcattccactttcaatcctttcgcgaaaatcgcctggcaatgcctgtcaaagtcagggactcctcaagagaacctggtggtagcctatcctttctgagaaaggcaatgaagtacgaagatacgcagcatatactctgccacctgaacatcacaatgcccccttgcgctaagggttcaggagcagaagataggcggaggaccccaacgcctctggctttgcgctactccattctgagcgagtccacccccggatcactgtctggaaccgaacaggctgaaatgaagatggctgtgatttcagagcacctgggattgtcctgggctgaactggcacgagaactacagttctccgtggaagatattaaccggatcagagttgagaaccccaattctctcctagagcagtcggtcgctcttctgaacctctgggtgatcagggagggccagaatgctaatatggaaaatctttacactgccctgcagagcatcgatcggggcgaaatcgtgaatatgctggaaggcagtggacggcaaagccggaaccttaagccagaccgtagacacacagaccgcgattattccctgagtcccagtcagatgaatgggatttccacgaacaacccttag

SEQ ID NO: 108209 - DNA, 5505 bp, synthetic construct
  misc_feature 1..5505: note = Description of Artificial Sequence: Synthetic coding sequence
  source 1..5505: mol_type = other DNA
atgccatactcagtgggattcagggaggccgatgctgccacgtcgtttctgcgagcagctcggagtggaaacttggataaggccttagaccatctgcgcaacggcgttgatattaacacctgtaatcagaatgggcttaacgggttacatcttgctagtaaagaaggacacgttaaaatggtcgtggaactgctgcataaggagattatactggaaacaaccactaagaaggggaataccgcgctgcacattgctgccctcgcaggccaagatgaggtagtgagggagttagtcaattacggtgctaatgtcaacgctcagagccaaaaaggattcacaccactatacatggccgctcaggaaaaccacctggaggtggtcaagtttctgctggaaaacggagccaatcagaatgtggctacggaagacggctttacgccccttgccgttgccttgcaacaaggccacgaaaacgttgtggcccatctgattaactacggcactaagggaaaagtgcggctgcctgcgctccacatcgccgccagaaacgatgacaccagaacagccgccgtcctgctacagaacgatcctaatcctgatgtgctgtccaagaccggatttacccctttgcatatcgccgcccactatgaaaatctgaacgtagcccagttgttattgaacagaggtgcctccgttaacttcacccctcagaacggcataacccccctccacatagcaagccgtcgaggcaacgtgattatggtgagactgcttctcgacagaggtgcccagatcgagactaaaacgaaggacgaactgacccccctgcattgcgctgcacgaaatggacacgtgaggatttctgaaatcctcctagatcatggagccccaatccaggccaagacaaagaatggcctaagtcctatccacatggctgctcagggggaccacttggactgcgtgaggcttctgctgcaatatgatgcagagattgatgacattacccttgatcacctaacacccctgcacgtggctgcccattgtgggcaccatcgtgtggccaaggttctgctcgataagggcgctaagccaaactctcgggcactgaacggcttcacaccccttcatattgcttgcaaaaagaatcacgtgagggtcatggaactgttgctgaaaacgggggcttcaatcgatgcggtgactgagtctggtctgactccactgcatgtagccagctttatgggtcacctgcccattgtgaaaaacctcttgcagcggggggcctccccaaacgtctctaatgtgaaggtagagacgccattacatatggccgcacgggccgggcacaccgaagtagccaagtatctccttcaaaacaaggccaaggtgaatgctaaggctaaagatgatcaaactcccctgcattgcgccgctagaatcggacatacgaatatggtgaagttgctgcttgaaaataacgctaatcccaatctggcaactacagccgggcacaccccactgcatatcgcagctcgggaaggccatgttgagaccgtcttagcccttctggaaaaagaagctagccaggcatgtatgactaaaaagggctttaccccgcttcacgttgccgcgaagtatggaaaggttagagttgcggagctgcttctggaaagagacgctcatcccaacgctgcagggaagaacgggctcactccccttcatgtggccgttcatcataataacctcgatattgttaaattgcttctgcccaggggtggcagtccacactctcctgcatggaatggatacacaccacttcacattgccgcaaagcagaaccaggtcgaagtggccagatctcttcttcagtatggtggctctgctaatgctgagtccgtccagggggtcactccactgcacctcgccgcacaggaggggcatgccgaaatggttgctttactcttaagtaaacaggctaatggtaacctgggtaacaaaagcggcctaacccctctgcaccttgtggctcaagagggacacgtgccggttgccgatgtgctgatcaagcatggcgtgatggtggatgctaccacccggatgggctatacccccctgcacgtcgcttctcactatggcaacattaaactggtcaaatttctgttgcagcatcaggccgatgtaaacgcaaaaacaaagctgggctatagtcctttgcaccaagctgcacagcagggccatactgatatcgtgacgctacttttaaaaaatggagctagtcccaacgaggtctcttcagatggtaccacacccctcgcaattgctaaacgactcggctatatttccgtcaccgatgtgctaaaggtggtgacggacgagacaagttttgtcttagtgtccgacaaacaccgaatgtccttcccagagaccgtggatgaaatcctggacgtgagcgaggacgaaggcgaggagctgatatccttcaaggctgagaggcgggatagtagggatgttgacgaggagaaggagttgctggactttgttcctaaactagaccaggtcgtggagtcccctgcaatacctaggatcccatgcgccatgccagaaaccgtggtgatacgcagcgaggaacaagagcaggcgagcaaagaatacgatgaggactcactgataccctcttcacccgcaaccgagacttcagacaacatcagccctgtcgctagccccgtgcatacaggttttctggtgtcatttatggtggacgcccgcgggggaagcatgagagggagtcgtcacaatgggttgcgcgttgtcatcccaccacggacatgtgccgcacctactcggatcacttgtcgtttggtgaaaccacaaaaattgtctacacctccacccctggcagaagaggaaggactggcgagtcgcattatcgccttgggcccaacaggtgcccagttcctgagcccggtgatcgtagagatcccccacttcgcctctcacgggagaggcgacagggaactagtggtgcttagaagcgaaaatgggtctgtgtggaaggagcataggtctcgatacggcgaaagctaccttgatcagattctgaatggcatggatgaagagctaggaagtctagaggagcttgaaaagaaacgcgtatgcaggattattacaaccgacttccccctctattttgtaatcatgagccggctttgtcaggattatgatactataggccccgaaggcgggtctctcaagagtaagctggtgcccctcgtccaggccacgtttccggagaacgcagttacgaaacgtgtgaagcttgctttacaagctcaaccagtgccagacgaattagtcacaaagctgctcggtaatcaagcaaccttcagccctatagtgactgtagagccacgccgtcgcaagttccatcgccctattggactccgtatccctcttccccccagctggactgacaaccctagggacagcggcgaaggcgatactacatccctcaggttactgtgtagcgtgattggtgggactgatcaggctcagtgggaggatataaccggcaccacaaagctggtgtatgcgaacgaatgcgccaacttcaccacaaacgtctctgcccgattttggctgagtgactgcccccgcaccgctgaggccgtcaatttcgctactctgctgtataaggagttgactgccgtgccctacatggctaagtttgtgatctttgccaaaatgaacgaccctcgggaaggcagacttagatgctactgtatgaccgacgacaaggtggataaaaccttggagcaacacgaaaactttgtagaagtggcgcgatctcgtgatatcgaggtcttggaaggcatgagcttattcgctgagttatccggcaacttggtccctgtcaagaaggccgcccagcagagatcatttcatttccagtcctttagagagaacaggctcgccatgcctgtcaaggtgagagactcctctcgtgagccgggggggagcctgtcttttctgcgaaaggccatgaaatatgaggatacgcagcacattctctgtcacctcaatattacaatgcccccatgcgccaagggctccggagcagaagataggagacgaaccccaaccccactagccctcagatatagcattcttagcgaaagcactcctggtagtctttccggcacagagcaggccgagatgaaaatggccgtgatcagcgaacacctgggcctgtcctgggcggagctcgccagggagctccagttctccgtcgaggacattaaccggatacgggttgagaaccctaactcgctccttgagcagagtgtcgcgctgctgaatttgtgggtgatccgggaagggcagaatgccaatatggaaaatttgtacaccgcactgcagagcattgaccggggtgaaatcgtgaatatgctggagggtagtggacggcaatcacgaaacttaaagcctgatcgtcggcatacagatcgcgattatagtttatctcctagccagatgaacggatacagcagtctccaggacgagcttctttccccagcaagtcttggctgcgcacttagttccccgctgcgggctgatcaatactggaatgaggttgccgttttggacgcaattcctctcgccgcaactgaacacgatactatgctggagatgagtgatatgcaagtgtggagcgcaggcctaactccatcactcgtcacagcagaggatagctccctggagtgttccaaggccgaagattcagacgccaccggtcatgagtggaagctggagggggcactatccgaagaaccgcgggggcccgagcttggcagtctggaactcgtggaggacgatacagtggacagcgatgccactaacgggctcatagatctcttggagcaggaggagggacaacggtccgaggagaagctgcccggctcaaagagacaagatgacgcaacaggggccggacaggatagcgagaatgaagtgagccttgtgtctgggcaccagagaggccaagcccggattacccacagtcctacagtgagccaagttactgagagatctcaggatcggctgcaagactgggacgccgacggctccattgtatcctacctgcaagatgccgcccagggaagttggcaggaggaggtgacacaaggaccacacagcttccagggtactagcaccatgaccgagggactggaacccggaggctcacaggaatacgagaaggtgctcgtgtccgtgagtgaacatacgtggaccgagcaacccgaggccgaaagcagtcaggcagaccgggatcgtcggcaacagggccaagaggagcaggtgcaggaggcaaaaaataccttcacccaggtagtgcagggcaatgagttccagaatatccctggagagcaggtcaccgaggaacagtttactgatgaacagggaaacatcgtcaccaagaaggaccacactagtactcccaacccttag

SEQ ID NO: 108210 - DNA, 5718 bp, synthetic construct
  misc_feature 1..5718: note = Description of Artificial Sequence: Synthetic coding sequence
  source 1..5718: mol_type = other DNA
atgccctattccgtcgggtttagagaagctgatgcagcgacttcttttctccgggccgctaggtctgggaacttggacaaagccctggaccacctaagaaatggagtcgatattaacacgtgcaatcagaacgggctcaacgggcttcacctagcttctaaggagggtcatgtgaagatggtggtggagctactgcataaagagatcattctggagacgaccacgaaaaaggggaatacagccctgcacatcgctgctctggcaggtcaggacgaggtagtgagagagctcgttaattatggcgctaacgtgaatgcccaatcgcagaaaggcttcactcccctctacatggccgcacaggaaaaccacttggaagtggtaaaattcttacttgaaaatggtgcaaaccagaatgtggccactgaagacggcttcacacctctggcggtggcgctgcagcaggggcacgagaatgtggtggcgcatctcataaattatgggactaagggtaaggtcaggttgccagcactccacatcgcggcacgcaatgacgatactaggaccgccgctgtcctcttgcagaatgaccctaaccccgacgtcctttccaaaacaggcttcacccccttgcatatcgccgcgcactacgagaacctcaacgtcgcacagctgctcttaaatcggggtgcttcggtgaacttcaccccccagaatggcatcaccccactgcatatcgcttcccggaggggaaacgtgataatggtgcgactgttgctggaccgtggagcccagatcgaaaccaagacaaaagacgagctgacccctctccactgcgccgcgcgaaatggccacgtcaggatctctgagatacttctggaccatggcgccccaatccaggctaaaactaagaatgggctgagtcccatccatatggccgctcagggggaccatctcgattgtgtcaggttgttgttacagtatgatgccgaaattgatgatataaccttggatcacctcacacctctccatgtggctgctcactgcggtcaccacagggttgctaaagttctcctggacaagggggctaaaccaaactcaagagctctcaacggttttactcccctgcacatcgcctgcaagaagaatcacgtccgcgtgatggaactgctactcaaaacaggcgcttccatcgatgctgtgacagagtccggactgacacccctgcacgtcgccagtttcatgggtcacctgcctatcgtgaaaaacctgctccagaggggtgcttctccgaatgtttcaaatgtgaaagtcgagaccccattacacatggccgctagggcaggtcataccgaggtggccaagtacctcctgcaaaacaaggctaaggttaacgctaaggctaaagatgatcagacacccctgcattgcgctgcacgaattggacacacgaacatggtgaaactccttttggaaaacaacgccaaccctaatttggccacaactgccgggcacactccgcttcatatagctgcccgggaaggtcacgtcgagactgtgctggcccttttggagaaggaggccagtcaggcgtgtatgacaaaaaaggggtttacccctcttcatgtcgccgctaaatatggcaaagtccgggtggccgaattactgctcgagcgggacgcccatcctaacgccgccggtaagaatggtctgacaccgcttcatgtggctgtgcatcataacaatcttgacatcgtaaagctcctcctgcccagaggcggatcacctcacagtcctgcctggaacggttacacccccttacacatagctgccaagcagaatcaggttgaagtggcccggtcccttctccagtatggcggctcagctaacgccgagtccgttcagggggtgacacctcttcacctggccgcccaggaggggcatgcggagatggtggctctcctactttcgaaacaagctaacgggaatttaggaaataaaagcgggctgaccccactgcacctcgtggcccaggaaggccacgtgccagtggccgacgtcctgattaagcatggcgtaatggtcgacgcaacaacacgtatgggctatactcccctccatgtggccagccactatggcaacattaagctcgtgaagtttttactgcaacaccaggctgacgttaacgcaaaaacaaaactgggatacagccctctgcatcaggccgcacagcagggacacaccgatatcgtgaccctactgctgaagaatggcgcaagccctaatgaagtgtcgtcggatggcacaactcccctggcaattgcgaagcgtctcggatatatcagcgtcactgacgtactcaaagtcgtgaccgacgaaaccagctttgtgctggtgtccgataaacatcggatgtcatttccggagactgtggatgagattctggatgtgagtgaagacgaaggggaggagttgatcagcttcaaggctgagcggagagactcaagggatgtcgatgaagagaaggagctgctggactttgtgccaaagttggaccaggtagtcgaaagccccgccattccccgcatcccgtgtgcaatgcccgaaaccgtcgtgatccggtctgaagaacaggagcaagcctcaaaagagtatgatgaggactccctgatcccctcttcccctgcaaccgagacaagtgataacattagtccagttgcatctcctgttcacacgggcttcctagtgtccttcatggtcgatgccagagggggctcaatgcgaggcagcagacacaatggcctgcgggtagtgatcccaccccggacctgtgccgcccctacgaggattacgtgtcgtctcgtgaagccccagaagctgtccaccccaccccctctggccgaagaggaaggcctggcttccaggatcattgcactgggaccaacaggcgcccagtttctgtcaccagtgatcgtggagattccccactttgcttcacacggtagaggggaccgcgagttagtcgtgcttagatcagaaaacggatcagtttggaaagagcatcgtagtcggtatggcgagtcttacttagatcaaatcttgaatgggatggacgaagaactcggctccctcgaggagcttgaaaagaagcgggtctgtcgtataatcacgacggacttcccgctttatttcgtgatcatgtccaggctttgtcaggattacgataccatagggcccgagggcggaagccttaagtccaaactagtgccactggtccaggccacattccccgaaaatgcagtgaccaagagggtcaagttggccctccaagcccagccagtgccagacgagttggtaactaagctgttaggtaaccaagcaacgttttccccgatagtgaccgtggagcctcggaggagaaagttccatcgacccatcggcctgcggatccccctgcctccatcttggaccgataaccctagggacagtggtgaaggagataccacatcactgcgactgttatgttccgttataggcgggactgaccaggcgcagtgggaggatatcacagggaccacaaaacttgtctacgcaaatgagtgcgccaacttcacaaccaatgtttccgccaggttctggctctccgactgccctcgcacggctgaggcagtaaatttcgctacgctactgtataaggagttaaccgccgtcccttacatggccaagttcgtaatctttgctaagatgaacgaccctcgggagggtagacttcgctgttactgcatgaccgacgacaaagtggacaagaccctggagcaacacgaaaacttcgtcgaagttgccaggagtagagatattgaggtccttgaagggatgtccctcttcgccgaactcagcggcaacctggtgccagtgaagaaggccgctcagcaacgctctttccatttccaaagctttcgggagaatcgcctggctatgcctgtgaaagtacgggacagttcaagagaacccggcggcagcttgtcattcctgaggaaagcgatgaagtacgaagatacgcaacacatactgtgccatctgaacataactatgcctccctgtgccaaagggtctggagcagaagaccggagaaggaccccgacaccactggctcttcgatactccattctgagcgagagcacacctggaagcttgtcaggtacggaacaggctgagatgaagatggctgtgattagcgaacatttgggtcttagttgggctgagctggcgcgcgagttgcagttttctgtcgaggatatcaatcgaattcgtgtcgaaaaccctaattctctgctggagcagtctgttgccttgctgaacttatgggtaattagagagggacaaaacgctaacatggagaacctatacaccgcccttcagtcaattgatcggggcgaaatcgtgaacatgttagagggctcaggccgccagagtcgtaatctgaagcccgatcggcggcacaccgacagagattatagtctgtcccccagtcagatgaatggatattcctctttgcaggatgaactgctctcccctgcgagtttaggatgtgccctgagcagccctttacgtgctgatcaatactggaacgaggtggccgttctcgacgctattcccctcgcggctacagaacatgacactatgctggagatgtccgacatgcaagtgtggagtgcaggtctgacgccctccctggtcacagccgaggatagttctttagaatgctcaaaagccgaggattccgacgcaactgggcacgaatggaagctggaaggggcccttagcgaggagccgagggggccagaactggggagcctggagctcgtcgaagatgatactgtggactccgacgccaccaatgggctgattgacctcctcgagcaggaggagggccaacgcagtgaggagaaactgccaggatccaaacgccaggacgacgcaacaggagcaggccaggattccgagaatgaagtctcattggtgtccgggcaccagagaggccaggcaaggattacgcatagccccaccgttagccaggtgaccgagcggtctcaggaccgtctccaggattgggatgcggacggatcaattgtttcgtatttgcaggacgcggcccagggctcatggcaggaggaagtcacgcagggtccgcactctttccaggggacatctaccatgactgagggattggagccaggaggttcacaagagtacgaaaaagtccttgtctctgtttctgaacacacgtggaccgagcaaccggaggccgaatcttcccaggccgatcgcgacaggcgccagcaggggcaggaagagcaagtgcaggaggcaaaaaacacatttactcaggtggtgcaaggtaacgagtttcaaaacatcccgggggaacaggtgacagaggaacagttcacagacgagcagggtaatattgtaacgaaaaagattattcggaaagtcgtccgacagattgacctttcctctgccgatgctgcccaggagcacgaggaagtaaccgttgagggcccactggaggaccctagcgagctcgaagtcgatattgactacttcatgaaacatagcaaagtggagctcaggggttctggactacagccggacctgatcgagggacgcaagggtgctcagatagtaaaaagagcctccctgaagcggggcaagcaatag

SEQ ID NO: 108211 - DNA, 5421 bp, synthetic construct
  misc_feature 1..5421: note = Description of Artificial Sequence: Synthetic coding sequence
  source 1..5421: mol_type = other DNA
atgccctattctgttggcttccgggaagctgatgccgcaacgtccttccttagagcagctcgctccgggaatctggacaaagccctcgaccacttgcgaaacggggtggacatcaacacatgtaaccagaatggcctgaacggcctgcacttggcaagtaaagagggccacgtgaagatggtagtggagctgcttcataaggaaatcatactcgaaactacaactaagaagggtaataccgctcttcacatcgccgctctggctgggcaggacgaagtggtgagggagctggtcaactacggagccaatgtaaatgcgcaatcacagaaaggatttacccccctctatatggcggcccaggagaatcatttggaggtggtcaagtttctgttagaaaacggcgcgaatcagaacgtcgccaccgaggatggatttaccccattggcagtagccctgcagcaagggcacgaaaatgttgttgcccaccttattaactatggcacaaaaggtaaagtgagacttccggccctacatatagccgcgagaaatgatgacacccgcactgccgccgtactgctgcagaacgaccccaatccggatgtcttgtccaaaacaggatttactccactccatattgcagctcactacgagaatctgaatgtcgcacaattgttactaaataggggagctagcgtcaacttcactccacagaacggaataacgccgctccacatagctagtcgtagagggaatgtgatcatggtgcgcttactgctggacaggggagctcagatcgagactaaaactaaggatgagcttacgcccctgcactgtgccgcacggaatggccacgtgcggatcagcgaaatcctgctagaccacggggcacctattcaagcaaaaaccaaaaatggtctgagccccattcacatggctgcgcaaggggatcacctggactgtgtgcgattgctcctccagtatgatgccgagattgatgatattacactcgatcacctaacaccactacacgtggcagcccattgcgggcaccacagggttgccaaagtactcctggataagggcgctaaacctaattcacgggcgctcaatgggttcactcctcttcatatagcctgcaagaaaaatcatgtgcgagtgatggagttgctcttaaagaccggggcatctatagacgctgtaaccgaatccggcctcactcccctccacgtagcgagcttcatggggcacctcccgatagtgaagaatctgctccagagaggagccagcccaaatgtgtccaatgtgaaagtggaaactccccttcacatggccgcaagagctggtcatactgaggtggcaaagtacctgctgcagaataaggccaaggtgaatgccaaagccaaggatgatcagactcccctgcattgcgctgcccgaattgggcacactaacatggtcaagctcctgctggaaaataacgctaatcctaacctcgctaccacagctggacatactcccctgcatatagccgctcgggagggccacgtggaaaccgtcctcgctttgcttgagaaggaggcgtcgcaggcctgtatgaccaaaaaaggattcacaccactccacgtggctgcaaagtatggaaaggttcgggtcgccgagctactcctggagcgagatgcccatccaaatgcagccgggaaaaatggactcactccgctccacgtggccgtacatcataataacctggatattgtgaagttacttctgccaaggggggggtctcctcatagccccgcttggaacggatacacaccgctgcatatcgctgctaaacagaatcaggttgaggtggcccgctctctgcttcagtacgggggaagtgcaaatgcggagagtgtgcaaggagtaaccccactgcatttggcagcgcaagagggtcacgccgaaatggttgcactgctattgtctaagcaggcaaacggcaatttgggaaacaagtccgggttaacccccctccatctggttgcacaggagggacacgtcccagtggctgacgtactgatcaaacacggtgttatggtcgatgccacaacacggatgggctacacccccctccacgtggcaagccactatggtaatatcaaacttgtgaaattcctgctccagcatcaggccgacgtgaatgccaagacgaagcttggctactcccccttgcatcaggccgctcagcagggtcacactgacatagtgaccctgctcctgaagaacggggcctctccgaacgaagtttcctctgacggaacaactcctctggcaatcgctaagaggctcgggtatatatctgttactgacgttctgaaagttgtgactgacgagacatcattcgtgctcgtgagcgacaaacacagaatgagcttcccagagacagtcgatgaaattttggatgtgagtgaagacgaaggcgaagagctcatctcatttaaagccgaacgaagagactcccgtgacgtggacgaggaaaaagaattgctggactttgtgccgaagctggaccaggtcgtggagagcccagctataccccgcatcccatgcgcaatgccagagactgtagtgattcgaagcgaggagcaggagcaggctagcaaagaatatgatgaagattcactgattccatcatctcctgccacagaaacctctgacaatatctcacctgtggcttcgccagtgcacaccggcttcctcgtctccttcatggttgacgctcgcgggggcagtatgagggggtcacgacataacggtttgcgagtggtgatccctccacggacttgtgccgctccaactcggattacctgcagactggtgaaaccgcagaaactgtctaccccgcctcctctcgcggaggaagagggcctggcaagcaggatcattgcactgggtcccactggggctcagtttctgtcacccgtgattgtcgaaatacctcacttcgccagtcatggccggggggatagggagttggtggtcctgcgttctgaaaacgggagtgtgtggaaagagcacaggtctaggtatggtgagagctatctggatcagatcctgaatgggatggacgaggagctgggttcattggaggaattggaaaaaaagagggtctgtcggatcatcactacagacttccctctttatttcgtaatcatgtctaggttgtgtcaggactacgacacaattggcccagaagggggaagcctgaagtccaaactggtcccactggtgcaggccacctttcccgagaatgcagtgaccaagcgggtcaaactggctctgcaggctcagcctgtgccagatgaacttgtcacaaaattgctcggcaatcaagcaacattcagccctatagtcactgttgagccccgccgtaggaagttccatagacccatcggactccgcattcccctgcccccatcatggaccgataatcctcgagactcaggcgagggggatacaacatcattaaggttactgtgctccgtcattggcgggacggaccaagctcagtgggaggatatcactggaactacgaagctggtttacgctaatgaatgcgctaacttcacgaccaatgtctcagcccgcttctggctaagcgactgtccgaggacagctgaagccgtcaacttcgccaccctgctgtacaaagaactgactgcagttccatatatggctaaatttgtgatcttcgctaagatgaatgacccccgcgagggcagattacgttgttactgtatgaccgatgacaaggtcgacaaaacactggaacaacacgagaactttgtggaggtagctcgctcaagagacattgaggtcctggaggggatgagcctgttcgcagagctatccgggaacctggtgcctgtaaagaaagcagctcaacagcgcagcttccattttcagagttttcgggagaaccgtctcgctatgcccgttaaagtgagagacagttctcgagagcccgggggcagcctatctttcttacgcaaagccatgaagtatgaagatactcaacatattctttgtcacctgaatatcacaatgcccccttgcgctaagggaagtggggctgaagataggcgcagaactcctaccccccttgccttgagatattccattctctccgagtcgacgcccggctccctgagtggaactgaacaagcagagatgaaaatggctgttatcagtgagcatctgggactatcatgggccgaactggctcgcgagttacaattcagtgtagaggacatcaatagaatcagggtggaaaacccaaacagcctgctagaacagagcgttgccctccttaacctgtgggtcattcgcgaaggacagaatgccaacatggagaatttgtacactgccctgcagtctattgataggggagagatcgtgaacatgcttgagggctccggcagacagtctcgcaacctaaaaccagacagaagacacactgatcgggactattctttgtctccctcccagatgaacggatattcttcacttcaagacgagctcctgtccccagcatcactgggttgcgctctgagcagtcccctgcgggccgaccagtactggaacgaggtcgccgtgctggacgccatacctctggctgccacagagcacgataccatgctggaaatgtcagacatgcaggtctggtctgctgggctgaccccaagtttggtcaccgccgaggattcttctcttgagtgctcgaaagctgaggactctgatgcaaccgggcatgaatggaagcttgaaggagctctgagcgaggaaccccggggacccgagctcggctcactcgagttagtggaagatgacacggtagatagcgatgccaccaatggactgattgatcttctggagcaggaagaaggacagcggtccgaggagaagctgcccggttcaaaaagacaggatgacgccactggcgccggacaggattccgagaacgaggtgagcttggtatcaggccaccagcggggtcaagctcggatcacccacagcccgacagtgtcccaggtcaccgagaggagtcaggaccgactgcaagactgggatgctgatggaagcatcgtttcttaccttcaggacgcagcgcaggggagttggcaggaagaggtcacacaaggtccacactcattccagggcaccagcaccatgacggagggcctggaacccgggggctcccaagaatatgagaaagtgttggtgagcgtgagcgagcacacttggaccgagcaaccagaggccgagtcaagtcaggccgatcgggacagaaggcagcaggggcaggaggagcaggtccaggaagccaaaaacacttttacccaagtcgtacaagaccacacttctacccccaacccatag

SEQ ID NO: 108212 - DNA, 330 bp, synthetic construct
  misc_feature 1..330: note = Description of Artificial Sequence: Synthetic coding sequence
  source 1..330: mol_type = other DNA
atgtggacgttcgtaacacagttactagtgacactcgtgcttttatcttttttcctggtgagttgccagaacgtaatgcatatcgtcaggggttcgttatgtttcgtattgaaacatattcatcaagaattagacaaggaactcggcgagtccgaggggctgtccgatgatgaggagacaatttcaacgagagtggtgaggcgccgcgtctttttgaaagggaacgaatttcagaacattcccggcgaacaggtgacagaggaacagtttacagatgagcaggggaacattgtgactaaaaaggaccatacttctactcccaatccatag

SEQ ID NO: 108213 - DNA, 11775 bp, synthetic construct
  misc_feature 1..11775: note = Description of Artificial Sequence: Synthetic coding sequence
  source 1..11775: mol_type = other DNA
atgatgaacgaagacgccgcccaaaagtccgacagcggggaaaagttcaacgggtcatcgcaacgcaggaaacgacccaaaaagtccgactcaaatgcttcttttttgagggccgcacgcgcgggaaacctagacaaggtcgtcgagtacctaaaaggaggcatcgacatcaacacctgtaatcagaacggcctgaacgccttacacttggctgcaaaggaaggtcacgtagggttggtacaggagttactgggcaggggctccagcgttgactctgctacgaaaaaaggcaatacagctcttcatattgcctctctggctgggcaggcagaagtggtgaaggtcctggtgaaagaaggcgcgaatattaatgctcagagtcagaatggatttaccccgctctacatggccgctcaagagaaccatatcgacgtggtaaaatatttgctcgaaaatggagctaaccaatccaccgctactgaagacgggttcacacctcttgcggtagcccttcagcagggccacaatcaggccgtggctattctattagagaacgacacaaagggcaaagtgaggttgcccgcattacacatcgccgctcgaaaggacgacacaaagtcagccgctctacttctgcagaatgaccataacgccgatgtacagtctaaaatgatggtgaacagaacgactgagtcagggttcacccctttgcatattgccgcacactacgggaacgtgaatgttgcgactctcctgcttaacagaggcgccgcagtggactttaccgcaaggaacggcattacccctctgcacgtagccagtaagcgcggaaacaccaacatggtcaagttgctgctggacagagggggtcagattgatgctaaaaccagagatgggctgaccccactccactgcgccgctcggtctggacacgaccaggtcgtggagctcctgctcgagaggggtgcaccactgcttgcaagaactaagaatggactgtcacctctgcacatggcggcacagggggaccacgtggaatgtgttaagcacttgctgcagcacaaggcaccagttgacgatgtgacactagattaccttaccgcactccatgtggccgctcactgcgggcactaccgtgtgactaagcttctcctcgataagcgcgctaacccaaacgccagggcacttaacggatttaccccattgcatatcgcgtgtaaaaagaacaggatcaaagtaatggagcttttggtcaagtacggcgccagcattcaggctatcactgagagcggattgactcccattcacgtggcagcctttatgggacacttaaatatcgtcttgctcctgttgcagaacggagcttctccagatgtgaccaatattagaggagagacagccctgcacatggcagctagagcggggcaggtggaagtggtgcgatgcctactgcgaaacggggccctggtggacgcacgcgccagagaagagcagactcccctgcatattgcatcacgtctgggtaagacggagattgtgcagttgctgctgcagcatatggcacacccagatgcggcaaccactaacggctacactcccctccacatctctgctagagaagggcaggtggatgtggccagtgtccttctcgaagccggagcagctcactccctggccaccaaaaagggttttacacctctgcatgtggcagctaagtacggcagcctggatgtagctaagctattactgcagagacgagccgcagccgactcagccggcaaaaacggcctgactccattgcacgtcgctgcccactatgataaccagaaagtggcgctcctactgctggagaaaggggcgagtcctcatgcaaccgccaagaatggctacaccccactacacattgcagctaagaagaaccagatgcagatcgcctccacacttctcaattacggggctgaaactaatattgtcactaagcagggcgttacccctctgcatcttgctagccaggaaggacacaccgatatggtgacgctgctgcttgacaaaggtgctaacatccatatgtccactaaaagcggactgacctctctccacttggccgcacaggaggataaggtcaatgtggcagacatcctgacaaaacatggagccgaccaggatgcgcataccaagctaggctatacccccttgattgtggcttgtcattacgggaatgtcaagatggtcaacttccttctgaagcaaggggctaatgtcaacgcaaagaccaaaaacggctatacccctttgcaccaagcagcccagcaggggcatactcacattattaacgtgctgctgcagcatggcgcgaaacccaatgccacgaccgcaaatggcaacaccgcattagcgatcgcgaaaagactcgggtacatttccgtggtagacaccctgaaggtggtgacagaggaggtgaccactacaacgaccacaatcacagagaaacacaaattgaatgtccccgagacaatgacagaggtgctcgacgtcagcgatgaggaaggagacgatacaatgacaggcgatggtggcgagtatctgcgccctgaggatttgaaggagctgggcgacgacagcctcccaagcagccagttccttgatggcatgaattacctccggtacagcttagaaggcggaaggagcgactccttgagatctttctcctctgacaggtctcacacacttagccatgcttcttacttgcgtgactctgctgtgatggacgactctgtagtgataccatcacaccaggtgtcaaccttagccaaagaggccgaaaggaactcctatcgcctgtcctggggcacagagaacctggataatgtggccctgagcagcagtcctatccactctgggttcttagtgtcgttcatggtggatgctcggggcggcgcgatgcgcgggtgccggcacaatggccttcgcataatcatccctcctcggaaatgcactgccccgacgagagttacctgtcggctggtcaagaggcacaggctcgccaccatgcctccgatggtagagggagagggacttgctagccggttgatagaagtcggtccatctggggctcaattcttgggaccggttatagtggaaatcccccacttcgcagcgctgagggggaaagagagggagctggtggttctccgaagtgagaacggcgacagttggaaggaacatttttgtgactacactgaggatgagctaaatgagatactgaatggcatggatgaagtgctggatagtcctgaggacttggagaaaaaaaggatttgccgcattatcactcgcgatttcccgcagtatttcgcggtggtcagtcgcataaaacaagacagtaacttaatcggccctgagggaggcgtactaagttccacagtggtaccacaggtccaagccgtgttccctgagggcgctttgacaaaaaggatccgggtcgggctgcaggcccaaccaatgcacagtgaactcgtaaagaaaattctcggcaacaaggcgacgtttagccctattgttacactcgaaccacgtagacgcaaatttcacaaacccattaccatgacgatcccagttcccaaggcttctagcgacgtgatgcttaacggctttgggggggatgcccccaccttgagattgctgtgttcgatcactgggggcaccaccccagcccagtgggaggatatcacaggcacaacacccctgacattcgtgaacgagtgtgtaagttttaccaccaatgtgagcgctagattttggctgattgactgcaggcagatccaggaatcagtaacattcgcctcacaggtatatcgtgaaatcatctgcgtaccgtatatggccaaattcgtcgtattcgccaagtcgcacgaccctatagaagcgcgcctaagatgcttctgcatgaccgatgacaaggtggataaaactctcgagcagcaggaaaattttgctgaggtcgccaggtcccgggacgtggaagtattggaaggaaagccgatttatgtggactgctttgggaacctagtgcctctgacaaaaagcgggcagcatcatatctttagtttctttgcctttaaggagaaccgcctcccattattcgtcaaggttagggataccacccaggaaccctgcggtcgtctaagttttatgaaggagcctaagtccaccaggggactcgtgcatcaggcaatctgtaatctgaatatcaccttgccaatctatacaaaagagtcagagtcagatcaagagcaggaggaggaaattgacatgacgtccgaaaaaaacgacgaaactgaatccaccgagacatctgtgctgaagagccatctcgtcaacgaggtgccagtgctcgccagtcctgatctgctgtcggaggtttccgaaatgaaacaggaccttatcaagatgacagcaattctgaccactgatgtgagtgataaggccgggtctataaaagtgaaggaactggttaaggccgccgaggaggagcccggcgaacccttcgaaatcgtcgagcgggtgaaggaggacctggaaaaggtgaacgagatcctgcgctccggaacttgcacccgagatgagagctctgttcagtcctctagaagcgaaaggggtctcgtggaggaggaatgggtgattgtgtccgatgaggagatcgaagaggctagacagaaagccccactcgagataaccgagtacccctgtgttgaagtgagaattgataaggagattaaggggaaggtggaaaaagactccacaggattggtgaactacctgaccgatgacttgaatacctgcgtacctctcccaaaggaacaacttcagacagtgcaggataaggcgggtaagaaatgtgaggcactggctgtgggcagaagcagcgagaaagagggtaaagatatccctcccgacgaaactcagtctactcagaaacagcacaaaccatctctaggcatcaagaaacctgtgcgaaggaaacttaaggaaaaacaaaaacagaaggaggagggactccaagccagtgcagagaaagcagagctgaaaaaagggtcatccgaggagtccttgggtgaggatcctggtcttgcccccgagcccctacccacagtgaaagcaacatcacccctaatcgaggagaccccaataggatccattaaggacaaggtcaaagccttgcagaagagggttgaggatgagcagaagggcagaagcaaactgcctataagagtgaagggtaaggaagacgtgcctaagaaaacaactcacaggccacatccggcagcctccccttcccttaagagtgaacgacatgccccaggcagccccagtcccaaaacagagaggcactctaccttgtcttcaagtgccaagactgaacgtcaccctccggtcagtccctcctctaagaccgagaagcatagtcccgtgtctccatctgctaaaactgagcgtcactcacccgccagttcctcttctaaaaccgagaaacattcccccgtctcgccgtctaccaagaccgagcgccactcacccgtctcatccacgaagactgaaaggcaccctccagtttccccttcggggaaaacagataaaaggccgcctgtgtctccatcagggcgcacagagaaacaccctcccgttagccccggacggaccgagaagaggttgcctgtgtcaccttctggaagaacggacaagcatcagcctgtgtctaccgctggaaaaacagagaaacaccttcccgtttcaccatccggtaagactgagaagcagcccccagttagccccaccagtaagacggagcgtattgaagaaacgatgtcggtcagagaactgatgaaagctttccaaagcggccaggacccaagtaaacacaagactggcctgtttgaacataaatctgccaaacagaagcaaccgcaggaaaagggtaaggtgagagtagaaaaggaaaagggcccaattttgacacagagggaggcacagaaaacagagaatcagactataaaacgcgggcagagacttcctgtcaccggcaccgctgagagcaagagaggcgtgagagtctccagcatcggggttaagaaagaggacgccgctggaggaaaagagaaggttctctcacacaagattccagaacctgtgcagagtgttcctgaagaagaatctcatcgggagtctgaagtgcctaaagagaagatggcagatgagcaaggggatatggacctgcaaatctcacccgaccggaaaacatccacagacttttctgaggtcatcaagcaggagctggaggataatgataagtaccagcagtttcgcctgagtgaggaaacagagaaagcccagctgcacttggaccaggtgctcacttcaccgtttaacaccacgtttcccctagactacatgaaagacgaatttctgcccgctcttagtctgcagtcaggcgccctcgacggctccagtgagtcactgaaaaatgagggggtagccggaagtccatgcggttccctcatggaaggaacgcctcaaatatcaagcgaagagtcatacaaacacgaaggcttagcggagacccccgaaacgtcacccgaaagcctgagcttctctcctaagaaatcggaggagcagactggggaaacaaaagagtctaccaagactgagacgacaaccgaaattagaagcgagaaggaacaccccaccaccaaggacatcacaggcggttcggaggaaaggggggccaccgtaacggaagacagtgaaaccagtaccgagagttttcagaaagaagccacactggggtccccaaaagacacatcacccaaaaggcaggacgactgcacaggtagctgctccgtggctctggcaaaagagacgccgacaggcctgacagaggaggccgcttgcgatgagggacagcggacttttggctcaagcgctcataagacccagaccgattcagaggtccaggaaagcaccgcgacctccgacgaaaccaaggcgctgccactcccagaggcctccgtgaagaccgatacaggcactgagagtaagccccagggtgtgattcgttcacctcagggtcttgagttggccttgccgtcccgggatagcgaagtgctgtctgccgtcgcagacgacagcttggctgtctcacataaagattccctcgaggccagccccgtgctggaggacaatagctcgcataagacgcccgacagcctggaaccaagtccactgaaggaaagcccctgccgggattccttggaaagttcaccggtagagccaaagatgaaagccggcatctttcctagtcacttcccacttcccgccgccgttgccaagactgaactcctaactgaggttgcttccgtgagatcaaggctccttagggatccagatggctccgcggaggacgactccctggagcagacttctctcatggagtcgtccggtaagtctcccctcagtcccgacacacccagctcagaagaagtttcttacgaggttactcccaagaccaccgacgtctcaacacctaagcccgctgtgatccacgaatgcgcagaagaggatgattcagagaacggcgagaaaaaaagatttacccccgaggaggaaatgttcaagatggtgacaaaaatcaaaatgttcgatgaacttgagcaggaagccaagcaaaagcgggactataagaaggagcctaagcaggaagaaagctcttcaagtagcgaccccgacgctgactgttctgtggacgtcgacgaacccaaacacaccggatctggggaggacgagagcggagtccccgtgctcgtgacctcagaaagccgaaaagtgtcctcctcctctgagagtgaaccagaactcgcacagttgaagaagggagctgactccgggctgttgcctgaacccgtcataagggtccaaccgccttctcctctcccaagtagtatggatagcaactcaagccctgaagaggtccagttccagccggtcgtatcaaaacagtacacgttcaaaatgaatgaggacacccaggaagagccaggtaaaagcgaagaggaaaaggacagcgaatcacatctggcagaagacaggcacgcagtttctacggaagccgaagatcggtcttacgataaactgaatcgggacactgaccagccaaaaatctgcgacggacacggatgcgaagccatgagtccctcttctagcgcagctcccgtctcttctgggctgcaatctcctactggcgatgacgtcgatgagcagcctgttatctacaaagaatctctcgccctacagggcacgcacgagaaagatacagaaggcgaggagttagatgtgtcacgggcagagtcgccacaggccgactgcccctccgagagcttttcttcttcttcttccctaccccactgccttgtgtcggagggcaaggagttagacgaggatattagtgccacgtcctcaattcagaaaacggaagtgaccaagaccgacgaaaccttcgagaatctgcccaaggactgcccgtctcaagacagctctatcactacacagacagatcgtttctccatggatgtgcctgtgtctgatcttgcggagaacgatgaaatttacgacccacagatcacgagcccctatgagaacgtgccatctcaaagctttttcagctcagaagagagcaaaacccagaccgacgctaatcacactacgagctttcacagctccgaggtgtatagcgtgacaatcacctcccccgtcgaggacgtcgtggtggccagttcttctagcggaactgttttgagtaaggagtccaatttcgagggccaggacataaagatggaatctcagcaggaaagcaccttgtgggagatgcagagtgactctgtttcttcttctttcgagccgaccatgtctgctactacaacagttgtcggggagcagatcagcaaggtaataattactaaaactgacgtcgactctgattcatggagtgaaatccgcgaggacgacgaagcgttcgaagccagggtcaaagaagaagaacagaagatctttggcctcatggtcgaccgtcaatcccaaggaaccacgcctgataccacacctgcccgaacaccaactgaagaaggtacgcccacttctgaacagaatccatttttgttccaggagggtaagcttttcgaaatgacccgttctggtgccatcgacatgaccaagaggagttatgctgacgagagtttccatttcttccaaattggccaggagagccgagaagagaccttatctgaggatgtcaaagaaggcgcgaccggcgccgacccgctgccgctcgagactagcgctgaatcgttagccctcagcgaatcaaaagagacagtggacgacgaagccgacctcttacccgatgatgtctccgaggaggtggaagagattcctgcatctgacgcccagttgaatagccaaatggggatttcagcctctaccgagactccgacaaaagaggccgtatctgtaggcaccaaagacctaccaactgtccagaccggcgacattcccccactctccggtgtaaagcaaatctcttgccccgattcgtccgaacccgccgttcaggtgcagctggatttctcgacgctcaccagaagcgtttacagcgaccgaggagacgattccccagacagttcccctgaggaacaaaaatcagtaatcgaaatcccaacggcccctatggaaaacgtgcctttcactgaatccaaaagcaagattccagtgcgcactatgcccacctcaacaccagctccaccatcggccgaatacgagtcatcagtaagcgaagacttcctgtcaagcgtggacgaggaaaacaaggccgatgaggcaaagcccaagagcaagctgccggtgaaggtgcctctacagagggtggaacagcagctgtcagatctggatacgagcgttcagaagaccgtggcccctcagggccaggatatggcaagcatcgcgccagacaaccgtagcaagtccgagtccgatgctagctccctagattctaagaccaagtgtcccgtgaaaacaaggtcctatacagaaactgagaccgagtctcgcgagagagctgaggaactggagctggaatccgaggaaggtgccacccggcccaagattcttaccagcaggctccccgtgaagtcccggtccacaacttccagttgtcgggggggaacatctccaacaaaagagtctaaggagcacttctttgatctctacagaaattcaatcgagtttttcgaggaaatcagcgatgaagcttccaagctggttgaccgcctgacccagagcgaacgcgagcaagagattgtgtcagacgacgaatcgtcctctgctctggaagtttcagtgattgaaaatctaccccctgtcgaaacagaacactccgtgccagaggatatctttgacacccggcctatttgggacgagtctattgagactctgattgagaggatcccggacgagaatgggcacgatcacgccgaagaccctcaggatgaacaagagagaattgaagaacggctcgcctatatagctgatcaccttggattctcctggactgagctcgctcgggaactcgacttcaccgaagaacagatccaccagatccggatcgaaaatccgaatagcctgcaggatcagagccacgcacttctgaagtattggctggagcgcgacgggaagcatgcgacagatactaacctggtagagtgcctcacaaagattaaccgaatggacattgtgcacctaatggagacaaatactgagcccctgcaggagagaataagccacagctacgctgagatcgaacaaaccatcacactggatcattccgaggggttcagtgtcctacaggaggagttatgtaccgcgcagcataaacagaaggaggagcaggccgtttccaaagagtctgaaacatgtgaccaccctcccattgtctcggaagaggatatcagtgtgggctactcaacttttcaagatggcgtgccaaagacggaaggggatagcagtgccacagccttgttccctcagacacacaaggaacaggtgcagcaggacttctccggtaaaatgcaggacctgccagaggagtcatctctggaataccagcaggaatacttcgtcaccacgccaggtaccgaaacaagcgagactcagaaggcgatgattgtccccagctccccatctaagacaccagaagaagtgtcaacccctgccgaggaggaaaagctatatctccaaacccccaccagctccgagagaggtggcagccctattatccaagaacccgaggaaccatctgagcacagggaagagtctagtccccggaagacaagcctcgtgattgtggaaagcgcggacaaccagccagagacgtgtgagcgactcgatgaagacgctgcctttgaaaagggcgacgatatgccggagattccgcccgaaacggtaaccgaggaagaatacatcgatgaacatggacataccgtcgtcaagaaggtgacccggaaaattatccggagatatgtgtcatcagaaggtaccgaaaaagaagagatcatggtccaggggatgccacaagaacctgtcaatatagaggaaggcgatggttacagcaaggtcatcaaaagggtcgtgctgaagtccgatacggaacagtcagaagataacaatgaatag

SEQ ID NO: 108214 - DNA, 5592 bp, synthetic construct
  misc_feature 1..5592: note = Description of Artificial Sequence: Synthetic coding sequence
  source 1..5592: mol_type = other DNA
atgtctcaccacatccagcggtccgattcaaacgcctctttcctgagggcggccagggccgggaacttagataaggtggtggagtatctgaaggggggtatcgatatcaacacttgtaatcagaacgggttaaacgctcttcatttagctgcaaaggaagggcacgtgggcctggtacaggaattgttaggccggggtagctcggttgactcagctacaaaaaagggtaacactgccctccacatcgctagtctggctggacaggccgaagtggtcaaggtgctggtgaaggagggcgcaaatatcaacgcccagagccagaatgggtttactcccctgtacatggccgctcaagaaaatcacattgatgtggtgaaataccttctcgagaatggcgctaaccaatctaccgctactgaagatgggttcacacctttggccgtagccctacagcagggccacaaccaggcagttgcaatactgcttgagaacgacacaaaaggcaaggtgcgactgcccgcactgcacattgccgcgcgaaaggatgatacaaaaagtgccgcccttctgcttcagaacgaccacaatgctgatgttcagtcgaaaatgatggtgaatcgtacaaccgagagcggctttactccgctgcatatcgccgctcactacggaaacgttaatgtcgcaaccttactgctaaaccgcggagcagcggttgacttcacagcccgtaatggcattaccccactgcatgttgcctcaaagagaggcaataccaacatggtgaaactgttgctagatagaggcggacagatcgatgctaaaaccagggacgggctgacgccccttcactgcgctgcaagatctgggcatgatcaagtagttgagctgctgctcgaacggggcgctccattgctggctagaacaaagaatggcctgagtcctctgcatatggcagctcagggcgaccatgtcgagtgtgtgaaacatctcctgcagcacaaggcccccgtggatgacgtgacgctggactacctgaccgcactgcatgtggctgcccactgtggccactatcgggttactaaactcctgctcgataagcgggctaaccctaacgcccgcgcgctcaatgggtttacccccctgcacatcgcttgcaagaaaaatagaatcaaggtgatggaactcctcgttaaatatggggcgagcatccaggcaatcacagaatctggcttaacacccatccacgttgccgctttcatgggtcatctgaatatcgtgctgctgcttctgcagaatggggcctcaccagacgtcaccaatatccgcggcgaaactgcactgcatatggcggctcgagccgggcaagttgaagtggtccggtgcctactgcgtaatggagcactggtggatgccagagcaagagaagagcaaactccattacacatagctagccgcctgggaaaaacagagattgtgcagctgttgttacaacatatggcgcatccggacgcagctaccacaaatggctatacgccattgcacatctcggccagggagggccaggtggacgtggccagcgtcttactggaggccggtgctgcccactctcttgccacaaaaaagggatttaccccattacatgtagccgcgaaatacggctctttagatgtggccaaactgctgcttcaacggagagcagctgccgattctgctggcaagaacggactgacgcctttacatgtggctgcccattatgacaaccagaaagtggccttactgctgttggagaagggtgcctcccctcatgcaactgctaaaaacggctacacaccccttcacattgccgcaaagaaaaaccagatgcagatcgcgtcaaccctgctgaactatggtgcagagacaaatattgtgaccaaacagggagtgacccctctacaccttgcctcccaggaagggcatacagatatggtgacactgctgctggataaaggcgcgaatatccatatgtccacaaaatcgggtctgacatccctgcacttagcagcccaggaggacaaagtgaatgtcgctgacatcctgacaaagcacggtgcggaccaggacgcccacaccaaactgggctacacccctctcatagtggcatgtcactacgggaatgtaaagatggtgaactttctattaaaacagggcgcgaatgtaaatgcgaagacaaagaatggctatacccctcttcatcaggccgctcagcagggccacacccatattatcaacgttctgctccagcacggagccaaacctaacgctaccaccgccaatggtaataccgccctggctatcgcaaagaggcttggatacattagtgttgttgatactctgaaggtggtcacggaagaggtgaccactactactacgaccatcacagagaagcacaaactgaatgttcccgagaccatgaccgaagttctggacgtttctgatgaggaaggggatgacacaatgaccggagacggtggagaatatttacggccagaggacctgaaagagctaggggacgactctttgcccagctctcagttcctggacggtatgaattatctgcgctacagcttggaagggggtaggagtgattctctgaggtcctttagcagcgacagatcacacaccctgtcacacgccagttacctgagagatagcgctgtcatggacgattccgtcgtcattccctctcaccaggtctcaacactggctaaagaggcagaacgcaactcttatcggctgtcctgggggactgagaatctagataatgtcgccctctctagtagcccaatccacagtgggagagcaagcccatgcctggagcgcgacaactccagctttttggtctctttcatggtggatgctcgagggggcgcgatgagggggtgccggcacaatggactgcgcatcattattccgccacgcaagtgcacagcaccaacgcgtgtgacgtgtcgcctggtgaagaggcaccggctcgccacaatgcccccaatggtggaaggggaagggctggcctctaggctcatcgaagtgggtccatccggggcccagtttttaggcaaactgcatctacctaccgccccacctcctctgaacgaaggggagtctcttgtatcgaggatccttcagttaggtcctcctggtacgaaatttctcgggcctgtgatcgtggaaatcccccattttgcagccctgaggggaaaggagcgagaacttgtggtgctgcgctccgagaacggggatagttggaaagagcacttttgtgattatactgaagacgagttgaatgaaattctcaatgggatggacgaggtactggattcacccgaagatctcgaaaagaagcgcatctgccgcatcattaccagagacttcccccagtacttcgccgtggtcagccgaatcaagcaagactccaacctgattgggccagaggggggcgtgctaagttcaacagtggtgcctcaggtgcaagccgtttttcccgagggtgccctcactaagcggatccgagtgggcctgcaggcccagcctatgcacagcgagctggtgaagaagattctaggaaacaaagccacattttcccctattgtaacactggagcctcggagacgcaagttccataagcctattactatgaccatcccagtgccaaaagccagctctgatgtcatgctcaatggattcggaggggacgcccccactcttaggttgctgtgttccatcacaggtggcacaacccctgcgcagtgggaggatatcacgggaacaactcccctgacattcgtgaatgagtgtgtaagcttcacgacgaatgtatccgctaggttctggctcatagactgtcgccaaattcaggagtcggttacatttgccagtcaggtctatcgggagattatttgtgtgccgtacatggcgaaattcgtggtgtttgccaagagccatgatcccatcgaggcaagacttagatgtttctgtatgaccgatgataaggttgataagaccttggagcagcaggagaactttgcagaagtagcgagatcaagggacgtggaggtgctcgagggaaagcccatatatgtggactgttttggcaacctggtgcctcttactaaaagtggacaacaccatatcttttccttctttgccttcaaagagaatcgactgcccctgtttgtgaaggtgagagacacgacccaggagccctgcgggcggctgtcgttcatgaaggaacccaagtcgactcgcggcctggtgcaccaggccatctgtaacttaaacataactcttccgatctacactaaagaaagtgaatcagatcaggagcaggaggaagagataggccaagaaagccgtcggtatcctcaggacgaacaggaaaggattgaagagcggctggcatacattgcagaccatctgggattttcatggaccgagctggcgagagagctggacttcactgaggagcagatacaccagatccgtattgaaaacccaaactctctccaggaccagtctcacgccttgctgaaatattggctggagcgggacggtaagcacgccaccgatacgaacctggtggaatgtctcacaaagataaaccggatggacatcgtccatctgatggagactaacactgagcccctccaggagcgcatctcccacagttacgcagaaattgaacagactattaccctggaccactccgaaggtttttctgtgttgcaagaggagttatgcacagctcagcataagcaaaaagaagaacaggctgtgagtaaggaaagcgaaacgtgcgatcaccccccgatcgtaagcgaagaagatatttccgtcggctacagcaccttccaagacggggtgccaaaaaccgaaggcgatagctccgccactgcgctctttccgcagacgcataaagagcaagttcaacaagacttttccggcaaaatgcaggaccttcccgaagagtctagcctggaatatcagcaggagtacttcgtgacaacccctggtacagaaacttccgaaacacagaaagctatgatcgttcctagtagcccttctaagacacctgaggaggtgagcacacctgcggaagaggagaagctgtatctccagacccccacgagttcggagcgtggggggtcccccataatacaggaacctgaggagccttccgaacacagggaagaatcgagtccaaggaagacatctctggtgattgtggagtccgctgacaaccagcccgaaacgtgcgagaggttagacgaggatgctgcattcgaaaaaggcgacgacatgcccgagattcccccggagacagttacagaagaggagtatatcgatgagcacgggcacactgttgttaagaaagtcacgcgaaagatcatcagacggtatgtctcatcggagggcacagagaaggaggagattatggtgcagggcatgccccaggagcccgtgaacattgaggagggggacggctatagtaaggtgatcaagagagtggttctcaaatccgacactgagcaatccgaggactccatggaatag

SEQ ID NO: 108215 - DNA, 11874 bp, synthetic construct
  misc_feature 1..11874: note = Description of Artificial Sequence: Synthetic coding sequence
  source 1..11874: mol_type = other DNA
atgatgaacgaagacgccgcacagaagtcagacagcggggaaaagtttaatggaagttcccaaaggagaaagaggcctaaaaagtcagactctaacgcgtcttttctcagagctgcaagagcagggaatttagataaggtcgtggaatacttgaaaggcggcatcgatatcaacacctgcaaccagaatgggctgaacgccctgcatcttgccgcaaaagaaggccacgtgggcctggtgcaggaactcctgggacgtggatcatccgtggacagcgcaaccaagaagggaaatacggcactgcacattgcaagccttgctggccaggccgaggtggtgaaagttctggtaaaggaaggtgcaaatatcaacgctcagtcacaaaacgggttcactccattatacatggccgcacaagaaaatcacattgatgttgtcaagtacttgctggagaacggcgcaaatcagtccaccgctacagaggatggattcacgccacttgccgtggccctccagcagggtcataatcaagccgtggctatcttgcttgaaaatgacaccaagggcaaagtgagactgcctgcattgcacatcgctgccaggaaggacgacactaagtctgccgccctactgctccagaacgatcacaacgctgacgtacagtctaaaatgatggtaaaccgtactacagagagcggcttcaccccgttacacattgcggcgcactacggcaatgtgaacgtcgccacattgctgctgaaccgcggagctgcagtagattttacagcacgaaacggcatcacaccgctgcatgtggctagcaaacgcggcaataccaacatggtgaagttgctgctggacagagggggccagatcgatgccaaaaccagggatggcctgacacctctacattgcgctgctcgatctgggcacgatcaagtggttgagctgctacttgagcggggagccccactactggcacgcaccaagaatgggttaagccctctccatatggccgcccagggcgatcacgtggagtgcgtaaaacacttgctgcagcataaggcaccggtcgacgacgtaacccttgattatttaacagccttacacgtagccgcccactgcgggcactaccgagttaccaaacttcttctagacaagagggcaaatccaaatgcaagagcactaaacggctttacacccctgcacatagcttgcaagaaaaaccgaataaaggtgatggaactgctcgtcaagtatggcgctagcattcaggctattaccgaaagtggactgacaccaatccacgttgcagcctttatgggtcatctgaacatagttctcctgctgctgcagaacggtgctagccccgatgtaaccaacatcaggggagagacggctctgcatatggcagccagggctggccaggttgaagttgtgaggtgtttgctaagaaacggtgcgctcgtggatgcccgcgctcgggaggaacagacacctctgcatatcgcgagcagactcggcaaaactgaaattgtccagcttctgctccagcacatggctcaccctgacgccgccacaacgaacggctacaccccgctacatatttcagccagggaggggcaagtcgacgtcgcgtcggtactccttgaagccggggcggcacactctcttgctacaaagaagggttttacgcccctgcacgttgctgcaaagtacggaagtctcgacgtggctaaactgctgctgcagagacgagccgctgctgactccgcgggcaagaacggactgacccccttacatgttgctgcacactatgataatcagaaagtggctctcttgcttcttgaaaagggagcttccccgcacgctaccgcaaagaacggctacacacctctgcacatcgccgcaaaaaaaaatcagatgcagattgcctccaccctgcttaattacggcgccgagacaaatatcgttacaaagcagggggtgactcccttgcatctcgcctcccaggaaggccatacagatatggttacgctgctactggataaaggagcgaacatccacatgtcgactaaatctggcctgacctctctgcatctggcagcacaagaggataaagttaacgtagctgatatccttactaaacacggggcggaccaggacgctcataccaagctgggctacacgcctctcattgtggcatgtcattatggaaacgtgaagatggtcaattttctcctcaaacagggcgcaaatgtgaacgccaaaacgaagaacgggtacacaccccttcatcaggcggcccaacaaggtcatacccatattattaacgtactgctgcagcatggcgctaaacccaacgcaaccacagcgaacggcaatacagcgcttgccatcgccaaaaggctaggatacattagcgtcgtcgataccctaaaggttgtgacagaggaagtcactactaccactacaaccatcacggagaagcacaagctgaatgtacccgagactatgaccgaggttctggatgtgtcggatgaggagggcgatgatacaatgacaggagacggcggcgagtatctgaggcccgaagacctgaaggaactcggtgacgacagtctccccagctcccagttcctggacgggatgaattacctaagatactccctggagggcggcagatctgatagcctcaggagctttagctcagacaggtcccacacgctgtctcacgcctcatacctgcgggatagcgcggtgatggatgattccgtggtgatcccctcccaccaggttagcacccttgctaaagaagcagagcggaattcctaccgcctgagttggggcaccgagaatctggacaatgtggcactgtcttcttccccaatccatagcggctttctggtgagtttcatggtcgatgccagaggcggcgccatgcggggctgccgccataatgggctgaggatcattattcctcctaggaaatgcaccgctccaacgcgcgtcacctgtaggctggtcaagaggcatcggcttgctaccatgcctcccatggtcgagggtgaagggctagcctcccgcctgatcgaagttggccccagtggtgctcaattcttgggaaagttgcacttgccaacagctccaccgccactgaacgagggcgaatccttggtctctcgcattctccagctgggacctcccggaactaagtttttgggccccgtcatcgtggagattccccactttgctgccctgagaggaaaggagagggagctcgttgttctgcgctccgaaaatggcgattcttggaaggaacacttctgcgactacacggaggacgagctgaacgaaattcttaacgggatggatgaggtgctggatagccccgaagatctagaaaagaaaaggatctgccgaattatcacccgtgacttcccacagtatttcgccgtggtatccagaattaaacaggattctaacttaatcgggccagaaggcggagtcctaagcagtacagtggtgcctcaagtgcaggctgttttccccgagggagcactgacaaaaaggatcagggttggactccaagctcagcctatgcacagcgagttagttaagaaaattctcggaaacaaggccaccttctcccctatcgtcactctggagccgcggaggcgcaagtttcataagcctataacaatgaccataccagtacctaaggccagctcagatgtgatgctaaatggctttgggggagacgccccaaccctgcggttgttatgctcgataactggtgggaccaccccagcccagtgggaagacatcacaggtactacccccctgactttcgtcaacgaatgcgtgtcctttaccaccaacgtctctgccagattttggctgatcgactgtagacaaattcaggagagtgtaactttcgcgtcacaggtgtatcgggagataatatgtgtgccatacatggcaaaatttgtcgtgtttgccaaaagccatgatcccatcgaagcccgtttgcgctgtttctgcatgactgacgataaagtcgacaagaccctagagcagcaggaaaatttcgccgaagttgctaggtcccgggatgtggaggtccttgaaggtaaacctatctatgttgattgcttcggaaatcttgttccgctaaccaagagcggccagcatcatatattcagctttttcgcctttaaggagaacaggcttccactttttgttaaagtgcgcgataccacacaggagccctgcggacgcctgtctttcatgaaggaacctaagagcactcgagggctcgtgcaccaggccatctgtaacctcaatatcaccctgcccatctacacaaaagagagcgagagtgaccaggaacaggaggaagagatcgacatgacttcagagaagaatgatgagaccgagagcacagaaacaagcgtcctcaaatcgcatcttgtgaacgaggtgcccgttttggcgtcacccgatttgctcagtgaggtgtctgaaatgaagcaggacctgataaagatgaccgccatactgacaaccgacgtgagcgataaggccggctctatcaaagtgaaagaactagtgaaagctgctgaggaagaacctggagagcccttcgaaatcgtagagagggtgaaggaggatttggagaaggtcaacgagatcctgcgctctggaacatgtaccagggatgaatcatcggtccaatccagtagaagcgagcgcggcctagtggaagaggagtgggtgattgtaagcgatgaggaaatagaggaagcccggcagaaggcgccgctcgaaatcactgagtatccttgcgtagaggttcggatagataaggagatcaagggcaaagttgagaaggacagtacaggcctggtcaattacctgaccgacgatctgaacacttgcgtgccgctgcccaaggagcagttacagaccgtccaggacaaagccggtaaaaaatgcgaggcattggccgtggggagatcatctgagaaggaaggtaaagatatcccacccgacgaaacccaatctactcaaaaacagcacaagccttcactggggataaagaagcccgtgcggagaaagcttaaggaaaaacagaagcagaaggaggaggggttgcaagcatctgcagaaaaggcagagctcaagaagggatcgtcagaagagagcctaggggaagatcccgggttggctcccgaacccctcccgacggttaaggccacctctcccctgatcgaagaaacgcctattgggagtataaaggataaagtaaaggcgcttcagaagcgggtggaggacgagcagaaaggaagatcaaagcttccaatccgtgtgaaaggaaaagaggacgtgccgaagaagaccacacatcgcccgcaccccgctgcaagccctagtcttaagtctgagcgccacgctccaggttcgccctcaccaaaaacagagaggcattcaactctgagtagctccgccaaaactgagcggcatccccccgtttcaccttcttcaaagaccgagaagcatagcccagtgagcccgtctgccaaaaccgagcgacacagtccagcctctagctcaagtaaaaccgaaaaacactctcccgtgtctccgtctactaagacagagagacactcccctgtatctagcaccaagaccgagagacacccccccgtgtcaccttccggtaaaaccgataagcgcccaccagtgagtccctcaggccggacagagaagcaccccccagttagccctgggaggaccgagaaacgcttgccagtaagcccatctggacggactgacaagcatcagcctgtaagcacagcgggcaagaccgagaagcatctgcctgtgtctcccagcgggaaaaccgaaaagcagcccccagtttccccgacctctaaaacagagaggattgaggaaacaatgagtgtgcgggaacttatgaaagccttccaaagcggccaggatcccagcaagcacaaaacaggcctgttcgagcacaaaagtgccaaacaaaaacaaccccaggagaaaggaaaggtgcgggtggagaaggaaaagggacccatattgacacagagggaggcccagaagaccgagaaccagactatcaagagaggccagcgactgcctgtaacaggtaccgctgaaagcaagcggggcgtgcgcgtgtcctctataggggtgaagaaggaggatgccgcgggcgggaaggagaaggtactgtctcacaaaattcccgagcctgtacagagcgtcccagaggaggaaagccaccgggaatccgaggtccccaaggagaagatggctgacgaacagggagacatggatcttcagattagccccgaccgcaaaacctccacagatttctctgaagtcatcaagcaggaattggaagataatgacaagtaccaacagttcagactttctgaagaaactgaaaaggcgcagctgcaccttgatcaggtgcttacatctcccttcaacacaaccttccccctcgattacatgaaggacgagttcctgcccgcattgtctctgcaaagcggggcactcgacgggagctcggagagcctgaaaaatgagggagtggctggttccccttgcggcagcctcatggaaggcacacctcaaatcagtagcgaggaaagctacaaacacgaaggtttagccgagactcccgaaacctcacccgagtctttgagcttttctcccaagaagtccgaagaacagaccggagaaaccaaagagtccacaaaaaccgagactaccacagaaattagaagtgaaaaggaacaccccacgaccaaagacataaccggtggatccgaagagcgtggcgccactgtgacagaagacagcgaaacctccacagaatcctttcaaaaggaagcaactttggggagccctaaggacacttcaccgaaaaggcaggatgactgcacaggtagctgctcagttgcccttgctaaagaaaccccgactggcctaaccgaggaagccgcgtgcgacgagggccagaggacctttgggagcagtgcacacaagacgcagacagactccgaggttcaggaatctacagcaactagtgacgagacaaaggccctccctcttcctgaagcctccgtaaaaacggataccggtacagagtctaagccacaaggtgtgattagatctccccagggcctggagttggcccttccgagcagggactccgaagtgctcagtgccgttgccgacgactcccttgccgtaagccacaaggactccctagaggcttcccctgtgctcgaagacaatagttcccataagacaccggactcattagagccgtcaccactgaaagaatccccatgtcgcgacagtttagagtcgagccctgtggagcctaagatgaaagcaggaattttcccatctcactttcctctacccgccgctgtagcgaagacagaactcctgaccgaagtagcttcagtcagatcaagacttctgcgcgaccccgatggtagtgctgaggatgattccctcgaacagacttccctgatggagtcatccggaaaaagcccgctgagccctgacactccctcctccgaagaggtctcttacgaggtgactccgaagaccacagatgtatctacgcccaaacctgcagtgattcacgagtgtgccgaagaggatgatagcgaaaacggcgagaagaaacgctttacacctgaggaagagatgtttaaaatggtcactaagatcaagatgtttgacgaactggagcaggaggccaagcagaagagggactataaaaaagagcccaagcaagaggagagctccagttcaagcgatccggatgcagactgtagtgtcgatgtagacgaaccaaaacatacagggagcggagaggacgaatccggagtgccagtgctggtgacttccgaatcacggaaggtgtcaagcagttctgaaagcgagccggagctggcacagctgaagaagggcgcagactccggcttgctcccagaacctgtgattagggtccagcccccaagccctttgcctagctcaatggactctaactcctcacctgaagaagtgcagtttcaacctgtggtgtcaaaacagtacacgtttaagatgaatgaggatacacaggaagagccagggaaaagtgaggaggaaaaagactccgaatctcaccttgccgaagacagacatgctgtgtcaactgaagccgaggacaggtcttatgacaaactgaaccgagataccgaccaaccaaagatctgcgatggacatggatgcgaggcaatgtcacccagcagctcagcggcacctgttagcagcgggctgcagagtccaaccggggacgatgtggacgagcagcctgtgatatacaaggagtcgttggccttgcaaggcacacacgagaaagacacggagggagaagagctggacgtgtcacgggctgagtctccacaagccgactgcccatctgagagcttttcctcatcctccagcctaccgcattgcttggtcagtgaggggaaagagctagacgaggatatttcagccacctcaagcatacagaagacagaagtgacgaaaactgacgaaaccttcgaaaaccttcctaaagactgtccatcgcaggattccagtatcacaacccagacggatagattttccatggacgtgcccgtctcagatctcgcagaaaatgatgagatctacgaccctcagatcacttccccatatgagaatgtgcctagtcagagcttcttcagcagtgaagagtccaaaacccagaccgacgctaatcacacaactagttttcacagtagcgaggtttacagcgttaccataactagcccagtggaagatgtggtggtggccagtagttcgtctgggaccgtgctctctaaagagagcaacttcgaggggcaggatattaagatggaatcccagcaggagagcactctttgggaaatgcagtcagattcggtgtcttccagcttcgagcccacaatgtctgccactaccaccgtggtgggcgaacagatttccaaagtgattatcacaaagaccgacgtagatagtgattcctggtcagaaattagggaagatgatgaggcgtttgaagctagagtgaaagaggaggaacagaagatattcggactcatggtggaccggcaaagccagggcaccacccctgacacaaccccagcaagaaccccaacagaggagggcacaccaacaagcgaacagaacccattcctgtttcaggaaggcaaactgttcgaaatgacccggtccggtgcaatcgacatgaccaagcgatcctacgctgatgagtcttttcacttttttcaaattggtcaggagtcaagagaagagaccctctctgaagatgttaaagagggagctacaggggctgaccctctcccactggagactagtgccgagtctctggccctgtctgagtcaaaagaaacagttgacgacgaggccgatctcttacctgatgacgtgagcgaagaagtcgaggagattcctgcctcggacgcccagctgaacagtcaaatggggatcagtgcttccactgaaacccctactaaagaagccgtctcggtgggaacaaaagatctacccactgtgcaaacgggcgacattcctccgttgtcaggagtcaaacagatttcttgcccagacagctccgaaccagctgtacaggtacagctggattttagtactttaacgaggtctgtgtattctgaccggggggatgattcccccgattcaagccctgaggaacagaagtctgtgattgaaattccaacggcacccatggagaatgtgccatttaccgaaagtaaaagtaagatacctgtgaggactatgcccaccagtacacctgcccccccttccgctgagtatgaatcatccgtgtccgaagatttcctcagtagcgtcgacgaagagaataaggcagatgaagcaaagcccaagtcgaaattaccagttaaagtgccccttcagagagttgagcagcagctgtccgatttggacacttcggtccagaaaacagtggcccctcaagggcaggacatggctagcattgcccctgataatagatcaaaaagtgaatccgatgctagctccttggacagtaagaccaaatgcccggtcaaaacccggagttacaccgaaacggaaactgagtctcgtgagagagcagaggaacttgagctcgagtctgaggagggggccacccgacctaaaattctgacaagcagattacctgtcaaatctcgttctacaactagctcgtgccgcggaggtacctcgccaacaaaagaatcaaaagagcattttttcgatctctatcggaattctattgagttcttcgaggaaatttcagacgaggcgtcgaagcttgtggatagactcactcagtcagaacgcgagcaggaaatcgtgtcggacgacgagtcttccagtgccctggaggtatccgttattgagaatctcccccctgtcgagacagagcacagcgtaccggaggatatctttgatacacgccctatttgggacgagtctatcgagactctgattgagagaattccggatgaaaacggacacgatcatgctgaggatccacaggatgaacaggaacgtatcgaggagcgactcgcatatatagcggatcatcttggattcagctggaccgaactggcaagagaacttgactttacagaagaacagattcaccagatcaggatcgagaaccccaacagtctgcaggatcagtcccacgctctcttaaagtactggctggagagggatggtaagcatgccactgacactaatctggtagaatgtctcaccaaaatcaatcgcatggacatagtgcacctcatggagactaacaccgaacctctccaagagcgtatcagccactcttacgccgagatcgagcaaacaatcaccctagaccacagtgagggcttctctgtgttacaggaggagttgtgcactgcgcagcataaacagaaggaggagcaagccgtgagcaaagagtcagagacctgcgatcacccacccatcgtctcggaagaggatatttctgtagggtattcaacatttcaggacggcgtacccaaaacagagggagactcctctgcgaccgccctcttcccccagacacacaaggaacaggtgcagcaggacttttctgggaaaatgcaggatctgcctgaggaaagctccctggaatatcagcaggaatactttgtaaccactcccggcaccgagacctctgagacccaaaaagctatgattgtgccttcatctccgtctaagacccctgaggaagtgagcacacctgcagaggaggagaaactgtatctccaaacgcccaccagctccgaacgcggcgggtctcctatcattcaggagcccgaggagccgagtgagcacagggaggagtcttctcctcggaagacatccctggtcatcgtcgagagcgctgataaccagccagagacatgcgagcgtcttgatgaagacgcagcattcgaaaaaggcgacgacatgccagagatccccccagagaccgtgacggaagaggagtatatcgacgaacacggacacaccgtagtgaaaaaggttacaagaaagataatcaggaggtacgtgagcagtgaagggactgaaaaggaagaaattatggtacagggaatgccacaggaaccagttaacatagaagagggcgatggttatagcaaggtcatcaagagagtagtgctgaaatctgacacggaacagtcagaggacaacaatgagtag

SEQ ID NO: 108216 - DNA, 5619 bp, synthetic construct
  misc_feature 1..5619: note = Description of Artificial Sequence: Synthetic coding sequence
  source 1..5619: mol_type = other DNA
atgatgaacgaagatgccgcacagaaaagtgacagcggagagaaattcaacggctctagccaaagacgtaagagaccaaagaagtcagattctaacgcctcatttctgagagccgcacgagctgggaatctggacaaggtggtcgagtatttgaaggggggtatcgatatcaacacttgcaatcagaatggcttaaacgctttgcatctggccgccaaagaaggccacgtaggcctcgttcaagaactgctgggccgcggctctagtgtggatagcgctactaaaaaggggaataccgccctacacatcgcctcattagcgggccaggccgaagtcgtgaaggttctagtgaaagaaggggcgaacattaacgctcagtcacagaatggttttacacccctctacatggctgcccaggaaaatcacatcgatgtggtaaaatatctcttggagaacggcgccaaccagtctacggccaccgaagacgggtttacccccctcgcagtggcgctgcagcagggccataatcaggctgtggcgatactgttagagaatgacacgaaagggaaagtgagactgccagctctgcacattgctgcacgaaaggatgatacgaaatcggccgcattactgcttcaaaatgaccacaatgcggacgtgcagagtaagatgatggtgaatcgcacaactgagagtgggttcacccctctgcatatagcagcacactatggaaacgtcaacgtggccaccctgctgctgaacagaggggcagccgtagatttcaccgcccgtaacggcatcacacctctgcacgtagctagcaagagagggaatacgaatatggttaagttgcttctcgatcggggcggacagattgatgccaagacccgtgatggacttacaccgctccactgcgccgcccgatcaggtcatgaccaggttgtggagctgctactggagcgcggtgctcccctgttggcaagaactaagaatggactgtctcccctgcacatggccgcccagggagaccatgtggaatgtgtgaaacacctgctgcagcataaggcgcctgttgatgatgtcacactggactacctcaccgcactgcacgtggcggcccactgtggacactaccgagtgactaaactcctgctggacaagagagccaatccaaatgcccgagccctgaacgggttcacccctcttcacatcgcttgtaagaagaacagaataaaggtcatggagcttctggtgaaatacggagcttccatccaggccataacagaatctggactgacccccatccacgtggcagcttttatgggacacctgaacatcgttctccttcttttgcaaaatggggcctccccggacgtcactaatatccgcggagaaaccgcgctgcacatggccgcccgggccggccaagtcgaggtggtgcgctgtctcttgagaaatggagcgctggtggacgcccgagcaagagaggaacagacaccgctgcatattgcctctcgtctgggaaagaccgagatcgtccagttgttattgcagcacatggcacacccggatgcagccacaaccaacggatacaccccattgcatatttcagcacgggaagggcaggtggacgtcgccagtgttctcctcgaggctggagccgcgcattctctggcaacgaagaagggcttcactcctttgcacgttgcggccaaatacggcagcttggatgtcgcgaagctgctgttgcagagaagggcagcagccgactctgcaggtaagaatggcctcaccccccttcatgtagccgcccactacgacaaccaaaaggtagccctgctgctgttggaaaagggcgcatctccccatgccacggccaagaatggctacaccccactgcacatcgctgcaaaaaagaatcagatgcagattgcctcgactttgctcaactacggagctgagactaatattgttaccaaacagggagtaacgcctctccatctggcctcacaagagggacacacagatatggtgactctgctactggataaaggtgcaaatatccatatgtccactaaatctggactgactagtctacacctcgcagcccaggaagataaggtcaatgtcgctgacattctcactaagcacggtgcagatcaggatgcgcacactaaactgggatatacgccactgattgtggcctgccactatgggaacgtgaaaatggtcaactttctcctcaagcagggagcgaatgtgaacgccaaaactaaaaatggatatacaccactgcaccaggccgcccagcaaggacacacacacattatcaatgtgctgttacagcatggagctaaaccaaacgcaacaaccgctaatggcaacactgcccttgcaatcgccaaaaggctcggttatatctctgttgtggacacactcaaagtagtgacagaagaagtgaccacgaccactactaccataaccgaaaagcataaattaaatgtacccgagacaatgacagaggtgctcgatgtatcagacgaagagggagacgatactatgacaggcgacgggggcgaatacctgcggccagaggacctgaaggagttgggagacgattcactgccatcaagtcagtttctggatgggatgaactaccttcggtacagtttggaggggggacgctccgacagccttcgtagtttctcttccgaccgttcacataccctaagtcacgcttcctatctgagagatagcgcagtgatggacgacagcgttgtcatccctagccaccaagttagtacactggccaaggaggcagagcgaaattcatatcggctatcttgggggaccgaaaatctggacaatgtggccttgtcttccagtccaatccactctggattccttgttagctttatggtggacgccaggggtggagccatgcgcggatgtcgtcacaacggactgcgaattatcatacctcctcgcaaatgtactgcccccacacgcgtgacatgcaggttggtgaagaggcacagactcgccaccatgcctccgatggtcgagggcgaaggactcgctagtcgcttgatcgaggtgggtccttccggcgctcagtttctagggaagctccatctgcctacagcccccccaccactcaacgaaggcgagtcactcgtgagccgaattttgcagctgggaccccctggtactaaattcctcggccctgtgatcgtcgaaattccgcacttcgctgcactgcgcggtaaagagcgggagctagtcgtgctccggtcagagaacggcgattcatggaaagagcatttttgtgattataccgaagatgaactgaatgaaatactgaacggcatggacgaggtgctggacagccccgaagatcttgaaaaaaaacggatctgtagaataatcactagagattttccccagtacttcgctgtggtgtcccggataaaacaggactcaaatctgatcgggcctgaagggggcgttttgtcatccacggtagtgccacaagtccaggccgtcttccctgaaggtgccttaaccaagaggatccgcgtgggcctgcaggctcaacccatgcacagtgaacttgttaagaagattctgggcaataaggccacctttagcccaatcgtcactctggaaccgcgccggcggaaatttcataaaccaatcacaatgaccatccctgtacccaaggcgtcttctgacgtgatgctcaacgggttcggtggggacgcccctacgttgcgcctactctgtagcataacaggtggcacaacccctgcccaatgggaggacatcacaggcaccacaccgttgacttttgtaaatgaatgtgtctcgttcacgacaaatgtgagcgcgaggttctggctgattgattgtcgccaaattcaggaaagtgtgacatttgcgtctcaagtgtacagagaaatcatctgcgtcccctatatggccaagttcgtggttttcgcgaaatctcacgatccgatcgaggctcggctcaggtgcttttgtatgactgacgacaaggtggacaagacactggagcagcaggaaaattttgctgaagtggcaaggtccagggacgtggaggtgctggaagggaaacctatctatgtggactgcttcggcaatttagtcccattaactaaaagcggacagcatcatattttcagtttttttgcgttcaaagagaatcgtctccctctcttcgtgaaggtcagagacaccactcaggagccctgtgggcgtctctcttttatgaaagaacccaaatccacccgggggctggttcaccaggccatatgtaacctgaacatcacattgcctatttatacaaaagagtccgagtctgatcaggaacaggaagaggagatcgacatgacttcggaaaaaaacccacaggatgagcaggaacggatagaagaaaggctagcctacatcgccgatcatctgggcttcagctggactgagctggctagagagctggattttaccgaagagcagattcaccagatcaggatcgagaatcccaacagtctccaggatcagagccatgccttgctcaagtactggctggaaagagacggaaagcatgccacagacaccaacctcgtcgagtgcctgaccaaaataaacaggatggatatcgtgcaccttatggaaacaaacacagaacctcttcaagaaagaatttcccattcctacgccgaaatcgaacagactattacactggatcattctgaaggattcagcgtcctccaggaggagctgtgcaccgcacagcacaagcaaaaagaggagcaggccgtgagcaaggagagcgaaacatgcgatcacccaccgatagtctccgaggaggacatcagtgtgggttacagtactttccaggacggagtgcctaagactgagggtgactcttctgctaccgcgttgttccctcagacacataaagagcaggtccaacaagacttttcaggaaagatgcaggacctgcccgaggaaagcagcctcgaataccagcaggaatattttgtgactacacctgggactgaaacctcggagacccagaaggcaatgatcgttcctagcagcccatctaaaacacctgaagaggtctctacccccgctgaggaggagaagctctatctgcagacccccacctcatcagagaggggcggttctcctatcatccaggagccagaggaaccttcagagcaccgggaagagtcttccccccgaaagaccagcttagtcatcgtggagtccgcagacaaccaaccagaaacatgtgagaggcttgacgaggatgccgcattcgagaagggcgacgacatgcctgagatccccccagagacagtaactgaagaagagtacattgatgagcacggacacacagtcgtcaagaaggtgactcgcaagattatacggcgctacgtgtcctcagagggcactgagaaagaggagataatggtccagggtatgccgcaagagccggtgaatattgaagaaggcgacggctattcaaaagtgatcaagcgggtcgtgttgaagagtgacacagagcagagcgaggataataatgagtag

SEQ ID NO: 108217 - DNA, 2988 bp, synthetic construct
  misc_feature 1..2988: note = Description of Artificial Sequence: Synthetic coding sequence
  source 1..2988: mol_type = other DNA
atggacgattccgtagtgattccatcccaccaagtgtcaacgctggcgaaggaggctgagcgcaacagttatagactttcctggggaacggaaaacctggacaatgtggcattgtcttcttcccccatccattcggggtttctcgtgagtttcatggtggatgcaagaggcggggccatgaggggctgtagacataacggcctgaggattatcattcctcctagaaaatgtaccgccccaacaagggttacttgtagactcgtgaagaggcaccgcctggctactatgcctccgatggtggaaggagaaggactggcctctcgcctcatcgaagttggcccttcgggcgctcagtttctgggccctgtcatcgtggagatcccccacttcgcagctcttagaggaaaggaacgagaacttgtggtgctcaggtctgaaaacggagattcgtggaaggaacacttctgcgattatacggaggacgagctgaatgaaatcctcaatggcatggacgaggtccttgattccccggaggatttggaaaaaaaacgaatttgtagaatcataacccgcgacttcccacagtattttgcggttgtatcgaggatcaagcaggattccaacttgattggacctgaaggtggcgtgctgtcgtccaccgtcgtcccccaggttcaggccgtctttccggaaggggcattgacgaagcgaatccgggtgggcctgcaggcacagcccatgcactctgagctagtgaaaaagatcctcgggaataaggcaacctttagccctatcgtcacactcgaaccaaggaggcgtaaattccataagcccattactatgactatcccagtgcccaaagcaagctcagatgttatgttaaacgggttcgggggagatgctcccaccctcaggttactttgcagcattacagggggaaccacaccagcacaatgggaggacataactgggaccacgcccttgacttttgtgaacgagtgcgtgtccttcacgaccaatgtaagcgcaagattttggctgattgattgccgccagatccaggagtcagttacttttgcgagccaggtctacagggaaattatctgtgttccctatatggccaagtttgtggtttttgcgaagagccatgatccaattgaagccagactgcgttgtttctgcatgaccgacgacaaggtggataaaaccctggagcagcaagagaactttgcagaggtggcccggtccagggatgtagaagttttggagggaaagcccatttatgtggattgttttggtaatctcgtacccctcacgaagtccggacagcaccacatcttttcgttttttgcgtttaaggaaaaccgactccctctatttgtaaaggtgcgggataccactcaagaaccgtgcgggcgccttagtttcatgaaggagcccaagtcaactagaggcttggtgcaccaggctatttgcaatctgaacatcaccctgcctatctacaccaaaactgaaacaaccactgagattcatccacaggatgagcaggagcggattgaagaaagacttgcctacatagcagatcatttgggttttagctggactgagctggcacgggaactcgattttacagaggagcaaattcatcagatccgtatagagaatcccaattccctgcaggatcagagccatgccctactgaagtattggctcgagcgagacggaaaacatgctacagatacaaacctcgtggagtgtctgactaagattaataggatggatatcgtgcatcttatggaaactaatacagagccactgcaggagcgcattagccatagttatgctgagatcgagcaaaccattacactggaccattcagagggcttctccgttctgcaggaagaactgtgtacagcccagcacaaacagaaggaggagcaggccgtgtctaaagaatcagagacatgtgatcaccccccaattgtttcagaggaagatatatccgtcggatattctaccttccaggacggcgttcctaagaccgagggcgactccagtgccaccgctctgttccctcagacccacaaggaacaggtccaacaggatttttctggaaagatgcaggatctccctgaggagagctctctggaatatcaacaagaatacttcgtgactacaccgggtactgaaacttctgagacacagaaagccatgatcgtgccgagcagcccttcgaagaccccagaagaggtgtctacacctgcagaagaggagaaattatacctgcagacacctacatcgagcgagaggggagggagcccaatcatccaagagcctgaagagccttcagagcaccgggaggagtcaagcccgcgcaagaccagcttggtgatcgtagaatccgcagataaccagcccgaaacctgtgaaaggctcgatgaggatgcagctttcgagaaggagctcaccgaagaattaggcgagctcgaagcctccagcgatgaagaagcaatggtgacaacccgagtcgtccgccgtcgcgtgatcatacagggagatgatatgcctgaaattcccccagagactgtgacagaggaagagtatattgacgagcacggtcacaccgtggttaagaaggtgactagaaaaattatacggcggtatgttagctccgagggaacagagaaggaggagataatggtccagggcatgccacaggagcccgtgaatattgaagagggcgacggttattccaaggtaattaaacgagttgttctcaagtctgacaccgagcagagcgaggtgaccctgtgcgaaccctctatcctctccagtacttcacagttccaggccgagcctgtggagggaaggcgggtgtccaaggttgttaagaccaccgtggtcctgggcgagagaatggagaagcatctgggggatagttccttagcgactgaccttcctagcgctaaagatgacttcgaggagtag

SEQ ID NO: 108218 - DNA, 3345 bp, synthetic construct
  misc_feature 1..3345: note = Description of Artificial Sequence: Synthetic coding sequence
  source 1..3345: mol_type = other DNA
atgaccaccatgttgcagaagtccgacagtaacgcgtccttcctgcgggcggccagagccggaaatctggacaaggtggtggagtaccttaaggggggcatcgacattaatacctgcaatcagaacggtctgaacgctttacatctcgctgctaaggagggacacgtcgggctcgtgcaggagcttcttggcaggggctcaagcgtggactctgctacaaagaagggcaatactgcactgcacatagcttccctggctggccaagccgaggttgtgaaggtcttagtcaaagaaggcgccaacattaatgcgcagtcacaaaacggttttacccccctttatatggctgcacaggagaatcacattgatgtagtgaaatacttgcttgaaaacggcgcaaaccaatctaccgccacagaggatgggtttactcctctcgcagtcgctctgcagcagggccacaatcaggcggttgcaatcttgctcgagaacgacacaaaaggaaaagttcggctcccagctctgcacatagcagcccgaaaagacgacaccaaaagcgcggcactacttttgcagaatgaccataacgcagacgtccagagcaaaatgatggtgaatcgaaccaccgaaagcggcttcactcccctgcacatcgccgcccattacggtaacgtgaacgttgcgacacttctactcaaccgaggcgctgctgtggatttcaccgctcgcaacggaatcacacccctgcacgtcgccagcaagaggggcaacacaaacatggtgaagttgctgctggacagggggggtcaaatagacgcgaaaactagggacgggctaactccgttacactgcgccgctaggagcgggcacgatcaagtggtggagctgcttcttgaaaggggtgcccccctgctggcccggaccaagaatgggctgtcccctctacatatggctgctcagggggaccacgtcgagtgtgtaaagcacttactgcaacacaaagcccccgttgacgacgttacgctggattacttgaccgccctccatgtggccgctcactgcggacactatagggttaccaaattgttactggacaaacgggcaaacccgaacgccagggctctgaacggcttcaccccactccacatcgcttgcaagaaaaacagaattaaagtgatggagttacttgttaaatacggagcctcgattcaagctataaccgaatcaggcctgacccctatccatgtggccgcttttatgggccatctgaacatagtgctgttattgcttcagaatggagcttctcctgacgtgaccaacattcgcggcgaaactgcgcttcatatggccgcaagagcaggccaggtagaggtggtgcgatgtctcctgagaaacggcgccctggtcgatgcgagagcccgggaggaacagacgcccctgcatattgcctcgcgccttggtaagacagagatcgtgcagctgctactgcaacatatggcacacccagacgcggccactaccaatggctacaccccccttcacatttccgcccgggagggtcaggttgatgtagcgtccgtcttgctggaggccggtgcggctcattcgctggctaccaagaaaggctttacacccctccatgtcgctgccaaatacggctccctcgatgttgctaagctgttactgcagcgtagagccgccgcggacagtgctggtaagaacggcctgactcctctacatgttgcggcacattatgacaatcaaaaggtcgctttgttgctactcgaaaaaggggccagtcctcatgcgaccgcgaaaaacggctatacccctctccacatagcagctaaaaagaatcagatgcagatcgcaagcactctgcttaactacggtgcagagactaatatagtcactaagcagggcgtaacgcccctccacttagcaagccaggagggacacacagatatggtaacccttttgctagacaaaggcgctaatatacacatgtccacaaaatccgggctcacatcactgcacttagccgcccaggaggacaaagttaatgtggccgatatcctgacaaaacatggggctgatcaggacgcacacaccaagctggggtatacgcccttgatcgtggcttgtcattacggcaatgtgaaaatggtgaactttctgctcaagcagggtgctaacgtcaatgctaagacaaaaaatgggtacactcctctgcatcaggcagcacagcaaggccacacccacatcattaacgtgctcctccaacatggcgccaagccaaatgctactaccgcaaacgggaacaccgcactggcaattgccaagcggctcggatatataagcgtcgttgacacactgaaggtcgtcactgaagaggtgaccacgactacaacaacaattactgaaaagcataaactcaatgtcccggaaactatgacagaggtgttggacgtctcagacgaagagggcgatgacaccatgaccggggacggcggtgagtacttacgaccagaggacctgaaagaacttggtgacgattccctgccttcatcccagttcctagacggcatgaactatcttaggtactcactggagggtggacgaagcgatagcctaaggtccttttccagcgataggagtcataccctgtcccatgcttcatacctccgcgattccgccgtgatggatgactctgtggtgattccctctcaccaggtcagtactctggctaaggaagcagaacgtaatagctaccggctgagttgggggaccgaaaacttggataacgtcgcgcttagctctagtcctattcactctggctttcttgtgagtttcatggtcgatgctagaggaggcgcaatgcgaggatgccggcacaatggactgcgtatcataattcctccgaggaagtgcacagctccgacgcgcgtcacttgtagactggttaagcggcatcggttggcaacaatgccacctatggttgagggggaaggacttgcatcgcggctgatcgaggtgggtccatcgggggcacagtttctagggaagttgcacctccccaccgcccctcctccgctcaatgagggggaatctctggtaagccgtattctgcaactcgggccgccaggcacaaagtttctaggccccgtaatagtggaaattccccacttcgccgcccttcgaggcaaagaacgcgagctggttgttctccgctctgaaaatggagattcctggaaggagcatttctgtgactatacggaagatgagctgaatgagattctcaatggaatggatgaggtcctggacagccctgaagacctggagtag

SEQ ID NO: 108219 - DNA, 5193 bp, synthetic construct
  misc_feature 1..5193: note = Description of Artificial Sequence: Synthetic coding sequence
  source 1..5193: mol_type = other DNA
atgatgaacgaagacgcagcccagaaaagcgattcgggagaaaagtttaatggtagtagccagcggaggaagcgcccaaaaaaagtgacttgcccgcagatgaaacccgaagctgctaatatcgaaaaatcagattcgaacgcgagcttcttacgtgccgccagagccgggaaccttgataaagttgtggagtacctgaagggcgggatcgacatcaatacctgcaaccaaaatgggctaaacgccctccacctggctgccaaggagggtcatgtaggactggtgcaagagctgttgggcagggggagctccgtcgactccgccacgaagaaaggcaacactgctctgcatattgcgtccctcgccgggcaggccgaggtcgtgaaagttctggtaaaggagggtgccaacattaacgcacaaagtcagaacggctttacacccttgtacatggccgcgcaggagaaccatattgatgtggtgaaataccttctcgagaacggtgccaaccaaagcaccgctacagaagatggctttactcccctagccgtggccctccaacaaggccataatcaagcagttgctatcctcctcgagaatgacactaaaggtaaagttcgccttccagccctccacattgccgcccgaaaggatgatacgaaatcagccgccctcttgctgcagaatgaccacaatgccgatgtgcaatctaagatgatggttaataggacaacagaaagtgggttcaccccacttcacattgccgcacattatgggaacgtgaacgtggctaccctcttgttgaatcgaggcgcagctgtggacttcaccgcccggaatgggatcacccctcttcatgtcgcatcgaagcggggtaataccaatatggtaaagctgctgctggatcgaggagggcagattgacgcaaagactcgtgacggcttaacacctcttcattgcgccgcaaggtccgggcacgatcaagtcgttgagctattactggaacggggggccccactcctggcaagaactaagaacggtctgtcccccctgcacatggctgcccagggagaccacgtggagtgcgtaaaacatcttctgcagcataaggccccagttgatgatgttacgctggactatttgaccgcccttcacgtagctgcgcattgtggtcactatcgggtcaccaaattgctgctagacaaaagagctaatcctaatgcccgggcattgaacggctttacacctctccacattgcctgtaagaaaaatcgcattaaggtgatggaactcctcgtcaagtatggcgccagtattcaggctattacggagtcaggcctgacgcctattcacgttgcagccttcatggggcacctgaatattgtactcttgttactgcagaatggcgcctctccagacgtgaccaatatacggggagagacggcactccacatggccgcaagagctggccaggtggaggtggtcaggtgcctgctgcggaatggcgccctagtcgacgctagagcacgggaagagcagacgcccctgcatatcgcttcaaggctcggcaagacggagatagtccagcttcttttgcagcatatggctcatcccgacgccgcaacaacaaacggatacactcctctccacatcagtgcgcgcgagggacaggtggacgttgcgtccgtgctactggaagcgggtgccgctcactccctggctaccaagaaggggtttactcctctgcacgtagctgccaagtatggatcacttgatgtcgcgaaactgttactgcagcgccgggccgccgcagattcagctggaaaaaatggactcactcccctccatgtggcggctcattatgataaccagaaagtggctctgttacttttggagaagggggctagccctcacgcaactgcgaaaaatgggtatactccattgcacatcgcagccaagaaaaatcaaatgcagatcgcatccaccttactgaactatggtgctgagacaaatatagtgacaaagcagggagtaacaccgctacacttggcttcacaagagggacataccgatatggttactctcctgttagataaaggagccaacattcacatgtcaaccaagtcgggacttacttcattacacttggccgctcaagaggacaaggtgaatgtcgctgatatcctgaccaagcatggtgctgatcaggatgctcacacaaagctaggttacacgcctttgattgtagcatgtcattatgggaatgtgaagatggtgaacttcctgcttaagcaaggggccaacgttaacgccaagacaaagaatggttatacccccctgcatcaagcagctcagcagggacacacccacatcataaacgttcttctccagcacggagccaaaccaaatgctactactgccaatggaaacacggccttagccatcgccaaacggctgggctatatctcagttgtagatactttgaaagtggtcactgaggaagtgacgactacaacgacgactattacagagaagcataagcttaatgtgcccgagactatgactgaagtgctcgatgtctccgatgaagagggcgatgatactatgacgggggacgggggagaatatctgcggcctgaggatctcaaagaattgggtgacgactcattaccatcttctcaattcctggatggcatgaattatctgaggtactctctggaaggaggccgtagcgacagtctgaggtccttctcgtccgacagaagccacacattatcacacgcctcatacctccgggattccgcagtcatggatgattcagttgtgattccttcccaccaggtatcaaccttagccaaggaagcggaacggaatagctaccgacttagttggggtaccgaaaatttggataatgtggcgcttagctcttcaccgatccacagcggcttcttggtgtcttttatggtcgacgctcgcggtggagcaatgagaggctgtcgtcacaacggacttcggatcattattcccccacgcaagtgcactgccccaacaagggtgacttgtaggttagtaaagcgacataggctggccactatgcctccaatggtggagggcgaaggtctggcttcccgactcatagaagttgggccctctggtgctcagttccttggaaaactgcacctgcccacggcacccccaccgctcaatgagggcgagtctttggtcagtcggattctgcagttaggccccccaggcacaaaattcctgggccctgtgatcgtcgagatcccacacttcgctgcgcttcgaggtaaagagagggagttggtagtgttgcgatcagagaacggcgattcttggaaagaacatttctgcgattatacagaagatgagttgaatgaaattcttaatggtatggatgaggtccttgacagtcctgaggacctcgaaaagaaacggatctgtaggataatcactagagacttcccccagtacttcgccgtagtatccaggatcaagcaggactccaacctcatcggccctgaggggggcgtactgagctctacagtcgttcctcaggtccaggctgtcttccccgagggggctctgaccaaacgcatcagggtcggtctgcaggcccagcccatgcactctgaactggtaaagaaaatcttggggaataaggcgacattttctccaatcgtgacactggagccccggcggagaaaattccataagccgatcaccatgacaatacccgtcccaaaggcttcatctgacgtcatgttaaatggcttcggaggtgacgcccctactctgcggctgttatgtagcattacaggtgggacaacacccgctcagtgggaggacattaccggcaccacgcctctgacattcgtgaacgaatgcgtttctttcacaacgaatgttagcgccaggttttggttaatcgattgcagacaaatccaggaatccgtgaccttcgcctcacaagtataccgtgagatcatttgcgtgccatacatggctaagttcgtggtgtttgctaaatctcacgaccccatcgaagcccgtttacggtgtttctgtatgacagacgacaaagttgataagacccttgaacagcaggagaatttcgcggaggtggctaggtcgagggatgtagaagtccttgaaggcaagccaatttacgtggactgtttcggcaacctggttcccttgaccaagtccggtcagcaccacattttctcgttctttgcttttaaggagaatcgcctgccattgttcgtaaaagtcagagatacaactcaggagccatgcggcaggttatctttcatgaaggagccaaaaagtacgaggggccttgtgcatcaggccatttgtaacctcaatattacgctgcccatttacaccaaggagtccgaatccgatcaagagcaggaggaggaaatagatatgacttccgagaagaacgacgagacagaaagcacggagacaagcgtgctaaagtctcacctggtgaacgaagttcccgtcttggcgagccctgacctactctcagaagtcagcgagatgaaacaggatttgataaagatgaccgccatcctgaccacagacgtgtctgataaggccggcagcattaaagtcaaagagttggtgaaggccgccgaggaagagcccggtgagccgtttgagatcgttgagagggtgaaggaggatctggagaaagtgaatgagatcctgcgcagcggcacctgcacaagggatgaaagctctgtgcagtcctcccgatcagagagaggcttggtcgaagaagaatgggtcattgtgagtgacgaagagattgaggaggcacgacagaaggcgcccctggagatcacagagtacccatgcgtggaggtgcggattgataaggagataaaggggaaagtcgaaaaggattccaccggcctggttaactacctgactgatgacctgaacacctgtgtcccactgccgaaagagcaactccaaaccgtacaggacaaggccgggaagaaatgtgaagcgctggcagtcggccgcagtagcgagaaggagggaaaagatattccaccagacgaaacccagagcacccagaaacagcataaaccctctctggggataaaaaaaccagtgagaagaaaactaaaagagaaacagaaacagaaatag

SEQ ID NO: 108220 - DNA, 5592 bp, synthetic construct
  misc_feature 1..5592: note = Description of Artificial Sequence: Synthetic coding sequence
  source 1..5592: mol_type = other DNA
atgaccacaatgctgcagaaatcggactcgaatgcaagttttcttcgcgccgcacgggcgggtaatctggataaagtagttgagtacctcaaagggggaatcgatattaacacatgcaatcagaacggcctaaatgcattacatttggccgcgaaggagggtcatgtgggcctagtccaggaactgctgggtaggggatcatcagtggacagcgccaccaagaaaggaaataccgccctccacatcgcctcactcgccggccaggcggaggtagttaaagtgctcgtaaaggaaggagccaacatcaacgcccaaagccagaatggcttcacccctctgtatatggccgcccaggaaaatcacattgatgtggtaaagtatcttctggagaacggcgctaaccagagtacggcgacggaagacgggtttacaccattagctgtggcactacaacagggtcacaatcaggctgtggccatcctattagagaacgatacaaagggcaaagtgagactcccagcactgcatatagccgcccggaaggacgacaccaagtccgccgccctactgttacagaacgatcataacgctgacgtacagtccaagatgatggtaaacagaacaaccgagagcggtttcacccctctacatatcgccgcccattatggaaatgttaacgtggcaacgctacttttgaataggggcgcggctgtagattttactgcacgaaatggtattacgcccctgcatgtggcctcaaagagggggaatactaacatggtgaagctcctgttggatcggggcggacagatcgacgctaagacgagggatgggctcacccctttgcattgcgccgcgcgctctggccacgaccaggttgttgaattgctgctcgaacgcggcgctccactccttgcccggaccaagaatggactgtctccattgcatatggctgcgcaaggggaccacgttgagtgcgtcaagcacctgctccagcacaaagccccagtagatgatgtgacattggactatttaactgcactgcatgtagcagctcactgtggccattatcgcgtcacaaaattgctcttggacaagagggccaaccccaatgcacgcgcacttaacggctttacccccttgcatatcgcttgtaagaagaatcgcataaaagtgatggaactcctagttaagtacggcgcttctatccaggctataacagaatccggtcttacccctattcatgtcgccgcctttatgggccacctaaacattgtgttactcttgttacagaatggcgccagtcccgatgtgacaaacattagaggcgaaactgctttgcatatggcagctcgggcaggacaagtcgaagtggtccgttgtttgctcaggaacggcgcgctggtggacgctagggcacgtgaggaacagaccccccttcatatcgctagtagactcggaaaaacagaaatcgtgcagttgctgttacaacacatggcacacccagacgccgccaccacaaatgggtacactcccttgcacatctcggccagggaggggcaggtggacgttgccagcgtgcttctggaggctggcgccgctcatagtctcgctacaaaaaaaggttttactcccctgcacgtggccgccaaatatggcagcctagacgtggccaaactgcttttgcagaggcgtgctgccgccgactctgcaggcaaaaacggcctcacaccactccacgttgccgcccactacgataatcaaaaggttgctctgctcttgttagagaagggtgcttccccacacgcaaccgctaagaacgggtatacaccgctgcatatcgctgctaagaagaatcagatgcagattgctagcaccctcttgaattacggcgctgaaacgaatatagttaccaagcagggcgtgacacctctgcatttagcttcgcaggagggccacacagacatggttactctgctgctagacaaaggtgccaacatccatatgagcactaagtctggtttgacctcccttcacctggctgcacaggaagacaaggtaaatgtggccgatatcttgacaaagcatggcgccgaccaggatgctcacaccaagctgggctacacacctctcattgttgcctgtcactacggtaatgttaagatggtgaacttcctcttgaagcaaggggccaacgtaaacgccaagaccaagaacggatacacacccctgcaccaggctgcccagcaggggcatacacacattatcaatgtgctcctccaacacggcgcaaagcctaacgccaccactgccaacgggaataccgcgctggcgatagctaaacgactgggctatatcagtgtggtggacaccttaaaggtggtcaccgaagaggtgacaactactacaactaccatcaccgagaaacataaactaaacgtccccgaaactatgactgaagttcttgatgtctctgatgaggagggtgatgacactatgacaggcgacggaggcgaatacctgaggccggaagacctgaaggagctgggagatgactcattgccttcaagtcaattcctggacggcatgaattacctccggtactctttggagggcggcaggtccgactcgctgaggtcattttcaagcgatcgcagtcacaccctgtcgcatgcttcttacctgagagacagcgcagtgatggacgatagcgttgtcattccctcacatcaggtgtcgacgctggctaaagaggctgaacgtaacagctatcgactatcttggggcacagagaacttggacaatgtggccctgagttcttcaccaatccattcaggcagggcctctccatgtctggagagggacaactcgtcttttctagtgtcgttcatggtggacgctagagggggagccatgaggggctgcaggcataatgggctgcggattattattccgcctcgtaaatgcactgcccccacccgtgtgacgtgtagactggtgaaacggcataggcttgccaccatgccgccaatggttgagggagagggcctcgccagcagactaatcgaggttgggccaagcggggcccagttccttggtaagttgcacctcccaacagcgccaccccctctgaatgaaggggagtccctcgtttcacgcatactgcagctgggacccccgggcactaagtttctggggcctgtaattgtggaaattcctcatttcgcagccctgaggggaaaggagcgcgaactcgtggtacttaggagtgagaatggagactcttggaaagagcacttttgcgattacaccgaggacgagttaaacgagatcttaaatggcatggatgaggttctggattcacccgaggacctggaaaaaaagagaatatgcaggataatcacaagagactttcctcagtattttgccgtggttagcagaattaagcaagatagcaatctgattggccctgaggggggtgttctgtccagtactgtggtacctcaagttcaagccgtgtttcctgagggggcactgaccaagcgcatcagagtgggtctgcaggcccagccgatgcacagtgagctcgtgaagaaaattcttgggaataaagcgaccttctccccaattgtcaccctagagcctaggcggcgcaaattccacaagcccataacaatgaccatccccgtgccaaaggcatcttccgatgtaatgcttaatggttttggcggggatgcaccgactcttcggctgctgtgctctatcacaggtgggacaaccccagcccagtgggaagatattaccggaacaaccccactgacatttgtcaatgagtgtgtgtcatttactaccaacgtttccgctagattctggttgattgattgccgacagattcaggagagtgtgaccttcgcctcgcaggtgtatcgagagatcatctgcgtcccctacatggcaaaattcgttgtctttgcgaagtctcacgatcccatcgaggccaggcttaggtgcttctgcatgaccgatgacaaagtggacaaaacactagagcaacaggagaattttgccgaagttgctcgatcaagggatgtcgaagtgcttgaaggtaagcccatctatgtagattgcttcggcaacctagtgccgttgacgaaatccgggcagcatcatatattctcctttttcgcattcaaagagaaccgtcttcctctgtttgttaaagtgcgggatacaactcaggagccatgtggtaggcttagcttcatgaaagaaccaaagagcacaagggggttggttcaccaggctatctgcaacctgaacatcactctgccaatctacacaaaggagtctgaatccgatcaggagcaagaggaggaaattgatatgaccagtgagaagaacccccaggacgaacaagaaaggatagaagagagactggcgtatatcgctgaccaccttggtttcagctggacggaattggcacgggaattggactttaccgaggagcagatacaccaaattagaattgagaacccaaattctcttcaggatcagtcccatgccctacttaagtattggcttgagagagatggaaaacacgcgacagatactaacttggtagaatgccttactaagattaatcgtatggatatcgttcacctcatggagactaatacagaaccacttcaagaaaggatttcgcacagttacgcggaaattgagcaaacaatcacattagaccacagcgagggtttctcagtgctgcaggaagaattgtgtactgcacagcacaaacagaaggaagagcaggcagtgtcaaaggaaagcgagacctgcgaccatccacccatcgtgtctgaagaagacatcagtgtgggctactcgacgtttcaggatggcgtgcccaagacagagggcgattccagcgccactgctttgttcccacaaactcacaaggaacaagtgcagcaggacttctctgggaaaatgcaggaccttcccgaggagtcaagcctggagtaccagcaagaatactttgtaaccaccccaggcacagagacgtctgaaacccagaaggctatgatcgtgccctcctcacccagcaagacacccgaagaagttagcacgcctgccgaggaagaaaaactgtacctccaaacccccacaagtagcgagcgcggcggatctcccataattcaggaaccggaagagccgagcgaacaccgcgaagagagctccccccgcaagacatctcttgtcatcgtcgagtctgccgataaccagccagaaacatgcgaacgactcgacgaggatgccgcattcgaaaaaggggatgacatgccagaaataccgccagagactgtgacggaggaagagtacattgatgagcatggccacactgttgttaagaaggtgacacgcaaaatcatcaggaggtacgtgagctcagaaggaaccgagaaagaggagatcatggtccaggggatgccgcaagaacccgtcaacatagaagagggggacggatactcgaaggttattaagcgagtagtcttaaagtccgacacggaacaatcagaagacaacaacgaatag

SEQ ID NO: 108221 - DNA, 5586 bp, synthetic construct
  misc_feature 1..5586: note = Description of Artificial Sequence: Synthetic coding sequence
  source 1..5586: mol_type = other DNA
atggcctctagcgccagttcatcccccgccggaacagaggactcggcccctgcacaggggggcttcgggtcagactactctcggagctcgcggaaatcagacgcaaacgcttcatatctgagagccgcccgggctggccaccttgagaaagcccttgactacataaagaacggagtggatatcaatatttgcaatcaaaacggattaaacgctctccacttagcatccaaagagggccatgtcgaggtggtctctgagctgctgcaacgcgaggctaatgtggatgctgccactaaaaaaggaaacactgccttacacatagcaagtctggctggtcaggccgaagtggtgaaagtcctcgtaaccaatggcgctaatgtgaacgcccaatcacaaaacggatttacaccgctgtatatggccgcacaagaaaaccacctggaagtcgttaagtttctgctggataacggcgcctcccaaagcctagcgaccgaggatgggttcacgccactggctgtcgccctgcaacagggccacgatcaagtcgtgtcgcttctgctggagaacgatactaagggaaaagtgcggcttcccgccttgcacatagccgcccgcaaggacgatactaaagccgcagccctgctactgcagaacgataacaacgcagacgtggagtcgaagtctggatttaccccactccacatcgccgctcactacgggaatatcaacgtagcaacattgctgctcaatagagccgccgctgttgatttcacagccaggaacgacataacacccctgcatgttgcttccaagaggggtaatgccaacatggttaagcttcttctcgaccggggagctaaaatagatgcaaaaaccagagatggcctcaccccgctgcactgcggtgcacgctccgggcacgagcaggtggtagagatgctgctcgaccgcgccgctcccattctcagcaaaacaaagaacggcctctctccattacatatggccacccagggcgatcacctgaattgtgtgcagctgctgttacagcataacgtgccagtggacgatgttaccaacgactaccttacagccctgcatgttgcagcccattgcggtcattataaagtagcaaaggttctattagataagaaagccaatcctaacgctaaggcgctgaatggctttacccctctgcacattgcatgcaaaaagaaccggatcaaagtcatggaactgctgcttaaacatggcgcatcaatccaggccgttacagagtctggtctcacccctatccacgtggccgcgttcatgggccatgtgaacatcgtgagtcaactgatgcaccacggcgctagcccgaacaccacgaacgtcagaggagagacagcgttgcatatggcagcccgcagcggccaggctgaggtggttaggtatctagtccaggatggggcacaagttgaggcgaaagcgaaggatgaccagacgcccttgcacatttccgcaagactaggcaaagccgatatcgtccagcagcttctgcagcaaggggctagtcccaacgccgctacaacgagtggttacaccccactccatctgtcggccagggaaggccatgaggatgtggccgctttcctgttggatcacggcgcaagcctgtctattacaacaaagaaaggttttacacctctacacgtggcagctaaatacggaaaactggaagtggctaacctgttgttgcagaagagcgccagccctgatgctgcaggaaagagtggcttgaccccgctacacgtggccgcccattacgacaatcaaaaggtcgccttgctgctgctggatcagggagcctcacctcacgctgcggccaagaacggatataccccattgcacatcgccgctaagaagaaccaaatggatattgccacgacgctgctcgaatacggcgccgatgctaatgctgtaacccgccagggcatagcaagcgtgcacctcgcggcccaggaagggcacgtggacatggtgagcctcctgctgggccgcaacgccaacgtaaacctttctaataagagcggactgacaccactccatcttgcggctcaagaagatcgtgtgaatgtcgcagaggtactggtaaatcagggtgctcacgtggatgcacagacaaagatgggttatacgcccctccacgttggctgtcattacggaaatataaagatcgtaaactttctgttgcagcacagcgcaaaggtaaacgcaaaaactaaaaacggctacactccgcttcatcaagcagcgcaacaggggcatacacacatcatcaacgtgctgttacagaacaacgcttcacccaacgaattgaccgttaatggaaatacggccctaggtatagcacggcgcctcggttacatttccgtcgttgatactctgaagatcgtgacagaagagactatgacaacaacaacagttacagagaagcacaaaatgaacgtcccggagacaatgaatgaggtactggacatgagcgacgacgaagtgcgaaaggcgaacgctcccgaaatgctatctgatggggaatacatttcagatgtagaggaaggcgaggacgctatgacaggcgatactgataaatacctgggcccacaagatttgaaggaacttggagatgattccctccctgctgaagggtacatgggattttccctgggcgcccggtcagctagcctaagatccttctcatctgacaggtcctatactctgaacagaagttcttacgccagggattctatgatgattgaagagctcctcgtgccctcaaaggaacagcatctgacttttacccgcgaattcgattcagactccctgcgccactactcctgggctgcagacacacttgacaacgtcaatctggtatcatcccccatccattctgggttcctcgtgtcattcatggtggacgcaaggggtggatcgatgcggggatctcggcaccacgggatgagaataataattccgcccagaaagtgcaccgcccctaccagaatcacatgccgtctggtcaaacggcataaattagctaatcctcctcctatggtggaaggagaagggcttgcaagtcggttggttgaaatgggccccgccggcgcccagttccttggccccgttatcgtcgagatcccacactttggcagtatgcggggtaaggaacgcgagttgatcgtgcttcgctccgaaaacggcgagacatggaaggagcatcagttcgatagcaagaacgaggatctgaccgaactcctgaacgggatggacgaggaacttgacagccccgaggagctcgggaaaaagaggatttgtcgcatcataaccaaagacttcccgcagtactttgcagtggtatcccggatcaaacaggaatctaatcagattgggcccgaagggggcattctcagtagcactactgtccctctcgttcaggcctcatttccagaaggtgccttgaccaagcgaataagagttggcttgcaggcgcagccagtccctgatgaaattgtgaagaagatcctcggaaacaaagccacctttagccctatagtgactgtggagccccgacggcgcaaattccataagccgataactatgactattccggtcccaccccccagcggcgagggagtttctaacgggtacaagggggacaccactcccaacctcagattgttatgctcgatcaccggcggcacatcccccgctcagtgggaggacattacaggcacgacacctttaacctttattaaggactgtgtatcattcaccacaaacgtatctgccagattctggttggcggactgccaccaggtgttagagacagtgggtcttgccactcagctgtatagagaactgatctgtgtaccctacatggccaaattcgtcgtctttgccaagatgaatgacccggtcgagagtagcctcaggtgtttctgtatgactgacgacaaagtggacaaaacgcttgagcaacaagagaacttcgaggaagtggctcgcagcaaggatatagaagtcctcgagggaaagccaatctacgtggactgctatgggaatctggcgcccctaacgaagggtgggcaacaactggtattcaatttttactccttcaaagagaatagactgcctttcagcattaaaattagagacactagccaggagccctgtgggcggctgtctttcctgaaggagcctaagacaaccaaaggcttgccgcagaccgccgtatgtaatttaaacatcacacttcccgcacacaaaaagattgagaagacggatagacgtcagtcattcgcctccctggcattgcgtaagcggtacagttatctgaccgaacccggtatgagtcctcagtccccctgcgagagaacggatattcggatggccattgtggcagaccacctgggcctcagctggactgagctggctagagagctgaatttctcagttgatgaaattaatcagattcgagtcgaaaatcccaattcgcttatctcacagtcttttatgctgttgaagaagtgggtcaccagggatggcaagaatgcaaccactgatgctctcacgtcagtgcttaccaaaattaatcggattgatatcgtaaccctgctggagggccctatcttcgactatgggaatatcagcggcactagaagttttgccgacgagaacaacgtgtttcatgatcccgtcgatggttacccctcgctgcaggtagagctggagacccctacaggtctgcactataccccgcctacacccttccagcaggacgattatttctccgatattagtagcattgagtctccactgagaactccatctagactctccgatggcttagttccaagccaagggaatatcgagcactccgccgacgggccccccgttgtgactgctgaggatgccagtttggaagactccaaactggaggactccgtacccctgactgaaatgcccgaggcagttgatgtagacgagagtcagctggaaaatgtgtgcctctcatggcagaatgaaacatccagtggcaacctggagtcctgcgctcaagctcgcagggttacaggtgggctgctggacaggctcgatgactcccccgaccagtgccgcgattcaatcactagttacctgaaaggggaggccggcaaatttgaagcgaatggctctcacacagaaattaccccggaagcgaaaacgaaatcctacttcccggagtcacaaaatgacgtgggcaagcagagtactaaagaaacccttaagcccaagattcacggttcaggccacgtagaagagccagcctccccacttgccgcctatcaaaagagcctggaagagacttcgaaactcattattgaagagaccaagccttgtgtgcctgtatcaatgaagaagatgagtcgtaccagcccagcggacgggaaaccgaggttgtcattgcacgaagaggaaggcagttcaggcagtgaacagaagcagggcgaaggatttaaggtgaaaaccaagaaggagattcggcacgttgagaaaaagtcacactcatag

SEQ ID NO: 108222 - DNA, 5607 bp, synthetic construct
  misc_feature 1..5607: note = Description of Artificial Sequence: Synthetic coding sequence
  source 1..5607: mol_type = other DNA
atgtcggaagagcccaaggaaaaaaatgccaagcccgcccatcgcaaaagaaaggggaaaaaaagtgacgccaatgcgagctacttgagggcggctagggccggacatttagaaaaagccctcgattatattaagaacggcgttgacatcaatatatgtaatcagaatggcctcaatgccttgcacttagcttccaaagaaggccacgtggaggtagtgagcgagctgctccaacgggaagccaacgtggacgccgcgactaaaaaaggtaatacggccctgcatattgcctccctggccggacaggccgaagttgtcaaggtcctcgttacaaacggagcaaatgtgaatgcccaatctcagaatgggttcaccccactgtacatggcagctcaggagaaccatctcgaagttgtaaagttcttgctggataatggggctagtcagtctttggccactgaggatggctttacacccttggcagtggccctccagcagggacacgatcaggtggtgtctctgctccttgaaaatgacactaagggaaaggtgcgcttgccggcgctgcacatcgctgcccggaaggatgacacaaaggccgcagctctcctattgcaaaacgacaacaacgccgatgtagaatcaaaaagtggctttactccccttcatatcgccgctcactatggtaatatcaatgtggccaccctcctgctgaaccgagctgccgctgtagactttacagcgcggaacgatataacccctctccacgtcgctagcaagcgagggaatgccaacatggttaagctgttgctcgaccggggcgcgaagattgacgctaaaacccgggatgggctgaccccgctacactgcggagccaggtctgggcacgaacaggtggttgagatgttgcttgatagggcagccccaattctgtctaaaaccaagaacgggctcagccccctgcatatggctacccagggagatcacttaaattgtgtgcagctcctcttacagcacaatgtcccagtcgacgatgttacaaatgactatctgacagccctgcatgtagctgcccactgcgggcactacaaggtagctaaagttttgcttgacaagaaggctaatcccaatgctaaggcgcttaatgggttcacccctttacatattgcctgtaagaagaatcggataaaagtgatggagctcctgttaaagcacggtgcttcaattcaggccgtcacagaatccgggttgacaccgatccatgtcgctgccttcatgggacacgttaacattgtcagccagctgatgcaccatggtgcaagccccaataccaccaacgtccgcggggagaccgcattgcatatggccgccagaagcggccaagctgaagtggtgagatatttggtacaggatggggcgcaggtagaagccaaagccaaagacgaccagacacccctgcacatatccgcgcgcctcggcaaggccgatatcgtccaacagctgttgcaacaaggcgcatcgccaaatgccgctaccacatctggctacaccccccttcaccttagcgcacgtgagggacacgaggacgtcgccgcttttctactggatcacggagctagcctgtccatcactaccaaaaagggtttcacgccattgcacgtcgcagccaagtacggaaagttggaggtggcaaaccttctgcttcaaaaaagcgcctctcctgatgccgccggaaagtccggcttaacacctttgcacgtggctgcacactacgacaaccagaaagtggccctccttctgttggaccagggagcgtcaccgcatgcagctgccaagaatggctacacccctctacatatagcagccaaaaagaaccagatggacatcgcaacaacactcttagaatatggagcggacgcaaatgcagttactcggcagggcatcgcaagtgtgcatctggctgctcaggagggccatgtggacatggtgtccctcctactgggccggaacgctaacgtcaatctgagcaataagtccgggctgactcctttgcatctggctgctcaggaggacagagtgaatgtggccgaggtcctggtaaatcagggggcccatgtggacgcccagacgaaaatgggttatactcctttgcatgtgggctgtcactatggtaacattaagatcgtgaattttcttttacagcacagcgcgaaagtgaacgccaagacgaaaaacggatacacacccctgcaccaagccgcccaacaaggccacacgcacatcattaatgtgctgctgcagaataacgcttcgcccaacgagctgaccgtaaacggcaacactgccctaggaattgctcgccgccttggttacatatccgtggtggacactctgaagattgtaacagaagagactatgaccactacaacggtaacagagaaacacaagatgaacgtcccagaaaccatgaacgaggtgctcgacatgtccgacgacgaggtacggaaagccaatgcccctgagatgctgagtgatggtgagtacataagtgacgtggaagaagggaacaggtgcacttggtataagatccctaaggtgcaagagtttacggtcaagtcagaagacgccatgaccggtgataccgataagtacctggggccccaggacctaaaggagctgggggacgacagtctgcccgccgaaggatacatggggtttagtctaggcgcgcgctctgccagcctcaggagtttctcctccgatcggtcttatactctaaataggtcgtcatatgcccgcgacagcatgatgattgaggaactcctggttccttctaaagagcaacacctaacgtttactcgcgagttcgactctgacagcctgcgccactacagctgggcagcagacacactcgataatgtcaaccttgtctctagccctattcactccgggttcctcgttagctttatggtggatgcccgcggcggaagtatgcgcggaagccgtcatcacggcatgcgcatcatcatcccccccagaaagtgtaccgccccgacccggattacctgccgcctggtgaagaggcataaactggcaaatccccccccaatggtggagggtgaagggctggccagcaggctggtggaaatgggcccagccggcgctcagttcctggggccagtgatcgtcgaaatccctcacttcgggagtatgagaggcaaagagcgagagttgatcgtcctacgcagcgagaacggcgagacatggaaagagcatcagttcgattccaagaacgaagatctgactgagttgcttaacggtatggacgaagaactcgactcgccggaggagctgggcaaaaaaaggatctgccggataatcacaaaggattttcctcagtacttcgccgtagtctctcgaatcaagcaagagtccaaccagatcggaccggagggcggaatcctgtcgagtaccactgttcccctcgtccaggccagctttcctgaaggtgccctcaccaagcgtatcagagtgggcctccaggcgcagcctgtacccgacgagattgtgaaaaaaatcttggggaacaaggctactttctcacccatagttacagtcgaaccacgtcggcggaagttccacaaacccattacaatgacaattcctgttccccctcctagtggcgaaggcgttagtaatggttacaaaggggacaccacccctaatctgcggctgctgtgcagtatcacaggtggcaccagccctgcccagtgggaggacattacaggtaccacgccactgacctttatcaaagactgcgtgtccttcactaccaatgttagcgcccgattttggctcgctgactgtcaccaggtattggaaacagtaggccttgccacacaactgtatcgagagctgatttgtgttccttatatggccaagtttgttgtattcgcaaaaatgaatgaccctgtcgaatcatcgttgagatgtttctgtatgaccgacgacaaagtagacaagacactggaacaacaggaaaacttcgaggaggtcgcaaggtccaaggacatagaagtgctggagggcaaaccaatctacgtggactgctacggaaacctggccccattgacgaagggcgggcagcaactagtgtttaacttctactccttcaaagaaaatcgactgcccttcagcataaagataagggacactagtcaggagccctgcgggaggctgtccttcttgaaggagcccaagacaacaaaaggcctgccccagaccgctgtctgcaatctgaacatcactttaccagcccataagaaaatcgagaagacagacaggcggcagtcatttgcgtcactggccctgcggaaacgctatagttacttaactgaacccggcatgtcgccccagagcccctgcgaaaggactgacatccgcatggctatcgtggccgaccacttgggcctatcctggacggaactcgccagggagctcaatttcagcgtggacgagataaatcagatccgggtggaaaacccaaactccttgataagtcagtcttttatgttgctaaagaagtgggtcacaagggatgggaaaaatgccactaccgatgctctgacatcagtgctgactaagatcaataggatcgacatcgtgacactcctagaggggccgatttttgactatggcaacattagcggcacgaggtcttttgccgatgaaaataacgtctttcacgacccagtcgacggctatcctagcctgcaggtcgaactcgagaccccaacgggattacactacacacctccaaccccattccagcaagacgattacttttccgatatttcctcaatcgaatcaccactcagaacaccaagtagattatcagacggactggtgccatcccagggcaatattgagcacagcgctgatggaccacccgtcgtaaccgctgaggatgcatccttggaggattccaagctggaagatagcgtgccattgaccgaaatgcccgaagccgtcgacgttgatgagagtcaactggagaatgtctgtttgagctggcaaaacgagacttcttctggtaatcttgaatcatgtgcgcaggctcggagggtgacgggcggccttctggaccgtctggacgacagtcctgaccaatgtagagatagtataacctcttatctgaagggcgaggcgggcaagttcgaagctaatgggtcccacactgagatcacccctgaggcaaagaccaagagctactttcccgaatcccagaatgatgtcggtaagcagagcaccaaggagactttgaagccaaaaatacacggaagcggtcacgtggaagagcctgcttctccgctcgcagcttaccagaaatccctggaggagacatccaaattgatcattgaagagaccaagccctgtgttcctgtaagcatgaagaagatgtcaagaacttctccagctgatggaaagccccgtctgagtctacacgaggaggagggatccagtggctctgagcaaaaacagggagaaggcttcaaagttaagacaaagaaagaaatcaggcacgtggaaaagaagtctcacagttag

SEQ ID NO: 108223 - DNA, 13134 bp, synthetic construct
  misc_feature 1..13134: note = Description of Artificial Sequence: Synthetic coding sequence
  source 1..13134: mol_type = other DNA
atggcccatgcagcatctcagttaaaaaaaaacagggatctcgagatcaacgccgaagaggaaccggagaaaaaacgtaaacatcggaagcgcagtcgggacaggaagaagaagagcgatgccaacgcatcttacttgagagccgcacgagctgggcatctggagaaggccttagactatattaagaatggagttgacattaacatatgtaatcagaacggactgaatgccctccatctggcctcaaaagaaggtcatgtcgaggtggtatctgagttgctgcagagagaggcaaatgtggatgctgcaaccaagaaggggaatactgctctgcatatcgcctccctggctggacaggcggaagtcgttaaggtgctggtaactaacggagccaacgtgaacgcccagagtcagaacggtttcaccccactttatatggccgcccaagaaaatcacctcgaggttgtcaagtttctgctcgacaatggcgctagccagagtctggcgacagaagacggcttcactcctctcgcggtggcgctccagcaggggcatgaccaggttgtctccctgcttcttgaaaatgacaccaaaggaaaagtacgcttacccgctctgcatatcgctgcacggaaggacgacaccaaagccgccgctcttctgcttcagaacgacaataacgccgacgtggaatctaagagtggcttcacccctcttcatatcgcggcccactatgggaacatcaatgtcgccacattattactcaacagagccgccgcagttgatttcaccgctagaaacgatattacaccgctgcatgtcgccagcaagaggggcaacgccaatatggtcaagctcctgttggatcgaggagccaagattgatgccaaaacccgggatggcctgacacctttgcattgtggggcgcgttccggacacgaacaggttgtggaaatgctgctggaccgcgctgcaccaattctgtcaaaaaccaaaaatggtctctcccctttacacatggcaactcagggagatcacctaaactgcgtgcaactgctgctgcagcacaacgtgcctgtcgacgacgtgacgaacgactacctcactgcgttgcacgttgccgctcattgcggtcattataaggtggccaaggtgctactggataagaaagcaaacccaaatgctaaggccttaaatggattcaccccgcttcacatcgcctgcaagaaaaatcggatcaaggtaatggagttgctactgaagcatggtgcatccatccaagctgtgacggagagcggccttacaccgattcacgtcgcagccttcatgggccacgtgaacatagtgtcacagctaatgcaccatggtgcgagcccaaacacgaccaatgtgaggggggaaaccgcgctacacatggctgcaagaagcggacaagcagaggtggtgcgctatctcgttcaagatggagctcaggtggaggccaaagcaaaagacgaccagactccacttcatatatccgctcggttgggcaaggccgatattgttcaacaactactacaacaaggagcaagccctaacgccgctactacaagcggctatacacctctgcacctctctgccagagaggggcatgaagatgtggcagcttttctgttggatcacggcgccagcctttcgataaccaccaagaaggggtttaccccattgcatgtggcagctaaatatggcaagctcgaggtggccaatctgctcctgcagaaatcggccagccccgatgccgccggtaaaagcgggctcacaccgttgcacgttgcggcccattacgacaatcaaaaggtggcactcctgctccttgaccagggcgctagccctcacgccgcggcgaagaacgggtacacccccctacacatcgctgcaaaaaagaatcagatggatattgccaccactctcctcgagtatggcgccgacgcaaatgccgtaacgaggcagggaatagcctcagtgcatctggctgcccaggagggtcacgtggatatggtaagcctgctgttagggcgtaacgcaaacgttaacctgtccaataagtctggattaactccactgcacctcgcagctcaagaggatagagtgaatgtagccgaagttctggtaaaccaaggcgcccatgtcgacgcccagaccaagatgggctatacacccctgcacgtgggctgccattacggcaacataaagatcgttaactttcttttgcagcattcagcgaaagtcaacgccaagacaaagaatggttacactcctctgcaccaggcagctcaacaggggcatacacatattatcaatgtgctgttacaaaacaacgctagtcccaacgagcttacagtgaatggcaacacagcgctggggatcgccaggcgtctgggctacattagcgtggtcgatacgctcaagattgtgaccgaggaaacaatgaccacaaccacagtaactgaaaagcacaagatgaatgtgccagaaaccatgaatgaggtcctggatatgtccgatgacgaggtccggaaggcaaatgcccctgaaatgctatcagatggcgaatatatatcagacgttgaggagggcgaagacgccatgacaggggacaccgataagtacctgggacctcaggacctgaaggagctgggggatgactcgttgcctgcagaaggttatatggggttttccctgggggcccgatctgcctctctgcgctcattctcaagcgacaggtcctacacattgaataggagttcttacgctagagactctatgatgatagaagaactgctggtgccaagcaaggagcaacacttgactttcaccagggagttcgacagcgattcgctaagacactatagctgggctgccgacaccctcgacaatgtgaatctcgtaagctcacctattcacagcgggtttttggtgagtttcatggtagacgcacggggtggcagcatgagggggtctcggcaccatggtatgcggattattattccacctcggaaatgtaccgcccccactaggattacctgtaggctggtgaaacggcataaactggccaaccctcctcccatggttgagggagagggactggcaagtcgactagtggagatgggcccagcgggagctcagttcctcggtcccgtgatcgttgaaatcccgcactttggctccatgaggggtaaagagcgtgagctcattgtccttcggagtgagaatggcgaaacttggaaagaacatcaatttgatagcaagaacgaggatttgaccgagcttctgaatggaatggatgaagagctcgatagtcctgaagaattggggaaaaagagaatctgcaggattatcaccaaggatttcccgcaatattttgccgttgtaagtcggattaagcaagagtcaaaccagattgggcccgaaggaggaattctttccagtacaaccgttcccctggtccaggctagcttccccgaaggcgccctaactaagcgcatacgggtaggcctccaggcccagccagtccctgatgaaattgttaagaagatcctcggaaacaaagccacatttagccctattgtaaccgtcgagccccgccgccgcaagttccacaaaccaattactatgacgataccagttccgccaccatctggggaaggcgttagtaacggttacaaaggagacacgacgccgaacttgaggctgctgtgcagcataaccgggggaacatcccctgcacagtgggaagatattacaggcaccacgcccctgacctttatcaaagattgtgttagcttcaccaccaatgtttctgcgagattttggctggccgactgccaccaggtgttggagacagtgggattagccacacagctttatagagagttgatttgcgtcccttatatggctaaattcgtggtgttcgcgaagatgaacgacccggttgaatcatctctaagatgcttctgcatgacagatgataaggtcgataaaacactggagcaacaagagaacttcgaggaagttgctaggtcaaaggacatagaggttctggaagggaaacccatctatgtggactgctatgggaacctggccccactgacaaagggaggacagcagctcgtgtttaacttctattcttttaaagagaaccgcctcccattctccatcaaaatccgcgacacctcccaagagccttgcggtcgcctgtcctttttgaaagaacctaaaacaactaagggtttgccccaaactgccgtgtgcaacctaaacattaccttacctgctcacaagaaggagacggagagcgatcaagatgacgagatcgagaaaactgatcgaagacaatcctttgcgagccttgccttaagaaagcggtacagctacctgacagaaccaggtatgatagagaggtcgacaggcgccacacgttccttgccgacaacctattcctataagcccttcttctctaccaggccttaccagagttggaccacagcgcctatcacagttcccggaccggctaagagcggttttacctcactctcttcctcttctagtaatactcctagcgcgagccctctgaagagcatctggtcagtgagcaccccatcgcccattaagagcactttgggtgccagtaccacgtcgagcgtgaaaagtatttcagatgtggcttccccgatccggtccttcagaaccatgagttcaccaattaagaccgtggtttcacagagcccctacaatattcaggtgtcatctgggacactggcgcgcgctcctgccgtgaccgaagctacccccctaaaggggttagcctccaactccacctttagctctcgcaccagcccagttactacagccggcagcctcctggaaagatcctccattaccatgacaccaccagcttctcccaagagtaacatcaacatgtattcctccagtctcccgtttaaatcaatcataacttctgccgcccctctgatttctagtcctctgaagagcgtggtgtctcccgtgaagagcgccgtcgatgtgattagtagcgctaagattacaatggcaagtagtctttcgagcccggtgaaacagatgccaggccacgctgaggtcgccctggtgaacggatccatcagccctctcaagtacccatcatcctccaccctcattaatggctgcaaggccactgcaactctgcaggagaaaatttcgagcgccacaaattcagtcagctccgtggtatccgcagcgacagacaccgtggagaaggttttttccacaaccacggcgatgcctttctcacccctccgctcctatgtgtcggccgcgccctccgctttccagtctctccgtacaccctccgctagcgccctgtatacgtccctgggatccagtatctcagctaccacatcaagtgtgaccagttctattataaccgtccccgtttactccgtggtgaacgtgctgccagagccagcacttaagaaactgcccgactccaactcattcaccaagagcgccgccgcgcttctgagccccatcaagacactcaccacagaaacacaccctcaacctcacttcagtcggacatcttctccagtgaagagtagcctttttctcgcaccctccgctctgaagttgagcaccccctcctcattatcctcctcacaagagatcctgaaggacgtggccgaaatgaaagaggacctgatgcggatgacagctatcctacagacagacgtgccggaggagaagcctttccaacccgaattacccaaggagggtaggattgacgatgaagaaccctttaaaattgtcgagaaagttaaggaagatcttgtgaaggtgagcgaaatccttaagaaggacgtgtgtgttgataataagggcagccccaagagtcctaagtctgataagggccattcaccagaagacgactggatcgaatttagctctgaggaaatcagggaggctagacagcaggcggccgccagccagagtcctagcttgcccgaaagggttcaggtgaaagcaaaggccgcaagcgaaaaggattacaaccttaccaaagtgattgactacctgactaatgatatcggcagctctagcctgacaaatctcaagtacaaattcgaggacgcaaagaaggacggcgaggaacggcagaagagagtgctgaagcctgcaatcgccctccaggagcacaagctcaagatgccccccgctagtatgcggacttctaccagcgaaaaggaactctgtaaaatggctgacagcttcttcgggactgacacgattcttgaatcccctgacgatttctctcagcatgaccaggacaagtctccgctttcggactccggctttgagacccgatcagaaaagacacccagtgcgccccagtccgctgagtcgaccgggccaaagccattgttccacgaggtccctatcccacccgtgatcacggagacaaggactgaggtcgtgcatgttattcgaagctacgacccatctgccggtgacgttcctcaaactcaacccgaggagccagtgagccccaaaccgtcaccgacttttatggaacttgagcccaagcccaccaccagctcgatcaaggaaaaggttaaggcatttcagatgaaggcatcttccgaggaggatgaccacaaccgggtcctaagtaagggcatgagagtaaaggaggagactcacattacaaccacaaccaggatggtctatcactcacccccaggcggagagggtgcatctgagagaatagaagagaccatgtccgtccatgatatcatgaaggcctttcaaagcggccgagacccaagcaaggagctggccggcttgtttgaacataagagcgccgtgtccccagacgtacacaagtccgccgctgaaacttccgctcagcacgccgaaaaggataaccagatgaaacccaaattagagcgaattattgaggtccacatcgagaaaggtaatcaggctgaacctactgaggtcataattcgggaaacgaagaagcatcccgaaaaagaaatgtacgtctaccagaaagacttgtctagaggagacattaacttgaaggatttcctgcccgagaagcacgacgccttcccctgttcagaagaacagggtcagcaggaggaagaagaactcaccgccgaagaatcgctcccctcctacctggaatctagccgcgtgaacacaccggtcagccaagaggaagatagtcggccatcgtcagcgcagctcatcagcgacgactcttacaagacactgaagctgctgtcgcagcactccatcgaataccacgacgacgaactctccgagctgcgaggcgaaagctatcggttcgcggagaagatgctgctgtctgagaaactcgacgtgagtcactctgacaccgaagagtctgtcacggaccacgccggaccaccatcatctgaattgcagggctctgataaacgcagcagggaaaaaatagctacagctccaaaaaaagaaatcctgagtaaaatttacaaggatgtctcagagaatggcgtcgggaaagtctccaaagatgagcatttcgataaggtgacagtgctgcattacagtgggaatgtctcctcaccaaagcatgcgatgtggatgcggtttactgaagaccgcctggacagaggaagggagaagctaatatatgaagacagagtggatcgcacagtgaaagaggcagaagaaaagctgaccgaagtgagtcagttttttcgggacaaaaccgagaagctgaatgatgagcttcaaagtcctgagaagaaggctcgacccaagaatggcaaagagtactcttcgcagagtccgacttcctcctcccccgagaaggttctcctgacggagcttctcgcgtctaacgatgaatgggttaaagcgcgtcagcacggccctgacggccaaggcttcccgaaagcagaggagaaagccccttcgctgcccagttctccagaaaagatggtgttgtcccaacagactgaggactcaaagtcaacagtggaagcaaaggggtctatcagtcagtctaaggcaccagacggcccacagagcggttttcagctgaagcagagtaaactgtcgagcattcgtctcaagttcgagcagggaacgcatgctaagtctaaggatatgtctcaggaagataggaagagcgacggacagtccaggattcctgtcaaaaaaatccaggagtcgaagctgcctgtatatcaggttttcgcccgtgagaagcagcagaaagctatcgatctaccagatgagtcggtaagcgtgcaaaaggacttcatggttcttaagacaaaggacgagcatgcccaatctaatgaaatcgtggtcaatgacagtggatcagataacgtaaagaaacagagaacagagatgagcagtaaagccatgcccgacagcttctccgagcagcaagctaaagacttggcatgccacattacatccgatctcgccactcgtggtccttgggacaaaaaagtgttccgcacctgggagtcatcaggcgcgacgaataataagtcacagaaggagaaactcagccacgtgttggttcacgacgtcagagagaatcatatcggccaccctgagtcaaagagtgtggaccaaaaaaatgaattcatgtcagtgaccgaaagagagcgcaagctcctcacaaatggcagcctctctgagattaaagaaatgacggtcaaatctccctccaaaaaggtgttgtatcgcgaatacgtagtaaaagaaggggaccatcccggggggttactggatcaaccttctcgccggtctgagtctagcgcagtgagtcatatcccagtccgcgtggctgatgagcgcaggatgctgtcttccaatatccccgatggattttgtgagcagtctgcatttcccaagcatgagttgtctcagaagttatctcaatcaagcatgtcaaaggagacagtggagactcaacactttaatagcatcgaagatgagaaagtaacctactccgagatctccaaagtgagtaaacaccaatcttacgtcgggctttgtccgccgctggaggagacggaaacctcacctaccaaaagtccggactccttagagttctcccccggcaaagaatcaccttccagtgacgtctttgatcatagccccatcgacggtctggagaaactcgcgcccctcgctcagactgaaggcggcaaagagattaagactttaccagtctatgtctcattcgtgcaggtgggcaagcagtacgagaaggaaatacaacagggcggcgtgaaaaaaatcattagtcaggagtgcaagaccgtgcaggagacccgcgggacattttatacaacacggcaacagaagcagccccccagtccacagggatctccagaggatgacacgttagagcaggtgtccttcctagacagctctggcaagtcaccccttaccccagagaccccaagctcagaggaggtgtcctacgaatttacctccaaaacacctgacagccttatcgcttacattccgggaaaaccatctccaatacccgaggtgtctgaagagtccgaggaagaagaacaggccaagtcaacctctctgaaacaaacaacggtggaagagaccgcagtagaacgggagatgccgaacgatgtttcaaaggatagcaatcaaagacccaaaaacaatagggtggcctacatcgagttccctccccctccaccattggatgccgatcagatcgagagcgacaaaaaacaccactatctccctgagaaagaggtggacatgattgaagtcaacttgcaggatgagcacgacaagtaccagttggcggaacccgttatacgcgtacagccaccgagccccgtacctcccggagctgacgtgagcgattcatcggatgacgagtccatctaccaaccagtgccagtgaagaaatatacatttaaactgaaagaggtcgacgatgaacaaaaggagaagcctaaagccagcgccgagaaagcatcaaatcagaaagaactggaatccaacggatcgggcaaggacaatgaatttggactcggattggactccccccagaatgagatcgcacagaacggaaacaacgaccagtcaatcaccgagtgcagcatagccaccacggcggagttcagccacgacacagatgccactgagattgattctctggacggatacgatctgcaggatgaggacgatgggttaactgaatccgactccaaactgcctatacaggccatggaaatcaagaaggacatctggaatactgaaggcattctgaagccagccgaccggagttttagtcaaagcaagcttgaggttattgaagaagaaggtaaggtcggccctgacgaggacaagcctcccagcaagagcagctcctccgaaaagacgcctgacaaaacagaccagaagagcggggcacagttttttactctggaaggccgccaccctgatagatcggtctttcccgatacctatttttcttacaaggtggatgaagagtttgcaacccctttcaaaacagtcgccactaagggacttgacttcgatccctggagcaacaatagaggcgacgatgaggtcttcgatagtaagagccgggaagacgagaccaaaccatttgggctggcagtcgaggatcgctcccccgcaacaacccccgacactacacccgccaggaccccaacagatgaaagcactcctactagtgagcctaatccattcccttttcatgaggggaaaatgtttgaaatgacccgaagcggcgcaattgacatgtctaagcgagattttgttgaggaacggcttcagttctttcagataggcgagcatacttcagagggtaaatctggagatcagggcgaaggcgacaagagcatggttaccgccacccctcagccgcagtctggcgataccaccgttgaaaccaatcttgagcgcaacgtggaaactcccacagtagagcctaacccctctatccccacctctggggaatgccaggagggaacttcaagctccggatccctggagaagtctgccgctgctaccaacacatcaaaagtcgatcccaagctgcggacccccatcaagatggggatatctgctagcacaatgactatgaaaaaggaaggaccgggtgaaatcaccgataagatagaggcagtgatgactagctgccaggggctggaaaacgaaaccatcaccatgatcagcaataccgccaattctcaaatgggcgtcaggccgcatgagaaacacgacttccagaaagacaattttaataacaataataatctggactcaagcaccattcaaactgataatatcatgtccaacatagtgctcacagaacactctgctcctacctgcacaaccgaaaaagataatccagtaaaagtatcctcaggcaaaaaaacgggcgtcctacaggggcactgtgtacgggataaacagaaggtcctcggggagcaacagaagaccaaagagctgattggtattcgacagaaatcaaagttgccaatcaaagcaacttcgccaaaagatacattcccacccaatcacatgagtaacacgaaggcaagcaagatgaagcaggtctctcagagcgagaaaacgaaagccctgaccacctcatcttgcgtggatgtaaagtcacgcatccccgtcaaaaacacccaccgcgacaacattatcgccgtgcggaaggcttgtgccacccagaaacaaggccagcccgaaaagggaaaggctaagcagctgcccagtaagttgccagtaaaagttaggtccacatgtgtaacaaccacaacaactaccgctactacaacaaccacgactaccacaaccactacgacttcctgtactgtcaaggttcgcaagtctcagctgaaggaggtctgtaaacactcaatcgaatattttaaaggcatcagcggagagacactgaagcttgtcgatagactcagtgaggaggaaaagaagatgcagagtgagttgtccgacgaggaggagtccacctcacgcaatacaagtctgagcgagacatcccgtggggggcagcccagcgtgaccactaagtctgctcgtgacaaaaaaaccgaggctgcccctctgaaatccaaaagtgagaaagccggatccgaaaagcggtccagtcggaggaccgggccccagtccccctgtgagcgaactgacatcagaatggcaatcgtcgcggaccacctcggactcagttggaccgagttggctagggagttgaactttagcgtcgatgagataaatcagattcgtgttgaaaatccgaatagtctcatttctcagtcatttatgcttctgaagaaatgggtgacaagagatggtaaaaacgccacgaccgatgcacttaccagcgtgctgactaaaatcaacagaatcgacatcgtgaccctcctggaaggtcccatttttgactatggcaacattagcggcacaaggagcttcgccgacgagaataacgtatttcatgacccagtagacgggtggcaaaatgagacaagctcaggtaaccttgagagctgcgcccaggctcggcgcgtgactggaggactgctcgacaggctggatgattcccccgaccaatgcagggattccattaccagctatttgaaaggtgaagctggcaaatttgaggcaaacggatcccacacagaaattacaccagaggctaagacgaagagctactttcccgaatctcagaacgacgtcggcaaacaaagtactaaagagacgttgaagccaaagatccacgggagcggccacgttgaggaacctgcgagcccattggcagcatatcagaaatccttggaggagacgtccaaactgatcatcgaagaaaccaaaccctgcgtgcctgtatccatgaaaaaaatgagccggacctcacccgctgacggtaagcctagactgtctctccacgaagaagagggcagctctggttcagagcagaagcagggggaaggttttaaggtcaagacaaagaaagaaattagacatgttgaaaaaaaatctcacagttag

SEQ ID NO: 108224 - DNA, 3006 bp, synthetic construct
  misc_feature 1..3006: note = Description of Artificial Sequence: Synthetic coding sequence
  source 1..3006: mol_type = other DNA
atggctttgccacagagtgaggacgctatgacaggtgatactgacaaatatcttgggccacaggatctgaaggagcttggagatgacagtctacccgccgagggttacatgggattctcccttggcgcaagatcagcctcgttacggagttttagttctgaccggagctacacattgaaccggtcttcatatgctagagattccatgatgatcgaggagctcctcgtgccctccaaagaacagcatctgacttttacacgggaattcgactctgactcgctgcgacactactcatgggcagcagacacgcttgataatgtgaacttagtatcaagccctatacactcgggcttccttgtctcttttatggttgacgctcgtgggggttcgatgcgggggagtagacaccacggcatgcgcattattatcccgcccagaaagtgcacagcccctaccaggattacgtgtagattagtgaagcggcataagctggccaatccacccccaatggtcgaaggtgaagggttagcgagccgccttgtggagatgggtcctgcaggggcccagtttctaggccccgtgatcgtcgaaatcccacacttcgggtctatgagaggaaaggagcgggaactaattgtgctgcgatcagaaaatggtgagacatggaaggaacatcagttcgattccaaaaacgaggatctcacggaactcctgaacggcatggacgaagagctcgatagcccagaggagcttggcaagaagagaatctgtagaattatcactaaagacttcccccagtacttcgccgtggtgagccgaatcaagcaggagagcaaccagattgggcccgaaggaggcatactcagctccacaactgttccactagtgcaagcatcttttcccgaaggtgcgctgacaaagcgaataagggttggacttcaggcccaacccgtccctgatgagatcgttaagaagatcctagggaacaaagcaacctttagtcccatcgtaacagtagaacctcggagaaggaaatttcacaagcccattactatgaccatccctgtcccacccccatctggcgagggggtcagtaacggctacaaaggggacaccaccccaaatctcaggttgttgtgctccatcaccggcgggacttccccggcccaatgggaagacattaccgggactaccccactcacttttatcaaggattgcgttagctttactaccaacgtttcagcaagattttggcttgctgattgtcaccaggttttagagaccgtgggtctggctacgcagctttatcgagagctgatatgcgtgccatacatggccaagttcgtggtatttgccaaaatgaatgaccccgtagagagtagcctgaggtgtttctgtatgacggacgacaaggtggataaaacactcgagcagcaggaaaactttgaggaggtggcaagatctaaagatatcgaggtactagaaggaaagccgatctatgtggactgctatggtaatctggcccccctgaccaagggcggccaacagctggtttttaacttctattctttcaaagaaaacagattaccattctctattaaaatcagagatacctcacaggagccatgcggcagactaagtttcctgaaggaaccaaaaaccaccaagggcctaccccagacagccgtttgtaacttgaatatcacccttcccgctcacaagaaaattgagaagacagatagacggcaatcctttgccagcctcgctctgaggaaaaggtactcatacctcaccgagccaggtatgagcccccaatcaccctgcgagcggaccgatatccgcatggctattgtcgcggaccatcttggtctgagctggacggaactcgcgcgggaacttaattttagcgtggacgagatcaaccaaatccgggtcgagaaccctaatagcctaatttctcagtcttttatgcttttaaagaagtgggtgactcgcgatgggaaaaacgcaacgaccgacgccctgacctctgtgttaactaaaatcaaccggattgacatcgtaactctgctggaagggccaattttcgactacggaaacatatcaggaacgcggtccttcgctgacgaaaataacgtgttccacgatccagtcgacggatacccctccctccaggtggagcttgagacccccactggcttgcattacactcccccaaccccctttcaacaggacgactacttttcagacatctcaagcatcgaatcacctctgcgtactccctccaggctctccgatggactcgttccgagtcagggaaatattgagcactctgccgatgggccgccagtggtgacagcagaagatgcgagtctggaagatagtaaactcgaagactcagtgcctttaactgagatgcccgaggcggtggatgtcgacgaatcacaactcgaaaatgtatgcctttcgtggcaaaatgagacttcaagcggcaacctcgagagctgtgcccaggccagacgggtgactggaggtcttctggaccggctggatgacagccccgatcagtgcagggactcaataacaagttatctgaaaggcgaggccgggaagttcgaggctaacggaagtcacaccgaaataactcccgaagccaagaccaagtcatattttcccgaatcccaaaacgacgtaggaaagcagagtaccaaagaaaccctcaagcctaaaatccacggttccggtcacgtcgaggagccagcatcccctctggcagcgtaccagaagagtctggaagagacgtccaagctgattatcgaggaaaccaaaccttgcgtcccagtctccatgaaaaagatgagcaggacatcaccagccgacggcaagccgcggctcagcttacacgaagaggaagggtcttctgggtcagagcagaagcaaggcgaagggttcaaggtgaagactaagaaggagatcaggcatgtggagaaaaaaagccactcctag

SEQ ID NO: 108225 - DNA, 3306 bp, synthetic construct
  misc_feature 1..3306: note = Description of Artificial Sequence: Synthetic coding sequence
  source 1..3306: mol_type = other DNA
atgagcgaggagccaaaggaaaagaacgccaaacctgcgcaccgcaagagaaagggaaaaaaatctgacgccaacgctagctacctgcgcgctgccagagcggggcaccttgaaaaagctctggactacatctccgtagtagatacactaaaaattgtcaccgaagaaacaatgaccactacaaccgtcacagagaagcacaaaatgaatgtcccagagacaatgaatgaggtcctagacatgagcgacgacgaagtgagaaaagccaacgcacctgaaatgctttctgacggtgagtacatttctgacgtcgaagaaggagaggacgccatgacgggggacacagataaatacctgggcccacaggatctgaaggagctgggcgatgactcgctcccagcagaagggtacatgggattctccctcggcgcgagaagcgcttctctccggtccttctcctccgatcggagctacactctgaaccgttcttcttatgctcgtgatagtatgatgattgaggagttgttggtgccgtcaaaagagcagcatctgacttttacaagggaatttgactccgattccttgcggcactattcttgggccgcagacacactggataacgtgaacctggtgtcaagtcctattcatagcggattcctcgttagctttatggtggacgcgcggggtgggtccatgcgcggttccaggcaccacgggatgagaataatcatccctcctcgtaagtgtaccgcccccacccgcattacctgtcgccttgtgaagaggcacaagctggcgaatccgcctcccatggtcgaaggagaagggctggcttcaaggctagtagaaatgggccctgctggcgctcagtttctcgggccagtgattgtggaaattccccacttcggttctatgcgcggcaaagagcgggagctgattgtactgcgaagcgagaacggcgaaacatggaaagagcaccagtttgattctaagaatgaggatttgaccgagctgctaaatggcatggacgaagagctcgacagccccgaggagctggggaagaaacggatttgccgaattataactaaggatttccctcagtactttgctgtcgtatcacgcatcaaacaggaatccaatcagatcggcccagaaggcggcattctgagttctacaacagttcccttggtgcaggcctctttccccgaaggcgccctgacgaaacgcatccgcgtgggtctgcaagcacagcctgtgcccgatgaaatagttaagaagatcctggggaataaagccacattctcacccatagtgaccgttgagcccaggcgtagaaagtttcataagcctataacaatgactattcctgttcctcctccatcaggggaaggggtgagtaacgggtataaaggagacaccactcccaatctgcgccttctgtgtagcattaccggaggaacatcacctgcccagtgggaggacataaccggcaccacgccactcacattcattaaggactgtgtcagctttaccaccaacgtgtcagcccggttctggctggctgattgtcaccaggtgctggaaaccgtcggccttgccacgcaactttaccgcgagttgatttgtgtaccctacatggccaagtttgtggtctttgcaaagatgaatgatcctgttgaaagttctctgcggtgcttctgcatgacagatgataaggtcgataaaacactggagcagcaggagaactttgaagaggtggcccgctccaaggacattgaggtccttgagggcaaaccaatctacgttgattgctatggaaatctggcgccattaaccaaaggaggacagcagctggtgttcaacttttatagcttcaaggagaatagactgcctttctccatcaagatccgggacacctcacaagagccctgcggacggctatctttcctgaaggagccaaaaacaactaagggactgcctcagactgcagtctgcaatttaaacatcacactgcctgcccacaaaaaaatcgaaaagacagatcgcaggcaatcttttgcctccctcgcactgagaaagcgttattcttatttgaccgagccagggatgtcacctcaatcaccatgcgagcgaacagatattaggatggctattgttgctgaccacttgggtctgtcttggacggagctagctcgcgagctgaattttagcgttgatgagatcaatcaaattcgtgtggaaaaccccaattccttgatatcccaatctttcatgctcctgaaaaagtgggtgacccgagacggtaaaaacgcaactacagacgccctgacatccgtcctcacgaaaatcaatcggatcgacatcgtgacactactggaggggcccatctttgactacggtaatatctccgggacccggagcttcgcagatgagaataatgtgttccacgatcctgtggatggttacccaagtctgcaggtggagctagaaacccccacaggccttcactataccccgccaactccatttcagcaggatgactatttctccgacatctctagcatcgaatcccctttacgcacaccaagcaggctgtcggatggtttggtaccatcgcagggaaacatcgaacattcagcggacggtccgccagtcgtgaccgcagaagatgcttctctggaggacagcaagctggaagactcagtgcctttgacagaaatgcccgaagccgtggacgtggacgaatcccaactcgagaacgtttgtcttagctggcagaatgagactagttctggcaaccttgaaagctgtgcacaggcccggcgggtgacgggaggactgctggaccgactcgatgatagccccgatcagtgcagagatagcatcacatcatacctcaaaggggaggccggaaagttcgaggccaatggaagtcatacagagatcaccccggaggctaagactaaaagttatttccccgaatctcagaacgacgtgggcaagcagagcaccaaagaaacgctgaaaccaaaaattcacgggtcaggccacgtggaggaacccgcctccccccttgctgcctaccagaagtctttagaggaaacctctaagttgattattgaggagactaagccttgtgtgcccgtttccatgaagaaaatgtcccgtacctccccagcagatggcaaaccccggttgtcactgcatgaggaagaaggttctagcgggagcgagcaaaagggcgaggggtttaaagtgaagaccaaaaaagagatacggcatgtagaaaagaaaagccattcatag

SEQ ID NO: 108226 - DNA, 3387 bp, synthetic construct
  misc_feature 1..3387: note = Description of Artificial Sequence: Synthetic coding sequence
  source 1..3387: mol_type = other DNA
atggcaacgcaaggggaccatctcaattgcgtacagcttctgttgcagcataacgttcctgtcgacgatgttaccaacgactacctaaccgccctgcacgtggccgcccactgtggacactacaaagtagctaaagttctgcttgataagaaggcaaaccctaacgccaaggccctgaatggtttcacgcccttacacattgcctgtaagaaaaacagaattaaggtgatggaactcctgctgaagcacggagccagcatccaggccgtgactgagagcgggctcacgcctattcatgttgctgcctttatgggtcatgtaaatattgtgtctcagcttatgcaccacggtgctagtcccaatacaacaaacgtgaggggggagaccgccttacacatggctgcaaggtctggacaagccgaagttgtccgctacctggttcaggacggggctcaggtggaagccaaggccaaagacgatcagacccctctgcatatttctgccagactaggaaaagccgatatagtacaacagctgctccaacaaggggccagtcctaatgctgctactacttcgggttatacccctctgcatctgtctgccagggagggacacgaggacgttgccgcatttctgctggatcacggagcgagcctgtccatcacaactaagaaaggatttacccctttgcacgtggccgcaaagtatggaaagctcgaggtagccaatctgctcctccagaagtccgcttcccccgacgcagcaggcaagagcggtctgacaccactgcacgtggcggcgcactatgataaccagaaagttgctttgttactccttgatcagggagcctcacctcatgctgccgcaaaaaatggttacactcctctgcatatcgcggccaaaaagaaccagatggacatagccactaccttacttgagtatggagctgatgcaaatgccgtaactcggcaaggcattgcatctgtccatctggccgcccaagagggacacgtggatatggtcagtcttctgcttggcaggaacgctaatgtgaatctttccaacaagagcggcctcactccattacatctggccgctcaggaggacagggtcaacgtcgctgaagtgctggtgaaccagggcgcccacgtcgatgcccaaaccaagatggggtacaccccactgcatgtgggttgccattacggcaacataaagattgtaaattttctcctgcagcattctgccaaggtaaacgcaaaaacaaagaatggctatacccctttgcaccaggcagcgcagcaggggcatacccacataattaacgtcttgctgcagaataacgcgtctcctaatgagctaactgttaatgggaatactgcactgggcatagctcgtaggcttggctacatttcagtcgtggacaccctcaagatcgtcactgaggagacgatgacgaccaccaccgtcaccgaaaagcacaagatgaacgtgccagagaccatgaacgaagtgctcgacatgagcgatgatgagggggaagacgcaatgacaggtgacacagataagtatttagggccccaggatctgaaggagttgggagacgatagtctgcccgctgaggggtacatgggttttagcctgggtgctcggtctgccagttcagacaggtcatacacacttaatagaagttcttatgcgagagactccatgatgatcgaagaactcctggtgcccagcaaagagcagcaccttaccttcacccgggagttcgacagcgactccttgaggcattattcttgggctgccgacaccctcgacaatgtgaatctcgtgtcttccccaatacacagcggttttctggtaagttttatggtggacgctcgtggcggaagtatgcgtggtagccgccaccatggcatgcggatcattatccccccccggaagtgtactgccccgacacgcattacttgccgactggttaaaaggcacaagttggccaatcccccaccgatggtcgagggagaaggtttagcaagtagactcgttgagatgggccctgccggagctcagtttctggggcccgtgatagtcgagatcccccatttcgggtcaatgagagggaaagaacgggagctcattgtgctgcggagtgaaaatggggagacatggaaagagcaccaatttgactccaagaatgaggatctaactgagcttcttaacggtatggatgaggagctggactcaccagaagagctgggcaagaaaagaatttgtcgcatcataacaaaggacttcccacagtattttgctgtcgtctcaaggataaaacaggagagtaatcaaattggccctgaaggaggtatcctctcctccaccaccgtcccactggtgcaggcgagcttccctgagggagctctgacgaaaagaattagagtaggcctgcaagcccagcccgtccccgatgaaatcgtgaagaagatcctgggtaataaggccacctttagtcctatcgtgactgttgagccaagacgtagaaagttccataagcctattactatgactatcccggtgccaccgccaagcggggaaggggtgtccaatggctataaaggtgatacaactccgaaccttcgcttgctctgcagcataaccggggggacatcccccgctcagtgggaggacattaccgggacaacaccactgacatttataaaggactgcgtttcctttacgaccaacgtgagcgcccgcttctggcttgctgactgccaccaggtgctcgaaactgtgggactggccacacagctatatagagagttaatctgcgttccttacatggctaagtttgttgtgtttgctaaaatgaacgatcctgtggaaagctccctaagatgcttctgtatgactgacgacaaggttgataaaaccctcgagcaacaggagaacttcgaagaagtcgctcgctcaaaggatattgaggtgttagaaggaaagcctatttacgtggattgttacggcaacctggccccactcaccaaggggggccagcagctggtgtttaacttttattcctttaaggaaaacagattgccctttagcatcaaaattcgagatacgagccaggaaccatgcggcaggctgagcttcctgaaagagcctaaaaccacaaaggggttgccacagaccgccgtctgtaacctaaacataacattgccagcacacaaaaaaatcgagaagaccgaccgcaggcaatctttcgcgtcgctcgcactcaggaagcgctatagctacctgaccgagcccgggatgtctgagttccccaacacatttacaaatacttggatctttatacgcagagacatctttagcatccagacaaagttttag

SEQ ID NO: 108227 - DNA, 5544 bp, synthetic construct
  misc_feature 1..5544: note = Description of Artificial Sequence: Synthetic coding sequence
  source 1..5544: mol_type = other DNA
agcgatgccaatgcctcttatttgcgcgccgctcgtgctgggcatctggagaaagcactggactacatcaaaaacggggtcgatatcaatatatgtaatcagaatggcctgaacgctctgcacttggcaagcaaagaggggcacgttgaagtggtctctgaattgctgcaacgagaagctaatgtcgacgctgctactaaaaaaggaaatactgccttgcacatagctagcctggcaggacaggcagaggtggtcaaagtgttagtcactaatggcgcaaatgtgaacgcccaaagccaaaatggctttacccctctgtacatggcagctcaggaaaatcacttggaggttgtcaagttcctgctggacaatggcgcttcccaatctctggctacggaagacggcttcaccccactggctgtagccctacagcagggtcatgaccaagtagtgagcctgttgctggagaacgacacgaagggcaaagtgcgcctccccgcattgcacatcgcggctagaaaagacgataccaaggccgccgcactgttattacagaacgacaacaatgcagatgtcgagagcaagagtggattcacacctctccacatcgctgcacattatgggaacatcaacgtggccacattgctcctgaaccgggcagcggccgtcgattttacagcacgcaatgacatcacacctctacatgtcgcatctaagagaggcaacgccaacatggtgaaacttctgctggatcggggcgctaaaattgatgccaagaccagagacggtctcacccccctgcattgtggagcgcggagcggtcacgaacaggtggtggagatgctacttgacagagccgccccaattctcagcaaaacaaaaaatggattgtctcctctacatatggctactcagggggatcacctcaactgtgtccagttgctgttgcaacacaatgtgccggtggatgacgtgaccaatgattacctgactgctctgcacgtggccgcacattgcgggcactacaaagtagcaaaggtactcctggacaaaaaggctaaccctaacgccaaagccctaaatgggttcacaccactacatattgcatgcaagaagaatcgaattaaggtcatggaattgcttctgaagcacggagccagcattcaggccgttacagagtctggcctcactcctatccatgtcgctgcctttatgggacacgtgaacattgtgtcgcaactaatgcatcacggggcttctcccaatactacaaacgttaggggtgagacagccctccatatggcggcccggtccgggcaggccgaggtggttagatacctagtgcaggatggagcacaggtggaggcaaaagccaaggacgaccaaacgcccctgcacatctccgcacgtcttggcaaagcggacatcgtacagcagctcctccaacagggggcctcacctaatgccgccactacctcaggttataccccactacatctctccgcaagggaaggtcatgaggacgtcgcggccttcttgctggaccatggggcctccctcagtattaccacaaagaaagggtttacacccctgcatgttgcagctaaatacggcaagctggaggttgctaatcttttgctccagaagtctgctagtcccgacgcagccggaaaatctggactgacgccgttacatgtagccgcgcattacgataaccagaaagttgcgctgctcctgctggatcaaggcgccagccctcatgccgcggctaagaacggctatactcctttacacatagccgctaaaaagaaccagatggatatcgccactactctgctcgagtatggagcagacgccaacgcagtgacacggcagggaatcgcctctgttcacctggctgcgcaggagggtcacgttgatatggtctcattgctactcggcagaaacgccaacgtgaacttgagcaataagtcaggcctcaccccactccacttggccgcccaagaagacagggttaatgttgcagaggtgctagtgaatcaaggagcgcatgtggacgcccagacaaagatgggatataccccccttcatgtgggttgccactacgggaatattaaaatcgttaatttcttactgcaacactcagccaaagtgaacgctaagacaaagaacggatacaccccgcttcaccaggcagcccagcagggacatacccacattataaacgtcctgcttcagaacaacgcctcaccgaatgagttgactgtgaacggcaatactgctctcggcatagccagacgactaggatacatcagtgtcgtcgacactctcaagatagtcactgaggagacgatgaccacaaccacagtgacagagaagcacaaaatgaatgtcccggaaacgatgaacgaagtgttggacatgagcgacgatgaagttcgtaaggcaaacgctcccgaaatgctgtccgacggggaatacatatcagatgtcgaggaggggaaccgctgcacatggtataaaatccccaaggtccaggagttcaccgtgaagtctgaagatgcaatgaccggggatacagataaatacctgggaccacaagacttgaaggaacttggggacgactccctccctgccgaaggatacatggggttctctctcggggcacggagtgcatccttaaggtcctttagcagtgaccggagttatacattaaatcgatcgtcatatgctcgcgactctatgatgatagaggagctgctggtgccctccaaggaacagcacctaacatttacacgtgagtttgactcagactccctccggcactatagctgggctgccgataccttggacaacgtaaacttggtgtctagtccaatccactccggctttctggtctcgtttatggttgatgcaagagggggatcaatgaggggatctaggcatcatggaatgaggataatcataccacctcggaaatgcacagctcctactcgcattacttgcagactggttaagcggcacaaactggctaaccccccacctatggtcgagggcgagggcctggcctctcgcctcgtggagatggggccggctggcgctcagttcctgggcccagtcatagtggagatccctcacttcggctctatgcgcggcaaggagcgggaactgattgtcctgcggagtgagaatggcgagacatggaaagaacaccagttcgatagtaagaacgaagatctcaccgaactgcttaatggcatggacgaggagctagacagcccggaggaattgggaaagaagcgaatatgtcggatcatcactaaagactttccccagtactttgctgttgtgagccgcatcaagcaggaaagcaaccaaatcggccccgagggaggaattctgagctcaacaacagtcccactggtgcaagcctccttccccgaaggcgctcttacgaaacggattcgggtggggctgcaggcgcaacccgtaccagacgaaattgtcaagaaaatactcggaaataaggctacatttagtcctatcgttaccgttgagccacggagacgaaagttccacaagcccatcacaatgactatccccgttccccctccttccggggaaggagttagcaacgggtataaaggggacacaacccctaatctgcggctgctctgcagtatcacaggaggtacatctcccgctcaatgggaggatatcacaggcactacccctctgacattcattaaggactgtgtgtcctttaccaccaacgtgtctgctaggttttggctggctgattgtcaccaggtcttggagaccgttgggctcgcgacccagctgtatagagaactcatctgcgtaccctatatggccaagttcgtggtattcgctaagatgaatgatcctgttgaaagctccctgcgatgcttctgtatgactgacgacaaggttgacaaaaccctggagcaacaagaaaattttgaggaggtggctcggagtaaagatattgaggttttggaaggcaagcctatctatgtcgattgctacgggaatttggcaccattgactaaaggcggacagcagctggtctttaacttctattcctttaaggaaaaccgcctaccatttagcattaagatccgagacacatcccaggaaccatgtggacgactgtcctttctcaaagagcctaagacaaccaaagggctgccccaaacagccgtctgcaacttaaatattacgctgcctgctcacaagaaaatcgaaaagacagaccgccggcagtcgttcgccagcttagcccttcgaaaacgatattcttatctcaccgaaccaggcatgtctccacagagtccatgcgagagaaccgacattcggatggccatcgtggccgatcatttggggctctcttggactgagctggcacgtgaactgaacttcagcgtggacgaaatcaaccaaatccgggttgaaaacccaaactctctgatatctcagtccttcatgcttctgaagaagtgggtgaccagagacggtaagaacgccaccaccgacgccctcacaagcgtgctgactaagattaataggatcgatatcgtcactctcctcgaaggtccaatttttgattatggcaatatctccgggacaaggagctttgccgatgaaaataacgtgtttcatgatccggtggatggatacccctctctccaggtggagcttgagacccccactgggctgcactacacaccgccgaccccattccagcaggatgactacttctctgatatctcctccatcgagagtccactgaggactccgagccggctttcagatggattggttccatcgcaaggtaacatcgaacacagtgccgatggcccgcctgttgtgaccgctgaggatgcttctctggaggattccaagcttgaagattccgtgcctttgacggagatgccagaggccgtcgacgtcgatgagtcccagctggagaatgtctgtctgtcatggcagaacgagacgtccagcggaaatttagagtcgtgtgcccaggcccgtagagtaaccgggggactcctcgatcgcctggatgattctcctgaccagtgcagagattctatcacgtcgtacttaaagggagaagccggtaaattcgaggcaaacgggtctcacacagagataaccccggaggctaagactaagagctacttccctgagtctcagaatgacgttgggaagcagagcaccaaggaaactctcaagcccaagatccatgggtctggacatgtggaggagcctgcatcgccgcttgccgcctaccagaaatccttggaggagacaagcaaactgattattgaggagacaaagccgtgcgtgcctgtgagcatgaaaaaaatgagtagaaccagccccgctgatggcaagccccgattaagcctgcacgaagaagagggatcttctggtagtgaacagaaacagggggaaggcttcaaggttaaaaccaagaaagagatcaggcacgtcgaaaagaagagccatagctag

SEQ ID NO: 108228 - DNA, 3354 bp, synthetic construct
  misc_feature 1..3354: note = Description of Artificial Sequence: Synthetic coding sequence
  source 1..3354: mol_type = other DNA
atggccacccaaggggaccacctgaactgtgtgcagttgctgctgcagcacaatgtgccagtggatgatgtgacaaatgactacttaaccgcccttcatgtggcagcccactgcggccattataaagtcgccaaggtccttcttgataaaaaagcgaatcctaatgccaaggccctaaacggttttacaccattgcatatagcctgtaagaaaaatcgaattaaagtgatggagcttctcctgaagcacggagcaagcatccaggctgttaccgagtcaggactgaccccaattcacgtcgcagcttttatgggccacgtcaatattgtgtcccagctgatgcaccatggagcttcacccaatacgaccaatgtccgtggagaaaccgcacttcacatggcagcacggagcgggcaggctgaagtagttcggtatttggtgcaggatggcgcccaagttgaggcaaaggctaaggacgatcagacacccctgcacatctcagcacggctgggcaaagctgacattgtgcagcaactgttacagcagggcgcctccccaaatgcggccactacatcaggctatacacctctgcacttgtcagccagagaggggcatgaggacgtggcagccttcctgcttgaccacggtgccagtctctctatcacaaccaagaagggcttcactccactgcacgttgccgccaaatatggaaaactagaagtggccaatctactgctgcagaagagcgccagccctgacgccgccggaaaatctggtttgacaccactgcatgtggctgcacattacgacaatcagaaggtcgcactgctcctcctggaccagggagcctccccccacgcagctgccaaaaatggctatacccccctgcacatcgccgcgaagaaaaaccaaatggacattgcaaccaccctcctggaatacggagctgatgctaatgctgttacacgacagggcattgccagtgtgcacctagcagctcaggagggccatgtagatatggtctccttgctgttgggcaggaatgccaacgattctgggctcacaccccttcatctggccgcgcaggaggatcgtgtgaacgttgcagaggtactagttaatcagggagctcacgtggacgcacagaccaagatggggtataccccgctgcatgtgggttgccactatggcaacatcaagattgtgaattttctcctgcagcactctgcaaaagtgaacgcaaaaactaagaatggctatactcccctccaccaggccgcccagcagggccatactcacattatcaatgtgctgctccagaataacgccagtcccaatgaactcaccgtgaatggcaacactgctctggggatcgctcggagactgggttatattagcgtcgttgacaccttgaagattgtcaccgaggagactatgactaccactaccgtgaccgagaaacacaaaatgaatgtgccggagactatgaatgaagttttggacatgtcagatgatgaaggagaagacgcaatgactggagacacagacaagtatctggggccccaggacctgaaggagcttggagacgacagtttaccagccgaagggtacatggggttctctctgggcgccaggagcgcaagcctgagatcctttagttccgatcgtagctataccctcaaccggtcaagctacgccagagattcaatgatgattgaggagcttctcgtaccctctaaggagcaacatctgacattcacccgggagttcgatagcgattcactgaggcattacagctgggccgctgacactctggacaatgtgaatctggtttcgagccccatccactctggttttttggtgtcttttatggtcgatgctcgggggggcagcatgcggggaagtcgccatcatggaatgcggatcattatccctccacgtaaatgtacggctcctacgcgcattacatgtaggcttgtcaaaaggcacaagttggctaatccccctcccatggtggagggcgaaggtttggccagcaggcttgtggaaatggggccagcaggcgctcagttcctgggtcctgtaatcgtggaaatcccgcactttgggtccatgcggggtaaggaacgcgagctaatcgtcctgagatctgagaacggggaaacatggaaagagcaccagttcgatagtaagaatgaagacctgacagagctactcaacgggatggacgaggaattggatagcccagaagaactgggcaagaaaagaatttgtaggatcatcacgaaggacttcccccagtacttcgctgttgtctctcgcatcaaacaggagagcaaccagataggtcctgaaggcggtatcctctcatctaccaccgttccccttgtgcaggcatcgtttcccgagggcgccctgaccaagcgtattcgagtggggcttcaagcgcagcctgtcccagacgaaattgtgaagaagatcctcggaaacaaggccacctttagtcccatcgtgacagtggaaccccgaagacgaaagtttcacaagcccataacaatgacaatccccgtgcctcctccttccggagaaggagttagcaatggctacaaaggcgacactacacccaatctaaggttactctgcagtattacgggggggaccagcccagcccagtgggaggatatcactggtactactcctcttacatttattaaagattgcgtatcttttacaactaacgtgtcagccaggttctggcttgctgactgccaccaggtgctagagaccgtgggcctggccacacagctgtatcgagagctcatttgtgtgccctacatggcaaaatttgttgtcttcgcaaagatgaatgacccagttgagagttcgttgaggtgtttttgcatgactgacgacaaagtagataaaacgctcgagcaacaagaaaatttcgaggaagtggcaaggagcaaggatatcgaagtactggaaggaaagccaatatatgttgattgttacgggaaccttgcacctctcacaaaaggtgggcaacaactggtgttcaatttttattccttcaaggaaaaccgccttcccttcagcatcaagatcagggatactagccaggaaccctgcggccggttgtcattccttaaagaacccaaaactaccaaaggcctgccacagacagccgtctgtaatctgaatatcactctccccgctcataaaaaaatcgagaagacggacagacgccaaagtttcgccagcttggctcttagaaaaaggtacagctacctgaccgagcccggaatgagcgagtttccaaatacgttcacaaaccttagggggttctcctag

SEQ ID NO: 108229 - DNA, 2436 bp, synthetic construct
  misc_feature 1..2436: note = Description of Artificial Sequence: Synthetic coding sequence
  source 1..2436: mol_type = other DNA
atggccctgccacagtccgaggacgctatgaccggagataccgataagtacctcgggccccaggacttaaaggaattgggtgacgactccctccccgcggagggctatatgggtttttctctgggcgcccggtctgcctcactgcgatcattctcttctgatagaagttacacattaaaccgcagcagctacgccagggatagtatgatgattgaggagctgctggtgccctctaaggaacagcatctcactttcacccgcgaattcgacagtgactcgctcaggcactactcttgggcggccgataccctggataatgtcaatctagtgagctctcccattcactccggtttccttgtgtctttcatggtagatgcccgaggggggagcatgagggggagccggcaccatggcatgcgtattattataccgccacggaagtgtaccgcccccacgaggattacatgtagactggtgaaacgacacaaactggcaaaccctcctccaatggtcgagggagaaggccttgcaagtaggctggtggaaatgggccctgcaggggcacagttcctggggcctgtcattgttgaaatcccccacttcggctcaatgaggggcaaggaacgagagctgatcgttctgcgctcagagaacggggagacgtggaaggagcaccaattcgatagtaagaacgaagatctgacagaattactgaatggaatggatgaggagctcgatagcccggaggagttgggtaagaagcgtatctgtaggattataactaaagatttcccccaatatttcgcagtggtctcccgcattaaacaagagagcaatcagattggcccggaaggcggaatcctgtcaagcacaaccgtgcccctggtacaagccagtttcccagagggcgcacttacaaagcggattagagtggggttgcaagcccaacctgtgccagatgagatagttaaaaagatcctgggaaacaaggctacttttagtccaattgtaaccgtagagcctagacggagaaagttccataagcctatcactatgacaatcccggtgccgcccccaagtggggagggggtcagcaacggctacaagggggacacaacccctaacttaagactcctttgcagcatcacaggcgggacttcgcctgctcaatgggaagatattacaggtaccactccactgacattcattaaagactgtgtttctttcactaccaatgtgagcgctagattttggctggccgattgccatcaggttctggagacagtgggcctggcaacccagctctaccgcgagctgatatgcgttccttatatggccaaatttgtcgtgtttgccaagatgaatgatcccgtggaaagctcactgaggtgcttctgcatgactgacgataaagtggataagacattggaacaacaagagaacttcgaggaagtggctaggtctaaggatatcgaggttctggaggggaaaccaatttacgtggactgttatggcaacctcgcacccttaaccaaagggggccagcagttggtctttaacttctacagcttcaaagaaaatcggctgcccttcagtatcaagatacgggatactagtcaagaaccttgtggtagactgagttttctcaaagagcctaagacaacaaaggggctcccacaaacggccgtgtgtaacctcaacattactctacctgcacacaagaaaatcgagaagacagacagacggcagtctttcgccagtctggcattacggaaacgatacagctatctgacagaacccggaatgtctcctcagagtccttgtgagcggacagatatccgaatggcaatcgtggccgatcacctgggactcagctggaccgagttggcaagggaactgaactttagcgtggacgagatcaatcaaatcagggtggaaaacccaaactccctcatatctcagtcttttatgctgttgaagaaatgggtgacccgggatggtaagaatgccaccactgatgccctgacatctgttctcactaagattaatcgcattgatattgtaactctgcttgaaggtcctatttttgactacggcaatatcagcggaacgcgcagtttcgcagacgagaataacgtttttcatgatcccgtggatgggtacccatctctgcaggtggagctggagacccctacgggcttgcactacacccccccaactccatttcagcaagacgactacttcagtgacatcagttccatcgaaagcccgctgagaactccttcacggctgagtgacggcctggtcccctcccagggcaatatcgagcactcagctgatgggcctcccgtggtgactgccgaagacgcgagcctcgaggactccaagctggaggactccgtgccactgacagagatgccagaggctgtgatgtag

SEQ ID NO: 108230 - DNA, 2796 bp, synthetic construct
  misc_feature 1..2796: note = Description of Artificial Sequence: Synthetic coding sequence
  source 1..2796: mol_type = other DNA
tttaccctggcacacgtcccacaaagaggcgaaacggctctccacatggccgcccggagcggccaggcagaagtggtgcgttacttggtgcaagacggggctcaggtggaggcgaaagccaaagatgaccagacacctctgcatatctctgcccggctcgggaaggcggatatagtccaacagctcctgcaacagggggccagccccaacgcggccaccacaagcggttatacacctcttcatctgagtgcgcgagaagggcatgaggacgttgcggcattcctcttagatcacggggcatctctgtctattaccaccaagaaaggatttactccactccacgttgcggccaagtacggcaaactggaagtggccaatctgctgctgcaaaagagtgcctcccctgatgctgccggcaagtccggcctcactccactgcatgtggccgcccattatgataaccagaaggtcgctcttctgctgcttgatcagggtgcatccccgcacgctgccgccaagaacggatacacgcccctgcatatagcagctaaaaagaatcaaatggacattgccaccacccttctcgaatacggcgctgatgccaacgcagtgaccaggcagggtatcgcgtccgtgcacctggccgcgcaggagggacacgtggatatggtgtcactgctcttgggtaggaatgccaatgtcaatttgagtaacaaaagcgggctgacaccacttcatctggcagcccaggaggatagagtgaatgtggccgaggtgctggtgaatcagggggcccacgtggatgcccaaaccaaaatgggttatacgcctctacacgtcgggtgccactatggcaatatcaagatcgtcaatttcttgcttcaacattctgcgaaggtgaacgccaagaccaagaacggatatactcctttgcaccaggctgctcagcagggacacacccatatcattaatgtactgctgcagaacaacgccagccctaatgagctcaccgtgaacggcaataccgccctggggattgcacgcaggctgggctacatctccgtggtggacacccttaaaatagtgaccgaggaaactatgaccacaaccacagtgactgagaagcataagatgaatgtccccgagaccatgaatgaggtgctcgacatgtctgacgacgagggtgaagatgcaatgaccggagataccgataagtacctcggcccacaagatttgaaagaactcggcgatgatagcctacctgctgaaggctacatggggttctcactcggtgctaggtccgcatcaagatctttctcttcagaccgaagctataccttgaacagaagtagttacgcaagagacagtatgatgatagaagagcttctcgttccaagcaaagaacagcacctgacgtttacccgagaattcgactcggattcgctgcgtcactactcctgggccgcagacaccctggataacgtcaacctggtctcttctccaatccattctggatactcaagccccctcccccagtacgattctaggtttctcgtttcctttatggttgacgcccgaggcgggtcaatgcgcggttccagacaccatggtatgcggattattatcccgcctcgaaaatgcacggcccctacacgcataacgtgccggctggttaagcgtcataagctggctaatccacctccgatggtggaaggcgagggcttggctagtcggttggtcgaaatgggacccgctggcgcccagttccttggacctgtcattgtagagattccgcattttggctctatgaggggaaaagagcgtgaattgatcgtattgagatcggagaacggtgagacttggaaagaacaccaattcgatagcaagaatgaggacctgacggaactcttgaatggaatggacgaggaacttgactcacccgaggagctgggcaagaagagaatctgccgaatcatcaccaaggacttccctcagtattttgccgtggtgtcaaggattaaacaagagtccaaccagattgggccagaagggggtattcttagcagcaccaccgttccactcgtgcaagcatcattccctgagggagcactgacaaagagaattcgggtaggactccaggcacagccggtcccagacgagatcgtaaagaaaattttgggcaacaaggccaccttctcccctattgttaccgtcgagccacgacgcaggaaatttcacaagccgattaccatgacaatccctgttcccccgccctctggagagggtgtgtccaacggctataagggagataccaccccaaacttacgtctcctttgtagcatcactggcggaacctcgcccgcccagtgggaggatatcacaggaactactcccctgacattcattaaggactgtgtgtctttcactacaaacgtgagcgcgagattttggctcgccgactgccaccaagtactggaaaccgtcggactggccacccagctatatcgagaactgatttgtgtgccctacatggcaaaattcgtagtttttgctaagatgaacgatcccgtggagtcaagcttgcgttgcttttgcatgacagatgataaggtggacaagaccctggagcagcaggaaaattttgaggaggtcgcaaggtcaaaagacattgaggtaccctgctcccaaaagcaggttcattttatcacttattcaagatatgaagtcctgttctgtggattaaactcgactcactataagattccttccgccctgttgattctgctgcttctgtag

SEQ ID NO: 108231 - DNA, 1647 bp, synthetic construct
  misc_feature 1..1647: note = Description of Artificial Sequence: Synthetic coding sequence
  source 1..1647: mol_type = other DNA
tcactccctgagagcgaagatgcaatgacgggtgacactgacaagtatctagggccacaggaccttaaggaactgggggatgacagcctgcccgctgagggatatatgggatttagtttgggtgccagatctgccagcctcaggtccttctcctctgacagatcatataccctgaatcgcagcagctacgcccgtgacagcatgatgatcgaggagctcctcgtaccttctaaagagcaacacctgacctttactcgggagtttgattccgacagcctaaggcactactcgtgggccgcagatacacttgacaacgtgaatctagtgagctcgccgatacattctggattcctggtttccttcatggttgacgcacgcggcgggagtatgagaggttcccggcatcacggaatgcggataatcattcctcctaggaagtgcactgctcctacacgcataacatgccgacttgttaagcggcataaacttgctaaccctcctccaatggtcgaaggggaaggccttgcttctcgcctggtcgaaatgggccctgccggagcacaatttctggggcccgtgatcgttgaaatccctcatttcgggagcatgcgaggcaaagagcgcgagcttattgtgttgagaagcgaaaacggcgagacctggaaggaacatcagtttgattcaaagaatgaggatctgaccgagctgcttaatggtatggacgaagagctggactcgccggaggaactggggaaaaagcgtatatgccgcattattaccaaggacttcccgcagtattttgcagtcgttagtcgtatcaaacaggaatcaaaccagattggccctgaagggggtattctttcgtcgacaacagtaccattggtgcaggccagctttcccgagggggctctcaccaaaagaataagggttggcctgcaggcacagccagtgccggatgaaatcgtaaaaaaaatattgggcaacaaggctacattttcgccaatcgtgactgtggagccacggcgtaggaagtttcataagcctataacgatgacaatccctgtgcctcctccttccggcgagggagtgtccaacggctacaagggggacaccaccccgaacctaaggctgctgtgcagcataacaggggggaccagccccgcgcaatgggaggatattactggaacaactccgctaacctttatcaaggattgcgtatcgttcacaaccaacgtttcagccaggttctggttggccgactgccaccaggtgctagagaccgtcggtctggctactcagttatatcgcgaactgatctgtgtcccctatatggccaagttcgtagtgtttgcaaagatgaatgaccctgttgagagctctctccggtgtttctgcatgaccgatgataaagtcgataaaacacttgagcagcaggaaaacttcgaggaagtagcccgaagcaaagacattgaagtcctggaggggaaacccatctacgtggattgttatggcaacctcgcacccctgactaaagggggccagcagctcgtgttcaatttttacagtttcaaggaaaaccgcctgcctttcagcatcaagataagagacacttcacaaaatattgtccaactgtcctgcctgttgtag

SEQ ID NO: 108232 - DNA, 1443 bp, synthetic construct
  misc_feature 1..1443: note = Description of Artificial Sequence: Synthetic coding sequence
  source 1..1443: mol_type = other DNA
atggccgtcgctagagctgcactcggcccgctggtcacgggcctgtacgacgtacaggcattcaaattcggggactttgttctaaagtccggtctatcatcccctatctacatagacctgcgggggatcgtgtctagacctaggcttctatcccaggtggctgacatcctttttcagaccgcgcagaatgcagggatttctttcgataccgtttgtggagtaccgtacacggccttgcccctcgccacagtgatttgcagcaccaaccagattcccatgctgataagacgcaaggagacaaaagattacgggacaaagagactcgtggaaggtacaattaaccccggagaaacctgtttgatcattgaagatgttgtgaccagcggctcttctgtgctggaaaccgtggaggttctgcagaaggaagggctgaaggttaccgatgccatcgtgctcctagaccgggaacaaggtgggaaagacaaattacaagctcatggcatccggcttcattctgtgtgcacactgagcaaaatgctggaaatccttgagcagcagaagaaagtcgatgccgaaactgtcggccgcgtgaagaggtttatccaggagaatgtgtttgtagcagccaaccataacgggtcccccctgtcaatcaaagaggctcccaaggaactgtccttcggagcgcgcgccgagctgcctcgaatccaccccgtagctagtaagttgctgcggcttatgcagaagaaagagaccaatctgtgtctcagcgctgacgtgtcactggctagggagcttctccagctcgccgacgccctgggcccaagcatatgcatgctgaagacccacgttgacattctaaacgatttcacactcgatgttatgaaggagctcattacgctggctaagtgccacgagtttttaatttttgaggacaggaaatttgcagacataggaaacacggtgaagaagcaatacgaggggggcattttcaagatagcctcttgggcagatttggtcaacgcacacgtggtgcccggttctggagttgtgaaaggattacaggaagttgggctgcctttacaccgcggctgcctgctgattgccgagatgagctccaccggtagtcttgccactggcgattataccagggcggcagtgcggatggccgaagagcatagcgagtttgtggtgggatttatttctggcagccgcgtgagtatgaagcctgaattcctccacttgacccctggagtacagctggaggccggcggggataatctcggacagcaatacaacagcccacaggaagtaatagggaaaagaggatccgatatcattatcgtggggcgtgggattatctccgcagcagaccgtctggaagctgcagagatgtatcggaaagccgcctgggaagcttacttgtcacggcttggagtctag

SEQ ID NO: 108233 - DNA, 1218 bp, synthetic construct
  misc_feature 1..1218: note = Description of Artificial Sequence: Synthetic coding sequence
  source 1..1218: mol_type = other DNA
atggatacgtctgatctgttcgcctcttgcaggaaaggtgacgtcggaagagtgaggtacttactggagcaggttctgtatctgctggccaacggtgctaggtgcgaggcaaatacctttgatggcgaacgctgtctctacggtgcacttagcgatcctatccggagggctctcagagactacaagcatcctttgctctgggatttgttgtcagacctcgaggccaaatgcgagaaagtctctgaattcgtggcttcaaagcctggcacgtgcgtaaaggtcctgactattgaaccaccacctgctgacccaaggctgcgagaggacatggctttgctggccgactgcgcactccctcccgagttaagggcgtttttctgcgggcgcagtgactactttcgggctcttctcgacgaccatttccgcgagagcgaggaacccgcaacctccggcggacccccagccgtgaccttacatggcattagcccagatgtttttacccacgttctatattacatgtactcggaccatacagaactgtcaccggaggcagcctacgatgttttgagcgtcgctgatatgtaccttctccccggcttgaagagactctgcgggcgctccctggctcagatgctcgatgaggacactgtggtgggagtttggcgagtggccaagctctttcgtcttgcgaggctggaggatcaatgcactgagtacatggctaaggtcatagaaaaattagtggaacgagaggatttcgttgaagccgtaaaggaagaagctgccgctgtggcagctaggcaggagacggatagcattccacttgtcgacgatataaggtttcacgtagcctctacagttcagacctacagtgcgatcgaggaggctcagcagcgtctgcgggccctggaggatactagcatgtgtatgcggctctgcgccgccctgctgccggcaccttgtaccttgagggcctcttggggggtacgaggagcccaatggggtttctcatccctacacgaaccgggagaccctaggggcggatctatctgggacgaaccacctccccccaatgctcaagctagcccacaggacccaggcgggggccatcactccggaaaaccgggagtaggtgttggcttcggcctgtcaacattcttgctgcagattccgcctacccatccatcccccaagtcctcgcccctggctcttgcatag

SEQ ID NO: 108234 - DNA, 1011 bp, synthetic construct
  misc_feature 1..1011: note = Description of Artificial Sequence: Synthetic coding sequence
  source 1..1011: mol_type = other DNA
atgcttgacacaaagtggaagggcaagagtgtggtcgtcctgcgccatcctctcatcaaccctgtagccttcggcgcacttttgcagtacctgtacaccgggagactcgatattggcgtcgagcatgtatctgactgcgagagattggccaaacaatgccagctctgggacctgctctcagatctagaggcaaaatgcgagaaagtttctgagtttgtagctagtaaacccggtacatgcgttaaggtcctgactatcgaacccccccccgccgatcctcgcctgcgggaagatatggctctgctcgcagattgtgctctgcctcctgagctgagaggcgatttgtgggagctgccctttccatgccccgatggcttcaactcatgcccagatatttgtttccgagttgccggatgtagtttcctgtgtcacaaagctttcttctgtgggaggagcgactactttagagccttattggacgaccacttccgagagagcgaagagccggctacgagcggcggtccgccagctgttacactgcacggcatttcccctgacgtcttcacccacgtactgtattatatgtacagtgaccatacggaactcagtcccgaggcagcttatgacgtgctcagtgttgccgatatgtacttacttcccggtctcaaaagactctgcggccggtcgctggcgcagatgcttgacgaagacaccgtcgtcggagtgtggagggtggccaaattatttcgcttagcccggctggaggatcagtgcacagagtacatggcaaaagtgatagaaaagctcgtcgaaagagaagatttcgtggaggctgtcaaggaagaagccgcagcggtcgccgcgcgccaggagacggactccatcccgctcgtggatgatatccgcttccatgtcgcctcaaccgtgcagacctactctgcgatagaggaagcacagcagcgccttagagccctcgaggatctcttggtgagtatcgggttagattgctag

SEQ ID NO: 108235 - DNA, 1011 bp, synthetic construct
  misc_feature 1..1011: note = Description of Artificial Sequence: Synthetic coding sequence
  source 1..1011: mol_type = other DNA
atgcttgacacaaagtggaagggcaagagcgtggtggttctacgccacccgttgattaatccagtggcatttggagcactgctgcagtacttgtacacaggaaggctggatatcggagtagagcacgtctccgactgtgagcgtctagccaagcagtgccagctgtgggatctgttgagcgatttggaagctaagtgcgagaaagtaagcgagtttgtggcgagcaagcccgggacgtgtgtgaaggtcctgaccattgagccaccccctgccgatccacggctgcgagaggacatggccctcctggctgattgcgctctgccacctgaactgcggggcgatctgtgggagctccctttcccgtgtccagacgggttcaactcttgccccgacatttgcttccgggtagcaggctgcagcttcctctgccataaggcttttttctgcggccgttcagactactttcgggcgctgttagatgaccatttccgcgagtctgaggaaccagctactagcggtgggcctccagctgtaacactgcatgggatctcacccgacgtgttcactcatgtgctgtattacatgtatagcgaccacactgaactctcaccagaagccgcctatgatgtgctgagcgtcgctgatatgtacctcttacctggattaaagcggctctgtggtcgctcgctcgctcagatgctagacgaggacacagtcgtgggagtttggcgcgtggcaaagctttttcgtttggcccgtttagaagaccagtgtacagagtatatggcaaaggtgattgagaagctggtagaaagggaggactttgtcgaggccgtgaaggaagaggccgcggccgttgctgccagacaggaaaccgacagcatcccactggtcgatgatattcgctttcacgtggcttccaccgttcaaacttactccgccatcgaggaggcccagcagagattacgggccttggaagatcttctggtgtcaatcggattagactgttag

SEQ ID NO: 108236 - DNA, 1011 bp, synthetic construct
  misc_feature 1..1011: note = Description of Artificial Sequence: Synthetic coding sequence
  source 1..1011: mol_type = other DNA
atgctagacactaagtggaaaggcaagagtgtggtggtactgcgacatcctctgattaaccctgtggcatttggcgcacttctgcagtacctctatacgggcagactagatattggcgtggagcacgtttcagactgcgaaagattagctaagcagtgtcaattgtgggatctgctgtccgacctggaagccaagtgtgaaaaggtgtcagaatttgttgcttccaagcctgggacttgcgtgaaggttctgaccatcgaaccccccccggccgaccccagacttcgcgaggacatggcacttttggccgattgtgccctgccacccgagctcaggggcgatctatgggaattacctttcccctgccccgatgggttcaactcttgccccgacatatgctttcgggtcgccggatgctcgttcttgtgtcacaaggcttttttctgtggacggagtgattattttagggccctcctcgatgatcacttcagagaatccgaagagccagctacttctggcggacctcccgctgtcacccttcacggtatttctccggacgtgtttacccatgtgctgtattacatgtactcagatcacactgagctgagccccgaagccgcctatgacgtgctgagtgtggctgatatgtatcttttacccggtctgaaacgcctgtgcggaagatctctggctcagatgctcgatgaggacactgtggtgggggtatggagggtggctaaattgtttagactcgcgagactggaggatcagtgcacagaatacatggcaaaagttatagaaaagcttgtggaacgggaggactttgttgaggccgttaaagaagaggccgctgccgtggccgcaaggcaagagactgacagcataccacttgtcgatgacatcagattccacgtagcctccaccgtccagacgtactctgctatcgaggaggcccaacagagacttcgcgcactcgaagatctgctcgtgtctataggcttagactgttag

SEQ ID NO: 108237 - DNA, 2061 bp, synthetic construct
  misc_feature 1..2061: note = Description of Artificial Sequence: Synthetic coding sequence
  source 1..2061: mol_type = other DNA
atggaggcatcccaggagggacacctggagctggtgaagtatctcctggcaagtggagcgaacgtccacgcgaccactgccacaggggataccgccttaacctacgcttgtgaaaacggacacactgatgttgccgacgtacttctgcaggcaggggctgatctagataagcaggaagacatgaagaccattctagagggcatcgatcctgcgaagcatcaggaacatgagagcgagggcggccgaacacccctgatgaaagccgcccgagcgggccacctttgtacagtccaatttcttatctcgaaaggggctaacgtcaaccgggctaccgcaaacaacgaccataccgtggtgtcactggcctgtgccggcggccatctagccgtcgtggagctccttctggcacatggcgccgacccaacacaccggttgaaagatggatcaaccatgcttattgaggctgcaaagggtggccacactaatgtggtgagttacctcctcgactaccccaataacgttctgtccgtacctaccaccgatgtatcccagctgccgccacccagccaagaccagtctcaagagcctgatcgaaccagccaagagaacagtcccgcccttttgggtgtccagaaagccgtgagcacccgcgtgccaactggctcaaatagttccagtcagacgacagaatgcttgaccccagaatcatgctcgcagaccacaagcaatgtggctagccaatcaatgcctccagtatacccgagcgttgacatcgatgctcacaccgaaagcaatcacgatactgccctgacccttgcttgcgcaggcggccatgaggaacttgtttctgtgttgattgcaagggatgcaaaaattgaacaccgtgacaaaaaaggttttactccactcatcctggctgccactgccgggcacgtaggagtcgtcgagatactgctggacaagggcggtgatatcgaagcccagagcgagcgtaccaaggacaccccattgtcgttggcatgctctggtgggcggcaggaggtagtcgatctgttgcttgctcgcggcgccaacaaggaacacaggaacgtcagtgattacacccctctcagcctggccgcgtcagggggctacgtgaacattatcaaaattttgctgaacgcaggtgcagaaatcaactcccgaacaggatctaagctcggaatttcaccccttatgctagccgccatgaatggacacgtacccgcagttaagctgttgctggacatgggtagcgacattaacgcccagattgagacaaatcgtaataccgctttgacgttagcctgcttccagggcagggcagaggttgtgagtttactcctggacagaaaggctaacgtggagcaccgcgccaagacgggattgactcccctcatggaggcagctagcggaggctacgctgaagtgggtcgagtgctgttagacaaaggggcagatgtgaacgctccgcccgtgcccagctcgcgcgacacggccctgactatcgccgccgataaggggcattataaattttgcgagctgcttattcaccggggggcccatatagacgtgcggaataagaagggtaatactccactctggttagcaagtaatggcgggcattttgacgtcgtacagctgttagttcaggcgggtgctgacgtcgatgccgctgataaccggaaaattacgcctctgatgtcagccttccgcaaaggccacgtaaaagtcgtgcaatacctggtgaaggaggtgaatcagttcccatccgatattgaatgcatgcggtatatcgctaccatcactgataaagagctgctgaaaaagtgccaccagtgcgttgagactatcgtgaaggccaaggatcagcaagcagcggaagctaataaaaatgcttccatattattaaaggagctcgatctcgaaaaaagccgagaagaaagccgcaagcaggcactggcagcgaagcgtgaaaagcggaaggagaagcgaaaaaagaagaaagaggaacaaaagcgaaaacaggaggaggatgagtag

SEQ ID NO: 108238 - DNA, 7623 bp, synthetic construct
  misc_feature 1..7623: note = Description of Artificial Sequence: Synthetic coding sequence
  source 1..7623: mol_type = other DNA
atgcttaccgattctggagggggaggcaccagcttcgaagaggatctggactcagtcgccccccgaagtgctccagcaggtgcctcagaaccacctccccccggcggcgtaggcctggggatcaggaccgtacggttgttcggagaggcaggacctgcatccggggtggggtcttcgggtggtggtggaagcgggtccggcactgggggcggggacgccgcattagactttaagttggcagcggcggtcctgcggacaggtggtggggggggggccagcggatctgacgaagatgaagtcagtgaggtcgagagttttatcctggaccaggaagacttggacaatccagtgctcaagacaacctcagagatctttctgagctccactgccgaaggagcagatttaagaacagtggaccccgaaacacaggcccgccttgaagccctccttgaggccgcgggcattggaaagctctccacagccgatggtaaggctttcgcggaccccgaagtcctgagacgccttactagttcagtgtcctgcgcgctggatgaagccgcagcagccttaaccagaatgaaagcagagaattctcataatgccggccaggtggatactcgtagtctggctgaggcctgctcagacggagacgtcaatgccgttagaaaactcctcgatgaaggaaggtctgtcaatgaacatactgaggagggagaaagcctgctgtgcttagcctgctctgctggatactacgagttggctcaggttctcctggccatgcacgctaatgttgaggaccgcgggaataagggcgacattacccccttgatggccgcctcctctggcggctacctggatatcgtgaagttgttgctgctccacgacgcggatgtaaactcccaaagcgctactgggaacaccgcccttacctatgcatgtgcaggaggctttgtcgatatcgtcaaagtccttctcaatgaaggggccaacatcgaggaccacaatgaaaatggccacactcccctaatggaggcggcgagcgccggtcatgtcgaagtggctcgggtactcctggaccacggagctggaattaatactcattctaacgaattcaaagaatccgcccttaccctcgcctgttataagggtcatctggacatggtgagatttctcctggaggccggtgcagatcaggaacacaagaccgatgaaatgcatactgctctgatggaggcgtgtatggatgggcacgttgaggttgccaggctgttactggattctggggcacaagtgaatatgcccgccgattcgtttgaatccccattaacactggctgcctgcgggggtcacgtcgagctagcggccctgctgatagagagaggtgctaacctggaggaggttaatgacgagggatatacacccctgatggaagctgcccgagaggggcacgaggagatggtggcgctgctgctagcacagggagctaacatcaatgctcagaccgaggagactcaggagaccgccctgacacttgcgtgctgcggcggattttctgaggtggccgattttctgatcaaggctggagccgatattgaactgggttgttctacaccactgatggaagcaagtcaggaagggcacttggagcttgttaagtacttgttagcctcaggggctaacgtgcacgcaacaaccgcaactggagacaccgccctgacttatgcctgcgagaacgggcatacagatgttgccgatgtcctcctgcaggctggtgcagacttagaacatgaatccgagggcggccgaactccattgatgaaagctgccagggccggccatttgtgtacggttcagttcctcatctccaagggtgccaatgttaaccgggccacagctaataacgaccatacagttgtgtcattggcctgcgccggaggacatctcgcagtggtggagctgcttctagctcatggcgcagaccccacccatcggctgaaggacgggagtacgatgctcattgaggcagccaaaggcggtcacacaaatgtggtgagttacctgctggactaccctaataatgtgctaagcgtgcctacgactgacgtgtcccagctgcctcctccgagtcaggaccagtcccaggtgcctagggtgccgacccatacactagccatggtggtgccacctcaggagccggacaggaccagtcaggagaactctcccgctttactgggagtgcaaaagggcacaagtaagcagaagagctcaagtctgcaggtggctgatcaagatttactgccatcatttcatccctatcagcccctggagtgcattgttgaagagaccgagggaaagcttaatgagctcggccagcgcataagtgctatcgaaaaggctcagttgaaatctctggagctgatccagggggagccactgaacaaagacaagatcgaggaactgaagaaaaaccgggaggaacaggtccagaagaaaaagaaaattctgaaagagctgcagaaggtcgagagacagctgcagatgaaaacccagcagcagtttactaaagaatacctcgagacgaagggccagaaggacactgtcagtctgcaccagcagtgttctcacagaggggtattccctgagggtgagggcgacggctcactacccgaggatcattttagtgagctgccccaggtggacacaatcctttttaaggacaatgacgtagacgatgaacagcagtcgccgccatctgcagaacagatagatttcgtgccagtgcagcctctgtcttctccccagtgcaatttttcaagtgacctgggatcaaacggaacgaacagcttggaactccagaaggtatccggcaatcagcaaatcgttggtcagcctcagattgctatcaccggacacgaccagggcctgctggtccaggagccagatggcttaatggttgcaacgccggcccagaccctaactgataccctcgacgatctgatcgctgcagtatcaacccgtgtgcccacaggaagcaactctagctctcagaccaccgagtgcctgacccccgagtcttgcagtcagactacgagcaacgtcgccagccaaagcatgcctcccgtctacccatctgtcgatattgatgcacacaccgagtccaaccacgatacagccctgacactggcttgcgcagggggccacgaagaactggtctcagtccttatcgcccgagacgccaaaatagagcatagagacaagaagggttttactcctttgatcctggctgccactgccggccacgttggcgtggttgagattctactggacaaagggggtgacattgaggcgcaatcagagcggacaaaagatacacctctctcccttgcctgctcaggcgggcgacaggaggtggtggacctgctgttggcccgaggggccaacaaggaacaccggaatgtaagcgactatacccctctctcgcttgccgcgagtggtgggtatgtgaatattataaagattctgctgaatgccggagcggagattaattcaaggaccggcagcaagcttgggatctcccccctaatgctggccgctatgaacggtcacgtgcccgcagttaaattattgctggacatggggtctgatattaacgctcagatcgagacaaacagaaatacagccctgactttggcttgctttcaaggtcgcgccgaagttgtaagcctcctgctggatcgcaaagccaatgtggagcacagagccaaaaccggcctcacccccctgatggaggctgcctctgggggttacgccgaagtggggcgtgtgctgctggataaaggcgctgatgttaacgctcctcccgttccatcatcccgtgacacagctctcactattgccgcagacaaaggtcattataaattttgcgaactgcttatacatcgaggtgcacacatcgatgtgcggaacaagaagggaaacactcctttatggttggcctcgaatgggggacatttcgacgtcgtccagctcctggtccaggccggagcagatgtagatgcggctgataaccgaaaaattactccgctaatgtctgcattcagaaaaggacacgtgaaagtggtgcagtatctggtgaaagaggtcaaccagtttccaagcgatatagagtgtatgcggtacattgccacgataacagataaggaattgttaaagaaatgccatcaatgtgtagagactattgttaaggcaaaagaccagcaggctgccgaagccaacaaaaatgcatctatcctgcttaaagagctggaccttgagaagagcagggaggaatccaggaagcaggctttagccgccaagagggaaaagagaaaggagaaaaggaagaagaagaaggaagaacagaaacgaaagcaagaagaagatgaggagaataaacctaaagagaactcagaactccctgaggatgaggatgaggaagagaacgacgaggacgtggaacaggaggtacctatcgagcccccttccgctactacaaccactactattggtatatccgcaacatccgctactttcacaaatgtcttcgggaaaaagagggctaatgttgtgactacacccagtacgaacagaaagaacaaaaaaaacaaaaccaaagagacgccacccactgcccatctcatattgccagaacagcacatgagcctggcacaacagaaagctgacaagaataaaatcaatggggagcccagaggcgggggcgccggggggaattccgattcagataacttggactccacagactgtaactctgagtcttccagcgggggcaaatcccaagaactcaacttcgtgatggatgtcaactctagcaagtacccatctcttctccttcatagccaagaggaaaagacaagtactgcaacgagtaagactcaaactcggcttgagggcgaggtcactccaaacagcctctcaactagttataaaacggtgagtctgccattgtcttcgcccaatattaaactcaacctgacttcccccaaacggggccagaagcgtgaggagggttggaaggaggttgtgaggcggtccaagaagttgtctgtgccagccagtgtggtgtcccggatcatgggccgtggcggttgtaatattacagccatccaagatgtaaccggcgcgcacatcgatgtcgataaacagaaggataagaacggcgagcggatgattacaatcagaggaggaactgagtctacgcgctatgctgtccagttgataaacgccctgatccaggacccggcgaaggagttggaggatcttatccccaaaaatcatataaggacacctgccagtacgaaatccatccatgctaacttctcatcgggtgtcggtacaaccgctgcgagcagcaaaaacgcttttcccctgggcgctccgactctggtcacaagccaggctacgacattgtccaccttccagcctgcaaacaagttgaacaaaaacgtgcctactaatgtccggtcctccttccctgtatcgctcccccttgcttaccctcacccacattttgccctgttggccgcccagacgatgcagcaaatccgacacccccggttgcctatggctcaatttggaggcactttctctccgtcccccaatacatggggacctttccctgtccgccctgtgaatcccggaaatactaattcttctccaaagcacaacaatacaagtcggttgcccaaccagaatgggacagttctcccctcggagagtgcgggactagccaccgcaagctgcccgatcacggtgtctagtgttgtggccgcatcccaacagctctgtgtgacaaatacccgaacaccgtcatccgtgaggaagcagctttttgcttgcgtgccgaagacttcgcccccagccactgttatttcttcagtaacctccacttgctcatccttaccttccgtctcttcagcaccaataaccagcggtcaggcccccaccaccttcctccccgcgtctaccagccaggctcagctatcctcccagaaaatggagtctttctcggccgtgccacccacgaaagaaaaagttagcactcaggaccaaccaatggccaatttatgcacgcctagcagcaccgcgaatagctgcagctcctccgcatctaacacgccaggggcccccgagacacatccctcttcaagccctacgcctacatcatctaatacgcaagaagaggctcagccttcaagcgtgtctgacctgtcacccatgtccatgccctttgcttccaattcagagcctgcaccactcacacttacgagccctagaatggtcgccgccgacaaccaggacacaagcaatctcccgcaactggcggtccccgctcctagagtgtctcacaggatgcagccacgcggatccttctactcaatggtcccaaacgctacgattcatcaggatcctcagtcaatctttgtgactaatcctgttactttaactcctccacaaggcccgcccgcagcagtccagcttagtagcgcagtaaacattatgaacggaagccaaatgcatattaaccctgccaataagagcctgccacccaccttcggccccgctaccttattcaatcatttcagtagcttgttcgactcatcccaagtgccggccaaccaagggtggggggacggccccttatcttcccgggtcgccactgacgcaagtttcacagtgcagtctgcatttctcgggaattctgtcctggggcacctggaaaatatgcatcccgacaattcaaaggctccaggttttagaccaccatcccaacgtgtgtccacaagtccggtgggtctgccatccatcgatcccagcggcagcagtccatctagctcttctgctcccctggcaagctttagtgggatcccaggcactagggtctttttgcagggacctgctccagtggggactccttcgttcaaccgccagcatttttcgcctcatccctggacatctgctagcaacagctgtgattcccctatccctagcgtgagtagtgggtcgagctcaccactgtccgctacctccgccccgccgaccctagggcagccaaagggcgttagcgcctcgcaagatcgaaaaatcccacccccgatcggaaccgaaagacttgctcgaatccgccagggcggcagcgtggcccaggcaccggccgggactagcttcgtcgctcctgtgggacacagcggaatatggagcttcggtgtcaacgcggtgagcgaaggcctctctggctggagtcaatcagtgatgggaaatcatcctatgcaccaacagctcagtgatccctccaccttctctcaacatcagccaatggagcgcgacgacagtgggatggtggccccctccaacatcttccatcaacccatggcgagcggattcgtagacttctctaagggactgccaattagtatgtatggcggcacaattataccttcacacccgcagctggcagacgtgcctggtggacccttgtttaatggcttgcataatccggacccagcctggaaccctatgataaaagtcattcagaactcaacagaatgcaccgatgcccaacaatag

SEQ ID NO: 108239 - DNA, 7854 bp, synthetic construct
  misc_feature 1..7854: note = Description of Artificial Sequence: Synthetic coding sequence
  source 1..7854: mol_type = other DNA
atgcttaccgattccggagggggcggaacaagcttcgaagaagatttagattcagtcgccccaagatccgcaccagccggtgcttccgagccacccccccctgggggagtcgggttagggatcagaaccgttcgcctcttcggggaagccggtccagcctctggcgtgggatcttctgggggcgggggctcaggttcagggaccggcggcggcgatgcggccttggattttaaattggctgccgcagtgctgcggaccggaggcggtgggggagcctcaggatctgatgaagatgaggtttctgaagttgaaagtttcatcctcgatcaagaagatctggacaacccggtcctcaagacgacttcagaaatattcctgagctcaaccgcagagggggccgacctacgcaccgttgatcctgaaacccaggcgaggctcgaagcactgctggaggctgctgggattggaaaactctccacagccgatggcaaggctttcgctgatccagaggttcttagaagactcactagctcagtgtcatgtgcactggatgaagcagccgccgcgttaacccggatgaaagctgaaaatagccacaatgccgggcaggttgatacaaggtcgctggcggaggcgtgcagtgacggagatgtgaatgctgttcgcaagcttctggatgagggaaggtcagtcaatgaacacacggaagagggcgagagcctgttgtgtctggcttgttctgccggatactatgaattggcgcaggtgttactggcaatgcacgctaatgtggaagacagggggaacaaaggggatatcacacccctgatggctgccagctccggtggatacctggacatcgtgaaactgttgctcctacacgatgccgatgtcaactcgcagagcgccaccggcaataccgccctgacctacgcgtgcgcgggtggatttgtggatattgtgaaggttctgttgaatgaaggagcgaacatagaggatcacaacgagaacggacataccccgctgatggaagctgcttccgctggtcatgttgaggtggctagagtcttactagaccacggagccgggattaacacacatagtaatgaattcaaagagtcagccctgaccctcgcttgctacaaaggacatcttgacatggttcggtttctgctcgaggccggcgccgatcaggaacacaagacggatgaaatgcatactgcacttatggaagcttgcatggatggacatgtcgaagtggcacgccttctgttggactcaggtgctcaggtcaatatgcccgcagattcattcgagtctccgctgactttggctgcctgtggaggtcacgtcgaactggctgcattgctcatagagaggggggccaatctggaggaggtcaacgatgaaggatacacccccctcatggaggcagcacgagaagggcacgaggagatggttgcactcctcctcgcccagggggcaaacatcaatgcccagaccgaagaaactcaggagacagccctcaccctcgcctgctgcggcggtttttccgaggttgcagactttttaatcaaggccggggctgatattgaattagggtgttccacccctctgatggaagcttcacaggagggacacctggaactcgtcaagtacctcctggcatccggagcgaacgtgcatgccacgactgctacgggagatacagcgctcacttacgcatgcgaaaacggtcatacagacgtagcagacgttctgctgcaggctggcgccgatctcgagcacgagtcggaaggtggccggactccactcatgaaggctgcccgcgctggtcatctctgtacagtgcaattcctgataagtaaaggagcaaacgttaatagagccacggccaacaacgatcacacagtagtgtccttggcctgtgcaggagggcatctcgccgtggtcgagctgctactagcgcacggcgccgatccaacacacaggctcaaggatggcagtacaatgttaatagaagcagccaaaggcggacataccaacgtagtgagctacctgctcgactaccctaataacgtgctatctgtccctaccacagacgtcagtcagctgcctcctcccagtcaagaccagagccaagtacctagggtccctacacacacactcgccatggtggtgcccccacaggagccagatagaacgtctcaggaaaattcccctgccctcctgggagtgcagaaggggacctcaaaacagaaatcctccagcttgcaggttgcagaccaggacctcctcccatccttccatccctaccagcccctggagtgcatcgtcgaggagacagaagggaagcttaacgaactgggtcagaggatctctgcgatcgagaaagcccaactaaaatccttggagttgatccagggggagccgctgaacaaggataagatcgaagagcttaaaaaaaaccgcgaagagcaggtacagaagaagaagaagatcttaaaagaactccagaaagtagaacggcaactgcagatgaagacccagcagcagtttaccaaggagtatctcgagaccaaagggcaaaaagacaccgtgagcctgcatcaacagtgcagtcacaggggcgtgttccccgaaggagaaggcgatggcagtcttcccgaagatcatttttcagaactgccacaagtggataccattttgtttaaagacaatgacgtggatgacgagcagcagagcccccccagcgctgagcagattgacttcgtccccgtccagccattgtcctccccacagtgcaacttctcttccgacctggggagcaatggaaccaacagcctcgaattacagaaggtctcaggcaaccagcagatcgtgggacagccacagattgctatcactgggcacgatcaaggcttgctggttcaggagcccgacgggctgatggttgcaacacccgcccagactttgactgatactcttgatgatcttatagctgccgtgtccacgcgggtacctacaggatccaattcgagttcacagactaccgaatgtctgacaccagagtcctgctctcagactactagcaacgtagcgtcacaatcaatgccaccagtctaccccagcgtcgacatcgatgcacatactgagtcaaaccacgacacggcactaaccctagcctgcgcaggcggccatgaggagctggtttccgttttgatagcccgggatgcgaagatcgagcacagagataagaagggcttcacacccctgatcctagctgccacagcaggccatgtgggcgttgtggaaattctcttggacaaaggcggggatattgaggctcagtctgagcgaacaaaagatacgccgctgtctctcgcctgctcaggagggcgccaggaggttgtggacctgctgctcgcaaggggcgccaataaagagcaccggaatgttagtgactacacaccgctcagcctggcagccagcggtggctatgttaacatcatcaaaattctccttaacgctggagccgagattaactctcgaacaggatccaaacttgggatcagtccactgatgctggcagctatgaatggccacgtccctgccgtgaagcttctcctggatatggggagtgatatcaacgcacaaatcgaaaccaatcgcaacaccgccctaacattagcctgcttccagggccgggccgaagtggtatctctcctcctggatcggaaagctaacgttgagcacagagccaagaccggactgaccccgctgatggaagccgcaagtgggggctatgccgaggtggggcgggtgctgctagataaaggcgccgatgtcaacgctccacccgtgccttcaagtcgcgataccgctctcacgattgccgcagataagggccactacaaattttgtgaacttttgattcaccgcggtgcacacattgatgtgagaaataaaaaggggaatacacctctttggctcgcctctaatggaggccacttcgatgtggtgcagcttttggtgcaagccggagcagatgttgatgcggcggacaataggaagattactcccctgatgtctgcgtttcgaaaggggcacgtgaaagtggtgcaatacctcgtgaaggaggtgaatcagttccctagtgacatagagtgtatgcggtatatcgctacaattaccgataaagagctgctgaagaagtgccatcagtgcgtggaaacaattgtcaaagctaaggaccaacaggcagctgaggccaataaaaatgcatccatcttactcaaagagttagaccttgaaaaatcaagagaggaaagccggaagcaagcccttgccgccaagagagagaaacgtaaagagaaaaggaagaaaaagaaggaggagcaaaagcgcaagcaggaggaagatgaagaaaacaaacccaaagagaacagcgaactacctgaggatgaggacgaagaagagaatgatgaagacgttgaacaagaagttccgattgaaccgccatctgccacaaccacgacaacaataggcatctccgcgaccagcgctactttcactaacgtgtttggcaagaagagagcgaacgttgtgactaccccttcgacaaacaggaaaaataaaaaaaataagacaaaagagactccccctaccgcacatctaatcttgccagaacagcatatgtcactggcacaacaaaaagcagacaagaataagatcaacggggagccgagaggagggggggccggaggtaacagcgattccgacaacctggattccaccgactgcaatagcgagtcatctagcggcgggaagagtcaggagctcaatttcgttatggacgtgaactcatcgaaatatcccagtttactacttcacagtcaagaagagaagaccagcaccgccactagcaaaacccagaccagactcgagggagaggttacgccgaacagtctgtcaacctcatacaaaaccgtgagtttgcccctgtccagtcccaatatcaagctgaatttgacatcgccaaagagaggacagaagagggaagagggctggaaggaagttgtgcgccgcagtaaaaaactctccgtgcccgcgtctgtggtctcgcgcatcatgggacgaggggggtgcaatatcacagctatacaggatgtgaccggggctcacattgacgttgacaaacagaaggataagaatggagaacggatgattactattcgcggcggcaccgagtccactagatacgctgtgcagttgatcaatgctctgatccaggaccctgccaaggagttggaagacctgatacctaaaaatcacataagaaccccagcgtccactaaatcaattcatgcaaatttcagtagtggtgtcgggacaacagccgccagctccaaaaacgctttcccccttggagcaccgaccctggtgacaagccaggcaacgaccctgtctacattccagcctgctaacaaactcaacaagaacgtcccaacgaatgtacgctcctctttccctgtgtcattgcctctcgcttacccacacccccacttcgctcttctagctgcccaaaccatgcagcaaataaggcatccgcggcttccaatggctcaatttggaggaacattttcgccctcaccaaatacttggggcccctttcctgtcagacctgtaaaccctggtaacacgaatagctcccccaagcataataatacctcgaggttaccaaatcagaacgggaccgtgttgccctcagaaagcgctggacttgcaacggctagctgtccaatcactgtatccagcgtggttgcggcctctcagcagctatgcgttacgaacaccagaacacccagttctgtgaggaagcagcttttcgcctgtgtgcccaagacaagccctcccgctaccgtcatttcatctgtcacctcaacctgtagctcattacctagcgtatcttccgcccccataactagcggccaagctccaaccacttttctacctgcttcaacctctcaagcccagttaagttcacagaaaatggagtcgttttcggcggttccccccaccaaggagaaggtgtctacgcaggaccagcccatggctaacttatgcaccccttcttctactgcaaactcgtgctcatcatccgcgagcaatacacctggagcacccgaaacgcacccatctagtagtcctaccccaactagtagcaacacgcaggaggaggcgcagccgtctagcgtttcagatctgtcaccaatgagtatgccctttgccagtaactccgaacccgcaccgctgacgcttaccagcccccggatggtggcagctgataatcaagacacatccaacttacctcagctggccgtccccgcaccaagagtgtcacatcgcatgcaacctagagggagtttttactcaatggtgcccaacgccaccatccaccaagatccccaatccatcttcgtgactaaccccgttaccctgactccccctcaaggtcctcccgcagcagtccaactatcgtcggcagttaatattatgaacggatcacagatgcatatcaatccagccaacaagagcctgcctccaactttcggccccgccacactgttcaatcattttagcagcctgtttgattctagtcaggtgcccgcaaaccagggatggggggacggtcctctctcatcccgcgtagccaccgacgccagcttcaccgtgcagtcagcttttcttggtaactctgtgctaggacaccttgagaacatgcaccccgataattcaaaggctccaggatttcggcctccttcacagcgggtctccacgagtcctgtgggactgccaagcatcgacccttctgggtccagccccagtagttcatcggccccactggccagcttctctggcatccctggcacccgagtctttctacagggccctgcacctgtaggaactcccagtttcaacaggcagcactttagtccacatccctggacctcagcctctaactctagtacctctgcccccccaactctgggccagcccaagggcgtctcggccagtcaggatagaaaaatcccaccacctatcggcactgaaagactggctcgcatacggcaggggggaagcgtggctcaggcacccgccggcacatcgtttgtcgcccccgtaggacattctggaatttggagcttcggagtcaacgcggtcagtgaggggctctcaggctggagccagtccgtgatgggcaaccatcccatgcaccaacagttgagcgatccgtccacgttctcccagcaccagcctatggaaagagacgatagcggaatggtcgcacccagtaacatttttcatcagccaatggcatccggattcgtggacttcagtaagggtctgccaatcagcatgtacggcggaaccatcatcccatcacaccctcagctggctgatgtacccggcgggccactttttaatggattgcacaacccagatcccgcctggaatccaatgatcaaggttattcaaaattccaccgagtgcaccgatgctcagcaggctagtcttttgccctcagtgcccgccctgaaaggcgaaatccctagcccccagctgacgagacctaagaagagaattggccgccccatggttgctagcccaaaccagcgccatcaggaccacctgcgccccaaagttcctgcaggcgtccaagaactgactcactgccctgacacccctttactgcctccttcggattcaagggggcataactcctcgaacagcccctcactgcaagcaggtggagcagaaggggcaggggacagagggcgggacactaggtag

SEQ ID NO: 108240 - DNA, 3024 bp, synthetic construct
  misc_feature 1..3024: note = Description of Artificial Sequence: Synthetic coding sequence
  source 1..3024: mol_type = other DNA
atggtggccctcttgctggcccagggcgctaacatcaatgcccagactgaagaaacacaggaaaccgcactgacccttgcgtgttgtgggggcttctccgaggtggcagactttttgatcaaagccggcgccgatatagaattagggtgttctacccccctgatggaagctagtcaggaaggccatctggagttggtgaagtaccttttggcatccggcgcaaatgtgcatgcaacaaccgccacgggcgatacagccctcacctatgcctgcgagaatggccacaccgacgtggcagacgtccttctgcaggcaggggcagatctggataagcaggaggatatgaagacaatcctcgaaggaatcgatccagccaaacatcaggaacacgaatctgagggcggccgcacccccctgatgaaggcggcgagagccggacatctctgcacggttcagttcttgatctctaagggtgcaaacgtcaatcgtgccactgccaacaacgatcataccgtggtgagcctggcttgcgcaggaggtcatctggccgtggtggaattactgttagcgcacggcgctgacccgacacaccgtctcaaagacggttcaaccatgctgatcgaggccgcaaagggggggcacactaacgtcgtgtcttatttgctggattacccgaacaatgtgctttccgtgccaaccaccgacgtttctcagttgccacctcccagccaggaccagtcgcaggtgccacgcgtgcctacgcacactctagccatggtagtgcccccacaggaaccagacagaacatctcaggagaacagtcctgctctgctgggagttcaaaagggaaccagcaagcagaagtcgtcgagccttcaagtcgccgatcaagaccttctccccagtttccacccatatcaacccctggagtgtattgtagaggaaaccgagggtaaactaaacgagttagggcaacgaatcagtgccattgaaaaagcgcaattgaaatccttggagctgattcagggggagccgcttaataaggacaagatcgaagagctgaagaaaaacagagaagagcaggtacaaaagaagaaaaaaatcctgaaagaactgcagaaggttgaacgtcagctgcagatgaaaacccagcagcagttcacaaaggagtatctggaaaccaaaggccagaaagacacggtgtcactgcaccagcagtgctcccatcggggcgttttcccagagggtgaaggagacggcagcctccccgaagatcacttctcagagctcccacaggtggacacaatactctttaaggataatgatgtggatgatgagcagcagtccccacctagcgccgaacaaatcgatttcgtcccggtccaaccactgagttctcctcagtgtaacttcagtagtgacctaggaagtaatggaactaattccttggaattgcagaaagtttcaggtaaccagcaaatcgttggacagccacagattgcaatcacgggacacgatcagggcttgctggtccaagaacccgatgggcttatggtggcaacaccggcccagacccttaccgatacactagacgatctgattgccgcagtctcaaccagagtgcccacagggtccaatagctcttctcagacaactgaatgccttacacccgaatcttgtagtcagactacctctaacgtggcaagtcagagcatgccccctgtttatccctccgtggatatcgacgcccataccgagagcaaccacgacacagcactgaccttggcctgtgccgggggtcacgaggagttggtgagtgtcctgatcgccagggatgcaaagatcgagcaccgggataaaaaggggttcaccccactcatcttagcagcaacagctgggcacgtcggtgtcgtagaaatccttctcgataagggcggcgacatcgaggctcagagtgaacgtacaaaggacacacctttgagcctggcctgctccggtggacgccaggaagtagtggacttattactggcccggggtgcaaacaaagagcatagaaatgtgtctgattataccccactctcactggctgcttctggaggttatgttaatatcatcaaaatcttactgaacgccggcgctgagataaattccagaactggtagtaaactcggtatatcaccgcttatgctagcagcaatgaatggacacgtgccagctgtaaaactgctgctcgatatgggatccgatataaatgcccagattgagactaacaggaacacagctctcaccctggcgtgtttccagggcagagcggaggtggtgtctcttctgctggatcgtaaggccaatgtggaacaccgggctaaaacaggtctgacccctctcatggaagccgcatcaggcggctatgcggaggtgggacgggtcctgctggataagggggccgatgttaatgcacctccagtcccttcgtctcgggataccgcacttactattgccgccgataaggggcattacaagttttgcgagcttctgatacaccggggtgcacacatagatgtgcgcaacaagaaagggaacactcccctgtggcttgccagtaatggagggcattttgacgtggtgcagctactcgtccaagccggcgcagatgtggacgccgccgataaccgtaagatcacgccactgatgagtgccttcaggaaaggccatgtgaaagttgtgcagtacctggtcaaagaggtgaaccaattcccctcggacattgaatgcatgagatacattgcaacgatcacagataaggaactgcttaagaaatgtcatcaatgtgttgagacaatcgtcaaggcaaaagatcagcaggccgctgaggctaataaaaatgccagcattctgctgaaggaacttgacctcgagaagagtcgagaggaatcaagaaagcaggccctggccgcaaagcgcgagaagcgtaaggaaaagcggaaagagaaacgagggaccgagaaggagacaggacgaaggtag

SEQ ID NO: 108241 - DNA, 7629 bp, synthetic construct
  misc_feature 1..7629: note = Description of Artificial Sequence: Synthetic coding sequence
  source 1..7629: mol_type = other DNA
atgcttacggactctggcggaggcggcactagctttgaggaagatttagattcggttgcccccaggtcagcccccgccggcgcatccgaaccaccgccacccggcggcgttgggctcggtatccgcacggtcaggctgtttggtgaagccggaccggcctccggcgtaggcagtagcgggggtgggggctccggcagcggcaccggagggggggacgccgccctggatttcaagctggccgcagccgtgctgcgtactggtggcggagggggggcatctggctccgatgaggacgaagtctcagaggtagagtcctttatcttagatcaggaggacctggacaatccggtactcaagactacttccgaaatttttctttcttctacagccgaaggagccgatctgcgaactgttgaccctgagactcaggccaggttagaagctctcctcgaggccgccggaattggtaagctctcaacagctgacgggaaagcattcgccgacccagaagtcttgcggcgcctcacgtcttcagtgtcatgtgctctcgacgaagcagccgccgctcttacaagaatgaaggctgagaattcccacaatgcaggtcaggttgacacacggtcactggctgaggcatgttcagatggcgacgtaaatgcggtacgcaagctcctcgatgaaggtcggtccgtgaacgaacataccgaggagggcgagtcacttctgtgtcttgcatgcagcgccgggtattacgagctggctcaggttctcctcgccatgcatgctaacgtcgaagatagaggaaataaaggagacattactccactgatggctgcctccagtggaggttatctcgatattgtcaaactgctcttgttgcacgatgctgacgtcaattcccaatccgccacaggaaatactgctctcacctatgcctgtgctggaggatttgtggacatcgtcaaagtgctcctgaatgagggggctaatatcgaagatcacaatgaaaatggacacacaccactgatggaagctgccagtgctggccacgtagaggtggccagggtgctcctcgaccacggggccggtataaacacccattccaatgaattcaaagaatccgccctgaccctggcctgctacaagggacatctagacatggtgcggttcctgctagaggctggagccgaccaggagcacaagaccgacgagatgcatacagccctgatggaggcctgtatggacgggcatgtggaggtggccagattactcctggattcaggagcacaggtcaacatgccggcggacagtttcgagtcgccgctgacacttgctgcctgcggaggacatgtcgagctggctgcccttctgattgaacggggagccaacctcgaagaagtgaacgacgaggggtatactcccctgatggaggccgcccgggaaggccacgaagagatggttgcacttttactggcacagggagcaaatatcaacgctcagacagaggaaacccaggaaactgccctcaccctcgcttgctgtggtggctttagcgaagtggccgactttttgatcaaggccggggcggatatcgagcttggctgcagtacaccattgatggaagcaagtcaagaagggcacctagaacttgtcaaatatctcctggcttccggcgctaacgtgcacgccacaactgccacgggagacacagccttgacctacgcctgtgagaatggccacacggatgtggccgacgtgttacttcaggcaggcgctgatctggaacatgagtcagaggggggtcggactccacttatgaaggctgctcgagctggtcatttgtgcacagtccagttcctcatcagcaaaggagcaaatgttaatagggcaaccgctaacaatgatcacaccgtcgtgagcctagcctgtgcaggcggccatttggccgtggtggagctcttattggcccatggcgccgacccgacacaccggctgaaagatggcagcaccatgctgatcgaggcagcaaaagggggacatactaacgtggtcagctatctgctggactaccccaacaacgtgctgtctgtgccgaccaccgacgtgagccagctgccaccgccatcacaagaccagtctcaggtacccagggtccccacccacactttggccatggtggtcccaccacaggagcctgacagaacttctcaagaaaactccccagcccttctgggtgttcagaagggtaccagtaaacagaaatccagcagtttgcaggtggccgatcaggatttgctccccagcttccacccctatcagcccttagagtgcattgtggaggaaactgagggcaagttaaatgagttgggccagaggataagtgctatagagaaagcccaactcaagtctctggaactgattcagggggagcccctgaataaggacaagatcgaagagcttaaaaagaacagagaggagcaggtgcagaagaagaaaaaaattctgaaggagttgcagaaagtagagcgccagctgcagatgaaaacccagcaacagttcacaaaagagtacctggagaccaaaggtcagaaggacactgtgagtcttcaccaacagtgcagccaccgaggcgtttttccggagggagagggagatggttctctgccagaagaccatttctcggagctgccacaggttgacacaatactgtttaaggataatgatgttgacgatgagcagcagagtcctccgtcagccgagcagatcgatttcgtgcctgtgcagccattgtccagtcctcagtgtaacttcagctccgatttggggtcaaatggcaccaacagcctggagctccagaaagtcagcggaaatcagcagatcgtgggccaacctcaaattgctatcacaggtcatgaccagggcctgctcgtgcaggagccggatggcctgatggtggccacccctgcacagacattaaccgatacattggatgatctcatcgccgccgtctctacccgggttcctactggctccaactcctcgtctcagaccacggaatgtcttaccccagagagctgctcccaaaccacctcaaacgtggccagccagagcatgccaccagtttacccttcagttgatattgacgcccataccgagagcaatcacgatacagccttgaccctggcctgcgcaggaggtcatgaagagctcgtttccgtgctcattgcccgggatgcaaaaatcgaacaccgggacaagaagggattcacgccattaatcctcgccgcaactgcaggccacgtcggagttgttgaaatcctgttagataaggggggagacatcgaggcacagtcagagcgcacaaaagacacaccattgagtttggcctgtagcggagggcgacaggaagtcgtcgacttattgctagctcgcggtgctaacaaggaacacaggaatgtgtctgactacacccctctttccctcgccgcctctggcgggtatgtcaatatcataaaaatcctgcttaacgctggggccgagatcaacagtaggacgggcagcaaactgggaatatcacccctcatgcttgcggcgatgaatggccatgtgcccgccgtcaagctgttgctcgatatgggctccgatattaacgcccaaattgagaccaatcgcaacacagctctgacactcgcctgctttcagggacgtgcggaagtggtgagcctgctgctggaccgtaaggcaaacgtggagcaccgggctaagactggacttaccccgctgatggaggccgctagtggcggatacgccgaggtgggacgggtcctgctagataagggagcagatgtgaatgcacctcccgtccctagtagccgcgacacagcgctgactattgcagctgacaaaggccactataagttttgcgagttgctgattcatcggggcgcacatatcgatgtgagaaacaagaagggaaataccccactgtggctggccagcaacggagggcacttcgacgtggtccagcttttggtgcaggcgggtgccgatgtggacgcagctgacaataggaagattacacccctgatgtccgccttccgcaaagggcacgtgaaagttgtccagtacttggtcaaggaggttaaccagttcccaagtgacatcgagtgtatgagatatatagccacaataacggataaagagcttctcaaaaagtgccaccagtgcgtagagaccattgtaaaagccaaggatcagcaggccgccgaagccaacaagaacgctagtattcttctcaaagagctcgacctggagaagagtcgggaggagagccgtaagcaggccctggcagctaagcgagagaagaggaaggagaagcgtaagaagaaaaaagaagaacagaaacgtaaacaggaagaggacgaggagaacaagcccaaggagaattctgagctccccgaggatgaggacgaagaagagaacgacgaggacgtcgagcaagaggtccctattgagcccccctcagccacaacaaccactacaataggaatttccgctacctccgccacatttaccaacgtgtttggcaaaaagcgggcgaatgtcgtgacaacaccttctaccaaccgaaaaaataagaagaataagacaaaagagacaccccccacagcgcaccttatactccccgaacagcatatgtcgttggctcagcagaaagccgataaaaacaaaatcaacggcgaaccccgtggcggaggagctggagggaattccgattctgacaatctggacagcacggactgcaattctgaatcatcatccggcgggaaaagtcaggagctgaactttgtgatggacgtgaacagcagcaagtatccatctttgctccttcactcacaggaggagaaaacctcaacggcaaccagcaagacccagacccggctggagggtgaagtaacccccaattccctatctacctcatacaagacagtttcactgcccctttcctccccaaacatcaagctcaacctcacgtcacccaaacgcggccagaagcgggaagagggatggaaggaggtcgttaggcgctccaagaaactttcagtccccgcgtcagtagtaagcaggatcatgggacgcggaggctgtaacattaccgccattcaggatgtcaccggggcacatattgacgtggacaaacagaaagacaaaaacggagagcggatgatcacgatccgcggggggacagagagtacaaggtatgccgtacagctgattaacgccttaatccaggaccctgccaaggagcttgaagacctaatccccaagaaccatatccggacacccgcctcaacgaaatccatccacgctaacttttcaagcggcgtggggacaactgccgcaagttccaagaacgcttttcccctgggggcacccacgctagtcacatcgcaggccactaccctaagcaccttccagcctgctaacaaactgaataagaatgtccctaccaacgttcgctcaagcttccctgtgtctttaccactcgcctacccacacccacattttgcgctcctagccgcacagacaatgcagcagattcggcatccccggctcccgatggctcagtttggtggcactttttcacctagccctaacacttggggaccctttcctgtgcggccggtaaacccaggcaatacaaactcttccccaaaacacaacaatacatctcggctgcctaaccagaatggcaccgtgctgccgagtgagagcgcaggcttggcaacagctagctgtcccataaccgtatcatcagttgtcgctgccagtcaacagttatgcgtgacaaatacccggacaccatctagcgtccgaaaacagcttttcgcgtgcgtgcctaagacctcaccccccgccactgttatcagctctgtcacgtcaacctgcagctctttacctagcgtgtcgtccgcccccattacatcaggccaggcacctaccaccttcctcccagcctccactagccaggcccagctgtcgtcccagaagatggaaagcttctccgctgttcctccgacgaaagaaaaggtatccacgcaggatcagccgatggccaatctatgtaccccaagttccacggctaactcttgctcaagttccgcttctaacacgcccggtgctccagagacacaccctagttcatctcccacacccacaagcagtaatacgcaggaagaggcccagcccagtagtgtttctgacttgtctccaatgtctatgcccttcgcctcaaatagcgagcctgccccactgacgttgacctcgccccgcatggtcgccgctgacaaccaggatacgtctaatctgccccaacttgctgtgccagctcctagggtgtcccaccgaatgcagcctagagggtccttctactccatggtgccgaacgccaccatccaccaggaccctcagtctatatttgtgacaaatccagtgacactaacccccccacaggggccacctgccgcggttcagttatcttcagctgtcaacatcatgaatggatcacagatgcacattaaccctgccaataaaagtcttcctccaacgttcggccctgccactctcttcaaccactttagctctcttttcgacagcagccaggtgccagccaatcaggggtggggcgacggtccgctttccagtagagtagctaccgacgccagtttcaccgtgcagagcgcgttcctcggcaactctgtcctggggcatctagagaatatgcatccggacaattcaaaggcccccgggtttaggcctccgtctcagcgtgtctccacgagccctgtgggcctgccaagtatcgacccttccggctcctcaccatcatcctccagcgcccctctggccagcttttctggtattccgggcacccgcgttttcctgcagggccccgcccccgtcgggacacccagctttaaccgccagcacttcagcccccacccgtggacatcagcttcaaattccagcactagtgctcccccaaccctcgggcaacccaagggcgtttcagccagccaggacaggaagattccccccccaattggcactgagcggctggcgcggatccggcaaggcgggtccgtcgcccaggctccagctggcacgagcttcgtagccccagtaggtcattcgggcatctggtccttcggcgtgaatgcagtcagtgaaggactcagcgggtggagccaaagtgtcatgggaaaccaccccatgcatcagcagttgagtgacccgtccaccttttcgcagcaccagcccatggagcgagacgactccggcatggtggccccgtcaaatatcttccaccaacctatggcctccggatttgtggactttagtaaagggcttccgatctcgatgtatggtggcacgatcattccctcacatcctcagctggccgacgtcccaggcggtcccctttttaacggacttcacaatcctgacccggcatggaatcctatgattaaggtaattcagaactccactgagtgcaccgatgcacagcagatctggcccgggacttgggcacctcacattggtaacatgcatctaaaatatgttaactag

SEQ ID NO: 108242 - DNA, 1851 bp, synthetic construct
  misc_feature 1..1851: note = Description of Artificial Sequence: Synthetic coding sequence
  source 1..1851: mol_type = other DNA
atgctgacggacagtggtggaggtggcactagcttcgaggaagacttggacagtgttgctccccggtccgcgcccgcaggggcaagtgaacctccgcccccgggaggggtcggtctcggaataagaaccgtccgtctctttggcgaggctggccctgcatccggggtgggttcaagtgggggcgggggcagtggctccggcactggcggtggcgacgcggcgctggacttcaaactggcggctgcggtgttacgcaccggcggcggcggcggcgccagtggcagcgacgaggatgaggtgtccgaggtggaaagcttcatcttagaccaagaggatctggacaatcctgttcttaagactacatccgaaatctttctttcaagcaccgccgagggtgcagatttgcgtacggtggacccggagactcaggcccgcctggaggccctgctggaagccgccgcttttgctgatcctgaagtcttgaggaggttgaccagtagtgtctcttgcgccttggatgaggctgccgccgctctgactcgcatgaaagccgagaacagccacaacgcagggcaagtggacacccggtccctagcggaggcttgttctgatggcgacgtgaatgcagtcagaaaactgcttgacgaaggtcgaagtgtgaatgaacatacagaggagggggagtctctcctttgtttggcctgcagtgcaggatattacgagcttgctcaggtgctactggcaatgcatgctaatgtagaggacagaggaaacaaaggagatatcacccctctcatggctgcatcctctggggggtacctcgacattgtaaagctgctgcttcttcacgacgccgacgtgaactcccagtccgcgacaggtaatactgcactgacatacgcctgcgcagggggctttgtcgatatagttaaggtgttgctaaacgagggggcaaatatcgaagatcacaacgagaacggccacacaccccttatggaggccgctagcgcaggacatgtcgaagtggcccgggtcttactcgaccatggcgcaggaatcaacacacacagcaacgaattcaaggagagcgctctgacactggcatgctataaagggcacctggacatggtgcgattccttctggaggcgggcgcagaccaggagcacaaaactgatgagatgcacactgcgctcatggaagcctgtatggatgggcacgtcgaagttgccaggttgttgctggactctggtgcgcaggtcaatatgccagcagactcatttgaatcacccttgactctggccgcctgtggaggacatgtagagctggcagccttgctgattgagaggggcgcaaatctcgaggaagttaatgacgaaggttacacacctctgatggaagcagcaagagagggccacgaggaaatggtcgccctattactggcgcaaggcgctaatataaacgcccagacggaagagacacaggaaaccgcactgacactggcgtgttgtggcggtttcagtgaagtagctgatttcctgatcaaagcaggcgcagacatcgagctgggctgcagcactcctctgatggaagcgagccaggaaggacatctggagctggtaaagtatctgctggcatccggcgcgaacgtgcatgcaaccactgctacaggggacaccgctctgacatacgcctgtgaaaatggtcatactgatgtggctgacgtcctgcttcaagccggagcagacctggacaagcaggaagatatgaaaaccattcttgaaggtattgaccctgcaaaacatcaggtgcgtgtggcttttgacgcctgcaagctgctgaggaaagaatag

SEQ ID NO: 108243 - DNA, 1884 bp, synthetic construct
  misc_feature 1..1884: note = Description of Artificial Sequence: Synthetic coding sequence
  source 1..1884: mol_type = other DNA
atgctcactgactcagggggcggggggacctcctttgaagaagaccttgatagtgttgctccgaggagcgccccagctggagcctccgagccacctcctcccggcggcgttggtctgggcatacggaccgtgcgcctgttcggagaagcaggccctgcctcaggtgtcggttcttcaggaggcggaggatccggttctgggaccggcggaggggacgctgcgctggatttcaaactcgcggccgcagtcctgagaacagggggcggtggcggcgcctccggctcagatgaggatgaggtgtccgaggtcgagtcatttattttggaccaggaggatttggacaaccccgtgctgaaaacaaccagcgaaatttttcttagtagcaccgccgagggagccgatctccgtaccgttgacccagagacccaggcacgtttagaagctctcctggaagccgcgggaatcgggaaactatccaccgctgacggcaaagcctttgccgacccggaggtgttgcggagactcacctcctccgtgagttgtgccctagatgaggctgcagcagccctcactcgtatgaaagccgagaattcccacaacgccgggcaggtggatacacgttccctcgctgaggcttgctccgacggcgatgttaacgcagtcagaaagcttctagatgagggccgatcagtgaatgagcacactgaggagggtgaaagcttactctgcttagcatgcagtgccggttactatgagcttgcacaggtacttctcgccatgcatgccaatgtcgaagataggggcaacaaaggcgacataactccactgatggcagcctctagcggcggctatctggacattgtaaaattgctgctgttacacgatgctgatgtcaactcccagtccgccactgggaacacagccctgacttatgcctgcgccggtggcttcgtggatatcgtcaaggtgctgctgaatgagggggcaaacatcgaggatcacaacgaaaatggccatacacctctaatggaggcagcatccgctggacatgtcgaagttgcaagagttctgctggatcacggtgccggaattaacactcattctaatgaattcaaggagtctgcactaaccctggcctgctacaaagggcatctggacatggtgcgatttctcctagaagctggggcagaccaagagcataaaaccgatgagatgcatacggcacttatggaggcatgcatggacggtcacgttgaagtggccaggcttctcctggactctggcgcccaagtcaacatgcctgctgattccttcgagagccctctgacactggctgcctgtgggggccacgtggagttggcagccctcttgattgaaagaggcgcgaacctagaggaggtcaatgatgaaggctacactcccctaatggaggccgcacgggagggccatgaggaaatggtggcactgctcctggcgcagggcgcaaacattaatgctcagacggaggaaacccaagagaccgccttgacactggcctgttgcggtggattttcagaggtggctgatttcttaataaaggccggagccgatattgagttgggctgcagcacccctttgatggaagcaagccaggaaggccacttagagttggtgaaatatttacttgcctctggggctaatgtgcacgcaacgactgccaccggggataccgcccttacttatgcttgcgagaatggtcatacggatgtggctgatgtcctgcttcaggccggtgcggatctcgataaacaagaggacatgaagacaatactggaagggatcgatccggctaagcaccaggtccgtgtcgcctttgacgcctgcaaactgcttcggaaggagtag

SEQ ID NO: 108244 - DNA, 4461 bp, synthetic construct
  misc_feature 1..4461: note = Description of Artificial Sequence: Synthetic coding sequence
  source 1..4461: mol_type = other DNA
ccgcgagtcggacgacatcgactacgtctccgagtgaggacaatgcttactgactccggtgggggtggaaccagcttcgaggaggatcttgattcagtggcaccccggagcgctcccgccggcgcttcagagccaccccctcccgggggggtcggcctgggaatcaggaccgtccgtctttttggggaggcggggcctgccagcggcgtggggagttccgggggcggaggatccgggtctggaactggtggaggagacgctgccctggacttcaagctggcggcagctgttctgcgtacggggggcgggggcggagctagcggcagtgacgaagatgaggtttctgaggtggagtctttcattctcgatcaggaagaccttgacaatcccgttctgaaaacaacaagcgagatttttctcagcagcactgcagaaggagcggacctgcgcacggtcgaccccgaaacccaggctagactggaagctttgttggaagcggcgggcattggaaagctgagtacggcagacgggaaggcattcgccgaccccgaagtgctgcgccgcctgactagctcagtctcctgcgcgttggatgaagccgctgccgccctgactcggatgaaagccgagaatagtcataacgccggtcaggtcgacactcgaagcctggccgaagcatgcagcgacggcgacgtcaatgctgtgaggaagctcctcgacgagggccgctcggtcaacgaacacaccgaagagggcgagtctctgctctgccttgcctgcagcgctgggtactacgaacttgcacaagtgcttctggctatgcacgcaaacgtcgaggatcgcgggaacaagggagatattaccccattgatggctgccagctccggaggatacctggatatcgttaagctacttttgctccacgacgccgatgtaaacagccagagtgcaactggtaacactgcactcacctatgcatgtgcaggggggtttgttgatattgtcaaagtcctcctgaacgagggggcaaacatagaggatcacaacgagaatggccatacccccctgatggaagccgcctcagccggtcacgttgaagtcgcccgggttcttttggaccacggtgctgggattaacacacattctaacgagttcaaggaaagcgcgcttacccttgcatgttataagggccacctcgacatggttcgattcctcctggaggcaggagccgatcaggagcataagaccgatgagatgcatacagctttaatggaagcatgcatggatggccatgttgaggtcgccaggctgctcttggacagcggcgcacaggtaaacatgcccgccgattcctttgaaagtccactgacactggctgcctgcggaggacacgtggaactagccgcactactgatcgagagaggagccaacctggaagaggtcaatgatgaaggttatactccattgatggaagctgccagagagggtcacgaggaaatggtggcactcctacttgcccagggcgcgaacattaacgcccagaccgaagagactcaggaaaccgccttaactttagcctgttgtggagggtttagcgaagtggccgattttctgataaaggctggagccgatattgagctagggtgctcgacacccctgatggaagcttctcaggagggacatctggagctggtcaaatacttgctggccagcggtgcaaacgtacacgctaccaccgctactggggatacggcccttacctatgcctgcgagaatgggcataccgacgttgctgacgtactgctgcaggctggcgctgacctagataagcaggaggacatgaagacaatcctcgaaggtatcgatcctgctaaacatcaggagcacgaaagcgaaggcgggcgaactccactgatgaaggctgcccgggcggggcatctttgcaccgtccaatttctcatctctaagggtgcgaatgtgaatagggccacagccaacaatgatcacacagtagtttctttggcatgtgcaggtggacacctggccgtggtcgaactcctgttagcccacggcgcagaccccactcatcggttgaaggatggtagtaccatgctaatcgaggccgcaaagggcgggcatacaaatgtggtgtcatatctgctcgactaccctaataacgtgttgagtgtgccgaccacggatgttagtcaactcccccctccaagccaggatcaatctcaggtacctcgggtgccgacccacaccttagcaatggtggtgcctccacaagagccagatcggacatctcaagagaactcacccgcgttgcttggggtccagaagggcacctcaaagcagaaaagttcctctctgcaggtggctgaccaggacctactgccaagctttcacccataccagccccttgagtgcattgtagaggagacggaggggaaactgaacgagttggggcaacggatttctgcaatcgagaaagcgcagctgaagagcctggagctgattcaaggggaaccactgaataaggacaagatcgaggagctcaagaagaacagggaagagcaggtgcaaaaaaaaaagaaaatcttaaaggagctgcaaaaggtggagcgacagcttcaaatgaaaacgcagcaacagtttaccaaggagtacctcgagacgaagggtcagaaggacactgtcagtctgcaccagcagtgctctcatcggggggttttccccgagggcgagggtgatggtagtctgccagaagaccatttctccgaactaccacaggttgatactatccttttcaaagacaatgacgtcgatgacgaacagcagtcaccccccagcgctgagcagatagatttcgtaccagtgcaaccactatccagcccacagtgcaattttagttccgacttggggagcaatggtacgaactccctggaattgcaaaaagtgagcgggaatcagcagattgtgggccagcctcaaatcgctatcactggtcatgaccagggcctcctggtccaggaaccggatggcctgatggtagcaacccctgctcagacgctgactgatacgctggatgatctcatcgcagctgtgagcacacgcgtccctactggctcaaatagtagttcgcagacaaccgagtgcctgactcccgaaagctgtagtcagacgacttcaaacgtagcctcccagtcgatgccgcctgtttatccctccgtagatattgatgcccacacggagtctaaccatgatactgcgcttaccctcgcatgcgctggcggacacgaagagctggtgagtgttttaattgctagggatgccaaaatcgaacacagggacaagaaagggtttactccacttattctggccgccactgccgggcacgtgggggtggttgaaatcctcctggacaagggcggagacattgaggctcagagcgagcggaccaaagataccccactgagtttagcctgtagcggcggaagacaggaggtggttgatctcctgttggcgaggggtgcaaataaagaacaccgaaacgtgtctgactacactcctctgagcttagccgcgagtggtggatacgtaaacatcatcaaaatccttctcaacgctggggctgaaattaactctcgtaccgggtcaaagttgggaattagccctctgatgctggccgccatgaacgggcacgtcccggctgtcaagttgcttctggatatggggtccgacatcaatgcacagatcgagacaaatcgcaatacagcccttacgttggcttgcttccagggaagagcggaggtggtatcacttctgttggaccggaaagctaatgttgaacatagagctaaaaccggactgacccctctgatggaggcagcctctggcggttatgctgaggtgggccgagttcttctggacaaaggagctgacgttaacgcccctccagtaccatcttcccgggacacagccctgaccatcgctgccgataagggtcactataagttctgcgaactgctgatccaccggggagcacacatcgacgtgcgcaacaaaaagggcaatactccactgtggctggcttccaacgggggtcacttcgacgtggttcaacttctcgtgcaggccggagctgacgtcgatgcagctgacaaccgcaagatcaccccactaatgtccgcctttaggaaggggcacgtgaaggtggtgcaatacctagtaaaagaagtcaatcagttcccctccgacatcgagtgtatgaggtacattgccaccataaccgacaaagagttactaaaaaagtgtcaccagtgtgttgaaacaatcgtgaaggccaaagatcagcaggctgctgaggctaataagaatgccagcattctgctcaaggagctagatcttgaaaagtcaagagaagagagccggaagcaggcattggctgctaaacggtag

SEQ ID NO: 108245 - DNA, 1863 bp, synthetic construct
  misc_feature 1..1863: note = Description of Artificial Sequence: Synthetic coding sequence
  source 1..1863: mol_type = other DNA
atgtcgttagctcaacagaaggcggacaaaaacaagattaacggcgagccgcgtggggggggggctggcggaaattcagacagtgacaacttggattcaactgactgcaactctgagtcctctagcggaggcaagtctcaggagcttaacttcgtaatggacgtcaatagcagcaagtatccctctctgctactgcactctcaggaagaaaaaacatccacggctacatcaaaaacccagaccaggctggagggagaggtaactcctaattctttgagcactagttacaagacagttagcttgcccttgtcttcccctaatattaagctaaacctcacatctcctaagagagggcagaaacgagaggagggatggaaggaggttgtaagacgtagtaagaaattatccgttcctgcaagcgttgtgtctagaattatgggaaggggcggctgtaacattactgctatccaggacgtaacaggagcccacatcgatgtggataagcaaaaggacaaaaacggggagaggatgattaccattcggggtgggactgagtccacacgttacgctgtgcagctgattaatgcactcattcaggatccagcaaaagagctggaggatctcatccctaaaaaccacattagaactccagcaagtaccaaaagcatacatgctaacttctcttctggggtaggaactacagccgctagctctaagaatgcatttcctctgggcgctccaacattggtgacatctcaagccacaactttatctacttttcagcctgctaataaattgaacaagaacgtacccaccaacgtccgttcaagtttcccagtgtcgttaccactggcctacccccatccgcattttgccctcctggcagcacagactatgcaacagattcgccaccctaggctgcctatggcacaattcgggggaacttttagccccagccccaatacatggggaccctttcctgtgcgacctgtgaatcctggtaacaccaatagctcacccaagcacaataacacttctcggctgcctaaccaaaatgggacagtacttccaagtgagagtgcgggacttgcgacagcctcatgtccaatcacagtctcttccgttgttgcggccagccagcagctgtgcgtcaccaatacacgaacaccctcctcagtacggaagcagttgttcgcatgtgtgcccaagaccagcccaccagccacagtaatcagttctgtgacctccacctgctcatccctgccgagtgtgtcttccgcgccgatcactagtggtcaggctccaacaacatttctgcctgcctccactagccaggcacagctttctagtcagaagatggaatctttttccgctgtccctcctactaaagagaaggtgtctacgcaggatcagcccatggcaaacttgtgcacacccagctcaaccgccaactcttgttccagctccgcttcgaacacaccaggcgctcccgagacacacccaagcagtagcccgactcccacatcttcaaacacacaggaggaggcccagcctagctcggtgtcagatttgtccccaatgagcatgcccttcgcatcaaactctgagcctgcgcctctcacacttacttcaccaaggatggtggctgctgacaaccaggatacctccaatctgccacaactggccgttccagcccccagggtcagccatcggatgcagcctagaggttcattctactctatggtccccaatgccactatccaccaagatcctcagtcaatttttgtcaccaatcccgtcaccctatgggaggccgaagcatccggcctgcatgaagtgcgatcccttcgacaagcctggtag

SEQ ID NO: 108246 - DNA, 2601 bp, synthetic construct
  misc_feature 1..2601: note = Description of Artificial Sequence: Synthetic coding sequence
  source 1..2601: mol_type = other DNA
atggatgtcaatagctcaaaatatcctagtttactcctgcattcccaagaggagaaaacctctacagccacctctaaaacccaaacaaggctcgagggggaggtgacacccaattctctgagcacaagttataagacagtgagcctgcccctatcatctcccaatataaagctcaatctaaccagccccaagcgcgggcagaaaagagaggagggctggaaagaagttgtgagacgatccaagaagcttagcgtgccagctagtgtggtgtctaggatcatgggccggggcggatgtaacatcacagctatccaagatgtgacaggcgcccacattgatgtggacaagcagaaagataagaatggtgaaaggatgatcaccattcgaggcggaactgagtccacccgttacgctgttcagctgattaacgcgctgattcaagaccccgccaaggaactggaggatcttatccctaagaatcacattcggactccggccagtaccaagtcaattcacgctaacttcagcagtggcgtcgggacgacagcagcatccagtaagaatgccttcccgctcggagcgccaaccctggtgacgtctcaggcgacaactttgtccacctttcaacctgccaacaagttgaacaaaaatgttccaacgaacgtccgtagctcgtttcccgttagtctgcctctggcgtacccacatcctcacttcgctctcctcgccgcccaaactatgcaacagatccgtcatcccagattgcctatggcacagttcggcgggactttcagcccgtccccgaatacctgggggccatttccagtaagaccggtgaacccaggcaatacaaatagcagcccaaagcataacaatacttcaagactgccaaatcagaacgggaccgttctgccctccgagtccgccggcctcgccaccgcatcctgtcctattacagtgtcctcagtggtcgctgcctcccaacagttatgcgtcacaaacacaagaaccccttccagcgttcggaagcaactctttgcctgtgtacccaagacaagcccacctgccaccgtgataagcagtgtgacctctacgtgcagctctctcccctctgtgtcaagcgctcctataacttccgggcaggcaccaactactttcttacctgcgtccacttcacaagcacagctgagcagtcagaaaatggaaagctttagcgcagtgcctcccactaaggaaaaggtgagcactcaggaccagccaatggctaatctctgtaccccttcatccaccgccaattcctgttcttcctccgcgtccaatacaccaggcgctccagaaacgcatccaagctcctcccctacccctacctcctcgaacacccaagaggaagcccagccatcatcagtgtccgatttgagtcctatgtccatgccgtttgcatccaacagcgagcctgcccccttaaccctcacttctccgcggatggtggctgctgataatcaagatacttcaaatctgcctcaactggccgtgcccgcccccagggttagtcaccgaatgcaaccacgcggttcattttattccatggtacctaatgccaccattcatcaggacccacagtccatctttgttactaatccggtcactctgactcctccccaaggtccacccgcagcagttcaactctctagcgccgtgaacattatgaacggctcccagatgcacataaacccagctaataagtccctgccgccaacttttggacctgcaactctgttcaaccacttctcttcattatttgatagcagccaggttccagccaatcagggatggggcgatggtccactgagctcccgtgttgcaacagatgcgagtttcactgtgcagagcgccttcctaggaaatagcgtattgggtcatctcgagaacatgcaccccgacaactcaaaggcccccggtttcagacctccctcacagcgtgtctccacttcaccagtggctactagtgccccaccgacgctgggccagccaaagggggtgagtgcctctcaggacaggaagatcccacccccaatcggaacagaaaggctggcccgaatacgccagggaggatccgttgcccaggcacccgcaggcacttcctttgtcgcccccgtcggccatagcgggatatggagtttcggtgtgaacgcagtctctgaaggactctcaggatggagccagtcggtcatgggtaatcaccccatgcaccagcagctgtccgatcctagtaccttttcccagcatcagcccatggagagggacgattcaggcatggtcgccccctccaatatctttcaccagcctatggccagcggttttgtcgactttagtaagggcttacccattagcatgtacggtggcacaatcatcccgtcccatcctcaactggccgatgtacccggaggccctttgttcaatgggctgcataacccagaccccgcatggaatcctatgattaaagtcatccaaaactccacagaatgcacggacgcccagcagatttggcccggtacctgggcacctcacattgggaacatgcatctgaagtatgtgaattag

SEQ ID NO: 108247 - DNA, 2298 bp, synthetic construct
  misc_feature 1..2298: note = Description of Artificial Sequence: Synthetic coding sequence
  source 1..2298: mol_type = other DNA
atggctgctgaccctactgaacttcggctgggcagcctccctgtgtttaccagggacgacttcgaaggtgattggaggttggtcgcctctggggggttttcccaagtcttccaagccaggcatcgtagatggcggacagagtacgccattaaatgtgccccttgtctgcccccggatgccgcatcttcggatgttaattatctgattgaggaagcagcaaagatgaaaaaaattaaattccaacacatcgtgagcatttacggggtatgtaagcaacctcttggcattgtgatggagttcatggctaacgggtccctagaaaaagtcctgtcaacacattccctctgctggaaattaaggttccgaattatacacgaaacatctctcgccatgaattttttgcatagtatcaagccaccactgcttcacctcgacctaaaacctggaaacatactgctcgactctaacatgcacgtcaaaatatccgacttcggactctcgaagtggatggagcaaagcactaggatgcagtatatagaaagaagcgcacttaggggaatgttaagctatatccctcctgaaatgttcttggaatcaaacaaagcccccgggccaaaatacgatgtgtatagttttgccattgtgatttgggagctccttacacaaaaaaagccctactctggctttaatatgatgatgattattatcagggtggcagccggcatgcgaccttcactgcagcccgtgagcgaccaatggccaagcgaggctcagcaaatggtcgacctgatgaagaggtgttgggaccaagatccgaagaaacgtccctgtttcctcgacatcacaattgagacagacatcttgctgtccctcctgcagtctagggtggccgtcccagagtccaaagcattggctcgtaaggtgtcttgcaagctgtctctgcgacagccaggcgaagtaaacgaagacatttctcaggaactgatggatagcgattctgggaactatctgaagagagccctgcagctgtctgataggaagaatctagtcccaagggatgaagagctgtgtatttacgaaaataaggtaacaccactacatttcctcgtggcacaaggctccgtggagcaggtccgcctgctgctggctcatgaggtggatgtggactgccagacagcctcgggatatactccactgctgatcgccgctcaggatcagcagcctgacctctgcgcactgctactggcacatggcgcagatgctaatagagtcgatgaagatggctgggcccctctgcatttcgctgcccaaaacggcgatgatggcacggcaaggctgcttctcgaccacggcgcctgtgtggatgcacaggagagagaaggttggactccgctgcatcttgcggctcagaacaatttcgagaatgttgccaggcttctagtgtctcgacaagcagacccaaacctccatgaagctgaggggaagacaccactccacgtcgcggcatatttcggtcacgtctcattagtcaaactcttgacaagccagggcgcagagctcgacgcacagcagaggaatctcaggactcctttgcatctcgccgtggaacggggcaaagtgagggccattcagcatctgctgaagtccggtgctgtccctgacgctttggatcagagcggctatggccctctccacacggctgccgcacgaggcaagtatctgatctgtaaaatgctccttagatatggagcaagcctagagttaccaacacaccaaggctggacccctctgcatctggcagcctataaaggacacctggaaattatccatctcttggccgagtctcatgcaaacatgggggcactcggtgctgtcaactggactccgcttcatctggccgcccgccatggcgaggaggctgtggtgtcggccctactccaatgcggcgccgatcctaatgccgctgagcagagcgggtggacacctttacacctcgcagtacagcgctctacttttctatcagtcataaaccttctcgaacatcacgctaatgttcacgccagaaacaaggtgggatggactcccgcccacctggccgccttaaaggggaacactgccatcctgaaggtgctggtggaagctggggcccagctggacgtgcaggacggcgtctcttgtaccccattacagttggctttgcggagccgaaagcaagggatcatgtccttccttgaggggaaagaacctagcgttgccacattggggggttccaagccaggggctgaaatggaaatttag

SEQ ID NO: 108248 - DNA, 1008 bp, synthetic construct
  misc_feature 1..1008: note = Description of Artificial Sequence: Synthetic coding sequence
  source 1..1008: mol_type = other DNA
atggctgaggggggctcacccgacggacgggccgggcctgggtctgctggcaggaatttgaaagaatggcttcgggaacaattttgcgaccacccactcgagcattgcgaggatacacgtttgcacgacgctgcctatgtaggagacttgcagacactgcggtctttgttgcaggaagagtcgtatcgctcaaggattaacgagaaatccgtttggtgttgtggctggttaccctgtactcccttgaggatagccgcaacggctggacacggttcctgtgtcgacttccttattcgaaaaggagcagaggtagatctagtcgacgttaaggggcagacagcgttgtatgtagccgtcgtgaatggtcatcttgaatccactcaaattctactggaggctggagccgatccgaatggatccagacatcaccgtagtaccccagtataccacgccagccgagtgggcagagccgacatcctgaaggcgctgataagatacggcgcggatgtagacgtgaaccatcacctcactcccgacgtacagccccgattttcccgacgactgacatctctggtcgtgtgtccactctatatttcggcagcttatcataacttgcagtgctttcggcttctgctccttgctggcgcgaacccagatttcaattgcaatgggccagtgaatacccagggcttttatcgggggtcccctgggtgtgtcatggacgccgttctgcgacacggctgtgaagcagcttttgttagcctcttggtggaatttggcgcaaatctgaatttggttaagtgggagagccttggtcccgaatctagggggagaaggaaggtggatccagaagcactgcaggtttttaaggaggccaggtctgttcccagaaccctcttatgtctgtgtagggtagcagtgcggagagccctgggcaagcaccgcctccacctgattccctctttgcccctgccagatccaataaagaagtttttgctgcacgaatag

SEQ ID NO: 108249 - DNA, 909 bp, synthetic construct
  misc_feature 1..909: note = Description of Artificial Sequence: Synthetic coding sequence
  source 1..909: mol_type = other DNA
atgctgcagctgaccggcgagaacgagaaaaactgcgaagtgtcagagaggattcggcgctccgggccatggaaagagatcagcttcggcgattatatatgtcatacctttcagggagattgctgggccgatagatctccgcttcacgaagctgctgcacagggccgcctactggctctcaaaacgttgattgctcagggcgtgaacgtgaatctcgtgactattaatcgagtctctagcctccacgaagcttgtctggggggtcacgtcgcttgcgccaaggctctgcttgagaacggagcccacgttaatggcgtgaccgtccacggagcaacccccctgtttaacgcctgttgttccgggagcgccgcatgcgtgaatgtgctcctggagtttggagcgaaggctcaattggaagtccacttagcctctccgatccatgaagcagtaaaacgagggcaccgcgaatgtatggagattctgctggccaacaacgtgaacatcgaccatgaagtgccccagctcggaacaccactatacgtcgcgtgcacgtatcaaagagtggattgcgttaaaaagctgctagagctaggcgcaagcgtggaccacggtcaatggttagacacgcccctgcacgctgccgcacgacagtcaaatgttgaagttatccacctgctcaccgactacggagcaaatctgaagagaaggaacgcgcaagggaagtccgctctggacttggctgcccctaaaagcagtgtggagcaggcactgctcctgcgcgaagggcctcccgctttgtctcaactgtgcaggctctgcgttcggaaatgcttagggcgggcttgccaccaagcgatccacaaactccatctgccagaacctctcgagaggttcctgctgtaccagtag

SEQ ID NO: 108250 - DNA, 972 bp, synthetic construct
  misc_feature 1..972: note = Description of Artificial Sequence: Synthetic coding sequence
  source 1..972: mol_type = other DNA
atggaagacggccctgtgttttacgggttcaaaaacattttcatcaccatgtttgccacatttttctttttcaagctactgataaaggtgttcctggccctcctgacgcacttttatatagtaaagggcaataggaaggaggctgcccgaattgcagaagagatttatggcggcatttccgattgttgggcagacagatcacctctgcatgaggccgcagcccaaggtaggcttctcgcactgaagactctcatcgcgcagggggttaacgtgaacttagtgactatcaaccgtgtgagcagtcttcacgaagcatgcctgggaggccatgttgcctgcgctaaagctcttttggagaacggcgcacatgtaaacggcgtgaccgtacacggtgcgacacctttatttaacgcttgctgctcgggttcagcagcgtgcgtcaatgtccttcttgaatttggtgctaaggcccagctggaggtgcatctggctagtcctatacacgaggctgtgaaaagaggccacagagaatgcatggaaatccttctcgccaacaacgtaaatattgatcatgaagtgcctcagttaggaacccctctctacgtcgcttgtacttaccagcgtgttgactgcgtgaaaaaattactcgaactgggcgcctcagtggaccatgggcagtggctggatacaccccttcacgccgcagctagacaatcaaatgtggaggtcatccacctgctaaccgattacggggctaatttgaagcgtaggaatgctcaagggaagtccgctctcgacttggcagctcccaagagctccgtggagcaggccctactgctcagggaaggccccccagcactttcccaactgtgccgtctgtgcgtcaggaagtgtcttggaagagcctgccatcaggcaatccataaactacatctgccagaacccctggagcgctttctcctttaccagtag

SEQ ID NO: 108251 - DNA, 909 bp, synthetic construct
  misc_feature 1..909: note = Description of Artificial Sequence: Synthetic coding sequence
  source 1..909: mol_type = other DNA
atgctccagcttacaggcgagaacgagaaaaattgcgaagtatcagaacgcattcgccgatccggtccttggaaggaaattagtttcggggattatatctgtcacactttccaaggcgattgttgggccgatcgatctccactgcacgaagccgctgcccagggtagactcttagccttgaagacgctgatcgcgcagggcgtgaatgtcaacctggtgacaattaatcgcgtgagttccttgcatgaagcatgtttgggcgggcatgttgcatgcgcaaaggcactgttggagaatggagcacatgtcaacggtgtgactgtgcacggggccacccctctgttcaacgcgtgttgttccgggtctgccgcctgcgtcaacgtattgctcgaattcggggccaaggctcagctggaggtccatctggcctctcctatccatgaagcagtgaaaaggggccacagggagtgcatggagatcctgctggccaataatgtcaatatcgaccatgaggtcccccagctaggcacgccgttgtacgttgcatgcacatatcagagagtcgactgtgtcaaaaaactgctggagctgggcgccagcgtggatcacggacagtggctcgacactccactgcacgctgcggctagacaatcaaacgtcgaagtcatacatctgctgaccgattatggagccaacctgaagcggcgcaatgctcagggaaagagcgctttagatttagctgcccccaaaagcagtgtggaacaggctctgctcctgcgggagggtcctcctgctctgagccaattatgcaggctctgcgtgcgaaaatgcctcggtcgcgcttgccaccaggcaatacacaagctgcacctgcccgaaccactcgaaagatttcttctctatcaatag

SEQ ID NO: 108252 - DNA, 921 bp, synthetic construct
  misc_feature 1..921: note = Description of Artificial Sequence: Synthetic coding sequence
  source 1..921: mol_type = other DNA
atggaggatggacccgtattttatgggttcaagaatatttttatcactatgttcgcaactttttttttttttaaactgctcattaaagtctttctggcactgttgacgcatttctatatagtcaagggaaaccgcaaggaagccgcccgcattgctgaagagatttatggaggcatcagtgactgctgggccgaccgctctccactgcacgaagcggccgcccaagggaggctccttgctctaaagactttgatcgcgcaggcatgcttgggtggacatgtggcttgcgccaaagcactacttgagaatggggcccacgtcaacggggtcaccgttcatggtgccacaccattattcaatgcctgctgttcaggttctgctgcttgtgtgaacgtgctcttggaatttggcgcgaaggctcagcttgaggtgcatttggccagcccaatacatgaagcagtaaagcgcggtcaccgtgaatgcatggaaatcctgcttgccaacaacgtgaatatcgatcacgaagtgccacaactgggaacccccctttacgtggcctgcacataccagagggtggactgcgttaagaagcttctagagctcggagcaagcgtggatcacggccagtggctggacactcctctccacgccgctgctcgccaaagtaacgttgaagttatacatctcctgacggactacggcgctaatctgaaacgacggaatgcacagggaaagtctgccctagatctggcagcacccaaatcttccgtggagcaggctttactgctccgggaaggtcccccagccttgagtcaactgtgtcggctgtgcgtccggaaatgtcttggacgggcttgccatcaggcaatccacaaactgcacttaccagaaccactcgaacgttttctgctgtaccagtag

SEQ ID NO: 108253 - DNA, 1764 bp, synthetic construct
  misc_feature 1..1764: note = Description of Artificial Sequence: Synthetic coding sequence
  source 1..1764: mol_type = other DNA
atgacacggttctcctacgccgaatacttctctctgtttcatagttgcagcgccccatcccgctctaccgcccccccggagtcgtctcccgctcgcgcacctatgggattattccagggggtgatgcagaagtacagctcttccttgttcaagacctctcaacttgctcctgccgacccactcataaaggccatcaaagacggcgacgaagaggcactaaaaaccatgatcaaagaagggaaaaacctggctgagcccaacaaggagggatggctgccgctgcacgaggccgcatactatggtcaggtgggatgtctcaaagttctccagagggcttacccgggcacgatagatcagagaactctgcaagaggagacagctgtctaccttgccacttgcagaggccatctggactgtctgctgtctctactgcaggcaggtgctgagcctgatatctcaaataaaagcagggagacccctctgtataaagcatgcgagaggaaaaatgcggaggctgttaagatcttagtccagcataacgccgatacaaaccaccggtgtaaccgcggttggacagccctgcacgaatctgtgtcacggaacgacttagaagtgatgcagatcctggtctccggcggggccaaagtggaatcaaagaacgcatatggtatcactccgctcttcgtggccgcccagagcggccagttggaggctctgcggtttctcgccaagtacggggccgacattaatacccaagcctcagacaatgcaagcgctctttatgaggcatgcaagaatgagcacgaagaagttgtggaatttcttttgtcccagggagccgatgccaacaaaaccaataaggatgggctgctaccgcttcacatagcatctaaaaaaggcaactaccgaattgtgcagatgcttctgcccgtcacaagccggaccaggatcagacggtcaggggtgtcccctctgcatctggctgccgagaggaaccatgacgaagtcttggaagccctgttaagcgctcgctttgacgtgaacactccgttggctcctgagcgagctcgtctttacgaggaccgccgttcgtccgctttgtattttgccgtcgtgaacaacaatgtgtacgctaccgaactcttgctgcaacacggcgccgaccctaaccgcgatgtaatttcccccctcctggtagcgattaggcacggctgccttagaactatgcaactccttctcgaccacggcgctaacatcgatgcttacattgccactcatcccacggcttttccggccactattatgtttgccatgaagtgtttatccttgctgaagtttctaatggaccttggctgcgacggcgagccatgcttttcttgtttatacggaaacggaccccacccccctgcacctcagccaagcagtcgcttcaacgatgcgccagccgccgataaggagccatccgtggtgcagttttgtgaatttgtaagtgctcctgaagtgtcacggtgggctggccctataattgatgtgctgctggattacgttggcaatgtgcagctctgttcccgactaaaggaacacatagactcattcgaagactgggccgtgattaaggagaaagctgagcccccaagaccactggcccatctgtgcaggttgcgcgtacgtaaggccatcggcaagtaccgcatcaagcttctggataccttgcctttgccagggcgcctgatacgatatttgaagtacgagaatacccagtag

SEQ ID NO: 108254 - DNA, 1812 bp, synthetic construct
  misc_feature 1..1812: note = Description of Artificial Sequence: Synthetic coding sequence
  source 1..1812: mol_type = other DNA
atggctattgaacagtctctcgctgataagacacgtggaccgacaactgcagaggcgactgccagcgcctgcaccaaccgtcagccagcacatttctacccctggacacgctcaacagctccaccagaatcttctccagccagggctcctatgggactttttcagggtgtgatgcagaagtacagttcctccctgttcaaaaccagccagctggcgcctgcagatccgctcatcaaggccattaaagatggtgacgaagaagcgctgaagactatgatcaaggaaggaaaaaacctggctgagcccaacaaggagggctggctaccacttcacgaggccgcctactatgggcaagtgggatgtctgaaagtccttcagcgggcataccctggtaccattgatcagagaacacttcaggaggaaaccgctgtctatctagcaacttgtcgcgggcacctggactgcctactcagcttgctccaggctggcgcagagcccgacatcagcaacaagtccagagagacgcccttatacaaggcttgtgagcggaaaaatgccgaggcggtgaaaattctggtccagcataatgctgatacaaatcaccgatgtaatcgggggtggactgcgttgcacgaaagtgttagtcgaaatgacctcgaagtgatgcagatcttagtgtcaggcggcgccaaggtggagagcaagaatgcgtatggaataacccccttgttcgtggctgcccaaagtggccaactcgaggccctccgatttctggccaagtacggagcggatattaatactcaggcctcagataatgcatccgccttgtatgaagcctgcaagaacgagcacgaggaggtggtcgagtttttgctgagccagggtgctgacgccaataaaaccaacaaggacgggctgctcccactgcatattgcctccaagaaaggtaattatcgcattgtgcagatgctcctgcccgtgaccagccgcactaggatcaggcgctcaggagtctcccctttacacctagccgcagaacgtaatcatgatgaggtgcttgaggccctgctatccgcccgttttgacgtgaacaccccacttgccccggaaagggcgcgcctttatgaggaccgtcgctcatccgccctgtatttcgcggtggttaataataacgtgtacgcgaccgagctactcttgcagcacggcgcagatccaaacagagacgtgatctctccgctcctcgtcgccattagacacggctgcttgcgaacgatgcagctgctcctcgatcacggcgcgaatatcgacgcctatattgccactcaccctactgcctttcccgccaccataatgttcgctatgaagtgtctgtctctactgaaatttttgatggacctgggctgcgatggagagccgtgcttctcatgtctttacggcaacgggccgcatcctccggctccccagcctagcagcagattcaacgacgctccagctgccgataaggagccctctgtcgtccagttttgtgaattcgtctccgcacctgaggtatccaggtgggccggccccattatcgacgtgctgctggattacgtcggcaacgtccagttgtgtagccgtcttaaggagcatatcgactctttcgaagattgggcagtcataaaagaaaaagcagaaccacccaggcctctggcacacctgtgcagactccgagtccgcaaagctatcggtaaataccggatcaagctccttgacacattgcccttgccagggcgtttaatcaggtatctgaagtacgagaatacacaatag

SEQ ID NO: 108255 - DNA, 1470 bp, synthetic construct
  misc_feature 1..1470: note = Description of Artificial Sequence: Synthetic coding sequence
  source 1..1470: mol_type = other DNA
atgcggccagccgacccactcattaaagcgattaaggacggggatgaggaagctctgaagacaatgattaaggaggggaagaatcttgcggagcctaacaaggaggggtggcttccgctacacgaggccgcttattacgggcaggtgggctgcctgaaggttttgcagcgcgcgtaccctggcacaatcgaccaaagaaccctgcaagaggagaccgcagtatatttggcaacttgtcgcggtcacctggactgtctactgagcttgctgcaggcaggcgccgaaccggacatctccaataagtctcgggagactcccctttataaagcctgtgaaaggaagaatgccgaggcagtgaaaattctggtgcaacacaatgccgatactaaccatcgctgtaaccgggggtggacagccttgcatgagtctgtctctcggaatgacctcgaagtgatgcaaattttagtatccggaggagccaaagtcgagtctaagaatgcttatggtatcacgcccctcttcgtggcagctcagtcaggccagctggaagctctacgcttcctagcaaaatatggagcagacataaatacacaggcttcagataatgcttccgccctttatgaagcttgcaaaaatgagcacgaggaggtggtcgaatttctgttgtcccagggagctgacgcaaataaaactaacaaggacgggctgttgccactgcatatcgccagcaaaaagggaaattatcgcatcgtccagatgctcttgcctgtgacttcacgcaccaggatccggcgctctggagtctctcctctacatttggctgccgagcggaatcatgacgaggtcctggaagccctgcttagtgcgcgctttgacgtgaatacaccgctggcccctgagcgagccagactgtatgaggatagacgctcgtctgccctgtatttcgctgtggtaaacaataacgtttatgctactgagctgttgctgcagcacggcgcagaccccaaccgggacgtcataagcccactgttggtcgccatcagacacggatgcctaagaaccatgcaactgctgctggaccatggcgcaaacattgacgcctatatcgcaacacatcccacggcattccctgccaccattatgttcgccatgaaatgtctgtccctcttaaaatttctaatggatctcggttgtgacggcgagccctgcttctcttgtctgtatgggaatggcccccaccctccagctccgcagccttcttcaagatttaatgacgctcctgctgccgataaggaaccttctgtcgttcagttctgtgaatttgtgtcagctcctgaggtgagcaggtgggcaggcccaataatcgacgtactccttgactatgtcggcaacgtgcagttatgttctcgccttaaagagcatattgactcctttgaggactgggttctggagggtttcgtcaagtattag

SEQ ID NO: 108256 - DNA, 1908 bp, synthetic construct
  misc_feature 1..1908: note = Description of Artificial Sequence: Synthetic coding sequence
  source 1..1908: mol_type = other DNA
atggccactcaaatctcaacccgcggttcacaatgcacgatcggccaggaagagtattctctgtatagcagcctgagcgaggatgaactagtgcagatggctatcgagcagtcgttggctgacaaaaccaggggacctacaacggcagaggctacagccagcgcatgtactaacagacaaccagcacacttctatccctggacacgatcgactgccccaccggagtcaagtccagccagagccccaatgggtctgttccaaggcgttatgcagaagtacagctctagccttttcaagacctcccagcttgcccccgcagacccgctcatcaaggccattaaggacggagatgaggaggctctgaaaacaatgatcaaagagggtaagaatctcgccgagccaaataaggaaggctggttgccgctgcacgaggcagcatattacgggcaggtgggatgtttgaaggtgcttcagcgggcctatcccggaaccatcgaccagcgcaccctccaagaggagaccgccgtttatcttgctacatgtagaggtcatttagattgcttgctttccctgctgcaagcaggagccgagcccgatattagtaataaatctcgcgaaacccctttgtacaaagcctgcgagcgcaagaatgcggaggccgtaaagattctcgtccaacacaatgcggatactaatcaccgatgtaaccgaggctggaccgctctccatgagtcagtaagtcgtaatgacctggaagttatgcaaatcctcgtgagcggtggcgcaaaagtggaatcgaagaatgcctatggtatcacccccctgtttgtggccgcccagtctggacagctcgaggctcttcgtttcctggcgaaatacggagcagatatcaatactcaggccagtgacaatgcatccgccctctacgaagcctgcaaaaatgaacatgaagaagtcgtggaattcctcttgtctcaaggagccgatgccaacaagaccaataaggacggcttattgccccttcacattgcaagcaagaagggaaactatcgcattgtgcagatgctgctgccggtgacaagtaggacccggatcaggagatcaggtgtctctcccctccacctcgccgccgagcgaaatcacgacgaggtgcttgaggctctgcttagcgcgcgtttcgacgtaaacactccgctggcgcctgagcgcgcccgactatacgaggaccgcaggtccagcgctttatattttgccgttgttaataataacgtgtacgcaaccgaactgctgcttcagcacggcgccgatccaaaccgcgacgtgattagccctctgctcgtggctatcagacacggatgtctgaggactatgcaacttttacttgatcatggagcaaacatcgacgcctatattgcaactcaccctacggcctttcctgctactatcatgttcgctatgaagtgtctctcattgcttaaatttttaatggatctcgggtgtgacggcgaaccttgcttctcttgcctgtatggaaatggccctcacccgccggcccctcaaccctctagtcgcttcaacgacgcacctgccgctgataaggagccctcggtggttcagttttgtgagtttgtttctgccccggaggtctcaaggtgggccggacctattatcgatgtgctgctagattatgtaggaaacgtgcaactttgctctcggctgaaggaacacatcgatagttttgaagactgggccgtgattaaggagaaggccgaaccaccccgaccgctggctcacctttgccgtctcagggtgcgcaaagctatcgggaagtacaggattaagctgctggatacactcccattgcctgggcggctcatccggtacttaaaatacgaaaacacccaatag

SEQ ID NO: 108257 - DNA, 1557 bp, synthetic construct
  misc_feature 1..1557: note = Description of Artificial Sequence: Synthetic coding sequence
  source 1..1557: mol_type = other DNA
atggacttcaccgaggcctacgccgatacttgtagcacagtggggctggcggcgagagagggaaatgtgaaggtattaaggaagcttctgaagaaaggtagatccgtcgatgtggccgacaacaggggatggatgccgatccatgaggctgcatatcacaattccgtcgaatgtttacagatgctcataaacgccgatagttccgagaactatattaagatgaagacattcgagggcttctgtgccttgcatctggcggccagtcagggacattggaagatagttcagattttgcttgaggccggggcagacccaaacgccaccacactggaggaaactacccccctgttcctcgccgtagagaacggtcagattgacgtgcttcgactgctcctgcagcatggcgctaatgtcaatggctcacactctatgtgtggttggaacagcctccaccaggcttccttccaggaaaacgctgagattattaagctcctgttgcgcaaaggcgctaacaaggagtgccaggatgatttcggaatcacaccactgtttgttgccgctcagtacgggaaactggagtctctgagcattttaataagttccggcgcgaacgtcaactgccaggccctagacaaggcaacccctctgtttattgcggcacaggagggccacacaaaatgcgtggaactactgttgagttctggcgctgatccagatctttactgcaatgaggactcctggcagctacccattcacgctgcggcacagatgggacacactaagatcttggacctcctgatccccctgactaacagggcatgtgacactggtctgaataaagtctcgccagtctattctgccgttttcggcggacacgaggattgcctggagatcctcctgcgtaacggatattctccggatgcccaggcttgcctcgttttcgggttcagcagcccagtgtgtatggcctttcagaaagactgtgagttctttggcattgtgaatattctgcttaagtatggagcccaaattaacgaacttcacctggcttactgtctcaaatatgagaagttctcaattttcagatactttctgaggaagggctgctctctgggcccctggaatcatatctatgagtttgtgaaccatgccatcaaggcccaggccaagtataaagagtggctcccacacctgctagtggctggctttgatccgttaattttactctgcaatagctggatagatagtgtgtcgatagacaccctgatcttcactctggaattcactaattggaaaacacttgcccccgccgtggagcggatgctctctgcacgtgcatcgaatgcctggattctgcagcagcatatcgcgaccgtcccaagtcttactcacctctgccgattagagatccgctcctctctcaagagcgaacggctgagaagtgacagttatattagtcagctgcctctgccacgatctttgcataactatcttctttacgaggatgtgttgcggatgtacgaagtccctgaactcgctgcaatccaggatgggtag

SEQ ID NO: 108258 - DNA, 1671 bp, synthetic construct
  misc_feature 1..1671: note = Description of Artificial Sequence: Synthetic coding sequence
  source 1..1671: mol_type = other DNA
atggcaatgatgcctctggtcctgcatcaccccgaacgacaggctgagctcgggtcaggactgcgtgatggggggggcgccgctctgagacctcccggcagactggtaaagcagatggacttcacggaggcatatgcagacacttgttctactgtgggcctggcggctcgggagggaaatgtaaaggtgttgcggaaacttctcaaaaagggcagatccgtggacgtggccgataatagaggctggatgcctatccacgaagctgcctaccacaatagcgtggagtgtctgcaaatgcttatcaacgccgattccagcgaaaattacattaaaatgaagactttcgagggattttgcgcgctgcatcttgccgcttcgcagggccactggaagattgtacagattctactagaagcaggcgcggacccgaatgccactactcttgaagagacaacacccctgttccttgctgtggaaaatgggcagatagacgttctccgtctgcttctccagcatggtgcaaacgtcaatgggtctcacagtatgtgtggctggaactcactgcatcaggcatcatttcaggaaaatgccgaaatcatcaagcttctgcttcgaaaaggggcgaataaggagtgccaggatgactttggtatcaccccccttttcgtcgcagcgcagtacggaaaactggagagccttagtatacttatttcctccggggctaacgtaaattgtcaggctctggacaaggccaccccccttttcattgctgctcaggaaggacacaccaaatgcgtggagctgctcctgtcatctggagcagatccagacctgtattgtaatgaggacagctggcagttgcccattcatgcagccgcccagatggggcacaccaaaatccttgacctgctcattccacttacaaacagagcatgtgataccgggttgaacaaggtgtccccagtctactcggctgtgttcggtgggcacgaggattgtttggagattctgttgcgaaacggctactccccagatgcacaggcgtgcctagtcttcgggttctcctcaccagtctgtatggcttttcagaaagactgcgagttttttggcattgtgaatatattactgaaatatggggcccagataaacgaactgcatcttgcctattgcttgaaatacgagaagtttagtatcttccgatatttcctccgtaaaggatgtagtctcggcccgtggaaccatatctacgaatttgtgaaccatgcaattaaagcacaggccaaatataaagaatggttgccccacctcctggtcgccggatttgatccacttattttactgtgtaacagctggatcgattcagtaagcatagatactctcattttcaccctcgaattcactaattggaaaacgcttgctccggctgtggagagaatgctgagcgccagggctagcaacgcctggattctgcagcagcatatcgctacagtgccatccttgacgcacctgtgcaggcttgaaattcggtcttctctgaaaagtgagagactccggtctgatagttatatttcgcagctgccccttcctcgatctcttcacaactacctcctctatgaggatgtactgcggatgtatgaagttccagagcttgccgccatacaggatggctag

SEQ ID NO: 108259 - DNA, 1338 bp, synthetic construct
  misc_feature 1..1338: note = Description of Artificial Sequence: Synthetic coding sequence
  source 1..1338: mol_type = other DNA
atgaagaccttcgagggcttctgcgcgctccatcttgccgccagccaaggacactggaaaattgtgcaaatcctgctggaagccggtgcagaccctaacgctaccacgctcgaggagaccactcccctgttcttggcggtcgaaaatgggcaaatcgatgttctacggcttctcttgcagcacggtgccaacgtgaatggctcacactctatgtgtggttggaactcacttcatcaggcttcttttcaagagaacgcagagataatcaagttactgttacggaaaggtgctaataaggagtgtcaggacgatttcggaatcacgcccctgttcgtggctgctcagtatggaaaactggagtccctttctatcctgatttcaagcggagcaaacgtcaattgccaggccctagacaaagccacacccctcttcatcgctgcacaagaaggacatactaagtgcgtagaattgctgttgtcctccggcgccgaccccgatctgtactgcaatgaggatagttggcagcttccgatccacgccgcggctcaaatgggacacactaagattctcgatctgctgatcccactcacgaacagggcgtgtgataccggcctgaacaaagtgagtcctgtgtactccgctgtgttcggaggacacgaggactgtcttgagatactcctgcggaatggttattcccccgacgctcaggcatgcctcgtctttggattttccagccccgtctgcatggctttccagaaggactgcgaattttttgggattgttaacatcctgcttaaatatggcgcacagataaacgagctgcacctcgcctactgcctgaagtatgagaagttctcgatctttcgctacttcctgcgcaaaggttgttcactcggaccatggaaccacatatacgagttcgtgaaccacgccatcaaggcccaggccaaatataaagagtggttgcctcatctcctggtggctgggttcgatcccctgatactattatgcaatagctggatcgattccgttagtattgatacgctcatctttactctagaattcactaactggaagacccttgcacccgccgtggagaggatgttatccgccagagcatccaacgcctggattctccagcagcacattgcaaccgtcccgtccctgactcacctttgccgactggaaattaggtcctccctgaaaagcgagagacttcgctcggatagctatatatcccaattacctctgccaagaagcctgcacaattacttgctgtatgaggatgtcctacggatgtatgaggtgccggagctggctgccattcaggacggctag

SEQ ID NO: 108260 - DNA, 1662 bp, synthetic construct
  misc_feature 1..1662: note = Description of Artificial Sequence: Synthetic coding sequence
  source 1..1662: mol_type = other DNA
atgccattggtgttacaccatccggagaggcaagctgaattgggtagcgggctgagggacggagggggggccgctttgcgcccccccggccgcctggtcaagcaaatggacttcacagaggcctacgcagatacatgcagtactgtgggcttggctgcaagagaaggcaacgtcaaggttctacgaaaacttcttaagaaaggacgctcggttgatgtggcagataaccgcggttggatgccaatccatgaggcagcctaccataattctgtggagtgtctgcaaatgttgattaacgccgatagctccgaaaattatatcaagatgaaaaccttcgaaggtttctgtgcactgcaccttgcggcgagccaggggcattggaaaatcgtacagatacttttagaagccggggccgatccgaacgcaacgactttggaagaaaccactcccctgttcctcgcggtggaaaacgggcaaatcgatgtcttgcgcctgttattgcagcatggtgctaacgtcaacgggtcacactccatgtgtggctggaattccctccaccaggcttcatttcaagaaaacgccgaaatcataaagctcctcctgagaaagggtgcaaacaaagagtgccaagatgatttcgggattacgccattgttcgtggccgcacagtatggcaagctggagtctctgtcaatcttgattagttcaggcgcaaacgtgaactgtcaggctctggacaaggcaacaccacttttcattgcagcacaggagggtcataccaaatgcgtggagctgttactgtcttctggcgctgaccccgacctgtattgtaatgaagattcttggcaactgccaatccatgccgctgcacagatgggccacactaagatcttggatcttttaattcccctcaccaatagagcgtgcgacactgggttgaataaagttagcccagtgtattctgccgtgtttggaggtcacgaggactgcttggagattctcttaaggaacggatactcacccgatgcccaggcatgcctggtgtttggtttctcttcacctgtgtgcatggcgttccagaaggattgcgaatttttcggaatcgtgaatattcttcttaagtacggtgcccagatcaatgaactacacctggcatactgcttgaagtatgagaagtttagcatcttcaggtattttctacgaaaaggctgcagcctcggtccatggaatcacatctacgaatttgttaaccacgctatcaaggcccaggctaagtacaaagaatggcttccacatctactggtcgctggattcgacccactgatccttttatgtaacagttggatcgacagtgtcagcatcgacactctgatattcaccttagagtttaccaattggaagaccctcgctcccgcagttgagcggatgctgtccgcgagggcatcaaacgcctggattttgcagcagcacattgccactgtgccatcgctcacccatctgtgtcgtctggagatccgcagctcattaaagtcagagaggctccgatctgattcttacatcagccaactcccattaccacgttctttacataactacctcctatacgaagacgttctcagaatgtacgaagtgcctgagcttgccgctatccaggatggctag

SEQ ID NO: 108261 - DNA, 1338 bp, synthetic construct
  misc_feature 1..1338: note = Description of Artificial Sequence: Synthetic coding sequence
  source 1..1338: mol_type = other DNA
atgaagacatttgagggcttttgcgccctgcatcttgccgcctcccaagggcactggaagatcgtacaaatattgctggaggccggagccgatcctaatgctaccacgctggaggaaactacaccgctgttcttggctgtcgaaaatggacagattgatgttctaagactgctcctccagcatggggccaacgtcaacggctcacacagcatgtgtggttggaatagcctgcatcaagcctcttttcaggagaacgccgagatcatcaagctactgctcagaaagggcgctaataaggagtgccaggacgattttggtattacccctctgttcgtagcagcccagtatgggaagttggaatccctgtctatcctgatatctagtggtgctaacgtgaattgtcaagcgctcgataaggctaccccccttttcatagcagcacaagaaggtcacaccaagtgtgtggagttgctcctttctagtggcgctgacccggatttgtattgtaacgaggacagctggcagttacccatccacgccgcggctcaaatgggacataccaaaattcttgatctactgatcccgttgaccaatagggcatgtgataccggtttaaacaaggtctcaccagtgtactccgcagtgtttggaggacacgaagattgcctcgagattctgctacgcaacggctacagtcctgatgcacaggcttgcttggtatttggcttcagctctcctgtgtgtatggcctttcaaaaggattgcgagttttttggaatcgttaacatcctgcttaagtacggcgcccagataaatgagctgcacttggcatactgcctcaagtacgagaaatttagcatcttccggtactttctgcggaaagggtgcagtctgggcccttggaaccatatctacgaatttgtcaaccatgctattaaagcacaggccaaatataaagagtggttgcctcacctactggtggcgggatttgacccactcatcctgctatgcaattcttggatcgactcagtttcaattgacacactgattttcacgctggaattcacaaactggaaaactctggccccagccgtagagcgaatgcttagtgctagggcatccaacgcatggattctgcaacagcatatagccaccgttcctagtttgacccatctttgtagattggagattcgttcgtctctgaaaagcgaaaggctacgaagcgattcttacatctcgcagttgcctctcccacgtagtctgcacaactatttgctgtacgaggacgtgctccgaatgtacgaggttcctgagctcgcagctatccaggacgggtag

SEQ ID NO: 108262 - DNA, 1314 bp, synthetic construct
  misc_feature 1..1314: note = Description of Artificial Sequence: Synthetic coding sequence
  source 1..1314: mol_type = other DNA
atggatttcaccgaggcctacgctgatacttgctcaacagtggggctcgctgctagggaagggaacgtgaaggtcttgcgaaaactcctcaagaaagggcgctctgtggatgtggctgataatcggggatggatgcccatacatgaggctgcctatcataactcagtggaatgcctacagatgctcatcaatgccgattccagcgaaaattatataaagatgaagacctttgagggattctgcgcactgcacctggccgcaagccagggacattggaagattgtgcaaatattactggaagctggggcagaccctaacgctacaactctggaggagacaactcccctttttcttggcgccaatgttaactgccaggcattagataaggctacccctctctttattgccgcccaggagggtcacacaaaatgtgtcgaattgctactcagcagtggcgctgaccccgacctttattgcaacgaagactcctggcaactgcctatccacgctgcggcacagatgggtcacacaaaaattctggatttgctgatcccactcacaaatcgcgcgtgtgacacaggccttaataaagttagccccgtctattcagcagttttcgggggccatgaggattgtctcgagattcttctcaggaatgggtactccccagatgcacaggcgtgtctggtctttggtttttcttctccagtctgcatggcattccagaaagagtggtcttgcgagtttttcgggatcgtcaacatcctgctaaagtacggtgctcagattaacgaactccacctggcttattgtcttaaatatgagaagttctccatcttccgctactttcttcggaaaggctgctctctcggaccttggaaccacatctacgaattcgtgaaccatgctatcaaggcccaggcaaagtataaagagtggctgccccatctgttagttgcaggttttgatcctctgattctgctgtgtaactcctggattgacagtgtgtccatcgataccctcatctttactctggaatttaccaattggaaaacgctggcccctgcggtggagcgcatgctctctgcgcgagcaagcaatgcctggatcctgcagcagcacattgccacagttccgtctctgacacatctgtgcaggcttgagatccggtcatcgttgaaaagcgaacggctgcgatccgattcttacatctcccagctgcctcttcccagatccttgcacaactacctgctgtatgaggacgtactgagaatgtacgaggtgcctgagctcgcggcaatccaggatgggtag

SEQ ID NO: 108263 - DNA, 1281 bp, synthetic construct
  misc_feature 1..1281: note = Description of Artificial Sequence: Synthetic coding sequence
  source 1..1281: mol_type = other DNA
atggacggtacgaccgcccccgtaactaagtccggcgccgccaagctggtgaagaggaacttcttggaggccttgaaatctaacgactttggaaaattgaaagctattctgattcagagacagatcgacgtggataccgtctttgaggttgaggatgagaacatggtcctggcctcgtacaagcagggttattggctcccctcctataaactgaagtcaagctgggcaactgggttacatctgagcgtgctattcggccatgttgagtgcctgttagtattgctggaccataacgccacaattaattgccgacctaacggaaagaccccactgcatgtggcctgcgaaatggctaacgttgattgcgtgaagatcctgtgtgatcgaggcgcaaagctgaactgctattctttaagcggccacaccgctctccacttttgcacgactccgtcaagtatcctttgcgccaaacaattagtgtggcgtggggccaacgttaatatgaagacaaataaccaggacgaagagacccccctccatactgctgcgcactttgggctgagtgagctcgtagcgttttacgtcgagcatggggcaatcgtcgacagtgtgaacgcccacatggagactcccctggcaattgcagcctactgggccctgagattcaaggagcaggaatacagtacagagcaccatttggtctgccggatgctactggactataaagccgaagtaaatgccagagacgatgacttcaaatcccccttgcacaaagcggcctggaactgcgaccacgtccttatgcatatgatgctggaagccggagctgaagctaatcttatggacattaatggatgtgccgctatccaatacgtgctcaaggtgacaagtgtccgccccgctgcccagccagaaatttgctatcagctgttgctgaatcacggggccgcccggatttaccctcctcagtttcataaggtgatacaggcatgtcactcctgtccaaaggccatcgaggtcgtggtcaacgcctacgaacacatcagatggaataccaagtggcggcgtgctattcccgacgatgacttggagaagtactgggacttctatcatagtttgttcaccgtctgttgtaacagcccccgtactctcatgcatctgtctaggtgcgcgataagacgcaccctgcataatcggtgccatagagccatccctcttctgagtctgcctctatctttgaagaagtacctactactcgaaccagaaggaatcatttattag

SEQ ID NO: 108264 - DNA, 1050 bp, synthetic construct
  misc_feature 1..1050: note = Description of Artificial Sequence: Synthetic coding sequence
  source 1..1050: mol_type = other DNA
atggatgggactaccgcccccgtgaccaagagtggagctgccaaactggtgaagcggaatttcctggaggcactgaaatccaacgacttcggcaagctgaaggcaatcctgatccaacggcagatcgatgttgataccgtgtttgaggttgaagatgagaatatggttctggccagctataaacaggggtactggctgccctcatacaagctaaagagctcatgggctaccgggcttcacctgtcggtgctcttcgggcacgtggagtgtctgttggtgcttttggatcacaatgccaccattaactgtcgacctaacggaaagacccccctgcatgtggcatgcgagatggccaacgtcgattgcgtgaaaattctgtgcgacaggggagctaagttgaattgctactccttgtcaggccacactgctttgcacttctgtaccactccaagcagcattttatgtgctaaacaactggtgtggaggggggcaaacgttaatatgaagaccaacaaccaggatgaagaaaccccacttcacacagctgctcacttcggtttgtctgagttagtggccttctatgtcgagcacggagccatcgtagattcagtgaacgcccatatggagacaccactggcaatagccgcttactgggcgcttcggtttaaggagcaagagtacagtaccgagcaccacctagtgtgccggatgctgctggactacaaggccgaagtgaacgccagggatgatgactttaagtctccgctgcataaagccgcctggaactgcgaccatgttctgatgcatatgatgctggaggccggcgccgaggcaaatctcatggacatcaacgggtgtgctgccatccagtacgttctgaaagtgacctctgtaaggcccgctgcacaacccgagatttgttaccagctgctgctcaaccacggtgccgccagaatctaccctcctcagttccacaaggtaagactgtgtccagtggtcagccgactgagaaagatccagatggccgctctgtccgagatcagtaaatag

SEQ ID NO: 108265 - DNA, 3747 bp, synthetic construct
  misc_feature 1..3747: note = Description of Artificial Sequence: Synthetic coding sequence
  source 1..3747: mol_type = other DNA
atgggtaaagaccaggaactgctggaagccgctcgaacagggaacgtggctctggtggagaagctgctgagtggccggaagggggggattcttggtggtggcagcgggcctttgccgttgagcaacctgctctcaatctggagagggcccaatgtcaattgcaccgacagcagtggttataccgcacttcatcatgccgcactcaacgggcacaaggacatcgtgctcaagctgctacagtatgaagcctctaccaatgtggctgacaacaagggttacttcccaattcatcttgccgcttggaagggcgacgtggaaatcgtgaaaatcctcatccaccatgggccgagccactcaagagtgaacgagcagaacaatgaaaatgaaactgcgttgcactgcgctgcacagtacggccacagcgaagtcgtcgcggtgttgctggaagagctgacggacccaaccatccgtaactctaaattggaaactccgcttgatctggccgccctgtacggccggcttcgtgtcgtgaaaatgataatatctgcccaccccaatctcatgtcttgtaatacacgcaaacatacacctttgcacctggcagccagaaatgggcataaagccgtggtgcaggtgctcctggaggccggcatggacgtatcctgtcagaccgaaaagggctcagcactgcacgaagctgctttattcggcaaagtcgacgtggtcagggtcctgttggagacaggtattgatgccaacatcaaggactcgctgggtagaactgttcttgatatcctgaaagaacatccatctcaaaagtcgctgcagatcgctacactgctgcaggaatacctggaaggagtggggcggtccacagtgttggaggagccagtgcaagaggatgccactcaggagacacatatatcaagccctgtcgagtctccttcccagaagacgaaatctgagacagtgacgggggaattgagtaagctcctggacgagataaagctatgccaagaaaaggactatagttttgaggacctatgtcacactatcagtgaccactacctagacaacttgagcaagatttctgaagaagaactggggaagaatggtagccagtccgtgagaacaagttcgaccatcaatttgagtcctggcgaggtggaggaagaagatgacgatgaaaatacctgcgggccatcaggtctttgggaagccctgacaccctgcaatggatgccgtaacctgggcttcccaatgctagcacaggagagttatccgaagaagcgcaattataccatggaaatcgtgccgtccgcttccctggataccttcccaagtgaaaatgaaaattttctctgcgaccttatggataccgcagtcaccaagaagccctgtagcctcgagatagcacgtgctcctagcccacgcacagacaacgctagtgaagtggccgtgacaacccccggtacctctaatcaccggaacagtagtaccgggcctactcctgactgttcaccccccagtcccgatacagctctgaagaacatcgtgaaggtgattcgaccccaacctaaacagcggacaagcattgtatctagcttagactttcatcgtatgaaccataatcaagaatactttgagattaacacgtcaaccgggtgcacttccttcacagcttcgccacccgcgagtccacccacctcctcggtgggcaccactgaggttaagaacgaaggcacgaatcataccgacgacctctctcgccaggacgataatgatccgcctaaggagtatgaccctgggcagttcgccggactgcttcacggttcaagccccgcctgcgagagcccagagaaccccttccacttgtacggcaagcgagagcagtgtgaaaaaggacaggacgaggtgtctcttgcgaattctccactcccattcaaacagtcacccatagaaaacaattcggagcccttggtgaagaaaataaaacctaaggttgtgtcacggaccattttccataaaaagagcaatcagctggagaatcacacaattgtcggtacaagatccacacggtccggaagccggaacggagaccagtgggtgatgaatgctggggggtttgtggagcgcgcctgtacgttaggccgcatcaggagcctgcctaaggccctgattgatatgcacctgtccaagtctgtgtccaagagcgatagcgacctgatagcatacccctccaacgaaaaaacgagtcgagttaattggagcgagtctagcacggccgaacactctagtaaaggcaactccgagcgaactccctcatttacgtcagagtgggaagaaattgataagatcatgagtagtatagatgtgggcattaataacgagctgaaagagatgaacggggaaaccactcggcctcgttgccctgtccaaacagtggggcagtggctcgaatctatcggcctgccacagtatgaaaatcacctgatggctaacgggttcgacaacgtacaattcatgggaagcaatgtgatggaagaccaagatctgctcgagattgggatccttaatagcgggcaccgtcagcgtattctccaggccattcaactgttgccaaaaatgcgcccaataggtcatgatggctaccaccccacttctgtggctgagtggctcgactctatcgagttgggcgactatacgaaggcctttcttatcaatggctatacctccatggacctgctcaaaaaaatctgggaagtggagctaataaatgttctgaaaatcaatctcatcgggcaccgaaagcgcattcttgcgtctttaggcgatagactgcatgacgatccaccgcagaaaccccccagatctatcactcttagagagccttcgggtaaccacacgcccccccaacttagcccttccttgagccagtccacatacactactggaggttccttggacgtcccccacattataatgcagggggacgcccggagacgccgcaatgaaaattacttcgacgacattcctcggagtaagctggagcgtcaaatggcgcagactggagattggggcgaaccttcaattacgctcagacctcccaatgaagcaacagctagcacacccgtacagtattggcagcatcaccccgagaagctgatcttccagtcctgcgattacaaagccttctacctgggctctatgttgattaaggagctgagagggaccgaaagcacccaagacgcctgcgccaagatgcgggtgatgtgcgtgaagtccactgaacagatgaagaaggtcccgaccattatactctcggtttcctacaaaggggtcaagttcatagatgcgacaaacaaaaatattattgccgagcatgagattaggaatatttcctgcgccgctcaagatccagaagacttatctaccttcgcctacatcacaaaagacttaaaatcaaaccatcactattgccacgtgtttactgcgttcgatgtaaacctggcctatgaaatcatccttactttgggtcaggcattcgaagtcgcctaccagctggcactccaggctcgtaagggagggcactctagtactttgcccgaaagcttcgaaaacaagccgtcaaaacccataccaaaaccaagggttagtattaggaaatcggtagacctgctgcacgctagccatacagggcaagagccgtcggagaggcatactgaggaggccctgcgtaaattttag

SEQ ID NO: 108266 - DNA, 1353 bp, synthetic construct
  misc_feature 1..1353: note = Description of Artificial Sequence: Synthetic coding sequence
  source 1..1353: mol_type = other DNA
atgatgtggcagtgccatctgtctgcccaggattaccgctattatccggtggacggctactctctgcttaaacgtttccctttacatccactcacgggaccgcgctgccccgtacagacagtgggccagtggctagagtctattggtctccctcaatatgagaaccacctgatggctaatggcttcgataacgtccagtttatgggtagtaatgtgatggaggatcaggatcttctggaaatcgggattctgaactcaggtcataggcagcgaattttacaggccatccagctcctgccaaagatgcgtcccatcggacatgacggttatcatccaacttcagtggctgagtggttggactctattgaactaggcgattatacaaaggccttcctcattaacggttataccagcatggacctgctgaagaaaatctgggaggtcgaacttatcaacgtgctgaaaataaatctgattggccacagaaaaagaatattggcatcattgggagatagactccacgatgacccacctcagaagccccctaggtcaataaccctgcgctcctcagtgtgcgaaatttggaccaaccaaaacgcggggtttccgttctccgcaatccaccaggtgcataacactggcgactggggcgagcctagtataacccttcgacctcccaacgaggcaacagcgtccaccccggtgcagtactggcagcaccatccagagaaattaatttttcaatcctgcgactataaagccttctacctgggatccatgcttattaaagaactgagaggcacagagtcaacacaggatgcctgtgcaaaaatgagggccaacattcaaaaatcaacggagcaaatgaaaaaggtgcctactataatattatccgtgtcatataaaggggttaaatttattgacgcgacaaataagaacattattgcagagcatgaaatacgcaacatcagttgcgctgcccaggaccccgaagacctgagcaccttcgcatatattactaaagatctaaagtcaaaccaccactactgccacgtgtttacagctttcgacgtgaatcttgcatatgagatcattctgacgctggggcaggctttcgaagtcgcataccagctggctctgcaggcccgaaagggaggtcattcatccactctgcctgagagcttcgagaacaagccatcgaagccaattcccaagcctagagtatcaatccgtaaaagcgttcagattgatcctagtgagcagaagaccctcgccaatcttccttggatagtggagccaggacaagaagccaagcgggggatcaataccaaatatgaaacgacgatcttctag

SEQ ID NO: 108267 - DNA, 765 bp, synthetic construct
  misc_feature 1..765: note = Description of Artificial Sequence: Synthetic coding sequence
  source 1..765: mol_type = other DNA
atgcaaggcgatgccagacgcaggaggaacgagaactactttgatgacataccacgctctaagctggagcgacagatggctcagaccggcgattggggagagccgtccatcacccttcgccctcccaacgaggccaccgccagtaccccagtacagtattggcagcatcatccggagaaactgatatttcaatcatgcgattacaaggccttttatctgggcagcatgctgataaaagagctccgagggactgagagcacccaggacgcatgtgcaaagatgcgggcgaattgtcagaagtccaccgagcagatgaagaaagtcccgactatcatcctgtctgtgtcctataagggagttaaattcatagatgccaccaacaaaaatataattgcggagcacgaaatccgaaatatctcctgtgccgcgcaagatcctgaggatctatcgactttcgcttacattactaaagacctgaaatccaatcaccactactgtcacgtgttcacggcttttgacgttaatttggcctacgagatcatactaaccctggggcaggcttttgaggtggcctatcaactggccctccaggcgcgcaagggcggtcattcctcaaccttgcctgagtcttttgaaaataagccctccaagcccatccccaaacctagggtgtccatccgaaaaagtgtggacctgctccatgcctctcatactggccaggagccgtcggagcgccatacagaagaggcactgaggaagttctag

SEQ ID NO: 108268 - DNA, 1053 bp, synthetic construct
  misc_feature 1..1053: note = Description of Artificial Sequence: Synthetic coding sequence
  source 1..1053: mol_type = other DNA
gtcctcttccaggggagcaacgtgatggaagaccaggatcttcttgaaatcggtatcctgaatagcggccaccggcagcggatccttcaagctatacagctgctccccaagatgaggcctattgggcatgacggatatcaccctacttcggtcgccgagtggttggatagcatcgaattaggggactacaccaaggcctttctcattaatggatatacaagcatggaccttctcaagaagatatgggaggtggaactcattaatcagtcatcggtgtgtgaaatctggactaatcagaatgctggattccccttctcagccatccatcaggttcacaacactggggattggggggaaccgagtatcaccttaagaccccccaacgaagctacggcctccaccccagtgcaatactggcaacatcatcctgaaaaacttatctttcagtcgtgtgactataaggccttttacctgggcagcatgttgataaaagagctacgcgggactgagtcaacccaggacgcctgcgccaagatgcgtgccaacatccagaaatccaccgaacagatgaagaaggtgccaacaataatcctcagcgttagttataaaggtgtaaagttcatcgatgcaacgaataagaatatcattgccgagcatgaaatacggaatatctcatgtgccgcacaggatccagaagatctatctaccttcgcatacattaccaaagacttaaaaagtaaccaccactactgccacgtgttcacagcctttgacgtgaacctcgcctatgaaatcatcctgaccctggggcaggcgttcgaggtcgcctatcagctggcactccaggcccgcaagggcggtcacagctccaccctacctgagtccttcgagaacaagccgtcaaaacctattcctaagccaagggtttctatccgcaagagcgtgatagacccatctgagcagaaaacgcttgcaaacctgccctggatagttgaacccggacaagaagctaaacgaggcatcaatacaaagtatgaaactaccattttctag

SEQ ID NO: 108269 - DNA, 2292 bp, synthetic construct
  misc_feature 1..2292: note = Description of Artificial Sequence: Synthetic coding sequence
  source 1..2292: mol_type = other DNA
tcattccaggagtcctacccgaagaagcgtaactataccatggaaatcgtgccttctgcgtccctggatacatttccgtccgagaatgaaaactttctgtgtgatctcatggacaccgctgtcacaaagaaaccatgctccttagaaatcgcgcgggcaccttctcctcgtactgataacgctagtgaggtcgctgttaccactccgggtaccagcaatcacagaaatagctcgactggccctacacctgattgtagccctccatcacccgacacagctctgaaaaacattgtgaaagtcattaggcctcagcctaaacaacgaacgtctatcgtgtcctctttagatttccaccggatgaatcacaaccaggagtacttcgaaattaacactagcactggctgcacatcctttactgcttcgcccccggcttctcctccaacatcaagtgtgggcactaccgaggtcaaaaatgagggtaccaaccacaccgacgacctcagtcggcaggacgacaacgaccccccaaaggaatacgaccctggccagttcgccggtttactgcatggctcaagtcctgcttgcgaatctcccgagaatccctttcacctctatggtaagagagagcagtgcgaaaaaggtcaggacgaggtgtctctggctaacagtccgctcccctttaagcaaagtcctattgagaacaactctgaacctctggtcaaaaagatcaagccaaaagttgtgtcccgaacgatctttcataagaaaagcaatcaactcgagaaccatacaatcgtgggaactcgctcaaccagaagtggttcaagaaatggggatcagtgggtgatgaacgctggaggatttgtcgaacgggcttgcacactgggccgtattcggtctttaccgaaggccctcattgatatgcatctgtccaaatccgtttccaaaagtgactccgatctcatagcctatccctctaacgagaagacatcccgagtcaattggtctgaatcttccacggcagagcacagctcaaagggcaactcagagaggaccccatccttcacctccgagtgggaggaaatcgataaaattatgtcatcaatcgacgtcggcattaacaacgagctgaaggagatgaatgggccccggtgtcccgtgcagacagtgggccagtggctggagtctatcggattgcctcagtacgaaaatcatctgatggccaacgggttcgataacgtacaatttatggggtcaaatgtgatggaagatcaggacctgctggagatcgggatcctgaacagcggacaccgccagagaatcttgcaggcaatccagctccttccaaaaatgaggccaataggacacgacgggtaccacccaacgtccgttgcagagtggctagacagtattgagctcggagattataccaaggcctttttgatcaacggctacactagcatggacctcttaaagaaaatctgggaggttgaattgataaatgtactaaagatcaatctcattggacatcggaagagaattttagcttccttaggggatagattgcacgacgaccccccacagaaaccccccaggagcatcaccctccgcacgggggattggggggagccatccataacactccgaccccctaatgaagcaacagccagcaccccagtccaatattggcagcaccacccggagaagcttatctttcaaagctgtgactataaggccttctatctggggagcatgctcattaaagagctacgcgggaccgagtcaactcaggatgcttgcgcaaagatgagagtcatgtgcgtgaagagtacggagcagatgaagaaggtccccaccataattttatccgtcagctataaaggtgtgaaatttatagacgccacaaataagaacattatcgctgaacacgagattagaaacatctcatgcgctgctcaggatccagaggatcttagcacattcgcgtatataactaaagacctcaagagtaatcatcattattgccatgtgtttaccgcgttcgatgtgaatctggcctacgagatcattctgaccctggggcaagcattcgaggtcgcttatcaactagcactccaggctcgcaaagggggccattcaagtactttgcctgagagctttgaaaataagccatctaagcctatccctaagcctcgggtttctattcgtaagtccgttgatttgctgcatgcgtcacacaccggccaggagcctagtgaaaggcatactgaggaagctcttaggaagttttag

SEQ ID NO: 108270 - DNA, 1281 bp, synthetic construct
  misc_feature 1..1281: note = Description of Artificial Sequence: Synthetic coding sequence
  source 1..1281: mol_type = other DNA
atgatgtggcagtgtcacttgtcggcccaagactatagatattacccagttgacggatatagcctgttgaaaagatttccgctccaccctcttacaggccctaggtgcccggtgcagaccgtcggtcagtggctagagagcattggactgcctcaatacgaaaaccatctgatggccaatggtttcgacaatgtccagtttatgggctccaatgtgatggaagaccaggatttactggaaataggaatcctcaactccggacatcgtcaacgtatactacaagcaatacagctcctgccaaagatgcggcctataggtcacgatgggtatcatccgacatccgtggctgaatggctagactcaatagagctcggcgattatacgaaggcctttctgatcaatggctacaccagcatggatctgttaaaaaaaatatgggaagtcgagttgattaatgtgctcaagattaatctaatcggtcaccggaaaaggatactggcaagtttgggggataggttacatgacgacccaccacagaagcctccccggtccattacactacgtacaggagactggggcgagccatccatcacactcagaccccccaatgaagcaaccgcaagcacgcccgtgcagtactggcaacatcatcctgagaaactcatattccagagctgtgactacaaagcattctaccttgggagcatgctgatcaaagaactccggggcaccgagtctacccaagatgcatgcgcaaaaatgcgggccaactgtcaaaaaagtaccgaacagatgaaaaaggtgccaactattatcctgtctgtcagctacaagggggtcaagttcatagacgctacaaacaagaacatcatcgcagaacatgaaatccgcaatatctcgtgcgctgcgcaagaccccgaagatctgtctacgttcgcatacataacaaaggatctcaaatctaatcaccactattgccatgtctttaccgccttcgatgtgaatctcgcatacgagatcattctgacccttggacaagcctttgaggtagcttaccaactggccctccaggcccggaagggagggcattccagcacactcccagaatcttttgaaaacaagccgagtaaacccattcctaagcctcgtgtttctatacgcaagagcgtccaaattgacccctctgaacagaagacacttgctaacctgccgtggatcgtagagccagggcaagaagccaagagggggatcaataccaagtatgagactaccattttttag

SEQ ID NO: 108271 - DNA, 1383 bp, synthetic construct
  misc_feature 1..1383: note = Description of Artificial Sequence: Synthetic coding sequence
  source 1..1383: mol_type = other DNA
atgatgtggcagtgccacctttctgcccaggattatcgttactatccagtggatggctattcgctgctgaagagattcccactccatcccctgactggacctaggtgccccgttcagacagtaggacagtggttggaatccattgggctgccacagtatgaaaaccatctgatggccaatgggttcgacaacgttcaattcatggggagcaatgttatggaggaccaagacctccttgagattggcatccttaactccggacatcggcaacgcatccttcaggccattcagcttctacctaagatgcgtcctatagggcatgatgggtaccatccaacctcggtggcagaatggctcgacagtatcgaactgggggattacacaaaggccttccttattaatggctacacatcaatggacctgctgaaaaagatctgggaagtggagttgattaatgtccttaaaatcaaccttatcggacaccgtaagcggattcttgcatctcttggcgacaggttgcacgatgacccgcctcaaaaaccacctaggtccataaccctgcgcgagccttcaggaaatcacaccccaccacagttaagtccgtctttgtcgcagagtacctacaccacaggaggcagccttgacgtgcctcatattattatgcaaggcgatgcaaggagacggagaaatgaaaactactttgatgacatcccaaggagtaaattagagcggcagatggcgcagacaggcgattggggcgagccctcaatcacactgcggccaccaaatgaggcaacggcttcaacaccagtgcagtattggcaacaccacccggaaaaactcatctttcagtcctgcgactataaagccttttatctaggaagtatgttgatcaaagaactgagagggactgagtcgactcaagacgcctgcgccaagatgagggcaaactgtcaaaaaagcaccgagcaaatgaagaaagtccccacgatcatactaagcgtaagttataaaggggtgaaatttattgacgccacaaataaaaacattatcgcagaacacgaaataaggaacattagctgcgcagcgcaggatcctgaggatctatcgacattcgcctacatcactaaggatcttaagtcaaaccatcattattgccacgtatttaccgcctttgacgtcaacctcgcgtatgagatcattctcacgctgggtcaggccttcgaagtcgcctatcaactggcactacaggctcggaagggcggtcatagcagcaccctcccagaatccttcgagaacaagccctccaaaccgatacctaagccccgtgtatcaattaggaagagcgtgccattctgctttaaagcagatcgccctatctag

SEQ ID NO: 108272 - DNA, 2295 bp, synthetic construct
  misc_feature 1..2295: note = Description of Artificial Sequence: Synthetic coding sequence
  source 1..2295: mol_type = other DNA
atgctcgcccaagaatcttatcccaaaaagagaaactacactatggagatcgtgccctccgcatccctggatacatttccttcagagaacgaaaactttctttgcgatttgatggacaccgctgtaaccaagaagccctgcagtctcgagatcgcccgcgctccatccccacgcactgacaatgcctcagaggttgcggtgaccacgcccggaaccagcaatcaccgcaactcctctacaggtcccacacccgattgttcccccccaagtcccgacacagctttgaaaaacatcgtcaaggtaatcaggcctcaaccaaaacaaaggacgtctattgtgtcttctttggattttcataggatgaaccacaatcaggagtatttcgaaataaacacttccactggctgtacttcgtttactgcatccccgcccgcctctccccccaccagctcagtaggtacaactgaggtcaaaaacgagggcacaaaccacacagacgatctcagtaggcaggatgataacgaccctccaaaggaatacgaccccgggcagttcgccggactgctgcatggatcttcccctgcatgcgagagtccagaaaatccatttcatctatatggcaaacgggagcagtgcgagaaaggtcaagatgaggtttcactggccaatagcccgttacccttcaaacagtctcccatcgagaacaattctgaacctttagttaaaaagataaagcccaaagtagtgtcacggaccatcttccacaaaaagagcaatcagcttgaaaaccataccatcgtgggtacacggtcaaccaggtccggatcaaggaacggcgatcagtgggtcatgaacgccggaggcttcgttgaaagggcatgcacattggggaggatccgttctttgcctaaggcccttattgacatgcatctttctaagtctgtcagtaagtctgacagcgacttgattgcctatccatccaatgaaaaaacaagcagggttaactggtccgaatcttcgactgccgaacacagcagtaaaggcaattctgagcggacaccttcgttcacctctgaatgggaggagattgacaaaataatgagctccattgacgtgggaattaacaacgagttgaaggagatgaacggtccacggtgccccgttcagacagtaggacaatggctggagagtattgggctgccccaatacgaaaatcatttaatggctaacggattcgataacgtgcagttcatggggagtaatgtcatggaagaccaggacctgctggagatagggattttgaatagtggccacaggcagcgcatactccaggccatacaactgttgcctaagatgcgtcctattggacacgatggctatcaccccacttcagttgcggaatggctggattcgattgaattgggtgactacaccaaggcattcctgattaatggctatacgagcatggacttgcttaagaaaatttgggaggtggaactcattaatgtactaaaaattaacctgataggccatagaaaacgaatcttggcctctcttggagacagacttcatgatgacccacctcagaaacccccgaggtcaataactctgagaacaggagactggggtgagccctcaattacattgcgtcctccaaacgaagccacagcttcaactcctgttcagtactggcagcatcacccggaaaagcttattttccaatcatgcgactacaaggctttctacctgggaagtatgctgataaaagagctgcgaggaacggagagtactcaggacgcctgcgccaaaatgagagccaactgccagaagtccacagagcagatgaaaaaagtgcccaccatcatcctgtcggtgtcgtataagggagtcaaattcatcgatgccaccaataaaaatattatagccgaacacgagatacggaatatttcttgcgccgcccaggacccggaagacctatctactttcgcttacattaccaaggatctcaaatcgaaccaccattattgccatgtgttcacagcattcgacgtgaatctcgcttacgagataatcttaacactaggtcaggcgttcgaggtggcttatcagcttgccctccaggcgcggaagggtggccattcttcaaccctgcccgaaagcttcgagaataaaccgtctaaacccatccctaagccccgagtgtctatcagaaagagcgtggaccttctacacgcatcccacacgggccaggaacctagtgagcgccacaccgaggaggctctccggaaattttag

SEQ ID NO: 108273 - DNA, 3747 bp, synthetic construct
  misc_feature 1..3747: note = Description of Artificial Sequence: Synthetic coding sequence
  source 1..3747: mol_type = other DNA
atgggcaaggaccaagagctgctcgaagctgcgagaaccggtaacgtggctctagtggaaaaactcctgagcggtagaaaaggggggattcttgggggtggttcgggcccactgccactgagcaacctgctctcaatttggaggggcccaaatgtgaactgcacagactcctccggctacaccgctttacaccatgccgcccttaacggccataaagatatcgtactcaaactattacagtacgaggccagtaccaatgtggccgataacaagggttacttccctattcacctcgccgcctggaagggagatgtggagattgtcaagatcctaatccatcacgggccatcccacagcagggtgaatgagcagaataacgagaatgaaaccgccctacattgtgcggcacagtacggacactccgaggttgtggcggtccttcttgaggagctgacagatcccaccatcaggaacagcaagctggagactcccctggacctggctgcgctgtatggacgactgcgcgtggttaaaatgataatttcagcccacccgaacctgatgtcttgtaatacccgcaagcacacaccactgcacttggccgccagaaacggtcataaagccgtggttcaggtgttactggaggccggcatggatgtgagctgtcagaccgagaagggttcggccctccatgaggccgctttgttcggcaaggtggacgtagtccgggtacttctcgagacagggatagacgctaatataaaggattctctcgggagaacagttctggacatactcaaagagcatccttcccagaagagcttgcaaatagcaacattgctgcaggagtatcttgagggagtggggcgcagtaccgtactggaggaaccagtgcaggaagacgcaacccaagaaactcacatctcctcacctgtggagtctccttctcagaaaacgaaaagcgaaaccgttaccggcgagctgtcaaagctgctggatgaaattaagctatgccaagaaaaggattatagttttgaggatctatgtcacacaattagcgaccattacctagataatctttccaaaatttcggaggaggagctcggaaagaacgggtctcagagcgtgcgaacgagttcgacgatcaacctctctcccggcgaggtcgaggaagaggatgacgatgagaatacttgtggcccaagtggcctgtgggaggccttgacaccctgcaacggatgccgaaatctcggatttcccatgttagcacaggaatcatatcccaagaagcggaattacactatggagatcgtgccttctgctagtctcgacacttttcccagcgagaacgaaaatttcctttgtgacctgatggacacagctgtcacaaagaagccatgcagcctggagattgccagggctcctagccctcgaacggacaacgcaagtgaagtagccgtgacgacaccagggactagtaaccacaggaacagcagcactgggccaacccccgattgcagcccacccagtcctgataccgctctaaaaaacatcgttaaggttattagaccgcagcccaaacagcggacctccatagtgtccagcctggacttccatcggatgaatcataatcaggaatattttgagattaacacatcaacaggttgtaccagtttcactgcatccccccccgctagcccgccaacttctagcgtgggaactactgaggtaaagaatgaaggtaccaatcacacagatgatctaagcaggcaggacgacaacgacccaccaaaagaatacgatcctggccagttcgccgggttacttcatggctcttcccctgcatgtgaaagtcctgagaaccccttccacttgtatggaaagcgggaacaatgcgagaaaggacaggacgaggtgagtctcgcaaattctccgctgccattcaaacagtcacccatagagaataactcggagcccttggtgaaaaaaatcaagccgaaggtagtgtctcgtacgatcttccacaaaaagagtaaccagctggaaaaccacaccattgttggcacacggtcaactaggtcaggtagccgaaacggggatcaatgggtgatgaacgcaggaggcttcgtcgaaagagcatgcactctgggaagaatcaggtcactacctaaagctttgattgatatgcaccttagtaaatctgtctctaaatccgacagcgatcttatcgcatacccaagcaatgaaaagacatcccgcgtaaattggagtgaatctagcacggccgaacactcaagcaagggcaacagcgagcggacacccagcttcactagtgagtgggaagaaattgacaagattatgtcttccatcgacgtaggtatcaataacgagcttaaggagatgaatggtgagactacaagaccgagatgtcccgtacagacggtgggacaatggttagagtctatcgggttgccacaatacgaaaaccacctcatggctaacggattcgataacgtgcagttcatggggtctaacgtcatggaggaccaagatttgctcgagataggaattcttaattccggtcatagacagcgcatccttcaggctattcagttgctgcccaaaatgaggcctatcgggcacgacggctaccaccccaccagtgtggcagaatggcttgacagcatcgaactcggagattacacgaaggcttttcttatcaatggttacactagcatggatctgctcaagaaaatttgggaagtggaattaatcaatgttttaaaaatcaatttgatcggtcatcggaagagaatcctcgcaagtctcggcgacaggctacatgacgatccacctcagaaacctcctagatctataaccttgagagagccaagtgggaaccatactccaccccagctgtccccctctctcagccagagcacgtataccacaggggggtctttggacgtgccgcatatcatcatgcagggggacgcaaggagaaggcgcaatgaaaattacttcgacgacatcccacggtctaagttagaaaggcagatggctcagacaggcgactggggcgagccttctataaccctacgcccgcccaacgaagcaaccgcttccactcccgtccagtactggcaacaccaccctgagaagctcatcttccagtcttgtgattacaaggctttttatctcgggagcatgttgattaaggagctgcgcggcacggaaagcactcaggacgcatgtgctaagatgagagctaactgtcagaaaagtactgagcagatgaagaaggttccaactattatcctctcggtgtcatataagggcgtaaagtttattgacgcaaccaacaaaaacataattgcagagcacgagattcgtaatatcagctgcgccgcccaggatcctgaggacctgtctacctttgcgtacatcaccaaagatctgaagtccaatcaccactattgtcatgtctttacggcctttgatgtgaatctcgcttacgagattatcttaacgctgggacaagcttttgaggtcgcctaccagctcgctctgcaggcaaggaaggggggccactcctccactctgcccgaatccttcgagaataaaccgtccaaacctattcctaagcctcgcgtgagtatcagaaaatccgttgacctgctccatgcaagccacacaggacaggagccttccgagaggcacactgaagaagcacttaggaagttctag

SEQ ID NO: 108274 - DNA, 1074 bp, synthetic construct
  misc_feature 1..1074: note = Description of Artificial Sequence: Synthetic coding sequence
  source 1..1074: mol_type = other DNA
atggccaatggtttcgataacgtccagttcatgggcagtaatgtaatggaggaccaggacctgctcgagattggcatactgaactccggacatcggcagcggatcctgcaagctatccagctgctgcctaaaatgagacctattggtcatgatggctatcaccctacctcagtggcagaatggctggactcaatcgagttgggggattacaccaaagcttttctgatcaatggttacacctcaatggatttgctcaaaaagatctgggaagtggagttgatcaatcagtcttcagtttgtgagatctggactaaccagaatgctgggttcccgttctccgccattcaccaggtgcataataccggcgactggggcgaaccttccatcaccctacgcccaccgaatgaagccactgcaagcacccctgtgcagtactggcagcaccacccagagaagctgatctttcagtcttgcgactacaaagcgttttatctaggctccatgctgatcaaagaattgcggggcacggaaagcacacaggacgcctgtgccaaaatgagagccaattgccagaaaagtacagaacagatgaagaaggtgccaactatcatattatcagtgtcatacaagggcgttaagtttatcgacgcaactaacaaaaatattatcgccgagcacgagattaggaacatatcatgtgctgctcaggacccagaggacctttcaaccttcgcttacataacaaaggatttaaaatcaaaccatcattactgccacgttttcaccgcattcgacgtgaacctggcatatgaaatcatcctgacattaggccaagcctttgaggtggcgtaccagctggcccttcaggcccgtaaaggaggtcattctagcaccctccccgaaagcttcgagaacaaaccttctaagccaatccccaaacctagggtcagcatccgcaaaagcgtgatcgacccttctgagcagaagacattagccaacctcccttggattgtggagcccggacaggaagctaaacgtggtatcaataccaagtacgagacgaccatcttctag

SEQ ID NO: 108275 - DNA, 1533 bp, synthetic construct
  misc_feature 1..1533: note = Description of Artificial Sequence: Synthetic coding sequence
  source 1..1533: mol_type = other DNA
atgatgtggcaatgccatttatccgctcaggactaccgttattatcctgtggatggctatagcctgctgaaaagatttcccctgcacccgctcactggaccacggtgtcccgtccagaccgtgggccagtggctcgaatccattggcctgcctcaatacgaaaaccatctgatggccaatggttttgacaacgtacagtttatggggtctaacgtaatggaagaccaggatcttctcgagatcggtattctcaattccggacataggcagcggattttacaggcaatccagctcctgcctaaaatgcgcccaattgggcacgatggctaccatcctacctctgtggctgagtggctcgacagtatagaactcggagattacacaaaagccttcctgatcaatggatacacctccatggacctactcaaaaagatttgggaggtggaacttataaacgttctgaagattaatctcattggtcaccgaaaacgaattttggcttctctcggggaccgactccacgatgaccctccccagaaacctccccggagcatcacactgcgtgagccgagtggaaaccatacccccccccagcttagcccgagtctatcacagagcacttataccactgggggctccctggacgtgccccatattattatgcagggcgacgccaggagacgcagaaacgaaaactacttcgacgatattccacgctcaaagctggaacgacagatggcacagtcctccgtgtgtgagatttggactaaccagaatgctgggttcccgttctccgcaatccaccaggtgcacaatacaggcgactggggggagccttcgataactttgcgtcctcctaacgaggcgactgcctctacgcctgtgcagtattggcagcatcaccccgagaaattgatctttcagagttgcgactacaaggcattttatctcggaagcatgctcattaaggagctgaggggaactgagagcactcaggacgcctgcgctaaaatgcgcgccaactgtcaaaagagcaccgagcagatgaaaaaggtgccaacaataattctttctgtgagctataagggagtcaagtttatagacgctacaaataagaacatcatcgccgagcatgaaatcaggaacatctcttgcgctgcacaggacccagaagatctatccacattcgcgtatatcactaaagatcttaagtcgaatcaccattactgccacgttttcactgcattcgacgtgaatctggcctatgagattatcctcaccctcggccaggctttcgaagtcgcctaccagcttgcactgcaggctcgaaaaggaggccactcctccaccctgccagaatctttcgagaacaagccaagtaagccaattccgaagcctcgcgtgagcattcggaagagtgttcagattgacccaagcgagcagaagactctggcaaaccttccgtggatcgtagagcccggccaggaggcgaagcgcggtatcaacacaaaatatgagacgaccattttctag

SEQ ID NO: 108276 - DNA, 1245 bp, synthetic construct
  misc_feature 1..1245: note = Description of Artificial Sequence: Synthetic coding sequence
  source 1..1245: mol_type = other DNA
atgatgtggcagtgtcaccttagcgcccaggactatcgatattacccagttgatgggtatagcttgttgaaacggttccctctccaccccctgacgggcccccggtgtccagttcaaacggtgggtcagtggctggagtctattggcctgcctcaatacgagaatcacctgatggcaaatggcttcgacaacgtccagttcatgggatcaaacgttatggaagaccaggacctcctagaaataggtatcctgaactccggccataggcagcggatcttacaagccattcagctgcttcccaagatgcgcccgataggacacgacggttaccaccccacttctgttgcggaatggcttgactctattgagctcggagactacacaaaagcatttctcataaacggctatacctccatggatttgttaaaaaagatctgggaggtggagcttatcaacgtcttaaagataaatttaattgggcatcggaagcggatcctcgctagtctgggggataggcttcacgacgaccctcctcaaaagcctccacggagcattacactgagaacaggagactggggagagccctctatcaccttaagacctcccaatgaggcgacagcttccactccggtacagtactggcaacaccacccagaaaagctcatcttccagtcatgcgattataaggcattttatctgggatcaatgctaattaaagagctccggggaactgagtccactcaggatgcctgcgccaaaatgcgggctaattgccaaaagtccactgagcagatgaagaaggtgccaaccattatccttagcgtgtcgtataaaggggtgaaatttatcgatgcaaccaataagaatatcatcgccgagcacgaaatccgcaatatttcctgcgcagcccaagacccagaggatctcagcacctttgcctatattacgaaggatttgaaatctaaccatcactattgtcatgtgtttaccgcttttgacgtcaacctggcttacgaaattattctcactctggggcaagcattcgaagttgcataccagcttgctctgcaggctcggaagggaggccattcctcaacgctgcctgaatcttttgagaataaaccctctaagcctataccaaaaccgcgagtgtctattcgaaagtccgtggatctgttgcacgcaagccatacaggccaggagccaagcgagaggcacactgaggaagcgcttagaaagttttag

SEQ ID NO: 108277 - DNA, 1353 bp, synthetic construct
  misc_feature 1..1353: note = Description of Artificial Sequence: Synthetic coding sequence
  source 1..1353: mol_type = other DNA
atgatgtggcagtgccacctgtctgcacaagattaccgctactatcctgtagacggttactctctcctgaagcgattccccctgcatccattgacaggacccagatgcccagttcagactgtgggccagtggctggagagcatcggcttgccccagtacgaaaatcatctcatggctaatggcttcgataacgtgcagttcatggggagcaacgtgatggaagatcaagacctgctggagattgggattcttaactccggacaccgtcagcgcatcttgcaggccatacaactactgcctaagatgagacccatcggccacgatgggtaccaccccaccagtgtcgcagaatggctcgatagtatcgagctgggagactacacaaaggcgtttttgatcaacggctacacgtcgatggaccttcttaagaagatatgggaggttgaacttatcaatgttctgaagatcaatctcatcgggcatcggaaaaggatcctggcatccctgggtgaccgcctgcacgacgaccctccacagaaacctcctcggtcaatcacgctgcgctcatctgtgtgtgagatttggaccaaccaaaatgccgggtttccgttcagtgcaattcaccaggtgcataacaccggcgattggggagagccaagtatcaccctccgccctccaaacgaggccaccgcttctacaccggtgcaatattggcaacaccacccggagaaactcatatttcaatcctgcgattacaaggccttctatctaggttccatgttgataaaggaacttcgagggactgagtctacccaggacgcttgcgctaaaatgcgggccaactgccagaaaagcacagaacagatgaaaaaggtgcccaccatcatcctgtctgtgtcatacaaaggggtcaagtttatagatgccaccaataagaacattatcgcagagcacgaaatccgcaacataagctgcgcagcacaggatccagaggacttgtcaactttcgcctacatcacaaaggacctgaaaagtaaccatcactattgccatgtgtttaccgcattcgacgtgaatctcgcatatgaaataatcctcactctgggccaggcgttcgaggttgcttaccagctggcattgcaggccaggaagggtggccattccagcaccctgccagagtcttttgagaataaaccaagcaaacccataccaaagccaagggtgtccatacgcaaaagtgtgcaaattgacccatcagagcagaagactctcgcgaatcttccctggatcgtagagcccgggcaagaggccaagcgcgggattaacaccaagtacgagaccaccattttttag

SEQ ID NO: 108278 - DNA, 1185 bp, synthetic construct
  misc_feature 1..1185: note = Description of Artificial Sequence: Synthetic coding sequence
  source 1..1185: mol_type = other DNA
atgggacctcgttgccccgtgcagaccgtggggcaatggctggaaagtatcgggctgccccagtacgagaatcacctgatggccaatggatttgataacgtgcagttcatgggcagtaacgtcatggaggatcaggacctgctcgaaatcggtattctaaactctggccaccggcagcgaatactgcaagccatccagctgctccccaaaatgaggcctattgggcatgatggctatcacccaacgtctgtcgctgagtggttagacagcatcgaactaggggactatacaaaagcttttctcattaatggctacacatccatggatctgctgaagaagatttgggaggtagaactgatcaacgttctcaagattaatcttattggacatagaaagaggattctagctagcctgggagatagactgcacgatgatccaccccagaagccaccccgttccattactctgcgtactggcgactggggcgagccgtcgattacccttagaccacccaacgaggccacggcatcaacgccagtccagtactggcaacatcatccagagaagctcattttccagtcgtgtgactataaagccttctatctggggagtatgctcattaaggaactgagagggaccgagtcaactcaggacgcctgtgctaaaatgcgagccaactgccagaagtctactgaacagatgaagaaagtgccgacgattattctcagcgtgtcctataaaggagtgaagttcattgatgctactaacaagaatatcatcgccgaacatgagatccgtaatatatcctgcgcggctcaggatccagaagaccttagcaccttcgcatacatcactaaggacctgaaatctaaccatcattattgccatgtcttcaccgcctttgacgttaacctggcctatgaaattattctgactttagggcaagcattcgaagtggcatatcagctggcactgcaagcccggaagggtggccactctagcacccttcccgaatcttttgaaaacaaaccgtctaagcccattcccaagcctagggtctccatccgtaaaagcgttatcgacccaagtgaacagaaaacgttggccaacctgccgtggatcgtggagcccggacaggaggcaaagcgaggcatcaacacaaagtacgagaccactattttctag

SEQ ID NO: 108279 - DNA, 1254 bp, synthetic construct
  misc_feature 1..1254: note = Description of Artificial Sequence: Synthetic coding sequence
  source 1..1254: mol_type = other DNA
atgtctactcgctaccatcaagctgcttcagactcctacctggagttgctgaaggaagctactaagagggatctgaacttgagcgacgaagatggcatgacacctaccctgttggctgcctaccatgggaatctggaggcgctggaaattatttgcagtcgtggaggcgatcccgatcgatgtgatatttggggcaacactccgttacattttgcagcttctaacggtcacgcacattgtgtctctttcctcgtcaacttcggggccaacatctttgcattggataacgatctgcaaactcccttagacgccgctgcaagtcgtgagcagaatgagtgcgtagctctccttgacaaggcagccaccgcccagaatattatgaacccaaaaaaggtgacacgactgaaggagcaggctcagaaaaacgctagaagacagataaaagaatgcgagagactgcaggagaagcaccagaataagatggcacacacatactctaaggaagaaagtggtactctcagtagtagtaaaggtactttctcacgctcaagtccatcgaatgcgagcgctcccgggaccttcggatcattgagcaagggcattaaggacacatttaaaattaaatttaagaagaacaaagacacagccgaacaggttggtaaagaaggacgctccggccagcggaacgtgatggaagtatttcgtgaggaagaggaggactcattttccggcgactttaaggagaagctgcagttgagcgctgaggaagatgggtcagtccaccatgagagcatcctgaacagaccagggctgggctctattgtgttccggagaaacaggatttcctctcctgaagacatttccgacagcaaaagggagtttggattcaagttgccttccgagttgctgcagagacagggggctagtgaggccgatgaaggcgctgctgatgaagagggagaggagaatggccttaaagatgatttgccatgggacgatgacgaggtagaatgggaagaagatgtggtcgacgcaacaccactagaagtctttttgctctcacagcacctggaagagttcctgcctatcttcaaaagagaacagattgatttggaagcactcctgctctgctctgacgaagacctacagagtatccagatgcaactcggccctaggaagaaagtgctcaacgctatcaatagacgaaagcaagtgctccaacagccagggcagctggtggatacatcattatag

SEQ ID NO: 108280 - DNA, 7992 bp, synthetic construct
  misc_feature 1..7992: note = Description of Artificial Sequence: Synthetic coding sequence
  source 1..7992: mol_type = other DNA
atgcccaagggcgggtgccctaaagccccacagcaggaggaattgcctctctcctctgacatggttgagaaacaaacaggaaagaaggataaggacaaagtttccctgactaagacccctaaattggagcggggcgatggcggcaaggaggttcgagagagggcctccaagcgcaagttgcccttcacagccggagcaaacggggaacaaaaggattccgatactgaaaaacagggcccggaaagaaaaagaatcaaaaaggagcccgtgacaagaaaagcaggactgctctttgggatgggtctgagtggtatcagggccggataccctctgtccgagcgccagcaagtggctttgctcatgcagatgacagccgaagagtcggctaactccccagtggatactactcctaagcacccgtctcagtcgaccgtttgtcaaaaaggaacccccaattcagcaagcaaaacaaaagacaaggtcaataagaggaacgaaagaggggagactcgccttcatcgtgcagctatcaggggtgatgcgaggcggataaaagagctgatttctgaaggagctgatgtgaatgtaaaggacttcgccggttggactgcactgcatgaagcatgtaatagagggtattatgacgtcgccaaacagctgctggctgctggagccgaagtgaatacgaagggacttgacgacgatacccctttacacgacgctgccaacaatggccactataaagtagtaaaactgctcctccggtatggagggaatccacagcagtcaaatagaaagggcgaaacccctctgaaggtcgctaatagtcctactatggtgaacttgctcttgggcaaagggacatacacctcgagcgaagagtccagcaccgagtcatctgaggaggaggacgcaccttcgttcgctccctcaagcagcgtcgacggaaacaacactgatagcgagtttgaaaagggactgaaacacaaggccaagaatcccgagccccagaaggcaaccgcaccggtgaaggacgagtatgaattcgatgaggacgacgagcaggacagagtccctcctgttgacgacaaacatctgctaaagaaagattacagaaaggagacgaaatcaaactcgtttatctccattccgaaaatggaggtgaagtcctacactaagaacaatacaatagcacccaagaaggcgagccacagaatcctctctgataccagtgacgaagaagatgcctctgtgacggtgggcactggagagaaactgcgattgagcgctcataccattctgcccggctcgaagacacgtgagccgtcaaacgccaaacagcagaaggagaagaataaagtgaaaaagaagcgcaagaaggaaaccaaaggccgtgaggtgagatttggcaaacggagcgataaattctgtagctctgagagcgagagtgaaagttcggagagtggcgaagatgaccgggattccctcggcagcagcggatgtctgaagggttcgcccctcgttctgaaggatccaagcctcttcagttccctgtccgccagctccacctctagccatgggtcttctgccgcacagaagcagaaccccagtcacactgaccagcataccaaacactggaggaccgataactggaagacaatctcttcgcccgcttggtctgaggttagtagtctgagtgatagtacacgtaccaggctgacctccgagtccgattatagttcggaaggctccagcgtcgaatcgctgaaaccagttcgcaaacgacaagaacacaggaagcgagctagcctgtcagagaagaagtcccctttcttaagtagtgctgagggggcagtccctaaactcgacaaggagggaaaagtggtcaagaagcacaaaaccaagcacaagcacaagaacaaagagaaagggcagtgctccattagtcaggagctcaagcttaaatctttcacctatgagtacgaagactcaaagcagaaatctgataaagctatcttacttgaaaacgatctgtcaacagagaacaaactgaaagtgctgaagcacgaccgggatcactttaaaaaggaggagaaactcagtaagatgaagctcgaggagaaagaatggctcttcaaagatgagaaatccctcaagcgcatcaaagacactaacaaagatatcagtcggagttttcgcgaagagaaagacagatccaacaaagcggagaaggagagatctctcaaagagaagagccctaaagaggagaagcttcgactttacaaggaggagcggaagaaaaagtccaaagatagacctagtaagcttgagaaaaagaacgacctcaaggaggataagatcagtaaggagaaggagaagattttcaaggaagacaaggagaaacttaaaaaagaaaaagtctatagggaagactccgcctttgacgagtactgtaacaaaaatcagtttttggagaatgaggataccaagttctccctgtccgacgatcagcgagacaggtggttctcagacctctccgacagcagtttcgactttaaaggagaggactcttgggattctcccgtgacagactatagggacatgaagtcagacagcgtggccaaactgatcttagagacagttaaagaggattccaaagaaagaagacgcgactcaagggcccgcgagaaacgcgactaccgggaaccgttcttccgcaaaaaggatcgcgactatttggacaagaactccgagaagcgcaaggagcaaactgagaagcataagagtgtgcccgggtatctgagtgaaaaggacaagaaacgcagagagtctgccgaggcgggccgcgatcgaaaggacgcgttagagtcgtgcaaggagaggagagacgggagagcaaagcctgaggaggcccaccgagaagagcttaaagaatgcggatgtgagagtggctttaaagacaagtccgacggcgacttcggcaagggcttagagccgtgggagcggcaccatcccgctcgggaaaaggagaaaaaagacgggcccgacaaagagcgaaaggaaaagaccaagccggaaaggtacaaagagaagtctagtgacaaagataaatccgagaagtccattttagagaaatgtcagaaagataaggagttcgataaatgtttcaaggagaaaaaagatactaaggagaagcacaaggatacgcatgggaaggacaaggagaggaaagctagtcttgatcaagggaaagagaagaaggagaaggcgtttccagggataattagtgaagacttctccgagaagaaggatgacaagaaagggaaggagaagtcgtggtacatcgccgacatatttacagacgaaagtgaggatgatagggactcatgcatggggagtggattcaaaatgggggaggcatctgatctgcccagaacagacggtttgcaagaaaaagaagaaggtcgagaagcctacgcctctgacaggcaccgcaagagttctgacaagcagcaccctgagaggcaaaaagataaagaacccagagaccgccgaaaagaccgtggcgccgcagatgcagggcgcgataaaaaagaaaaggtgtttgaaaaacacaaggagaagaaagacaaggagtccacagagaagtacaaggaccgaaaggacagggcgtccgtggacagcacacaggataaaaagaacaaacagaaactgccagagaaggccgagaagaagcatgcggccgaggacaaagccaagagcaagcacaaagaaaagagtgacaaagagcatagcaaggagaggaagagtagcaggtccgccgacgcagaaaaaagcctgttagagaagttggaggaagaggccttgcacgaatacagggaggattccaatgacaagatctcggaggtctcctcagatagcttcacggaccgggggcaggaaccagggctcaccgcctttttggaggtgtctttcaccgaaccccccggcgacgacaaacctcgcgagtctgcttgtttgcctgagaaactgaaggaaaaggagcgccacaggcattcgagtagttcatcaaaaaagtcacacgacagagagcgcgcgaagaaggagaaggctgaaaagaaagagaagggcgaggactataaggagggtggatctcggaaggatagcggacagtacgagaaggattttctcgaggctgacgcttatggcgtctcttataacatgaaggccgatatagaagacgagttggacaagaccattgaactgtttagcaccgaaaagaaagataagaacgacagtgagagagagccttcaaaaaagattgagaaggaattaaagccatacggttcatcggcgataaacatacttaaagagaagaaaaaaagggagaagcaccgtgaaaaatggagagacgagaaggaaagacaccgtgacaggcatgcagacggcctcctaaggcaccatagggacgaactcctcaggcaccacagagacgaacagaaacccgccactcgcgacaaagattcacccccccgagtgctgaaggacaaaagtagagacgagggcccccgcctaggggatgccaaactgaaggaaaagttcaaggatggagcagagaaggagaagggagaccccgtcaagatgagcaatggaaatgataaagtggctccaagtaaagaccctggaaagaaagacgcgaggccacgcgagaagctcctcggcgacggtgaccttatgatgacttcgtttgagcggatgctgagccagaaagatttggagatcgaagaacgccacaagagacacaaagagagaatgaaacagatggaaaagcttcggcacagaagcggggatcccaaactgaaggaaaaagctaagccagcagatgatggccggaagaagggactggatattccggctaaaaaaccccccggtctcgaccctccctttaaagataagaaactgaaagagagcactcccataccccccgctgctgaaaataagctgcatcccgcatccggagcagattctaaggattggctagcaggaccacacatgaaagaagtgctcccagccagtcccagacctgatcagagtaggcctactggggtccctacgccaacctccgtcctgtcatgcccgtcatatgaagaggtgatgcatacaccacggaccccttcttgcagtgccgacgactacgccgatctcgtgttcgactgcgcagacagtcagcatagcactcccgtgccaaccgcacccactagtgcttgttcgccatccttctttgaccggttttccgtggcatctagcggtctctctgagaatgcgagccaggctcccgcacgcccactgtccacaaatctctataggagcgtgagcgtggatatccgcagaactcccgaggaggagttctccgtcggcgacaagctttttcggcagcaatcggtgcctgcagcttcctcctacgacagtcccatgcccccaagcatggaggaccgtgcccctctgccaccggttccagcagaaaaatttgcttgtcttagcccgggctactatagcccggattatgggctcccaagtcctaaggtggacgccctccactgtccccctgccgccgttgtgacggtgaccccctcaccggagggtgtattttctagcctgcaggctaagccatctcccagccctagagctgagctcttggtcccgtcacttgaaggcgccctcccccccgatttagacacctctgaggatcaacaagcaaccgcagctattatccctccagagccaagttatctcgagcctttggatgagggtcctttttctgctgtgatcactgaagagcctgtcgagtgggcccaccccagtgagcaagctttagctagcagcctgattggtggcacctcagagaacccagtctcctggccggtgggctcagacttactcctgaagagtccccagcgatttcctgagtctcccaagaggttttgccctgcagatcctcttcactccgcggctccagggccgttctcagctagcgaagcgccctacccagcccctcctgcgtcgcctgctccttacgctctacctgtggctgagcccggccttgaagacgttaaggacggtgtcgatgctgtgccggcggcaatcagcacctcagaggccgccccatatgccccgccttccgggttggaatctttcttctccaattgtaagtcgttacccgaagctccactggacgtggccccggagccggcttgcgtggctgctgtggcccaggtagaggcactagggcctctcgaaaattcgtttctcgatggaagtagaggactgtcacatctaggccaggtggaacccgttccttgggccgatgctttcgccggccctgaagatgacctggacttgggtcccttcagcctccccgaactgcccctgcagactaaagatgctgcagacggagaagcagagccagtcgaggagtcattggcgccccccgaggagatgcctcctggcgccccaggcgtgattaacggcggagacgtgagtacagtcgtggccgaggaaccaccggctctgcctcctgaccaagcatccaccagactacccgccgagctcgagcctgagccctctggggagcctaagcttgatgtggccctagaagccgcggtcgaggccgagacggtccccgaggaacgcgcgagaggtgatcctgattcaagcgtcgagcctgccccggttccaccagaacagcggccattaggttccggggaccaaggtgctgaggctgagggtccccctgctgcctccttgtgtgcccctgatggccctgctcccaataccgtggcacaggcccaggcagccgacggagcgggccccgaggatgacacagaagcctccagggccgcagcacccgctgaaggcccccctggtggaatacagcccgaggctgctgagcctaaacccaccgccgaggcgccaaaggcacctcgcgtcgaagaaattccacagaggatgacccgaaacagagctcaaatgctggcaaatcagtcaaagcagggtccccctccgagtgagaaggaatgcgctccaactccagcccctgtgaccagagctaaggctaggggcagcgaagatgacgatgcacaggcacagcaccctcgcaagaggaggtttcagcggagtactcaacaacttcaacagcagttgaacacctcgacgcagcagacccgcgaggtcatccaacagacacttgccgcgatcgtggacgccataaagctggatgctattgagccctatcactcagacagggccaacccctactttgaatacctgcagatccgcaagaaaatagaggaaaagcggaaaatcctctgctgtattaccccacaagcgccccagtgctacgcagagtatgttacatacaccggctcttacctgctggacggaaaacccttatctaaactccacatacctgtgattgccccacctcccagcctggcagaacccttgaaagagctctttaggcagcaggaagcagtgcgcggaaagctgaggctccagcattcaatcgagagggagaaacttattgtgtcatgtgagcaagaaatcttacgggttcactgccgagctgctaggaccatcgctaaccaagccgtccctttttcagcatgtaccatgttgcttgactctgaggtctacaatatgcctctggagtcacagggggacgaaaacaagtccgtgagggaccgctttaacgctagacaattcattagctggctccaggatgttgacgacaaatacgataggatgaagacatgtcttctgatgagacaacaacacgaagcagcagcgctgaatgcagttcaacggatggaatggcagctgaaggttcaagaactcgaccccgcggggcataagtctctgtgcgtgaacgaggtcccttcattttatgtccccatggtagatgttaacgacgattttgtgttgttacccgcttag

SEQ ID NO: 108281 - DNA, 1836 bp, synthetic construct
  misc_feature 1..1836: note = Description of Artificial Sequence: Synthetic coding sequence
  source 1..1836: mol_type = other DNA
agcattcccaagatggaggtcaagagctacacaaagaacaacaccattgccccgaagaaggcctcacatcggattctaagtgacacatctgatgaagaagatgcgtccgtgacggtgggtacgggagagaagctgagactatccgcccacaccattttaccaggctctaagacgcgtgaaccgtcaaacgcaaaacagcagaaagaaaagaataaggtgaaaaaaaagcgcaaaaaggaaacaaaggggagagaagtgcggtttggaaagcgatccgacaaattctgttcctcagagtccgagagcgaatctagtgagtcaggtgaggatgaccgagattctctcggctcatctgggtgcttaaagggctctcctttggtcctaaaggaccccagcctgttttcttccttatcagccagctccacctcaagtcatggctctagcgcagcacagaagcagaacccctcccacacagaccagcacacaaagcactggcggacggataattggaagactatatcaagccctgcttggagtgaagttagctccctctccgatagtaccaggacccggctgacctcagagtcagactacagctccgaaggatcttcagtggagagcttgaagcccgttcggaaacggcaggaacacaggaagagggccagtctgtccgagaagaaatctcccttcttgtctagtgcggagggggccgtccctaaactcgacaaagaggggaaagtagtgaagaaacacaaaaccaaacacaaacataagaacaaagaaaaaggtcagtgctcaatatcgcaggaactaaagctcaaaagcttcacgtatgaatatgaggattctaagcagaaatccgataaggccatcctgctggaaaatgacctgagtacagaaaataagcttaaggtgctgaagcacgaccgtgatcactttaagaaagaggaaaagctcagcaaaatgaagctggaggagaaggaatggttgtttaaggacgagaaaagccttaaacgtattaaggacacaaataaagatatttctcgcagctttagagaagagaaagataggtccaataaagccgagaaggagcgctccctcaaagaaaagagcccgaaagaggagaaactgagactttataaggaggaaaggaaaaaaaaatctaaggaccgtccatctaaactggagaagaagaatgaccttaaggaggacaagatttccaaggaaaaggagaaaatctttaaggaagacaaggaaaagttaaagaaggaaaaagtgtatagggaagatagcgcttttgatgaatactgtaataagaatcagttcctggaaaacgaagatactaaattctcactctcggacgaccagcgcgaccgctggtttagtgatctttcagactcctctttcgatttcaagggggaggattcctgggatagccctgtgacagactacagagacatgaaatccgattcagtggccaagttgattctggaaaccgtgaaggaggactccaaagagcggagaagggatagccgcgctcgcgaaaaaagagattaccgtgaacccttttttcgcaaaaaggatagggactacctcgataaaaactcagagaagcggaaggagcagaccgagaagcacaagagcgttcccggctacctgtctgagaaacatgagcggagaaggcggagaatggctccaattcggaagggtcggcgccgtcagaaccagaaggacacaaagagaaatccggtcaccaggacgaaggtgaggaaccagtcctggaagaatgttagacgaaccaagaacttgatcaacgttcttaagcgtaaaaagtag

SEQ ID NO: 108282 - DNA, 7992 bp, synthetic construct
  misc_feature 1..7992: note = Description of Artificial Sequence: Synthetic coding sequence
  source 1..7992: mol_type = other DNA
atgcccaaaggcgggtgccctaaggcaccacagcaagaagaactccctctgagcagcgatatggttgagaaacagaccggcaaaaaagataaggacaaagtatctcttacaaaaacgcctaaactcgagaggggagatggaggaaaggaggtacgcgagagggcttccaagcgcaagttgccattcacagctggggcaaatggggaacaaaaagacagcgacacagagaagcaggggcctgagcgcaagaggataaagaaggaacctgtcacgcgcaaagctgggctgttatttggaatggggctttcaggcattcgcgcgggatacccccttagcgaaagacagcaggtggccttgctgatgcaaatgacagctgaggagagcgccaacagccccgtggatacaacgccgaaacatccttctcaaagcaccgtgtgccaaaaagggacgcctaatagcgcttcgaaaaccaaagataaggtcaataaacggaacgaacggggcgagacacgactgcacagggctgccatcagaggagacgctaggcgcattaaagaactgatctccgaaggagccgacgtcaatgtcaaggacttcgccggttggaccgcgctccatgaagcctgcaatcgtgggtattacgatgttgctaaacagctgctcgctgccggtgctgaggtgaataccaaagggctagacgatgacacgccactccatgacgcggctaacaatgggcactacaaagtagtcaagctgctgctgaggtacggcggaaaccctcagcagtctaaccgcaaaggtgaaactcccctgaaggttgccaacagcccaactatggtcaacctcctgcttggaaaaggaacatacacttcctccgaagaatcctcaactgaaagtagcgaagaggaagacgccccgtcattcgcaccctctagctccgtcgatggtaataatacggactctgaatttgaaaagggattaaagcacaaggcgaagaaccccgagccccagaaggctacagcacccgtgaaggatgaatatgagttcgacgaggatgatgaacaggaccgggtcccaccggttgacgacaagcacttgctcaagaaggattacagaaaagaaacaaagtccaatagttttatctctatccctaagatggaagttaagtcatacactaaaaataacacaattgctccaaaaaaggcatctcataggattttgtccgatacgagcgatgaggaggatgcttccgttacggtggggacgggcgaaaaactgaggctgagtgcccacactattctgccaggatcaaaaacaagggagccttcaaatgccaagcagcaaaaagaaaaaaacaaagtgaagaagaagcggaaaaaagaaactaagggccgggaagtgcgttttggaaagagatccgataaattttgttcttctgagtccgagtcggagtccagtgaaagtggcgaggacgatcgggattccctgggctccagcggatgtctgaagggaagcccactggtgctcaaggacccctctctgttctcctcgctcagtgcgagctctactagctcccacgggtccagcgctgctcaaaaacagaatccttcacacactgatcagcataccaagcattggaggacggacaactggaagacgatttccagccccgcatggagtgaggtttccagcctcagcgactctacccgcacaagactgacatctgagtctgactactcatcagagggttctagtgttgagtcattgaaacccgtccgtaaacggcaggagcaccggaagcgcgcctctcttagcgaaaagaagagcccattcctgtccagcgctgaaggggccgtaccaaaactcgataaggagggcaaggtggtcaaaaaacacaaaacgaaacataagcataaaaacaaggagaaaggccagtgctccatttcacaggagctgaagcttaaaagtttcacctacgaatacgaggacagtaagcagaaaagcgataaagccatcttattagaaaacgatctctcaacagagaacaagcttaaggtgttgaagcacgatagagaccacttcaaaaaggaggagaagctctcgaagatgaagttggaggagaaagagtggctgttcaaggatgagaagagcctgaagcgcatcaaggacacaaacaaggatatttcacgttccttcagagaagagaaggaccgtagtaataaggccgaaaaagaacgttcactcaaggagaaatcccccaaagaggagaagctaagactgtataaagaggagaggaagaagaaaagcaaagaccgccccagcaagcttgagaagaagaatgaccttaaagaagacaagattagcaaggagaaggagaaaatctttaaggaggacaaggagaagcttaagaaggaaaaagtatacagagaggactccgcattcgatgaatactgtaataagaaccagtttttggaaaatgaggacacaaaattctcactgagcgacgaccagcgggaccggtggttcagcgacttgtcagactctagttttgatttcaagggcgaggactcatgggactctcccgttaccgattatagagacatgaagtctgacagcgtcgcaaagctcatccttgaaacagtgaaggaggattccaaggaaaggcggagagactctcgtgcccgcgaaaaaagggattaccgagagccattctttcggaaaaaggacagggattacctagacaagaatagtgagaaaaggaaggaacagacagaaaaacataaatccgttccaggttatttatctgagaaggataagaaacgcagggaatccgccgaggctggtcgagatcgcaaggatgctctcgagagctgtaaagagcggcgagacggacgtgccaaacctgaagaagcccatcgagaggagttgaaagagtgtggctgtgagagtgggttcaaggataagtccgacggtgatttcggtaaggggctggaaccctgggaacgccaccatccagcccgggaaaaagagaagaaggatggccctgataaagaacgaaaggagaaaacaaaacctgagagatataaggaaaaatcatctgataaggacaagtccgaaaagtctattctggagaaatgccagaaagacaaagagtttgacaaatgtttcaaggaaaaaaaggacacaaaagagaaacataaagacactcacggaaaagataaggagcggaaagcctccctggatcaggggaaagagaaaaaagaaaaagcatttcctggaattatatccgaagacttctctgagaaaaaggatgacaagaagggtaaggagaaatcctggtatatcgctgacatcttcactgatgagtctgaagatgaccgggactcgtgcatggggtcggggttcaaaatgggtgaggccagtgacctgcccaggacagatgggctgcaggaaaaggaagagggccgggaggcctatgcctccgatcgccatcggaagagttctgataagcagcacccagaaaggcagaaagacaaggaacctcgggataggaggaaagaccgaggcgccgccgatgcgggtagggacaaaaaggaaaaggtatttgaaaagcacaaggagaagaaggataaagagagcactgaaaaatataaagatcgaaaggacagggcttcagtggatagcacacaagataaaaaaaacaagcagaagctgccagagaaagcggagaagaaacatgcagcagaggacaaagccaaatccaagcataaggaaaaatccgataaggagcactccaaggaacggaagtcatctaggagcgccgatgccgaaaagtctctgctcgaaaaactggaagaggaggccctgcatgagtatcgggaggacagcaatgacaagatcagcgaagtcagttccgattcctttacagaccgtggccaggagcccgggttgaccgcctttttggaagtaagtttcacggagccaccaggcgacgacaaaccgcgagaaagtgcctgcctgcctgagaaactaaaggagaaggaacgacatagacactcgtcttcttcgtcgaagaagtcccacgaccgagagagagctaagaaggagaaagcagagaagaaagaaaagggggaggactacaaagaggggggctcccgcaaagattcaggacagtacgagaaagattttctggaggccgacgcatatggcgtgtcatataacatgaaagctgacatcgaggatgaacttgacaaaactatcgagctgttcagcacagaaaagaaggataagaatgacagtgaacgtgaaccgtctaaaaaaatcgagaaggagctcaagccctacggttcttccgccattaacatactaaaagaaaagaaaaagagagagaaacatagagaaaagtggcgcgacgaaaaggagcggcatagggatagacacgcggatggtctgctgcgtcatcaccgagatgaactactccgtcatcacagggacgaacagaaaccggcgaccagggataaagactctcctccccgggttctgaaggataagtctcgcgatgaagggccgaggctcggggatgcaaagctcaaggaaaaattcaaagatggtgccgaaaaagaaaaaggcgatcctgtgaaaatgtcaaacggcaatgataaagtcgcaccaagcaaagaccccggcaagaaagacgcaagaccccgggagaaactactaggagacggggatctcatgatgacttccttcgagcggatgttaagccaaaaggacctggaaatagaggagagacataaacggcataaggaacggatgaaacagatggaaaaactgcgccaccgaagtggggatccaaagctgaaggagaaagccaagccagcagatgatggtcgaaagaaagggttagacatcccagcaaagaagcccccgggcctagacccccctttcaaggacaaaaaattaaaagagagcactcctatcccccccgccgctgagaacaagctgcaccccgcctccggtgctgattcgaaggattggttagctggtcctcacatgaaggaggtgctgccagcttccccccgtccagatcagtctagacctactggcgtgcctactcctacttcagtgctctcttgtccgtcgtatgaagaagtgatgcacacacctcgcacgccctcatgcagcgcagacgactatgctgacctcgtgtttgattgtgctgacagtcagcatagcaccccagtgcctactgcgccaacttccgcctgttctcccagtttctttgatcgcttttcagttgcttctagtgggctttctgaaaatgcaagccaggcccctgcacggcccctgagcaccaacctctatcgttctgtcagcgttgatattaggaggacacccgaagaggaattctccgttggagacaagctgtttcggcagcaaagcgtaccagctgcctcctcttacgattccccaatgcctccaagtatggaggatcgggcacccttacctccagtccccgctgagaagtttgcttgcctctctcctggttattattctccagactatgggttgcctagtcccaaggtggacgcgctccactgccctcctgcagccgtggtgacagtgacacccagccctgagggtgtattcagcagcctgcaggcgaagccaagccctagcccacgagcagaactgctcgtcccatcgttggaaggggcacttcctccggacctcgacacctctgaagatcagcaggccacagccgcaattatccctcccgaaccaagttacctagaaccgctggacgagggacctttcagcgcagtgataacagaggaaccagtagaatgggcccacccatccgagcaggctctggcttcttccttaatcgggggaacctccgagaacccggtttcctggccagttggaagtgatctcctgctcaagagcccacagcgcttccctgagtcaccaaagcggttctgccccgcagacccactgcatagcgcagctcctgggccattctcagctagcgaagctccctatccagccccccctgctagccccgctccctatgctctgcctgtcgctgaacccgggctcgaggacgtgaaagatggcgtggatgctgtgccggcagctataagtacgagtgaagccgcaccttacgcccccccgagcggcctggagagctttttttctaactgcaaaagcttgccggaagctcctctcgacgtcgcaccggagccagcctgtgtggcggcggttgcccaggttgaggcgctcgggccgttggagaacagctttctcgacggaagccgcggtctctcacatttaggtcaagtagagcctgtcccttgggcggacgccttcgccggccccgaggacgacctcgacctcgggccatttagccttcccgagctgccactccagacaaaagacgcagccgatggagaggctgagcccgtcgaagaaagcttagccccacctgaagagatgccccctggggctccaggcgtgatcaatggaggcgatgtatctactgtggttgccgaggagcctccagccttgcctcccgaccaggcctccactaggctgcccgcagaattggagcccgaaccatcaggggagcccaaactggatgttgctctggaagccgccgtggaggccgagacagtgccggaggaaagggcccgcggagatccggactcatccgtggagcccgcacctgtgcctcctgagcagagacctctgggatcgggagatcagggcgcagaagccgagggccctcccgccgcttcgctgtgtgctccagacggaccagcaccgaacacagtggcgcaagctcaggccgccgatggtgccgggcccgaagacgataccgaagctagccgggcagccgcacctgccgaggggcctcccggaggcatccagccagaagccgctgaacctaagccaactgccgaggcacctaaagcacctcgggtggaggaaattcctcaacgtatgacacgcaatcgggcgcagatgctggctaaccaaagcaaacagggcccgccgccctccgaaaaagaatgtgctccaacaccggccccagtcacgagagcaaaggcccgaggcagcgaagacgacgatgcccaagcccagcaccccagaaaacgcaggttccagagaagcactcagcagctccagcaacagttgaatacttctacccaacagacccgggaggtgatccagcaaactcttgcagctatcgtcgacgctattaagctggatgcgattgagccctatcatagtgacagagctaacccctatttcgagtacttgcaaataaggaaaaagatcgaagagaaacgaaaaatcctctgctgtatcacaccacaagcaccgcagtgctacgcagagtacgtgacctataccgggtcatatttactcgacggcaagcctctctcaaagctccacatccccgtgatcgcaccccctccttccctagccgaaccactgaaagaactgttccgccagcaagaagccgtgaggggtaaactccgtttgcagcatagtatagagagggaaaaactcatcgtgtcttgtgagcaggaaatccttagggtgcattgccgagccgccaggacaattgcaaaccaggccgtccccttcagtgcctgtacaatgctgctggactccgaggtgtacaacatgccactagaaagccagggtgacgagaataagtcagtcagagacaggttcaatgcccgccagtttatatcctggttgcaggatgtggacgataagtatgatcggatgaaaacatgcctgctgatgcggcagcagcatgaggcggccgccctgaatgcggtacaacgaatggaatggcaactaaaggtgcaagaactggaccctgccgggcataaatccctctgcgttaatgaagtgcccagcttctacgttccaatggtggacgtaaatgatgatttcgttctgttgcctgcctag

SEQ ID NO: 108283 - DNA, 1317 bp, synthetic construct
  misc_feature 1..1317: note = Description of Artificial Sequence: Synthetic coding sequence
  source 1..1317: mol_type = other DNA
agcgcgggccgagtgaatgaagacagagtccggagccggactatgcccaagggcgggtgtccaaaggccccccagcaggaggagttgcctctaagtagtgatatggtggagaagcaaactgggaagaaggataaggacaaggtttcattgactaagacccctaaactcgagcggggggacgggggcaaggaggtaagggagagagcctccaagcgaaaactgccctttaccgccggagcaaatggagagcagaaagattcagacacggagaagcagggccctgagcgaaagcggatcaagaaagaaccagtgacacggaaggcgggcttgctgtttggtatgggactctccggcatccgcgcaggctatcccctgtccgaacggcaacaggtggccctgttgatgcagatgactgcagaggagtccgcaaattctcccgttgatacaactccaaaacatccatcccaaagcacagtgtgtcagaagggaacacctaacagcgcttccaaaaccaaagataaggtgaataaacgcaatgaaagaggcgaaactcggctccatcgggctgcaatccgaggtgacgccagacggattaaggagctgatttctgagggagctgatgtaaacgtgaaggacttcgccggctggacagctctccacgaagcgtgcaatcgcggttattacgacgtcgctaagcagctgctggccgcaggggctgaagtcaatacaaagggtctggatgacgacacccctctccatgacgctgcgaacaacggccattacaaagtcgttaagctccttcttcgatacggcggcaaccctcagcagtccaatcgcaaaggcgaaacaccactgaaagtagctaattccccaaccatggttaacctgctactaggaaagggaacctacacctcatccgaggagtcgtcaaccgagagcagcgaagaggaagatgcgcctagctttgcaccatcctcttccgtcgatggaaacaatacagacagcgaattcgaaaagggactgaaacacaaggcaaagaaccccgagccgcagaaggcaaccgccccagttaaggatgaatacgaatttgacgaggatgatgagcaagacagggtcccgccggtggatgacaagcacctgcttaagaaagactatcgaaaagaaactaagagcaacagcttcatcagcattcccaaaatggagaaggtgactttgaagatcacaagactgcaccaacggaagaggcccattgttagctgccaaacccgcaggacaagacggaccagagtctccccctgggggcaggagcggtcatag

SEQ ID NO: 108284 - DNA, 6189 bp, synthetic construct
  misc_feature 1..6189: note = Description of Artificial Sequence: Synthetic coding sequence
  source 1..6189: mol_type = other DNA
atgcccaaaagcggctttacaaagccgatccaaagcgagaattcagacagcgattcaaatatggtggaaaagccatacgggagaaaaagcaaggataaaatcgcttcctatagcaaaacccccaaaatcgaaagaagcgacgtctccaaagaaatgaaggagaagtcctcaatgaaaagaaaactgccgttcactatctccccttctcgtaacgaggagagggactcggataccgattcagacccaggacacaccagcgagaactggggggagagactgatcagttcctatcggacctattctgagaaggagggacccgaaaagaagaagactaaaaaggaggctggcaataagaaaagcacgcccgtgtcaattctgttcggatacccgctttcggaacggaaacagatggctctgttaatgcaaatgaccgcccgcgacaactccccagacagcacccccaaccacccttcacagaccacaccagcccagaagaagacacctagctcaagctcccgccagaaggataaggtcaacaaaagaaacgaaaggggggagacaccccttcatatggcagcaataaggggtgacgtcaaacaggttaaggagcttattagcctgggcgccaacgtgaatgttaaagattttgccgggtggactcccctgcatgaagcttgcaatgtgggttactatgacgtggcgaaaatcctgattgcagctggtgctgacgtgaatacccagggattggacgacgatactccgttgcatgactctgccagctcaggccatcgcgatattgtgaaattgctgttacggcacggtggaaaccctttccaagcgaataagcatggggagcgccctgttgacgtggccgaaacagaggaattggaactgctactgaagagagaggtcccactgagtgatgatgatgagtcgtacacagattcggaggaggcccagagtgtcaatccgtctagtgtggacgaaaacatcgacagtgagaccgaaaaggactcgttaatctgcgagagcaagcagattctgccttccaagactcccctgcctagcgctctagatgagtacgagttcaaggatgatgacgacgaggagatcaataaaatgatcgatgacagacacattctgcgtaaagagcagcgcaaggagaatgaacccgaagccgaaaagacccatctgttcgcgaagcaagagaaagctttctaccccaaatcttttaaatccaaaaagcagaagccgagcagagtgctgtattcgtccacagaatcatctgatgaggaggctctccaaaataagaagataagtacatcctgctctgtgatccccgaaacgtcgaactccgatatgcagacaaaaaaagagtacgtggtgtctggagagcataaacaaaaaggtaaagtgaaaagaaaattaaaaaatcagaacaagaacaaagaaaaccaggaattgaaacaggaaaaggaaggcaaggagaataccaggatcactaatctcacagtgaataccggcctggattgcagtgaaaagacccgtgaggaggggaatttcagaaagtctttttcacccaaggatgacacatcacttcacctcttccacatttccacaggtaaatcccccaagcactcttgcggcctgtccgagaagcagagcacccctctgaaacaagaacataccaagacgtgtctctctcccgggtccagcgagatgtccttgcaacccgatcttgtgagatacgataatactgaaagtgaatttctccctgaatcttcttctgttaaatcttgtaaacacaaagagaagtcaaaacaccagaaggacttccacttggagttcggagagaagagcaacgccaagatcaaggacgaagaccatagcccaactttcgagaacagcgattgcactcttaagaagatggacaaggaggggaagaccctcaagaaacacaaattaaagcataaagaaagagagaaggaaaaacataagaaggagattgagggggaaaaggaaaagtacaagaccaaggactctgcgaaggagctccagagatccgtggagttcgaccgagagttctggaaggagaattttttcaaatctgatgagaccgaggacttattcctcaacatggaacacgagagcctgacactggagaaaaaatcgaagctagaaaaaaatatcaaagacgacaagagcacaaaggaaaagcacgtgagcaaagaaagaaacttcaaagaggagagagataaaataaaaaaagaaagcgaaaaaagctttcgcgaggaaaaaatcaaagatctcaaggaagaaagagaaaatattcctacggacaaagactcagagttcaccagcctgggtatgtcagcaatcgaagaatccattgggctgcacctcgtagaaaaagagatagatatcgaaaaacaggagaaacacattaaggaaagcaaagaaaagcctgagaaacgaagccagattaaggagaaggacattgaaaagatggagcgcaagaccttcgagaaagagaagaaaatcaaacacgaacataagtccgagaaagacaagttggatctgtctgaatgtgtcgacaagatcaaggagaaggacaagctgtactctcaccacacagaaaagtgccacaaggaaggggagaagtctaagaatacggctgcaatcaagaaaactgacgaccgagagaagtcaagggaaaaaatggacagaaaacacgataaagaaaagcccgaaaaggaacgacatttagcagagtccaaagaaaagcacctgatggaaaagaaaaataaacaatccgacaatagcgagtactccaagagcgaaaaaggtaagaacaaggagaaagacagggaacttgataagaaagagaagtcgcgagacaaggaatccatcaacatcaccaacagtaagcacatccaagaggagaagaagtcttcaatcgtcgatggcaacaaggcccagcacgagaagcccttgtctctgaaggaaaaaacaaaggatgaacccctgaaaacccccgacgggaaggagaaggacaaaaaagataaggacatagatcgctacaaagaacgggataagcacaaggacaaaatccagatcaactccctgctcaagctgaagagcgaggctgataagcccaagcccaagtcaagtcctgcaagcaaggatacgcgccctaaggagaaacgcctggtgaatgacgaccttatgcagaccagcttcgagagaatgctgagcctaaaggacctggagatcgaacagtggcacaaaaagcacaaggagaaaattaagcagaaagaaaaagagaggctcaggaaccggaattgcttggaattgaaaattaaggataaagagaagacaaaacacacacccacagagtcaaaaaataaggagctcactagaagcaaatcaagcgaagtgaccgacgcatatacgaaggaaaaacagcctaaggacgcagtctcaaatcgttcccagtcggtcgacacgaaaaacgtgatgacattaggcaagtcatctttcgtgtcagataactcccttaataggtccccacggtccgaaaatgagaagccagggttgtcatcccgttccgtctctatgatctctgtagcctcatcagaagactcatgccacacaactgtcaccactccgcggccccccgtggaatacgattcagatttcatgcttgagtcatctgaatcccaaatgtcatttagccagtctccattcctgtccattgccaagagtccagctttgcacgagagagagctagactccttggcggacttgcccgaaaggataaaacctccgtacgccaatcggctgagcacgtcacacttgcgttcatccagcgtcgaagacgtcaagctaatcatcagtgaaggccggcccaccatcgaggtgcggcgttgcagcatgccttcagtgatctgcgaacacaccaagcaattccaaactatcagtgaagagtccaaccagggttccttactgaccgtgcccggggacactagcccgtctcccaagccagaggtgttctctaacgtcccggaacgtgacctttcaaacgtctccaacatccacagctcatttgccaccagcccaacaggcgccagcaattctaaatacgtatcggcagatcgtaacctgatcaagaacacagcccccgttaatacagtgatggacagtcccgtgcatctggagccttcatctcaagtaggggttatacagaataagtcgtgggagatgcccgtggatcgccttgaaaccctcagtacgcgggactttatctgccctaatagcaacattccggaccaggaaagcagtctccagagtttctgtaactccgagaacaaagtgctgaaggagaatgccgactttctttcccttcggcagacagagttaccaggaaatagttgcgcccaagaccccgcgagcttcatgccaccacaacaaccatgttcattccctagtcagtcactaagcgacgcagaaagcatctccaagcacatgtcgttgtcttatgtcgccaatcaggaacctggaattctgcagcagaagaacgccgtccagattataagcagtgccctcgatactgacaatgaaagcacaaaagatacagagaatacattcgtgctgggcgatgtgcagaagacagacgcgttcgttccagtgtatagcgacagcactattcaagaggcctcccctaattttgagaaagcctacacgctgccagtcttaccctcagaaaaggacttcaacgggtccgacgcatccactcagttgaacacccactatgcattctccaagctgacttataaatcttcctccggccacgaggtcgaaaactcgaccactgacactcaggtgatttctcacgagaaggagaataagctggagtctctcgtccttactcacctgtcaaggtgtgactccgacctgtgcgagatgaatgcaggaatgcccaagggtaacctgaacgaacaggatccaaaacactgtcctgagtcagaaaaatgcctgctgtccattgaagacgaggagagccaacaatcgatcctatcttcactggagaatcacagtcaacagtccacccaacccgagatgcacaagtacggacaactggtgaaagttgaactcgaggaaaacgccgaggatgataaaaccgaaaaccagatcccccagaggatgaccagaaacaaagctaatacaatggccaatcaatctaaacagattttggcttcctgtaccctcttgagtgagaaggacagtgagtcctcctctccccgcggcagaatccgtcttactgaggatgatgatcctcagatccaccacccccggaagcgaaaggtgagtagggtgccccaacccgtgcaggtttcgccaagcctcttacaggctaaagaaaagacccagcagagccttgccgcaattgtggattccctgaagcttgacgagatccaaccttactctagcgaaagagccaacccatacttcgaatacctgcatatccgtaaaaaaatagaagaaaaaaggaaacttctctgttctgtgattcctcaggcaccacagtactacgacgagtatgttaccttcaatggttcatatctgttggacgggaatccactcagcaagatttgcattcctaccataaccccacctccgtcactatctgaccctttaaaagaacttttccggcagcaggaagtggtcaggatgaaattgcggctccagcactcaatcgaaagagagaagctgatcgtcagcaatgaacaggaggtgttacgcgtccactaccgggctgccagaactcttgctaaccagaccctgccatttagtgcgtgtactgtgttgctcgatgccgaggtatataacgtgccactggattctcaaagcgacgattctaaaactagcgtgcgagaccggttcaatgcacggcagtttatgagttggttgcaggacgtagacgacaaattcgacaaactcaagacttgtctgctaatgcggcaacaacacgaagcagctgccctgaacgccgtgcaacggctggagtggcagttgaagctgcaagagctggaccctgccacgtataagagcatctcaatatatgagatccaagaattctatgtgcctttggtggatgtcaacgatgacttcgagctgaccccgatatag

SEQ ID NO: 108285 - DNA, 1317 bp, synthetic construct
  misc_feature 1..1317: note = Description of Artificial Sequence: Synthetic coding sequence
  source 1..1317: mol_type = other DNA
atggtaaatgtacctgaactcctactcggacagtcaccgagtcggaacgacaccaagattatcaattcagaagaagcacagagcgtgaacccgagttcagtcgacgaaaacatcgattccgaaactgagaaggattctttgatatgtgaaagcaaacagatcctgcctagcaaaacgccgctcccttccgccctggatgagtatgaattcaaagatgacgatgacgaagaaatcaataagatgatcgatgatcgacacattctgagaaaggagcaaagaaaagaaaatgagcctgaggctgaaaagactcatttatttgctaagcaggaaaaagccttctaccctaagtcctttaagtccaagaaacagaaaccctcccgtgttctttattcgtctacggaaagtagcgacgaggaggcactgcagaacaaaaaaatttccacttcttgctccgttattcctgaaacaagcaactcagacatgcagacaaagaaagaatacgtggtgtccggagagcataagcagaagggtaaagtgaagagaaaactaaagaaccagaataagaataaagaaaaccaggaactgaaacaggagaaggagggaaaggagaatacacgcattacaaacttaacagtgaatactgggctcgactgttcagagaaaactcgagaagaaggcaactttcgaaagtcattctcccctaaggatgacacaagccttcatctcttccatatttcaaccggaaagtcccctaagcactcgtgcggccttagcgagaagcagagcacccctctgaagcaggaacacacaaaaacgtgtttatctccaggctcttctgaaatgtcactccagcctgaccttgtccgctacgacaacaccgaatctgaatttttacccgaatcctcctcagtgaagagctgtaagcataaggaaaagagcaagcatcagaaagacttccaccttgagttcggagaaaaatctaatgcgaaaatcaaagacgaagaccactctccgaccttcgaaaatagtgattgtactctaaagaagatggacaaagaaggcaagacacttaaaaagcacaagcttaaacataaagaacgcgaaaaagaaaagcataaaaaggagatcgaaggtgagaaggagaagtataagactaaggatagcgccaaggagctgcaacgatctgtcgaatttgatcgggagttctggaaagagaattttttcaagagcgacgaaaccgaggatctcttcctcaatatggagcatgaatccttaaccctggagaaaattaagattggtaaaaagcatcagcggtag

SEQ ID NO: 108286 - DNA, 6120 bp, synthetic construct
  misc_feature 1..6120: note = Description of Artificial Sequence: Synthetic coding sequence
  source 1..6120: mol_type = other DNA
atgcctaaaagcggatttacaaagccaattcaatctgagaatagcgactcggactctaacatggtggagaagccctatggcagaaaatcaaaggacaaaattgcatcctattctaagacacctaaaatcgaaaggtccgacgtgagcaaggaaatgaaggagaaaagttcaatgaagcgcaaacttccatttacaatctcgccttcaagaaacgaagagcgggacagcgacaccgaaaaggaaggacccgagaagaaaaagactaaaaaagaagctggcaataaaaaaagcacaccagtgagtatcttattcggctaccctttatctgaacgcaaacagatggccctccttatgcaaatgaccgcgagggataactccccggatagtaccccgaatcatccctctcagacaacccccgcgcagaagaaaacgccttcttcatcaagcagacagaaagacaaggtgaacaaaaggaatgaacggggagaaacccctctgcacatggcagctattaggggcgatgtcaagcaggtcaaagaactgataagtttgggcgctaatgtgaacgtgaaggattttgctgggtggacccctttgcatgaagcctgtaacgtcggatattatgacgtggctaagattttgatcgccgctggcgccgacgtcaatacccagggtctcgacgacgatacccccctccatgactctgccagctcggggcatcgagacattgtgaagctgttgttgaggcatgggggaaatccctttcaagctaataagcatggtgagaggcctgtcgacgtcgctgagaccgaagaactggagctcctgttaaaaagagaagtgccactgagcgacgacgatgagtcgtatactgattctgaggaggctcagtccgtgaatccttctagcgtggatgaaaatattgactctgaaaccgaaaaggactcccttatctgtgagagcaaacagatcctgccctctaaaacaccactcccaagcgcactcgacgaatatgagttcaaggatgacgatgatgaagaaattaataagatgatcgacgacagacatatccttagaaaagagcaacggaaggaaaacgaaccagaggcagagaaaacccatctgtttgccaagcaggaaaaagccttttaccctaaatcttttaagtccaaaaagcagaaaccatctagagtcttgtattctagcaccgagtcttccgatgaagaggctctccagaataaaaagataagcacatcttgtagtgtaatccccgaaacaagcaactcggacatgcagaccaagaaagagtatgttgtgtcaggtgaacacaagcagaagggaaaagttaagaggaagttaaagaaccagaacaaaaataaagagaatcaggaactcaaacaagaaaaagaagggaaagaaaacacccgcatcactaaccttaccgtgaatacgggtctggattgcagcgagaaaacaagggaagaggggaattttcgaaaatcatttagtccaaaggatgatacgtcactgcacctcttccacatctcgaccggaaagagcccaaaacactcctgtggactatccgaaaagcagagcacccctctcaaacaagagcacacaaaaacatgcctgtcgccagggagctcagaaatgtcactccagcccgacctggtccggtacgacaacacagaatccgaatttctgcctgaatcctctagtgtcaaatcttgcaaacacaaagaaaagtctaagcatcagaaggacttccatcttgagttcggagaaaagagtaacgcaaagatcaaagacgaggatcattcacccacttttgagaattccgactgtactctaaaaaagatggacaaggaggggaagacgctgaagaagcacaagttaaagcacaaagaaagggaaaaggagaagcataagaaggaaatagaaggcgagaaggaaaaatacaaaactaaggactctgccaaggagctccagcgctccgtggagtttgatagagaattttggaaagaaaacttctttaaaagtgacgaaaccgaagacctgttcttaaacatggagcacgagtcactcaccttggagaagaagtcaaagctggaaaagaatatcaaagatgacaagagtacaaaggagaagcacgtgagcaaggaacgcaacttcaaagaggagagagacaaaataaagaaagagtccgagaaaagctttcgggaagaaaagattaaagacctgaaagaggaacgcgaaaacatccctaccgataaagactctgaattcaccagtctcgggatgagcgctattgaggagagcattggcctgcatctggtcgagaaagaaattgatattgaaaaacaggaaaagcacataaaagaatccaaagaaaagcctgaaaagcgctctcagatcaaagagaaagacattgaaaagatggaacgaaaaacctttgagaaggaaaaaaagattaagcatgagcacaaaagcgaaaaagacaagttagacctaagcgagtgcgtcgacaaaattaaggagaaggacaaattgtatagccaccacaccgagaaatgccataaagagggcgaaaaaagtaaaaacaccgctgccattaagaagacggacgatcgggaaaaaagcagggagaagatggataggaagcatgataaggaaaagccagagaaggaacggcatctcgccgaatcaaaggaaaaacatcttatggagaagaaaaacaaacagtccgacaacagtgagtacagcaaatccgagaagggcaaaaataaggaaaaggatagggaattggataaaaaagagaaatcacgcgacaaagagtccattaatattaccaactccaagcatattcaggaagagaagaagtcctcaatagttgatggcaacaaggctcagcacgagaaacctctcagcctgaaagagaagacaaaggatgaacccctgaaaacacccgacgggaaggagaaggacaaaaaggataaagatatcgatcgttacaaagagcgcgataagcacaaggacaagattcaaatcaacagtctgctcaaactgaaatccgaggccgataaaccgaagcctaagtcttcacctgcttctaaggacactcggcccaaggagaaacgccttgttaatgatgatctaatgcagacatccttcgagagaatgctgtccctcaaagatctggagatcgagcagtggcataagaaacacaaagagaagatcaagcaaaaggaaaaggagaggctacgaaacagaaactgtttagagttgaagatcaaggacaaggaaaagaccaaacacactcccacggagtcaaagaataaggagttgactagatctaaatcctctgaagtgactgacgcctacactaaagaaaagcaacccaaagatgccgtcagtaatcggagccaaagcgttgacaccaaaaacgtcatgaccttggggaagagttcctttgtttcagacaatagcctcaacaggagtccacggtccgaaaacgaaaaacccggcctgtcctctaggtctgtgtccatgatcagtgtggctagttcagaagatagctgccacaccaccgttactaccccgcgcccgcccgtggagtacgactctgattttatgcttgagtcctccgaatcccaaatgtctttctcacagagtccattcttaagcatcgccaaaagccccgccttgcatgaaagggagctcgacagccttgctgacctgccagagcggattaagcccccttacgcgaatagactgtccactagtcacctgcgctcaagttccgttgaggatgtcaaattaatcatcagcgaggggaggcctacaatcgaagtacgcaggtgctccatgccctccgtgatctgtgagcacaccaagcagttccaaacaatttccgaagaatccaatcaaggaagcctgctcaccgtgcctggtgatacctcaccatctccgaagccagaagtcttcagtaatgtccctgagcgcgacctctcgaacgtgagcaacatacactcttcattcgccactagtccgaccggtgcttcgaacagcaaatacgtgtctgccgatcgtaacctgattaagaacacggcaccagttaatactgtgatggactcacctgtgcatcttgagccgagtagccaggtgggtgtcatacagaacaaatcatgggaaatgccagttgaccgcttggagacattgagtacaagagacttcatttgcccgaattctaacattcctgatcaggagagctcgcttcagagtttttgcaactcagagaataaggtgttgaaggagaatgccgacttcttgtctctacgccagactgagctccccggaaatagttgtgcccaagatccggccagctttatgccgccccagcagccttgctcctttcctagccagagcctctcagacgctgagtctatttctaagcatatgtccttgagctacgtggctaaccaggaacccggcatccttcagcagaagaatgccgtccagattatcagttccgcactggacaccgacaatgagtctaccaaagacacagaaaacactttcgttctgggggacgtgcagaagacagacgcctttgtccctgtctattccgattccacaatccaggaggcatctcctaatttcgagaaggcctatacattgccagtgctgcctagcgaaaaagatttcaatgggtccgatgcctctacccaactgaacacgcattacgcatttagcaagctcacctataagagttcatctggtcacgaagtcgagaatagtactactgacactcaggttatttctcacgaaaaagaaaacaaactggagtcactcgtgctgactcatttgtcccgatgtgatagtgatctgtgcgagatgaatgccggtatgcctaagggcaacctgaacgagcaggatccgaaacactgccccgagagtgaaaagtgccttcttagcatcgaagacgaggaatcacagcaaagcatcctgtctagtcttgaaaaccattcccaacagagcactcagcccgaaatgcacaaatatggacaattggtgaaagtagagctggaagagaatgcggaggatgataaaacagagaaccagatcccacagcgcatgactcgtaataaagccaacacaatggccaatcagagtaagcagatcttggcttcctgcacactgctctccgagaaagatagtgaatcatccagcccacgagggagaattagactgacagaggacgatgacccacagatccaccatccacgtaagcgtaaggtgagcagggtgccgcagccagttcaagtcagccccagcctgctccaggccaaggaaaagacacaacaatctttggctgctatcgtagatagcttaaaattagacgaaatccaaccttactcctccgagcgcgcaaatccgtactttgagtatctccacatccgaaagaagatcgaggaaaaaagaaaactgctatgcagtgtgattccacaggcacctcagtattacgacgagtacgttactttcaatggctcgtacctgctggatggaaatcctctgtccaaaatctgtatccccactattacacctcctccttcgctgagtgatccactcaaggagctcttccggcaacaggaggtggtgagaatgaagctcagactccagcactccatcgaacgggaaaagcttatcgttagtaacgagcaggaagtactgagagttcactatagggctgccagaactcttgctaaccagactctgcccttcagtgcctgcacagtgctgctggatgccgaagtatataatgttcctctggactcccagagcgatgattctaaaacttccgtgcgcgatcgctttaatgcacgccaattcatgtcctggctccaggacgtggacgacaaattcgacaagctgaagacatgtttactgatgcgtcagcagcacgaagccgccgccctgaatgctgtccaaaggctggagtggcaactgaagctccaggaactcgatcccgccacatacaagtctatctcaatctatgaaattcaggagttctatgtccccttagtcgatgtgaatgacgattttgagttaactcctatctag

SEQ ID NO: 108287 - DNA, 372 bp, synthetic construct
  misc_feature 1..372: note = Description of Artificial Sequence: Synthetic coding sequence
  source 1..372: mol_type = other DNA
accgaggatctctttcttaatatggaacacgaatcactcaccctcgagaaaaagagtaagttggaaaaaaatatcaaagacgataagtctaccaaggagaagcatgtgagcaaagagagaaacttcaaggaggagcgagataagatcaagaaggagtctgagaagtccttcagagagggcatgtctgctatcgaagagagcatcggcctccacttggttgagaaagaaatcgatattgagaaacaggaaaaacacataaaggagtccaaggagaaacctgagaaaaggagtcagattaaagagaaagatatcgagaagatggaacgaaagacatttgagaagggcacatcgtacattagaattacacagtag

SEQ ID NO: 108288 - DNA, 993 bp, synthetic construct
  misc_feature 1..993: note = Description of Artificial Sequence: Synthetic coding sequence
  source 1..993: mol_type = other DNA
atgccgaaatctggttttaccaagcccatccaatccgagaattccgattccgatagtaacatggtggagaaaccttatggaaggaagagtaaagataaaattgccagttactcaaaaacaccgaaaattgagcgcagtgacgtttcaaaggagatgaaagaaaaatcttcaatgaaaaggaagctgcccttcactatatcgccctcgaggaatgaggagcgcgactccgacacagattcggatcccggacacacatcagagaactggggcgagcgcttgatcagctcttatcggacctacagtgaaaaggaggggccagaaaagaaaaagaccaagaaagaggcaggcaataagaagagtacacccgtatccatcttattcggctaccccttgtccgagcgcaaacagatggcactgctcatgcagatgacagcacgcgataacagccctgactccactccaaaccatccatcgcagacaacccccgcccaaaaaaagacgccgagcagttcttcaaggcagaaggacaaagttaataagcgtaacgaacgcggagaaaccccactgcatatggccgcaattcgtggcgatgtgaagcaagtcaaagagcttatctctctgggcgctaatgtgaatgtcaaagacttcgccggttggactcccctgcacgaggcttgtaacgttggctattatgacgtcgccaaaattcttatcgctgccggagctgatgtaaacacccagggcctcgatgatgatacacctttacacgattccgcaagctccggccacagagacattgtcaaactcttgcttaggcacggcggcaatccgttccaagccaataaacacggagaacgccctgtggatgtggccgaaactgaagaactggagctactgctcaaacgggaagtgccgttatcggatgacgatgaaagctatacagggtccagctaccagttcgctgggaatgccaaactgagtggggcctcctag

SEQ ID NO: 108289 - DNA, 1116 bp, synthetic construct
  misc_feature 1..1116: note = Description of Artificial Sequence: Synthetic coding sequence
  source 1..1116: mol_type = other DNA
atgcctaagagtggctttactaaacccatccagtctgagaatagcgatagcgactccaatatggtggagaagccttatggacgcaaatccaaagacaagatcgcttcttactccaaaacacccaagatcgagcgctcagacgtctctaaagagatgaaggagaagagcagcatgaagagaaagctgccgttcaccatctcgccgagtcgcaatgaggaacgggactctgacactgagaaggagggcccggagaagaagaagacaaaaaaggaggctgggaataaaaaatcaacccccgtgagcatcttgttcggatatccactctctgagcgcaagcagatggctctgctgatgcaaatgacggcccgagataactctccagacagcacacctaatcacccaagtcaaacgactcccgcacagaagaaaacaccttcctcctcatcacggcagaaggacaaggttaataaacggaatgaaagaggtgagacacctctacacatggccgctatcagaggtgatgtcaaacaagtgaaagaactgatttctctcggggcaaacgtgaatgtaaaagacttcgcggggtggactcctctccatgaagcctgtaacgtgggatactacgacgtggccaagatccttatcgctgccggggcagatgttaacacacagggtctggacgacgacaccccacttcacgacagtgcgagttcaggtcacagagacatcgtcaaactgctgttgcgacacggtggtaacccttttcaggccaataagcatggagagaggcctgtggatgtcgctgagactgaggaactggagctcctactgaaaagagaagtgcctctcagtgatgacgatgaatcatacacagattcagaagaggctcagagcgtcaatccttcatctgttgacgagaatatcgactctgaaaccgagaaagattctttgatatgtgagagcaaacaaattctgccaagtaaaactccacttcccagcgccttggatgagtatgagttcaaggatgacgatgacgaagagatcaataagatgatagacgatcgacacatcctgcgcaaggaacaacggaagaagaaacgtaaagagaagaagtag

SEQ ID NO: 108290 - DNA, 984 bp, synthetic construct
  misc_feature 1..984: note = Description of Artificial Sequence: Synthetic coding sequence
  source 1..984: mol_type = other DNA
atggctaaggccccgagctgggccggcgtgggtgccctggcttacaaggcaccagaagctctttggcctgccgaggctgtaatggacggaacgatggaggattcggaagctgtgcaacgcgcgactgctttgatcgagcagcgcttggcccaggaggaagagaacgaaaaacttagaggagacgcgagacaaaaattgcccatggacctgttggtgcttgaggacgagaagcaccacggcgctcagtcagctgccctccagaaagtcaaaggccaggaacgcgttaggaagacttcgcttgacttgcgacgggaaatcattgatgtgggcggtattcaaaatctgatagagctgcgtaaaaagagaaaacagaaaaagcgagacgccctggcagcaagtcatgagccccccccagaacccgaggaaatcacaggccctgtggatgaggaaacatttctaaaggcagccgtagagggaaagatgaaggtaattgagaaattccttgccgatggtggatcagcagacacgtgcgaccagttccgcaggactgcattacaccgcgcttccttggaagggcatatggaaattttggagaaactattagataacggcgcaacggtcgatttccaggaccggctggattgtaccgctatgcattgggcgtgccgaggcgggcaccttgaggtagtaaagctgctgcagagccatggggccgataccaacgtaagggataaggagggcgatactgccctgcacgatgccgtgcggctcaatagatataaaattataaagctactgctgctgcatggtgcagatatgatgacgaagaatcttgcaggaaagaccccaactgacctcgtccaactgtggcaggccgatacaaggcacgcactagagcaccctgagccgggagccgagcacaacggcctggaagggcctaacgatagcggccgcgaaacccctcagcccgtgcctgcccaatag

SEQ ID NO: 108291 - DNA, 1083 bp, synthetic construct
  misc_feature 1..1083: note = Description of Artificial Sequence: Synthetic coding sequence
  source 1..1083: mol_type = other DNA
atggccaaagcgccgagctgggccggagtgggtgctctggcctataaagcgccagaagccctctggcccgctgaagctgttatggacgggacaatggaggatagcgaagctgtgcagcgggcgaccgcactgatagagcaacgactagcccaagaggaagaaaacgagaagctgcggggagatgctagacagaagttacccatggatctgctggtgctggaagatgagaaacatcacggggcacagagtgctgccctgcagaaagtgaaggggcaagaaagagtgaggaagactagcctggacctgaggagagaaatcatcgacgtgggcgggatacagaacctgattgagttaagaaaaaagcgtaagcagaagaagagagatgcgctggctgcaagtcacgaaccaccccctgaaccagaggagatcaccggtccggtggatgaggagacattcttaaaggctgccgtggagggaaagatgaaagttatcgagaagtttctcgctgacggcggatctgccgatacatgtgaccagtttagacggacggcgctgcaccgcgcctccctcgaaggtcatatggagatactagagaagctcctcgacaacggtgcaactgtagattttcaggataggctcgactgcacagctatgcattgggcctgtaggggtggacatttagaagtggttaagctcctacagtctcacggtgcagacacaaacgtgagggacaaactgctgtcaacaccgttgcacgttgctgttcgcacaggccaggtggagattgttgagcattttttgtcattgggactggaaatcaacgctagggatcgcgaaggggatactgccctccacgacgctgtgcggcttaatcgatataagatcattaagttgctcctgctccatggtgcagacatgatgacaaagaatttagccggtaaaaccccaaccgatttggttcagctatggcaagctgacaccagacacgctctggaacatcccgagcccggcgccgaacacaacggcctagagggacctaatgactctggaagagagaccccgcagccagtcccagcgcagtag

SEQ ID NO: 108292 - DNA, 1002 bp, synthetic construct
  misc_feature 1..1002: note = Description of Artificial Sequence: Synthetic coding sequence
  source 1..1002: mol_type = other DNA
atggatggcaccatggaagacagtgaggccgtacaacgcgccaccgccctgattgaacaaagattggcccaggaggaggaaaacgagaagctgagaggcgatgctagacagaagcttccaatggacctccttgtgttagaggatgaaaagcaccacggtgctcagtccgcagcacttcaaaaagtgaagggccaggagcgcgtgcggaagacatcactggatttgcgaagagaaattattgacgttgggggaattcagaatcttatcgagctccgaaaaaagagaaagcaaaaaaaacgggacgccctggctgcctcacatgaaccgcctcccgagcctgaggagattaccgggcctgtggacgaagagacattcctgaaggcagccgtagagggaaaaatgaaggtcattgagaagttcctcgccgatggtggttcagctgacacctgtgaccaatttagaagaacagctctgcaccgggcctctcttgaggggcacatggagatactagaaaagttgctggacaacggcgcaacagtcgacttccaggatagattggattgtaccgctatgcattgggcctgccgaggaggccacctggaagtggttaagctcttacagtcacacggggctgataccaacgtgcgggacaaactcctgtcaactcccctgcacgtggcagtcaggacaggacaagttgagatcgttgaacattttctctccctgggactggagattaacgccagggaccgggagggcgacacagcactgcatgatgctgtccgtttgaacaggtataaaataattaagctcttgctcttacacggagccgacatgatgacgaagaatcttgcaggcaaaactcccactgatctggtccagctctggcaagccgacacccgccacgccttggaacatcctgaaccgggtgccgaacataacggactcgaaggacctaacgattcaggacgagagacgccccagcctgtacctgcgcaatag

SEQ ID NO: 108293 - DNA, 903 bp, synthetic construct
  misc_feature 1..903: note = Description of Artificial Sequence: Synthetic coding sequence
  source 1..903: mol_type = other DNA
atggacggtaccatggaggactctgaagccgtacagagggctacggccctgatcgagcagcgactggcccaggaagaagaaaatgagaaactgagaggggacgctcggcaaaaacttcccatggatctcctggtcctggaggatgaaaagcatcacggggcacagtccgctgcactgcagaaagtgaaggggcaggaacgcgttcgcaagaccagcctagacctccggcgagagatcattgacgtcggtgggattcagaatctcatcgaactacgtaagaagcgcaagcagaaaaagcgggacgccctggctgcatcccatgagcccccccctgaacctgaggagataactgggcccgtggatgaggaaaccttcctgaaggcagcagtcgaaggaaagatgaaggttatcgaaaagttcctggccgatgggggctcagcggacacttgcgaccagtttagaaggacagccctgcaccgcgccagtctggagggtcacatggagattctggagaagctactggacaacggcgctactgtggattttcaggaccggctggattgtacagctatgcactgggcctgcagaggcggccacctggaggtggtcaagcttttgcagagtcacggagcggacaccaacgttcgcgataaggagggagacacggccttacacgatgctgttcgtctgaacaggtacaagattatcaagctattgctgctccacggcgccgacatgatgaccaagaatcttgccggcaagacaccaacagatctggtgcaactctggcaggcagatacacgtcacgcactcgagcatccagagccaggagccgaacacaacgggttggagggccctaacgacagcggccgcgaaacaccccaacctgttccggctcagtag

SEQ ID NO: 108294 - DNA, 918 bp, synthetic construct
  misc_feature 1..918: note = Description of Artificial Sequence: Synthetic coding sequence
  source 1..918: mol_type = other DNA
atggactttatttcgattcagcagctggtgagcggagaaagggtcgaaggaaaagttctcggatttgggcacggcgtacctgacccgggcgcgtggccatctgattggcgacgcgggccgcaggaagcggttgctagagagaaattgaagctcgaggaagaaaaaaagaaaaaattagaaaggtttaattcgacgagattcaatcttgacaacctcgcggacctggaaaacctggtgcagcggagaaagaaaagactgaggcaccgcgtcccccctagaaagccagagccactggttaagccccaaagccaggctcaggtcgagcctgtaggcctggaaatgtttctgaaggccgcagcagagaatcaggagtatctcattgacaaatatctgaccgatggaggagaccccaacgctcatgataaattgcatcgcaccgctctccactgggcctgccttaaggggcacagccagttggtcaataagctcctggtcgctggcgcaactgtagatgcaagggatttattggaccggacccccgtattctgggcgtgcagaggaggccacctggtgatactgaagcagcttctgaaccagggggcccgcgtaaatgccagagacaagatcggctccactccgctacatgtcgcagtgaggacaagacatccagactgcctcgagcaccttatcgagtgcggcgctcatctcaacgctcaggacaaagaaggagatactgctctgcacgaagcagttaggcatggttcatataaggctatgaaactactcctgctgtacggggcggaactcggcgtgcggaacgctgcatccgttacacctgtgcagcttgccagagactggcagagggggatccgagaagctctgcaggcccacgtagcccatccccggactaggtgctag

SEQ ID NO: 108295 - DNA, 792 bp, synthetic construct
  misc_feature 1..792: note = Description of Artificial Sequence: Synthetic coding sequence
  source 1..792: mol_type = other DNA
atggatttcatcagcattcagcagcttgtgagcggagagagggttgagggcaaagtgctggggtttggccacggtgtcccagatcctggcgcttggccttccgattggaggagaggaccccaggaagcagtggcacgcgaaaaactgaaactagaggaggaaaaaaaaaagaaattggagcgcttcaacagtacacggttcaacctggataatctagccgaccttgagaatctggtgcaaaggagaaagaagcgtttgaggcacagggttcctcccagaaagccagaacctctggttaaactccatagaaccgccttgcactgggcctgtttgaaaggccacagtcaactcgttaacaagttgttagtagcaggcgcaaccgtggatgcacgggacctcctggacagaacccctgtgttctgggcctgccgtggcgggcacctggttattttaaagcagctgttgaatcaaggtgccagggtgaatgctagggataagatcggcagcactccactgcatgtagctgtgcggacccggcatcccgactgccttgagcacctgatcgaatgtggcgcccacctgaacgcacaggacaaggagggagatacagcccttcacgaggctgtgaggcatgggtcatataaggccatgaaactgttactcctgtacggggctgaattgggagtaagaaatgccgcctccgtcaccccagttcagcttgcccgcgactggcagcgcgggatcagagaggcacttcaggcacatgttgcccatccacgaactagatgctag

SEQ ID NO: 108296 - DNA, 918 bp, synthetic construct
  misc_feature 1..918: note = Description of Artificial Sequence: Synthetic coding sequence
  source 1..918: mol_type = other DNA
atggatttcatttctattcagcaactggtgtccggcgagcgagttgagggaaaagtgctgggttttgggcacggggttccagatccgggcgcctggccgtccgactggcgaagaggaccccaagaagccgtggcgagagagaagctgaagctcgaggaagaaaagaaaaagaaactggagaggttcaacagtacacgtttcaacctcgataacctggctgatttggagaacctggtgcagagacgtaaaaagcggctgagacaccgggtccccccccggaaacctgaacccttggtaaagccacagtcgcaggcgcaagtcgaaccagtggggctcgaaatgtttctcaaggccgccgctgagaaccaggagtacctgattgataagtatctaacggatggcggcgatccgaatgcccacgataagttacaccggactgccctgcactgggcttgtctgaagggccatagccagctggtgaacaagctcctggtcgccggtgccaccgtcgacgcgagggacctactagatagaactcctgtgttttgggcctgcagaggaggacacctggtaattcttaagcagctactaaaccagggcgcaagggttaacgcacgggataagattggatccaccccgcttcatgtggctgtgagaacccggcatcccgattgcttggaacacctgattgagtgcggcgcccacctaaacgcccaagacaaagagggggatactgccctgcatgaggctgtgcgtcacggatcttataaggcgatgaagctacttctactttacggtgctgagctcggggtccgaaacgcagcttcggtgaccccagtgcagctggcccgcgactggcagcgtgggatcagggaggcactgcaggcccacgttgctcatccgagaacccgctgttag

SEQ ID NO: 108297 - DNA, 3804 bp, synthetic construct
  misc_feature 1..3804: note = Description of Artificial Sequence: Synthetic coding sequence
  source 1..3804: mol_type = other DNA
atgaaccacatgtttcatatcaagcgccattctatctcagctggaacagatgcatataaaaagactaagcccatccagaacctattccaaaagccactctacgaccattgtagcgctaacaactacaaatcgatggaacctgagctggagaatgttcggagcagtcccccacggggagatcgcaccagcaaagtgagcctgaaggaagagttgcagcaggacatgcaaaggttcaagaacgaaataggaatgctcaaggtcgaatttcaggcactagagaaggaaaaggtgcaactgcaaaaagaggtggaggaagaaaggaaaaagcacagaaacaatgaaatggaagtcagcgcaaatattcacgatggtgccacagacgacgccgaggatgatgacgatgacgatggcttaattcagaagagaaagagcggcgaaactgatcaccagcaattcccacggaaggagaacaaggagtatgcttccagtggcccagccctgcaaatgaaggaagtgaaaagtactgagaaagaaaagcgcacttccaaagaatctgtcaattctcccgtttttggaaaagcctccctcctcaccggagggctgctacaggtggacgatgactctagtctctcagagatcgacgaggacgaaggcagacccactaagaagacttctaacgagaagaataaagtgaaaaatcagatacagtcgatggatgacgtagacgatctgactcaatcctccgaaacagccagtgaggattgcgagttgccacacagctcttataagaactttatgttactgatagagcaattagggatggagtgtaaagactcagtcagcctgctcaagatccaggatgcggctctcagttgcgagcggctcctggagctgaagaaaaatcattgcgaactgctcacggtgaaaattaagaaaatggaagataaggtgaacgtgctgcagcgggaattgtccgagaccaaggagatcaagagtcagttagagcaccagaaggtcgaatgggagagggagctttgctcactgcgattcagtctgaaccaggaggaagaaaagcgtcggaacgctgacactctgtacgaaaagatccgcgagcagctccggcgcaaagaagagcaatatagaaaggaggttgaggtgaagcagcagctggaactcagcctccagactctggagatggagctgaggaccgtcaaaagtaatttgaatcaggtggtgcaggagaggaatgacgcccagcggcagttgtcaagggagcagaacgcgagaatgctccaggacggtatcctgactaaccacctctctaagcagaaggagattgagatggcccagaagaaaatgaattctgaaaacagccactcccatgaagaagagaaagatctttcccacaagaattctatgctccaggaggagatcgcgatgttgcgcttggagatcgatactatcaaaaatcaaaaccaggagaaggaaaaaaaatgttttgaggacctaaagattgtgaaggaaaaaaacgaagacttgcagaagacaattaagcaaaacgaagaaactttgacccaaacaatctcccagtataacgggcgcttgtcagtgctgaccgccgagaatgccatgctcaactccaagctggagaacgagaagcagagtaaggaacggctcgaggcggaggtggaatcctaccactccaggcttgccgcggccatacacgatcgtgatcagagcgaaacttctaaacgcgagctagagttggcctttcaaagagcccgggatgagtgctcgagactgcaggacaagatgaatttcgatgtttcaaacctcaaagacaacaacgagatcctctcacagcaacttttcaagactgagtctaaattgaactcgctggagatcgagttccatcacacccgggatgccctgcgagagaagacgctaggtcttgagcgagtccagaaagatctgagccaaactcagtgtcaaatgaaagaaatggagcagaagtaccagaacgagcaggtgaaagtgaataagtatatcggcaaacaggagtccgtggaggagcggctttcgcagctccagagtgagaacatgctcctgaggcagcagctagatgacgcccacaataaggcagataacaaagaaaagacggttattaacatccaagatcaattccacgccatcgtgcagaagctacaggccgagagtgaaaaacagtccctgctgctggaagagcgtaataaggaactgattagcgagtgtaatcacctgaaagaacggcagtatcagtacgaaaatgagaaagccgagagggaggtagtggtcagacagctgcagcaggaactcgccgacaccctgaagaagcaatccatgtctgaggcttcgctggaggttacgtcacgataccgaatcaaccttgaggacgaaactcaagatctcaaaaagaaattaggacagatccggaatcaactccaggaggcacaggatcggcataccgaggccgtacggtgcgctgaaaagatgcaggaccacaaacagaagctcgagaaggacaacgcgaagctaaaggtgaccgtaaagaaacagatggacaaaattgaagaactgcaaaagaatctactcaacgctaatttgtctgaagatgagaaagagcagctgaaaaagctgatggagctgaaacagtcgctcgagtgtaaccttgatcaggagatgaagaagaacgtggaactggaaagggagataacaggattcaaaaatcttctaaaaatgacaagaaaaaaacttaacgagtacgagaatggggagtttagttttcacggcgacctgaaaacaagccagttcgagatggatatccagatcaataaactgaagcacaagatagacgatctcaccgccgagttagagactgctggtagtaaatgcctgcacctggatacaaaaaatcaaatactccaagaggaattgcttagcatgaaaacagtgcaaaaaaagtgcgagaagctccagaagaacaaaaagaagctcgagcaggaagtcataaacttacgcagccacattgaaagaaacatggtggagctgggccaggtgaaacagtacaaacaggaaattgaggagcgagcccgtcaggagatcgccgaaaagctgaaggaagtgaacctttttttacaggcccaggcagcttctcaagagaatctagagcagttccgggagaataactttgcaagcatgaaaagccagatggaactccgcattaaagatttagagagcgagctgtccaagatcaagacctcccaggaggactttaataagaccgaacttgagaagtataagcagttataccttgaagagctgaaggtccgaaagtccctaagttccaaactgacaaaaaccaacgagagactagccgaggtcaacaccaaacttctagtggaaaaacaacagagtagaagtctctttaccactctgacgacacggcccgtgatggaacccccatgcgtcgggaacttgaacaactccctggacttaaataggaagctgattccccgcgaaaacctagtgataagtacatctaatccaagagcctcaaacaacagcatggagaactacttatccaagatgcagcaagaactggaaaaaaacataactcgagagctcaaagaggcagctgccgaattagagagtggaagcattgcgagccctctcggttctactgatgagagcaatctcaaccaggatcttgtgtggaaggccagccgggaatacgtccaggttttgaaaaaaaattacatgatctag

SEQ ID NO: 108298 - DNA, 5133 bp, synthetic construct
  misc_feature 1..5133: note = Description of Artificial Sequence: Synthetic coding sequence
  source 1..5133: mol_type = other DNA
atgaaaaaaatcttcagcaaaaagggagagtctccccttggcagtttcgccaggagacagaggagctcagccggtggcggtggggaaccgggagaaggggcgtacagtcaacccgggtatcatgtaagagaccgagacttgggcaagattcacaaggctgcttccgcaggcaacgtggccaaggtgcagcagatactgctgctgcggaaaaatggcttaaacgatcgcgataagatgaatcgaacggccctacacctggcatgtgccaatggccatcccgaggtggttactctcctcgtagaccgcaagtgtcagttgaacgtgtgtgacaatgagaacaggactgccctgatgaaggcagttcagtgccaggaagaaaaatgcgctaccatcctgctcgaacatggcgccgaccccaaccttgctgacgtgcatgggaatactgccctgcactacgcggtgtacaacgaagatatatctgtcgcaactaaactgctgctgtacgacgcgaatatcgaggctaaaaacaaggatgacctcacacccttactcctggccgtgagtggcaaaaagcaacaaatggtggagtttctcatcaaaaaaaaggctaacgtaaatgccgtggacaagctagaatcttcccaccagttaatcagtgagtataaggaggagagaattccaaaacattccagtcagaatagcaatagcgttgacgaatcttcggaagatagcctgagccgactatctggcaagccaggggtggatgactcttggccaacttccgacgacgaagatctgaatttcgacacaaaaaacgtccctaagccgtcactggccaaattgatgaccgcctcccagcagagtcgaaaaaacctggaagctacatatgggacagtacgcaccggtaacagaacactgttcgaggatcgcgattcagacagccaggacgaggtggtagtggaatccctaccaaccacatctattaaagtccagtgcttttcacatcccacataccagtctccagatctgttgcccaagcctagccacaaatccctcgctaaccctggcttgatgaaggaggaaccaacaaagcctggtattgcgaaaaaagaaaatggtatcgacattatcgagtcagcacctttggaacagaccaacaacgacaatcttacttacgtagatgaggtgcacaaaaacaacagaagcgatatgatgagcgcactgggattgggccaggaggaggacattgaaagtccatgggatagcgagtcaatcagcgagaacttcccgcagaagtatgtcgatcctctagccggggccgctgacggcaaagaaaagaacataggcaacgaacaggccgaggatgtgttttatattccgagctgcatgtcggggagcaggaattttaaaatggccaaactggaggataccagaaatgtggggatgcccgtggcccatatggagagcccagaacgttaccttcacctgaaacctaccatcgagatgaaggattccgtccccaacaaagctggaggcatgaaggacgtccaaacttccaaagctgccgaacacgatctcgaggtggctagcgaagaagagcaggagagggagggctctgagaataatcaaccacaggtggaagaagagcgaaaaaagcatagaaacaatgaaatggaggtgagtgccaacatacacgatggggccacagacgatgccgaggacgacgacgacgacgacggactgatccagaagagaaagtccggcgaaacagaccatcaacagtttccacggaaagaaaataaagaatacgcgagtagtggccctgctctacaaatgaaggaggtgaagagcactgagaaagagaaaaggactagcaaagagtccgtcaattccccagttttcgggaaggcctccctattgaccggaggtcttctgcaagtcgatgacgattcctctctgagcgaaatcgatgaggatgaaggccgaccaacaaagaaaaccagcaacgaaaaaaacaaagtcaagaatcagatccagagtatggacgatgtcgacgacctgacccagagttccgagactgcctcagaggactgtgaactgcctcactcttcctacaagaatttcatgctattgattgaacagcttggtatggaatgcaaggattcagtgtccctgcttaaaatccaagacgccgccctgtcttgcgagagactgctggagctaaagaagaaccactgcgagctccttacagtgaaaataaaaaagatggaagacaaggtaaatgtcctgcagagagagctgtcggaaaccaaggaaatcaaatcccaactggagcaccagaaagtcgaatgggaaagagaactttgttctttacgcttctccctgaaccaagaggaagaaaaacgtagaaatgctgacacactatacgagaaaatccgggagcaacttcgacgtaaagaggaacagtaccgcaaggaggtggaggtcaagcaacaactggagctttcactgcaaacactggagatggaactcaggactgtgaaatccaaccttaaccaagtggtgcaagagcgcaacgatgctcagcgtcaactgtcaagggagcagaatgctcgcatgcttcaggacggtatcctaaccaaccacctgagcaagcagaaggagattgagatggctcaaaaaaagatgaactccgagaacagccattcacacgaagaggagaaagacctgtctcataaaaacagcatgcttcaggaagagatcgccatgcttaggctcgaaatagacacaataaaaaatcagaatcaggaaaaggagaagaaatgtttcgaagacttaaaaatcgttaaagagaaaaatgaggacctccagaaaaccatcaagcaaaacgaagagacactgacgcagaccatttcccaatacaacggtcggctttctgtactcaccgccgaaaacgccatgctgaactcaaagcttgaaaatgaaaaacaatccaaggaaaggctggaggcagaagtggagagttaccacagccgtcttgcggctgccatccatgatagagaccagagtgaaacctcgaaacgagaactcgagctagccttccagagagcaagggacgagtgttcgcgcctgcaagacaagatgaactttgacgtgtctaatctgaaggacaacaatgagatcctgtcccagcagctatttaaaactgagtctaagctgaattcattagaaatcgaattccaccataccagggatgcactgcgtgagaaaactctgggcctggagcgcgtgcaaaaagatttgtcccagacccagtgtcagatgaaagaaatggaacagaagtatcagaatgaacaggtcaaagtgaataaatacataggtaagcaggaaagtgtagaggagaggctctcacagctccaaagcgaaaacatgctgctgcggcagcaactggacgatgcgcacaacaaagcggacaacaaagagaaaactgtgatcaacatccaggaccaattccacgctatcgtccagaaactgcaagcggaatccgaaaagcagtccttactgctagaagagcggaacaaagagctgatctcggaatgcaatcatctaaaggagcgtcaatatcagtatgagaacgagaaagcagagagggaagtggttgttcgacagttgcaacaggagctcgccgacaccttaaaaaaacagtcaatgtcggaggctagcctagaagtcacgtctagatatcgaatcaatctggaggacgagactcaagacttgaagaagaaactgggacaaataagaaatcagctgcaggaggctcaggaccgtcacactgaagctgttagatgtgctgagaaaatgcaggatcataagcagaaactggaaaaggacaacgcaaaactgaaagtgaccgtcaaaaagcaaatggataaaattgaagaactccagaaaaatctactgaatgctaacctgtccgaggacgagaaggagcaactaaagaagcttatggaacttaaacagagcctcgagtgcaaccttgaccaggagatgaagaaaaacgttgaactggaacgggaaattacaggatttaaaaacttattgaaaatgacccgcaagaagttgaatgagtacgagaatggtgaattttcattccacggcgatctaaaaacaagccagtttgagatggatattcaaatcaacaaactgaagcataagatcgatgacctgactgccgaactggagacagcgggatccaaatgccttcacctggatactaagaatcagatccttcaggaagaactgttaagtatgaagaccgttcagaaaaaatgtgagaaactgcagaaaaataagaaaaaactggaacaggaagtgatcaatctcaggtctcacattgaaaggaatatggtcgagttgggacaggtgaaacagtacaagcaagagattgaagaacgtgcaaggcaggagatcgccgagaagctgaaagaggtaaacctattcttgcaggcccaggcagccagtcaagagaacttggaacagtttcgagagaacaactttgcctctatgaagagtcagatggaattacgcatcaaggacctggaatctgagctttccaagatcaagacaagtcaggaagatttcaataagaccgaattggaaaaatacaagcagttgtacctggaagaactcaaagtaaggaagtctctttcgtctaagcttaccaagactaacgaacgcctggccgaggtgaatactaagttgttagttgaaaagcaacaaagtcggtctctcttcaccacattgaccacccgacccgtcatggagcctccttgtgtgggtaatctgaacaatagcttggatcttaatcgcaaactgattccacgggaaaacctagtcattagcacttcgaacccccgtgcaagcaataacagcatggagaattacctgtctaaaatgcagcaagaactggaaaaaaatatcaccagagagctcaaagaagctgcagctgagctcgagagcgggtctattgcgagcccacttggcagcactgatgaatcaaacttgaaccaggacttagtctggaaagcatctagggagtatgtccaggtgctcaaaaagaattatatgatttag

SEQ ID NO: 108299 - DNA, 5181 bp, synthetic construct
  misc_feature 1..5181: note = Description of Artificial Sequence: Synthetic coding sequence
  source 1..5181: mol_type = other DNA
atgaagaagatcttttcgaagaagggcgagtcacctctggggagctttgccaggcgacagaggagctccgcgggcgggggaggcgagcccggggaaggggcctactcccagcccggctaccacgtgcgggaccgtgaccttgggaaaatccacaaggctgcaagcgccgggaacgttgccaaagttcagcagatcctcctcctgcggaaaaatgggctgaatgatcgcgacaaaatgaatcgcacagctttgcacctggcatgtgccaatggccaccccgaggtggtcacgctactggttgatagaaagtgccagttgaacgtgtgcgacaatgagaatcggaccgccttgatgaaagcagtccagtgtcaggaagaaaagtgtgccacaatcctgttggaacacggggctgatcccaatctcgctgatgtgcacgggaacactgccctgcattacgctgtgtacaacgaagacatatccgtggcaacaaagctcctcctgtacgatgccaacatagaggctaagaacaaagacgatttgacgccattgttgttggcggtatctgggaaaaagcagcagatggtggagtttctaatcaagaaaaaagctaacgtaaatgcagtggacaagcttgaatcctcccatcagctcatctctgaatacaaggaggagagaattcctaagcactcttcacagaactccaacagcgttgatgaatcatctgaggactccctgagttctctgttttattttatcttttttgaaacgaagagttgtacggtagcgcaggccggcgtactgcagcacgatctctcaagccttcagtcgctgctcccaggttttacacagtttttctgtttgcacctccccagtagctgggaccacaggctcagtggaaaacccggcgtggatgatagctggccaactagtgacgacgaagacctcaacttcgacactaaaaacgtacccaagccctcactagctaagctgatgactgccagccagcagtccaggaagaatctggaggccacatacggtaccgtgcggacaggaaatagaactctctttgaggatagggactccgactcacaggatgaagtggtcgtcgaaagcctacctactacgtccatcaaggtgcagtgtttctcccaccccacatatcagagcccagatttactgccaaaaccctcacacaagtccctggcaaatccaggcctgatgaaggaggaacctacaaagccgggaatcgccaagaaggaaaacggcatcgatatcattgaaagtgctccgcttgagcagacgaacaatgataacctgacctatgtcgacgaggttcataagaacaacagatccgatatgatgagcgctctgggactgggccaggaagaagatattgagagtccttgggatagtgagagcatttcagagaacttcccccagaaatacgtggatcccctcgccggcgctgcagatgggaaagagaagaacatcggcaatgagcaggctgaagagtctcctgaacgatatttacatcttaagccaactatcgagatgaaagacagcgtgcctaacaaagcaggagggatgaaagatgtgcagacgtctaaggctgccgaacacgaccttgaggtggccagtgaagaagagcaagaaagagagggatcagagaacaaccaaccgcaggtggaggaagagagaaagaaacatagaaacaatgagatggaggtcagtgcgaacatccacgatggcgctactgacgacgccgaggacgatgatgacgatgacggtctgatacaaaagaggaagagtggggaaactgatcaccagcagttcccaagaaaggaaaacaaagaatacgcctcttccggtccggctctccagatgaaggaggttaaatcaacggaaaaggagaagagaacctccaaggaatctgtcaacagcccagtgtttgggaaagccagcctcctaacaggcggattgctgcaggtggacgatgactcctcattgagtgaaatcgatgaggatgaggggagacccaccaagaagacaagcaacgaaaagaacaaggtgaagaatcagatacaatctatggatgatgtggatgacctgacgcagagctccgagaccgccagcgaagattgtgaactgccacactcaagttacaagaattttatgcttttaattgagcagctgggtatggagtgcaaagactccgtctccctgctcaaaattcaggacgcagcgcttagctgtgagcgtctacttgagctcaagaagaatcactgcgagctgcttaccgtgaagatcaagaagatggaggataaggtaaacgtgctgcaacgggagctctccgaaacaaaggaaatcaaatctcagctcgagcatcagaaggttgagtgggaacgcgagctctgcagccttcggttcagcttgaaccaggaagaagaaaaacggcgaaacgccgacacactgtatgaaaaaatcagggagcaacttcgtaggaaagaggaacaatatcgcaaggaggtggaggtaaaacagcaacttgaactaagtctccagactttagaaatggaactgcgcacagtcaagagtaatcttaaccaggtggttcaggaaaggaacgacgctcagcggcagctttctagagaacagaatgccaggatgttacaagatggcattcttacaaatcatcttagtaaacagaaagagattgaaatggctcagaagaaaatgaattccgagaacagccatagtcacgaggaagagaaagacctaagtcataagaattccatgctacaagaggagatagctatgctccgtctggaaatagacactatcaaaaaccagaaccaggagaaagagaagaagtgtttcgaagatttgaagattgttaaagaaaaaaacgaagacctgcaaaaaacgattaagcagaacgaagaaacccttacccagacaataagccaatataacggcagactctcagtcctgacggcagaaaacgccatgctgaatagtaagttggagaatgagaaacagtctaaggaaaggcttgaggccgaggttgagtcgtaccactcccggttggccgcggccatacacgacagagaccagtcagaaacctccaagcgggagctggaactggctttccagcgcgcaagagacgaatgctctaggctacaagacaagatgaacttcgacgtgtctaatctcaaagataacaacgagattttgagccagcagctgttcaaaacagaatctaagctgaattcgctcgagatcgagttccaccatacacgtgatgccttgagagagaagactttagggctggaacgggtccagaaggatcttagccaaactcagtgtcagatgaaggagatggagcagaaatatcagaacgagcaagtcaaagttaacaaatacattggaaagcaagagagcgtggaagagagactgtctcagctgcaaagcgagaacatgttgcttagacaacagcttgatgacgcccacaacaaagcagacaacaaggagaaaacggtgataaacatccaagaccagttccacgccatcgtccaaaagttacaggcggaatccgagaagcagtcactgctgctagaggagcgaaacaaagagcttatttccgagtgtaaccacctgaaggaaaggcagtaccagtatgagaacgagaaagcagagagagaggtggttgtgcggcagcttcagcaagagctcgctgatactcttaagaagcaaagcatgtccgaggcctctcttgaggtgacctctcgctaccggattaacctggaggacgaaactcaagatctcaagaaaaagctggggcagattagaaaccaattgcaggaggctcaggatcgccacacggaggctgtgcgatgtgccgagaaaatgcaggatcataaacaaaagctggagaaggataacgccaagcttaaggtgactgtgaagaaacaaatggacaaaatagaagaactgcaaaaaaacctgttaaacgccaatctctccgaagacgagaaagaacagcttaagaagttgatggaactgaagcagagtctagagtgtaatctcgatcaggagatgaaaaaaaacgtcgagctcgagagagaaattaccgggttcaaaaatctgctgaagatgaccagaaaaaaacttaacgagtacgaaaatggagagttttcatttcacggcgacttgaagacctcccaattcgagatggatatccagatcaacaagttgaaacacaagatagacgacctgactgcagagcttgaaacggcaggctccaaatgtttgcacctggacactaagaatcaaattttacaagaggaactcttgagcatgaaaacggttcaaaagaagtgtgaaaaattgcagaaaaataagaaaaagctggagcaggaggtgatcaacttgcgtagtcatattgagagaaacatggtggagctgggccaggtcaagcagtataagcaagagatagaggagagggcgagacaggaaatcgcggaaaaactgaaagaggtgaacttattcctccaggcccaggcagcttcccaggaaaacctggagcagtttcgagagaataattttgcttccatgaagtctcaaatggaacttaggatcaaagatttggagagcgaactctctaaaatcaaaaccagtcaggaagatttcaacaagacagagttggagaagtacaagcagctctacctggaggagttgaaggtgcgaaaatcgctgtcttcgaaactgactaagaccaacgaacgattagctgaagtaaacaccaagctgctcgttgagaagcagcagagccgatcgctgttcacaacactgacgacccgacctgtcatggagcccccatgcgtgggtaacctcaataattctctcgaccttaaccggaaacttatcccacgggaaaacctggttatttcaacgtcaaacccaagggccagcaataattccatggaaaattatttgtccaaaatgcagcaggagctggaaaagaacattacccgggaacttaaggaagccgccgccgagctggagtccgggtcaattgcatccccactcggctccaccgatgaaagtaatctgaatcaggatctcgtgtggaaggcctcccgcgagtacgtgcaggtccttaaaaagaactacatgatctag

SEQ ID NO: 108300 - DNA, 642 bp, synthetic construct
  misc_feature 1..642: note = Description of Artificial Sequence: Synthetic coding sequence
  source 1..642: mol_type = other DNA
taattccgggaaaataatttcgcctcaatgaagtctcagatggaactcagaattaaggatttagaaagcgagctcagtaagattaaaaccagccaggaagacttcaacaagaccgagcttgaaaaatacaaacagctttacctagaagagcttaaagtgcggaagagcctatcaagcaagctgacaaagacgaatgagcgcttagcagaagtgaacactaagctattagtggagaagcagcagagccggagcctcttcaccactctgaccacacggcccgtaatggaaccaccgtgcgtgggaaatttgaacaactcattggacctgaacagaaaactgatccctagagagaacctggtcataagcaccagtaacccccgtgcttctaataatagcatggagaactatctctcaaagatgcaacaagagcttgagaagaacatcaccagggagctgaaggaagctgctgccgaattagaatctggcagcatcgcctcacctctggggtccacagacgagtccaatcttaaccaggatttagtgtggaaggccagcagggaatacggccctagcgatgagacgccacacgactatgtgctgatgactgatcagtgcctgacaagcagaactgatctgcagtag

SEQ ID NO: 108301 - DNA, 3261 bp, synthetic construct
  misc_feature 1..3261: note = Description of Artificial Sequence: Synthetic coding sequence
  source 1..3261: mol_type = other DNA
atgtcacgtgtatgtattgtcgtgttggaggaggtagaggatgaaagtccagcgttcataagtaagctgcctcaagagaataagagcctccatagcccaccatccggcaatgttctcgtcagatacccaagcctggtccaggccatcttcaacggggatccggacgaggtgcgtgctctcatttttaaaaaggaagacgttaattttcaggacaacgagaaaagaacccctttacatgctgcagcatatctaggtgacgcggagatcatcgaattgctgatcctgagcggcgccagagttaatgcaaaggattcaaaatggttgacacccctccacagggccgtagcctcctgctcagaggaagccgtccaggtgctgctgaagcatagcgcggatgttaacgcccgcgataagaactggcagacgccgctgcacattgccgccgccaacaaagctgtgaaatgcgccgaagctcttgtccctctgctgtcaaatgtgaatgtatcagacagagccggcaggacggccctccaccacgccgccttcagcgggcacggcgaaatggtgaaacttctattgtctaggggagctaatattaacgcgtttgacaagaaggatcggagagccatccactgggcagcatacatgggccatattgaggtcgtgaagctcctggttagtcatggcgcagaagtcacttgcaaggataaaaagtcttatactcctctgcacgcggctgcgtctagcggtatgatctccgtggtgaaatatctccttgacctcggagttgatatgaatgaacctaatgcttatggtaataccccattacatgtggcgtgctataatggccaggacgtcgtcgtaaatgaattgattgattgtggcgccatcgtgaaccagaagaacgaaaaggggttcacgcctctgcattttgctgcagcctccacccatggggctctgtgcctcgagctgctcgtgggaaacggcgccgacgtgaacatgaagtccaaagatggcaaaactcccctacacatgaccgcactgcacggcaggttttccaggagccaaacaattatccaaagtggagcagtgatagactgtgaagacaaaaatggaaacacacccctgcatatcgccgctcggtacggacatgagttactgatcaacaccctcatcacttcgggagccgataccgcaaagcgggggatccacggcatgtttcctctgcacctagctgccctgtccgggtttagcgattgctgtcggaagctgttaagcagcggctttgacattgatacgccagatgacttcggccgcacctgtcttcatgcagccgctgcaggaggaaatctagagtgcctgaatctattgctcaacaccggggctgactttaacaaaaaagacaagtttgggaggtcacctttgcattatgccgccgcgaattgtaactatcagtgtctttttgcattggtcgggagtggcgctagcgttaatgacttggacgagcgaggttgcacacctctgcactatgcagccacctccgacaccgatggaaaatgcttagaataccttttacgcaacgacgctaacccaggcattagggataagcaaggttacaacgcagtccactatagtgcagcatacggccacagactgtgcctacagctcatcgcatcggagacccctttggacgtgctaatggagacatcgggtaccgacatgctgagcgatagcgacaatcgggctactatctctccactccacctggcagcataccatggccatcaccaggccctcgaggttctggtccagtctctgctggacctggacgtgagaaactcatcgggtcgcactcctttggatctggccgcctttaagggacatgtggagtgtgtggacgttctgatcaaccagggcgcctcaattctcgtaaaggattacatcctgaaacggacccctatccacgctgccgcaacgaacggacatagcgagtgcctgcgcctcctgattggcaatgcggagccccagaatgccgttgatatacaggatggaaacggtcagacccccctgatgctatctgtcctgaatggtcacacggattgcgtgtattctctcctcaacaaaggcgctaacgtcgatgcgaaggacaaatggggccggacagcacttcaccgtggagctgtcactggccacgaagaatgcgtcgacgccctgcttcagcatggcgctaagtgtcttttgcgagattctcgcggaagaacacccatccacctttccgccgcatgtggacacatcggagtactgggagccttgttacagagcgccgcaagcatggacgctaatcccgcaactgctgacaaccacggttacacagccctccactgggcttgctataacggtcatgagacctgtgtcgaattattactggagcaagaggtgtttcagaagactgaaggcaatgctttcagccccctgcactgcgcagtgatcaacgacaacgagggggctgccgagatgctaatcgatactctgggggcttcgattgtgaatgcgacagatagtaagggcaggacacccctgcatgccgcggcttttactgaccacgttgagtgtctgcagctactcctgtcccacaatgcgcaagtaaatagtgtcgacagtactggaaagaccccattgatgatggcagccgagaatggtcaaaccaacaccgtagagatgctagtgagttcagccagtgcagagctgaccctgcaggacaacagtaaaaacaccgcgctccatctcgcctgttccaagggacatgaaacttcggcacttctgatcctcgaaaagatcaccgacagaaatctcataaatgctacaaatgctgccctacaaacaccgctgcatgttgccgcacgtaacggcttgaccatggtggtccaggagctgcttgggaaaggcgcttcagttctggctgtggacgagaacggatatactccagcgctcgcttgcgcccccaataaggatgttgcagattgcctggccctgattctcgccacaatgatgccagtaagctcctcttcaccactttcctctctgacttttaacgccattaaccggtatacaaacacgtcaaagacagtttcctttgaagcacttcccattatgcggaacgagccttcaagttactgctcattcaacaacatcggaggagagcaggagtatctgtataccgatgtcgacgagctcaacgactccgactctgagacatactag

SEQ ID NO: 108302 - DNA, 3162 bp, synthetic construct
  misc_feature 1..3162: note = Description of Artificial Sequence: Synthetic coding sequence
  source 1..3162: mol_type = other DNA
atggcctttcttaagcttcgcgaccagcccagcctggtgcaggccatcttcaacggagaccccgatgaggtccgcgcactgattttcaagaaggaggatgtgaattttcaagataatgagaagcgtacccccctccacgccgcagcctacttgggcgacgctgagataattgaattgctcatcctctcaggcgcaagggtcaatgcaaaagattcaaaatggctcaccccccttcacagggctgtggcctcttgttcagaggaggcagtgcaggtcctgctgaagcactctgccgacgtgaatgcacgcgataaaaattggcagacccccttgcacatagccgctgccaataaagccgtgaagtgtgcagaagccctggttcccctgctgagtaacgttaatgtatctgatagggccggaaggactgccttgcaccacgccgcattttctggacatggagagatggtaaaattgctgctttctcgaggagctaacatcaatgcctttgacaagaaggatcgtcgcgctatccactgggccgcctatatggggcacattgaggtggtaaagctcctcgtatcccacggagcagaggtgacctgcaaggacaaaaagtcgtatactccactgcacgcggctgcaagttcggggatgatttctgtcgtcaaatatttgctggatctcggcgttgacatgaatgaacccaatgcctacgggaacacacccttgcatgtggcgtgttacaacggacaggatgtagtggttaatgagcttatcgactgtggggccatagtaaaccagaaaaacgaaaaaggattcacccctctccacttcgctgccgcgtccacgcatggggcgttgtgcctcgagctgttagtgggcaatggtgccgacgtgaatatgaagtctaaagatggcaagacccctctgcacatgaccgccctccacggaaggttctctagatcccaaactatcattcagtctggagcagtaatcgattgtgaggataagaacggaaatacccctctgcatatagccgcacgctatggacacgaactcttgataaacactctgattacaagtggagctgacactgccaagcggggaatccacggcatgttcccactgcacctagctgctctcagtggcttctccgactgttgccgtaagttgctaagtagtgggttcgacatcgatacccctgatgacttcgggcgcacgtgcctccatgccgccgccgccggtggaaacctggaatgcttaaatctgctgttgaataccggggcagatttcaataaaaaggataagttcggacgatctcccctacactacgcagccgccaattgcaattatcagtgtctgtttgccctggtgggtagcggtgccagcgtgaacgacctcgatgagcggggctgtactccgctccattacgccgccactagtgacactgatggcaaatgcctggagtacctgctgagaaatgacgccaaccccggcatacgagacaaacaaggctacaatgcagttcactattccgccgcctatggtcatcgcctctgcctgcaactaatagcatccgagactcccctggatgtgctcatggagacttccggaaccgacatgcttagcgacagcgacaacagagccaccatctccccactgcacctagctgcttaccatggacatcaccaggctctggaggtgctcgtgcagagcctactcgatctggacgtgcggaactcaagcggtagaacacctcttgatcttgctgcgttcaaagggcatgtcgagtgtgttgatgtgttaattaaccagggcgcaagtattctcgtgaaggattacatattaaaacgcacccccatccacgctgccgcaaccaatggacattccgaatgcttaagactcctcattggcaatgcagaaccacagaatgcagtggacattcaggacggcaacggccaaacgccactaatgctatctgttctgaatggccacaccgactgcgtgtattcactactgaataaaggcgcaaacgttgacgcaaaggataaatgggggcgaactgcgctgcatcgcggggccgtcactgggcatgaggagtgtgtagacgcgctcttgcagcatggtgctaagtgcttactgcgggatagtcgggggcggacacccatacatctgagcgctgcatgcgggcatattggtgtcctgggagcccttttgcagagcgcggcttcaatggacgcgaatccagctaccgctgacaaccatgggtacactgccctgcactgggcctgttacaatggccacgaaacttgcgtagagttgttgttggaacaggaggtatttcagaaaaccgaggggaacgccttctctccacttcattgcgcagtgataaatgacaacgagggcgcagctgagatgctgatcgatacgttgggcgcctctatagttaacgcaaccgattccaaaggcagaacccctctgcacgcagctgcgtttaccgaccacgtggagtgtctgcaactgcttctgtctcacaacgctcaggtcaacagtgtggactcaacaggcaaaactccgctgatgatggccgctgaaaatggccagaccaataccgtcgaaatgttggtctccagcgcaagcgctgagctcacacttcaggacaattccaagaacaccgcgctgcacttggcctgtagcaaaggtcatgaaacatccgcccttctgattctcgagaagatcaccgataggaatctgattaatgctacgaacgctgcattgcaaactcccctgcacgtcgcagcccgtaatggattgactatggtagtgcaggaactcctgggcaaaggggccagcgtattggcagtggatgagaatggttatacccccgcacttgcgtgtgcccccaacaaggatgtcgccgactgtctcgccctgattttggccaccatgatgcctgttagcagttcgagtcctctgagcagtttaacgtttaacgccattaatcgctatacgaacacttctaaaacagttagtttcgaggcccttccgatcatgaggaacgaaccttcatcatattgttccttcaacaacatcggaggcgagcaggagtatctttacaccgatgtcgatgaactaaatgactcggattctgagacctattag

SEQ ID NO: 108303 - DNA, 3162 bp, synthetic construct
  misc_feature 1..3162: note = Description of Artificial Sequence: Synthetic coding sequence
  source 1..3162: mol_type = other DNA
atggcattcttgaaattgcgggatcagccaagcctggtacaagctatctttaacggggatcctgatgaagtgcgggctctgattttcaaaaaggaggacgtgaactttcaggacaatgaaaaacgcacgcctctgcacgcggctgcttatctgggggacgcagagattatcgaactgctaatattgtctggtgcgcgggtcaacgccaaagacagcaagtggctgacgcctcttcatagggccgtggcttcttgctcagaggaggccgtccaagtgcttctaaagcacagcgcagacgttaacgctcgggataagaactggcaaacccctctgcacatcgcagcagccaacaaagccgtcaaatgcgctgaagcgctggtcccactactgtcaaatgtaaatgtaagcgatagagccgggaggacggcactgcatcacgcagcctttagcggtcatggggaaatggtcaagctgctcctgagtcgcggggccaatattaatgctttcgataagaaagacagacgggccatacattgggctgcatatatgggtcacattgaagtggttaaattgctggtcagtcacggtgctgaagttacttgcaaggacaagaagtcgtatactcccttacacgcagctgcttcctctgggatgatctccgtggtgaaatacctgctcgacttgggagtggatatgaatgagccgaatgcttacggcaatacccctctgcatgttgcctgctataacggccaggatgtagtggtgaacgaactgattgactgtggcgcaatcgtcaatcagaagaatgaaaagggctttacccctctgcacttcgccgcggcaagcacgcacggggcactgtgtttagaattactcgtcggcaacggggccgacgttaacatgaagtcaaaagatgggaagacaccccttcatatgacagcactacatggccgtttttcaagatcccagacaattattcagtccggagccgtgatcgattgcgaagataaaaatggcaacacccccctgcacattgctgccaggtatgggcacgagctgctgattaatacattaattacctctggtgccgatactgcgaagcgggggattcatgggatgttccctctgcatcttgctgcattgagcggcttcagcgactgctgtagaaaacttctgagctcgggattcgatattgatacgccagatgactttggaaggacttgcctgcacgcggccgctgctggcggaaacctcgaatgcttgaacctgcttctgaacaccggcgctgatttcaataagaaggacaaattcggcagatcgcccctgcattacgccgcagccaactgcaactaccagtgtctgtttgcgctcgtgggctctggagcctcagtcaacgatttggacgaaaggggatgcacacctttacactacgccgcgacttccgacaccgacggcaaatgcctcgaatacttgctgaggaatgatgcaaacccaggaatcagggataagcagggatataatgcagtccactacagcgccgcgtacggacaccggctctgccttcagctgatcgcatctgagacccctctcgatgtgctgatggagacctccggcacagacatgctgtccgattcagataaccgggccaccatatcacctctgcacctcgcagcctaccacggtcatcatcaggctctggaagtcctggttcaatcattgctcgatctagatgtgcgaaacagttccggtagaaccccccttgacctggcagccttcaagggtcacgttgagtgtgtggatgtgctaattaatcaaggcgcctctattctggtgaaggactatatcctaaagcgaacgcctatccacgccgctgccaccaacggccattcagagtgcctcagattgttaataggcaatgccgaacctcagaacgctgtcgacatccaggacggtaacgggcagacaccactaatgctctctgttctgaacgggcatacggactgcgtgtacagtttgctgaacaaaggtgctaacgtagacgcgaaagataagtgggggcggactgcgttacaccgcggggcggtcacagggcacgaagagtgcgtggacgctttgctgcagcacggagccaagtgccttctgcgggacagcagagggcggaccccgattcacttatcagcagcatgcggccacattggagtgctgggagcactgctgcagagcgccgcatccatggatgccaatcccgcaacagcagacaaccatgggtataccgctttgcattgggcttgctataatggtcacgagacctgtgtggaactgctgttggagcaggaagtgttccagaagactgagggaaacgccttttctccgttacactgtgcagtgatcaatgacaacgagggtgccgccgagatgctaattgacactctgggggcgtctatcgtgaatgcgactgacagtaagggccgaactcctcttcacgccgccgcttttaccgaccacgtcgaatgcttgcaactcctgttaagtcacaacgctcaggttaacagcgtggactccactgggaaaacacctctcatgatggctgcagagaatggacagacaaacaccgtggaaatgctggtgtcttccgcgtctgcggaattaactctccaggataattccaaaaacactgcgctccatctggcatgctctaagggccatgagacctctgcactcttaatcctggagaagatcactgatcgtaacctaatcaatgccacaaatgcagccctccagacacccctgcatgtggcagcccgtaacggcctcactatggtggtccaggagttgctcggcaaaggtgccagcgttctggctgtggatgagaacggctatactcctgccctcgcatgtgctcccaacaaggacgtagctgactgcctggcccttatacttgccacaatgatgccagtgtcatcgagctctcctctctcctccctgacttttaatgccattaacagatatactaacaccagcaagactgtatccttcgaggccctaccaatcatgcgcaatgaacctagtagctactgttcatttaataacataggaggagagcaagaatatctgtacaccgacgtggacgagctgaatgactccgactctgaaacttattag

SEQ ID NO: 108304 - DNA, 4026 bp, synthetic construct
  misc_feature 1..4026: note = Description of Artificial Sequence: Synthetic coding sequence
  source 1..4026: mol_type = other DNA
atgaccaagcgcaagaagacgataaacttgaacattcaggatgcacagaagcgaaccgccttgcattgggcctgtgtcaatgggcacgaggaagtagtgaccttcctggtagaccggaagtgccaactagatgtgcttgacggcgagcaccgcacaccgctgatgaaggcactgcagtgccaccaggaagcctgtgcaaacatactcatagacagcggagccgacataaacctcgtggatgtttatgggaacacggccctccattacgccgtgtactcggagattctttccgtggttgccaagctgctttcacacggggccgtaatcgaagtccacaataaggccagtttgacacctctccttcttagcatcacgaagaggagcgagcagatcgtcgagttcctcctgattaaaaatgccaatgctaacgcagtgaacaaatataaatgtaccgccctgatgctggctgtatgccatgggtcctctgagatcgtggggatgctcctgcaacagaatgtggacgtcttcgccgcagacatatgcggggtgactgccgaacattatgcagtgacatgcgggttccaccacattcacgagcaaatcatggaatacatccggaagcttagcaaaaaccatcagaacacgaaccccgagggaacttctgcaggcaccccagatgaagccgcccccctcgccgagaggactcctgatacagctgaatcactggtggagaagacacccgatgaagccgcaccgctcgtggagcgtaccccagatactgcagagtctctcgttgaaaagacgccagatgaagccgcatcactcgtcgagggaacgagtgataaaattcagtgcttggagaaggcgacaagcggtaagttcgagcaatccgccgaggaaacccctcgtgagataacaagtccagctaaggagacgagcgaaaagtttacctggcccgcgaaagggcgcccacggaagatcgcttgggagaaaaaagaggatacacctcgagaaatcatgtcacccgctaaggagactagcgagaagttcacatgggccgccaagggtagacccaggaaaattgcttgggagaaaaaggaaacgccagtaaagacaggctgtgttgccagagtcacgagtaacaaaacgaaagtgctggaaaagggcaggagcaaaatgatcgcatgtcccaccaaggagtccagtactaaggcatccgctaacgatcagaggttcccctcagaaagcaagcaggaggaggatgaggaatattcctgcgattcccgctcattattcgagtccagtgcgaaaatccaggtctgcatacccgagagcatttatcagaaggtgatggaaattaatagggaggtggaagaacctcccaagaagccctccgccttcaaaccagctattgagatgcaaaacagcgttccaaacaaagcctttgaactgaaaaacgagcagacacttagagccgacccaatgtttccaccagagtccaaacagaaggattacgaagaaaattcatgggactcagaaagtctgtgcgagacagtatcacagaaagacgtttgccttcctaaggctacacaccagaaggaaatcgacaagataaatggcaaactcgaggaaagcccgaacaaggacggcctcctcaaagccacctgcggtatgaaagttagcatcccaactaaagcccttgaactcaaagatatgcagacgttcaaggcagaaccacctggcaaaccttcagcgtttgaacccgccacagaaatgcagaagagtgtgccgaacaaagcactggaactgaaaaatgagcagactctgcgcgctgacgagatcctaccttctgagtctaaacaaaaggactacgaagagaacagctgggataccgaatctctctgtgaaacagtctcccagaaagacgtgtgcctgccaaaggcggcccaccaaaaagaaattgataaaattaatggaaagctggagggctcccccgtgaaggacgggttgctgaaggcgaattgtggaatgaaggtctcaattccaaccaaggcactggaactgatggacatgcagaccttcaaggcggagcccccagagaagccttccgcctttgaacccgccatagaaatgcagaaaagcgtcccgaacaaggctctcgaactcaaaaacgagcagacccttcgggcggacgagattctgccctccgaatcaaaacaaaaggactatgaggagtcctcttgggactctgagagtctgtgcgagaccgtgagtcagaaagatgtttgtctcccaaaggcgactcaccaaaaagaaattgataagattaacggaaagctggaggaatcacctgataatgacgggttcctgaaggcaccatgccgaatgaaggtgtccattccaacgaaagcattggaactgatggacatgcagacttttaaagccgagcccccggaaaaaccatccgcatttgagccggcaatcgagatgcagaaaagcgtgcctaacaaggcccttgaactgaagaacgaacagacactgagggccgaccaaatgtttccaagcgagtctaaacaaaagaaggtggaggaaaactcctgggacagcgagtccttgagggaaaccgtgagtcagaaggatgtctgtgtgcccaaagcgactcaccagaaggagatggataagattagtgggaaactggaagactcaacaagtctatcgaaaatactcgatactgtgcatagctgtgagcgcgcccgggaactgcaaaaggaccactgtgagcagcgaaccgggaaaatggaacagatgaagaagaaattttgcgtgctcaaaaaaaagctgagtgaagcaaaggagatcaaaagccaactggagaaccagaaagtgaagtgggagcaagaactgtgttccgtgagactgacgttaaatcaggaagaagagaaaaggagaaacgccgatatattgaatgagaagatccgcgaggagttgggtcggattgaggagcagcacagaaaggaattggaagtgaagcaacagctcgaacaagctctcaggattcaagacattgaactgaaaagcgttgaatccaatcttaatcaggttagccatacccatgagaatgagaactacttactgcacgagaactgtatgcttaaaaaagaaatcgctatgctcaaactggagatcgccaccctcaaacaccagtaccaggagaaagaaaataagtacttcgaggatataaaaatactcaaggagaaaaacgcagagctccaaatgacactgaagcttaaagaggaaagtttgacaaaacgggcctcgcagtacagtggccagctcaaagtccttatcgcggaaaatacaatgctcacctccaagctgaaggaaaagcaagacaaagagatcttagaggcggagatcgaatcacaccatcccaggttagccagtgccgtgcaggatcatgaccagattgtcacttctagaaaaagccaggagcctgcctttcacattgccggcgatgcttgcttgcagcgcaaaatgaacgtcgacgtttccagtaccatatataacaacgaggtcctccaccagccacttagtgaggctcagcggaagtcgaagtccctgaaaatcaatctgaactacgccggagacgccctcagggagaacacgctggtgagcgaacacgctcagagagaccagagagagacgcagtgtcaaatgaaagaggccgagcatatgtatcagaatgagcaggacaacgtcaacaaacataccgagcaacaggaaagtcttgaccagaagctgttccagctgcaaagtaagaacatgtggctccagcagcagctagtgcacgcccataagaaggccgacaataagagcaaaattacgatagatatacactttctggagcgtaagatgcagcatcatctcctgaaagaaaagaatgaggagatcttcaactacaataatcaccttaagaacaggatctaccagtacgaaaaggaaaaagctgaaacagagaattcttag

SEQ ID NO: 108305 - DNA, 360 bp, synthetic construct
  misc_feature 1..360: note = Description of Artificial Sequence: Synthetic coding sequence
  source 1..360: mol_type = other DNA
atgggtacacgcacattgcagtttgagatctccgattctcatgagaaggaagaggaccttctgcataagaaccatcttatgcaagacgagatagccagactccggctggaaatccacaccataaaaaatcagatcttggaaaagaagtacctgaaagatatagaaattattaagagaaagcatgaggacctgcagaaagccctaaaacagaacggtgaaaaatccaccaagacaattgcacattactccgggcagcttacagcgctgacagatgagaatacaatgttgcgctccaagctggagaaagaaaaacagagtcgtcagagactcacgaaatggaatcacacgattgtcgattag

SEQ ID NO: 108306 - DNA, 759 bp, synthetic construct
  misc_feature 1..759: note = Description of Artificial Sequence: Synthetic coding sequence
  source 1..759: mol_type = other DNA
atgtcacaggcggctaaagcctccgccagcgccactgtggcagtcaacccaggtccggatactaaggggaagggagcaccccccgctgggacaagtccgtccccagggaccaccctcgctccaacgacagtcccaatcacctctgccaaagcagcagagctccctccgggcaattatcgactggtggtttttgaattggaaaacttccagggacggcgcgccgagttcagtggcgaatgctccaaccttgccgacagggggttcgatagagtccgtagtataattgtctctgcaggcccctgggtcgctttcgaacagtctaacttccgcggtgagatgttcattcttgaaaagggggagtatcctcgctggaacacttggagcagcagctacaggagtgacaggctcatgtcattcagacccattaagatggacgcacaggagcacaagatctccctgttcgaaggcgctaacttcaagggaaatacgatagagatacaaggcgatgatgctcctagtctctgggtttacggtttctccgatcgggtcggctccgtcaaagtcagctcgggtacctgggtgggctatcagtatccgggctaccggggatatcaatatctgctcgagccgggcgattttaggcactggaatgaatggggagcgtttcagcctcaaatgcagagcctgcgcagactgagggacaagcagtggcacctcgaggggagctttccagtcttagccaccgagccccccaaatag

SEQ ID NO: 108307 - DNA, 627 bp, synthetic construct
  misc_feature 1..627: note = Description of Artificial Sequence: Synthetic coding sequence
  source 1..627: mol_type = other DNA
tgacgggacgaactacgctgcaagatcccagcgggaaggctgagacgcgctgccaggcctcatagaagactcggtccgaccggtaaggaagtccatgccctcaaacgattacgggacagtgccaacgccaatgacgtcgaaactgtgcagcagctgctcgaggacggcgccgacccgtgcgctgcagacgacaagggccggaccgcacttcattttgcctcttgcaacgggaacgatcaaatcgtacagttgcttcttgaccatggggccgatccaaatcagcgtgacggattgggcaacacacccctgcacctcgagtgctccccccaactcgtgcccgccggagcccgtgttgacgccctagatagggccgggaggacacctttacaccttgccaagagtaagctgaatattttacaggaaggccatgcccagtgcctggaagcagtgcggctggaggtcaaacagatcatccatatgcttagggagtatctggagaggttgggccagcacgagcagagagaacgcttggacgacctgtgcactaggctccagatgacatctacaaaagagcaggtggacgaggtaactgacttacttgctagttttacctcgctgtcactctag

SEQ ID NO: 108308 - DNA, 2184 bp, synthetic construct
  misc_feature 1..2184: note = Description of Artificial Sequence: Synthetic coding sequence
  source 1..2184: mol_type = other DNA
atgtcccaacaggatgctgtggctgctctgtcagagcgactcctggtggccgcttataagggtcagacggagaacgtggtgcagctcatcaacaagggagccagagtagccgtgaccaaacatggaagaacccccctgcaccttgctgccaacaagggacacctgcccgtggtgcagattctgttgaaagctggctgtgacttggacgtgcaggacgatggtgaccagactgccctgcaccgagctacagtagtcggaaatactgagatcatcgccgcactgatccatgaagggtgtgccctcgacaggcaggataaggacgggaataccgcactccacgaagccagctggcacggattctcccagtcagcaaagctcctgattaaggccggggcaaacgtgctcgccaaaaataaggctggtaacacagcgctccatctggcctgtcagaactcccattcacagtcaacccgtgtgttacttctggcggggtcccgggccgacctcaaaaacaatgccggagatacctgtctgcacgtcgctgcccgatataatcacctttcaatcatccgtctgctgctcaccgcattttgttccgttcacgagaagaaccaagccggagacaccgctctgcacgtcgcagccgcccttaaccacaagaaggtagcaaagatcctgctagaagctggagccgacactacaatcgttaacaacgctggccagacccccctggagaccgcacgctaccataataaccccgaagtggccctgctgctcacaaaggcaccccaggttctgaggttcagcagggggcggagccttagaaaaaaacgggaaaggctgaaagaggaacgccgcgcacagtccgtcccacgggatgaagtcgcccagtctaagggaagtgtgtccgccggcgatacaccttcatcagagcaagctgtggccagaaaggaagaggcaagggaggagttcctgtcggcatcccccgagcccagagccaaagatgacagacggcggaaatctcgacccaaggtctcagcgttcagtgaccccacaccaccagccgatcaacaacccgggcatcagaaaaacctacacgcccacaatcatccgaaaaaaagaaacaggcataggtgcagttctccacccccccctcacgagttccgtgcttaccagctgtatactctttaccgcggcaaggatgggaaagttatgcaggctcccataaacggatgcaggtgtgagcctctaattaataaactggaaaaccagcttgaggccaccgtcgaggagattaaggctgagttgggctctgtacaggataagatgaatactaagttgggacagatggaaaataagactcagcatcaaatgagagtgcttgacaaactcatggttgagcggctctccgccgaaaggactgaatgcctcaacagactgcaacagcactccgatacagaaaagcacgagggcgaaaagcgccagattagcctcgtcgatgagctgaagacgtggtgtatgctgaaaattcagaacttggagcagaaactgagcggcgacagtcgggcatgtcgggccaaaagcactccatctacctgtgagtcctccactggagtggaccagctggtagtgactgccggcccggctgccgctagcgactcatcaccccctgtcgttagacctaaggagaaggctctcaattccaccgcaacacagcgattgcagcaggaactgtccagctcagattgtaccggctcacgcctacgcaatgtgaaggtgcagacggccctgctccccatgaatgaagccgctaggtctgaccagcaggcagggccctgcgtgaaccgcggaactcagactaagaagtccggtaaatccggaccgacccgccatcgggctcagcaacccgccgcatcgtcaacatgcggtcagccccctcccgccaccggcagcgagcaaacaggcccccacattcgggatacaagccaggcattagaactgactcagtatttctttgaagctgtttcaacccagatggagaagtggtatgaacgaaaaattgaagaggcccggtcccaggctaaccagaaagcacagcaagataaggcaaccctgaaagagcatatcaaaagcctggaggaggagctggcgaaattaaggactagagtgcagaaggaaaactag

SEQ ID NO: 108309 - DNA, 2079 bp, synthetic construct
  misc_feature 1..2079: note = Description of Artificial Sequence: Synthetic coding sequence
  source 1..2079: mol_type = other DNA
atgtcccagcaggatgccgttgcagcgctcagtgaacgcctcttggtggctgcttacaagggccagactgaaaatgtggttcagctcatcaacaagggcgcacgggtggcggtcaccaaacacggacgaaccccattgcacctggctgcgaacaagggccatctgcccgttgtacagatcctcctcaaagcaggctgcgacctggatgtccaggacgacggggaccagaccgctttacaccgggcgactgttgtgggtaatacagagatcatagctgccctcatccatgaagggtgtgcacttgataggcaggataaggacggaaataccgctttgcacgaggccagttggcacggatttagtcagtctgctaaattactgataaaagccggcgcgaatgtgctggccaagaacaaagccggcaacacagctttgcatcttgcatgtcaaaactcgcacagccagtctacaagggtcctccttctggccgggagccgggccgatctaaagaacaatgctggtgacacatgcctccatgtagctgcccggtataaccacctctcaattattaggctcctgctgactgctttttgttccgtgcacgaaaagaaccaggcaggggacacagcactgcacgtggcagccgcactgaatcataagaaggtggccaagatcctgctcgaggctggagcagacaccaccattgtgaataacgccggccaaaccccgctcgagactgcgcgataccataataaccctgaagtggccctcctactcactaaagccccccaggggtctgtgtcagctggcgacacaccatccagtgagcaagcagtcgcccggaaggaagaagcccgagaggaatttttgtctgccagcccggagccgagagctaaggacgatcgccgaaggaaatctaggcctaaagtgagtgcgttctccgacccaactccccccgccgatcagcaacccgggcatcagaagaacttgcacgcacataatcatccaaagaaacgcaatcggcaccgatgcagcagtccgccacctccacacgagtttagggcctatcagctgtatacactctatagagggaaggacggcaaagtcatgcaggctccaattaacggctgtcgttgcgagcctttgatcaacaagttggagaaccagcttgaggcaactgtggaggagattaaagccgaactaggatcggtgcaggataagatgaacactaaactcgggcagatggaaaacaagactcagcaccagatgcgagtgttagacaaattgatggtggagagactgtcagctgaacgcaccgagtgcctgaatagactccagcagcactccgacactgaaaaacacgaaggcgagaaaagacagatatcgctggtagatgaattgaaaacctggtgtatgctcaagattcagaacctagagcagaagttatcgggggatagtagagcttgcagggccaagtccacaccctctacatgtgagtcaagcaccggcgtcgatcagctcgtggtgacagccggccccgctgctgcaagtgactcaagcccccccgttgtgcggcccaaggaaaaggctttgaactccaccgccacccaaaggttgcagcaagagcttagtagctccgattgcactgggtcaagacttagaaatgtgaaagtacagaccgctctactgccgatgaacgaagcagcaaggtcagatcaacaggccgggccgtgtgtaaataggggtacccagaccaaaaaatcaggcaaatccggcccaactagacatcgagctcagcagcccgccgccagttctacctgtgggcagccacctccagcaacgggatccgagcagaccgggccacacattagggacaccagccaagccctcgagttaactcaatacttttttgaggccgtgtcaacacagatggagaagtggtatgaaagaaagattgaggaagccagatcccaggctaatcagaaggctcagcaagataaggccacgcttaaagagcacataaagtctttagaagaggagctcgctaagctgcggacaagggttcagaaagagaattag

SEQ ID NO: 108310 - DNA, 2169 bp, synthetic construct
  misc_feature 1..2169: note = Description of Artificial Sequence: Synthetic coding sequence
  source 1..2169: mol_type = other DNA
atgagccagcaggatgctgtggctgccctgtctgagaggctcctcgtagccgcctacaaaggccagaccgagaacgtggtgcagctgatcaacaagggcgcaagagtggccgttacaaagcatggcaggacccccctgcatcttgcagcaaacaagggacacctgcccgtcgtgcagatactactgaaggctggatgcgatctggatgttcaggacgatggagaccagaccgcactccaccgggctaccgtggtcgggaatacagagattattgctgctttgatccatgaggggtgcgccctcgacagacaggacaaagatggtaacacagctctgcatgaggcaagttggcacggcttctcacaatccgctaagctgcttatcaaagctggggcaaacgttctagctaagaacaaagcaggaaacactgccctacacctcgcgtgccagaattctcattcccagagtacgcgcgtgctcctcctggccggcagtagggccgatctgaagaacaacgccggagacacttgcctccacgtagctgccaggtacaaccacctcagcattattcggctcttattgactgccttctgcagtgtgcatgaaaaaaaccaggctggcgataccgctctgcacgtggcagccgctctgaaccacaaaaaggtcgccaagatcttgctcgaggcgggggctgacaccaccatagtgaacaatgctggccaaacccctcttgagacagcccgctatcacaacaatccagaggtagccttactgctgacaaaagcaccccaggtgctgcggttctccagaggtagaagcctgcggaagaagcgagaaagactgaaagaggagcggcgcgcacaatcagtcccaagggatgaagttgcccagtccaagggctcagtgtctgccggcgacacaccatcttccgaacaggcagtggcaagaaaagaagaggctcgggaagagttcctcagcgcctccccggagcccagagccaaggacgaccggagacgcaaaagtaggcctaaggtttccgctttctccgatcctacccctcctgcagaccagcagccgggccaccaaaagaacctgcacgctcataatcacccgaagaagcggaatagacaccgctgttcctcccccccccctccacacgagttcagggcataccagttgtataccctgtaccgcggaaaggatgggaaggtcatgcaggctccgatcaacggctgtagatgcgaaccccttatcaacaaactggagaaccaactcgaagcaacggttgaagaaataaaggccgagctgggctcggtacaagacaaaatgaatactaaactcggacaaatggagaacaagacccagcatcagatgcgcgtgctcgataagcttatggtagagcgcctgagtgccgagaggacagaatgtctgaatagactgcaacagcacagtgataccgaaaaacacgagggcgagaaaaggcaaatcagtctggtcgacgaactgaagacgtggtgcatgctaaaaatccagaacttggaacaaaaactgtcaggggacagtagagcgtgcagagccaagagtacaccctccacatgcgttgatcagctggttgtgactgcagggcccgccgccgcctcagactctagcccacccgttgtcagaccaaaagaaaaggccctgaatagcaccgccacccaacgccttcaacaggagctgtcgagcagtgattgcactggctctcggctgcgcaatgtgaaggttcagacagccctgctgcccatgaacgaagctgcacgaagcgaccagcaggccgggccgtgcgttaatcggggaacacagacgaaaaaatcgggtaaatctggtcctactaggcacagggcccagcagccggcggcctcatctacatgcggacagcccccaccagccacaggatccgaacaaacgggcccccacattcgcgacacctcgcaggcactggagctgacacaatacttttttgaagcagtctcgacccagatggaaaaatggtacgagcggaagatcgaggaagccaggagtcaggcaaatcagaaggcccagcaagacaaagccacgctcaaggagcatatcaaatctctggaggaagagctggctaagctgagaacacgtgtgcagaaggagaattag

SEQ ID NO: 108311 - DNA, 528 bp, synthetic construct
  misc_feature 1..528: note = Description of Artificial Sequence: Synthetic coding sequence
  source 1..528: mol_type = other DNA
atgtcacagcaggacgccgtggcggctcttagtgaaagacttttggtggccgcttacaagggccaaacagagaatgtggtccagctgatcaacaaaggtgctagagtcgctgtcaccaaacacggcaggacacccctgcatctcgcagccaacaagggacacctccctgtggttcagatcttgctgaaggctggttgcgatctcgatgtgcaggacgacggagatcaaactgctctgcacagagctacagttgtgggcaatacagaaattattgcagcccttattcacgagggctgtgccctagaccgccaggacaaagacggtaatacggcactgcacgaagcatcttggcatggattttctcagtccgccaaactgctgataaaagcaggagcaaatgtgttagcaaaaaacaaagccggaaatacagccctccatctggcctgccagaattcacactcccagtcaactcgggtgctcttactggctggttcccgcgccgacttaaagaacaatgccggtgattag

SEQ ID NO: 108312 - DNA, 243 bp, synthetic construct
  misc_feature 1..243: note = Description of Artificial Sequence: Synthetic coding sequence
  source 1..243: mol_type = other DNA
atgagtcagcaagatgccgtggctgctctgtcagaacggctattagtggcagcctacaagggccaaaccgagaatgtagtgcagttgatcaataagggtgcccgcgtagctgtcaccaaacacgggcgtactccactgcatcttgctgcgaacaaggggcacttacccgtggtacagatactcctcaaggccgggtgcgatctcgacgtccaggatgatggcgaccagacagccctgcactag

SEQ ID NO: 108313 - DNA, 2184 bp, synthetic construct
  misc_feature 1..2184: note = Description of Artificial Sequence: Synthetic coding sequence
  source 1..2184: mol_type = other DNA
atgagccagcaggacgccgtcgcagcccttagtgagaggctgcttgtagccgcctataaagggcaaaccgaaaacgttgtccagcttatcaataagggtgcacgtgtcgccgtcactaagcacggtcggacccccttgcacttagctgccaataagggacaccttcctgtggtgcagatcctattaaaggccggctgcgacctagatgtgcaggatgatggtgaccaaaccgcccttcaccgtgcgactgtcgttggcaatactgaaatcatcgccgctcttattcacgaagggtgcgcactcgatagacaggataaggatggcaatacagctctacacgaagcatcctggcacggctttagccagtcagccaagctcctgatcaaggctggggccaatgttctggctaaaaacaaagccggcaataccgctctgcacctcgcctgtcagaatagccactcccaaagtactcgggtcttgttactggctggaagccgggccgatctaaagaacaacgctggcgacacctgtctccatgttgcagcccgatacaaccatctgtccattattcggttgctgttgaccgccttctgctctgtgcatgagaaaaaccaggctggggacacagcactgcatgtggctgccgcattgaatcataagaaggtagcgaagatcctgctggaggcaggagccgataccactatcgtgaataacgccggccagacaccgcttgagacagctaggtatcataataatcccgaagtcgcactcctgctgaccaaagcccctcaggtgttgaggttttcaaggggcagatcactgcgcaaaaagcgggagcggctcaaggaggaacgcagggcccagtccgttccaagggacgaggtcgctcagtcaaagggatcagtgtctgcgggggatacccccagctcagagcaggctgtggcaagaaaagaggaggcccgggaagagttcttgtccgcatctcctgagcccagagctaaggacgaccgcaggcggaaaagtcgccccaaagtatctgccttctccgaccccacgcctccagctgaccaacagcccggtcaccagaaaaatctccacgcgcataaccatccaaagaagagaaacagacacaggtgcagctctccccccccccctcacgaattccgcgcttatcaactgtacaccctctatcgcgggaaggatggaaaagttatgcaggcgcccatcaacgggtgccgctgcgaacctcttataaataaattggagaatcagctggaggcgacagtcgaggaaatcaaggccgaactaggctcagtacaggacaaaatgaatacaaagctgggtcagatggaaaacaaaacccagcatcagatgcgggtgctcgacaagctaatggttgaaagactgtcagccgaaagaaccgagtgcctgaacaggctacaacagcactccgatactgagaagcacgaaggggaaaaaagacagatcagcctcgtcgacgagctgaaaacatggtgcatgctcaaaattcaaaacctcgagcagaaactctctggcgatagtagagcctgccgggccaagagcaccccctcaacctgtgagtcaagcacgggcgtggaccaactggtagtaaccgccggacctgcggccgcatcggacagttctcctcccgttgtgagacccaaagagaaagccttaaattcgacagctacccagcgtctgcagcaggaattgtcgagttccgactgcacaggaagccgcctgcgaaatgttaaagtgcagactgcactcctgccaatgaacgaggcagcgcgttcggaccaacaggccggaccgtgcgtaaatcgaggaactcagacaaagaaatcaggtaagagcgggcctactcgacacagggcccagcagcccgctgcttcgagcacatgcgggcaaccccctccagcaactggcagtgagcagactggcccacacattcgggacacgtcccaagctctcgaattaacacagtatttcttcgaggcagtgagcacgcagatggagaagtggtacgaacggaaaatcgaagaggcccgaagccaggccaatcagaaggcgcagcaggacaaggctacactcaaagaacatattaagagcctggaagaagaactcgccaagcttcggacacgcgtgcagaaagagaactag

SEQ ID NO: 108314 - DNA, 357 bp, synthetic construct
  misc_feature 1..357: note = Description of Artificial Sequence: Synthetic coding sequence
  source 1..357: mol_type = other DNA
atgtcacagcaggatgctgtcgcagcgctcagcgaaagactcctggtggcagcgtataaaggccaaaccgagaatgtggtgcaactgattaataagggcgcgcgtgtcgcagtgacaaagcatgggcgtacgcccctgcatcttgctgcaaataaaggccacctgcccgtcgtccagatcctgctcaaagccggctgcgatctggatgtccaagatgatggagaccagaccgccctgcatagggccacagtagttggaaataccgaaataatcgccgccctcattcacgagggctgtgctctggataggcaggataaagatggcaatacagcgttgcatgaagcttcctggcactag

SEQ ID NO: 108315 - DNA, 309 bp, synthetic construct
  misc_feature 1..309: note = Description of Artificial Sequence: Synthetic coding sequence
  source 1..309: mol_type = other DNA
atgtcccaacaggacgccgtagcagcattgagtgaacgcttgctagtcgctgcatataaggggcagactgaaaatgtggtgcaactcataaataagggggcgagagtggcagttaccaagcatggaagaactccactgcaccttgccgccaacaaaggccatttgccggtggtgcagattttattgaaggcaggttgtgatctggacgtgcaggatgacggtgaccagacagccctgcaccgcgccacagtggttggtaatactgagatcatcgccgctctgatccatgagggttgtgccctggactag

SEQ ID NO: 108316 - DNA, 1992 bp, synthetic construct
  misc_feature 1..1992: note = Description of Artificial Sequence: Synthetic coding sequence
  source 1..1992: mol_type = other DNA
atgagccagcaggatgctgtcgcagctctgtcagagaggttattagtcgctgcttacaaaggccagacagagaatgtcgtgcaattgataaacaagggtgcccgcgttgccgtcacaaagcacggcagaaccccactgcatctggctgccaataagggacacttacccgtcgtccagatcttactcaaggcgggttgtgacctcgacgttcaggatgatggggaccaaaccgccctccatcgcgccactgtggtcggcaatacggagatcatcgctgctttaatccacgagggctgcgctctggatcggcaggacaaagcaggaaacaccgcgttgcatctcgcctgccagaattcacacagccagtcaacccgcgtgcttctgttagctgggtccagggcagatctaaagaataacgcaggagacacttgtctccatgttgccgcccgctataatcacttgtcgatcatcaggttgcttctcaccgcattctgctcagtgcatgagaaaaaccaggccggtgatacagctttacatgtcgctgctgctctcaaccacaagaaggttgcaaaaatcttacttgaagcaggagcagatacaacaatcgttaataacgtgcttcggttttcccgagggaggagcttacgaaaaaagcgcgagcgcctcaaggaagagcggcgagcccagtcggtgcccagagatgaggtggctcagtccaaggggtctgtttccgcaggcgacacaccatctagtgagcaagccgttgccaggaaggaggaggcccgtgaagaattcctgagcgcgtctccggagcctcgggccaaggacgatcggaggagaaaatccaggcccaaagtgtctgcattcagtgatccaacaccacctgctgatcaacagcctgggcatcagaagaaccttcacgctcataatcatcctaaaaagagaaatcgacataggtgctcttcccctcccccgccacatgagttccgggcctaccagctatacactctttaccgcggaaaggacggtaaagtcatgcaggccccaattaatggctgccgctgtgagcccctcatcaacaaactggagaaccaacttgaggccactgtggaagagatcaaagccgaactgggctccgtccaggataagatgaacacaaaactgggtcagatggagaataaaactcagcaccagatgcgggtgctggacaagctcatggttgagaggttaagcgccgagagaaccgagtgcttgaatcgtcttcagcagcattctgacaccgaaaagcatgagggcgaaaagcgccaaataagcctggtggacgagctgaagacctggtgcatgttaaaaattcagaacctagagcagaagcttagcggtgacagtcgcgcctgtcgagcaaagtctaccccctcaacctgcgttgatcagctggtggtcaccgcggggcccgctgcagcttccgacagcagtcccccagttgtgcgccccaaagagaaagccttgaacagtacagctactcagagacttcagcaggaactcagctcttccgactgcaccggaagccgcctgagaaacgtgaaggtccaaaccgcacttctgcccatgaatgaggctgcccgctcagaccagcaggccggcccctgcgttaatagaggcactcagacaaaaaaatctggtaagtctggccccacccgccacagggcccaacagcccgcagcgtctagcacgtgcgggcaacctcctccagccaccgggtccgagcaaacaggcccgcacatcagagataccagtcaagccctggagctgacacagtatttcttcgaggccgtgagtactcagatggagaaatggtacgaaagaaagattgaggaagccagaagtcaagctaatcagaaagcacagcaagacaaggccacgctgaaggagcatattaagagcctggaggaggaattggcaaagcttaggaccagagtgcaaaaggagaattag

SEQ ID NO: 108317 - DNA, 765 bp, synthetic construct
  misc_feature 1..765: note = Description of Artificial Sequence: Synthetic coding sequence
  source 1..765: mol_type = other DNA
atgaataaacttttttcattttggaagcgcaagaatgagactagatcccagggatacaatctgagagagaaggacctgaaaaagctgcatagagctgcctctgtgggcgatttgaaaaagcttaaagagtatcttcagataaagaagtacgacgtgaacatgcaggataaaaaataccgtacccccctgcatctggcctgtgctaacggccacaccgacgtcgtcttgtttctcatcgagcaacaatgtaagattaacgtacgcgattccgagaacaaaagtccgctgattaaggccgttcaatgccaaaatgaggattgcgcgaccattctcctcaacttcggggctgatcccgacttgcgggatatacggtataatacagtgttgcactatgctgtctgtggccagagtctaagtctagttgaaaagttactcgaatacgaggctgacttggaagccaaaaacaaagacgggtacaccccactcttggtagctgttatcaacaacaatccaaagatggtgaaatttctactggagaaaggcgcggacgtcaacgcctccgacaactaccagaggaccgcgctgattctggccgtgagcggagagcccccatgtctggtgaaattactgcttcagcagggtgtggagttgtgttacgagggaatcgtagacagtcagcttagaaatatgtttattagcatggtactgctgcatcgctatccccagtttaccgctagtcacggcaaaaagaagcacgccaagtag

SEQ ID NO: 108318 - DNA, 825 bp, synthetic construct
  misc_feature 1..825: note = Description of Artificial Sequence: Synthetic coding sequence
  source 1..825: mol_type = other DNA
atgaacaagctgttcagtttctggaaaaggaagaacgaaacacgctctcagggctataatctccgggagaaggacctcaagaaactccaccgggcagcttcggttggcgaccttaaaaaattgaaggaatatctccaaataaagaagtacgatgtgaatatgcaggataagaagtattcagtcgtgcagtcttctaggtggcttttaagttacacaacccctctcaatgactttataaggactccactgcatctggcatgcgccaatgggcatacagacgtagtgctgttcctgattgagcagcagtgcaagatcaatgtccgcgatagcgaaaacaaatcccctctcatcaaagccgtgcagtgccaaaacgaagattgcgccacgattctcttgaactttggagcagaccctgatcttcgcgacatcaggtacaacacagttctccattatgcagtttgcggacaatccttatccttggttgagaaactcttagagtacgaagctgacctggaggctaagaacaaggacggctacacccctctgcttgtggccgtaataaataataaccccaagatggtcaaattcctgcttgaaaaaggtgcggatgtgaatgctagcgataactatcagagaaccgctctcattctcgccgttagtggcgagcccccttgtttagttaagcttttgctacagcaaggggtggaattatgctacgaaggcattgtggactctcaactgagaaatatgtttattagcatggtgctgctgcatcgttatccacagttcacagcgtctcacggcaaaaaaaagcacgccaaatag

SEQ ID NO: 108319 - DNA, 606 bp, synthetic construct
  misc_feature 1..606: note = Description of Artificial Sequence: Synthetic coding sequence
  source 1..606: mol_type = other DNA
atgcaggacaagaaatacagaacccctctgcacctggcatgtgctaatgggcacaccgacgtggtcctattcctcatcgaacagcaatgtaaaatcaatgtcagggactccgaaaataagtctcctctgatcaaggccgtgcagtgccagaatgaagactgcgcaaccattctcctgaacttcggagccgatcccgacttgcgcgacataagatacaacaccgtgctgcattacgccgtgtgtggccagtcactgtcacttgtggaaaaactgcttgagtatgaagcagatcttgaggccaagaacaaagatgggtacacgcctttgttagttgccgtgataaataacaacccaaagatggtgaagtttctccttgagaagggcgccgacgtgaatgcttctgacaactatcaacggaccgctctgattctggcggtgtcaggtgagccaccctgcctggtgaaattgcttctacaacagggagtcgagctgtgctatgaggggatcgtggattcccagcttaggaatatgttcatcagtatggttctgctccatcgctatccacagtttacggcgagccatggcaaaaaaaagcacgccaagtag

SEQ ID NO: 108320 - DNA, 942 bp, synthetic construct
  misc_feature 1..942: note = Description of Artificial Sequence: Synthetic coding sequence
  source 1..942: mol_type = other DNA
atggacacctcaacaaacctggatattggggcacaacttatcgttgaggagtgcccttctacctactcactcacaggtatgcctgacatcaaaatagaacatcctctggatccgaattcggaagaggggagcgcgcaaggtgtcgcaatgggaatgaagtttattcttccaaatagattcgatatgaatgtctgttccaggttcgtcaagtcgctgaacgaggaggatagcaagaacatccaggatcaagtgaatagcgatcttgaggtcgcaagcgtgctttttaaggccgagtgtaacatccatacgtctccatctcctggcatccaggtccggcacgtctacacgccatccaccacaaagcactttagtcctatcaaacagtcaactacactcacgaataagcaccggggaaacgaggtcagtaccactccattactggcaaacagcctgagcgtgcatcagctggccgctcagggcgaaatgctttatctggccactagaattgagcaggagaatgtgattaatcacaccgatgaggagggtttcacaccactgatgtgggccgctgcccacgggcaaattgcagtggttgagttcttgctgcagaacggcgcagacccacagttactggggaaagggcgagagtcagctttgtcactggcatgtagcaagggatatactgatatcgttaagatgcttctggactgcggcgtagatgtcaacgagtacgattggaacggtggtactcctctcctgtatgcagttcatgggaatcatgttaagtgtgtgaagatgttactcgagtctggcgctgaccccaccattgagacggactccggatataattccatggacctcgcggtggctttgggttatagaagcgtgcagcaggtgatcgagtcccacctccttaaactcctgcagaacattaaagaatag

SEQ ID NO: 108321 - DNA, 1428 bp, synthetic construct
  misc_feature 1..1428: note = Description of Artificial Sequence: Synthetic coding sequence
  source 1..1428: mol_type = other DNA
atggctgctagtgccttgaggggactacctgtggcaggcggtggcgagtcatcagaatccgaagacgatggctgggaaatcggctatctagatcggacatcgcagaaactgaagcgcctgctaccgatcgaagagaagaaggagaaattcaagaaagctatgacaattggcgacgtgagtctcgtccaggaattactggattcaggcataagtgtggacagtaattttcagtacgggtggacacctctgatgtacgccgcctccgttgcgaatgccgagctggttcgcgttttactggataggggggctaacgccagcttcgagaaagacaagcagtccatcctgatcacggcgtgctctgctcacggctcagaagagcagattctcaagtgtgtcgagctgctgctgtctcggaatgctgacccgaacgttgcatgccggcgcctgatgacccccattatgtatgcagcccgcgatggccatacccaggtagttgccctgctagtcgcacatggggcggaggtgaatacacaagatgagaacggatataccgcactcacttgggctgcacgacagggccacaagaacattgtgctaaagctgctcgaactgggggccaataagatgttacagaccaaggatgggaaaatgccatctgagattgccaaacggaataaacatcatgaaatctttaacctgctgtcattcactctcaaccctctagagggtaaactgcagcaactcacgaaagaagacaccatctgcaaaatcttgacgactgattcagaccgcgaaaaggatcatatcttttctagctacaccgcattcggagacctggaggtcttcctgcacggcttagggctcgaacacatgaccgacctgcttaaggagagggatatcacactgcgacacctcctgactatgcgcgaggacgagtttacaaagaacggcatcacgtccaaggatcaacagaagatcctcgccgccttaaaggagctgcaggtggaggaaatccagttcggggagctctcggaagagaccaagctggagatttcaggcgacgaattcctcaacttcctgttaaagctgaataaacagtgtggtcatctgatcacagcggtccagaatgttatcacagagctgcccgtgaatagccaaaagatcaccctggagtgggcgtcaccacagaatttcacctctgtgtgtgaggagctggtgaacaatgtcgaagatctctctgagaaggtgtgtaaactcaaggatttgatccagaagctgcagaatgagagggaaaacgacccaactcatatccagctgcgcgaagaagtctccacctggaatagccgcatactcaagagaacagccattaccatttgtggctttggctttctcttgttcatctgcaagttgacctttcagagaaagtag

SEQ ID NO: 108322 - DNA, 1041 bp, synthetic construct
  misc_feature 1..1041: note = Description of Artificial Sequence: Synthetic coding sequence
  source 1..1041: mol_type = other DNA
atggccatggtctcagagttcctcaaacaggcatggtttattgaaaacgaagagcaggaatatgtgcagacggtgaagtcatccaagggcgggcccggtagcgccgtgtccccttatccaaccttcaatcctagctctgacgtggcggctcttcacaaggctataatggtgaaaggggtggacgaggccactatcatcgatattctcaccaagcgcaacaatgcacaacggcaacagattaaagcagcctacctgcaggagactggcaagcctttagatgagacactcaagaaggcactcaccggccacctggaagaggtggtgttagccttactgaaaaccccagctcaattcgacgccgatgagctgagagctgcgatgaagggattaggcactgatgaggacactctgatcgaaattctggcaagcagaacgaacaaggagattcgggatattaatagagtgtacagagaggagctgaagagagacctggccaaggacattacatccgatactagcggagactttcgcaatgctctgctcagcctggctaagggggatcgatccgaggattttggcgtcaacgaggatctggcggattctgatgcaagggctctctatgaggccggagaaagacggaaagggacagacgtgaacgtttttaacaccatactgacaactagatcctacccacagcttcggagggtttttcagaagtatactaagtactccaagcatgacatgaacaaagtgctagacctagaactgaagggcgacattgaaaagtgcttgaccgcgattgtgaagtgcgcaacaagcaagccagccttcttcgcggagaagctgcatcaggcaatgaagggggtgggaactaggcacaaagctctaattcggataatggtctctcgtagcgagatcgatatgaatgatatcaaggccttctaccagaagatgtatggcatctccctctgccaggcgatcttggacgaaactaaaggcgactacgaaaaaattctcgtggcactatgcggcggaaattag

SEQ ID NO: 108323 - DNA, 1041 bp, synthetic construct
  misc_feature 1..1041: note = Description of Artificial Sequence: Synthetic coding sequence
  source 1..1041: mol_type = other DNA
atggccatggtatcagaattcttaaagcaggcctggtttatcgaaaacgaggagcaggaatacgtgcagacagtcaagtcctcaaaaggggggccaggaagcgctgtgagtccctaccctaccttcaacccaagttccgatgttgccgccttgcataaggctattatggtcaaaggtgtcgatgaagctaccatcattgatatactcacaaagcgtaacaacgcgcagagacaacagataaaagccgcctacttacaagagacggggaagccattagatgagacactgaagaaggccctgaccgggcacctggaagaggtcgtactggctctcctcaaaacccctgcacagttcgatgcagatgaattaagagccgcgatgaaaggcctgggaactgatgaggatactttaatcgagattctcgcatcccgtacaaataaggagataagagacatcaatcgagtctatagagaggagctgaagcgtgatctcgccaaggatataacaagtgacaccagcggcgattttcgtaatgctcttctgtctctggcgaagggagatcgatccgaagattttggagtcaatgaggacctagcggattctgatgcaagggccctttatgaggcaggagaacggcggaagggcaccgatgtcaatgtcttcaataccatcctgacgacgcggagctatcctcaactccggcgggttttccagaaatatacaaaatactccaaacacgatatgaataaggtgctggatttggaactgaagggcgacatcgagaagtgtcttaccgctatcgtgaagtgcgctacaagcaaaccagcctttttcgctgaaaagcttcatcaggcgatgaagggagtgggcactaggcacaaagccctgattcgcatcatggtgtcacggtctgagattgatatgaatgacatcaaagctttctaccagaaaatgtacggtatatccctatgtcaagccatcctggatgagaccaaaggggactatgaaaaaatcttagttgccctgtgtggcgggaattag

SEQ ID NO: 108324 - DNA, 348 bp, synthetic construct
  misc_feature 1..348: note = Description of Artificial Sequence: Synthetic coding sequence
  source 1..348: mol_type = other DNA
atggccatggtgtcggaattcctcaagcaggcctggtttattgagaacgaggagcaagaatacgtgcaaaccgtgaaaagctctaaaggcggaccaggatctgctgtctccccctaccccacctttaatccctcttcagacgtcgccgctctccacaaagcaatcatggtgaagggcgtggacgaggcaaccatcattgatatcttaaccaagcgcaacaacgcgcaaaggcagcagatcaaggctgcgtacctgcaggagacaggcaaaccgctagatgagactctgaagaaggccttgacaggccaccttgaggaagtagtgttagccctgctaaaaaccccgtag

SEQ ID NO: 108325 - DNA, 615 bp, synthetic construct
  misc_feature 1..615: note = Description of Artificial Sequence: Synthetic coding sequence
  source 1..615: mol_type = other DNA
atgaatctaatccttcggtacacattctccaagatggcaatggtctctgaatttttgaagcaggcctggtttatcgaaaatgaggaacaggaatatgtacagaccgtgaagtccagtaaaggaggcccaggaagcgctgtgtccccatatccaacgtttaacccctcttcagacgtggctgctttacacaaagcaattatggtcaagggcgtggatgaggcaacaattattgatattctcaccaaaaggaataatgcccagagacaacaaataaaggcagcgtatttgcaggaaactggcaaaccattagacgagaccctcaaaaaagcactaacaggacacttggaggaggttgtgctcgcgttgctgaagacccctgcccaatttgatgccgacgaactgcgcgctgccatgaagggcttaggcactgacgaggacacactgatcgagattttggcctccagaacaaataaggagattcgtgacataaatcgggtctaccgcgaagagctgaagagggacctggcaaaggatatcacgtccgatacttcaggtgacttcagaaacgctcttctgtccctcgcgaaaggagaccggtccgaagactttggatag

SEQ ID NO: 108326 - DNA, 975 bp, synthetic construct
  misc_feature 1..975: note = Description of Artificial Sequence: Synthetic coding sequence
  source 1..975: mol_type = other DNA
atgttttgtggcgactacgttcagggaaccatattcccagcacctaacttcaaccctataatggatgctcagatgctgggtggcgccctccagggctttgattgcgacaaggacatgttaatcaacatcctgacccagcgatgtaatgcccagcggatgatgatcgctgaagcttatcagagtatgtacgggcgcgatctaattggtgacatgagggagcagttatctgatcattttaaagacgtgatggccggccttatgtatcctccgccgctttatgatgcccacgagctctggcatgccatgaaaggggtgggcactgatgagaattgtctcattgagattttggcctctcgcacaaacggtgagatttttcagatgagggaagcgtactgcctacagtacagtaataatctgcaggaagatatatactcagaaacctctggccatttccgcgataccctgatgaacctggtccagggcactagggaggaaggatacactgatcccgcaatggccgcacaggatgccatggtgctttgggaggcttgccagcagaagaccggcgagcataagacaatgcttcaaatgattttgtgtaacaagtcataccagcagctcaggctagtgtttcaggaattccagaatatttctggccaggatatggtggacgctataaacgagtgctacgatggctatttccaggagctgctggttgctatcgtgctgtgcgttcgagacaaacctgcgtacttcgcctatcggctttacagcgccatccacgactttggatttcataacaaaaccgtgatccgaatccttatagctcggtccgagattgatcttctaactataaggaaacggtataaggaacgctacggcaagtcgttgtttcacgatatccggaacttcgccagcgggcactacaagaaggcacttttggcgatctgcgcgggagacgcagaagattactag

SEQ ID NO: 108327 - DNA, 975 bp, synthetic construct
  misc_feature 1..975: note = Description of Artificial Sequence: Synthetic coding sequence
  source 1..975: mol_type = other DNA
atgttctgcagtaatctggtacagggtaccattttccccgctcctaactttaaccctatcatggatgcgcagatgttgggcggggccctgcaaggtttcgattgtgataaagacatgctcatcaacatcctcacacagcgatgcaacgcccagcggatgatgatagcggaggcctatcagtcaatgtatgggcgagaccttattggggatatgcgagaacagctaagtgaccactttaaagatgtgatggctgggctgatgtaccctccaccgttatacgacgcgcatgagctctggcatgccatgaagggagttgggaccgacgagaactgcctgatcgaaatcctggccagccggaccaacggagagatctttcagatgcgagaggcttactgtctgcaatactcgaataatctacaagaggacatctacagcgaaacttctggccacttcagggacactctaatgaaccttgtccaggggacacgggaggagggctacacagatccggccatggcagcccaagacgcgatggtattatgggaagcctgtcagcagaaaactggggagcacaagaccatgctgcagatgatactctgcaacaaatcttaccagcaattacgactcgtctttcaggaatttcaaaacatcagcggacaagacatggttgatgcgatcaacgagtgctacgacggctactttcaggaactactggtagctatcgtgctgtgcgttcgggacaagcctgcttactttgcatataggttatacagtgccattcacgattttggcttccacaataagaccgtcattcggattcttatcgcacggtccgaaattgacttgttaacaatccgcaaacggtataaagagcgatacggcaaatcccttttccacgacatccgcaattttgcgtcaggtcattacaaaaaggccctgctggccatatgtgctggtgatgccgaggactactag

SEQ ID NO: 108328 - DNA, 1518 bp, synthetic construct
  misc_feature 1..1518: note = Description of Artificial Sequence: Synthetic coding sequence
  source 1..1518: mol_type = other DNA
atgtcctatccaggatatcctccccctccaggcggatacccaccagccgcaccaggcggcggcccctggggcggcgccgcttacccccctcccccgtccatgccacctatcggcctggacaacgtggccacttatgccggccagttcaatcaggactacctgagcggaatggccgccaatatgagcggaaccttcgggggggctaacatgcccaacctgtacccaggcgcgccaggggccggctaccctccagtcccccctggggggttcggccagcccccatcagcacagcaaccagtgcccccgtacggaatgtatcccccacccgggggaaaccccccatcaaggatgccaagctatccgccttaccccggggctcccgtgcccggccagcctatgccgcctcctggtcagcagccccctggggcttacccaggtcagccgcctgtgacctacccaggccagcctccagtacccctcccagggcagcaacagcccgtgcccagttatcctggctatccggggtcaggtacggtgacacctgccgtacctcctactcaatttggctcacgaggcacaattaccgacgcccccggattcgatccattgcgagacgccgaggttctcaggaaggccatgaaaggtttcggcaccgatgaacaggcgatcatagattgcctagggagccgaagcaataagcagcgacaacagattctgctttctttcaaaaccgcttatgggaaagacctgatcaaagatctgaaatcagagctatccgggaacttcgagaagacaatcctcgccttgatgaagacgccagtgctgttcgatatatacgaaatcaaggaggctatcaagggggtgggaactgatgaggcatgtctgattgaaattctagctagtagaagcaatgagcacattcgcgagctaaatagagcctacaaggccgaattcaaaaagaccctggaggaggccatccggtccgacaccagcgggcatttccaaaggttactcataagcctgagccagggcaatagagatgagtccactaacgtagatatgagcctggcgcagagagacgctcaggagctctatgcagctggagagaaccgcttaggcacggacgagagcaaattcaatgcagtgttatgctcccgctcgagggcccacctagttgccgtgtttaacgaatatcagaggatgacagggcgtgatatagagaagtctatctgcagggaaatgtcgggggatttggaagagggcatgttagccgtggtgaaatgtcttaaaaacactccggctttttttgccgaacggctgaacaaagctatgcggggcgctgggactaaggacaggaccttaatacgaattatggtgtcaaggagcgaaacagatcttctcgacatccggtctgaatacaagaggatgtacggcaagagtctgtaccacgacatctccggcgatacatccggtgactaccggaagatcctcttaaaaatatgcggcgggaacgattag

SEQ ID NO: 108329 - DNA, 1518 bp, synthetic construct
  misc_feature 1..1518: note = Description of Artificial Sequence: Synthetic coding sequence
  source 1..1518: mol_type = other DNA
atgtcctatcccggatacccccccccacccggaggataccctcctgcagctcctgggggtggaccctggggaggtgctgcctatcccccacccccgagcatgccacctatagggttggataatgttgccacctatgcagggcagtttaatcaggattatttgtcaggaatggccgctaatatgtcaggtaccttcggaggggcgaatatgcccaacctgtaccctggagccccaggagctggatatccgcccgtgcccccaggaggattcggacaacccccaagtgcccaacaacctgtacccccttacggtatgtatccccctccaggagggaaccctccatcccgaatgccctcctatccaccctacccaggggcgccagtgcccggacaaccgatgccccccccgggtcagcagcctcccggtgcatatcccgggcagcctccagttacgtaccccgggcagccaccagttccactgccaggacagcagcagcccgttccaagttatccggggtaccccggatctggcaccgtcactcccgcagtcccaccaacccagttcggctcaagagggaccatcaccgatgccccaggcttcgacccccttagggatgctgaagttctgagaaaagcgatgaagggcttcggcaccgatgaacaggcgattatcgattgtcttggtagcagatcaaacaagcagcggcaacagattttgttgagctttaaaacggcgtacggtaaggatctcatcaaggatctgaagtctgagctgagcggcaatttcgaaaagacaatattagccctgatgaaaaccccagtccttttcgacatctatgaaattaaggaggccattaagggcgttggtaccgacgaggcctgccttattgagatactggcttctcgaagcaacgagcacatcagggaacttaatagagcctacaaggcagagttcaagaagaccttggaagaggctatacgctcagatactagcggccactttcagcgattgctcataagtctctcacagggaaacagagatgaatctactaatgtggatatgagtttagcgcagcgcgatgcacaggagctctacgccgccggcgagaaccggctcggtacagacgagagcaagttcaatgccgtactctgttcacgaagcagggctcacctggtggcagtgtttaacgagtatcagaggatgaccggtcgggacatcgaaaaaagcatctgtagagaaatgtccggggatcttgaagagggtatgctggcagttgttaaatgcttgaagaatacccctgcctttttcgctgagagactgaacaaggcaatgaggggggctggaactaaggacagaactctcatcaggattatggtcagccgcagcgaaaccgatctgctcgacataaggagtgagtataaaaggatgtatggcaaaagcctttatcacgatatttcgggtgatacatccggggattatcggaaaatcttactgaagatttgtggaggaaacgattag

SEQ ID NO: 108330 - DNA, 489 bp, synthetic construct
  misc_feature 1..489: note = Description of Artificial Sequence: Synthetic coding sequence
  source 1..489: mol_type = other DNA
atgtctttggctcaacgagacgcgcaggaattatacgctgcgggcgaaaaccgccttggaaccgatgagtccaagttcaacgctgtgctttgtagtcgcagtagagcacaccttgtcgcagtgttcaatgagtaccaacgtatgacaggcagagatatcgagaagtcaatatgtagagaaatgagcggcgacctggaagaggggatgctggcagtagtgaagtgcctgaaaaacactcccgccttttttgccgaaagattgaataaagccatgaggggcgctggtacaaaggacagaacattgatcaggataatggtctcccggagtgaaacagacctcctggatatccgctccgagtataagaggatgtacgggaagtcactgtaccacgatatctcttcaattagttgcatgcccgcttcatatggtcatctggaagaggcaacatgcctggcattaaaactgctgcgagtggaggggaatgattag

SEQ ID NO: 108331 - DNA, 1518 bp, synthetic construct
  misc_feature 1..1518: note = Description of Artificial Sequence: Synthetic coding sequence
  source 1..1518: mol_type = other DNA
atgagttatcccgggtatcctcccccccctggcggctatccgcctgcagccccgggcgggggcccctggggaggtgcagcctatcctccgccgccaagcatgcctcccattggactagataatgtggccacctatgccggacagttcaaccaggattatctctctggtatggccgcgaacatgtccggtacattcggtggcgccaatatgccaaatctctatcctggcgctcccggcgctgggtatcccccagtgccgccgggggggttcggtcagccgcctagcgctcagcagcctgtgcctccatacggtatgtaccccccccctgggggcaacccgccaagccgtatgccaagctacccaccttatcccggcgctccggtgcctggccagcccatgccaccccctggccaacagcctcccggcgcctatccaggccaaccacccgtaacatacccggggcagccacctgttccactgccaggtcagcaacagcccgtaccgtcataccccggctaccccggatccggtactgtgacgccagccgtgcctccaacgcaattcggaagccgcggcaccatcaccgacgctccagggttcgatccgttgcgcgacgccgaggtgctgcgcaaggcgatgaagggattcggaaccgatgagcaggcaatcatcgattgcttgggttcaagatcaaacaagcaacgacagcagatcctgctgtctttcaagaccgcctatggaaaggacctgataaaggacctgaagtctgagttgtccgggaactttgagaaaacaatcctggccctaatgaagactccggtactgttcgacatttacgagataaaagaagcaattaagggagtgggaaccgatgaggcctgtctgattgagatactggcctcccgctctaacgagcatatccgagagctgaaccgagcctacaaggccgagttcaagaaaacactggaggaggctattaggagtgatacatcagggcactttcaaagactgctaataagcctttcccaagggaaccgggacgaaagcactaacgttgacatgtctctcgcccaacgggacgcgcaagagttatacgccgcgggagaaaaccgtctaggtaccgatgagagcaagttcaatgctgtgctttgttcccgttctcgcgcccatcttgtcgcagtgtttaatgaataccagcgcatgaccgggagagatattgagaagtccatctgccgggagatgtccggagatttagaggagggcatgcttgcggtggtcaaatgcttaaagaacacccctgcattttttgccgaacggcttaacaaggccatgcgaggtgccggtactaaagaccggacactcatccgcatcatggtgtcccgcagtgaaacagatttattggacatccggtccgaatacaagaggatgtatggcaagtcactctaccacgacattagtggtgatacttccggcgattatagaaaaattctgctcaaaatctgcggaggaaatgattag

SEQ ID NO: 108332 - DNA, 1518 bp, synthetic construct
  misc_feature 1..1518: note = Description of Artificial Sequence: Synthetic coding sequence
  source 1..1518: mol_type = other DNA
atgtcctacccagggtacccccccccgccgggcggctatccccccgctgcccccgggggcggcccatgggggggagcggcctaccctcccccacctagcatgcctccgattgggctcgacaacgtagcgacttacgccggacagttcaatcaggattatctgagtggtatggccgccaacatgagtgggactttcggcggagccaacatgcccaacctatacccaggggctccaggggccgggtatccacctgttccccccggcgggttcggtcagcccccttccgcacaacagcccgtgcccccttacgggatgtatcccccaccgggcggtaatccccctagtcggatgccctcttatcccccttatccaggcgccccagttccaggccagcctatgcctccgcctgggcagcagccccccggagcctaccccggtcaacccccagtaacataccccggtcagccgcctgtgcctctccctggccagcagcaacctgtgcccagttatcctgggtaccccggaagcgggactgtgaccccagccgtcccccctacccagttcggctcaagagggaccattacagatgctcccggcttcgaccctctccgggacgccgaggtgctccgtaaagcaatgaaagggtttggaaccgatgagcaggccatcattgattgtttggggagtcgtagtaataaacagcgacagcagattcttctcagtttcaagacagcttatgggaaagacctgatcaaggaccttaagagtgagctgtctggaaatttcgagaagaccattctcgctctcatgaagacacccgtgttgtttgacatatatgagatcaaagaagcaatcaaaggggtgggtacagatgaggcctgcttgatcgagatccttgctagtaggtctaacgagcacatccgcgagctgaatagagcctacaaggcagagtttaaaaagactctggaggaagccatacggagcgacacttccggccattttcagagactcctgatctctctttctcagggcaatagagatgagagcacaaacgtcgatatgagcctggcccagcgtgacgcacaggagctgtatgctgcaggagagaaccgcctggggacagatgaaagcaaattcaatgctgtcctgtgctccaggtcacgggcacatctggtagcagtgttcaacgaatatcagaggatgactggtagagacattgaaaagtcaatatgccgcgagatgtctggagacttagaggagggcatgttggcagttgtcaaatgtctcaaaaataccccagccttcttcgcagaaagactgaataaagccatgcggggagccggcacaaaggatcggaccctgatccgcatcatggtttcacgctccgagaccgatctcctggacattcgttccgagtataaacgcatgtacggcaagtcactctaccatgacatttccggcgatactagcggggattacaggaaaatcttactgaaaatctgcgggggcaacgactag

SEQ ID NO: 108333 - DNA, 1518 bp, synthetic construct
  misc_feature 1..1518: note = Description of Artificial Sequence: Synthetic coding sequence
  source 1..1518: mol_type = other DNA
atgagctacccgggttaccctcccccacccgggggctatccccccgccgcgccaggcggagggccatggggaggagccgcgtaccctcctcctcccagtatgccgcccatcggcctggataatgtggccacctacgcggggcagtttaatcaggactacctcagcggaatggctgctaatatgtccggcacctttgggggcgccaatatgcccaatttgtacccaggagctcccggagctgggtatcctccagttcctcctggaggattcgggcaaccccccagcgcacaacaacctgttcccccgtatgggatgtacccaccacctggaggaaacccgccctcacgaatgccctcctaccccccttacccaggcgcccccgtccctggacaacccatgccaccccccggccaacaaccgccaggagcctacccgggacagcctccagtaacctaccccggtcaaccccctgttccattacctggccagcaacagccagtccctagttatccagggtatcctggatccggaaccgtcactcccgcagtgccccccacccagtttggctcacggggcaccatcacggatgcgcctgggtttgatccactgagagatgccgaggtgctaagaaaggccatgaaggggttcggtaccgatgaacaggccatcatagattgcctggggtcacggtctaataagcagcgacagcagatcctgctttccttcaaaactgcttatggcaaggacctaattaaggacctcaagtcagagctgagcggtaacttcgagaagactattctggccctgatgaaaacccctgtcctgtttgacatttatgagataaaagaagcaattaagggagttgggaccgacgaggcctgtttaatagagattctagctagtcggtccaacgagcacatccgcgaactaaatcgcgcatacaaagctgagttcaaaaaaaccctggaggaagcaattcggtctgacacatcgggccattttcaaagactactgatctcacttagccaggggaacagagatgaaagcaccaatgtagatatgtctcttgctcagcgcgatgcccaggagctgtatgccgctggagaaaacagactcggcaccgacgaatccaaattcaatgcggtgttatgcagccggtcacgcgctcatctcgtggctgtgttcaacgagtaccagcgcatgactgggagagatattgagaagagcatatgcagagagatgtcaggggacctggaagagggaatgcttgccgttgtgaagtgtcttaaaaacacacccgctttcttcgccgagaggctgaacaaggcaatgcggggagctggaactaaggacaggactctgattcgtatcatggtgtcacggtccgaaacggacctgcttgatattcgcagcgaatataaacgtatgtatggaaagagtctttatcacgatatttccggagatacttccggcgactataggaagatactgctgaaaatttgtggaggaaacgattag

SEQ ID NO: 108334 - DNA, 1239 bp, synthetic construct
  misc_feature 1..1239: note = Description of Artificial Sequence: Synthetic coding sequence
  source 1..1239: mol_type = other DNA
atgcgaggctcatctacacggaccatcagccgagagtgctggcgcctctgggccgctcctctgtgccccgccgcttgcagcagcctgtgggatgtcagcactccgaggaggaagccgaccctgcaggatgccctcatttctgccataccgtaccccggccaacctcccgtcacatacccaggccagcccccagtgcccttacccggccagcaacaaccagtcccatcatacccgggttaccctgggtccggaacagttactccagccgtaccccctactcagtttggcagtaggggaaccatcacggatgcacccggtttcgaccctctgagagacgccgaagtcttgcgtaaggcaatgaagggttttggaacagacgagcaggcgatcattgactgcctagggagtcggagcaataaacaacgccagcagatcctgttgtccttcaaaaccgcttatggaaaagacctcatcaaggacctgaaatctgaactgagcggcaactttgagaaaacgatcctggctctgatgaaaacgcctgtgttattcgacatttacgagattaaggaggcgattaagggcgtcggcaccgatgaagcatgcctgattgaaatcctggcaagccgaagtaatgagcacataagagaacttaatagggcttataaggcagaattcaaaaagacactggaagaggctattcgatccgacacgtccggccattttcagagacttctcatttcactaagccagggcaacagagacgaatctacaaatgtcgatatgagtctcgcccagcgcgatgcacaggagctctacgcggctggggagaatcgtctcgggaccgacgaaagtaagttcaacgccgtgctgtgctctcggagccgagctcacctggtagctgtttttaatgagtaccagcgaatgacagggcgggacattgaaaagagtatctgccgggaaatgagtggtgacctcgaagagggcatgttggcagtcgtgaaatgtctaaaaaacactccagcctttttcgccgaacgacttaataaagcaatgcgtggggcaggtaccaaagataggaccctgatccgcattatggtgagccgaagtgaaacggacctgctggatattaggagcgagtataagcgtatgtatggaaagtctctttatcatgatattagtggggatactagtggcgattacagaaaaatattgctaaaaatctgtggggggaacgattag

SEQ ID NO: 108335 - DNA, 453 bp, synthetic construct
  misc_feature 1..453: note = Description of Artificial Sequence: Synthetic coding sequence
  source 1..453: mol_type = other DNA
atgagttacccaggctaccctcctccccccggaggctatccacccgcagctcctggtggaggcccgtggggaggcgcagcttatcctccacctccatccatgcctccgatcggactggataacgtcgctacctatgcaggccaattcaatcaggactatttaagcggcatggccgccaacatgtcaggaacatttggaggggctaacatgcctaacttatacccaggggcgcccggagcaggatacccacccgttcctcccgggggatttggtcagccccctagcgcacaacagccagtgccaccatatgggatgtacccgccaccaggaggcaatcccccctcccgcatgccctcttacccaccatatccaggagcacccgtacctggccagccaatgcctccacccggacagcaaccacccggcgcctacccaggtcaaccgcctgtgtag

SEQ ID NO: 108336 - DNA, 1518 bp, synthetic construct
  misc_feature 1..1518: note = Description of Artificial Sequence: Synthetic coding sequence
  source 1..1518: mol_type = other DNA
atgagttaccctggctatccacctccaccaggcggttatcctccggccgctccaggtggcggcccctggggaggagcagcataccctccacctccaagtatgccacccattggcttggataatgttgctacatacgccggacagttcaatcaagactacttatccggaatggctgcgaatatgtcgggaacattcggtggagccaacatgccgaatctgtacccaggcgcgccgggcgcaggatatccacccgtcccacctggtgggtttggccaaccccccagcgcccagcagccagtgcccccctacggaatgtaccccccccccggtggcaaccctcctagccgcatgcctagttacccaccctacccaggagctccagtgcccggccagccaatgcctcccccggggcagcaacctcctggagcctatcctggtcaacctcctgttacctaccccggccaaccacctgtcccccttcctggacagcagcaaccagtaccaagctacccaggatatccagggagcgggaccgtgactcccgcagtacctcctacccaatttggcagcaggggcacaataactgacgcccccggcttcgacccacttcgagatgccgaagtattgaggaaggctatgaaagggttcggaactgatgagcaagccattatcgattgtctgggatctaggagcaataaacagaggcagcagattttactttctttcaagaccgcctacggcaaggacttaatcaaggacctgaagtccgagctgtccgggaatttcgaaaaaacgattctggccttgatgaaaactccagtgctgttcgatatatatgaaattaaagaggctatcaagggcgtgggcaccgatgaagcatgcctaatcgagatcctggcttctagaagcaatgaacacatcagggaactgaacagggcctacaaagccgagttcaagaaaacactcgaagaagccatccgatccgatactagcgggcacttccagagactgctgatctctctaagccaaggcaatcgggacgagagcactaatgtcgacatgtcattggcccagcgggacgctcaggaactatacgccgctggagaaaaccgacttggtacagacgagagcaagtttaatgcagtgctctgtagccgctcccgggcccaccttgtggccgttttcaacgagtatcagcgcatgaccggccgggacatcgagaagtccatttgtagagagatgagtggagacctcgaagagggcatgctggcagtcgtaaagtgcttaaagaacactccagcattctttgccgagagattgaacaaagccatgcgtggagccggaaccaaagatcggacgctaatccgcattatggtgagtcggtctgaaacagacctgctcgacataagatccgagtacaaaaggatgtatggcaaaagcctttaccacgacatcagtggggacactagtggggactatcgtaagattctcctgaagatatgcggcggtaatgattag

SEQ ID NO: 108337 - DNA, 615 bp, synthetic construct
  misc_feature 1..615: note = Description of Artificial Sequence: Synthetic coding sequence
  source 1..615: mol_type = other DNA
atgtcttaccctggctacccccctccaccgggtggctacccaccagctgcccccggtggaggtccatgggggggagccgcatacccacccccgccgtcgatgcccccaatcgggcttgataacgtggcgacctacgctggtcaattcaaccaggattacttgtccggcatggctgctaacatgtctggaacgttcggtggagccaacatgcccaacctttaccccggggccccaggagccgggtatccccctgtgccccctggtggatttggccagccgccctccgcccagcaacctgtccctccatacgggatgtaccccccacccggaggcaacccacccagccggatgccttcctatcccccctacccaggcgcaccagtccctggccaaccgatgccacctccagggcagcagccaccgggagcttatccaggacaaccaccggtgacctacccaggccagccaccggtcccattgcccggtcagcagcagcctgtgccatcttatcctggatatccaggaagcggtaccgttaccccagcagtgccgccaactcaattcggatcccgcggcaccataacagacgctcccggcttcgatccactccggtag

SEQ ID NO: 108338 - DNA, 447 bp, synthetic construct
  misc_feature 1..447: note = Description of Artificial Sequence: Synthetic coding sequence
  source 1..447: mol_type = other DNA
tgagagaaccgactcggaacagatgagagcaagttcaacgctgtcctgtgtagcagaagccgcgcccacctagtggcggtgtttaacgaataccagcgcatgacgggcagagacattgagaagtctatctgtagggagatgtctggcgacctggaggagggcatgttagctgtcgtcaaatgccttaagaacaccccggcattttttgccgagagattgaataaagccatgaggggagcgggcaccaaggatcggaccctcatccgcatcatggtttcaagaagtgagaccgatctcctggacattagatcagagtataagcggatgtatggcaagagtctatatcatgatatttcaagcatcagttgcatgccagcctcctacgggcacctagaagaagccacatgtctggctttaaagctgctgagggtggaaggaaacgactag

SEQ ID NO: 108339 - DNA, 1518 bp, synthetic construct
  misc_feature 1..1518: note = Description of Artificial Sequence: Synthetic coding sequence
  source 1..1518: mol_type = other DNA
atgagctatccaggatatcctcccccacctggagggtatccccctgcagctccaggaggaggcccgtggggcggcgcagcttacccgcccccgccatcgatgcctcccattggtctggataatgtggcgacctacgccgggcagttcaaccaggattatctctccgggatggccgcaaacatgtccggcactttcggcggggcaaacatgcctaacttataccccggggcccccggggcaggataccccccagttccaccaggagggtttggacagccgccatccgcacagcagcctgtcccgccatacgggatgtaccccccccccggcggcaacccccctagtcggatgccttcctacccgccttaccccggggcccctgtccctggtcagccaatgcccccaccaggtcagcaaccaccgggggcgtaccccggtcaacctcccgtcacttaccctggtcaaccacctgtgccactgcccgggcagcagcagccggtccctagctaccccggctaccctggaagcggcacagtgacaccagccgtaccgcccacacagttcggttctagaggaaccatcactgatgccccaggttttgatcccctgagggatgcagaggtgctccgaaaggcaatgaaaggtttcgggaccgatgagcaagcgatcatcgattgcctcggctcaaggtccaataagcaacggcagcagatcctgctcagcttcaaaacggcatatggcaaggatttaattaaggacctcaagagcgagctaagcgggaacttcgagaagacgatcctggctctgatgaagacaccagtcctatttgacatctatgagatcaaagaggcgattaaaggggtgggtacggatgaagcctgcctgatagagatcctggcaagtcgcagcaacgaacacataagggaactgaatagggcatataaggctgaattcaaaaagaccttggaggaagcaatccgatccgatacaagcgggcacttccagcgactgctgatctctctgtcacaaggtaatcgcgacgaaagtaccaacgtggacatgagcctggcccagagagacgcccaggaactgtacgccgccggggaaaatcgcctgggcaccgatgaatctaagttcaatgcagttttgtgttccagatcaagggcccacttagtggctgtatttaatgagtatcagcgtatgacaggtagggatattgagaaatctatctgtcgggaaatgtcaggggacctggaggagggaatgctggcagtcgttaagtgtcttaagaatacccccgctttttttgctgagagactgaataaggctatgcgtggagccggtacgaaagacaggacattgatccggattatggtttcccgcagcgaaacagatcttttagatatacgttctgagtataagaggatgtatggcaaatccctgtatcacgatatcagtggcgatacatccggcgactatagaaagatcttgctgaaaatctgtggaggaaacgattag

SEQ ID NO: 108340 - DNA, 1419 bp, synthetic construct
  misc_feature 1..1419: note = Description of Artificial Sequence: Synthetic coding sequence
  source 1..1419: mol_type = other DNA
atgccacccattggcttagacaacgtcgcaacctatgcaggccaattcaaccaggactacctgtccgggatggctgcgaacatgagtggcaccttcggtggagccaacatgcctaacctctaccccggagctcctggcgctgggtatcctcccgtccctccaggtggcttcggtcagcctcccagcgcgcaacaacccgtgcccccgtacggaatgtaccccccaccaggaggcaaccccccctcaaggatgcctagttacccgccttatccgggcgcccctgtgcctggccagccaatgccacctcccggccagcagccccccggcgcataccccggccagccaccagtcacctatccagggcagcctcccgtgccgctcccaggtcagcagcagccagtcccctcgtatcctggttaccccggtagcggcacagtcaccccagcggttccaccaacccagtttggcagtagaggcactattacagatgcacctggcttcgacccacttagggacgccgaggtgctgcgaaaagccatgaagggattcggaacagacgaacaggcgattattgactgtctggggagccgatctaataaacagcgacagcagatcctcctttctttcaaaaccgcttacggcaaagaccttatcaaagacttgaagtcagaactgtccggtaattttgagaagaccatacttgccctgatgaaaacccctgtcctttttgacatctatgaaattaaagaagctattaagggcgttggcaccgatgaagcgtgtctgatagagattctcgcaagccgtagtaacgaacacatcagggagctgaaccgtgcgtacaaggccgaattcaagaaaactttggaagaggcaatcagatccgacacctcggggcattttcagaggctcctgataagtcttagccaaggaaatcgagacgagagcacaaatgtcgatatgagcctcgcgcagagggatgcccaggaactctatgcagcaggggagaacaggttaggaaccgacgagtcgaagtttaacgccgtcctctgctccagatcccgggcccatctcgttgcagtgttcaatgagtatcagaggatgacgggacgtgatattgagaaatcgatctgcagagagatgagtggggacttagaagagggaatgctggctgtggtgaagtgtctgaagaatacccctgcattctttgctgagagactcaacaaggcgatgagaggtgccggtaccaaagatcgaacactgattcgtataatggtctctcggagcgaaaccgatttactggacataaggtccgagtataaacggatgtatgggaaaagtctgtaccatgatatctccggagatacctctggagactaccgcaaaatcctccttaaaatatgcggcggcaatgactag

SEQ ID NO: 108341 - DNA, 1074 bp, synthetic construct
  misc_feature 1..1074: note = Description of Artificial Sequence: Synthetic coding sequence
  source 1..1074: mol_type = other DNA
atggggcgacaattagcgggttgtggcgatgccggcaaaaaagccagttttaaaatgtctaccgtgcacgagatcctttgtaagttatcgcttgagggcgaccacagcacgccgcccagtgcttatggatctgtgaaggcgtataccaactttgacgccgagcgagacgctctgaacattgagacagctattaaaaccaagggagttgacgaagtcacaatagtgaacatcctgactaatcgttctaacgcacaacggcaggacatcgcttttgcatatcagcgcaggacaaaaaaggaactggcttccgccctgaaaagcgccctgtccggccatctcgagactgttattcttggactgttgaagacccccgcacagtatgatgcctccgaactgaaagctagcatgaagggactaggcactgacgaagatagcttgattgagattatatgttcacgcaccaaccaggaacttcaagaaatcaacagagtctacaaagagatgtacaaaaccgatctagagaaggacattattagcgacacctctggagatttcagaaaactgatggtggccctggccaaaggccgacgggctgaggatggctctgttatcgattatgagcttatagaccaggacgcccgcgatctgtatgacgctggagttaagaggaaagggacagacgttccaaaatggatctccattatgaccgaacgctccgtgcctcatctccagaaggtcttcgatcgttacaagtcttactccccatacgacatgctcgaatctattcgaaaagaagtcaaaggcgacttggagaacgcatttctcaacctcgtgcagtgtattcaaaataagcccttgtactttgccgataggctgtacgactcaatgaagggtaaaggcacacgcgacaaggtgttgattagaataatggtgtccaggtctgaggtggacatgctgaagattagaagcgagtttaagaggaagtacggtaaaagcctatattactacatccagcaggatacgaagggtgattatcagaaggccttgctgtacttatgtggcggcgacgactag

SEQ ID NO: 108342 - DNA, 1020 bp, synthetic construct
  misc_feature 1..1020: note = Description of Artificial Sequence: Synthetic coding sequence
  source 1..1020: mol_type = other DNA
atgtccaccgtgcacgagatcctgtgcaagctcagccttgaaggggaccatagtacgccaccctcagcatacggcagcgtaaaggcctacacaaattttgatgccgagagagacgccctaaatattgagactgccattaaaacaaagggcgttgacgaagtgaccatcgtcaatatcctgactaacagaagcaatgcccagagacaggatatcgcatttgcttaccagagacgcacgaagaaggagttggcaagcgccctcaagagcgcgctctctggtcatctggagacagtaattctgggactcctgaagactccagctcagtacgatgctagcgaactcaaagcgtctatgaaagggttgggtaccgatgaggacagcttaatagagataatatgcagtcgcactaaccaggaattgcaagagatcaacagagtatataaagagatgtataaaacagatctggagaaggacatcatcagtgatacaagtggcgattttagaaaactgatggtggctctggccaaggggagaagagccgaagacggcagtgtcattgattatgaactgattgatcaggatgctcgcgatctttacgatgccggagtgaagcgaaaagggacggatgtgccaaagtggatctctattatgaccgaacggtcagtcccccacctgcagaaagtatttgatcgatataagtcctacagcccatatgacatgctggagagcatcagaaaggaggtcaagggggaccttgaaaacgcttttctgaatctcgttcagtgtatccagaataaacctctctactttgcggaccgcctctacgactcaatgaaaggaaaagggacaagggataaagttctgatacgcataatggtcagcagatccgaggtggacatgctgaaaattaggtctgagttcaagagaaagtacggaaagagtttgtactactatatccagcaggacactaaaggcgactatcagaaagcacttctgtatttatgtggcggcgatgattag

SEQ ID NO: 108343 - DNA, 1020 bp, synthetic construct
  misc_feature 1..1020: note = Description of Artificial Sequence: Synthetic coding sequence
  source 1..1020: mol_type = other DNA
atgagtacggtgcacgagatcctgtgtaagctgagtttggaaggcgatcattccacacctcccagcgcttatgggtctgttaaagcctacacgaacttcgatgccgaaagagatgccctgaacattgaaacagcgataaagacaaagggggtggacgaggtcactattgtaaacatactgacaaaccgctcgaacgctcagcgccaggatatcgccttcgcttatcaacgacgtaccaaaaaggagcttgcatccgcactaaagagcgcactgagcggccatctcgagactgtaattctgggtctgctcaagacccctgcacagtatgatgccagtgagctcaaggcttctatgaaagggctcggtaccgacgaggacagcctcattgaaattatatgcagccgtactaaccaggagctgcaagagatcaaccgagtgtataaagagatgtataaaaccgacctcgagaaggatatcatcagcgatacctcaggcgattttcgaaagctgatggtggcgctcgccaaggggcggcgggctgaggacgggagcgtcattgactacgaattgattgatcaggacgctagggatctgtacgacgccggtgtgaaacggaagggaacagacgtcccaaaatggatttcaattatgaccgagcggtctgttcctcacctgcaaaaagtctttgaccgctacaaaagttatagtccttatgacatgctcgaaagcatccggaaggaggtgaaaggggacctggagaacgcttttctgaatctggttcagtgcatccagaacaagcctctttacttcgcggaccggctctatgactcaatgaaaggcaaagggactcgagacaaggtgctgatccgcataatggtctctcgatccgaggtggacatgttgaaaatcaggagtgagtttaaacgcaagtatggaaagtccctctattattatattcagcaggacaccaagggcgactatcagaaagccctcctctatctgtgtggcggggacgactag

SEQ ID NO: 108344 - DNA, 1020 bp, synthetic construct
  misc_feature 1..1020: note = Description of Artificial Sequence: Synthetic coding sequence
  source 1..1020: mol_type = other DNA
atgtcaactgtgcatgagattttgtgcaagctctctcttgagggcgaccactcaacacccccgtcagcctatggatctgtaaaggcctatacaaattttgatgcagagcgggacgctctgaacatcgagacagcgatcaagacaaagggagtggacgaggtgactatagtaaacattcttaccaatcgatctaacgcacagagacaggatatcgcattcgcgtatcaaaggcggacaaaaaaagaattagcaagtgctctgaaatccgccctttctgggcacctagaaactgttattttaggcctgttgaagactcctgcccagtacgacgcatccgaactgaaagcatccatgaaggggttgggcacggacgaggactctctaatagagattatttgcagccgcaccaaccaggagctgcaggaaatcaaccgtgtgtataaggagatgtacaagacagacctggagaaggacatcattagtgacactagtggagactttaggaagttgatggtggctctcgctaaggggagacgcgctgaggatggttccgtgatcgattacgagcttatagatcaggatgctagagatctgtatgacgcaggcgtgaaaagaaagggcacagatgtgccaaagtggatctcgatcatgacagaacgaagcgtgccccatctgcagaaagtgtttgatagatataagagctactctccctatgatatgctggaatcaataagaaaagaagtaaaaggcgacctggagaacgctttcctcaatcttgtgcagtgcatccaaaacaaaccactctattttgctgatcggttgtatgacagcatgaagggaaaaggaactcgagataaagttctcatacggatcatggtgtccagaagcgaagtcgacatgctgaagatccggtctgagttcaaacggaaatacggcaaaagcttatattattatatacagcaagacacaaagggcgattaccagaaagctctcctgtacctttgcgggggagatgattag

SEQ ID NO: 108345 - DNA, 246 bp, synthetic construct
  misc_feature 1..246: note = Description of Artificial Sequence: Synthetic coding sequence
  source 1..246: mol_type = other DNA
atgtccaccgtgcacgagatcctctgtaagctcagcctggagggggatcatagcacccccccttccgcatacggctccgtcaaagcatacacaaactttgatgccgagcgtgatgcactgaatattgaaacagctatcaaaacaaagggggtggatgaagtgacaattgttaatatactgacgaatcgaagtaacgcccagaggcaggatatcgctttcgcttatcagagacggacaaaaaaatag

SEQ ID NO: 108346 - DNA, 531 bp, synthetic construct
  misc_feature 1..531: note = Description of Artificial Sequence: Synthetic coding sequence
  source 1..531: mol_type = other DNA
atgtccaccgtccatgaaatactgtgcaaactgtccctggagggtgaccactccactccaccatcagcctatggaagcgtcaaagcttacactaacttcgatgcagaacgcgacgccttgaatatcgaaaccgctatcaaaaccaaaggcgtcgacgaagtaacaattgtaaatatactgaccaacagaagcaatgctcagcgccaggacattgctttcgcctatcaacggaggacaaagaaggaactggcatcagccctgaagtccgccctcagtggccatctggaaacagtcatcctgggcctgttgaagacaccggcccagtacgacgcaagtgagttgaaggcttcaatgaagggactaggaaccgatgaagattcccttatagaaattatatgtagtcgaacgaaccaggaacttcaggagatcaacagggtttataaggagatgtacaaaacagatctcgaaaaggacattatatccgacactagcggcgattttaggaagttgatggtggctctcgctaagtag

SEQ ID NO: 108347 - DNA, 144 bp, synthetic construct
  misc_feature 1..144: note = Description of Artificial Sequence: Synthetic coding sequence
  source 1..144: mol_type = other DNA
atgtctaccgtgcacgaaatactgtgtaaattaagtctcgaaggagaccattcaacaccgccatcagcctacgggagtgtcaaggcctatactaacttcgacgctgaacgggatgccctgaacattgaaaccgctatcaaatag

SEQ ID NO: 108348 - DNA, 405 bp, synthetic construct
  misc_feature 1..405: note = Description of Artificial Sequence: Synthetic coding sequence
  source 1..405: mol_type = other DNA
atgagcacagtgcacgagatactgtgtaagctgagtctcgaaggggatcattcgactccaccatccgcttacggttccgttaaggcctatacaaactttgacgcagagcgggatgcgctaaacatagaaacagctattaagacaaagggggtagacgaggtgacgattgtcaacatattgaccaataggtctaatgcgcagcgccaggatattgctttcgcttaccagaggcgcacaaaaaaggaattagccagcgcactcaagagcgcactctccgggcatttagagacggtgatccttgggctccttaagaccccagcccaatatgacgctagcgaacttaaggcatccatgaagggactcggcactgacgaagattctctgatagaaatcatttgttcgtag

SEQ ID NO: 108349 - DNA, 402 bp, synthetic construct
  misc_feature 1..402: note = Description of Artificial Sequence: Synthetic coding sequence
  source 1..402: mol_type = other DNA
atgtctactgtgcacgagatcctgtgtaaactgagtctcgagggggatcactctactccaccaagcgcttacggatccgtgaaggcctacacaaacttcgatgctgagagagacgctttgaatatcgaaacagctatcaagaccaaaggcgtggatgaggtgaccatcgtaaatatcctgaccaaccggagcaacgcccagagacaggacattgcatttgcgtaccagaggcggaccaagaaggagttggcaagtgcacttaaatccgctctctctggccatctggaaactgtgatactggggctgctgaagacccccgcccagtacgacgccagtgaactgaaagcctcgatgaaggggctgggtaccgatgaggatagcttgatcgagatcatttgttag

SEQ ID NO: 108350 - DNA, 450 bp, synthetic construct
  misc_feature 1..450: note = Description of Artificial Sequence: Synthetic coding sequence
  source 1..450: mol_type = other DNA
atgtccaccgtgcatgagattctttgtaaactttccctggaaggggaccacagcacccctccctctgcgtacggctcagtaaaggcctacaccaacttcgatgccgaacgcgatgccttaaacatcgaaaccgctattaaaacgaagggagtggatgaagttaccatcgtcaatattctgaccaatcgttccaatgcacagcggcaagacattgccttcgcctatcagcggaggactaagaaggaattagcctccgcgctaaaaagcgcgttatccggccaccttgagaccgtcattctgggcctgctgaaaacacccgcgcagtacgacgcttctgaattgaaagcctcaatgaagggcttgggaacagatgaggattcccttattgaaatcatttgcagtcggaccaaccaggagctgcaggaaataaatcgggtgtacaaagagtag

SEQ ID NO: 108351 - DNA, 198 bp, synthetic construct
  misc_feature 1..198: note = Description of Artificial Sequence: Synthetic coding sequence
  source 1..198: mol_type = other DNA
atgtcaacagtgcacgagatactctgcaaactttccttggagggcgaccactccactcccccatctgcctatggatctgtgaaagcctacacaaattttgatgccgaacgagacgcactgaatatagagaccgcgattaagaccaaaggcgtggacgaggtgactatcgtgaacatcctgactaatagatccaattag

SEQ ID NO: 108352 - DNA, 360 bp, synthetic construct
  misc_feature 1..360: note = Description of Artificial Sequence: Synthetic coding sequence
  source 1..360: mol_type = other DNA
atgtcgacagtgcacgagatcctctgtaagctgagtttggaaggggatcacagtacccccccctcagcatacgggtccgtgaaggcctacactaatttcgacgccgagcgggacgcactgaatatcgagaccgcgattaagactaagggcgtggatgaggtcaccatagtgaacatcttgactaaccggagcaacgcacagcgccaggacattgccttcgcctatcagagacgcaccaaaaaagagctcgcgagtgcccttaagagcgctctgtcagggcacttagaaacagtcatcctggggctgctgaaaactcctgctcaatacgacgcctccgagttgaaagcttctatgaaatag

SEQ ID NO: 108353 - DNA, 771 bp, synthetic construct
  misc_feature 1..771: note = Description of Artificial Sequence: Synthetic coding sequence
  source 1..771: mol_type = other DNA
atgtccacggtccacgagatcctttgtaagctctctctagaaggcgatcacagcacccccccatcagcatatggctccgttaaggcttatacaaattttgacgccgaaagggatgcccttaatatcgaaacagccatcaaaaccaagggggtcgacgaagtaaccatcgtcaatatattaaccaaccgctctaacgcgcaaaggcaggacattgcctttgcttatcagcgccggaccaagaaggagctcgccagcgcattaaaaagcgcactgtctggacatctagagactgtgatcttaggactgctaaaaacgcctgcccagtatgacgcctcggagctgaaggcttccatgaagggccttggcacagatgaggacagcctgatcgaaattatatgtagccgaaccaaccaggagctgcaggaaattaacagggtatataaggaaatgtataaaaccgacctcgagaaggacatcatctctgatacatctggagacttcagaaagctaatggtcgcactcgcaaaggggaggcgtgccgaggatggctccgtgattgactatgaacttatcgatcaagatgccagggacctctatgacgccggagtgaaacggaaggggaccgatgtccccaaatggatttcgattatgaccgagcgttccgtgccgcatcttcagaaagtgttcgaccgctacaagagctatagcccgtacgatatgctggagtccattcgtaaagaggtaaaaggagatctggaaaacgccttttag

SEQ ID NO: 108354 - DNA, 360 bp, synthetic construct
  misc_feature 1..360: note = Description of Artificial Sequence: Synthetic coding sequence
  source 1..360: mol_type = other DNA
atgtccacagttcacgagatcttatgtaaattaagtctggagggggatcattctacacctccctccgcgtacggttctgtgaaggcctacaccaattttgatgctgaacgtgatgccctgaacatagaaacggccatcaagaccaagggcgttgatgaagtgactatagttaacattctcaccaatcgttcaaatgcccagcgccaagatattgccttcgcctatcaaaggagaacgaaaaaagaactggcctcagccctcaaatcagccttgtcgggtcaccttgagacggtcatcctcgggcttttgaagacccctgcacagtacgacgcctccgagctgaaggcatccatgaaatag

SEQ ID NO: 108355 - DNA, 531 bp, synthetic construct
  misc_feature 1..531: note = Description of Artificial Sequence: Synthetic coding sequence
  source 1..531: mol_type = other DNA
atgtctaccgtccacgagatcctgtgtaaactgtccttggaaggcgaccattctaccccaccgtccgcatatgggtccgtaaaggcgtatactaatttcgacgccgagcgtgatgccttaaacatcgaaacagccatcaaaactaaaggcgtggatgaagtgaccattgtgaatatcctgaccaacagatctaatgcgcaacggcaggacatcgccttcgcataccagaggaggaccaagaaggaactagcatcggcgctgaagtccgctctgagcggacacctagagacggtgatacttgggctactcaagacccctgcccagtacgacgccagcgaacttaaggcctccatgaaaggccttggtacggatgaagatagccttatcgagattatttgctctaggactaatcaagagctccaggagattaaccgagtttacaaggagatgtataagacggacctggagaaagatattattagcgacacctccggggacttcaggaaattgatggtggccttagccaagtag

SEQ ID NO: 108356 - DNA, 684 bp, synthetic construct
  misc_feature 1..684: note = Description of Artificial Sequence: Synthetic coding sequence
  source 1..684: mol_type = other DNA
atgtctaccgtccacgaaatcctttgcaaacttagtctggaaggggatcacagcacgcccccatcggcatacggaagtgtgaaggcctacactaactttgatgcagagagggatgcactgaacatcgagactgcaattaagactaaaggagtggatgaagtaacaattgtgaacatcctgacaaacagaagcaatgcccagcgccaggatattgcctttgcatatcagcgcagaactaagaaggaactggccagcgctctgaaaagcgccctcagtggccacctcgagacagtgatcttggggctgttgaagaccccggcccagtacgatgcttccgaattaaaagcttccatgaaggggctggggacagatgaggacagtttgatcgagattatttgcagccggacaaatcaggaactacaggaaataaaccgggtttacaaggagatgtacaaaacagacttggagaaagatataatatccgatacttctggagacttcaggaagcttatggttgccctggcaaaagggcggagggcagaggacggaagcgtaatcgactacgaactcatcgaccaggatgccagggacctgtacgatgcaggagtgaagcgaaaaggcactgatgtccccaaatggatttcgatcatgacagagcgcagtgttccacatctccagaagtag

SEQ ID NO: 108357 - DNA, 531 bp, synthetic construct
  misc_feature 1..531: note = Description of Artificial Sequence: Synthetic coding sequence
  source 1..531: mol_type = other DNA
atgtcaaccgtgcacgaaattctgtgcaagttaagcctggagggagatcattccaccccgccctcggcctacggatctgtgaaagcgtatacaaatttcgatgctgagagagacgctctgaacattgagacagctattaagaccaaaggggtggatgaggtgactattgtgaatatcctgaccaacaggtctaacgctcagcggcaggatattgcgttcgcctaccagaggcgtaccaagaaggagctggcctccgccttaaagagcgccctgagtggtcacctggagaccgtaatactcggcctgctcaaaacaccggcacaatacgacgcgtccgagctcaaggcctctatgaaggggttaggcacagacgaggattcccttatcgagattatctgtagtcgtacaaatcaagaactgcaggaaatcaatcgcgtgtataaggagatgtacaagactgacctagaaaaagacattatctccgatacttctggtgactttcggaaactcatggttgctctagctaagtag

SEQ ID NO: 108358 - DNA, 333 bp, synthetic construct
  misc_feature 1..333: note = Description of Artificial Sequence: Synthetic coding sequence
  source 1..333: mol_type = other DNA
atgagcacagtgcacgaaatactgtgcaaactaagcctggaaggagatcattctacgcctcccagtgcctatggatcggtcaaggcttacactaattttgatgccgagcgtgacgcactgaacatcgagactgctataaaaactaagggcgtcgacgaggtcactattgttaatatcctgaccaaccgctcgaatgcacagcggcaagatatcgccttcgcatatcaacggcgcacaaagaaagagctggcttccgcactgaaaagcgcactctccggtcatctggagacagttatccttggactgcttaagacgcctgcgcagtacgactag

SEQ ID NO: 108359 - DNA, 972 bp, synthetic construct
  misc_feature 1..972: note = Description of Artificial Sequence: Synthetic coding sequence
  source 1..972: mol_type = other DNA
atggccagcatctgggttggccatagaggcacagtgcgcgattatccggacttcagcccatcagtggatgctgaagccatccagaaggccatacgcgggattggcaccgacgagaaaatgctgataagcattctgacagaacggtccaacgcccagaggcaattgattgttaaggaataccaagcagcctatgggaaagagctcaaggacgacctgaagggcgacctgtccggccacttcgaacatctgatggtggctctcgttacccctcccgctgtcttcgacgccaagcagctaaaaaagagtatgaagggggctggaacgaacgaggacgcactgatagagatcctgacgactagaacctcccgacaaatgaaagacatctctcaggcttactacaccgtgtacaaaaaatcactgggagacgatatcagtagtgagactagtggagattttagaaaagcgctcctcaccctggcagatggcaggagggacgaaagcctgaaagtggatgagcatcttgccaagcaggatgcccagatactttacaaggccggggagaataggtggggaacggacgaggataagtttactgagattttgtgcctgcgttccttcccccagctcaaactcaccttcgatgagtatcggaacatcagtcaaaaagacatcgtggacagcattaaaggggagctgtcaggtcactttgaagatctattacttgccatagtgaattgcgtgaggaacacgcccgccttcctggccgagcggctgcatagagcactgaaaggtataggcactgatgagttcaccctaaatcggattatggtctcacgttccgagattgatttactcgacatccggactgaatttaagaagcactatggttactctctttactctgcaatcaagagtgacacgtctggtgattatgagataaccctgctgaagatctgcggcggtgacgactag

SEQ ID NO: 108360 - DNA, 405 bp, synthetic construct
  misc_feature 1..405: note = Description of Artificial Sequence: Synthetic coding sequence
  source 1..405: mol_type = other DNA
atggctagcatctgggtgggtcatcgtgggacggtgcgagactaccccgatttcagcccaagtgtggacgctgaagccattcagaaggcgattagaggaatcggaacggatgaaaagatgctgatctcaatcctgacagagcgctccaacgcgcagcgccaacttatcgtcaaagagtaccaggctgcctatggcaaagaactgaaggatgatctgaagggcgatctttcagggcatttcgaacacctgatggtggcgttagtgaccccaccagccgtatttgacgctaaacaacttaaaaaatcaatgaagggcgcaggaacgaacgaggacgcactcatagagatactcactacaagaaccagtagacaaatgaaggacatatcccaagcctactatacttag

SEQ ID NO: 108361 - DNA, 315 bp, synthetic construct
  misc_feature 1..315: note = Description of Artificial Sequence: Synthetic coding sequence
  source 1..315: mol_type = other DNA
atggcctccatttgggtaggacataggggcacggtgagggactatcctgatttctctcctagcgtcgacgctgaggctattcaaaaagctattagaggaatcggtactgacgagaaaatgttaatttctatccttacagaaaggtctaatgcccaaagacagctaatagtgaaagaataccaggccgcctacggaaaggaacttaaagacgatctgaaaggcgacttgtctggccattttgagcacctaatggttgcacttgtaacacctccggcagtgtttgacgccaagcagctgaagaaaagtatgaagtag

SEQ ID NO: 108362 - DNA, 465 bp, synthetic construct
  misc_feature 1..465: note = Description of Artificial Sequence: Synthetic coding sequence
  source 1..465: mol_type = other DNA
atggcatccatttgggtcgggcatagggggaccgtccgggactacccagacttcagtccaagtgtcgatgccgaggcaatccagaaggcaatacgaggcataggaaccgatgagaagatgctgatcagtattctaaccgaacggagtaacgcgcagcggcagctgatcgtaaaggagtatcaggctgcatacggtaaggagctaaaagatgacctcaaaggcgacttgtctgggcactttgagcacctgatggtcgctctcgtgacgccacctgccgttttcgatgccaagcagctgaagaagtccatgaagggggcaggcacaaacgaagatgctctgatcgagattctgactactagaacgagtagacagatgaaggatatcagtcaggcctactatactgtgtataaaaagtcactgggggacgacatttcaagcgagaccagcggagattttaggaagtag

SEQ ID NO: 108363 - DNA, 966 bp, synthetic construct
  misc_feature 1..966: note = Description of Artificial Sequence: Synthetic coding sequence
  source 1..966: mol_type = other DNA
atggcaatggcaacaaagggaggaacagtgaaggcggcaagcggcttcaatgctatggaggatgcgcagaccttgcggaaagcgatgaagggtctcgggacagatgaagatgctattatttcagttctcgcctatagaaatacggcccagcgtcaggaaattcgaaccgcttacaaatccactatcgggcgagatctcatcgatgacttaaaatctgagctgagcggaaatttcgagcaggtaatagtaggcatgatgacgcccactgttctgtatgatgtccaagaactgagaagggccatgaagggcgctggcacagatgaaggttgtctgatcgaaatcctcgcttcacggactcctgaggagatcaggaggatctcgcagacttatcaacagcagtacggtcgaagcctggaggacgatatccgctctgacactagctttatgttccagagggtgctggtgagcctcagcgctggcggacgagatgagggcaactacttagacgacgcactggttcgtcaggacgctcaggacctgtacgaggctggagaaaaaaaatgggggacagatgaagttaaattcctgacggttctgtgcagccgaaatagaaatcatttactgcacgtgttcgacgaatacaagaggatctcccagaaagatattgaacagtcgattaaatcagagacctcggggtcattcgaggacgcccttctggccatagtcaagtgtatgcgcaacaaaagcgcatactttgccgaaaagttgtacaagtctatgaaaggcctgggaaccgacgacaacactctgattagagtgatggtctcacgcgctgagatagatatgcttgacataagagcacatttcaagaggttatatgggaagtctctatattctttcatcaaaggggatacatccggcgattacaggaaggtcctgctagttctttgcggcggggacgattag

SEQ ID NO: 108364 - DNA, 900 bp, synthetic construct
  misc_feature 1..900: note = Description of Artificial Sequence: Synthetic coding sequence
  source 1..900: mol_type = other DNA
atggctatggccacgaaaggaggaaccgttaaagccgcgtcaggattcaatgctatggaggatgcacagacacttagaaaggcaatgaagggattaggaaccgacgaggacgctatcatctccgttttggcctatcgcaatacagcccaacggcaggaaattcggaccgcctacaagagtacaattgggcgtgatctgatcgacgatctgaagtcagaactctctggcaactttgagcagggcgccggcactgacgaagggtgtttgattgagatcctagcctctcgaaccccggaggaaatacgccggattagtcagacctaccaacagcaatacggtcggagtcttgaggacgacatcagaagtgacacatccttcatgttccaacgcgtgcttgtgagcttgagtgccgggggtcgcgacgaggggaactatctggacgatgcactcgtgcgccaagacgcccaggatctgtacgaagccggggaaaagaagtggggcacagacgaggtgaagtttctcaccgtgctgtgcagtcggaatcgcaaccacctgctgcacgtctttgatgagtacaaaagaataagtcagaaagatatcgagcaaagcattaagagtgagacctcgggctcttttgaggatgcactcctggctatcgttaaatgtatgcgaaacaagtccgcctacttcgccgaaaaattatacaaaagcatgaaaggcttaggcacagacgataacacgctgatacgggtgatggtgtccagagccgagatagacatgcttgatatccgagcgcatttcaagcgcctttatggaaaatcactgtattccttcataaagggagacactagcggcgactacagaaaggttctgttggtgttatgtggcggagacgattag

SEQ ID NO: 108365 - DNA, 714 bp, synthetic construct
  misc_feature 1..714: note = Description of Artificial Sequence: Synthetic coding sequence
  source 1..714: mol_type = other DNA
atgatgacccccactgtgctgtatgacgtgcaggagctgcgacgagcgatgaaaggggctggtactgacgagggctgcctgattgagattctggcctctcgcacccctgaggaaataaggagaatttcccagacgtaccagcaacagtacggacgatcattggaggacgatataaggtccgatacctcattcatgttccagagagtgctagtgtcactatctgctggcgggcgcgatgaggggaattatctagatgacgcgctggtgcgccaagacgctcaggatttgtatgaagcgggcgaaaagaagtggggaacggatgaagtcaagttcctgacagtgctgtgcagccggaacaggaatcatcttcttcacgttttcgacgaatataagcgcatatctcaaaaggacattgagcagtccatcaagagcgagacctcaggaagcttcgaggacgctctgctggcaatcgtgaaatgtatgcgtaataagagcgcctactttgccgagaaactctacaagtcaatgaagggactgggcactgacgataacacgcttattagagtcatggtgtctcgagcggagattgatatgctggatatcagagcccactttaagcggctctatgggaagtctttgtactccttcatcaagggcgatacatctggggactacaggaaggttctgctggtgctgtgcgggggggatgactag

SEQ ID NO: 108366 - DNA, 963 bp, synthetic construct
  misc_feature 1..963: note = Description of Artificial Sequence: Synthetic coding sequence
  source 1..963: mol_type = other DNA
atggcacaagtcctgagagggacagtaactgattttccgggtttcgacgagcgggcagatgctgaaactttgcgtaaagccatgaaaggacttggcacagacgaggagagtatcctgacccttctcacaagtagatctaacgcgcagcgacaggaaatctccgcagccttcaagacactctttggtagagaccttctggatgatctaaagagtgagctgaccggtaaatttgaaaaactcatcgtggccctaatgaaaccctctaggctgtatgatgcctatgagctgaaacacgcccttaaaggcgccgggaccaatgaaaaggtgttgactgagatcattgcctcccgcaccccagaagagctgagggccatcaagcaggtgtacgaggaagagtatggttcctctctcgaggacgacgttgtaggggacactagcggctactatcaacgcatgctggtggttctcctccaggcaaatagagatccggatgcaggaattgacgaggcccaagtggagcaggacgcgcaggccttattccaggccggtgaactgaaatggggtaccgacgaagaaaagtttataaccatttttgggacacgtagtgtcagccaccttcgcaaagtctttgataaatacatgactattagtgggtttcaaatcgaggagacgatcgacagagagacatcaggcaacctggagcagctgctcctggccgtggtgaagtctattagaagcattcccgcatacctggccgagaccttgtactatgctatgaagggtgctggcacggacgatcataccctcatacgggtaatggtgtctcgcagtgagatcgatctgttcaatatacgcaaagaatttcgaaagaactttgcaacctcattgtacagtatgataaagggcgacaccagtggtgattacaaaaaagcactgctcctgttatgtggcgaggatgattag

SEQ ID NO: 108367 - DNA, 2022 bp, synthetic construct
  misc_feature 1..2022: note = Description of Artificial Sequence: Synthetic coding sequence
  source 1..2022: mol_type = other DNA
atggccaaaccggcgcagggtgccaaataccggggcagcatacatgatttcccagggtttgaccccaaccaagacgccgaggcactgtatacagcaatgaagggcttcggatcagacaaggaggccatcctcgacattataacatctcgcagcaataggcagaggcaggaggtgtgccaatcttataaaagtctatacggtaaagatctcatagctgatctaaaatacgaactgactggaaagttcgagaggctgatagtgggattaatgcggcctccagcctactgcgatgccaaggagatcaaggatgccatctccggtattggaacagatgagaagtgtttgatagagattctggcctcaagaaccaacgagcagatgcaccagctggttgcagcctacaaggacgcctatgagagagacttagaggctgatatcattggcgatacctcaggtcactttcagaaaatgctcgtggtgctgcttcagggcacacgcgaggaggacgatgtggtgtccgaggaccttgttcagcaggatgtgcaggacctgtatgaggctggagagctgaagtgggggactgatgaggctcagttcatctatatcctaggaaacagaagtaagcaacatctgagactcgtgttcgatgagtatttgaaaacaacgggcaagccaatcgaggctagcattagaggcgagctttccggagacttcgagaaattaatgctggccgtggttaaatgtatccgtagcaccccagaatatttcgccgaacggctcttcaaggcaatgaagggactcggaacgagggacaatacacttatccggatcatggtgagcagatctgagctggatatgctggacattagagaaatttttcgaaccaagtacgagaaatctctttatagtatgatcaaaaacgatactagcggagaatataagaagaccctgttaaaattgtctggcggggatgatgatgccgctggccaattcttccccgaagcagctcaggtagcataccagatgtgggaactgtccgcagtggcacgtgttgaactcaagggaaccgtcagaccagcaaatgacttcaaccccgacgctgatgctaaggccttgcgtaaagctatgaaaggcctgggaaccgacgaggacactatcatcgacatcattacccaccggagtaacgttcagcgccaacagattcgccaaacattcaaaagccattttggcagagacctcatgaccgaccttaagtcagagatcagtggagacctagctagactaatcctgggcctgatgatgccaccagctcactacgatgcaaaacagctaaaaaaggcaatggaaggagcgggaactgacgagaaagctctgatagagattcttgcaactagaacaaacgcagagattcgggctataaatgaagcctataaggaagattatcacaaatccttggaggatgcactgtcgagtgacaccagtggtcattttagacgcatccttatctctctagccacaggacacagggaagagggaggcgagaacctggaccaggcaagggaggatgcgcaggtagctgcagaaattctggagattgccgacacaccctctggcgacaagacaagtctcgaaacacgcttcatgaccatcttgtgtactagaagttaccctcatctgaggagagtttttcaagagttcatcaagatgaccaattacgacgtggaacacacgatcaagaaggaaatgagtggggacgttcgggatgcttttgttgccatcgttcagtccgtcaaaaataaacccttattcttcgcagacaagttgtataagtctatgaagggggccggaacggatgagaagactctgacccggataatggtctcaagatccgagatagacctgctgaatatacggagagagtttattgaaaagtacgacaagtccctgcatcaggcaatcgagggggatacgagcggtgattttctgaaggccctcttggctttgtgtgggggcgaagactag

SEQ ID NO: 108368 - DNA, 2004 bp, synthetic construct
  misc_feature 1..2004: note = Description of Artificial Sequence: Synthetic coding sequence
  source 1..2004: mol_type = other DNA
atggctaagcctgctcagggggccaagtacagaggaagcattcacgactttcctgggttcgaccctaatcaggatgccgaagccctctacaccgcaatgaaagggttcgggtccgacaaggaggcaattttagacatcataacaagccgtagcaatcgccagaggcaagaagtttgtcagtcttataaatcgctgtatgggaaggatctaattgctgaccttaaatacgagctgaccggaaagtttgagaggctcatagttgggctcatgcgccccccagcctactgtgatgcgaaagaaattaaagatgccattagcggcattggcaccgatgaaaagtgtctgattgagatccttgcgtctaggaccaatgagcagatgcaccagttagttgccgcctacaaagatgcctacgagcgagatttagaggccgacataatcggcgacacatccggccactttcagaagatgcttgtcgttctcctccaaggaactcgcgaggaagacgacgtcgtctctgaggacctggtccagcaagatgtacaagatctgtatgaagctggcgaactcaaatggggtactgatgaagcccagttcatatacatcttgggaaatcggtcgaaacagcatcttcgattagtgttcgatgagtacctgaaaacaactgggaagccgatcgaggccagcatccggggggaactgtccggagacttcgagaaacttatgctggctgtggtcaagtgtattcggagcactcctgagtactttgctgaaaggctcttcaaagccatgaaaggtctgggtacccgcgacaacacacttatcaggatcatggtttctagatccgagctggatatgcttgacattagggagatcttccgaacaaaatatgagaagagtctttacagcatgattaagaacgatacctcaggtgaatacaaaaagactctcctcaaactctccgggggcgacgatgatgccgcaggccagtttttccctgaagccgcccaggtggcctatcaaatgtgggaactgagcgccgtggctcgggtggaactgaagggcacagtaaggccagccaatgacttcaaccccgatgctgatgctaaggctctgcgaaaggctatgaagggtttggggacagatgaagataccatcatcgatattatcactcaccgctctaatgttcagaggcagcagatccgccagaccttcaaatctcactttggacgcgatttgatgactgacttgaagtccgaaatctcaggcgatctagccaggttgatcctggggcttatgatgcctcccgcccactacgacgctaagcagctgaagaaagccatggaaggggccggaactgacgagaaggcactaattgagattctagccaccaggactaatgcagaaatccgcgccatcaatgaagcgtacaaggaggattaccacaagagtctggaggacgctcttagctccgatacatccggccatttccgccggatcttgattagtttggctaccgggcatcgagaggagggaggtgaaaacctcgatcaagcccgggaggacgcacaggagatagcagacactccatccggcgataaaacaagccttgaaacaaggtttatgacgattttatgtacccgctcgtatccccacctacggagagtttttcaagagttcattaagatgacaaactatgacgtcgaacatacaatcaaaaaggagatgtctggagacgttagggatgccttcgtggccatcgtacagagtgtcaaaaataagccactgttctttgccgacaagctgtacaagagcatgaagggggccgggaccgatgagaagactttaacaagaatcatggttagccgtagcgagatcgacctacttaatatccgccgtgagtttatagagaagtatgacaaaagcctgcatcaggctatcgagggtgacacatcaggggattttctcaaggccttactggctctatgtggcggtgaggactag

SEQ ID NO: 108369 - DNA, 333 bp, synthetic construct
  misc_feature 1..333: note = Description of Artificial Sequence: Synthetic coding sequence
  source 1..333: mol_type = other DNA
atggcgaaacctgctcaaggtgcgaagtacagaggatctattcacgacttccctggatttgatcccaatcaagacgccgaagcattgtacaccgccatgaagggattcggctcggacaaagaagccattctagatatcattacgagccggtcaaatcgtcagcggcaggaggtctgtcagtcctataaatccctgtatggaaaagatctgatagctgaccttaagtacgagttaactggtaagtttgagcggctcattgtcggcctcatgaggccacctgcttactgtgatgccaaggaaattaaggatgcgatctcaggcatcggtacctag

SEQ ID NO: 108370 - DNA, 1926 bp, synthetic construct
  misc_feature 1..1926: note = Description of Artificial Sequence: Synthetic coding sequence
  source 1..1926: mol_type = other DNA
atgaagggctttggctccgataaagaagcaatcctagatatcattacatccaggtccaatcgacagcggcaggaggtgtgtcagtcgtacaagtctctgtacggaaaagatctgatcgccgacctcaaatacgaactgactggaaaattcgaaagattgatcgtgggacttatgagacctccggcatactgcgacgccaaagaaatcaaggacgcgatttctggcattgggactgatgagaaatgtctcattgagatattagcctcacggacaaacgaacagatgcaccagcttgttgccgcctacaaagatgcctatgagagggatttggaggccgacattatcggcgacacttcagggcatttccaaaagatgcttgtcgtcctcctccagggaaccagggaggaagacgatgttgtgtcggaggatttggtgcagcaggacgttcaggatctttacgaagctggggagctgaagtggggaactgacgaggcccagttcatttacattctgggcaatcgctcgaaacagcacctgagactagtctttgatgaataccttaaaactactggcaagccaatcgaggcctccatccggggcgaactgtcaggagactttgaaaagctcatgttagcggttgttaagtgtatccggtcaacaccagagtacttcgcagagcggctgttcaaggctatgaaaggtctgggcaccagagacaacacactcattagaattatggtctccaggagcgaattagatatgctcgatatcagagagatatttagaaccaagtatgagaaaagtctctacagtatgatcaagaacgataccagtggagagtataagaagacactgctcaagctgtcgggcggggacgatgatgcagctggacagtttttcccggaagctgctcaggttgcataccagatgtgggagttgagcgccgtggcaagggtggaattgaagggcacagtgcgccctgcaaatgacttcaaccccgacgctgatgccaaggcgctgagaaaggccatgaagggactcggcactgacgaggatactatcatcgacattatcacccaccgtagcaatgtgcaacgccagcagatcaggcagacatttaagagccattttggtagagatcttatgacagatctgaagtccgaaatcagtggggacctggcccggcttatcctagggctcatgatgccccctgcccattacgatgcgaaacagctgaagaaagccatggagggtgccgggactgatgagaaggccctgatagagatcctcgccaccaggaccaacgcagaaatcagagctatcaacgaagcctacaaagaagactaccacaagtccctggaagacgctttatctagcgatacctcgggacacttccgccgcatcctgatcagtctagctacaggccaccgggaggagggcggtgaaaatttagaccaagcaagagaggacgctcaggtcgctgctgagatccttgagatcgctgatactccatctggagacaagactagcctggaaacccggttcatgaccatcctctgcactagaagctatcctcatctccgccgagtcttccaggagtttattaagatgaccaactacgatgttgaacacactataaagaaagagatgtcaggcgacgtgagggatgctttcgtagcaatagttcaatccgtcaaaaacaaacccctgtttttcgccgataaattatacaagtccatgaagggagccggcacagatgaaaagaccctgacaagaatcatggtgtcacgctcggaaatcgatttgctcaacatccggcgggagttcatcgaaaagtacgacaagagcctccatcaagcaattgaaggggacacatccggagattttctcaaagcattactggcgctgtgtggcggagaggattag

SEQ ID NO: 108371 - DNA, 1644 bp, synthetic construct
  misc_feature 1..1644: note = Description of Artificial Sequence: Synthetic coding sequence
  source 1..1644: mol_type = other DNA
atgcaccagcttgtcgcggcgtacaaggacgcctatgaacgagacctggaagccgacataattggcgacaccagtggccattttcagaagatgctggtcgttctgctgcagggtactagggaggaagatgacgtagtttccgaagacctggtccagcaggacgttcaggacctgtatgaggcgggcgagttgaagtggggtactgacgaagcgcagtttatttatattctcgggaacaggagcaaacagcacctgcgcctggtgtttgatgagtacctaaaaaccaccggcaagcccattgaagcctccatccggggcgaactgtctggggattttgaaaaattgatgctggctgtcgttaaatgcattcggtcgacacctgagtattttgctgaaaggctattcaaggccatgaagggattgggtacgagggataataccttaatccgaatcatggtgtcccgctccgagctggatatgttagacatccgtgagatcttccgcactaagtacgaaaaatctttgtatagcatgattaagaacgatacgtcaggggaatacaagaagaccctgttaaaactgtctggcggagacgacgacgccgcaggtcaattttttcctgaagccgcgcaggttgcttatcagatgtgggaactgtctgccgtggcgagagtggagcttaaagggaccgtgcggcctgctaacgacttcaatcccgacgcagatgctaaagctctgagaaaggcaatgaaaggtttgggcaccgacgaggacactattatcgatattattacacacagaagcaatgtacagcggcaacaaatacgccagaccttcaaatcccactttggcagagacctcatgacagacctgaagagcgagatcagcggcgacctcgctaggctgatcctggggttgatgatgcctccagcccactatgacgcaaagcagctaaagaaggccatggagggagccgggacagacgaaaaagcactgattgagattcttgccacaaggacaaatgctgagatacgagccataaatgaggcatacaaggaggattatcacaagtcgttggaggatgccctgagttcagacaccagtggccactttaggagaattctgatatcactcgccactggccaccgagaagagggcggtgagaatctggatcaagccagagaggatgcccaagttgccgccgagatcctggagatagcggataccccatcgggggataagacatccctagagactcggtttatgacgattctgtgcaccaggtcttacccacaccttaggcgcgtgttccaagagtttattaagatgaccaactacgatgtcgaacatacaattaagaaggagatgtccggcgatgtgagggacgcttttgtggcgatagtgcagagcgtgaaaaataaacctttgtttttcgccgacaagctctacaagtctatgaagggagccggcacggatgaaaaaacgctcacccgcataatggtgagtcgctcagagattgacctcctcaacattcgcagggagttcatcgagaagtacgacaagagtctgcaccaagccatcgagggcgacaccagtggggacttcctcaaagcgctcctggctctctgtgggggcgaggattag

SEQ ID NO: 108372 - DNA, 1467 bp, synthetic construct
  misc_feature 1..1467: note = Description of Artificial Sequence: Synthetic coding sequence
  source 1..1467: mol_type = other DNA
atgagctatccaggctaccccccgactgggtaccctccattccctggctacccacccgcagggcaagaatctagcttcccgccaagtgggcagtatccttatccttccggttttcccccaatgggaggaggcgcctacccacaagtgccgagctcaggctatccaggggcgggcggttatcccgctccaggcgggtatcctgccccaggcggctatcccggcgctcctcagcctggtggcgccccatcctaccctggcgtaccacccggacaggggtttggtgtcccgcctggcggtgcaggattttcaggctatcctcaacccccttcacaaagctacggcgggggaccagcccaagtccctctccctggaggattcccgggggggcagatgcctagccagtacccaggcggtcagcccacctatcctagtcagattaacactgacagtttctcatcgtatcctgtgttctcacccgtgtcactcgattatagcagcgaacccgcaaccgtcacgcaagtgacccagggaacgattcggcctgcagcaaactttgatgctatcagagatgccgagatcctgcgcaaagctatgaagggctttggcaccgatgaacaggccatagtggatgtcgtcgcaaacagatctaatgaccagaggcagaagataaaggccgcttttaagacctcatatgggaaagatctcatcaaagacttaaagagcgagctgtcgggaaacatggaggagttaattctggcactgttcatgccccccacttactacgacgcatggtccttacggaaagccatgcaaggagctgggactcaggaacgcgtgttgatcgagatcctctgtaccagaactaaccaggagataagagagatcgtgagatgttatcaatcagagtttggacgcgacttggaaaaggacattaggtctgacacgtcaggccacttcgaacgcctcctcgtgagtatgtgtcagggtaatagggacgagaaccagtctataaaccatcaaatggcacaggaggatgcccagcgactatatcaagccggtgagggtagacttgggacggacgaatcatgttttaacatgatactagctacgcggtccttccctcaactccgtgccacaatggaggcctactctaggatggcaaaccgtgatctcctgagttctgtgtccagagaattcagtggatatgtggagtcaggattgaagaccatcctgcagtgcgcgttgaacaggcctgcctttttcgcggaacgcctgtactacgctatgaagggagcagggactgacgacagcaccctcgtacgaatagtggtcactcggtccgaaatagatctcgtccagatcaagcagatgttcgcacagatgtaccaaaaaaccctgggaaccatgatcgccggcgacacctccggcgattacagaaggctactgttagctattgtaggccagtag

SEQ ID NO: 108373 - DNA, 1401 bp, synthetic construct
  misc_feature 1..1401: note = Description of Artificial Sequence: Synthetic coding sequence
  source 1..1401: mol_type = other DNA
atgagctatcctggctacccaccgacgggatacccaccgttccccggttaccctcccgcaggtcaagagtccagttttccaccctctggccaatacccatacccctccggatttccacctatgggagggggcgcttaccctcaggttcccagtagtggctatccaggcgcagggggataccctgccccaggtggttatccagcccccggcggctaccccggcgctccacagccgggcggtgcccccagctacccaggcgttcctcccggccaagggtttggcgtcccccctggcggcgctggtttctccgggtaccctcagccaccttctcagtcctatggtggcgggcctgctcaggtgccactgccgggcggttttcccggaggtcagatgccctctcaatatccgggtggtcagcctacctacccaagccagccagcgaccgtcacacaagtcacccaggggaccatcaggcctgctgcaaactttgatgccattcgagacgcggaaatattgaggaaggctatgaaaggcttcggcactgacgagcaagccatagtggatgttgtggccaatagatctaacgaccaacgccaaaagattaaagctgccttcaaaacttcgtacgggaaagatcttataaaagatctgaaaagcgagctgtcgggcaacatggaggagctcatcttggctctattcatgccaccaacgtactacgacgcttggtccctacgcaaagccatgcagggtgccggcacacaagaacgtgtcctgatcgaaatcctgtgcacccggactaatcaagaaatacgggagattgtgcggtgctatcagtcggaattcggccgagacctggaaaaagacatccgctctgatacaagtggccactttgaaaggctgctcgtgtctatgtgtcaggggaacagggacgagaaccagagcatcaatcaccagatggcacaggaggatgcccagcgtctgtatcaggcgggtgagggaagattgggaaccgacgagagctgcttcaacatgatccttgctactcgcagcttcccacagctgcgagcaaccatggaagcatactcacgcatggctaatcgcgatcttctctccagcgtgtcccgagaattcagcggatatgtagagtccggtctgaaaacgattcttcagtgtgctcttaaccgcccagcttttttcgcagagaggttgtattacgctatgaaaggagctggaaccgacgattctacactggtaagaatcgttgtgacacgctccgagatcgacctcgtccagattaagcagatgtttgcgcagatgtaccagaagaccttgggaacgatgattgctggtgacacatcaggagattatagacggctgctgctggcaattgtggggcaatag

SEQ ID NO: 108374 - DNA, 435 bp, synthetic construct
  misc_feature 1..435: note = Description of Artificial Sequence: Synthetic coding sequence
  source 1..435: mol_type = other DNA
atgtcttatcctggttatccacccacaggctaccctcccttcccggggtacccaccggctggccaagagagcagctttcccccaagcggccagtacccatacccaagcgggtttccgccaatggggggaggggcttatcctcaggtgcctagttcagggtaccctggggccggtggttaccccgcccccgggggttacccggcccctgggggatacccgggcgccccacagcccggtggtgccccctcctatccaggggttcctcctggacagggctttggtgtgccacccggtggcgcaggctttagcgggtacccacagccacccagccaatcttatgggggagggcccgcacaagtgcctcttcccggcggattccccggcggccagatgccctctcaatatcccggcgggcaacctacgtaccctagttag

SEQ ID NO: 108375 - DNA, 1011 bp, synthetic construct
  misc_feature 1..1011: note = Description of Artificial Sequence: Synthetic coding sequence
  source 1..1011: mol_type = other DNA
atgcccagtcagtaccctggtgggcagcctacctatccttctcaacctgctaccgtcacccaggtcacacaaggcaccatcagacctgccgcaaactttgacgcaattcgggatgccgaaatcttgaggaaggctatgaagggctttggtacagacgagcaagccatcgtagatgtagtagccaatcgctctaatgatcagcggcaaaaaattaaagctgccttcaagacctcctatggcaaagacctcattaaggatctgaagtctgaactgtctggaaatatggaagagctaatcctcgcactgttcatgccccctacgtattacgacgcatggagcttgagaaaagctatgcagggggcggggacccaagaaagagtgttgatcgaaattctctgcactcgtaccaaccaggaaattagggaaattgtcaggtgttaccaaagcgagtttggtagggaccttgaaaaagatattcgctccgatacctcaggacatttcgagcggctccttgtcagcatgtgtcaagggaaccgcgacgagaaccagagtattaaccatcagatggcccaagaggatgcacagcggctttaccaagcaggagaaggtaggctgggcactgatgaatcgtgttttaatatgattctcgccacacgctcctttccccaactgcgcgccaccatggaagcatacagtcgtatggccaaccgggacctcctgagctccgttagcagagaattctccgggtatgtggaatccggattaaagacaatacttcagtgcgccctcaacaggccagccttcttcgccgaaaggctctattacgctatgaaaggcgctggcacggatgactcaactctcgtgcgcatcgttgtgactaggtccgaaatagatttggtacaaattaaacagatgtttgctcagatgtaccagaaaactctggggaccatgatcgcaggggacacttccggagactatcgccgactcctcttggcaattgtgggccagtag

SEQ ID NO: 108376 - DNA, 984 bp, synthetic construct
  misc_feature 1..984: note = Description of Artificial Sequence: Synthetic coding sequence
  source 1..984: mol_type = other DNA
atggcatggtggaagagttggatcgagcaggagggagtgaccgttaagtcttcttctcacttcaacccagacccggatgccgagacactgtataaagctatgaaggggattgggaccaacgaacaagccatcattgacgtcctgacgaaacgatccaacacccagagacaacagatcgctaagtccttcaaggcccaattcggcaaggacctcacagagactttgaagagcgaactgtctgggaagttcgaacgcttgatagtagcactgatgtatccaccgtatcgttatgaagctaaggaactccacgatgccatgaagggactcgggactaaagagggggtgatcatagagatcctcgcctcacgaactaagaaccaactgcgcgaaattatgaaggcatatgaggaagactacgggagcagcctcgaggaggatattcaggccgacacaagcggttatcttgagcgtattttagtgtgccttctccaggggtcccgggatgatgtcagcagcttcgtcgaccccggtctcgctcttcaggacgctcaagatctttatgctgcgggcgagaaaatccgcggtacagatgagatgaagtttatcactattctctgcaccagaagtgccacacacctcctgcgcgtcttcgaggagtacgagaagatagcgaacaaatccattgaagactcaatcaagagcgagacccacggcagcctggaggaggctatgttgaccgtagtgaagtgcacccaaaacctgcactcatatttcgcggaacgtttgtactacgctatgaagggagccggaacacgggatggcactctgataaggaacatcgtgagtagatccgaaatagacttgaacctcattaaatgtcatttcaagaagatgtatggtaagaccctgagttccatgattatggaagatacaagcggcgactacaagaatgccctgctcagtttggtaggatcagatccctag

SEQ ID NO: 108377 - DNA, 831 bp, synthetic construct
  misc_feature 1..831: note = Description of Artificial Sequence: Synthetic coding sequence
  source 1..831: mol_type = other DNA
atggcctggtggaagtcctggatcgaacaggagggcgttacggtgaagtcctccagtcatttcaaccccgatccagatgcagaaaccttgtataaagctatgaagggtattggcgtgggctctcagctgctctctcaccaggctgctgccttcgccttcccaagttccgcacttactagtgtgtccccctgggggcaacaggggcatttgtgctgcaacccggcagggaccaatgagcaagcgataattgatgttttgacaaaacggagcaatactcaacggcaacagattgctaagtctttcaaagcccagtttgggaaggacttaaccgaaacactcaagtcagagctgtctggtaagttcgaaaggttaatcgtcgccctgatgtatccgccctacaggtatgaagctaaggagctgcatgacgccatgaagggctctcgtgacgacgtatcttctttcgtggatcctgggctagccctccaggatgctcaggatctttatgcggccggagaaaagatacgtgggaccgatgagatgaaattcatcaccatcctctgcacaagaagcgccactcatctgttacgagtcaaatgtacccagaacttgcactcctattttgcggagcggctctactacgccatgaaaggcgcggggacacgtgacggaacactgataagaaacattgtgtcccgtagcgaaatcgatcttaacttgatcaaatgccacttcaaaaagatgtatggcaagaccctgagtagtatgatcatggaggacacctcaggcgactacaaaaacgccctgcttagccttgtggggtctgatccctag

SEQ ID NO: 108378 - DNA, 798 bp, synthetic construct
  misc_feature 1..798: note = Description of Artificial Sequence: Synthetic coding sequence
  source 1..798: mol_type = other DNA
atggcctggtggaagagctgggacctcacagagacactgaaatcagagctctccggcaaatttgagcgcttgatcgtcgcgctgatgtatcccccctaccggtatgaggcaaaagaattgcatgacgccatgaaagggctcggcacaaaagagggcgtcatcatcgaaatcctggcttcgagaacaaaaaatcagttaagggaaattatgaaagcctacgaagaagattacgggagctccttagaggaggatatacaagcagacacaagcggctacctggaacggatcctggtatgcttactccaaggctcacgagacgatgtaagttcttttgttgatcccggcttggctctgcaggacgcacaggacctatacgcagctggagagaaaatccgtggcactgatgagatgaagttcataacgatcttgtgtactcggagcgctactcatctcctgagggtcttcgaggaatacgagaaaattgcaaacaagtccatcgaagatagtattaagtccgagacccacggttcattggaagaggcgatgttaaccgtcgttaagtgcacccaaaatttgcactcttatttcgcggagcgactttattatgccatgaagggggccggcacaagagacgggacactaattaggaatatcgttagtcgtagcgagatcgacctgaacttaatcaaatgccatttcaaaaaaatgtatggcaagaccctctccagcatgattatggaggatacctcaggggactacaagaatgctcttctgtccctagtggggtccgatccttag

SEQ ID NO: 108379 - DNA, 426 bp, synthetic construct
  misc_feature 1..426: note = Description of Artificial Sequence: Synthetic coding sequence
  source 1..426: mol_type = other DNA
atggcctggtggaaaagctggatcgaacaggaaggggtaactgtgaagtcttcctcccattttaaccccgaccctgacgctgagaccctgtacaaggccatgaaaggcattggaactaatgagcaggccataatcgacgtcctcacaaaaaggtcaaacacccagcgtcaacaaatagcaaaatccttcaaagcacagtttgggaaggatctgacagaaaccttaaaaagtgagctgtccgggaagtttgagcgtttaatcgtagccttaatgtaccccccgtacagatacgaagccaaggagctccacgacgctatgaaagggttagggaccaaggagggagtgatcatagagatcctggcatccagaaccaaaaaccaactcagggaaatcatgaaagcctatgaggaagggcagcagggctag

SEQ ID NO: 108380 - DNA, 1038 bp, synthetic construct
  misc_feature 1..1038: note = Description of Artificial Sequence: Synthetic coding sequence
  source 1..1038: mol_type = other DNA
atgtcagtaaccgggggcaagatggctcctagcctgacccaggagattctatctcatctcggactggccagcaaaacagctgcttgggggaccctggggaccttacgaacttttctgaacttcagcgtcgacaaagatgcgcagaggttgctgcgggcaataaccggccagggagttgaccgttcagctattgtcgatgttctgaccaaccgcagtagagagcaaaggcaactaatatcacgaaactttcaggagaggacccagcaagaccttatgaagagcctccaggctgcgttgtccggaaatctcgaaagaatcgtgatggcccttctacaacctaccgcccaatttgatgctcaggagctcagaacagccctgaaggcctcagactctgctgtggacgtcgcgattgagattcttgcaaccagaacccctccccagcttcaagaatgtctcgccgtctataagcacaacttccaagtggaagccgtggacgatatcacttctgaaacaagcgggatcctgcaggacctgctgctggcactcgccaagggcggccgggattcttacagcgggataattgactacaacttggccgaacaggacgtacaggccctccagagagcagagggtccctcccgagaagagacctgggttccagttttcacccagcggaaccccgagcacctgatccgtgttttcgaccagtaccaacggtcgacggggcaggagctcgaagaagctgtgcaaaacaggtttcacggggatgctcaggtcgccttgctgggacttgcttcagtgatcaagaataccccactctatttcgcagacaagctgcaccaggcgctgcaagaaactgaaccaaattatcaggtgctcatccggatcctaatatcacgctgtgagaccgacctcttatccatccgcgctgagtttagaaaaaaatttgggaaatctctgtacagcagcctgcaagatgccgtcaaaggggattgtcaatcagcccttctggccctctgtagagctgaggacatgtag

SEQ ID NO: 108381 - DNA, 1929 bp, synthetic construct
  misc_feature 1..1929: note = Description of Artificial Sequence: Synthetic coding sequence
  source 1..1929: mol_type = other DNA
atgctgactcgcccgtcccaggtcctccttaacagcctgtcagttgatcctgacgcagaatgcaagtacggcctgtatttccgcgacgggagacgaaaagtggactacattttggtgtaccaccacaaacggcctagcgggaataggactcttgtcagacgtgtgcagcacagtgacacccccagtggggccagaagtgtgaaacaggaccatcctttaccagggaaaggagcctcgttggatgcgggttccggcgagccgcctatggactatcatgaggatgataagcgcttcaggagagaagagtatgagggaaacctgctggaggccggcttggagctagaacgagacgaggataccaagatccatggcgtcggctttgtgaaaatccatgcaccctggaacgtgctctgccgagaggctgaattccttaaactgaaaatgcccacaaagaagatgtatcacatcaacgagacccgtgggttgctcaagaagattaattccgtcctgcagaagattacagatcctattcaacctaaagtggctgagcacagaccacagactatgaaaagactctcttaccctttcagtagggaaaagcaacacctgttcgatctaagcgacaaggacagctttttcgacagcaaaacccgctctacaattgtttatgagatactgaaaagaaccacctgcactaaggcgaagtactcaatgggcatcacttccctgctcgccaatggtgtgtatgctgccgcttaccctctgcatgacggcgactataacggtgagaatgttgaattcaatgacaggaagctgctgtacgaagaatgggcgaggtacggcgtattttacaagtatcagcctatcgacctggtgcggaagtactttggcgagaagatcggactgtactttgcgtggctgggggtgtacacccagatgctgatccctgcctcaattgttggtattattgtgtttctgtatgggtgtgccactatggatgagaatattccaagcatggagatgtgcgaccaaaggcacaatatcactatgtgtcccctatgcgacaagacatgcagctattggaagatgagttccgcatgcgcaaccgcccgtgcatctcacttgtttgacaatccagccaccgttttcttcagcgtattcatggctctgtgggccgcaacctttatggagcactggaaacggaaacaaatgaggttaaactaccgctgggacctcacaggattcgaggaagaggaagatcacccgagggccgaatatgaagcccgagtgctggagaagtcactcaagaaagagagtcgtaataaggaaactgacaaggttaaattaacgtggagggatcgttttcccgcctacttaaccaaccttgtgagcattatttttatgatcgctgtgactttcgcaatagtccttggggtcattatctaccggataagcatggccgcagctctggccatgaattcttcacccagcgtgcgcagcaacatccgggtgacagtgaccgcaactgcagttattatcaacctggttgtgatcattctgctggacgaggtgtacggatgcattgcaaggtggttgacaaaaatcgaagtacccaagacagaaaagtcatttgaggagcgcctgatctttaaggcctttcttttaaagtttgtaaatagctacaccccaattttttacgtggcatttttcaaaggcagatttgtgggcagacccggggactatgtgtacattttccgcagcttcaggatggaagaggtaaccgaaatcctgttcattagtgggtcaccattctgcttggcctatgacttgagtaccccgtgtacctgggagaaacagctccagcacatatgcagtgccaaaagctcccggtttttaagctttttgctggaaacgtttctgttcccatag

SEQ ID NO: 108382 - DNA, 2961 bp, synthetic construct
  misc_feature 1..2961: note = Description of Artificial Sequence: Synthetic coding sequence
  source 1..2961: mol_type = other DNA
atgagagtgaacgaaaaatacagcactctacctgctgaggaccggtctgtgcacatcatcaatatatgcgctatagaagacataggctaccttccatcagagggaacactgcttaacagtctttcagtcgatccagatgccgagtgcaaatacggcttgtattttagggacgggcgcaggaaggtggattatattttagtttaccatcacaagcgcccctccggtaacaggacattggttagaagagtgcaacattcagatactccctcaggagccaggtccgttaagcaagatcacccactgccaggcaaaggcgcctctcttgacgctggctctggagaacccccgatggattaccatgaagatgacaaaagattcaggcgagaagaatatgagggtaatctcttggaggccgggcttgagttggagcgagatgaggacacaaagatccatggcgtcgggtttgtgaagatccacgctccatggaacgttctgtgtcgagaggccgaattcttgaagttaaaaatgccaacgaaaaagatgtatcatattaatgagacccgaggcctgcttaagaaaatcaattctgtgctgcagaaaataactgatcctatccagcccaaggtcgcggagcacagaccccagacgatgaagaggctgagctacccattcagcagagaaaagcagcacctgttcgatctgtcggacaaagatagctttttcgactccaagacccggagtaccatcgtgtacgaaattctgaagcgtaccacatgcacaaaggcaaagtattccatgggaataacttctctgttggcaaacggtgtgtacgccgctgcctacccactgcatgacggtgactacaacggtgagaatgtagagtttaacgaccgcaaactcctgtacgaggaatgggccaggtatggagtattctataagtaccaacctatcgatttggtaaggaagtacttcggggaaaaaataggtctgtacttcgcttggttgggagtttatactcagatgctcatcccagcttccattgtagggatcatagtgtttctgtatgggtgcgccacaatggacgaaaatattccgtcaatggagatgtgcgaccaacgccataacattactatgtgccctttatgcgacaagacctgttcttactggaagatgtcctcggcctgcgctaccgctagggcttcgcatctctttgacaatcctgccacggtgtttttctctgtgtttatggccctctgggccgccaccttcatggaacactggaagcgcaagcaaatgcggctgaactacaggtgggatctcactggctttgaggaggaggaggaggcagtcaaggaccacccaagggctgaatacgaggcaagggtgctggaaaaatccctgaaaaaagagtctaggaacaaggagaaaagaagacatatccctgaagagtctaccaacaaatggaaacaacgagtaaaaactgccatggcaggcgtcaagctgaccgataaggtcaaactgacttggcgggatagattcccagcctacttaaccaatctagtgtccattatcttcatgatcgccgtgacttttgctattgttctgggtgtgatcatatacaggatttccatggctgccgccctggcaatgaacagctcgccatcagtgagatcaaatatcagagtgacggtgacagctaccgccgtgattatcaaccttgtggttataatcctcttagacgaagtttacggctgcatagcgcgatggctcacaaagatcgaggtgcctaagacagaaaaatcctttgaggagaggttgattttcaaggcttttctgctgaaatttgtgaactcctatacccccatcttctatgttgcgttctttaagggccgattcgttggaaggccgggggattacgtgtatattttccggagttttaggatggaggaatgcgctccgggaggctgtttgatggagttatgtatccaactatcaataattatgctgggcaaacagctgatccagaacaatttatttgagataggaatccccaaaatgaaaaagctcatccgctatctaaagctcaagcagcagagccccccagatcacgaggagtgcgttaagaggaaacagaggtacgaagtggattataaccttgaaccctttgctggcctgacgccagagtacatggagatgatcattcagttcgggttcgtcaccctctttgtggcctcctttccgctcgcccccctgtttgctctgttaaacaacatcattgaaattcgcctggacgctaagaagtttgtcacggagctgagaagaccagttgccgtcagggccaaggatattggaatctggtataacatcttacgcgggattggaaaactcgccgtcatcatcaacgctttcgtgatttcttttaccagtgatttcatccctcggttggtctacctttacatgtattcaaagaatggaaccatgcatgggtttgttaatcatactctctcatctttcaacgtgtcagacttccagaatggcaccgcccccaacgatcctctggatctcgggtacgaagtgcagatttgcagatacaaagactaccgggagcccccatggtccgagaataagtacgacatttcgaaagacttctgggcggtgctggctgccagactcgcctttgtgatagtcttccagaacctagttatgttcatgtcagatttcgttgattgggtgatccctgacatccccaaggacatttcccagcagattcacaaggagaaggtcctgatggttgagctatttatgcgggaggagcaggacaagcagcagctgctggaaacatggatggagaaggaaaggcagaaagatgagcccccatgcaaccatcacaataccaaggcttgccccgactctctcgggagtcctgccccgtcccacgcttatcatggtggagtgctgtag

SEQ ID NO: 108383 - DNA, 2523 bp, synthetic construct
  misc_feature 1..2523: note = Description of Artificial Sequence: Synthetic coding sequence
  source 1..2523: mol_type = other DNA
atggactaccacgaagatgacaaaaggttcaggagagaggagtacgagggtaacttacttgaggctgggttggagctggagcgggacgaggacactaagattcatggggtcggctttgtgaaaatccatgccccctggaacgtgttatgtagggaggccgagtttttgaagttgaagatgcccactaaaaaaatgtaccacattaatgaaaccagaggcctgctaaagaaaattaacagcgtgctgcagaaaatcacggatcctatccagcctaaagtcgctgaacataggcctcagaccatgaaacgactctcctacccttttagtcgcgaaaaacagcacctgttcgatctgagtgataaagattctttcttcgactcaaagacacgctcaaccatcgtttacgagatcctaaagagaacgacttgtactaaggccaaatactccatgggcattacaagcctgctggcaaatggagtgtatgctgccgcctatccgctgcacgatggcgattataatggagaaaatgtggagttcaatgatcgcaagctgctctacgaagaatgggcgaggtacggggttttctataagtaccagcccatcgacctggtcaggaaatatttcggggagaagataggactctactttgcttggctcggagtttatacgcaaatgcttataccagccagcatcgtcggcataatcgttttcttatatggctgcgcaactatggatgagaatattccttctatggagatgtgtgatcagaggcacaacattaccatgtgtcctttgtgtgataaaacctgctcctattggaagatgagctcagcttgtgctaccgcacgggcttctcacctgtttgataatcccgctactgtgtttttctcagtctttatggccctgtgggccgccacctttatggagcattggaaaagaaagcagatgagattgaattaccgttgggatctcactggtttcgaagaggaggaggaccaccctagggcagagtacgaggcccgcgtcctggagaagagtctcaagaaagagtctcggaataaagaaacggacaaagtgaagcttacatggagagacaggttccctgcgtacctgacgaatttggtgtccatcatttttatgatcgccgtcacctttgcgatcgtgttgggagttattatctaccgcatttccatggccgcagctctggcgatgaactccagcccttcagttcggagcaatataagagtgaccgtgaccgccacagctgttatcattaatttagtggtcattatcctgctggacgaggtttatggctgcatcgcccgatggctaaccaagatcgaggttcccaaaacagagaaaagcttcgaggagaggctgatctttaaggctttcctgctgaaatttgtgaactcatacacccccatattctatgttgccttcttcaaaggtcggttcgtgggccggcccggagattacgtttacatttttcgctcttttaggatggaggaatgtgccccaggggggtgcctcatggaactgtgtatccagctgtccataatcatgcttggcaagcaactgattcagaacaatctgtttgaaataggtatccccaagatgaaaaaactaattcgttatttgaagctcaagcagcagtcacccccagaccacgaagaatgtgtgaagagaaagcaacggtatgaagttgactataacctggagccattcgcgggcttaactcctgagtacatggagatgattattcagtttggatttgtaactttgttcgtagctagctttcccctggccccactgttcgcccttctcaacaacattatagaaataagactggacgctaaaaaatttgtcaccgagttacgccggccagtggctgtcagggccaaagacataggcatctggtacaatatcctcagaggcattggaaaactggcagttattatcaacgcctttgtaatttcttttacaagtgattttattccgcggctcgtttacctgtacatgtatagcaagaatggcaccatgcacggttttgtgaaccacactcttagtagctttaacgtgtccgacttccaaaatggcactgctccgaacgatcctctcgatcttggttacgaggttcaaatatgtcggtataaagattacagggaaccaccatggagtgaaaacaagtacgatatcagcaaggacttttgggctgttctcgctgcccggcttgcgtttgttatcgtgtttcaaaatctcgtcatgttcatgagtgatttcgtggattgggttatcccagacatacccaaagacatttctcagcagatccataaagagaaagtgctgatggtggagctgtttatgagggaggagcaggacaaacaacaactactggaaacctggatggaaaaagagagacagaaggacgagcccccgtgcaatcatcacaacaccaaggcttgtcctgattcccttggttcacctgccccatcacacgcttatcatgggggcgttctctag

SEQ ID NO: 108384 - DNA, 2523 bp, synthetic construct
  misc_feature 1..2523: note = Description of Artificial Sequence: Synthetic coding sequence
  source 1..2523: mol_type = other DNA
atggattatcacgaggacgataaacggttccgtagagaggaatatgagggcaacctcctggaagcgggattggagctagaaagggatgaggacactaaaatccatggtgtcggctttgtcaaaatccacgctccttggaatgttttatgtagagaggcggaattcctgaagttgaaaatgcctacaaagaaaatgtaccatattaacgagactcgtgggctgctcaagaaaattaatagcgtgctgcagaaaatcactgaccctatccagcctaaagtggccgaacacaggccccagacgatgaagcggctgtcttacccattcagtcgtgagaagcagcatctttttgatctgtccgataaggacagtttctttgattccaaaacgcggagcactatagtttacgagattttgaaaagaacaacctgcaccaaggcaaagtacagcatggggataaccagcctcctggcgaacggtgtttacgctgccgcatacccactacacgacggtgactacaacggcgagaatgtggaatttaacgacagaaagctattgtacgaagaatgggccaggtacggcgtcttttataagtaccagcctattgacctagtcagaaagtatttcggtgaaaagataggtctttacttcgcctggctcggggtatatacccaaatgcttattccagctagcatcgtgggaattattgtgtttctttatggctgtgctaccatggacgagaacattcctagcatggagatgtgcgaccaaaggcataatataacaatgtgcccgctgtgtgacaagacatgtagctattggaaaatgagtagcgcctgcgcaaccgcacgcgcctctcacctattcgacaaccccgctacagtgttctttagcgtgtttatggccctatgggccgcaaccttcatggagcactggaagcggaagcagatgcggctgaattacaggtgggacttgacaggcttcgaggaggaggaggatcacccacgtgccgaatacgaggcgcgggtcctggagaaatcattaaaaaaagaatcacggaacaaagagaccgataaggtcaagcttacatggagagatagattcccagcctacttaacgaatttagtcagtattattttcatgatcgcggtaacgtttgccatcgtgcttggggtgatcatatatcggatttcaatggcagctgccctggctatgaatagctccccttccgttcggtccaatatccgtgtgactgtcacagccactgccgtcattatcaatcttgtagttataattttactggacgaagtttacgggtgcatcgccagatggctcaccaagattgaagtgccaaagaccgagaagtcattcgaggaaagactcatcttcaaagctttcctcctgaagttcgttaacagctacactcccatcttctacgtggctttcttcaaaggtcgctttgtaggtcgacccggggactacgtgtacatcttccgcagtttcagaatggaagaatgcgccccaggaggctgtctgatggagctgtgcatacagttgtctatcataatgctggggaaacagctaatccagaataacttgtttgagattggaattccaaagatgaaaaagctgattagatacttgaaactgaagcagcagtccccacccgaccacgaggagtgcgtaaaaagaaagcagcggtacgaggtggactacaatctcgaaccatttgctggactgactcctgaatacatggaaatgatcatccagttcgggttcgttaccctttttgtagcctcctttcctctggcgcccctcttcgccctactcaacaacatcatcgagataagactcgacgcaaaaaagttcgtgactgaactgagacgcccagttgcagtgcgcgccaaggacattggaatttggtacaatattctacgcgggatcggaaagctggccgttattattaacgccttcgtcatcagtttcacaagcgattttattcctcggctcgtgtacctgtacatgtactccaaaaacgggactatgcacggatttgtcaatcacacactgagcagctttaacgtcagtgattttcagaatggaacagcacctaatgaccctctggatctgggatatgaggtccagatctgtaggtacaaagactacagagagcccccatggagtgagaataaatacgacattagcaaagatttctgggccgtcttggccgctcgactcgccttcgtcatcgtgttccaaaatctcgttatgttcatgtcagattttgtagactgggtcattcctgacatcccaaaagacataagtcagcagattcataaggagaaggttcttatggtggaactgtttatgagggaagagcaagacaaacaacagcttctagagacctggatggagaaggagagacagaaggatgagccaccctgcaatcaccacaacactaaggcttgtcctgactcactcggctctcccgcaccaagtcacgcataccacgggggagttttgtag

SEQ ID NO: 108385 - DNA, 2961 bp, synthetic construct
  misc_feature 1..2961: note = Description of Artificial Sequence: Synthetic coding sequence
  source 1..2961: mol_type = other DNA
atgcgcgtgaatgagaagtattctacactcccggcggaggaccgctccgttcacatcattaacatctgtgccattgaggatattgggtatctgccatcagagggtacactgctcaactctctctcggtggaccctgatgcagagtgtaagtacggcctgtactttagagacggccgacggaaagttgattatatcctcgtttatcaccacaaacgacctagtggtaaccggaccctggtccgccgcgttcagcactcagatacgccatccggagctagaagcgtcaaacaagatcatcctttgccaggcaagggcgcaagcttggacgccgggtctggtgagcccccaatggactatcacgaagacgataagcgctttcggcgcgaggaatacgaaggcaatctcctggaggctggcctggaactggaaagagatgaggacactaaaatccacggcgtcggctttgtcaaaatccatgcaccctggaacgtgctgtgtagggaagccgaatttctgaagctaaagatgcctacaaagaagatgtatcacatcaatgagacgagggggctcctgaagaaaatcaatagtgtgctgcagaagatcactgaccccatacaaccgaaggtggctgaacaccgccctcagaccatgaagcgcctgagttatcctttctcccgtgaaaagcagcatctttttgacctcagcgataaggatagcttttttgatagtaagacccgctccaccatcgtgtatgaaatcctaaagagaacaacgtgtaccaaagcaaagtattcaatgggtatcaccagtcttctggccaatggtgtgtacgcagccgcctatccgctgcacgacggggactacaacggtgaaaatgtcgaatttaacgatagaaaactgctttatgaggagtgggccaggtacggcgtcttttacaaatatcagccaattgacctggtacgaaagtattttggtgagaaaattgggttgtactttgcctggctaggagtgtacacccagatgcttatccccgcgagtattgtagggatcattgtgtttctgtacggatgcgccacgatggacgagaatataccctccatggaaatgtgcgaccagagacataacatcaccatgtgcccactctgcgacaaaacttgcagttactggaaaatgtcctctgcgtgtgccacagcacgcgccagtcatttatttgataatcccgccactgtctttttctcagtatttatggccctgtgggcggccactttcatggaacattggaaacggaaacaaatgcgcctgaactacagatgggacctgacagggttcgaagaggaggagaaggcccttctcgaccatccacgggcggagtacgaagctagggttctggaaaagagtctgaagaaggagtcacgcaataaagagaaacgcaggcatatcccagaggagagcacgaataagtggaagcagcgagtgaaaactgccatggcaggggtgaaattgacagacaaagtcaagctgacttggcgggaccgcttccccgcctatctcacaaatctggtgtcaattattttcatgatcgccgttacctttgccattgtactcggcgtaatcatctatagaatatccatggccgccgccctggctatgaacagctcaccgagcgtgaggagcaacatccgcgtcaccgtcacggccaccgctgttatcatcaacttggtcgttatcattctgctggatgaagtgtacgggtgcatcgctcgctggcttaccaaaattgaggtcccaaagactgagaaaagttttgaagagcggctaatctttaaagccttcctgcttaaatttgtgaattcatacacccccattttctatgtcgcattttttaaagggcggttcgtggggagaccgggagactacgtctacatcttccggtctttcaggatggaggaatgtgccccgggtgggtgtctgatggagctctgtatccagctgtccatcatcatgctgggcaagcagctcattcagaacaatctgttcgagatagggatacccaagatgaaaaaactgattcggtatctcaagttaaagcaacagtctcccccagatcatgaagagtgcgttaagcggaaacagagatatgaagtggactataacctggaaccctttgccggtcttacccctgagtatatggaaatgattatacagttcggattcgtgaccctgtttgtagccagctttccactcgctcccctgtttgctctactcaacaacataatcgagatccggctggacgcgaagaagttcgttacagaactccgcaggccagtggcagtgcgagcaaaagatattggtatatggtacaacatactccgagggataggcaaactagccgtcattatcaatgcttttgtgatctctttcacaagtgattttatcccaagactcgtgtatctttatatgtatagcaagaacggcacaatgcatgggtttgtcaaccacaccctgagtagttttaacgtgtccgacttccagaacgggaccgcgcccaacgaccctctcgatctgggttatgaggtccagatatgtcggtacaaagactatcgcgaacccccatggagcgagaataagtatgatatctccaaggacttctgggccgtccttgcggctcgtctggctttcgtgatcgtctttcagaacctcgtgatgttcatgtccgactttgtcgactgggttatcccggatattcctaaggacatctcacagcagatccacaaagagaaagtattgatggtggaactgtttatgcgggaagagcaggataagcagcagctcctggagacctggatggaaaaagagcggcaaaaagatgaacccccctgtaatcaccacaacaccaaagcctgtccagattctcttgggtccccagcgccttcacacgcttaccacgggggggtgctgtag

SEQ ID NO: 108386 - DNA, 942 bp, synthetic construct
  misc_feature 1..942: note = Description of Artificial Sequence: Synthetic coding sequence
  source 1..942: mol_type = other DNA
atgcttgatgccgcatcaaaggcgagggaggctcctgaggcagctcccggatgggatgacccgcagggagaagggcggagaggcaggggcgaaggcctgagttgggccgtggggccccatccagaccctggggtgctgatgcagggggaggtttggtcaggacgctttagtcacgctgttatccaatttggatttgtgaccttgttcgtggccagcttccccctggcaccactgttcgcactcctcaacaacatcattgagattcgcctggatgcaaaaaaattcgtgacggaacttcggagacctgtcgcggtccgggccaaagatattggaatctggtataacatcctaagggggatcggaaaattagccgtgatcattaatgcattcgtgatatcattcaccagtgactttatccccaggttggtctacctctacatgtatagtaaaaacgggactatgcacgggttcgtaaaccatacactgtcttcattcaatgtgtctgactttcagaacgggaccgcgcctaatgatcccctcgacctgggctacgaagttcaaatttgcagatataaggattaccgcgaaccaccgtggtccgagaacaaatatgacatttccaaagacttctgggcagtgcttgccgcgcgactggctttcgtgattgtgtttcaaaatctcgtgatgttcatgtctgattttgttgactgggtgatcccagacattcctaaagacattagccagcagatacacaaagagaaagtactgatggtggagctctttatgcgagaggaacaggacaaacagcagctgctagaaacatggatggaaaaagagaggcagaaggacgaacctccctgtaaccatcacaacaccaaagcctgcccggattccctcgggagcccggctccttcgcatgcttaccacggaggtgtactctag

SEQ ID NO: 108387 - DNA, 2235 bp, synthetic construct
  misc_feature 1..2235: note = Description of Artificial Sequence: Synthetic coding sequence
  source 1..2235: mol_type = other DNA
atgaagaggttaagctacccattttcccgcgaaaagcaacacctattcgatctgagcgataaggactccttttttgactcgaaaacaagatccaccattgtttatgaaatcttgaaacgcacgacatgcactaaagcaaagtattctatgggcattacctctctactcgcaaacggggtgtacgccgctgcttacccgctgcatgacggagattacaacggcgagaatgtggagttcaacgataggaagttgctgtacgaggaatgggccagatatggcgtattctacaagtatcagccaatagatctggttcggaagtattttggagaaaaaattggtctctacttcgcttggctcggagtgtacacccagatgctgatccccgccagcatagttggaattatcgtattcctctacggatgtgccacaatggatgagaatattccttctatggaaatgtgtgatcaaaggcataatattacaatgtgtcctctgtgcgataagacgtgtagctattggaaaatgagtagtgcttgtgctacagcacgggcctcccacctgtttgataatccagccacggtcttctttagtgtgttcatggctctgtgggccgctacttttatggagcattggaaaaggaagcagatgcgtctgaactacagatgggacctgacaggtttcgaggaagaggagaaggcactgctggatcatccacgggcggagtatgaggcacgcgtgctggagaagagcctgaagaaagagtctcgtaataaagaaacagataaggtcaagctcacctggcgggatcggttccctgcctacctgaccaacctggtctcaatcatcttcatgatcgctgtgacctttgcgatcgttctgggcgttatcatttacagaatcagtatggctgccgcattagctatgaatagtagtcctagtgttagaagtaatattagagtaacagttaccgctacagccgtgatcatcaacctcgtggtcattattctcctggatgaggtgtacggctgcatagctcggtggttaacaaagatcgaggtgccgaaaaccgaaaaatcgtttgaggagcgactgatcttcaaagcattcctgctgaaatttgtgaacagttatacaccaattttttatgtggcctttttcaaggggagatttgttggccgacctggggattacgtctacatcttccgcagctttaggatggaggaatgtgcaccaggaggttgccttatggaactatgcatacaactgtctatcattatgctaggaaagcagctcatccagaataacctctttgaaataggaattccgaaaatgaagaagctaattcgctacctcaagctgaaacagcagagcccgcccgaccatgaagagtgcgtgaaacgcaagcagcggtatgaagtcgactacaacctagagccattcgccgggctgactccagagtacatggagatgattatccaatttggcttcgtcacattatttgtggcctcttttcctttagccccactcttcgctctgttaaacaatatcattgagatccgccttgacgctaaaaaatttgtcacagaactgaggcgccctgtggccgtgcgcgccaaggatattggcatttggtataacattctccgcggtattgggaagctagctgtcattatcaacgcctttgtaattagcttcacatccgattttatccccagactggtgtatctatacatgtactccaaaaatggaacgatgcatgggttcgtgaaccacaccctctcctcgttcaatgtgtctgactttcagaacgggactgcccccaatgatcctctggatctgggttatgaagtccagatatgccgctacaaagactatcgtgagccaccttggagcgagaacaaatatgatatttccaaggatttctgggctgtactggcggcaaggttagcatttgtgattgtattccagaacctcgtgatgttcatgagtgatttcgtcgattgggtcattcctgacattcctaaagatatcagccagcagattcacaaggagaaagtactaatggtggagctgtttatgcgcgaggagcaggataaacaacagttactggagacatggatggagaaagagagacagaaagatgagccaccttgtaaccaccacaacacaaaggcgtgccctgactccctaggctcccctgctcccagtcatgcctaccacggtggggtcttgtag

SEQ ID NO: 108388 - DNA, 1983 bp, synthetic construct
  misc_feature 1..1983: note = Description of Artificial Sequence: Synthetic coding sequence
  source 1..1983: mol_type = other DNA
atgaaggtgaccctctccgccctggacaccagtgaatctagcttcacacccctggtggttatcgaactggcccaagatgtgaaggaagaaacaaaagagtggctgaagaatcgcatcatcgcaaaaaagaaagatggcggtgcccagttgctgtttcgaccactcctgaataagtacgaacaggagaccctggagaatcagaacttgtacctggtcggggcgagcaaaattagaatgctcctgggagccgaagccgtggggctggtcaaggagtgtaacgataacactatgagagctttcacttacagaacccgccagaactttaagggattcgatgataacaatgacgatttcctgacgatggccgaatgtcagtttatcattaagcacgaactggaaaaccttcgagccaaggacgagaagatgataccaggctacccacaggccaaactgtatccgggtaaatctctgctgcgcaggcttcttacaagcgggattgtgatccaggtgttccctcttcacgactcagaagcccttaagaaactagaagacacgtggtacacaagatttgcattgaaatatcagcctattgatagtattaggggctattttggagaaaccattgcactctacttcgggttcttagagtacttcaccttcgcacttatcccaatggccgttatcggcctgccgtactatttgttcgtgtgggaagattacgataagtatgtcatcttcgcgagttttaaccttatctggagcacggtgatcctggagctgtggaagagagggtgtgctaacatgacgtacagatggggcacccttttgatgaagcgcaagttcgaggagccacgccccggattccacggcgtgctggggataaatagtatcaccgggaaagaagagccattgtaccccagttacaagaggcagctccgcatttacctagtctctttgccattcgtgtgtctgtgtctgtatttttcactgtatgttatgatgatatactttgatatggaggtctgggctctgggcttgcatgagaacagcggcagtgagtggacttccgtgctcttgtacgtcccttcaataatttatgccatcgtgatcgagatcatgaacaggctataccggtacgctgctgaattcttgacatcttgggagaatcataggctcgagtctgcatatcagaaccacctcatactaaaagttttggtcttcaactttctcaattgcttcgcctccctgttttacatcgcgtttgtgctcaaagatatgaagctgctcagacagagtctggccacgttactcattacatcacagattctcaaccagattatggaaagtttcctgccctattggctgcaacgcaaacatggtgttcgcgttaagcgcaaggtgcaggcactgaaggctgatattgatgcgacactttatgagcaagtcatcttagaaaaggagatgggcacttaccttggaacatttgatgactatctcgagctctttctgcaattcggctacgtttcactgttctcctgcgtttatcctctcgccgcggcttttgctgttctcaataattttaccgaggtgaatagtgatgctctgaaaatgtgccgagtgtttaagcggccattcagtgaacctagcgctaatatcggggtgtggcagctcgcctttgagacaatgagtgtgatcagtgtggtcacaaactgtgcgcttattggaatgtcccctcaggtcaacgcggttttccccgaatctaaagcagatcttatcctaattgttgtggcagtagagcatgccttgctagctctgaagttcatcctggcgttcgcaatccctgacaaacctcgacacattcagatgaagctggctcgtttggagtttgagagcctggaagccctgaagcagcagcaaatgaaacttgtcacggagaacctgaaagaggagccgatggagtccgggaaagaaaaagcgacctag

SEQ ID NO: 108389 - DNA, 1413 bp, synthetic construct
  misc_feature 1..1413: note = Description of Artificial Sequence: Synthetic coding sequence
  source 1..1413: mol_type = other DNA
atgaaagttacgctgagcgccttggatacttcagagtcatcatttaccccactggtggtgatagagctggcacaggatgtcaaggaggagacaaaagagtggctgaagaacagaatcatcgcaaagaagaaagacggcggtgcgcaactgctcttccgccctctgctcaacaagtacgaacaagagactttggaaaaccagaacctgtatctggtcggggccagcaagattcgcatgctgctgggagctgaagccgttggcttggtgaaagagtgtaatgacaacaccatgcgtgctttcacttatcgaacaaggcagaatttcaaaggcttcgatgacaacaatgatgattttctgactatggcagaatgccagttcatcattaaacacgaattggaaaatctacgggctaaagacgaaaaaatgatcccaggatatccccaggctaaactctacccgggaaaaagcctgctccgccgactactgacaagcggtatcgtgatccaggtgtttccactgcacgacagcgaggcattgaagaagcttgaagatacctggtatactcggtttgccctgaagtatcagccaattgagaatcatcgacttgaaagcgcctatcaaaaccatctgatactgaaggtcctggtattcaatttcctgaattgcttcgctagtcttttttacatcgcattcgtcctgaaggacatgaaactgctccggcagtctcttgcaacacttctcatcacatctcagattctgaaccaaataatggagagctttttaccttattggcttcagcgcaagcacggagttcgggtcaagcggaaggtgcaagccttgaaggccgacattgatgctaccctctatgaacaagtcattcttgagaaggaaatgggcacgtatctaggaacctttgacgactaccttgagctctttcttcagttcggctacgtaagtctattctcttgcgtctaccccttggcagccgcattcgctgtgctgaacaacttcacggaagtaaatagcgatgccctgaagatgtgtcgggtgtttaagaggccattttctgaaccctcggccaatattggtgtgtggcagctggccttcgaaaccatgtctgtcatcagcgttgttaccaattgtgctctgatcggaatgagtccccaggtcaacgccgtgttccctgaatctaaggctgatcttattctcatcgttgtggcggtggaacacgccctgttggctctcaaatttatcctcgcatttgctatacccgacaagcctcggcacatccagatgaaactcgcgagactggagtttgaaagtctcgaggccctcaagcaacagcagatgaaattagttaccgagaacctcaaggaggagccaatggaatccggcaaagagaaggcaacttag

SEQ ID NO: 108390 - DNA, 423 bp, synthetic construct
  misc_feature 1..423: note = Description of Artificial Sequence: Synthetic coding sequence
  source 1..423: mol_type = other DNA
atgaaagtaactctcagcgcactggatacatccgaatcctctttcacccccctggttgttatcgaactggcacaggatgtgaaggaggaaaccaaggagtggttgaaaaatcgcataatcgccaagaagaaagacgggggcgcccaattgctgttccgccccctgctcaacaaatacgaacaagaaactctggaaaaccaaaatctgtaccttgtgggcgctagcaagattcgcatgctgctcggagccgaagccgtgggtctggtgaaggagtgcaatgataatacaatgcgggcgttcacatacaggacgagacagaatttcaagggttttgacgataataatgacgactttttaactatggccgagtgtcagtttattataaaacacgagttggaaaacctacgtgccaaggatgaatag

SEQ ID NO: 108391 - DNA, 339 bp, synthetic construct
  misc_feature 1..339: note = Description of Artificial Sequence: Synthetic coding sequence
  source 1..339: mol_type = other DNA
atgaaggtgacactctctgcactggacaccagcgaatcatcatttaccccattggtggtgattgagttggctcaggacgtcaaggaggagacaaaggagtggctgaagaataggattattgctaagaagaaagacgggggggctcaactgttgttcagacccctgcttaacaagtacgagcaggagactctggagaaccaaaatctctacctcgtcggagcttctaaaattcggatgctcctcggagcagaagcagttggacttgtgaaagaatgcaatgataacaccatgcgggcttttacctatagaacacgacaaaatttcaaagggtttgactag

SEQ ID NO: 108392 - DNA, 117 bp, synthetic construct
  misc_feature 1..117: note = Description of Artificial Sequence: Synthetic coding sequence
  source 1..117: mol_type = other DNA
atgaaagtgacgctgtcagctctagacacctcagaatctagctttacaccgctggtcgtcatcgagttagcgcaggacgtcaaagaggaaaccaaggaatggttaaaaaaccggtag

SEQ ID NO: 108393 - DNA, 405 bp, synthetic construct
  misc_feature 1..405: note = Description of Artificial Sequence: Synthetic coding sequence
  source 1..405: mol_type = other DNA
atgaaagtgacactgtccgctttggatacatccgagtcatcctttaccccactggtcgtgatagaattggcccaggacgtcaaagaagagacaaaggagtggctgaagaatcggatcatagctaaaaaaaaggacggcggggcacagcttctctttaggcctctgttaaacaagtatgaacaagagactcttgagaaccagaatctgtacctggttggtgcttcaaagatacgtatgttactgggagccgaagcagtcggacttgtcaaggaatgcaatgacaatacaatgcgagccttcacgtatcggacaagacagaactttaaaggattcgatgataataatgatgactttctcactatggccgagtgtcagttcatcatcaagcatgagctcgagaactag

SEQ ID NO: 108394 - DNA, 441 bp, synthetic construct
  misc_feature 1..441: note = Description of Artificial Sequence: Synthetic coding sequence
  source 1..441: mol_type = other DNA
atgaaggtgacactgtcggcccttgacacatcagaatctagcttcacccctctagtagtgatagaactggcgcaggacgtgaaagaagagacgaaagaatggctgaagaatcgcatcatagctaagaaaaaagatggtggcgcccagttactttttaggcctctcctgaacaaatatgaacaggagactctcgagaaccagaatctgtatcttgtcggggcctcgaagatcagaatgctgctgggtgcagaagcagttgggctggtcaaagaatgcaatgacaataccatgagggcgttcacataccggacaagacagaacttcaaaggattcgatgataacaacgacgacttcctgacaatggcggaatgtcaattcatcataaaacacgaacttgaaaatttaagagcgaaggacgagaagatgattcccggctattag

SEQ ID NO: 108395 - DNA, 426 bp, synthetic construct
  misc_feature 1..426: note = Description of Artificial Sequence: Synthetic coding sequence
  source 1..426: mol_type = other DNA
atgaaagtgacgctgtcagcactggatacctctgagtcttcgtttactcccctggtagtgatcgaactggcccaggatgtcaaagaggagaccaaggagtggctaaagaatcgcattatcgcaaagaaaaaagacggaggggcacaactcctcttccggccccttctgaacaaatacgagcaagaaactctcgagaatcaaaacctctatctggttggcgctagtaaaatccgcatgctgctgggcgctgaggcagtggggctggtcaaagaatgcaatgataacactatgcgcgctttcacttacagaaccagacaaaactttaaggggtttgatgataacaacgacgactttctaacaatggctgagtgccaatttatcatcaagcatgagctggaaaacctgcgtgccaaggacgagaagtag

SEQ ID NO: 108396 - DNA, 1785 bp, synthetic construct
  misc_feature 1..1785: note = Description of Artificial Sequence: Synthetic coding sequence
  source 1..1785: mol_type = other DNA
atgaaagttacgctgagcgctctagacacttctgaatcttcatttactcccctcgtagtgatagagttggctcaggatgtgaaggaggagacaaaggagtggctgaagaataggatcattgcaaagaagaaggacggagacaacaacgatgacttcttgacaatggccgaatgccagttcatcatcaagcacgagctggaaaatctaagggcgaaagacgagaaaatgatacctgggtacccacaagccaagctgtatccagggaagagtttactcaggcgcctcctgacctctggcatagtaatccaggtttttcctctgcacgatagcgaagctctgaaaaaactggaggacacctggtatacccgctttgccctcaagtaccagccgatcgattcgatcaggggatacttcggtgaaaccatcgctctgtacttcggctttctcgagtacttcacctttgccttgatacctatggcagttatcggtctgccttactatctattcgtctgggaagattacgataagtatgtaatatttgcttcctttaatttaatctggtcaaccgtgatcctggagctgtggaaacgcggctgtgctaacatgacgtatcgttggggcactctcctgatgaagcgtaaattcgaggaacctcgcccaggctttcatggtgttctgggaatcaattccattaccggcaaggaggagcctctgtacccctcctataaaaggcaactccgaatctacctcgtatccctgcctttcgtgtgtctgtgcctgtatttcagcctctatgttatgatgatttattttgacatggaagtctgggccctaggcttgcatgagaattcagggtccgagtggacctcagtgctattgtatgtgccaagcattatctacgccatcgtcatcgaaattatgaatagactttaccggtacgctgctgaattccttacgagctgggagaaccatcggttagaatcagcttaccagaatcacctcattcttaaggttctggtgtttaacttcctcaactgttttgcttctttattttatattgcgtttgttctgaaggacatgaaattgctgagacagagcctcgcaaccctgctcataacttcacagatattgaatcagataatggaatcctttcttccctactggctgcagaggaaacatggtgtgagggtgaaaagaaaggtccaggccttgaaagcggatatcgatgcgacactgtatgagcaggtcatattagaaaaggagatgggtacgtatctcgggactttcgacgactacctggagctttttctccaatttggatacgtctccttgtttagttgtgtctaccccttggccgccgctttcgcagtgctaaataacttcacagaggtcaactctgatgcactcaagatgtgccgggtcttcaagcgtcccttctccgagccgtccgctaatattggagtttggcagctcgcattcgaaacaatgagcgtgatctccgtggtcactaactgcgctctgatcggcatgtccccacaggtgaatgctgtgtttcccgagtccaaagcagacctgatcctgattgtggtggccgtcgagcatgcccttctcgcactcaagtttatactggccttcgccatcccagacaagccaagacacatccagatgaagcttgccagattggaatttgaaagcctagaagctctgaagcagcagcagatgaagctggtcaccgagaatcttaaggaggagccaatggaatctgggaaggaaaaggccacctag

SEQ ID NO: 108397 - DNA, 1884 bp, synthetic construct
  misc_feature 1..1884: note = Description of Artificial Sequence: Synthetic coding sequence
  source 1..1884: mol_type = other DNA
atgaaggtgaccttgagtgctctggacactagtgagtccagctttaccccactggttgtgattgagctggcgcaggatgtcaaagaagagacaaaggaatggctgaaaaatcgcatcatcgcaaagaagaaggatgggggcgcccaactcttgtttcgacctctcctgaacaagtatgaacaagaaacactggaaaatcaaaacctgtaccttgtcggggccagtaaaatccgcatgcttctgggcgcagaagctgtggggttagtgaaggaatgtaacgacaacactatgcgggcttttacatacaggacccggcaaaattttaaaggcttcgacgacaacaacgatgacttcctgacaatggccgaatgccagttcatcattaagcatgagcttgaaaatctgcgcgcaaaagatgaaaaaatgattcctggttacccccaggctaaactatacccaggcaagtcccttctgaggcgattgctgacaagcggaattgtgatacaggtttttcccctccacgacagcgaagctttgaagaagttagaagacacatggtacaccagattcgcactgaagtatcagcctatcgactcaatcagaggctattttggggagaccattgcactctatttcggatttcttgagtacttcacttttgccctaatccccatggccgttatcgggctcccgtattatttgttcgtgtgggaggactatgacaaatatgtgatcttcgccagtttcaatctgatctggtccactgtgatacttgagctttggaaacggggctgtgccaacatgacgtatcggtggggtaccttactgatgaagcggaagttcgaagagccgcgccccggattccacggtgtcctggggataaattctattacaggaaaagaggaaccgttatacccgagctataagcgacagctgcgtatatacctggtttccctgcctttcgtttgcctttgcctgtatttcagtctgtatgtgatgatgatttacttcgacatggaggtgtgggccctgggcctccacgagaactcagggtcagagtggacttcagtcctactctatgttccaagcattatctatgctattgtaatagaaattatgaatcgtctttaccggtatgccgctgaattcctcacttcatgggagaaccaccggcttgaatccgcctaccagaatcacttaatcctgaaagtgttggtgtttaactttctaaattgcttcgcctcactgttctatattgcgttcgtgttgaaggatatgaagcttctgagacagtccttggctactcttttgatcacttcgcagatcctcaaccagattatggaatcctttcttccctactggttacagcgaaaacatggagttcgcgtaaagcgaaaagttcaggctctcaaggctgatatcgacgcaacactttacgaacaggtaatcctggagaaagagatgggcacatatcttggaacctttgatgactatctggaattatttttgcagttcggctatgtctcgctgttttcctgcgtgtaccctctcgccgccgcttttgcggtccttaataacttcacagaggtgaattccgatgcacttaaaatgtgtcgcgtgttcaagagacctttctctgaaccttctgcaaatattggggtatggcaactcgcctttgagacgatgtcagtcatttccgtggtgaccaactgcgcgctcataggaatgagcccccaagtgaatgccgtattcccagagagtaaggctgatttaattctgattgtggtggcagttgaagctgctagctgcaaacttgtaagcctccccagatattcctggagcacaaacagtgtgcccggaaccgtgatcggcccgggagtttag

SEQ ID NO: 108398 - DNA, 1650 bp, synthetic construct
  misc_feature 1..1650: note = Description of Artificial Sequence: Synthetic coding sequence
  source 1..1650: mol_type = other DNA
atgaaggtgacattgtcagccctggatactagcgagagcagttttactcctctggtggtgatcgaattggctcaggatgtgaaggaagaaacaaaagagtggttaaagaatcgcatcatcgcaaaaaaaaaagacggtgtccggcgtctgctgacttctggcattgtgatccaggtgttcccactgcacgacagtgaagcacttaagaagcttgaagacacctggtacacccgattcgctctaaagtatcagccgattgatagcatcagaggctactttggtgaaacgatagctttatacttcggttttctggaatacttcacttttgccctgattccgatggctgtgatcggactgccctactatctgtttgtttgggaagattacgacaagtatgtgatatttgcaagctttaatctgatctggagtacagtgatactggaactctggaagcgggggtgtgccaatatgacgtaccggtggggtactctgctgatgaaacgcaagttcgaggagccccggcctggttttcacggagtcttagggattaacagcatcacaggcaaggaggaacctctctacccctcctataagaggcagctcaggatttacctggtgtcgctgccctttgtctgcctgtgcctctatttttcgctgtacgtcatgatgatctatttcgatatggaggtttgggctctgggactgcatgaaaattcggggtcagaatggacttcagttttgctatacgtcccatctattatttatgcaatcgtgatcgagatcatgaacaggctctacaggtatgccgcagagtttttaaccagctgggagaatcacaggctggagtcagcgtatcaaaaccacctcatcctgaaggtgctagtgtttaatttcctcaattgctttgcttcattattttatattgcatttgtgttgaaggacatgaagctgttgaggcaaagtctcgccacactcctgatcacatctcagatcctgaatcagattatggaatcttttctcccatactggctgcagaggaaacacggagtacgggtcaaacggaaggtgcaggcactgaaagccgatatagatgccactctctatgagcaagttattcttgagaaagagatgggcacctatctcgggaccttcgatgactacttagagctgtttctgcaatttggctatgtttcgctcttttcatgcgtgtaccctctagcggcggcatttgcagtgctgaacaatttcacagaggtcaactcagacgctcttaaaatgtgccgggtcttcaagaggcctttctcggaaccgagtgccaacataggggtttggcagctggcattcgaaaccatgtcggtcatcagtgtggtaaccaattgcgccctcatcgggatgagtccccaggtgaatgccgtgttcccagagagcaaagccgaccttattctcatcgtggtagctgtagagcacgcgctgcttgcactgaagtttatactcgcgttcgcgatcccagacaagcctcggcatatccagatgaaactggcacgcctggagtttgaaagcctggaggccttgaaacagcagcaaatgaaactcgtgacagaaaaccttaaagaggagccaatggagagcggcaaagagaaggctacctag

SEQ ID NO: 108399 - DNA, 2997 bp, synthetic construct
  misc_feature 1..2997: note = Description of Artificial Sequence: Synthetic coding sequence
  source 1..2997: mol_type = other DNA
atgccagaagatatccccctgctgccggggtcacccagacggctctcgccacaagccggctccaggggcggtcagggacctaagcatggacaacaatgtttaaagatgccaggacctagagcgccaggcctgcagggcggatctaatagggatcccggccagccgtgcggtggggagagcacccggagcagcagtgtgattaacaactacttggacgccaacgagcccgtctctttagaagcccggctgtctcggatgcactttcacgacagtcagagaaaggtggattacgtgttggcataccactatagaaagcggggcgtgcacttggctcagggcttcccagggcactccctggccatcgtatccaacggcgaaacaggcaaggagcctcacgccgggggtcctggtgatattgagctgggacctctggatgccctagaggaggagcgtaaggaacagcgcgaggagttcgaacacaatctgatggaagccggtctggagctggaaaaggatctggagaacaaatcccagggctccatcttcgtacggatccacgccccctggcaggtccttgccagggaggctgagttcctgaaaatcaaagtgcccacaaagaagatgtatgagataaaggcaggtgggagcatcgccaagaagttctcagctgctctgcagaagttaagttctcacctgcaaccgcgcgtgccggagcattctaacaacaagatgaaaaatctgtcctacccctttagcagggagaaaatgtatctctataacatccaagagaaggacactttcttcgacaatgccacacgatcaaggatcgtacatgagattctaaaacggactgcttgcagcagggcgaataatacgatgggcattaatagcctcattgcaaataacatctatgaggccgcttatcctctgcacgacggagagtacgatagtcctgaagatgatatgaatgatcgtaaactactttaccaggagtgggcccggtacggggtgttctataagttccaaccaatcgacttaatccgcaagtacttcggcgaaaagatcggcctatacttcgcctggctcggtctgtatacatctttcttgattccttcaagcgtaattggcgtgattgtctttctgtacggctgtgcgactatcgaggaagacataccatcaagggaaatgtgcgaccagcagaatgcttttacgatgtgccctctatgcgacaaatcctgcgactactggaacctgtctagcgcctgtgggaccgcccaagcaagccatttattcgacaatcccgccactgtgttctttagtatcttcatggccctctgggccacaatgtttctggagaactggaagaggcttcagatgaggctcggctacttctgggatttgaccggcattgaagaagaagaggagagggctcaggagcactcacgacccgaatacgaaacaaaagtccgagagaaaatgcttaaggagagcaatcagagtgccgtccagaaactggagaccaataccacagagtgtggcgacgaagacgacgaggataaattgacgtggaaagatcggtttcccgggtatctaatgaacttcgcctcaatcctgttcatgatcgcactaacatttagcattgtgtttggagtgatcgtgtacaggatcaccacggcggccgcactgtcgctcaacaaggctacccggtcaaacgttagagttaccgttaccgctaccgccgtcattattaatctggtagtgattctgatcttagatgaaatctacggcgctgtagctaaatggctgacaaagattgaggtccctaaaacagaacaaacttttgaggagcgtctgatactgaaagccttcctgctcaagttcgtcaatgcctacagcccgatcttttatgttgccttttttaaaggcaggtttgttgggcgacccggtagctatgtatatgtgtttgatggatatagaatggaagagtgcgcccctggaggctgcctgatggagctgtgcattcagctcagcataatcatgctcgggaagcagttaattcaaaataatatctttgagataggggtccccaaactgaaaaagctgtttagaaagctgaaggatgagaccgaagctggcgaaacggactccgcccattccaagcatcccgagcagtgggaccttgattatagccttgagccgtacaccggtttgacccccgagtatatggagatgatcatccaattcgggtttgtgactctgttcgtcgcttcattccccctggccccagtgtttgcacttttaaacaatgtaattgaagtgcggttggacgctaagaaatttgttacagaactccggcgccctgatgcagttcggacgaaggatatcggaatctggttcgatattctgtccggcatcggaaaattctccgtgatttccaacgcatttgtgatagctattacttctgattttatcccgcgcctggtgtatcagtatagctacagccacaacggcacccttcacggatttgtcaatcatactttatctttctttaatgtgagccaacttaaagaaggcacacaacccgagaattcccagttcgaccaggaagttcaattctgccggtttaaggattacagagaaccgccctgggccccgaacccttacgagttctctaaacaatactggttcattttgtctgctaggctggccttcgtcataatattccagaatctggtcatgttcctctcagtgctggtggactggatgatccccgacatcccaacagacatttcagatcaaattaagaaagagaaatcattactggtcgacttcttcctcaaggaggaacacgaaaagctgaagctaatggacgagcccgccctaagaagtcctggggggggagaccgcagccggtcccgtgctgccagcagcgcaccaagcgggcagtctcaactgggaagcatgatgtcgtctggttcccagcacactaacgtgtag

SEQ ID NO: 108400 - DNA, 3000 bp, synthetic construct
  misc_feature 1..3000: note = Description of Artificial Sequence: Synthetic coding sequence
  source 1..3000: mol_type = other DNA
atgccagaagatatcccccttctcccgggaagtcctagacgactgagccctcaggcgggcagtcggggcggccagggtccgaaacatggacagcaatgcctcaagatgcctggacctcgtgctccaggcctacaaggtggcagtaatagagaccctgggcaaccttgcggtggggaatccacgagaagtagctccgtgataaacaactatctggatgccaatgagcctgtgtctctcgaagcaaggctctctaggatgcactttcatgattcccagcgcaaggtcgactacgttcttgcttatcactataggaaaagaggggttcacttggctcagggatttcccggtcacagcctggctatcgtgtccaacggggagacaggaaaagaaccacacgccggcggtccaggggacattgaactgggacctctagacgccttagaagaagaacgaaaggaacagcgcgaagagttcgaacacaatttaatggaggcgggcctcgagttggagaaggatctggaaaataagtctcaaggttccatctttgttcgtattcacgcgccctggcaggtccttgcgcgggaagcggaatttctgaagatcaaggtgcccacaaagaaggaaatgtacgagattaaagccggcggatcgatagcaaagaaattctctgctgctctgcagaagctctcaagtcatctccagcccagggtgcccgagcactctaataataaaatgaagaatctctcttacccattcagccgggaaaagatgtacttgtacaatatccaggagaaggataccttctttgacaacgccactaggtctaggatcgtccatgaaatcctgaagcgaactgcctgtagccgggcaaataatacaatgggcatcaattccctgatcgccaataacatctatgaagccgcttaccccctccacgacggtgagtatgacagccccgaggatgacatgaatgaccgtaagcttttgtatcaggagtgggcacgctatggggtgttctataagttccagcctattgacctgatcagaaagtattttggggagaagattggactatacttcgcctggttgggtctgtatacgagttttctgataccgtcctctgtgatcggcgtcatcgtgttcctgtatggatgcgccacaatcgaggaggatataccctctcgggagatgtgtgatcagcagaacgccttcactatgtgtccactttgcgacaagagttgtgattattggaatcttagttctgcatgcggtaccgcccaggccagccatcttttcgataacccggccaccgtcttcttcagtattttcatggccttatgggccacaatgtttttggaaaactggaagcgattgcaaatgaggttgggctacttttgggatttgaccggcatagaagaagaggaagagcgggctcaagaacactcacgaccagagtacgagactaaggtgagggagaagatgcttaaggagtcaaaccagtcagccgtccaaaaactcgaaacaaataccaccgagtgcggtgatgaggatgatgaggataagctgacttggaaggacaggtttcctggttacctgatgaacttcgccagcattctatttatgatagctctgacattcagcatcgtgttcggtgtaatcgtttatcggataacaaccgcggccgctctgagcttgaataaagccactcgcagcaacgtgagggtcactgtaaccgctacagcagtcatcatcaatcttgtggtgatactgatacttgacgaaatctacggcgcagtcgccaaatggctgacaaaaatcgaagtccccaagactgagcagacgtttgaagaaagactaattctaaaggcattccttctgaaattcgtgaacgcttactcgcctatcttctacgtggctttcttcaaagggaggttcgtggggcggcccggcagttatgtctacgtgttcgacgggtatcgcatggaagagtgcgcaccaggcgggtgtctcatggagctgtgcattcagctgtctattattatgttaggcaagcagctgatccagaataacatcttcgagatcggggtgccaaaactcaaaaaactcttccggaaactgaaggatgagaccgaagccggcgagaccgatagtgcccatagcaagcatcccgaacaatgggatctcgattactccctggaaccttatacagggctcaccccagaatacatggagatgattattcagttcggcttcgtcaccttgtttgtggctagcttccccctggctccagtgttcgctttactcaataatgtgatcgaggtgcggctcgatgcaaaaaaattcgtgacggaactgaggaggccagatgccgtgagaaccaaggacatcggaatatggttcgatatcctgagcggaattggcaagttctctgtcatatcaaacgcctttgtgatagccatcaccagcgatttcatcccccgattagtttatcagtatagctacagccacaatggtaccctgcacggattcgtcaaccatactctgagcttctttaacgtatcccagctgaaggaaggaacacagcctgagaactctcagtttgaccaggaagtgcaattctgtcgctttaaggattaccgagagcctccctgggcccccaacccatacgaattttctaaacaatactggttcatcctgagcgcacgcctggccttcgtgataatattccaaaatttagtaatgtttctgagcgtgctggtcgactggatgatccctgatattccaacagacatctctgatcagataaagaaggaaaaaagcctcttggtggatttttttctgaaggaggaacatgagaaattgaagcttatggatgagcccgccttgcggtctcctggggggggagaccgatcccgctccagagcagcctcgagcgcaccatctggccaaagccagctggggagtatgatgtcctcaggctctcagcacacaaacgtgtag

SEQ ID NO: 108401 - DNA, 3012 bp, synthetic construct
  misc_feature 1..3012: note = Description of Artificial Sequence: Synthetic coding sequence
  source 1..3012: mol_type = other DNA
atggcaacacccggtcccagggatatcccgctcctccctgggtcgccacgccgcctcagcccccaagcgggttctcggggcggccagggcccaaagcacgggcagcagtgtctcaaaatgcccggaccacgggctccaggcctccagggcggctccaaccgcgatccaggccaaccctgcggcggcgaatccactcgctcgagcagcgtaatcaacaactatctggacgctaatgaaccggtgagtctggaagctcgactatcccgtatgcatttccacgactcacagcggaaggtggattacgtcctggcgtaccactacaggaaacggggtgtgcacctcgcccagggctttcccgggcacagccttgcgattgtcagtaatggcgaaacaggaaaggaaccccatgccggcgggcccggagatattgagctgggcccgctcgatgccctcgaggaggagagaaaggagcagcgggaagagttcgaacacaatctgatggaggctggactggagctggagaaagatctggagaacaaaagtcaaggtagtatttttgtcagaattcacgccccttggcaggtcctggccagagaagctgagttcttaaagataaaggtgcccacaaagaaggagatgtacgaaatcaaggccgggggttcaatcgccaaaaagttctcagctgcactccaaaagctgagcagccacttacagccacgggtccccgagcatagcaataataagatgaagaacttatcttaccctttcagccgggagaagatgtacctctataacatccaggagaaagataccttcttcgacaacgcaacgcgctcccgtatagtgcacgaaattctaaagcggactgcctgcagccgggccaataacaccatggggatcaactccttgatcgcaaacaacatctatgaggccgcgtatcccttgcacgatggggagtacgatagcccggaggacgatatgaatgacagaaagctgctgtaccaggagtgggctaggtatggcgtcttctataaattccaaccaattgaccttatacggaaatactttggcgagaagatcggcttgtactttgcttggctggggctttatacatcctttctgataccatcctccgttattggagtgattgtgttcctttacggctgcgccaccatcgaggaggacatcccatctagagaaatgtgcgatcaacagaacgctttcaccatgtgcccgctttgcgacaagtcgtgtgactactggaacctttcctccgcctgcgggaccgcacaagcatcccatttatttgacaaccctgcaacagtgttcttcagcatcttcatggctctctgggctacaatgtttttagagaactggaagcgcctgcagatgcgcctgggttatttttgggaccttacgggaatcgaagaggaagaggaaagagcacaggagcactctcgccctgagtatgagaccaaagtacgtgagaaaatgctgaaggagtctaatcaaagtgccgtgcaaaaactggagaccaacactactgaatgcggggatgaggacgacgaggacaagctgacctggaaagaccgcttccccggctatttaatgaactttgctagtatcctcttcatgattgcactcacattcagcatcgtcttcggggtcattgtatatcgtatcacgaccgcggccgcactgtcccttaacaaggctacgagatcaaacgtaagggtaactgtgaccgcaactgctgtgataatcaatctggtggttatactgattttagacgaaatctacggagcagtagctaaatggctcactaagattgaagtccctaagacagaacagaccttcgaagaaaggctcattctgaaggcgttcctgcttaagttcgtaaacgcctattcgcccatcttttacgtggctttcttcaaaggacggtttgtcggtcgccctggaagctatgtgtacgtctttgatggctacagaatggaggaatgcgctcccggaggatgcttaatggagctttgtatccagctgtccataatcatgctggggaagcagctgatccaaaataacattttcgaaattggtgtccccaaattaaaaaaacttttcaggaagcttaaggatgagaccgaagccggggagacagattctgcccactctaaacatcccgaacagtgggatctggactacagtctagagccttacacagggttgaccccggaatatatggaaatgatcatccagttcggcttcgtaaccctgtttgtggcttcattccctctggcacccgtcttcgccctgctcaataatgtgattgaagtaagactggatgcgaaaaaattcgtgacagaactgcggcgacctgatgcggtcagaactaaggacataggcatctggttcgatatacttagtggcattggcaaatttagtgtaatcagtaacgcgtttgttatcgctattactagcgactttattcctagactggtgtatcagtactcttactctcacaatgggacactgcacgggttcgtaaaccatacactaagcttctttaacgtgtcccagcttaaagagggcacacaacccgaaaacagccagtttgaccaggaagtacagttctgtaggtttaaggactaccgtgagccaccctgggctcccaatccctacgagttttccaagcagtactggttcatcctgtcagcaagactggcatttgtgatcatatttcagaatcttgttatgtttctctctgtcttggtggactggatgattccagacattcccaccgacatctccgatcagattaagaaggagaaaagcctgttggtggatttctttctcaaggaagaacacgaaaagctcaagttaatggacgagccagctcttcggtctcctggcgggggggatcgtagcagatcaagagccgcttcaagcgctcctagcgggcagtcacagcttggtagtatgatgtcgtccgggtcccagcataccaacgtgtag

SEQ ID NO: 108402 - DNA, 261 bp, synthetic construct
  misc_feature 1..261: note = Description of Artificial Sequence: Synthetic coding sequence
  source 1..261: mol_type = other DNA
atgttcctcagcgtactggtggattggatgatcccagatatccctaccgacatctccgatcagatcaaaaaagagaaatccttgctggtggatttcttcctcaaagaagagcacgaaaaattgaaactcatggatgaacccgccctgcggtcgccagggggcggagaccggtctcgcagcagggcagcttcttcagctccctctggacagtcacaacttggcagtatgatgtcctccggctcccagcacactaatgtttag

SEQ ID NO: 108403 - DNA, 3000 bp, synthetic construct
  misc_feature 1..3000: note = Description of Artificial Sequence: Synthetic coding sequence
  source 1..3000: mol_type = other DNA
atgcccgaagatattcccctcttaccgggtagtccacgcaggctgagcccccaggcagggtcgaggggagggcagggcccgaagcacgggcagcagtgcctaaaaatgcccggaccccgagccccgggcctgcaaggcggctcgaaccgagaccccgggcagccgtgtggaggagagagcacaaggtcaagctcggtcatcaacaattatcttgacgccaacgaaccagtatccctggaggccaggctttctaggatgcactttcatgattcccagcgcaaagtagactacgttttagcctatcactacagaaagagaggtgtccacttggcccaggggtttcccgggcattcactggccattgtgtcaaatggcgaaaccggaaaggagccacacgccggaggaccgggagacattgagttgggaccactggacgccctggaagaggagcgcaaggaacagagggaggagttcgaacataatctcatggaggctgggctcgaactggagaaggacctcgaaaacaagtctcaggggagtatttttgttcggattcatgccccctggcaggtgctcgcccgcgaagctgagtttttaaaaatcaaagtgcctaccaaaaaggaaatgtacgaaattaaggccggcggtagcatagccaagaaattcagcgccgccctccagaagctgagtagccatctgcagccacgggtccctgaacactcaaacaataagatgaaaaacctatcttacccctttagcagagaaaaaatgtacctgtacaacatccaggaaaaagacactttttttgacaacgcaaccaggtctagaatcgtgcacgagatcttgaaaagaactgcctgtagtagggccaataatacaatgggcataaacagcctgattgctaacaacatctacgaggcggcctatcctctgcatgatggggagtatgattctccggaggacgacatgaatgaccgcaagctgctgtatcaggaatgggcccgatatggcgtgttttacaagtttcagcccattgatcttatccggaaatacttcggcgaaaagatcggtctctacttcgcctggctcggactgtacacaagtttcctaatcccttcaagcgtaatcggggttatcgtcttcctatacggatgtgccacgattgaggaggacattccttctagggagatgtgcgatcagcaaaacgccttcactatgtgcccactgtgtgacaagtcctgtgattactggaacctgagtagtgcgtgtggcaccgcccaggcctcacatcttttcgacaatccggcaaccgtcttctttagcatttttatggcattgtgggccaccatgttcctggaaaactggaagagattgcagatgcggctcggctacttctgggacctgacgggaattgaagaggaggaaccccgagtccaggaacattctcggccagagtacgaaacgaaggtccgcgaaaagatgctcaaggagtccaatcagtcagcggtccagaaactggagaccaacactactgagtgtggagatgaggatgacgaggataagctcacctggaaagataggttcccaggatacctgatgaacttcgctagtatactctttatgatcgcattgactttctcaattgtgtttggagttatcgtgtatcggatcactacggccgctgccctctcactaaataaggcaaccagaagcaacgtacgggtcaccgtaacagcaaccgccgtgatcattaacctggttgtaatccttattcttgatgagatttacggcgctgttgccaaatggctcaccaaaatagaagttcccaaaacggaacagaccttcgaggagcgtctgattcttaaggcttttctgctgaagttcgtaaacgcttactccccaatcttttatgtggctttctttaagggtagatttgtgggcagacccggctcttatgtgtatgtgtttgatggttacagaatggaggaatgtgctcctggagggtgcctcatggagttatgcatacaattgtcaatcatcatgctggggaagcaactgattcagaacaatatcttcgagataggagtacctaaattgaaaaaattgtttcggaagctcaaagatgaaaccgaagctggtgaaacagactcagcgcacagcaaacatcctgagcagtgggacctggattacagtctcgagccgtataccggactgacccctgaatatatggagatgatcatccaattcgggtttgtgacactgttcgtggcgagtttcccgttagcacccgtgtttgcgctgctcaataacgtgatcgaagttagactggacgccaagaagtttgttactgagctgcgtcgccctgacgcagtgagaactaaggatatagggatttggttcgacatcttgtcaggaattggaaaattttcagttattagtaacgcctttgtcattgccatcacgtctgattttattccacggctggtgtaccaatactcttacagccacaatggaacccttcacggatttgtgaatcatactctgtcattctttaacgtgtcccaattgaaagagggcacacaaccagaaaattcacaatttgaccaggaagtgcagttctgcagatttaaagactatagagagccgccctgggcccctaacccctatgaattttctaagcaatactggttcattctgtctgctcgcctcgccttcgtgataatcttccagaacttagttatgttcctctccgtgctcgtagattggatgattcccgacattccaaccgacattagtgaccagatcaagaaggagaaatccctcctcgtcgacttcttcctgaaagaagaacacgaaaagctgaaactgatggacgaacctgcgctgcggagtcccggtggaggagacagatcacggagccgtgctgcctcaagcgccccatctggccagtcccaacttgggagcatgatgagtagcgggtctcaacataccaatgtatag

SEQ ID NO: 108404 - DNA, 2742 bp, synthetic construct
  misc_feature 1..2742: note = Description of Artificial Sequence: Synthetic coding sequence
  source 1..2742: mol_type = other DNA
atgggcgaccctgatttgttagaggtgttggccgaggaaggggagaaggtcaacaaacatatcgactacagcttccagatgtccgaacaaagcctgtctagccgcgaaaccagctttttgataaacgaggagaccatgcccgccaaaagatttaacctgttcctgcgacgcaggctcatgttccaaaaaaatcagcagtccaaggatagtatctttttccgcgacgggattcgacagattgacttcgtactcagctacgtggatgatgttaaaaaggacgccgagcttaaggccgaaaggcggaaggagttcgaaacaaatttgagaaagaccggattggaacttgagatcgaagacaagagggacagtgaagacggccgtacttacttcgtaaagatacatgccccttgggaggtcctggtgacttatgctgaagttttaggcatcaagatgccgattaaagagtctgatataccacgcccaaagcacacccctattagttacgtactcggcccagttaggctgcctctatcagtaaagtatccccaccctgagtacttcactgcccagttcagccgccatcgacaggaactttttttgattgaagatcaggccaccttcttcccaagctcgtcccgaaaccggatcgtgtactacatccttagccgatgcccctttggcatcgaagatggaaaaaagaggtttggcatcgagaggctcctaaattctaacacctactcctctgcttatccgctacacgatggccaatattggaagccttctgagcccccaaatcccaccaatgagaggtacactctgcaccagaattgggcccgcttcagttacttttataaggaacagcccctggatctcatcaagaattattacggggaaaagatcggcatctattttgtctttctgggcttttacaccgagatgctgttcttcgccgctgtcgttggcttagcttgctttatttacgggcttctctccatggaacacaatacctcctctaccgaaatctgcgaccccgagatcggcggtcagatgatcatgtgtcctttatgtgaccaggtttgtgactactggagattgaactcaacttgtctggctagcaaattcagccatttattcgataatgaatcgactgtgttctttgcgatcttcatggggatctgggtgaccctcttcctggaattttggaagcagcgacaagccagattggagtacgaatgggacctggtggatttcgaggaagaacagcagcagttgcagctgcgccctgaattcgaggccatgtgcaaacatcgcaagctgaacgccgtgaccaaagagatggaaccatatatgccattatatactcggatcccttggtacttcctatcaggggcaacggtcaccctctggatgagcttggtggtgacgtccatggttgcagtgattgtttacagactgtccgtctttgcaacgttcgcctcatttatggaatccgacgccagcctgaaacaggtgaagtctttcctgacccctcagatcaccaccagcctcacaggtagctgccttaactttatagtgatcctcatcctgaacttcttctatgaaaaaatatccgcgtggatcactaagatggagattccgcggacttatcaggagtatgaaagttctcttacactgaagatgtttctctttcaattcgttaatttttatagcagctgcttttacgtcgcctttttcaagggcaagtttgtgggatatccgggcaaatacacttatctgtttaacgagtggaggtctgaggagtgtgaccctggagggtgcctgattgaactgactacgcagttgaccatcatcatgaccgggaagcagatctttgggaacattaaggaggcaatatatcctcttgcactgaattggtggcgaagacgaaaagcaagaaccaacagcgagaagctttatagcaggtgggagcaggaccacgaccttgaaagtttcggacccctcggtttattctacgagtaccttgaaacagtgactcaattcggatttgtgacattattcgtagcctccttccctcttgccccgcttttagcccttattaataacattgtcgagataagggtagacgcctggaagcttaccacacagtataggcgcactgtagcgagtaaagcgcactcgataggggtttggcaggacatcctttacggcatggccgtgctgtcagtggctactaatgccttcattgtggcttttacttccgacataatcccaagactcgtgtactattacgcctactccaccaatgccactcagcccatgaccggctacgttaataattccttgtctgtgtttctgattgccgattttccaaaccacactgccccttctgaaaaaagagactttatcacatgccgctaccgcgactaccgataccccccagacgatgagaataaatatttccataacatgcagttttggcacgtgctcgccgcaaaaatgacattcattatagtgatggaacatgttgtctttctggtgaaatttttacttgcatggatgatccccgatgtgcccaaggatgtggtggagcgcatcaaaagagagaagctgatgacaatcaaaatactgcacgactttgaactgaataaactgaaggaaaacttgggaatcaattccaacgaattcgccaaacatgtgatgattgaggaaaacaaggctcagttggccaagagtacactgtag

SEQ ID NO: 108405 - DNA, 2733 bp, synthetic construct
  misc_feature 1..2733: note = Description of Artificial Sequence: Synthetic coding sequence
  source 1..2733: mol_type = other DNA
atgaagaaaatgagcaggaatgtgttactccagatggaggaagaagaggacgacgatgacggagacattgtcctggaaaatctcggccagacaattgtcccagatctgggctcccttgagagtcagcacgactttagaaccccagagtttgaagagtttaacggcaaacctgacagtctgtttttcaacgacggacagcggcgcatcgacttcgttttggtctacgaggatgagtcgagaaaggagacaaacaaaaagggcaccaacgagaaacagaggcgaaagaggcaggcttacgaaagtaatctgatttgccacggactgcaattagaggcgacccggtctgtcctggacgacaagctggtttttgtaaaagtgcatgctccttgggaggtgctgtgtacctatgctgagataatgcacattaagttgcctctgaaacctaatgacctgaaaaatcgcagttctgctttcggcaccctgaactggttcactaaagtgctctctgtggatgaatccatcatcaagcccgagcaagagttttttaccgccccattcgagaagaataggatgaatgacttctacattgttgatcgcgacgcatttttcaacccagctacccggtcgcggatcgtgtatttcatcttgtcgcgtgtgaaataccaggttataaacaacgttagcaagttcggaataaatagattggtcaattctgggatctataaggccgctttccctctccatgattgtaaatttcggagacagtccgaggacccctcctgtcctaatgagcgttatctcctttacagggagtgggcccacccccggtccatttacaaaaagcagcccttggatctcataagaaagtattatggggagaagatcggaatctactttgcctggctgggttactacactcagatgctgctgctcgctgccgtggtgggtgttgcctgcttcctgtatggatacttgaatcaggataactgcacctggagtaaggaggtttgccatcccgacattggcggtaagataatcatgtgtccccagtgtgatagactgtgtcccttctggaagcttaacatcacttgcgagtcttcaaaaaaactctgtatcttcgattcattcgggacactcgtttttgctgtttttatgggcgtctgggtcacactctttctggagttttggaaacgtaggcaggctgagctagagtacgaatgggacaccgttgaactgcagcaggaggagcaggctcggccagaatacgaagcaaggtgtacgcatgtggtgataaatgagatcactcaggaggaagagcgaatcccttttacggcctgggggaaatgcatccggattactctgtgcgccagcgcagtgttcttctggattttactgatcatagcttcggtgattggcattattgtctatagactctcagtctttattgtgttctctgccaagctgccaaaaaacatcaacggcacagaccccatacagaaatatctgaccccacaaaccgcaacatcaataaccgcttctatcattagtttcatcattattatgattctgaacaccatttacgagaaggtcgccatcatgatcaccaattttgagctgccaaggactcagactgactatgaaaatagcctaacaatgaagatgtttctgttccagttcgttaactattactctagctgtttttacatcgcttttttcaaagggaaatttgtcggatatcccggagatccagtctattggttgggcaagtatagaaacgaagagtgcgaccctgggggctgcctgctagaactgaccacacagctgacaatcattatggggggaaaggccatctggaacaacatccaggaagtgctgcttccatggataatgaatctgattggccgatttcaccgcgtttccggatctgagaaaattactcccagatgggagcaagactaccacctccagcctatgggaaagctgggcctgttttatgaatatcttgagatgattatccagtttggctttgtcacactgttcgtggccagcttcccgctggctccacttcttgcccttgtgaacaacatcctggagattcgcgtcgatgcatggaagctcaccactcagttcagaaggctggtgcccgagaaggcacaggacataggcgcttggcagcccatcatgcagggtattgctatcttggccgtggtgactaatgccatgatcatcgccttcacctccgacatgattccacgattggtatattactggagtttttctgtacccccgtatggcgatcatactagctacacaatggaaggttatattaataacactctgagtatctttaaggtggcagactttaagaacaaatccaagggaaacccctatagtgacctgggtaaccacactacttgccgctaccgcgacttcaggtaccctcctggacaccctcaagaatataaacacaatatttactattggcacgtcattgctgctaagttggctttcatcatagtgatggagcacgtaatttacagtgtcaaattctttatctcctatgctatccccgatgttagtaaaagaaccaagagtaagatacagagggaaaaatatctgacacaaaagttactgcatgagaatcacctcaaggatatgacaaagaacatgggcgtgatcgccgaaagaatgatcgaggccgttgacaataatcttcgtcccaagtccgaatag

SEQ ID NO: 108406 - DNA, 2790 bp, synthetic construct
  misc_feature 1..2790: note = Description of Artificial Sequence: Synthetic coding sequence
  source 1..2790: mol_type = other DNA
atgaagaaaatgagccgcaatgtgctgttgcaaatggaagaggaggaggacgacgatgacggagatatcgtgctggagaatctgggccagaccatcgtgccagatttgggctctcttgaatcccaacatgactttagaacccctgagttcgaggagttcaatgggaaacccgacagtctgttctttaacgacggccaaagacgcattgacttcgtgctggtatacgaggacgaaagtcgaaaggagaccaataagaagggcactaatgagaaacagcggcggaagagacaagcgtacgagagtaatcttatctgccatggcctccagttggaagcaaccagatctgtgctcgacgataaactggttttcgtcaaagtgcatgccccatgggaggtcctgtgtacatacgccgagataatgcatattaaattgccactgaaacccaacgacctgaaaaacagatcttccgctttcggcactctcaattggtttactaaggttctcagtgtcgacgagtcaatcatcaagccggagcaggagttcttcactgcaccctttgaaaaaaataggatgaatgatttctacatcgtggatcgagatgctttttttaatcccgctacacggagcagaatcgtctatttcatactttcacgggtgaagtatcaggtgatcaacaacgtgtccaagtttggcataaacaggctcgtgaacagtgggatttacaaagccgcctttcccctgcatgattgcaagttcaggcgccaatccgaggatccgtcctgccctaatgagaggtatctcctgtacagggaatgggcgcaccccaggtcaatttacaagaagcagccactcgacttaatccgcaagtactatggcgaaaaaataggaatttactttgcttggctcggttattacactcagatgctgctgctggccgccgttgtcggggttgcctgtttcctatacggctatctcaatcaggataactgcacctggtccaaagaagtttgccaccccgatatcgggggtaagatcattatgtgtccacagtgcgaccggctctgtcccttttggaagctcaacatcacgtgcgaatcgtccaaaaagttatgcatctttgatagcttcggtactctggtatttgcagttttcatgggagtgtgggtaacgcttttcttagagttctggaagagaagacaggccgagctagagtatgagtgggatactgttgagctacagcaggaagagcaagcgaggcccgaatatgaggctcggtgtactcatgtggttatcaacgagatcacccaagaagaagaaagaattcctttcacggcatggggcaagtgcatccgcatcacgctgtgtgccagcgcggttttcttttggatccttttaattatcgcctctgtgatcggaatcattgtgtaccgcctttcggtgtttatcgtcttcagcgcgaaattacccaaaaacatcaacggtacagatccgatacagaagtacctgacaccccaaacggccacaagtataacagcttcaattattagtttcatcatcataatgatcctcaataccatctacgagaaggtcgctatcatgataacaaattttgaacttcctcggacccaaactgactatgaaaattctctgaccatgaaaatgttcttattccagttcgttaattactattcttcttgcttttatatagcctttttcaaaggcaaatttgtcggctatccaggggatccagtttactggctgggaaagtaccggaacgaagagtgtgatccaggtggctgtctgctggagctcacaacccaattaacaatcatcatgggcgggaaagccatctggaataacatccaggaagtattgctcccatggattatgaatctgatcgggcgctttcatagggtttcagggtccgagaaaatcacaccacgctgggagcaggactaccacttgcaacccatgggcaaacttggacttttttacgagtacctcgagatgatcatccagtttggtttcgtaacactgtttgtggcctcattcccactggcccccctgctggctcttgtgaataacatcctggaaatcagggtggacgcctggaagctgactactcagtttcgaaggctggttcctgagaaggcgcaggacatcggagcttggcagcctattatgcaggggattgcgattctcgccgtggtgactaacgccatgattatcgcctttacctcagatatgatacctaggctggtatactattggtccttctctgtgcccccctatggcgaccacacctcgtacaccatggagggatacattaacaacacattgtcaatattcaaagtggccgacttcaaaaacaagagcaaggggaacccttacagcgatctcggaaaccacacgacttgtagatatagggactttagatatccccccggtcatcctcaggagtacaaacataacatctactattggcacgtgattgcggccaaactggccttcatcatcgtgatggagtacctcgccctgctgccccggctgggccatagcggaatgattttggcacactgcaacctgcgtctccccgtggattgctgtatgtgttatagatttgttgacgagataagacttcttgaacaactgacttccgacttcatcgattcactgtactacattttctcaatcagcatcatttccatttttttttctgtgactttcttcttcttgttgctttcactgggccccacaccttgcttcagcgtatcaaacttcctctcgtag

SEQ ID NO: 108407 - DNA, 2790 bp, synthetic construct
  misc_feature 1..2790: note = Description of Artificial Sequence: Synthetic coding sequence
  source 1..2790: mol_type = other DNA
atgaaaaaaatgtccagaaacgtgcttctgcagatggaagaagaggaggatgatgacgatggcgatatcgttctggaaaaccttggccagacaattgtccctgatctcggaagcctggaaagtcagcatgacttccgcacacccgagttcgaagagttcaatggcaaacctgattccctgttcttcaacgacgggcagaggagaattgactttgtccttgtttacgaggacgaatcacgcaaagagaccaataagaaggggaccaatgaaaaacagagacgtaagcggcaagcgtacgagagcaatctcatttgtcacggcctccagttggaagccacccgaagcgttttagacgataagcttgtgttcgttaaggttcacgctccctgggaggtgttatgcacctacgcagagatcatgcacattaagcttccactgaaaccaaacgacctgaagaacaggagctccgcctttggcactcttaattggttcacaaaagtcctctccgtggacgaatcaattattaaacctgagcaggagttttttacggcaccgttcgagaagaaccggatgaacgatttttacatcgtggatcgagatgctttctttaatcctgcaacgagaagccggatcgtgtattttatcctctcgcgggtcaagtaccaggttatcaataacgtctcaaagttcgggatcaatagattagtcaattctgggatatacaaggcagctttccccctgcatgactgcaaatttcgacgccagagcgaagatcctagttgtcctaacgaacgctacctcctctacagagaatgggcccacccccggagtatttacaaaaagcaacctctggacctgatccggaaatactacggagagaagattgggatttacttcgcctggctagggtactatacccagatgcttttgctggcagcggtggttggcgtcgcatgctttctgtatggctacctcaatcaggataactgtacttggagtaaagaagtatgccatcctgacattggcggcaaaattataatgtgcccgcagtgtgaccgcttgtgccctttctggaagcttaacatcacttgcgaaagctctaaaaaactgtgcatcttcgatagcttcggaacccttgtgtttgctgtgtttatgggtgtgtgggtgaccttgttcctggaattttggaagagaagacaggcagagctggaatacgaatgggatactgtggaactgcaacaagaggagcaagcccgacctgagtacgaagctcgctgtacccatgtggtgatcaatgagatcactcaggaagaagagagaattccatttacagcatggggcaaatgcattagaataaccctctgcgcgagcgccgtattcttttggatcctcctcataattgcttctgttatcggaattatcgtgtaccgcctgagtgtcttcatcgtattctctgctaaacttccaaaaaatattaatggaacggacccaatccagaagtacctaacccctcagaccgccacctctatcactgcatctataatttcatttattatcatcatgatccttaatacaatctatgaaaaagtggctatcatgatcacgaactttgaactcccacgaactcaaaccgactacgaaaactccctaaccatgaagatgttcctgtttcaattcgtgaattattacagtagttgtttttatatagcattttttaagggcaagtttgtggggtaccctggggatcccgtgtattggttaggaaagtaccgcaacgaagaatgcgatcccggaggctgcctgctggaactcaccacacagctaacaataattatgggcggtaaggccatctggaacaacattcaggaagtgctgctcccatggataatgaatttgattggccgcttccaccgggtgtcaggtagcgagaaaatcactcctcgatgggagcaggactatcacctacagccaatgggcaagttgggactgttctacgagtacctagaaatgattattcaattcggcttcgtcaccctcttcgtagcctcgtttccactggcccccctcctggcactggtaaataacatcctggaaattcgggtcgatgcatggaagctgacgacacagttcaggcggctcgttccggagaaggcccaggatatcggtgcatggcaacctatcatgcagggaattgctattctggctgtggtcacaaacgctatgatcatcgccttcacctctgacatgattcccaggctggtgtactattggagcttctctgttccgccatacggggatcatacttcatatacgatggagggatacattaacaataccctatctatctttaaggtggccgacttcaaaaataagtccaaggggaacccctactcagatttaggcaatcacacaacatgtaggtacagagattttaggtatcctccaggtcatccacaggaatataagcataatatatattattggcacgttatcgctgctaagttagccttcatcattgtaatggaatatcttgctctgcttcctcgcttgggtcactctggtatgatactcgcccattgcaacttgagattgcccgtggattgctgtatgtgttaccgctttgtggacgagatcaggctgttggagcaactgacctctgatttcatagattctctctactatatcttctctatatcaattatctccatatttttttcagtgacttttttcttcttacttctctctcttgggcccaccccttgctttagtgtcagtaacttcctctcttag

SEQ ID NO: 108408 - DNA, 2679 bp, synthetic construct
  misc_feature 1..2679: note = Description of Artificial Sequence: Synthetic coding sequence
  source 1..2679: mol_type = other DNA
atgttttgcgctgccgttctggaaaacctgggccagacaatcgtaccggacctgggttcccttgaatctcagcacgacttccggacccccgagtttgaggaatttaacggtaagcccgattctctcttttttaacgatggccagcgccgaattgacttcgtcctcgtttacgaggatgagagtaggaaggagaccaacaagaaaggcacaaacgagaagcagcgacggaagcggcaggcctatgagagtaatctcatttgccatggccttcagctggaggcgacccgtagcgtattggacgataagctcgtgtttgtaaaggttcatgctccctgggaagtgctgtgcacctatgcggagattatgcacatcaaactgcccctaaagcctaatgacctgaaaaaccgtagctctgccttcggaaccctaaactggtttaccaaagtgctatctgtagatgagtccatcatcaaaccggaacaggaattctttactgcgcccttcgaaaaaaaccgaatgaacgacttctatatcgtcgatcgagacgccttcttcaatcccgctaccaggtctcggattgtgtacttcatcctgagtcgtgtgaaatatcaggtgatcaacaatgtttcaaagttcggcattaaccggttggtgaattccggtatttataaggccgcatttcccttgcacgattgtaaatttcgcagacagagcgaggatccctcttgccccaatgaacgctacttgctgtatcgtgaatgggcacaccccagaagcatctataaaaaacagccgcttgacctcatccgcaagtactacggcgaaaagattggaatatactttgcctggctgggctactatacacaaatgctgttgctggcagcggtcgtgggggtggcctgctttctttatggttacttaaaccaggataattgtacgtggagcaaagaggtatgtcatcctgacatcgggggtaagattatcatgtgtcctcaatgcgatagattgtgtcctttttggaagcttaacatcacgtgcgaatccagcaaaaaactgtgcatctttgacagcttcggcacattagtgtttgcagtgtttatgggcgtgtgggtgaccctgttcctggaattctggaaacgcagacaagccgaactggagtatgaatgggacactgtcgagctccagcaggaggaacaggcccgcccagagtatgaagcaagatgcactcacgttgttattaacgaaattactcaggaagaggaaagaatccctttcacagcctggggcaagtgtatcagaatcaccctgtgtgcgagcgcggttttcttctggatccttttgatcatagcttctgtgatcggaataattgtgtaccggctgtccgtctttatagttttttcggccaagctgccaaaaaacattaacgggaccgaccctattcaaaagtatcttacacctcagaccgccacttcaattaccgcatccataatcagcttcatcatcataatgatcctgaataccatctacgagaaggtagcaattatgattaccaacttcgaactgcccagaacacagaccgattatgagaattcgctcacaatgaaaatgttcctcttccagttcgtcaactattatagcagctgtttttacatcgccttttttaaaggaaagtttgtggggtaccctggtgatcctgtgtattggctggggaaatataggaacgaagagtgcgatccaggggggtgtctactggagttaaccacccagctaacaatcataatgggaggtaaagccatatggaataacatacaagaggtcctcctgccatggattatgaacctaatcggtcggtttcatcgcgtcagcggaagtgaaaaaattacaccccgctgggagcaggactaccacctccagcccatggggaaactgggtctcttttatgagtacctggagatgattattcagttcggcttcgtcaccctctttgtggcttctttcccgctggctcctttattggccttagtcaacaatattctggaaatccgggtcgacgcctggaaactcaccacccagttcaggcgactagtccctgagaaagcccaggacattggcgcctggcagccaattatgcagggcattgccatcctggccgtcgtcaccaacgccatgatcatcgcatttacgtcagacatgatcccgcggctggtgtattactggagttttagcgtgcctccctacggtgatcatacgagctatacaatggaggggtatattaacaatacattgtcgattttcaaggttgccgacttcaagaataagtccaagggcaatccctattctgaccttgggaaccacacgacttgcagatatcgagattttcggtacccacccggacacccacaggagtataaacataacatctactattggcacgtcatcgcagctaaactcgcattcataattgtcatggagcatgtgatctattcagtcaagtttttcatctcttatgccatcccagacgttagtaagagaaccaagtctaagatccagagagaaaaatacctgacacagaaactactccacgaaaatcacctgaaggatatgaccaaaaatatgggagttatcgctgagcgaatgatcgaagccgtggataataacctgaggcccaaaagtgaatag

SEQ ID NO: 108409 - DNA, 2796 bp, synthetic construct
  misc_feature 1..2796: note = Description of Artificial Sequence: Synthetic coding sequence
  source 1..2796: mol_type = other DNA
atgaagaagatgtcccggaatgtgctgctccaaatggaggaggaggaggacgacgatgatggagacatcggcgacgtgcctgcatccaggagaccatttctgacccctcacacacatctgccaagcagcctggtccttgagaatttagggcagaccattgtgccagatcttgggagtctagagagccagcatgattttcggacgcctgaattcgaggagttcaacggcaaacctgacagcctcttctttaatgacgggcaacgccgcatagacttcgtgctggtctacgaagatgagtctcgtaaagaaacaaacaagaagggaacaaatgaaaagcagaggaggaaacgacaggcctatgagagtaacttgatttgtcatggactacagttagaggcaacacggagcgtcctcgacgacaaactcgtgttcgtcaaagtccatgccccatgggaggttctgtgtacgtacgcagaaatcatgcacatcaaactaccgctcaagccgaacgacttgaagaaccggtctagcgcctttggcacccttaattggttcactaaagtgcttagtgtcgatgagagtatcatcaaacccgagcaggagtttttcaccgcccccttcgaaaagaacagaatgaacgacttttatatagtggatcgagacgccttcttcaaccccgcgacaaggtcacggattgtgtacttcattctgtcccgggtaaagtaccaggttatcaataatgtctctaaattcggaattaatcgccttgtgaactccggaatttataaagctgccttccctctgcatgattgtaagttccgacgccaatccgaggatccctcatgcccgaacgagcggtacttgctgtatcgggaatgggctcatccccggtctatttacaagaaacagcctctggacctgatacggaagtattatggcgagaagatcgggatttacttcgcatggttaggctattatacccagatgctcctcctggcagctgtggttggagtggcctgtttcctctatggctacctgaaccaagacaattgcacatggagtaaagaagtgtgtcatcccgacatcggaggcaagatcattatgtgcccgcagtgcgaccgattgtgtccattctggaagctcaacattacctgcgaaagttccaagaagctctgcatattcgactccttcgggactctcgtgtttgctgttttcatgggcgtgtgggtgactcttttcctggagttctggaagcgacgtcaggccgagctcgaatatgaatgggatactgtggaactccagcaggaagagcaggcaaggcccgagtatgaggcaagatgcacccatgtggtaataaacgagatcactcaggaagaagagcgaatcccctttacggcttggggcaagtgtatccgcatcaccctttgtgcctcagccgttttcttctggatcctgctgatcattgcttcggttataggaattattgtctaccgcctttcagtgttcattgttttctccgccaagcttcccaagaacattaacggcactgaccctatccagaagtacctgaccccgcagacagccacatccataaccgccagcattatttcttttattatcatcatgatcttgaatacaatttacgagaaggtagctattatgatcaccaactttgaattacctcgtactcagaccgattacgagaattcactgaccatgaaaatgtttctgttccaatttgtgaattactatagttcatgcttctatatagccttttttaaaggcaaatttgtgggatatcctggagaccccgtgtattggctagggaagtaccgcaacgaggagtgcgatccagggggctgtcttctcgaacttaccacccagctcactattattatgggaggtaaagcaatttggaataatatccaggaagtattactgccatggataatgaacttaatcggccgcttccatcgagtttcgggtagcgaaaaaatcacacctcgttgggagcaggattaccatttacagcctatgggaaaattgggtttattctatgagtacttagaaatgatcattcagttcgggtttgtcaccctcttcgtcgcatcattcccattggcccctttgttggccttggtgaacaacattctggaaattcgagtcgatgcctggaagctgaccacacagttcagaaggctcgtgccagagaaggctcaagatatcggggcgtggcaaccaatcatgcaaggcattgctatcctggcagttgttacgaatgccatgattatcgctttcacctccgacatgattcccaggcttgtttactactggagtttctcggttcccccatacggcgaccacacaagctacactatggaagggtacatcaataataccctgtctattttcaaggttgcagatttcaagaacaaatccaaagggaacccatacagtgacttagggaaccacactacctgccgatatcgggactttaggtacccccctggccacccccaagagtacaaacacaacatttattactggcacgtgattgccgccaagctagctttcataattgtcatggaacacgtgatatacagcgtaaaattcttcatttcttacgcaatccccgatgtgtccaagcggaccaagtccaagattcagcgcgaaaaatatttaacgcagaaacttctgcacgaaaatcacctgaaggacatgacgaaaaacatgggcgttatagccgagcggatgatagaggccgtcgacaacaatctgcgcccaaagtcagagtag

SEQ ID NO: 108410 - DNA, 501 bp, synthetic construct
  misc_feature 1..501: note = Description of Artificial Sequence: Synthetic coding sequence
  source 1..501: mol_type = other DNA
atgatgcttcactctgctctcggactgtgcctcctgctcgtgacagtctcgtccaacctggcaatcgctataaaaaaggagaaacgtccaccacagacactttccaggggctggggggacgacattacttgggtccagacgtacgaagagggcctgttttacgcccagaagtctaagaaaccactgatggtgatacatcatctggaggactgccagtactcacaagctcttaaaaaggtgttcgcccagaacgaggaaatacaggagatggcacaaaacaagtttataatgttgaacctcatgcacgagaccaccgataaaaacttgagccctgacggccagtatgtcccacgcattatgttcgtggacccaagcctgacagtgagagcagatatcgctggtcggtattcaaataggttgtacacctatgagcctcgcgatctgccactgctgatcgaaaatatgaaaaaggctcttaggctcatacaatccgagctttag

SEQ ID NO: 108411 - DNA, 453 bp, synthetic construct
  misc_feature 1..453: note = Description of Artificial Sequence: Synthetic coding sequence
  source 1..453: mol_type = other DNA
atgggtgctgcagtttttttcggatgtacatttgtagcctttggacccgctttcgccctgtttcttataactgtggccggggatcccctgcgggtgattatcttggttgcaggaaaggccgacgagggtcttgcatctctctctgaggacgggcgctcccctatctcaatacgccagatggcatacgtgtccgggttgtcctttggaatcatcagcggtgtgttctcagtcattaatattctggctgacgctctgggacctggagtggtggggatccatggcgattcgccatactacttcttaacttcagcttttctgacggctgccatcatactgttacacacattctggggtgtcgtctttttcgacgcttgtgagaggaggaggtactgggccctgggactggtggttggatcgcaccttctcaccagcggccttacctttctaaactag

SEQ ID NO: 108412 - DNA, 744 bp, synthetic construct
  misc_feature 1..744: note = Description of Artificial Sequence: Synthetic coding sequence
  source 1..744: mol_type = other DNA
atgggggcagccgtgttttttgggtgcacatttgtcgcatttggacccgccttcgcactgttcctgattactgtcgccggggatccgttgagagtaattatcctggtggcaggtgcctttttctggctggtctcactcctcctggctagtgtggtgtggtttatacttgtgcatgtaacagaccgaagcgatgctcgcctgcagtatggcctgctgatcttcggcgccgccgtcagcgtactcctccaggaggtgttcagatttgcttattacaagttgctgaaaaaagccgatgagggcttggctagtttatcagaagacggccgttctccgatcagcatccgccagatggcttatgtttcgggattgtcttttggcatcatctccggagtcttcagcgtgattaatatcttagccgatgctttaggccccggagtggtgggaattcatggtgactcaccctattattttcttactagcgcttttctcacagcggcaattattctcctgcacacattttggggtgtggtatttttcgatgcctgcgagagaaggcggtactgggccctgggccttgtcgtaggttcccacctgctgactagtggattgaccttcctgaacccatggtatgaagcctcccttctccccatctacgctgtgaccgtgtcaatgggcctatgggctttcatcacagccggtggaagcctgcgatccatccaaaggagcctgttgtgcaaagactag

SEQ ID NO: 108413 - DNA, 798 bp, synthetic construct
  misc_feature 1..798: note = Description of Artificial Sequence: Synthetic coding sequence
  source 1..798: mol_type = other DNA
atgggagcggctgtgttcttcggatgtaccttcgttgcgttcggccccgcattcgcactgttccttatcaccgtggcaggagatcccttaagggtgataatccttgtcgccggggctttcttttggctagtctctctattgttagccagtgtggtttggtttatcctggtacatgtgaccgatagaagtgatgctaggcttcagtacggactcctgatctttggggcagccgtttccgtcctgctgcaagaggtgttcaggttcgcctactataagttactgaagaaagccgatgaggggctcgccagtctgagcgaggacgggaggtctcctatctccatcaggcaaatggcgtatgtgtcaggcctgtcctttggcatcatctccggggtgttttccgttatcaatatactggccgacgccttgggtcccggcgtcgtggggattcatggcgacagtccttattatttcttgacttctgccttcctcacagccgctattattctgcttcacacgttttggggagtcgtgttcttcgatgcatgtgagcgcaggcggtactgggctttgggcctggtggtggggagtcatctgttgaccagtggactcacttttctcaatccctggtacgaagcatccctgctccccatttacgctgtgactgtgtcaatgggtctgtgggccttcatcactgcaggaggctcactgcgttcaattcaacgctctttattatgccggcgtcaggaagattccagggttatggtttactcggctctaaggatcccaccggaagattag

SEQ ID NO: 108414 - DNA, 588 bp, synthetic construct
  misc_feature 1..588: note = Description of Artificial Sequence: Synthetic coding sequence
  source 1..588: mol_type = other DNA
atgggcgcggcagttttctttggatgcactttcgtagcctttggtccagccttcgccttgttcttgatcactgtggccggggatcccctgagagtaattatacttgtggcaggacgatgcagcgccctgcccacaacctcttgcctaatatccggattgtctttcggtatcatcagcggggttttttcggtgataaacattcttgcggacgctctggggccaggtgtggttggcattcacggtgacagcccttactacttcctaacctccgccttcctgacggctgccatcatactacttcacaccttttggggtgtggtgttctttgacgcttgcgaacggcgccgttattgggcacttggacttgtggtcggttctcatctgctgacgagtggcctaacttttctaaatccatggtacgaggcgtcactgctgccgatttacgccgtcaccgttagcatggggctctgggcatttattacagctggaggaagcctaagaagcatccagcgctctctactttgtagacggcaagaggattctcgggtgatggtctatagcgctctgcgtatcccgcctgaggactag

SEQ ID NO: 108415 - DNA, 774 bp, synthetic construct
  misc_feature 1..774: note = Description of Artificial Sequence: Synthetic coding sequence
  source 1..774: mol_type = other DNA
atgacagccgcggtgttctttggttgtgctttcattgcttttgggccagccttagcactgtatgtgttcaccatcgcaaccgaacccctgcgcattatttttctaatcgctggagcattcttctggctcgtgagcctcctgatctcatctctcgtgtggttcatggcccgcgtgattattgataacaaagatggacccactcagaagtatttgctcatctttggggcctttgtcagcgtttatatccaagagatgtttcgatttgcatattacaaactgctgaagaaggcatccgagggtttgaaatcgatcaacccgggggaaacagcaccatcgatgaggcttttggcttacgtctccggccttgggtttggcataatgagcggagtgttttcttttgtcaacacactcagtgacagtctcggacccggcaccgtaggaattcacggagactcgccacagttctttctttactcagcattcatgacgctggtgatcatccttttacacgttttttggggaatcgtcttctttgatggttgcgaaaagaagaaatggggcatcctgctgattgtgttgctgactcacctgctcgtatccgcccagaccttcataagctcatactacggcattaacttagcatccgccttcattatcctggttttaatgggcacatgggccttcctggctgccggcggatcatgtaggagcctgaagctttgcctgctgtgtcaagacaaaaactttctcttgtataatcagcggtccaggtag

SEQ ID NO: 108416 - DNA, 246 bp, synthetic construct
  misc_feature 1..246: note = Description of Artificial Sequence: Synthetic coding sequence
  source 1..246: mol_type = other DNA
atgaccgctgcagtgttttttggttgcgcgttcatcgccttcggccctgccttagcattgtacgttttcacaatcgccaccgagcctctgcgtatcattttcttaatcgcagggaggagggtggaaacatgtaagaatacagaagctccagattgtgcttctcccagcgggtctctgtcctttttattggtaggagtcagcaccgatttcgtcccatgtctggtgcatgggaagagccattactag

SEQ ID NO: 108417 - DNA, 651 bp, synthetic construct
  misc_feature 1..651: note = Description of Artificial Sequence: Synthetic coding sequence
  source 1..651: mol_type = other DNA
atgactgctgccgtgttttttggctgtgcctttatagcttttggaccagctctcgctttatacgtctttaccattgccaccgaacctctgagaatcattttccttattgcaggagcattcttttggctcgtcagcctgctcataagttccttggtttggtttatggccagagtgataatcgataacaaagacggcccaacccagaaatacctgcttattttcggcgcctttgtcagcgtgtacatccaggagatgtttcggttcgcctactataagctcttgaaaaaggccagcgagggcttgaagtctatcaatcccggagaaacagccccctcaatgcggttgttagcgtatgccttcatgactcttgtaatcattttgttgcatgtgttttgggggatcgtctttttcgatggctgtgaaaagaagaagtggggcattttactcatcgtgctgttgactcatctcctggtgagcgcacaaacattcatctcctcctattacggaattaacctcgcttctgcatttatcatcctggtgctcatgggcacatgggcatttcttgctgcgggaggctcttgccggtcactaaagttgtgcctgctgtgccaggataagaatttcttgctgtataaccagcgcagccggtag

SEQ ID NO: 108418 - DNA, 1695 bp, synthetic construct
  misc_feature 1..1695: note = Description of Artificial Sequence: Synthetic coding sequence
  source 1..1695: mol_type = other DNA
atggcaaccgccgagagaagggctctgggtatcggcttccagtggctgtccctcgctactctggtgctgatctgtgccggccaggggggtagaagggaggatggtggccccgcctgttacggggggttcgacctctatttcatactcgacaaatcgggatcagtattgcatcactggaacgagatatactactttgtcgagcagctggctcacaaattcatatctcctcagctgcggatgagcttcatagtgttctcaacccgcggcacaacgctgatgaaactgacagaagatcgcgaacaaataagacagggactcgaggagctgcagaaagttctgccaggcggcgacacctacatgcatgaaggattcgaaagagcttcagagcaaatttactacgaaaacaggcagggatataggacagcctccgtgataattgctctgacagacggcgaactccacgaggatttgtttttctattcagagcgcgaagctaacaggtcacgggacctcggagccatcgtgtattgtgtcggcgtcaaagacttcaacgaaactcagctggcccgcatagcagactctaaggatcacgtctttcccgtcaatgatggttttcaggctcttcagggcattattcatagtattttaaaaaagtcatgtattgagatcctcgccgctgagccctccaccatctgcgcaggcgaatcattccaggtagtggtgagaggaaatgggtttaggcacgcccgaaacgtggatagagtactctgttctttcaagataaatgactcggtcaccctgaacgagaagccttttagtgttgaggatacttacctgctgtgcccagcccctattctgaaagaggtgggcatgaaagccgccttacaggtatcaatgaatgacggattgtcctttatcagctcctcagtgataattacgactacccattgcagcgacgggtcaatcttggcaattgctctccttattctctttctactgctggccctagctctgctgtggtggttctggcctctatgttgtacggttatcattaaggaagtgcctccaccccctgctgaggagagtgaagaggaggacgacgacggcctgcccaagaaaaaatggccgacggtggacgcctcttactacggtggccgaggagtgggtggaattaaaagaatggaggtgaggtggggggagaagggctccaccgaagaaggagccaaactggagaaggccaagaacgcgcgtgtgaagatgcccgagcaggaatatgaatttcccgaacctagaaacttaaataacaatatgcgtcgcccatccagccctaggaaatggtattcccccatcaagggcaagttggacgccctctgggttcttcttcggaagggctatgatagagtgtcagtgatgagaccccagccgggtgatacaggcaggtgtatcaatttcactagagtgaaaaataaccagccagccaaatatccactgaataacgcctatcacaccagttcacctcctcctgctcctatttacaccccccctccccccgcccctcactgtcctccacccccaccatctgcccctactccacccataccaagcccaccaagcactttgccgccccccccccaggccccccccccaaaccgagctccacctcccagccggcctcccccgcggcccagcgtctag

SEQ ID NO: 108419 - DNA, 1107 bp, synthetic construct
  misc_feature 1..1107: note = Description of Artificial Sequence: Synthetic coding sequence
  source 1..1107: mol_type = other DNA
atggccacggccgagaggagagcccttggcattggttttcagtggctgtcacttgcaaccctcgtccttatatgtgccgggcagggtggacgacgggaggacggaggcccagcatgttacggaggcttcgatctgtactttatcctggataaatctggaagtgtactgcaccactggaacgaaatctactacttcgtcgaacagctcgcacacaaatttatttcgccccagctccgcatgtcattcatagtcttttctaccagaggaacaacccttatgaagcttactgaggatcgagagcaaattcggcaagggctggaggagctgcagaaagttctacctggtggtgacacatacatgcacgaaggcttcgagcgggcatcggaacagatatactacgagaaccggcagggttatcggacggccagtgtcatcattgccttaactgacggggagctgcatgaggatctgttcttctatagtgaacgtgaagccaatcggtctcgggatttgggggctattgtgtactgtgtgggtgtaaaggattttaacgagacacaactcgcacggatagccgatagtaaggatcatgtgtttccagtgaacgacggctttcaggcactacaagggataatccacagtatccttaaaaagtcgtgcatagagattctggccgccgagccaagtactatatgcgccggggagtcctttcaggttgttgttaggggaaatgggtttcgccacgcccgcaacgtagacagagtgctctgctcatttaagattaacgattcggttaccttgaacgagaagccttttagcgttgaggacacctacctactgtgcccagcccctattctgaaggaggtcggcatgaaagcggctctacaagtgtctatgaacgacgggctgagcttcattagctcctctgtgatcattactaccactcattgttccgacggtagcattttggccatcgccctactgatcctgtttcttttgttggccctggctttgctttggtggttttggcctctatgctgtaccgtaataatcaaggaggtaccaccaccacctgcggaagagagcgaagaaaataagatcaagtag

SEQ ID NO: 108420 - DNA, 1002 bp, synthetic construct
  misc_feature 1..1002: note = Description of Artificial Sequence: Synthetic coding sequence
  source 1..1002: mol_type = other DNA
atggctactgccgagaggcgagctctgggcatcggatttcagtggctctctctggctacccttgtgctgatatgtgccggacagggaggacgacgggaagacggcgggccagcatgctatggcggattcgacttgtattttatcttggacaaatccggatctgttctccaccactggaacgagatctactatttcgttgaacagctggcccacaagtttattagtccacagctaaggatgagcttcatagttttcagcaccagaggaactactctgatgaagctcaccgaggacagagagcagatccggcaaggcttggaggagcttcagaaggtactccccggaggagacacatacatgcacgaagggtttgagcgggcttccgagcagatatactatgagaaccgacaaggatataggaccgcaagcgtgataattgcgttaactgatggtgagctgcatgaggaccttttcttttacagtgaaagagaagcaaacaggtcccgtgatctgggtgctatcgtgtactgtgttggcgtgaaggacttcaacgagacccaactggccagaatcgcagatagcaaggatcacgtgttccccgtcaacgatggcttccaggccctgcaaggaataatccacagcatcctcaagaaatcttgtatcgaaattctagctgccgagccctctactatctgtgctggtgagtcgttccaagtcgtggtccgcggcaacgggtttagacacgcgcgaaacgtggacagagtcttgtgttctttcaagatcaacgatagcgtgactctgaatgagaagccgttttccgtggaagatacttatttgctctgtccagcccccatattgaaagaggtgggcatgaaagctgcactccaagtgtccatgaacgatgggctgagttttatctccagctcagtgattatcacaaccacccattgcagccttcataagatagcttccgggccaactacagccgcctgtatggagtag

SEQ ID NO: 108421 - DNA, 969 bp, synthetic construct
  misc_feature 1..969: note = Description of Artificial Sequence: Synthetic coding sequence
  source 1..969: mol_type = other DNA
atggtcgctgagcggagtcccgctaggtcacccgggagctggctcttccctggactctggctgttggtgctaagcggacccggtggcctattgagggcacaggagcagccatcttgccgtcgggcgtttgacttgtacttcgtgctggataaaagtggaagcgtagcgaataactggatagagatttacaatttcgtacaacagctggcagaacgattcgtgtcccctgaaatgagactgtctttcattgtgttctcgtctcaggctactatcatcctacctcttaccggcgatcggggaaagatctctaaggggcttgaggacctgaaacgcgtgtctcctgtcggcgaaacatatatccacgaggggctgaaattggcaaacgaacagatccagaaagccggcgggctcaaaacaagtagcatcattatcgctcttacggacggcaagcttgacgggctcgtgcccagttacgccgagaaagaagccaagattagccgcagcctgggagctagcgtctattgcgtcggggtgctggacttcgagcaggctcaactggaacgaatcgccgacagcaaagaacaagttttccccgttaaaggagggtttcaagccttgaaaggcatcatcaattcaatcctggctcaaagctgcaccgagatcttagaactgcagccctccagcgtgtgtgtcggcgaagaattccagattgttctgagcgggagaggcttcatgttagggtctcgcaacgggtcagtgctgtgtacatatacagtgaacgagacatacaccacctccgtaaagccagtcagcgtacagctgaatagcatgctctgccccgctcctatcctgaacaaggctggcgagtggggactaactgtaacccaggccggagtgaagtggcatgatcttacacattgtacctttggactgagcggctccggggatcctcctacgtccgccagttag

SEQ ID NO: 108422 - DNA, 1470 bp, synthetic construct
  misc_feature 1..1470: note = Description of Artificial Sequence: Synthetic coding sequence
  source 1..1470: mol_type = other DNA
atggtcgccgagaggagccccgcccgatctcccggctcatggctgttccctgggttgtggttactggttctgtccgggcccggagggctgttgagggctcaggaacagcctagctgccgtcgcgcattcgatctgtactttgtcctggataagagtggaagcgtggccaacaattggattgagatttataacttcgtgcagcagcttgcggagcgcttcgtgtcaccagaaatgcgcctgtcctttatcgtcttttcctcacaagctaccatcatcctgccccttacaggagataggggaaagatctccaagggtctggaagacctcaagagagtgtctcccgtgggcgagacttacatccacgaaggcctgaagcttgccaacgagcagatccaaaaggcaggcgggctgaagacctcatcaataattattgccctcaccgatggaaagcttgacggcctggtaccaagttacgcggagaaagaggctaaaattagtcgcagtttgggcgccagcgtctactgcgtgggagtgctcgatttcgaacaggcacagctcgagagaatcgcagattccaaagagcaagttttcccagtgaagggcggcttccaggctctgaagggaatcattaatagtattcttgcacagagttgcactgagattttggagctgcagccatcgtctgtgtgtgttggagaggagttccagatcgtcctctcgggcaggggatttatgctcggcagtcggaacggtagcgtcctgtgcacctatacagtgaatgagacatataccactagtgtcaagcccgtgtcagttcaattgaacagcatgttatgcccagccccaatactgaacaaggccggtgagaccctggacgtctctgtgagttttaatggggggaaatccgtcatctccggcagtttaatcgtgacagctaccgaatgcagcaatggcatcgcggcgatcatcgtcatcttggtcctgctcttgttgctaggcatcggcctcatgtggtggttttggcccctgtgttgcaaggtggtgattaaggatcccccccctcctccagctccggccccaaaagaagaagaggaggagcctctgccgacaaaaaagtggcctacagtggatgcctcatactacggaggtcggggcgtggggggtattaagaggatggaagtgagatggggcgacaagggctcgacagaggagggtgctaggttagaaaaagctaagaatgcagttgtgaaaattcctgaagagaccgaggagcctatcaggcccaggcccccacgtcccaagccaacccatcaaccacctcaaacaaagtggtacaccccaataaaaggtaggcttgacgcattgtgggcacttcttcgccggcaatatgaccgcgtctcacttatgagaccacaggagggcgacgaggtttgtatatgggaatgcatcgaaaaagaactgactgcatag

SEQ ID NO: 108423 - DNA, 1161 bp, synthetic construct
  misc_feature 1..1161: note = Description of Artificial Sequence: Synthetic coding sequence
  source 1..1161: mol_type = other DNA
atggtagccgagcggagccccgctcgttccccagggagctggctctttcccggcctatggctgctggttttgtccgggcctggaggactgctgagggcacaggagcagccgtcctgtcggagggccttcgatctgtacttcgtgttagataagtcaggcagcgtggccaacaactggatcgagatctataattttgtgcagcagctcgccgaaaggtttgtgagtcccgaaatgcgtctcagcttcatagtgttctcctcccaagcgactattattcttcctctgactggcgatcggggcaaaatctcaaagggcctcgaagacttgaagcgggtgtctccagtcggggagacctatattcacgaaggtctcaagctggcaaacgaacagattcaaaaagccggaggattaaaaacttccagcattatcattgcgctaaccgacggcaaactcgacgggctggttccgtcctacgctgaaaaggaggcgaagatcagcaggtcactgggggcttcagtgtactgtgtcggcgttctggatttcgagcaggctcaacttgaaagaattgccgactccaaagagcaggttttccccgttaaaggcggattccaagcgctgaagggtataattaatagttccaacgggattgccgccatcattgttattttagttttgcttctcctgcttggcattggcctgatgtggtggttttggcctttgtgctgtaaggtggtgatcaaggaccctccgcctcctcccgcaccagcgcccaaggaggaggaggaggaacctttgccaacaaagaaatggcctaccgtcgacgcaagctattacggtgggcgtggcgtaggcggcatcaaaaggatggaggtgcggtggggcgacaagggatccactgaggagggagctagactggagaaggccaagaatgccgttgtgaaaataccagaggagaccgaagaacccatacgaccccggcccccacgtccaaagccaacccaccagccgcctcaaacaaaatggtatacgcccatcaaaggccggctggatgccttgtgggctctactgaggagacagtatgacagagtatccctgatgagacctcaggagggagatgaagtgtgtatatgggaatgtatagaaaaggagctgaccgcttag

SEQ ID NO: 108424 - DNA, 1467 bp, synthetic construct
  misc_feature 1..1467: note = Description of Artificial Sequence: Synthetic coding sequence
  source 1..1467: mol_type = other DNA
atggttgcagagagaagccctgctaggtcgccaggctcctggctgttccctgggctatggctgttggtcctcagcggaccaggggggctgcttagagcgcaggaacagccttcttgtcgccgcgccttcgatctttacttcgtgctggacaaatcggggtctgtagccaataattggattgaaatctataacttcgtgcaacagcttgcagagagatttgtgtctcctgaaatgcggctctcctttattgtctttagctctcaggcaaccatcatcttacccttaactggcgatcgaggaaagatttccaagggcctcgaagatctcaagagagtgagccctgtgggcgaaacctatatccacgagggcctgaagttggccaatgaacagatacagaaagcaggcggactcaaaacctcttcaatcataattgcgctaacagatggcaagctggacggcctggtgcccagctatgcagagaaagaagcaaagatatctcgctctttgggagcgtccgtgtattgcgtgggcgtattggactttgagcaggcgcagctcgaacggatcgctgactctaaggaacaggtgttcccagtcaaaggagggttccaggccttaaagggcattatcaacagcattctcgctcagtcttgtacggagatcttagaactgcagcctagtagtgtgtgcgtgggcgaagaatttcagatcgttctcagcgggagaggcttcatgttaggctccagaaacggtagcgtgctgtgcacatacaccgtgaacgagacttataccaccagcgtgaaaccagttagcgtgcagctgaattcaatgctctgccctgcccccatccttaacaaggctggcgagacgctggacgtatcggtaagttttaatggcggcaaaagcgtcatcagtggatctttgatagttacggcaacagaatgctctaatggcatcgctgcgatcatcgtgattctcgtcctgctgctcttgcttggaattggactcatgtggtggttttggcccttgtgctgcaaggtggtcatcaaggacccccccccccctccagcccctgctcctaaggaggaagaagaggaaccgctgcccacaaagaaatggccgactgtcgatgcaagctattacgggggtaggggggtgggaggcattaagcgaatggaagttcgctggggggacaaagggtccactgaggagggtgctaggctagagaaggcaaagaatgctgtagttaagattccggaggaaaccgaggagcccatccgacctcgccctccccgacccaagcccacccaccaaccgcctcaaacgaagtggtacacccccattaaggggagacttgatgccttgtgggccttgctacggagacagtacgatcgcgtaagccttatgagacctcaggagggcgatgagggaagatgtataaacttcagtagagtgccctctcagtag

SEQ ID NO: 108425 - DNA, 2217 bp, synthetic construct
  misc_feature 1..2217: note = Description of Artificial Sequence: Synthetic coding sequence
  source 1..2217: mol_type = other DNA
atgcgtggacctagcggagctctctggctgctactagcccttagaactgtgctgggaggaatggaggtgcgctggtgcgcaacctccgatccagagcagcacaaatgtggtaacatgagcgaagctttcagagaagccggcatccagccctctctcttatgcgtaagaggtaccagcgccgaccactgtgtgcaactcatcgccgcacaagaggcggacgctatcacactcgatggaggtgccatttatgaggctggtaaggagcacggcttaaaacccgtggtcggagaagtctatgaccaagaagtcggtacttcttattacgccgtggcagtcgtgcggagaagctcgcacgttaccatcgacaccctgaagggagtgaaaagctgccatacaggtatcaaccggaccgtcggatggaatgtccccgtgggataccttgtcgagtccggtaggctctcagtgatggggtgcgatgtgctcaaggcggtgagcgactactttggcggcagttgcgtccccggcgctggcgagaccagctatagtgaaagtctctgccggctttgcagaggagatagcagcggagagggagtgtgtgacaaaagccccctcgaaagatattatgactacagcggggccttcaggtgtctggcggagggagctggcgatgtggcctttgttaaacactccaccgtactggaaaacacagatggtaagaccctgcccagctgggggcaggcactgctgtcacaggattttgaactgttgtgccgtgacggcagccgcgctgatgttacagaatggcgacagtgtcaccttgcccgggtgccggcccatgcggtcgtggtgagagccgataccgacggagggctgatctttaggttactgaacgaaggtcagagattgttctctcatgaagggtcctccttccaaatgttctccagcgaggcctatgggcaaaaggacctgctcttcaaggactcaaccagcgagcttgttcccatcgccactcagacctatgaagcatggttgggccacgagtatctgcatgctatgaaaggtctcctgtgcgatcctaatagactgcctccgtaccttaggtggtgcgtcctctctacccccgagatccagaagtgtggagatatggccgtggcctttcgccgccagcgcctgaaacccgaaattcagtgcgtgtcggccaaatccccgcagcactgcatggagcgcatccaagctgaacaagtcgatgctgtgaccctaagcggagaagacatatacacagcaggcaagacatatggacttgtccctgcagcgggcgagcattacgcccctgaagactcctctaactcttattacgtagttgctgtcgttaggcgcgatagcagccacgcctttaccctggacgaactgagggggaaacgaagctgccacgccggcttcggcagccctgccggctgggatgttcccgtgggggccctgattcaacggggcttcatccggcccaaagattgcgatgtactcaccgcggtatctgaattttttaacgcaagttgcgtacccgttaataacccgaagaactatccaagttctctgtgtgccttgtgcgtaggagacgaacagggaaggaacaaatgtgtggggaattcacaggaaagatattacggatatagaggcgccttcaggtgtcttgtagagaatgccggggacgtggcctttgtacgtcacactacagtcttcgacaacaccaacggtcacaacagcgaaccttgggcagctgaacttcggtctgaagactacgagctattatgtcctaacggggccagggctgaggtctcacagtttgcagcgtgtaatctggcccagatccctcctcacgctgtgatggtgcggccggacaccaacatctttacagtttatggcctcctcgacaaggcacaggacctcttcggagatgaccacaacaaaaatggatttaaaatgtttgatagttctaactaccacggtcaagaccttctgttcaaagatgcaaccgtgagagccgttccagtgggtgagaagacaacataccgcggttggctcggcctcgactacgtagctgcactggaaggcatgtccagccaacagtgttcaggtgctgcggcccctgctccaggggccccgctgttaccgctgctcctacctgcgctggccgccagactgttaccgcctgccctatag

SEQ ID NO: 108426 - DNA, 909 bp, synthetic construct
  misc_feature 1..909: note = Description of Artificial Sequence: Synthetic coding sequence
  source 1..909: mol_type = other DNA
atgcggggcccctcgggggccttgtggctgctactcgctttgagaactgtgttaggaggaatggaagtgagatggtgcgccacaagtgaccctgagcagcacaaatgtgggaatatgtctgaggccttccgagaggctggcattcagccgtcactcctctgtgtgcggggcacttccgccgatcactgtgtgcaactcatagccgcacaggaggctgatgccattacactggacggcggagcaatctatgaagcaggcaaggaacacggcctgaaacctgtggtgggcgaggtgtatgatcaggaagtgggtacaagctattatgcagtggcggtggtccgacgatcctcacatgtcactatcgatacccttaaaggcgtaaagagctgtcacacaggaatcaatagaaccgtgggttggaatgtgccagttggctatttggtggaatctgggagacttagcgtaatgggctgtgacgtgctgaaggcagtgagcgactattttggaggatcctgtgtgccaggtgctggtgaaacttcctattccgaaagcctatgcaggctctgccgtggggattctagcggagaaggcgtatgtgacaagtcccctttagagcgctattatgactacagtggcgcattccgttgtctggctgagggggctggcgatgtagcttttgtcaagcacagtaccgtcctggagaacaccgacgagtccccatctcgtaggcagacttggactcgtagcgaagaggaggaaggcgagtgtcctgcacatgaggaggctcgcagaaccatgcggagcagcgccggccaggcttggaaatgggccccagtgcatcggccacaggacgagtctgacaagggcgaattcgggaaaagagccaagagccgggacatgctgggatag

SEQ ID NO: 108427 - DNA, 1395 bp, synthetic construct
  misc_feature 1..1395: note = Description of Artificial Sequence: Synthetic coding sequence
  source 1..1395: mol_type = other DNA
atggactttcagcaccgacccggtggaaagaccggaagtggcggagtggctagctctagtgagtcgaatcgggaccggagagaaagactcaggcagctggctctggaaaccatcgatattaataaagacccttattttatgaaaaaccacctaggatcttacgagtgcaaactatgcctcactcttcacaataatgaggggagctacctagctcatacccaggggaagaagcaccagacaaatctcgcaagacgcgcagctaaggaagcgaaagaagcacccgctcagccagctcccgaaaaggtcaaagtggaagtgaaaaaatttgtgaaaattggaagaccggggtataaggtgactaagcagagagactcggagatgggacagcagtcccttctgttccagattgattaccccgagattgctgagggcataatgccccgccaccgcttcatgtccgcatacgaacaacggattgaaccccctgaccgacggtggcagtatttattgatggccgcagagccctatgaaacaatcgcattcaaggtcccctccagagaaattgacaaggctgaaggcaagttttggacccattggaatagggagacaaaacagtttttcctgcagtttcacttcaaaatggaaaaaccacctgcacctccaagcctccccgccggaccccccggcgtgaaaagaccgccccctcctctaatgaatggccttcctcctcgccctcctctgcccgagtctttgccccctccacctccaggaggcctcccattgccccctatgcccccaacaggaccagctcctagcggaccacctggacccccccagcttcccccccccgcccccggcgttcacccaccagccccagttgtgcaccctcctgcaagtggcgttcacccgcctgcccccggagtgcaccctcccgctcccggcgttcaccctcctgcaccgggcgtgcatcctcccacttccggcgtgcatccaccagccccaggtgtccatccaccagcaccaggggtacatcctccagcaccgggggtgcacccacctgccccaggggtccatcctcccgccccaggagtccatccaccaccttctgctggagtccatccacaggctccaggcgtccaccccgccgcccctgccgtccacccccaagctcctggcgttcatccaccagctcctgggatgcacccacaggcccctggcgtgcatccccagccacctggcgtgcatccttcagcacccggggtgcatccccagcccccaggtgtgcacccgagcaacccgggagtccaccctccaaccccaatgccacctatgctccgcccccctctgcctagcgaggggccaggtaatattccccctcctccacctacaaattag

SEQ ID NO: 108428 - DNA, 1437 bp, synthetic construct
  misc_feature 1..1437: note = Description of Artificial Sequence: Synthetic coding sequence
  source 1..1437: mol_type = other DNA
atgttggggagcttagggttatgggcgttgctacctacagccgtcgaagccccacctaatcggcgcacgtgtgttttttttgaagcccctggggtaagaggaagtactaaaaccctaggcgaactactggatacagggacagaactgccacgagctatccggtgtctttattcccggtgttgttttgggatttggaatctgacacaggaccgggctcaggtggaaatgcaggggtgcagggattcagacgaaccgggctgtgagagccttcactgcgacccttcacctcgcgcacatccttcccccggatccaccctgttcacatgctcttgcggtaccgatttttgtaacgccaattatagccatttgccaccgccgggctctccggggacacccggctcccaaggcccgcaagccgccccgggcgaaagcatctggatggctctggtcctgcttggattgtttctgcttctgctgctcctgttgggatctataatcctggcactgctccagcgcaaaaactacagagttcggggcgaacccgtccccgagcctcgcccagactcaggccgggattggtccgtggagctgcaggaactcccagaactgtgttttagccaggtgatcagagaaggaggccacgctgttgtctgggccgggcagctacaaggcaagctggtggcaatcaaggctttcccccccagatcagtggcccaattccaagctgaacgcgccctgtacgaactcccgggccttcaacatgatcacatcgtgagatttataaccgcctcccgaggcggccccggccggctgctgtcaggccctctgttggtgctggaattgcaccccaaaggctccctgtgtcactacctaactcagtacacctccgattggggctcctctctgaggatggcgctgagcctggctcaaggattagctttcctgcatgaggaacgctggcaaaacggccaatacaagcccggtatcgcacatagggacctttccagtcaaaacgtcttgatccgcgaggatggctcctgcgcaatcggtgacctcgggttggcactcgtcttgcccgggctcactcagcctccagcctggacccctacacaaccccagggtcccgcagccattatggaagatcctgacggcttgcgggagctattggaggattgttgggatgccgatcccgaggcaaggctcactgccgagtgcgtgcagcaaaggttggccgcccttgctcacccccaggaaagtcatccgttccccgagagctgcccccggggctgcccccctctgtgtcctgaggactgcacatcaattccagctcctacaatcctgccctgccgaccacaaagatccgcatgtcatttttccgtacagcagggaccctgctcaaggaatccccagccagcttgcacactcagtcccgtttag

SEQ ID NO: 108429 - DNA, 1437 bp, synthetic construct
  misc_feature 1..1437: note = Description of Artificial Sequence: Synthetic coding sequence
  source 1..1437: mol_type = other DNA
atgctgggatccttgggactttgggccctactcccaacggccgtcgaggcgccaccaaacaggaggacctgcgtattttttgaagctcccggagtgcggggctctactaaaacattgggggaactgctggatacaggaaccgaactgccgcgggcaattaggtgtctttactcgcggtgttgtttcgggatttggaatttgacacaggatcgcgcgcaggtggagatgcagggatgtcgtgactctgatgagccaggctgcgagtccctgcactgcgaccctagtccgcgcgcccacccctctccaggttccacactgtttacatgctcatgcggtaccgatttctgcaacgccaactatagccacctgccccccccaggcagcccaggcactcctggttcccaaggtcctcaggccgcgccaggtgaaagtatctggatggcactggtgctcctaggcctcttcctcttacttctgctgctcctggggagcatcattttggccctactgcaacgcaaaaactatcgggtgcggggtgaacctgtaccagagcctcggcccgattctgggcgggattggtcggtggagctccaggaactccctgagctctgtttttcacaggtaattcgcgaaggcggacacgccgtggtctgggcagggcagctgcaaggaaagctggtagctatcaaggcctttccgccaaggagtgtggcccagtttcaggcagaacgggcactctatgaactgcctggtcttcaacatgaccatatagtgcggttcatcaccgcatctcgcggaggacctggaaggttattgtctgggcccctgttggtgttagagctgcaccccaagggatctctttgtcactatctgacccaatacacaagtgattggggtagcagcctgagaatggccctgtccctggcacagggccttgcctttttgcatgaggaacgctggcagaacgggcagtataagcctggtattgcacatagagacctgtcctcacagaatgtgctaattagggaggatggttcttgtgccattggcgatcttggtcttgctttggtgttgccaggactcactcaacctcccgcttggacacctacccagcctcaggggccagccgcaattatggaggccggcacccagcggtacatggctcccgaattattggacaagaccctggatctccaggattggggcatggctctgaggcgagcagacatctactccctggccctgctactgtgggagattctgagccgctgccccgatctccgaccggccgtacaccacccatccaattggcccatgcgacagaactgggccatcccactccctctgatgagctacgggccttggcagtgcaggcgcggaggggttccaactagtcaccctcctggggcagcgctcccacagacactgatgggctag

SEQ ID NO: 108430 - DNA, 1722 bp, synthetic construct
  misc_feature 1..1722: note = Description of Artificial Sequence: Synthetic coding sequence
  source 1..1722: mol_type = other DNA
atgctcggctccctgggcttatgggctctgctccctacagccgtcgaagcccctcccaatcggcggacctgcgtgttcttcgaggcacccggcgttcgagggtctactaaaacactgggcgagctcctagatacagggaccgaactcccgagggccattcgatgcctgtactcacgatgctgttttgggatttggaatctcacccaagaccgcgcccaggtcgagatgcaggggtgcagggattctgacgagcctggatgtgagtccttacattgcgatccttctcctcgagctcatcccagccctggttccacgcttttcacgtgcagctgtggtaccgacttctgcaatgccaactacagccacctgccacccccagggagccccgggacgccaggcagccaaggaccacaggctgcccccggagagtccatttggatggctctggtgctgcttgggctgtttctcctgctcctgcttctactgggctcaattatcctagcactgttgcagcgaaagaactacagggtccgaggcgagcccgtgcctgaacctcggcctgactccggaagagattggtccgttgagctccaagagttaccagaactttgtttctcccaggtgatccgcgagggagggcacgcagtcgtgtgggccggtcagctgcagggcaagttagtagcaatcaaagcattcccccctcggagcgttgcccagttccaggctgagcgggcgctttatgagctgccaggcctccagcatgaccacatcgtcagatttatcaccgccagcagaggcggcccaggacgcctgcttagcggaccgctcctggtactggaactccaccccaaaggatccttatgccattatctcactcagtatacgtccgactggggctctagcctccgcatggccctgtctctggctcaggggctcgcatttctgcacgaggagagatggcaaaatgggcagtacaaaccagggatcgcccacagagacttgagcagtcagaacgtgctaattcgggaagacggcagttgcgccatcggggacctgggcttggcactggtgctacctgggctgacccagcctccagcctggactccgactcagccacagggtcccgccgctatcatggaggcgggaactcagagatatatggcaccagaattgctggataaaacactggatctgcaggactggggtatggcactgcgccgtgcagatatatacagtcttgcactgctactttgggagatcctgagtcgttgcccagatctcagacccgactcttcgccccctccgttccagctggcctacgaggcggaacttggcaatactcctactagcgatgaactgtgggccttagccgtgcaggaacgaagacgcccgtatatcccttctacctggagatgctttgccacagacccagacggcctgcgcgagctgctcgaggactgctgggatgctgatcccgaagccaggctgacagccgagtgcgtccagcagagattagctgcactcgcacaccctcaggaatcccaccccttccctgagtcctgtcccagggggtgcccacccctctgcccagaagactgtacttctatcccggctccgactattttaccatgtaggcctcagaggtctgcttgccatttcagcgtccagcaggggccatgttcaaggaatccccagccggcctgcactctgtctcccgtatag

SEQ ID NO: 108431 - DNA, 1347 bp, synthetic construct
  misc_feature 1..1347: note = Description of Artificial Sequence: Synthetic coding sequence
  source 1..1347: mol_type = other DNA
atgaaggggttcattgacgatgccaactattcagtcggacttctagatgaggggaccaacctagggaatgtaattgataattatgtgtatgagcatacactaacgggtaagaatgcctttttcgtaggagacctcggcaaaattgtcaagaagcactcccagtggcagaacgtggttgcccagatcaaaccattctatacagtgaaatgtaactccgccccagccgtcttggagatcctggccgctctgggaaccgggtttgcatgttcatcaaagaacgagatggctctcgtgcaggagctgggagtgccgcctgaaaatatcatctacatctcaccttgtaagcaagtgtcccaaatcaagtatgccgccaaagtcggagtgaacattctcacttgtgataacgaaatcgagttaaaaaagatagctaggaatcatcctaatgctaaagtccttctgcacatagccaccgaagacaacattggcggtgaagaagggaatatgaaattcggtactacattgaagaattgccggcacctgctagaatgcgctaaggagttagatgtccagatcatcggggtgaaatttcatgtatccagcgcctgcaaagaatctcaggtatatgtgcatgccttgtccgatgctagatgtgtgtttgacatggcaggcgaaataggctttactatgaacatgctcgacatcggaggaggcttcaccgggacagagtttcagctagaagaggtaaaccacgttatttcccctcttcttgatatatacttccctgaaggaagcggtgtgaaaatcatcagtgaacccggatcctattacgtttcttcggcattcacactggcggtgaacatcatcgccaagaaagtagtggagaatgataagtttccgtctggcgtagagaaaacgggtagtgacgaacccgcatttatgtactacatgaacgatggagtgtacgggtcctttgcctctaagctgtctgaagatctaaatactatccccgaggtccataaaaaatataaagaggatgagccgctcttcacaagcagtctgtggggacctagctgcgatgagctggaccagatcgttgagtcctgcttgcttccggagctaaacgtgggcgactggttaatattcgataatatgggagccgacagtttccacgagccctcagcctttaacgacttccaacggcccgcaatttattatatgatgtccttttccgactggtacgagatgcaggacgccggtattaccagtgactcaatgatgaagaatttcttttttgttccttcttgcattcaattatctcaggaagattccttcagcgccgaagcctag

SEQ ID NO: 108432 - DNA, 1347 bp, synthetic construct
  misc_feature 1..1347: note = Description of Artificial Sequence: Synthetic coding sequence
  source 1..1347: mol_type = other DNA
atgaagggatttattgacgacgccaattactctgtgggcttattagatgagggcacgaacttggggaacgtgatcgataactatgtgtatgagcacaccctaacgggcaaaaacgcctttttcgtgggggacctgggtaaaattgtcaagaagcattcgcagtggcagaatgtcgttgcccagatcaagcccttctacaccgtgaaatgtaactcggctccagccgttctcgaaatcctcgccgccttgggcactggctttgcctgctcctcaaagaatgagatggctctggtccaggagttgggtgttccaccagagaacattatttacatctctccttgcaaacaggttagccagatcaagtacgccgccaaggtgggagttaatatcttaacctgcgataacgaaatcgagttgaagaaaatagcccggaatcatcctaacgccaaggtactactgcacattgccacagaagacaatataggtggggaggaaggaaacatgaagtttggaacaactttaaagaactgtaggcacctgcttgagtgcgccaaagagcttgacgttcagatcatcggagtaaagttccatgtctcctcggcctgcaaggagagtcaggtgtatgtgcacgctcttagcgacgcccggtgtgtgttcgatatggctggagaaatcgggtttaccatgaacatgctcgatattggggggggatttacaggcactgagttccagttggaagaggtgaatcacgtgataagccctttgcttgatatctacttccctgaagggagcggcgttaagatcatcagcgaacccgggagttattacgtgtcctctgctttcacactcgctgtgaacatcatcgccaagaaagttgtggaaaacgataaattcccctctggcgtggaaaaaacaggaagcgacgaaccggcgtttatgtattatatgaacgacggcgtttatgggtcctttgcctccaaactgtccgaggatttaaacacaatcccagaagttcacaaaaagtacaaagaagacgaacccctgttcacttcaagcctttgggggcctagctgtgacgaactcgatcagatcgtggaatcctgtctcctgcctgagcttaatgtgggcgattggttaatcttcgacaacatgggggctgattcctttcacgaaccttctgcatttaacgactttcaacgaccagccatttattacatgatgagttttagcgactggtatgaaatgcaggatgctggaatcacatccgattcaatgatgaagaacttttttttcgttcccagctgcatacaacttagccaggaggattcattcagtgctgaggcatag

SEQ ID NO: 108433 - DNA, 102 bp, synthetic construct
  misc_feature 1..102: note = Description of Artificial Sequence: Synthetic coding sequence
  source 1..102: mol_type = other DNA
atgaagggctttatcgatgacgctaattatagcgtcggccttctcgacgaagggaccaacctgggaaatgtaattgacaactatgtgtatgaacatacatag

SEQ ID NO: 108434 - DNA, 294 bp, synthetic construct
  misc_feature 1..294: note = Description of Artificial Sequence: Synthetic coding sequence
  source 1..294: mol_type = other DNA
atgaaaggctttattgacgatgctaactactctgtggggctcctggatgagggtactaatctgggcaacgttatcgacaactatgtttatgagcacacattaaccggcaagaatgcattcttcgtcggggacttgggcaaaattgtgaagaagcatagccaatggcagaacgtggtcgcgcagatcaaacccttttacacagtgaaatgcaacagtgctcctgctgtcctggagatactggccgcactggggacgggatttgcctgttcatcaaagaacgaaatggccttatag

SEQ ID NO: 108435 - DNA, 780 bp, synthetic construct
  misc_feature 1..780: note = Description of Artificial Sequence: Synthetic coding sequence
  source 1..780: mol_type = other DNA
atgcgacgggctgtcgcctatatggccattaagatagaagtgcagggccatcagtcctttgcaatcccttctggcacgttctggctctggaggtcacttctcagtcaggacaaggaacatcccagatacttgattcctgagctgtgtaagcagttctatcatctagggtgggtgacagggactggaggcggaattagtctgaagcacggagatgagatctacatcgcaccatccggagtgcaaaaagaacggatccagcccgaagacatgtttgtgtgtgatatcaacgaaaaagatattagcgggccatcaccctccaaaaagctaaaaaaatcacagtgtactcctctgttcatgaacgcctacaccatgaggggggccggagccgtgatccacacgcacagcaaagcagcagtcatggctaccctcctgttccccggacgagagtttaaaattacgcatcaggagatgattaaggggataaaaaaatgtacaagcggaggctattacaggtatgacgatatgctcgtggtcccaataatcgagaacactcccgaggaaaaggatctgaaggatagaatggcgcacgccatgaacgagtacccggactcttgcgctgtcctggtcagaaggcatggtgtgtatgtctggggcgagacctgggaaaaagctaaaactatgtgtgaatgttatgattacctcttcgatatagccgtttcaatgaaaaaggtaggcctggacccctcccagctgcccgtgggagaaaatggcatcgtctag

SEQ ID NO: 108436 - DNA, 729 bp, synthetic construct
  misc_feature 1..729: note = Description of Artificial Sequence: Synthetic coding sequence
  source 1..729: mol_type = other DNA
atgtcaggttgtgatgctcgtgagggggactgctgctcaaggagatgcggggcccaggacaaagagcacccaagatatctcattcctgaattgtgtaaacagttttatcacctggggtgggtcactggtactgggggcggcatctcccttaaacacggtgacgagatctatatcgccccatctggggtacagaaggagagaattcagccggaggacatgtttgtgtgcgatatcaatgaaaaagatatcagcggcccttcacccagtaagaaattgaaaaaaagccagtgtacaccactgttcatgaacgcctataccatgaggggcgccggggcggtcatccatactcattcgaaggccgccgtgatggctaccttgttattcccggggcgcgagtttaagatcactcaccaggagatgatcaaagggattaaaaaatgcacctcaggtgggtattatcggtacgacgacatgctggtcgtaccaatcattgaaaacacgccggaagagaaagacctcaaggaccgaatggctcacgctatgaatgaatacccagatagctgtgctgtgctcgttaggcgtcacggtgtttacgtctggggcgagacttgggaaaaggccaagaccatgtgtgagtgctacgattacctttttgacattgcggtgtccatgaaaaaggtggggctcgacccatcacagctcccagtgggtgagaacggcattgtttag

SEQ ID NO: 108437 - DNA, 234 bp, synthetic construct
  misc_feature 1..234: note = Description of Artificial Sequence: Synthetic coding sequence
  source 1..234: mol_type = other DNA
atgaacctcaggctgtgcgtccaggctctcctgctgctctggctgagtctgacagccgtgtgcggcgggagtcttatgccgcttccggacggcaatggcctggaggacggaaacgtgaggcacttagtacagcctcgtggctcccgcaatggaccgggcccatggcagggcggcaggaggaaatttcgacgtcagagaccccggctatctcataaaggtccaatgccattttag

SEQ ID NO: 108438 - DNA, 369 bp, synthetic construct
  misc_feature 1..369: note = Description of Artificial Sequence: Synthetic coding sequence
  source 1..369: mol_type = other DNA
atgtccgcaacatggtgctcacccgaaggccaaggtatgggccagggaccagggagggaggtcggcggcaattcggctgcatccgggcctgctagtcctataagagatccgtgtctctctgaggcaggactcaaagggccccccagtgcccaccccaggcgactttgtctactacatcgcctggtgtgcttctcggggggcttgacttccattcagctgagccctagaacctgctgcagtcaccagtgggcacagttattcagtccagcttgtttcccacagtggagggcccctgggtgctcactagatgattccaggtctcttactcggatcagaccagtgcatctgcctgggccctcactcgactag

SEQ ID NO: 108439 - DNA, 369 bp, synthetic construct
  misc_feature 1..369: note = Description of Artificial Sequence: Synthetic coding sequence
  source 1..369: mol_type = other DNA
atgagtgctacctggtgctccccggaaggacaggggatgggacagggcccaggaagggaagtcggcggcaactcagctgcctccggacccgcatccccgatacgtgatccttgtctgtccgaggccggactgaaaggccccccctctgctcatccacgccgcctgtgtctgttgcacaggctggtgtgtttttccgggggcctgacatccatccagctttcccctagaacttgttgtagccatcagtgggctcagctgttttccccagcctgtttcccccagtggcgcgcaccagggtgctctctagacgactcccggtccctgacacgaatccgacctgtgcacctccctggaccgagtctggactag

SEQ ID NO: 108440 - DNA, 303 bp, synthetic construct
  misc_feature 1..303: note = Description of Artificial Sequence: Synthetic coding sequence
  source 1..303: mol_type = other DNA
atgaagttgctggcagccactgtcctgctgttgactatttgctccttagagggagcactcgtgcggagacaggccaaggagccatgcgtggagtcactggtctctcagtactttcagacagttaccgattatggcaaggacttgatggaaaaggttaaaagtcccgagctgcaagccgaggcaaagtcctactttgagaagagcaaggaacagctaacaccattgatcaagaaggctggcactgagttggtgaattttctcagctactttgttgagctggggacacagcctgcaactcagtag

SEQ ID NO: 108441 - DNA, 1191 bp, synthetic construct
  misc_feature 1..1191: note = Description of Artificial Sequence: Synthetic coding sequence
  source 1..1191: mol_type = other DNA
atgttcctgaaggccgtcgtgttgactctggcactggtagccgtcgcgggagcacgggctgaagtgtccgccgaccaggtggctaccgttatgtgggattacttttcccagttatctaacaatgctaaagaggccgtggagcacctgcaaaaaagcgagctgacccagcagttaaacgctctattccaggacaagctgggtgaagtcaacacatatgcaggtgaccttcagaagaagctagttcccttcgctactgaactgcacgaacgacttgcaaaggatagtgagaaacttaaagaggagatcggaaaggaactcgaggaactgagggcgaggcttcttccccacgccaacgaagtgagtcaaaagattggggacaatttgcgggaactccagcagagactcgaaccatacgccgaccagctccgcacacaggtgtctacacaggcggaacagctgcgacggcagctgactccctacgcccaacgaatggagcgagtcctgcgcgaaaacgccgattccctccaggccagtttgcgtcctcacgcagatgaacttaaggctaagattgaccaaaacgtcgaggagctgaagggtcgactgaccccctacgcagacgaatttaaagtcaaaattgaccagacggtcgaagagttgaggcgttccttggctccctatgcccaagacacccaggagaagctgaaccaccagcttgagggcctgacattccaaatgaaaaagaatgcagaggagctgaaggctcgcatttcagcatccgcagaggagcttagacagaggcttgcaccgctggccgaagacgtccgagggaacctgagaggcaacacggaggggctacaaaaaagcctggcagaactgggcggacacctagaccagcaggtagaggaattcaggaggagggttgagccctatggcgagaattttaacaaagctctggtgcagcagatggagcaactccgacagaagctgggccctcatgccggcgatgtggaaggacatctgtcctttctggagaaagatcttcgtgataaggtcaattcttttttcagcacattcaaagaaaaggagagtcaggataagactctgtccctgccagagttagaacagcagcaggaacagcaacaggaacagcagcaggagcaggttcagatgctcgcaccattggagagttag

SEQ ID NO: 108442 - DNA, 1281 bp, synthetic construct
  misc_feature 1..1281: note = Description of Artificial Sequence: Synthetic coding sequence
  source 1..1281: mol_type = other DNA
atggcaattgcacagctggctactgaatatgtgttttcagatttccttttgaaagagcccaccgagcctaagttcaagggcctgcgcctcgagctggccgtggataagatggttacatgtatcgcagtcggcctgccgctgctgctgatttctttagctttcgcccaagaaatatctattggcactcagatctcttgcttttccccatcaagcttctcctggaggcaggccgccttcgtggatagttactgctgggccgccgtccagcagaaaaactccctgcagtcagagtccggaaaccttcccctgtggctgcacaagtttttcccatatattttgctcttattcgctatcctgctgtacctcccgcccctcttctggcgatttgccgccgccccccatatttgcagtgatttgaagtttatcatggaggaactggataaggtctataatcgggcaattaaagccgctaagagtgcccgggacctcgatatgcgcgacggagcgtgcagcgtccccggtgtcaccgaaaaccttggccaaagcctgtgggaggtgtcagaatcgcacttcaagtacccaatagtcgagcagtatctgaaaactaaaaaaaatagcaacaacctgatcatcaagtacatttcctgcaggcttctaacccttataattattttgttggcttgtatatacctgggatactatttcagcctcagttcattgtcagatgagttcgtgtgtagtataaagtctggaatcctgaggaacgattctacggtgccagatcagtttcaatgtaagcttatcgcagtgggcatcttccagctcctgtctgtgattaacctagtggtctacgtactgctagcaccagtcgtggtttatacactcttcgttccatttcggcagaaaaccgatgttttaaaggtgtacgagatccttcccacctttgacgtgctgcactttaaaagcgagggatataatgacctctccctttataatttgtttctggaagaaaatatcagcgaggttaagtcgtataagtgcctcaaggtcctggaaaatataaaatcttccggccaggggattgatcccatgctgctcctgacaaatctcggaatgataaaaatggacgtagttgacgggaagacgccaatgagtgccgaaatgcgggaagagcagggaaatcagaccgccgagctccaaggtatgaatattgactcagaaaccaaggctaataatggcgagaagaatgcccgtcagagattgctcgattcttcatgctag

SEQ ID NO: 108443 - DNA, 489 bp, synthetic construct
  misc_feature 1..489: note = Description of Artificial Sequence: Synthetic coding sequence
  source 1..489: mol_type = other DNA
atggcgagcatggcagcagtattgacctgggcgttggcacttctctccgccttttcagccacccaagcacggaagggattttgggattacttctcacaaacttctggagacaaaggccgtgtcgagcagatacaccagcagaaaatggccagagaaccggctactctcaaagattcattggagcaggacctgaacaacatgaacaagttcctggaaaagttgcggccacttagcggcagcgaggcccctcgactccctcaagatccagtcggtatgcggcgacaactgcaggaggaactggaggaagtgaaggccaggctgcagccttacatggctgaagcccatgaactcgtcggctggaatctggagggcctgcgacagcagcttaaaccatatacgatggatctgatggagcaggtggccctacgggtgcaagaacttcaggagcagctgagagtggttggtgaagacaccaaggcacagctttag

SEQ ID NO: 108444 - DNA, 1101 bp, synthetic construct
  misc_feature 1..1101: note = Description of Artificial Sequence: Synthetic coding sequence
  source 1..1101: mol_type = other DNA
atggctagcatggccgccgtcctgacttgggcgttggctctgctgtctgcattctctgctacacaagccagaaaaggcttctgggactacttctctcaaacctccggggacaaaggtcgtgtggaacagattcaccagcagaagatggctcgcgaaccggccaccctcaaggattccctggagcaggatctgaataacatgaacaaattcctggagaagcttagaccgttgtccggctctgaagctccgcgcctgccgcaggacccggtgggcatgaggaggcagctccaggaagagctggaggaagtgaaggccaggctgcagccatacatggccgaggctcatgagctcgtggggtggaacctcgagggattgcgtcagcagctgaaaccttacacgatggatctcatggaacaggtcgccttacgcgttcaggaactgcaggagcagcttagagttgtgggcgaagatacgaaagcccaactgctgggaggtgttgacgaggcatgggccttgttgcaagggctccagagcagagtggtccaccacactggtaggtttaaagaattattccatccgtacgccgaaagtttagtgagcgggattgggcggcacgtgcaggaattacaccgctccgtggccccacacgcgcccgcgagccctgccaggctgagtagatgcgtgcaagtgttatcaaggaaacttactcttaaagcgaaagcgctgcatgcacgtatccagcagaatctggaccagctaagagaagagctttcaagggccttcgccggcactggtacagaggaaggagctggcccagatcctcagatgttgagcgaggaagtccgccagagacttcaagcttttagacaggatacatatcttcagatcgcggctttcaccagagccatcgatcaggagacagaggaggtgcagcagcaactcgccccacccccgcccggacatagcgccttcgcccctgaattccagcagactgacagtggtaaggtgctgtccaagttacaagctagacttgacgatctctgggaggatatcacccattcactccatgaccagggacactctcaccttggcgacccatag

SEQ ID NO: 108445 - DNA, 1074 bp, synthetic construct
  misc_feature 1..1074: note = Description of Artificial Sequence: Synthetic coding sequence
  source 1..1074: mol_type = other DNA
atgaacccacaaattcgcaatcctatggaaaggatgtatcgggacacattttacgacaactttgaaaatgagcccattctctacggtcggtcttatacctggctatgttacgaagtgaagattaagcgaggaaggagtaacctgttgtgggatacgggcgtcttcagagggcaagtctactttaaacctcagtatcacgccgagatgtgttttttgtcatggttctgtggaaaccagctacctgcctacaaatgcttccagatcacctggtttgtcagttggacgccctgcccagattgcgtggctaagctggcagagttcctcagtgagcaccctaacgtaacactgacgataagtgccgcccggctgtactattattgggaaagggactatcggcgggcgctgtgtcgtttgtcacaggccggggccagagtgacaataatggattatgaggaattcgcgtattgctgggagaacttcgtttataatgagggtcagcaattcatgccttggtataagtttgacgagaattatgcattcctgcatcggacacttaaggagattctccggtacctgatggatcccgatacatttacattcaatttcaataatgatccactagttttgcggaggagacagacctacctctgctacgaggtcgagcgacttgacaacggcacatgggttttaatggaccagcatatgggattcctgtgcaacgagctggaccctgctcagatttacagggtcacatggtttataagctggtccccctgtttttcctggggttgtgcaggcgaagttcgcgcatttctccaggagaatactcatgtgaggctgcgcatctttgcggctcggatctacgactatgatccgctttacaaagaggctcttcaaatgttaagagatgccggagctcaggttagcattatgacctatgacgaatttgagtactgttgggatacgtttgtgtaccggcaggggtgtccttttcaaccctgggatgggctggaggaacatagtcaagcgttgtctggtagattgagggcaatcctccagaatcaaggaaactag

SEQ ID NO: 108446 - DNA, 306 bp, synthetic construct
  misc_feature 1..306: note = Description of Artificial Sequence: Synthetic coding sequence
  source 1..306: mol_type = other DNA
atgaaaccacacttcaggaataccgtggagcggatgtacagggacacatttagttataatttctacaatcggccaattctgagccgccgcaacacggtgtggttatgctacgaagtcaagactaaggggccctctcgacctcgcctagacgctaaaatcttcaggggacaggttccaagatcctttatccgcgcccctttccaggtcttatccagtcccttcggtcagtgtgcccctccccatgggacagcccaagttcagtggcctccgcagctgacggcaggacgggaacaggggagaccttag

SEQ ID NO: 108447 - DNA, 381 bp, synthetic construct
  misc_feature 1..381: note = Description of Artificial Sequence: Synthetic coding sequence
  source 1..381: mol_type = other DNA
atggcatcagccagtacgcagcccgccgccttgtctgcagaacaagcaaaggttgtgctcgccgaagtgattcaggcatttagcgcccctgaaaatgcagtccggatggacgaggcgcgggacaatgcttgcaacgatatggggaagatgctgcagtttgtattaccagtggcaactcagatccagcaggaggtgatcaaagcttacggtttctcttgcgacggagaaggggttctcaagtttgccagactggtgaaaagttatgaagctcaagatccggagatcgccagcctgtctggcaagttaaaggctttatttctccccccaatgacactgcctccgcatggccctgccgcaggaggctctgtggccgcctcctag

SEQ ID NO: 108448 - DNA, 675 bp, synthetic construct
  misc_feature 1..675: note = Description of Artificial Sequence: Synthetic coding sequence
  source 1..675: mol_type = other DNA
atggcacagaaggaagaagctgccgtggctacagaggccgccagtcaaaatggcgaagacttggagaacctggatgatcctgagaaattaaaagagttaatcgaactcccaccgtttgagatcgtcacaggagaaagactacccgctaacttttttaaatttcaattccgaaatgtggaatactcctccggacggaacaaaaccttcctttgctatgtcgtggaggcccaaggaaagggcggtcaggtccaggcttccagagggtacctggaggatgagcacgcagctgcccatgccgaggaagctttcttcaatactatcctgccagcctttgaccctgcgctgaggtataacgtgacctggtacgtctccagcagcccttgtgcagcgtgtgctgacaggatcatcaagacattgtccaaaacaaagaacctccggctgttgattctggtcggcaggctgtttatgtgggaggagccagaaatacaagcggcattaaagaagctaaaggaagccggatgtaaattacggatcatgaagccacaagattttgagtacgtttggcaaaattttgttgagcaggaagaaggtgagtcaaaggcgttccaaccgtgggaggatatccaagagaacttcctgtactatgaggagaaacttgcagacattctgaaatag

SEQ ID NO: 108449 - DNA, 393 bp, synthetic construct
  misc_feature 1..393: note = Description of Artificial Sequence: Synthetic coding sequence
  source 1..393: mol_type = other DNA
atggcccagaaagaggaagccgctgtcgctacggaggcagcctcacagaatggggaagacctcgaaaatctggacgatccggagaaactgaaggagctgatagaacttccgccatttgagatcgtaactggtgaacgccttcctgctaattttttcaaatttcagttcagaaatgtggaatacagttctggtcggaagctgtccagtactccatcctgtcagcctagcactcagccctgcggaacaatgagccctggcatgtgcccccctgcccctgttcagcgggtgctgactgctctttcaaaacctctcgctaggccaagaacttgcgtctgttcattttggtgggtggactccagctgcggccggtcccgcaggtctcgcctgctttag

SEQ ID NO: 108450 - DNA, 600 bp, synthetic construct
  misc_feature 1..600: note = Description of Artificial Sequence: Synthetic coding sequence
  source 1..600: mol_type = other DNA
atggaagctagcccagcctcagggccacgacatcttatggatccccatatattcacttctaattttaataacggtattggcaggcacaagacctacctctgctatgaggtcgaaagactcgacaacggcactagtgtgaaaatggaccagcataggggattcctccacaatcaggcaaagaacctgctgtgtggattttacgggcgacatgcagaactgagatttcttgatctggtcccatctctgcagttggatcctgcccaaatataccgcgtcacgtggtttatcagttggtccccgtgcttttcttggggctgcgctggtgaggtgagggcttttttacaggagaacactcatgtgaggctgagaatttttgccgcacggatttacgattacgatccactgtacaaggaagcactacagatgctgagagatgcgggggcacaagtgagcatcatgacctacgacgaatttaaacactgctgggataccttcgtcgatcatcaaggttgcccgtttcaaccatgggacggcttggatgagcacagccaggccctgagcggtaggcttagagcaattcttcagaaccaggggaattag

SEQ ID NO: 108451 - DNA, 600 bp, synthetic construct
  misc_feature 1..600: note = Description of Artificial Sequence: Synthetic coding sequence
  source 1..600: mol_type = other DNA
atggaggcaagtcccgctagcggtccaaggcacctcatggacccccatattttcacaagcaatttcaataatgggatcgggcggcataaaacgtacttatgctacgaggtcgaaagacttgacaacggtacatctgtaaagatggaccaacacagaggcttcctgcacaaccaggctaaaaacctgctgtgtgggttctatggacgccatgccgagctacgattccttgatctggtgccttccctgcaactggaccccgcccagatctaccgcgtcacctggtttatttcctggtccccctgcttctcttggggttgtgcaggcgaggtccgcgcattcctccaggagaatacccatgtgcggcttaggatatttgccgcacgcatttatgactatgatccattgtataaggaagccctgcaaatgctccgggacgcaggtgcacaggtcagcatcatgacttacgacgaattcaaacactgctgggatacattcgtggaccaccaagggtgtccttttcagccatgggatggtctggatgagcatagtcaggcactgtctggcagattgcgggctattctacaaaaccaagggaactag

SEQ ID NO: 108452 - DNA, 1149 bp, synthetic construct
  misc_feature 1..1149: note = Description of Artificial Sequence: Synthetic coding sequence
  source 1..1149: mol_type = other DNA
atgaatccgcagatcagaaatcctatggagaggatgtatcgggacacattttatgataattttgaaaatgagcctatactttacggaaggtcttatacttggctgtgttatgaagtcaaaattaagcgaggacgctcaaaccttttgtgggatacaggggtattccggggccaggtgtatttcaaacctcagtaccatgcagagatgtgctttctgagctggttttgcgggaatcagctccctgcttacaagtgctttcaaatcacctggtttgtttcttggaccccttgtcccgactgcgtggccaagttagcagaattcttgtctgaacacccgaacgtcactcttactatttcagctgcccggctctattactactgggagagagactacagaagagcgctttgccggttgagtcaggccggagctagagttacaataatggactacgaagaattcgcttattgctgggaaaatttcgtgtacaatgaaggtcagcagtttatgccctggtacaagtttgatgagaattatgcttttttgcacaggactttgaaggaaatactccggtatcttatggaccctgacaccttcacgttcaattttaacaatgatccccttgtgctcagacgacgacagacttacctctgctatgaggtcgagcgactggataacgggacgtgggtgttgatggatcagcatatgggattcctttgtaacgaggccaagaacttgctctgtggattctatgggcgccacgctgagctgcggttcttagaccttgtcccgtcactccagcttgacccagcccagatttacagagtgacatggtttatctcctggagcccctgttttagttggggatgcgcaggtgaagtacgagcatttctgcaggaaaatacacatgtgcgcctccggatctttgcagcacggatttatgactacgaccccttatataaggaggccctccagatgctccgggacgccggggcccaggtgagtatcatgacctacgatgaatttgaatactgttgggacacatttgtataccggcaggggtgcccatttcaaccatgggacggactggaggagcattcccaagccctcagtggcaggcttagagcaattctgcagaaccagggtaactag

SEQ ID NO: 108453 - DNA, 573 bp, synthetic construct
  misc_feature 1..573: note = Description of Artificial Sequence: Synthetic coding sequence
  source 1..573: mol_type = other DNA
atgaacccacagatcaggaatccgatgaaagccatgtatcctggtactttttacttccaatttaaaaacttgtgggaggctaacgaccgaaatgaaacgtggttgtgtttcacagttgaggggatcaagcgcagatctgtggtgtcctggaagacgggcgtgttccgcaaccaggtggacagtgaaacccactgccacgcggagcggtgtttcctctcctggttttgcgacgatatcctgagtcccaacacaaagtaccaagtgacttggtacactagctggagcccatgcccagattgtgcaggggaggttgctgagttcctcgcaaggcactctaacgttaacctgacaatcttcactgccagactgtactacttccagtatccatgctaccaggagggccttaggagtttgtctcaggaaggagtggccgtggagataatggactacgaggatttcaaatattgctgggagaattttgtgtataacgacaacgagccttttaagccttggaaaggtctgaagactaactttagattactgaagcggaggcttcgggaaagcctgcagtag

SEQ ID NO: 108454 - DNA, 1122 bp, synthetic construct
  misc_feature 1..1122: note = Description of Artificial Sequence: Synthetic coding sequence
  source 1..1122: mol_type = other DNA
atgaagccccatttccgcaatacagtggagcgtatgtaccgggatacgttcagttataatttctataataggcctattctctcaagaagaaacaccgtgtggctctgctacgaagtgaagactaaggggcccagtagacctaggctggacgccaagatctttcgtggccaggtctactcccagccggagcatcacgcggaaatgtgtttcctcagctggttttgcggcaatcagttgcctgcatacaaatgctttcagatcacctggtttgtttcttggaccccgtgtcctgattgtgttgcaaagctcgccgaattcctagccgaacaccccaatgtcaccctcaccattagcgccgcccgactgtactactactgggagcgggactacagacgagcgctgtgtcgactgtcacaagctggggcaagagtaaagattatggacgatgaagagtttgcgtattgctgggagaacttcgtgtactcagaaggccaaccatttatgccctggtacaagtttgatgacaattacgcgtttctacaccgcaccctgaaagagatcctccgcaaccccatggaagcaatgtacccgcacattttctattttcacttcaagaatcttagaaaggcgtacggaaggaacgagagttggctgtgtttcaccatggaagtagtaaaacaccactccccggtctcatggaagaggggtgttttcaggaaccaggtggatccagaaacacattgtcatgctgagcgttgctttctcagttggttctgtgatgatattctctcaccgaacacaaactacgaggtaacgtggtacacctcctggtctccctgccccgaatgcgccggcgaggtggcagaattcctggcacgccacagcaatgtgaacctaactatctttaccgcccgcctttactacttttgggacacagattatcaggagggcctccggtccctgagtcaggagggcgcgagcgtggagatcatggggtataaagacttcaaatattgttgggagaacttcgtatacaatgacgacgagcctttcaagccatggaaggggctaaagtataattttttgttcctggacagcaaattacaggagatcttagagtag

SEQ ID NO: 108455 - DNA, 1155 bp, synthetic construct
  misc_feature 1..1155: note = Description of Artificial Sequence: Synthetic coding sequence
  source 1..1155: mol_type = other DNA
atgaaaccgcatttccgaaatacggtagagcgaatgtaccgggacacgttttcttacaacttttacaatcgccccatcctttccagacgtaacaccgtgtggctgtgttatgaggtcaaaactaagggcccatctagaccgccgcttgacgcaaaaatatttcgggggcaggtgtacagtgagctgaagtaccaccccgaaatgcgattttttcactggttcagcaaatggcgcaagcttcatagagaccaagagtacgaagtcacctggtatattagttggtccccttgtactaagtgcacgcgtgatatggctacttttttggctgaggatccgaaagtcactctcaccatatttgtagcgagactgtactatttctgggatccggattatcaagaagctttacgttctctttgtcaaaagcgcgacggtcctagagccaccatgaaaatcatgaattacgacgaattccaacattgttggagcaaatttgtctactcccagagagagttattcgaaccttggaataacctcccgaaatattacatcttgcttcatattatgctgggggagatcttgagacactccatggacccaccaacatttaccttcaatttcaacaatgagccctgggtccgcggaaggcacgagacctacctatgctatgaggtggagagaatgcacaacgacacttgggttcttctgaaccagcgaaggggcttcttatgtaatcaagcccctcataaacatggctttctggaaggacggcacgctgagctctgctttttggacgtgatcccattctggaagttggatcttgatcaggattaccgggtgacctgttttacatcttggagtccttgcttcagctgtgcgcaagaaatggccaaatttattagtaagaacaagcatgtgagtctgtgtatctttacagcccgcatctatgatgaccagggtcgttgccaggaggggctgcggactctggccgaggctggcgccaagatcagcatcatgacatatagtgagttcaaacactgctgggacacattcgtggatcatcagggatgcccttttcagccgtgggatggcctagacgagcatagccaagacctctctggtaggttgcgtgcaatcctgcagaatcaagagaattag

SEQ ID NO: 108456 - DNA, 1155 bp, synthetic construct
  misc_feature 1..1155: note = Description of Artificial Sequence: Synthetic coding sequence
  source 1..1155: mol_type = other DNA
atgaagcctcattttcgcaataccgtagagcggatgtatagagacacatttagttataatttctacaatagaccaattctgagtaggaggaacactgtgtggctgtgttatgaggttaaaacgaaggggccgagccgccctcccctagatgccaaaatttttagggggcaagtgtactcagaactcaagtaccaccccgagatgcgattcttccactggttctcaaagtggaggaagctacatcgagaccaagagtacgaggtcacgtggtacatttcctggtccccctgtactaagtgtaccagggacatggccacattcctcgctgaggacccaaaggtaacactaaccatctttgtggctcgcttgtactacttctgggaccctgactaccaagaagccctccgctctctgtgccagaaaagggacggaccaagggcaacgatgaagataatgaactacgatgaatttcaacactgttggagtaaatttgtctacagtcagcgggaacttttcgaaccatggaataatttacccaagtattacatccttctccatataatgctcggagagatcctcagacactccatggatccacccacctttaccttcaactttaacaacgagccttgggtccgaggtcgtcacgaaacatacttgtgttacgaagtcgagcgaatgcataacgatacatgggtactgctgaaccagcgacggggtttcctctgcaaccaggcgcctcataaacacggattcctggaagggcgccatgcggagttgtgtttcctggatgtcatccccttctggaagctggacttggaccaggactatagagtcacttgttttacgagctggagcccatgtttctcttgcgcccaggagatggccaaatttataagcaagaacaaacatgtctcactctgtatcttcacagctaggatctacgatgaccagggaagatgtcaggaggggcttcgcaccttagccgaagccggtgccaagatcagcatcatgacttatagtgagtttaaacattgttgggacacctttgtcgatcatcagggctgccccttccaaccttgggatggccttgacgagcactcacaggacctaagtggcaggctaagagctatactgcaaaatcaagagaactag

SEQ ID NO: 108457 - DNA, 549 bp, synthetic construct
  misc_feature 1..549: note = Description of Artificial Sequence: Synthetic coding sequence
  source 1..549: mol_type = other DNA
atggcattgctaacagctgaaacatttaggttgcagtttaacaataagcgcaggctccgtcggccttactacccaaggaaggccctgctgtgttatcaactgactccacagaacggctctaccccaactaggggatactttgagaacaagaagaaatgtcacgccgaaatctgctttattaatgagatcaaatctatgggcctggatgagacccagtgctaccaagtgacgtgttacttgacctggtcgccgtgctcttcctgtgcctgggaactcgtggactttatcaaagcacacgaccatttgaacctgggcattttcgcgtctcgtctgtattatcattggtgcaagccacagcagaaaggcctaaggcttctatgtggaagccaggtgccagttgaggtcatgggatttccaaagtttgccgactgttgggaaaattttgtggaccacgagaaaccgctttcattcaatccgtataaaatgttagaggagctggataaaaattcccgggccatcaaacggcgtctcgaaagaatcaagtcctag

SEQ ID NO: 108458 - DNA, 603 bp, synthetic construct
  misc_feature 1..603: note = Description of Artificial Sequence: Synthetic coding sequence
  source 1..603: mol_type = other DNA
atggcgctcctgacagccgagaccttcaggttgcagttcaacaataaacggagacttcgacggccatactacccaaggaaagctttactgtgctaccagttaactcctcagaatggatctacacctactagggggtactttgagaataaaaagaagtgtcacgctgagatttgcttcattaacgagatcaaatctatgggcctcgacgagacccaatgctatcaagtgacatgttacttgacgtggtcaccttgttcttcctgcgcatgggaactggtggattttatcaaggctcacgaccacctgaatctggggatcttcgctagccgcctatattatcactggtgtaagccacagcagaaggggcttaggctcctgtgcggatcccaggtccctgtcgaagttatgggatttcccaagttcgccgactgctgggagaactttgtggaccatgagaaaccattgtccttcaacccttataaaatgctggaggagctggacaagaatagtagagcaataaaaagacgtcttgaaaggatcaagatcccaggcgtgagggctcaaggccgatacatggatatcctgtgcgatgcggaagtctag

SEQ ID NO: 108459 - DNA, 465 bp, synthetic construct
  misc_feature 1..465: note = Description of Artificial Sequence: Synthetic coding sequence
  source 1..465: mol_type = other DNA
atggcactgttgaccgcagaaacctttagactacagttcaataataaacgtcgactaagaaggccctattatccaagaaaagccctgctttgttatcagttaactccgcaaaatggatcaacccctacccggggttattttgagaacaagaagaagtgccatgctgaaatttgttttattaacgaaattaagtcaatgggccttgatgagacccagtgttaccaggtcacatgctatctgacatggtcaccctgttcctcctgcgcctgggagttggttgatttcatcaaggcccacgaccatctgaacttggggatcttcgcctccaggctgtactaccattggtgcaagccccagcagaaaggtctgcgcctgctgtgcgggtctcaggttccggttgaggtgatggggtttcctaattctagaggcacctgcgccggaagtctgcacggttatatcgtatag

SEQ ID NO: 108460 - DNA, 552 bp, synthetic construct
  misc_feature 1..552: note = Description of Artificial Sequence: Synthetic coding sequence
  source 1..552: mol_type = other DNA
atggcattattgaccgctgagacattccgcctgcagttcaacaataaacgcagactcaggagaccatactacccaagaaaggctctgctgtgttatcagctgactcctcagaatggaagtactccaaccagagggtatttcgaaaataagaagaaatgccacgctgaaatctgcttcataaatgaaatcaaatcaatgggcttggatgagacccaatgttaccaagtcacctgctatttgacgtggagcccgtgtagcagctgcgcctgggaactcgtggactttattaaagcacatgatcatttgaacctgggtattttcgcttccagactgtactaccattggtgcaagccccagcagaaggggctgcggctgttgtgtggaagtcaggtacccgtggaggtcatgggctttccgaaattcgccgactgttgggagaacttcgtagaccatgagaagcctctgtcatttaacccctacaagatgctggaagagctcgacaaaaacagccgggccatcaagcgccggctggaaagaataaaacagtcctag

SEQ ID NO: 108461 - DNA, 1104 bp, synthetic construct
  misc_feature 1..1104: note = Description of Artificial Sequence: Synthetic coding sequence
  source 1..1104: mol_type = other DNA
atggaaccaatctatgaagagtacctggctaaccacggcacaattgtgaagccctattactggttatctttctcccttgactgcagcaattgcccgtaccacataagaacgggggaggaggccagggtctctctcaccgagttctgccaaatctttgggttcccctacgggacaacattcccccagaccaagcacctcacgttttacgagctgaaaacaagtagtgggtctctggtgcaaaaggggcatgcatccagttgtacaggaaactatatccatccagaatccatgctgtttgaaatgaatggctacctcgattctgctatttataacaatgacagtatcagacatatcatactgtattcaaataattcaccatgtaacgaggcaaatcattgctgtatctcaaagatgtacaattttttgatcacataccctggcataacactgtccatctacttttcccagttataccataccgagatggacttcccggccagcgcctggaatcgcgaagctctgcggtccttggcatctctatggccccgagttgtgctctcccccatttcagggggcatttggcatagcgtgctccactccttcatctccggcgtgtccggctcacacgtctttcagccaattctgaccggaagggccttagcagaccgacacaatgcatatgaaatcaatgctatcacgggcgtgaaaccttacttcaccgatgtgctcctgcaaaccaagaggaaccccaatacgaaagcgcaggaagcattggagtcctaccccctcaataatgcttttccaggacagttcttccagatgcccagtggccaactgcagcccaatctgccacctgatctccgagcccccgtagtctttgtgctggtgccccttagggacctccccccaatgcacatgggacaaaacccgaataaacccaggaatattgtcaggcatctgaatatgcctcagatgtcttttcaggaaaccaaggacttaggacggcttcctaccggccgcagcgtggagatcgtcgagattaccgaacagtttgcctcctctaaggaagccgatgagaagaaaaagaagaaaggtaagaaatag

SEQ ID NO: 108462 - DNA, 252 bp, synthetic construct
  misc_feature 1..252: note = Description of Artificial Sequence: Synthetic coding sequence
  source 1..252: mol_type = other DNA
atgcggttgttccttagtttaccagtgcttgttgttgtgctgtctatcgtgctggaaggcccagcccccgcccaagggacaccagatgtgtcatctgctctggataagttaaaggagtttggcaataccttggaggataaagccagagaactcatcagcagaatcaaacagtctgagctcagtgctaagatgagagaatggttctcggaaacgtttcaaaaagtgaaggagaaactgaagatcgacagctag

SEQ ID NO: 108463 - DNA, 306 bp, synthetic construct
  misc_feature 1..306: note = Description of Artificial Sequence: Synthetic coding sequence
  source 1..306: mol_type = other DNA
atgggtacacgcctattacctgccctatttctagtattactcgtcctcggctttgaggtgcaaggaacacagcagcctcagcaggacgaaatgcctagcccaactttcctcacacaggtgaaggaatcactgtcttcttattgggaaagtgcaaaaacagccgcccaaaacttgtacgaaaagacatatcttccagccgtggatgagaagcttcgggatttgtactcaaagtcgacagcagccatgtcaacttacacaggcattttcaccgaccaggtgctttccgtgctgaaaggggaggaatag

SEQ ID NO: 108464 - DNA, 384 bp, synthetic construct
  misc_feature 1..384: note = Description of Artificial Sequence: Synthetic coding sequence
  source 1..384: mol_type = other DNA
atgagtctccttcgtaaccgcctccaggccctgccagcactgtgtctttgtgtgctggttttagcgtgcataggcgcctgtcagcctgaggcccaagaaggtactctcagccctccgccaaagctcaagatgagccgctggtcactggtgcggggtcgcatgaaagaacttctggagaccgtggtgaacagaactcgcgacggctggcaatggttctggtcgccatccactttccgcggcttcatgcagacttactacgatgaccatctgagagaccttggccctttgaccaaggcatggttcttagaatctaaggactcgctgttgaaaaaaacacattcgctgtgcccaagacttgtgtgcggggacaaagatcaggggtag

SEQ ID NO: 108465 - DNA, 1101 bp, synthetic construct
  misc_feature 1..1101: note = Description of Artificial Sequence: Synthetic coding sequence
  source 1..1101: mol_type = other DNA
atggcctctatggccgcggtcctgacatgggccctcgcattgttgtctgcattctccgccactcaggcgcgcaaagggttttgggactattttagccagacctcaggcgacaaaggtcgagtggagcaaatccatcagcaaaagatggctcgcgagccggccaccctgaaagacagccttgaacaggacctcaataacatgaacaaattccttgagaaactgcggcctctgtcaggaagcgaagcaccaagattgccacaagacccagtgggtatgcgtaggcagctgcaggaggagctggaggaagtgaaggcaaggctgcaaccgtatatggccgaagcgcacgaactggtgggctggaatctggagggattaagacagcaactgaagccatacacaatggacctgatggagcaggtcgccctgcgtgtgcaggagttgcaagagcagctacgggtggttggggaggatactaaagcacaacttctcgggggtgtcgacgaagcatgggcactgcttcagggtttgcagagccgcgtggtccaccatacagggcgcttcaaagagctattccatccttacgcggagtcgctagtgagcggtataggccggcacgtccaagagctgcaccggagcgttgcccctcatgctcctgcaagtcccgcgagattgagcaggtgcgtacaggtcttgtctaggaagttgacactgaaggctaaagcgctgcacgcaaggattcagcagaatcttgaccagctgcgtgaagagctgtccagagcttttgctggcaccggaactgaagagggggccggcccagatccccagatgctatctgaagaggtcagacaacggctccaagcatttaggcaggacacttatctgcagatcgccgcattcacacgtgctatcgatcaggaaactgaagaagtccaacagcagctggctccaccaccccccgggcacagcgctttcgccccggaattccagcagaccgacagcggtaaggtgctttctaagttgcaggcacgcctcgacgacttatgggaggatataacgcacagtctccacgatcaaggccacagtcatttaggagatccgtag

SEQ ID NO: 108466 - DNA, 354 bp, synthetic construct
  misc_feature 1..354: note = Description of Artificial Sequence: Synthetic coding sequence
  source 1..354: mol_type = other DNA
atgggtacatggggtgctccacaccggaccctgccctgcaggaatcggggcgcaatgcagccacgcgttttactagtggtcgccctgctagccttgttagcatcggcaagagcgtctgaggctgaagatgcttctctcctctccttcatgcaaggatacatgaaacatgctaccaagaccgccaaagatgctctttccagtgttcaggagagccaggtggctcagcaggccaggggctgggttacagatggttttagttctcttaaagattactggtcaaccgtgaaagacaagtttagcgagttctgggacctggatcctgaggtccggccgacttccgctgtcgccgcgtag

SEQ ID NO: 108467 - DNA, 168 bp, synthetic construct
  misc_feature 1..168: note = Description of Artificial Sequence: Synthetic coding sequence
  source 1..168: mol_type = other DNA
atgcagccgagagtcttattagtcgtggctctgctggccctgctggcaagtgccagggcctccgaggccgaagatgccagcctattgtcgttcatgcaaggatatatgaagcacgcaacgaagacggcaaaagatgctttgagcagtgttcaggaatctcaggtgtag

SEQ ID NO: 108468 - DNA, 384 bp, synthetic construct
  misc_feature 1..384: note = Description of Artificial Sequence: Synthetic coding sequence
  source 1..384: mol_type = other DNA
atgagcttactgaggaataggttgcaggccctccccgccctttgtttgtgtgttttggtgctagcctgtatcggcgcctgtcagcctgaggcccaggaaggcaccctgagtcctcccccaaaactgaaaatgagccgatggtccctcgttcgcggacgcatgaaggaactcctggagactgtggtgaataggacccgggatgggtggcagtggttttggagcccgagtaccttcagaggtttcatgcagacgtattatgatgatcacctgcgggacttaggacccctgaccaaagcgtggtttctggaatcaaaggatagtctcctgaagaaaactcactctttgtgcccccgacttgtatgtggggataaagatcagggatag

SEQ ID NO: 108469 - DNA, 384 bp, synthetic construct
  misc_feature 1..384: note = Description of Artificial Sequence: Synthetic coding sequence
  source 1..384: mol_type = other DNA
atgagtctactacgtaaccgcctgcaggccctccctgccctgtgcctgtgcgttctcgttcttgcatgcattggcgcatgtcagccagaagcccaggagggcacgctttccccaccaccaaaactgaagatgtcacgttggtcccttgtgcgcggtagaatgaaagagctgctcgaaacagtggtgaatcgcactagagacggctggcagtggttttggagtccctctacctttcggggattcatgcagacgtactatgatgatcacctccgcgacctgggccctctgaccaaagcttggtttcttgaatccaaggatagcctcctgaaaaagacacattcattatgcccaagactggtgtgtggtgacaaagatcaggggtag

SEQ ID NO: 108470 - DNA, 570 bp, synthetic construct
  misc_feature 1..570: note = Description of Artificial Sequence: Synthetic coding sequence
  source 1..570: mol_type = other DNA
atggtgatgctactgctgctgcttagcgccctcgcagggctgtttggggctgcagaaggccaggcctttcacttagggaagtgcccgaatcctccggtacaggaaaactttgatgtaaataagtatctggggaggtggtacgagatcgaaaaaattccaaccacctttgaaaatggaaggtgcatccaggccaattatagtttaatggaaaatggaaagataaaggttctgaatcaagagctccgggccgacgggactgtgaaccagatcgaaggcgaggccacacctgtgaatctgacagaaccagctaagctggaagtgaaattttcatggttcatgccctcggcaccatactggattcttgctaccgattatgaaaattacgctctggtctactcctgtacgtgcattattcaactgtttcacgttgatttcgcctggattctggccaggaacccgaatctgccaccagaaaccgttgacagtctgaaaaatatcctcacatctaacaatattgacgtcaagaaaatgaccgtaacagaccaggtgaactgccccaagcttagctag

SEQ ID NO: 108471 - DNA, 450 bp, synthetic construct
  misc_feature 1..450: note = Description of Artificial Sequence: Synthetic coding sequence
  source 1..450: mol_type = other DNA
atggtgatgttactcctgctattaagtgccttggccggcttgttcggggccgctgaaggccaggctttccacctcgggaagtgcccaaatccgcctgtgcaggaaaatttcgatgtgaataagtatctcggcagatggtatgagatcgagaaaattccgacgacattcgaaaacgggcggtgcattcaggctaattactccctcatggagaacggcaagatcaaagtcctgaatcaggagctgcgcgctgacggaacagtcaatcaaatcgaaggagaggcaaccccggtcaacctgaccgagcctgccaagctggaagtgaaattctcttggttcatgccatctgccccgtactggatccttgccacggattatgagaattacgctttggtctattcctgcacctgcattatccagctcttccacgtggactttgcctggatcttgtag

SEQ ID NO: 108472 - DNA, 954 bp, synthetic construct
  misc_feature 1..954: note = Description of Artificial Sequence: Synthetic coding sequence
  source 1..954: mol_type = other DNA
atgaaggtgctgtgggccgctcttttggtgacattccttgcaggctgtcaagctaaggtggagcaggctgtggagacagagcctgaaccagagttgagacagcagaccgaatggcagtccgggcagcggtgggagttggccttgggaaggttttgggattacctgcggtgggtgcagaccttaagcgagcaagttcaagaggaactcctgtcctctcaagttacccaggagcttcgggccttaatggatgaaacaatgaaagagcttaaggcctacaagagcgagctcgaggagcagctgacgccagtggccgaggagacacgggcacgactctctaaagagctgcaggcagcacaggcccgactaggagcggacatggaggatgtatgcgggcgcttagtgcaatatagaggtgaggtccaggctatgctcggccagagcacagaggagcttcgagtaagactcgcctcacatttaaggaagctccggaagcgcctcttgcgcgacgccgacgacctgcaaaaaagactagcggtgtatcaagcaggggcgagagaaggcgccgagcgcgggctctcagccatccgtgaacgcctggggccccttgttgagcagggaagggtgcgtgcagccacagtagggtctctggctgggcaaccactgcaggagcgagctcaagcttggggtgagcgtcttcgcgcccgcatggaagaaatgggttctaggacacgggataggcttgatgaagtgaaagagcaggtggcggaagtccgggccaagctcgaagagcaagcacaacagattagactccaggcagaggcattccaggctcggctgaaatcttggttcgaaccattagtggaggacatgcagcggcagtgggccggattggtggagaaggtgcaggcagccgtgggtacatcggctgccccggtgcccagcgacaatcactag

SEQ ID NO: 108473 - DNA, 660 bp, synthetic construct
  misc_feature 1..660: note = Description of Artificial Sequence: Synthetic coding sequence
  source 1..660: mol_type = other DNA
atgaaggtgttatgggccgctctgctcgtcaccttcctggccggatgccaggccaaggtggaacaggccgtggaaacagaacccgagcccgaactccggcaacagactgaatggcagagcgggcagcggtgggagctggcgcttgggcggttctgggattacctcaggtgggtgcagactctgtccgagcaggtgcaggaggagcttctgagctcccaggtgacccaagagctccgggcattgatggacgaaaccatgaaggagctgaaggcttataaaagcgaattggaagagcagttgacacccgtagccgaagaaacccgagcaaggctaagcaaagagctgcaggctgcccaggcacgactcggcgcggatatggaagatgtctgcggcagacttgtgcagtacaggggagaagtccaggcaatgctgggacaatctacagaggaattacgggttagacttgcaagtcacttgcgcaagttgagaaagcgtctcctgcgcgacgctgatgacctgcaaaaacggcttgccgtttatcaagctggggccagagagggggcagagcgggggctgagtgccatacgagagaggctggggccactcgtggaacaggggcgggttagggccgccaccgtggggagtttagcaggacagtag

SEQ ID NO: 108474 - DNA, 867 bp, synthetic construct
  misc_feature 1..867: note = Description of Artificial Sequence: Synthetic coding sequence
  source 1..867: mol_type = other DNA
gaggtaaaagacgttctgcctcaagagcctgtccggtccgcagtgggtggtacaggcatgtcaagtggtgcctctaggaagtcttgggatccgggcaatccctggccccctgattggccaatcacgggcagaaagatgaaagtgctgtgggccgctctgctggtgacattcctggcgggatgccaggcaaaggttgagcaggcagtcgagaccgagcctgaacccgaattgcgtcagcagaccgagtggcaatctggacaaagatgggagctggcactgggtaggttctgggattacctgcggtgggttcaaaccctctccgagcaagtgcaggaagagctgttgtctagtcaagtgacgcaagaactccgcgctcttatggacgaaaccatgaaggaactgaaggcgtacaagtctgaacttgaggagcagctcacaccggtggccgaggaaacgcgggcacgtcttagcaaggagttacaggccgcacaggcccgactgggcgcagatatggaggacgtgtgtggcagactggtgcaatataggggtgaagtgcaagctatgctgggccaatctacggaggagttgagagttagacttgccagtcacttgcgaaaattgcggaagaggctcctgagggacgctgatgacttacagaaacgccttgcggtatatcaagcaggcgcgcgtgaaggggccgagaggggactgtccgccattagggaacggctcgggcccctggtggagcagggccgtgttagagcagctactgtggggtccctggcaggacagccactgcaggagagagctcaggcctggggcgagcggttgagggcacgcatggaagagatgggttcaagaacatag

SEQ ID NO: 108475 - DNA, 651 bp, synthetic construct
  misc_feature 1..651: note = Description of Artificial Sequence: Synthetic coding sequence
  source 1..651: mol_type = other DNA
atgaaggtgctctgggcggctttgctcgtgacatttcttgctggctgccaggcaaaggttgagcaggccgtcgagacagaaccggaacccgaacttagacaacaaactgagtggcaatctggacagagatgggagctcgcattgggacggttctgggattacctccggtgggtgcaaaccctgtccgagcaggtgcaggaagagcttctctcttcccaagtgactcaggaactccgggctcttatggacgaaactatgaaggaattaaaagcttacaaaagcgagcttgaggaacagctcactcccgtggcggaggagactagagcccgcttgtccaaagagctacaggcggcacaagcacgccttggcgcagacatggaggatgtgtgtggaagactcgttcagtatcggggtgaagtacaggctatgctgggacagtcaactgaagaactccgagttagactcgcaagccatctcaggaagctgaggaagagacttttacgcgatgcagatgacctccagaagcgcttggccgtataccaggccggcgctagagagggtgccgaaaggggcctgtcggcaattcgggagcgcctgggaccattagtagagcagggtagggttcgagctgccacagtggggtcactgtag

SEQ ID NO: 108476 - DNA, 10593 bp, synthetic construct
  misc_feature 1..10593: note = Description of Artificial Sequence: Synthetic coding sequence
  source 1..10593: mol_type = other DNA
atggccaaagaagaagatgaggaaaagaaggcaaaaaaaggcaagaagggcaagaaagcccccgaaccggagaaaccaaagagatccctcaaagggacaagtcggcttttcatgggctttcgagaccggaccccaaaaattagcaagaaaggtcaattccgttccgcctccgcgtttttttggggcctacataccgggccccagaagaccaaacgtaagcgcaaggccagaacggtgcttaagagtacatcaaaacttatgacacagatgcgaatgggtaagaagaaaagagccatgaaggggaagaagccctcattcatggtgatccggtttcccggtagacgcggatatggccggctgcgcccccgtgcacgaagcctaagtaaggctagtaccgccatcaattggctcacaaagaagttcctgctcaaaaaggcggaggaatctggctctgaacaggcgaccgtagacgcctggctgcagaggtcatccagtcgcatggggtctaggaagctgccttttccttcgggcgccgaaattctgaggcccggcgggcgactccgtcgattcccgagatcccggtctatctatgcatccggcgaacctctgggtttcctcccattcgaagacgaagccccatttcatcactcagggtcccgaaaatccttgtacggactcgaagggttccaggacctgggagagtattatgactaccatcgggacggggatgactattacgatcgccagagccttcacaggtacgaggagcaggaaccatacctcgctgggttagggccatatagccctgcctggccgccttacggggaccactattatgggtacccaccagaagatccctacgactactaccacccagactactatggtggaccatttgatcccggttatacctacggttacggttacgatgattatgagcctccctacgctcctccaagcggttatagctctccatatagctatcacgatggatacgagggggaggcccatccctatggctactacctagacccctatgcaccgtatgatgccccatatcccccttatgacctaccataccataccccttacgatgtgccttactttgatccctacggagttcactatactgtcccgtacgccgagggggtgtacggcgggggtgacgaggccatatatcctcccgaggtgccttatttttaccctgaggagtctgccagtgctttcgtatatccctgggtcccacctccaattcccagcccccataacccttacgcccatgctatggacgatatcgcagaattagaggagcctgaggatgctggtgtcgagaggcaggggacaagctttaggttaccatctgccgctttcttcgaacagcaggggatggataaacctgccaggtcaaagttgtcgctgattcgtaaatttcgcctctttccccgacctcaggtgaagctatttggcaaagagaagctcgaagtccccctgccacccagcttggatattcccctgcctctgggcgatgcagacgaggaagaggatgaagaggagctgccaccagtctcagccgtcccttatggccaccccttttggggatttctcacaccccgacagcgtaacctgcagcgcgctctgagcgccttcggcgcacataggggcctgggtttcgggcctgagtttggaaggccagtaccgcgcccagcaacctcattagccaggtttctcaagaaaacgctgagcgaaaaaaagcctattgccaggctcaggggctctcagaaggcgagggctggagggcccgctgtgcgagaggcggcctataagaggttcggctataagctggccggcatggaccctgagaagcccggcacaccaatcgtgctccggagagcacagcctagagctagatccagtaacgatgcccgtcggccgcccgccccccagcccgctccgcgaacactgtcccactggtcagcactgctgagtcctccagtaccgccgagaccccctagctccggacctccccccgctccgcccctctcccccgccctgtcagggctgcctcgacctgcatctccatacggctctctgaggcggcatccacccccctgggccgcgccagcccacgttccacctgctccacaggcatcctggtgggctttcgttgaaccccccgctgtctcacctgaggtccctccggacttgctagcatttccaggccctcgtccctcctttaggggcagccgtcgtcgaggggccgcttttggctttcccggggcatcccctagagcctcaagaagaagggcctggtcccctctggcttccccacagccctcactgcgctcatcccctggcctcggttattgcagccccctggcacccccctcaccccaactgtcattacggacaggcccattccagccaccttttctcccccctgctagacgacctaggagcttgcaggaaagcccggcgccacggagagcggcaggtagactaggcccacccgggtcgcctttgcccgggtcaccacgtcccccaagcccccccctcggtctgtgtcatagcccaagaaggagcagcctcaatctcccttcccggttgccacatacgtggaggagactctctgaaccaccaactcgagcagtgaaacctcaggtgaggctgccatttcatagacctccacgggctggagcttggcgggccccgttagagcacagggagagccccagagaaccagaggactctgaaactccctggaccgttccacctctggctcctagttgggatgttgatatgcctcctacccagagacctccgtcgccttggcccggtggcgctgggtctcgacgcgggttctctcgtccaccacctgtgccagaaaaccctttcctgcagctgctcgggccagtcccgtccccaaccctgcagcccgaggatcccgctgctgacatgacaagggtgttcctgggaaggcatcacgagccaggacccgggcagcttacaaagtcagccgggccaacgcccgagaagcccgaagaagaagctacactgggagacccccagctaccggcagaaacaaaacctcccacacctgcaccacctaaagatgtgacgccacccaaggacataacaccccccaaggacgtactgcccgagcagaagacgctgcgtccttccttgagctaccccttagctgcatgtgatcagactcgtgccacttggcctccttggcaccgctggggcactcttcctcaggctgccgcccccttggctcctatccgggctccagaacctttaccaaaagggggagagcggcgccaagcagccccagggaggtttgccgttgttatgcccagagtccaaaagctctcctctttccagagggtgggcccagccaccctgaagccccaagtgcagcctatacaggaccccaaaccccgagcctgctcgctcaggtggtcatgtctatggctgcgggccgatgcttatggcccctggccccgggtgcacacccacccccaaagctgtcacctagggcctggggctgcgtgtctttcactgagagggtcttgggaggaagtggggccccccagctggaggaacaaaatgcattctatcagaaacctgccgagtatgaggtttagagaacagcacggcgaggatggggtcgaggatatgactcagctggaggacttgcaggagactaccgttctttcaaacttgaagatacgctttgaaaggaacctgatttatacctacatcgggtctattttggttagtgtgaacccctatcaaatgttcggcatttacgggccggaacaggttcagcagtacaacgggcgagctcttggagaaaatcccccacacctgtttgcggttgctaatctcgctttcgccaagatgctcgacgccaagcaaaatcagtgcataattatttccggagagtccggctccggcaagaccgaagccacaaagctcattctgagatacttggccgcaatgaaccagaaaagggaagtgatgcagcaaattaaaatactagaggcaacaccattactggaatctttcgggaatgccaagaccgtcaggaacgacaactctagcagattcgggaagtttgtggaaattttcctcgaaggaggtgtgatatccggagccatcaccagccaatatctgctggaaaaatctcggatcgtattccaggccaagaatgaacgcaattatcatattttctatgaactcttagctgggctgcctgcccagctccgacaggccttctcactgcaagaggcagaaacttattattacctgaatcaaggcggcaactgcgagatagccggaaaaagcgacgcggacgatttcaggaggctcttagctgccatggaggtcctgggtttcagcagtgaagatcaggatagtatcttcaggatcctcgccagtattctccacctcgggaacgtgtattttgaaaaatacgaaacagatgctcaggaagtggctagtgtggtctctgctcgagagatacaggcagtggctgagttgctgcagatttccccggaaggccttcagaaggctattacattcaaggtgacagaaacaatgcgggaaaagatcttcactccattgactgtggagtcagctgtagatgctagggacgctatcgccaaagtgctgtacgccttactgttcagttggctcattacgagggtgaacgcactggtctcacctcggcaggacactctgtcaatcgcgatcctcgacatctatggcttcgaagacctgagttttaacagctttgagcagctctgtataaactacgcgaacgagaatctacagtacctcttcaacaaaatcgtgttccaggaagagcaagaggagtacatcagagagcagatcgactggcaagaaatcacatttgccgacaaccaaccgtgcatcaatctaatctccctgaaaccttatggaattcttagaatcctcgatgaccagtgttgcttcccacaggctactgaccacacgttcttgcaaaaatgtcattatcaccacggggcaaatccactttatagtaagcctaagatgcctcttccagagttcaccatcaagcattacgccggaaaggtaacttatcaggtccacaaatttctggacaagaaccatgaccaggttaggcaggacgtgctggatctgttcgtccgttccaggaccagggtagtggcccatcttttttcttcacacgctcctcaggccgccccccaaaggttggggaaatcctccagtgttactcggctgtacaaagcccacaccgtagccgcaaagtttcagcagtcactgctagatctggtagagaagatggagcggtgcaatccgcttttcatgaggtgtctaaagcccaatcacaaaaaagagcccgggctctttgaacccgacgtcgtgatggctcaactgagatacagcggcgttttagagaccgttagaatcagaaaggaaggtttccccgtgcggctgcctttccagggcttcatcgaccgatactgctgtctggtcgccctcaaacatgatctccctgctaacggagacatgtgtgtgtctgttctttcgcggctatgcaaagttatgccaaacatgtatagggttggcgtgtctaagctgttcctgaaggaacacctgtaccagttgcttgagtccatgcgggagcacgtcttaaaccttgcggccttgacccttcaacgctgcctgcgcggcttctttatcaaacgccgctttcgatctctccggcacaagataattctgcttcaatcgagagcccggggctatttggcaagacagagatatcaacaaatgcggaggtccctggtcaagttccgcagcttagttcacgcttacgtctcccggcgtcggtacttgaagcttagggccgaatggcgttgtcaggtcgagggggccctgctgtgggagcaagaggaactcagtaaacgggaggtggtggccgtgggtcacttggaagtgcctgccgaactggctggcttgttgcaagcagttgccggcctcggtctggcccaggtgccacaggtggcccccgttaggacaccccgactgcaagctgagcctagagttaccctgcctctcgatattaacaactatccgatggccaaatttgtgcagtgccattttaaggagcccgccttcgggatgctcacagtgcccttaaggacccctctgactcaactgccagctgaacaccatgctgaggcggtgtccatttttaagctcatcctgcggtttatgggagatccgcaccttcacggagcccgtgagaacatcttcgggaattatatcgtccagaaagggctcgcggtccctgaactccgggatgagatcctcgctcaactggcaaaccaggtctggcacaaccacaacgcgcataacgccgagcgggggtggttgctcctcgctgcctgtctcagcgggtttgcaccttccccttgcttcaacaagtatctcttaaagttcgtctctgactacgggcggaacggattccaagccgtttgtcagcaccgcctgatgcaggccatgggaagagcccagcagcagggcagcggcgcggcacgcactctgccacccactcagttagagtggacagctacgtacgagaaggctagcatggctctggatgtaggttgttttaatggggaccaattctcctgccctgtgcattcgtggagtactggtgaggaggtggcgggcgacatactaagacatcggggcttagccgatggctggaggggatggactgtagccatgaaaaacggggttcagtgggccgagctggcggggcacgattacgttctcgaccttgtgagtgacctggaattgttgcgagacttccccagacaaaaaagttacttcatcgtggggaccgaaggaccagccgcaagtaggggcggtccgaaagtggttttcggtaactcttgggattcagacgaagacatgagcacccgacctcagccacaagagcatatgcctaaggtactggattccgatggatattcctcccacaatcaagacggtacgaatggcgagaccgaagcccagcggggtacagccacacatcaagaatctgactcactgggcgaaccagctgtgccacacaaaggcctggactgttatctcgatagcctcttcgatccagtgctttcttatggtgatgctgacttagaaaagcccactgctattgcctatcgcatgaagggtggagggcagccaggcgggggcagcagcagcgggacagaagacactcccagacgcccacctgagcctaagccaattccaggcttggacgcatctacattggcactgcaacaggcctttatacataaacaagcagtgctgctggcccgcgagatgacgctgcaagccaccgctctgcaacaacagcctttaagcgccgctctgagatccctccccgccgaaaagccacctgccccagaggctcaacctacttccgtcggaacaggacctcccgcaaagccagtgctgctgagggcgacacccaagcctctggccccagccccactggccaaagcgcctcgtttgcccattaaacctgtggctgcccccgtcctggcccaggatcaggccagccccgagacaacgagcccctccccggagctggtgcgctacagtacactaaacagcgagcattttccccagcctacccagcagataaaaaacattgtccgccagtaccagcagccatttcgcggaggaagacctgaagccctccgcaaagacggaggaaaggtttttatgaaaaggcctgacccacatgaggaagcactaatgatcctgaagggacagatgacccacttggccgctgcccctggaacccaagtgtctagggaggcggtggccttggtgaagccggtgactagcgcccctcggccatcgatggccccaactagcgctctcccttcccggagtctggaacctcccgaggagctgacgcagacgcggttacatagactgataaatccaaatttttacggttatcaggacgcaccatggaaaatttttctccgaaaggaggtgttttaccccaaggacagttattcccaccccgtgcagcttgacctcttgttccgccagattctccatgacaccttgtcagaggcctgcttgagaatttccgaagatgagagacttaggatgaaggctttgtttgcccagaaccagcttgatacccaaaagcccctcgttaccgagtctgtgaagcgtgccgtggtcagtacagcccgggatacctgggaggtatacttttctagaatctttcccgcgactggaagcgtcggcactggagtgcaacttctagcagtcagccacgtgggcattaagctgcttcgtatggtgaagggaggccaggaagccggcggacaactccgcgtccttcgcgcatacagttttgccgacattttgtttgtaactatgccatcccagaatatgttggagtttaatttggcgagtgagaaggtgatcctcttctcagcgcgggctcaccaggtcaaaacactcgtggacgacttcatcttggaacttaaaaaggatagcgattacgtagtcgcagtccgcaacttccttcctgaggatccggccctgttagccttccataagggagatataattcaccttcaacccctggaacccccacgggttgggtactctgcagggtgtgtggtgcgaaggaaagtggtttatctggaggagctccggagacggggtcctgacttcggatggcggttcggtacaatacatggtcgggtgggacggttccctagtgaacttgttcaacctgccgccgcgccagactttctccagctgcccacggagcctggtcgcggccgagcggcagcagtagccgccgcggtagcctccgccgcggcagcccaggaagtcggccggcggcgagagggaccacctgtacgggcaagatctgcagatcacggagaagacgcattagccctcccaccatacacaatgctggaattcgcacagaaatatttccgcgatccccagcgacggccccaggacggcctcagactgaagtctaaggagccgcgcgaaagtaggacgcttgaggacatgctgtgtttcactaaaacacccctgcaggaatctttgattgagctgagtgactccagtctgtcaaagatggctaccgacatgtttctcgccgttatgcgttttatgggggatgcaccgctgaaaggacagtcggacttagacgtactctgcaacctgctgaaactatgtggggatcacgaagtaatgagggacgagtgttactgccaagtggtaaagcagataacagacaacacgtcctccaaacaagactcctgtcaacggggctggagattgttatacatagttaccgcgtaccattcctgttcagaagtactacacccgcaccttaccagatttctgcaggacgtctcacgaactccgggactgccattccagggaatcgctaaggcgtgcgagcaaaatttgcagaagactctccgcttcggaggtcgcctcgagcttcctagctcaattgaattaagggccatgctggcgggcagatcaagcaagcggcagctctttctccttcccggcggactggaaagacacctaaagataaagacatgcaccgtggccctggatgtggtggaggagatttgcgccgaaatggcactaacccgtcccgaagcgtttaatgaatacgtgatctttgttgtgaccaatagagggcagcatgtttgtcccctcagcagacgcgcctacatcctggacgtggccagtgagatggaacaagtggatggtggttacatgttatggtttcggcgagtgctgtgggatcagcctttgaaattcgaaaacgagctgtatgtcacaatgcactacaatcaggtgcttccagattacctgaaaggacttttttcttctgtgcccgcttctcgaccgagcgaacagctcctgcagcaagtgagtaagctggcatccctccagcacagagctaaggaccacttctacctgccaagcgtgagggaagttcaagagtacatcccagcccagctctacagaactacagctgggtccacctggctcaacctggtttctcagcacagacagcagacccaggcactctctccgcatcaggcaagagcccaattcctgggcctcctgtcagccttacccatgtttggatcttctttcttcttcatacagagctgttcgaatatagcggtgcctgcaccttgcatattggcgattaaccacaatggcctgaactttctttcgacagaaacccacgagttgatggtgaagttccccttgaaggagatacaatctacccggacacagcggccaaccgctaactcatcttacccatacgtcgaaattgctcttggagacgtggctgcacagagaacactgcaattgcagttagagcaggggttagagctgtgcagggtggttgccgtgcacgtggaaaaccttctctctgcccacgaaaaacgtctgactctgccaccgtccgagatcacattattgtag

SEQ ID NO: 108477 - DNA, 840 bp, synthetic construct
  misc_feature 1..840: note = Description of Artificial Sequence: Synthetic coding sequence
  source 1..840: mol_type = other DNA
atgtttcgagctccctgtcacagactgagggctcggggtactaggaaagctagagcaggggcctggcgtggatgcacgtttccctgtctggggaaaggaatggagcgacccgcagctcgggaaccacatggccctgacgctctgagacgctttcagggactcctgctggatcgccggggcagactgcacggccaggtactgcgcttgcgcgaagtagcccgtaggctggaacgtctcagacgtcgatcactggtggcaaatgtcgccgggtctagcctgtcggcgacgggcgccctcgccgcaatcgttggtctcagcctgagcccggtaacattgggcacctctctgctggtgtctgcagtcggtctgggtgtggccacggccggtggagccgtgaccatcaccagcgatctgtcccttatcttttgcaactccagggagctaagaagggtgcaggagatcgccgccacatgtcaggatcagatgagagaaatcctgagctgtctggagttcttctgccgatggcaggggtgcggggaccgacagctgttgcaatgtggaaggaacgcttccatcgctctctacaattcagtgtatttcattgtctttttcggaagccggggattcctaattcctaggcgagccgagggtgacacaaaagtgtcccaggctgtgttgaaggcgaagattcagaaattagcggaaagcctggagagttgcaccggggcacttgacgagttaagcgagcagcttgaatctcgggttcagctgtgtaccaagtcatcccgaggtcatgacctgaagataagcgctgatcaacgtgcaggcctgtttttttag

SEQ ID NO: 108478 - DNA, 747 bp, synthetic construct
  misc_feature 1..747: note = Description of Artificial Sequence: Synthetic coding sequence
  source 1..747: mol_type = other DNA
atgggcatggagcggccagcggcccgtgaaccacatggccctgatgcccttcggagatttcaaggcctgcttcttgaccggcgcggtcgcctgcacggccaagtgctgcgattacgagaggtcgcccggagacttgagcggctcaggcgtagaagcctggtggctaacgtcgcaggaagtagtctttccgctactggcgctcttgccgctatcgtcgggttgtctttgtcacctgtgacactaggcaccagcctgctggtttccgccgttgggctcggcgtagccaccgctggcggggcagttacaattaccagtgacctgtcactcattttttgtaactcacgggagttaagacgcgtacaagagatcgctgccacctgtcaggaccagatgagagagatcctgtcctgtctggaatttttttgccgatggcagggttgtggtgatcgccagttactgcagtgcgggagaaatgccagcatcgctctttacaactccgtgtacttcatcgtgttttttgggagccgcggtttcctcataccaagacgcgcagaaggcgatactaaagtctctcaagcagtcctgaaggcaaaaatccagaagctggcagaaagcttggagtcttgcaccggtgcactcgacgagctctccgagcagctcgaatctcgagttcagctctgtactaagagttcccgtggccacgacctgaaaatctccgccgaccagagggccggactgttcttttag

SEQ ID NO: 108479 - DNA, 1245 bp, synthetic construct
  misc_feature 1..1245: note = Description of Artificial Sequence: Synthetic coding sequence
  source 1..1245: mol_type = other DNA
atgaggttcaaatcacataccgtcgagctacggcgtccctgctcggatatggaaggggccgcacttctgcgggtaagcgtcctgtgcatctggatgagcgcactgttcctgggggtgggtgttcgggccgaggaagcaggagcccgggtacagcagaacgtcccatctggcaccgataccggggacccccagtcaaagccactgggagattgggctgccggcactatggatcctgagagctctatcttcatcgaagacgcgattaaatatttcaaggagaaggtgtctacgcagaatttgctgttgttgctcacagacaacgaggcctggaatgggtttgtggctgcagccgagcttccaagaaacgaggccgacgaattaaggaaagcactggacaatttagcccgccagatgattatgaaagacaagaactggcacgataaaggacaacaatataggaattggtttctgaaagagtttccaagattgaagagcgagctcgaagataacatccggcgactgagggcactggcagacggcgtgcagaaggtgcacaaagggacaacaattgccaatgttgtttcaggctcgctgtcaatcagcagcggtattctgaccctggtgggcatgggcttggcccctttcacagaaggaggttctcttgtactgcttgagcctggcatggaactggggatcactgccgccctgacaggcatcacctcctccaccatggactacggaaagaaatggtggacacaggcccaggctcatgatctcgtgatcaagtccctcgacaagctcaaggaggttagggagttcctcggagaaaacatatcaaatttcctttccttggctggcaacacataccagctgacgagaggcatcggaaaagatataagggcactcagacgggcaagagcaaacctgcagtcagtcccacatgcatccgcatcacggcctcgggtgacggagcccatttcggccgagtccggagagcaagtcgaaagggttaacgaaccgtccatcctggaaatgtcacgaggcgtgaagctcactgatgtcgccccagtgtctttcttcttggtcctcgatgttgtgtacctcgtatatgagtccaaacatttgcacgagggggcgaaatctgagactgccgaggaactgaagaaagtcgcccaggagctggaagaaaagctgaacattctgaacaacaactataaaattctgcaagcggaccaagaactgtag

SEQ ID NO: 108480 - DNA, 834 bp, synthetic construct
  misc_feature 1..834: note = Description of Artificial Sequence: Synthetic coding sequence
  source 1..834: mol_type = other DNA
atgattatgaaggacaaaaactggcacgataagggccagcaatacaggaactggtttcttaaggaattccctagactgaagagcgagctcgaggataatataaggcggcttcgtgccttggccgacggagtacagaaagtgcacaaggggactaccattgcaaatgtagtctccggttccctgtcaatatcttccgggatacttacactcgtcggaatgggcctggctccattcaccgagggaggatcacttgtgttactcgaaccgggcatggagttgggcatcaccgctgctctgacaggcatcacctccagtaccatggattatggaaagaaatggtggactcaagcccaagcccatgatctcgtgatcaaatcccttgataaactcaaggaggtgcgggaattcctgggggagaacataagcaatttcttatcccttgcgggaaacacctaccaactgactcgtggaatcgggaaagacatcagggctttgcgtagggcacgcgctaatctccagtccgtgcctcatgcctcagcttctagaccgcgcgtcacagagcctattagcgctgaatcaggcgagcaggtggagcgtgtgaatgaaccctctatcctcgagatgtcacggggagtcaagctcacagacgtggctcccgtgtctttctttctcgtgctggatgtggtttatctggtgtacgaatcaaagcacctccacgagggcgccaagagcgaaacagccgaggaactcaagaaggttgctcaagaattggaagagaaactcaatattcttaacaataattataagatactgcaggccgaccaggagttgtag

SEQ ID NO: 108481 - DNA, 1197 bp, synthetic construct
  misc_feature 1..1197: note = Description of Artificial Sequence: Synthetic coding sequence
  source 1..1197: mol_type = other DNA
atggagggcgccgctcttctccgagtgagtgtgctatgcatatggatgtctgccttattcctaggcgtcggggtgagagccgaagaagctggtgctagagtgcagcagaatgtgccatccgggaccgatacaggggatccccagagtaagcctttaggcgactgggctgcgggcaccatggatcccgagtctagtatattcatagaagacgccatcaaatacttcaaggagaaggttagcactcagaacctccttcttttgctcaccgataatgaagcctggaatggcttcgtggccgcggcggaattgcctagaaatgaggcagacgagttgcgtaaagccctggataatcttgcaagacagatgatcatgaaggacaaaaattggcatgacaagggacaacagtatagaaactggtttctcaaagaatttcctcgcttgaagtctgagctcgaggacaatattcgaaggctcagggcgctagctgatggagtgcagaaggtccacaaaggtacaactatagccaacgttgtcagcggttctctttccattagcagtggtatactgactctggtgggcatgggactggctccttttactgaagggggatcccttgtgttactagaaccaggaatggagctcgggataacagctgcactcacaggtataacatcgtccaccatggactatgggaagaaatggtggacgcaggcacaggctcatgacctggtcattaaaagtctggacaagctgaaggaggttagggaattcttgggcgagaacatcagcaattttttgagtctcgctggaaatacgtaccagctcacccggggaatcggtaaagatattcgagccctgagacgcgcaagagccaacctgcaatctgtgccgcacgcctccgccagcagaccgcgagtcaccgagcccatttctgcagagtctggcgagcaagttgaacgagtaaacgaaccatctatcctagagatgtctcggggagtgaaactcaccgacgtggcacctgtgtcgtttttcttggtcctcgacgttgtgtacctggtctacgagtcaaaacatctgcacgagggggccaaatcagaaaccgctgaggaactcaagaaggtcgcccaggagttggaggagaagctcaacatcctcaacaacaactacaaaattctccaggcagatcaagagctatag

SEQ ID NO: 108482 - DNA, 1197 bp, synthetic construct
  misc_feature 1..1197: note = Description of Artificial Sequence: Synthetic coding sequence
  source 1..1197: mol_type = other DNA
atggagggtgcagccttattacgggtctctgtcctgtgcatttggatgagcgctctttttctcggggtgggtgtcagggctgaggaggctggtgcccgagtacagcagaatgtcccctccggaactgatacaggcgacccacagtccaaacccctaggggactgggcagctggcaccatggaccccgagtcctcaattttcatagaggatgcaatcaaatacttcaaagagaaggtgtccacacaaaatctgctgttgctactcaccgataacgaggcgtggaacgggttcgtcgcagccgccgagctaccccggaacgaagctgatgagctgcggaaagcacttgataacttagcacgccaaatgataatgaaagacaagaactggcatgacaagggtcaacaatatcgcaattggtttctaaaggagtttcctcggcttaaatccgagttggaagacaatataaggaggctcagagctctggcggacggggtacagaaagttcataagggcaccacgattgcaaatgtggtgtccggaagcttatccatcagctcgggaattctgacgctggtggggatggggttggccccatttactgaagggggctccctggtactgctggagcccggaatggagctggggattactgcggctcttactggcatcacatcgagtacaatggactacggaaagaagtggtggacccaagcacaggctcatgatctagtcatcaagagtctggacaagctgaaagaggtgcgtgagttccttggggaaaatataagcaacttcctcagcctagctggcaacacatatcagctaacgagaggcatcgggaaagacattagagctctccggagggccagagcgaacctgcagtccgtaccccacgcttccgcaagtcgacctcgagtcactgagccaatcagtgcagagagtggcgaacaggtcgaaagagttaacgagccgagtattttggagatgtcaagaggggtgaaactgaccgacgtggccccggttagcttcttcttggttctggacgttgtgtacctggtctatgagagcaagcacctgcacgaaggggccaagtcagagaccgctgaggaactgaagaaagtggctcaggagctggaggaaaaactcaacattctcaataataattacaagattctacaagctgaccaagaactgtag

SEQ ID NO: 108483 - DNA, 1197 bp, synthetic construct
  misc_feature 1..1197: note = Description of Artificial Sequence: Synthetic coding sequence
  source 1..1197: mol_type = other DNA
atggagggggctgccctcctcagggtgtctgtgctgtgtatttggatgagtgctctatttctgggagttggggttagagccgaagaggccggcgcacgtgtacaacagaacgtgccctcaggaacagacacaggggacccccagtcaaagccgcttggagattgggcagccggcactatggatcccgagtccagcattttcatcgaagacgctataaaatactttaaagagaaagtctccacccagaatctgctgctgttgctgacggacaatgaggcctggaacggatttgtcgccgctgccgaattgcctaggaacgaggctgacgagctccggaaagcgctggacaatctggcaaggcagatgattatgaaggacaaaaattggcatgataagggccagcaataccgcaattggttcctgaaggagttcccccgcctgaagtctgagctagaggataatatccggcggcttagagctctcgcagacggagtccagaaggtgcataaagggactacaatcgccaacgtggtgtccggcagcctgtcaatcagttcagggatactgactctggtcggaatggggctggctcctttcacagagggaggctccttagttctgcttgagccaggcatggaacttggcattaccgctgccttaacaggaataaccagctccactatggactacggtaagaaatggtggacacaggcccaggcacacgatctcgttataaagtccctagataagctcaaggaggtccgagaattccttggggaaaatatctcaaatttcctttctctggctggaaacacttatcagctgactcgaggcattggaaaggacatcagggccctgcgcagggcccgggcgaatcttcagtccgtgccacatgcttctgcctccagaccacgcgtgaccgaacccatatccgccgagagtggggaacaggtggaacgcgtcaacgaaccctccattctggaaatgtctcgcggggtaaagctaactgacgtcgctccagtgtcattttttctagtgctggacgtggtgtacctggtctatgaaagcaagcatttacatgaaggagctaagagcgaaaccgccgaagagctcaaaaaggtggcccaagagctcgaggaaaaattgaacatcctcaataataactacaaaatccttcaggctgaccaggagctgtag

SEQ ID NO: 108484 - DNA, 1197 bp, synthetic construct
  misc_feature 1..1197: note = Description of Artificial Sequence: Synthetic coding sequence
  source 1..1197: mol_type = other DNA
atggaaggtgcagccctccttagagtcagcgtgctgtgtatttggatgtccgccctttttctgggcgtcggagtgagggctgaagaagccggcgcaagggtccagcagaacgttccctctggtaccgataccggagatccccagtcaaagcccctgggagattgggccgccggcaccatggaccccgagagtagcatctttattgaggacgcaattaagtactttaaggagaaagtgtcgactcagaatcttcttctgctactgacagacaacgaagcatggaacggttttgtcgctgctgcggagctgcctagaaacgaggccgacgagctgcgcaaggctctggacaaccttgccagacaaatgatcatgaaagacaagaactggcacgacaaagggcagcagtacaggaactggttcctcaaggaattcccccgcctcaaaagcgagcttgaggacaatattcgtaggcttcgcgctctggccgacggggtgcagaaagttcacaaaggcaccaccattgcaaatgtagtgagcggctccctaagcatttccagtgggatcttaaccctggttggcatgggtttagcaccttttaccgaaggcggaagccttgtgctactcgagcccgggatggagctgggtatcaccgctgctctcacaggtatcacctccagtacaatggattacggaaaaaagtggtggactcaagcccaggcccatgatctggtcattaagtccctggataaacttaaagaggttagggagtttctaggggaaaatatttctaacttcctgtccctggcaggcaacacctatcagctgactagaggaattggaaaggatattagggccctgagacgagctagagccaacctacagagcgttccccacgcttcggcatcaagaccacgagtgacagagcccatctctgctgagtctggggagcaagtggagcgggtcaatgagccaagtatcctggagatgtctagaggcgtgaagctcacagatgtggctccagtgtccttcttcctagtgttagacgtggtgtatctcgtgtacgagagcaagcacctgcatgagggcgcgaaaagtgagaccgccgaagaattgaagaaagtggcccaggagttggaggaaaaactcaatatcctgaacaataattataagatcctgcaggctgaccaggagctctag

SEQ ID NO: 108485 - DNA, 1143 bp, synthetic construct
  misc_feature 1..1143: note = Description of Artificial Sequence: Synthetic coding sequence
  source 1..1143: mol_type = other DNA
atggaaggtgcggcccttctgagggtgtctgttctgtgcatctgggtacaacagaatgttccctccggcacagatactggcgatccacagagcaaaccactgggcgattgggctgccggaacaatggatccagagtcaagtatcttcatcgaggatgccattaagtattttaaggagaaggtctccacccaaaatctgttactgttgctcactgataacgaggcatggaatggcttcgtggctgctgcggaacttcctaggaatgaagccgatgagcttcgcaaggccttggacaacctcgccagacagatgatcatgaaggataagaattggcatgacaagggacaacaatacaggaattggtttcttaaggagtttccccggttgaagagtgagctcgaggataacatacgcagactgcgcgccttggctgacggtgtgcaaaaagtgcacaagggaacaacaattgcaaatgtcgtgtcaggatccctatccattagctctggtatcttgactttggtggggatggggctcgcgcccttcactgaggggggtagtctagtgctcctggagccagggatggagctggggatcacagccgcgctaactggcatcaccagctcgaccatggactacggaaagaagtggtggacccaggcacaggctcacgatctggtgatcaagtctctcgataagctgaaggaagtccgggagttcttaggcgagaatatctctaacttcctgagcctcgccgggaatacgtatcagctaacgcggggcatcgggaaggacatcagggcccttcgtcgcgcccgcgctaatctgcaatctgtgccccacgcttccgcaagtaggcctcgtgtgacagaaccgatatctgctgagtccggcgagcaggtggagagagtgaacgagccttcgattctggaaatgagtcggggggtcaaacttacggatgttgccccggtgtctttttttctggtgctggatgtcgtgtatctggtttatgagtcgaagcaccttcatgagggagctaaatccgagaccgctgaggaactgaaaaaggttgcacaggaattggaggaaaagctaaacattctgaacaacaactacaagattctgcaggcggaccaggaattatag

SEQ ID NO: 108486 - DNA, 483 bp, synthetic construct
  misc_feature 1..483: note = Description of Artificial Sequence: Synthetic coding sequence
  source 1..483: mol_type = other DNA
atggagggagctgccctgctgagagtaagcgtgttgtgcatctggatgtcggcgctgttcttgggcgttggggtgcgtgccgaggaggctggagctagagtccagcagaacgtcccttccggcaccgacactggcgatcctcagagtaaaccactgggtgattgggccgctggaaccatggatccagagtcatcaatattcattgaggacgcaatcaagtacttcaaggagaaggtgtccactcagaatctgctgctgctgttgacggataacgaggcctggaacggcttcgtggcagccgcggaactgcccaggaatgaggctgacgagctgagaaaggccctcgacaatttggccaggcagatgattatgaaagataagaattggcacgataagggtcagcagtataggaactggttcctgaaggagttccctcgactaaaatctgagctcgaggataatatcagacgtctccgggcatag

SEQ ID NO: 108487 - DNA, 426 bp, synthetic construct
  misc_feature 1..426: note = Description of Artificial Sequence: Synthetic coding sequence
  source 1..426: mol_type = other DNA
atggaaggagctgctctgttgagagtcagcgtgttgtgcatttggatgtcagcgctctttctcggagtaggcgtccgggcagaagaggccggggctcgagtccaacaaaacgtgccatctggaacagatactggcgaccctcagtccaagcctctgggagattgggccgctggcaccatggatccaggcccagctggcagccggggagacagtggagagccttgcactttaaggcctgcttgcaggggacagcggcagcatggcggggcaagcagaatttccgcggaaggacccgccccaatgccaagacggcgcaccccttccacggcccatctgcgcgtcccaaaaaccagccgaaggaacctcctttgtatgcgtgctgtgtcactgctgcgaatgcctttatcaatatctcgcaagaaatag

SEQ ID NO: 108488 - DNA, 357 bp, synthetic construct
  misc_feature 1..357: note = Description of Artificial Sequence: Synthetic coding sequence
  source 1..357: mol_type = other DNA
atgaggtttaagagtcacaccgtggagttaaggagtacgttatctcaaccgttattcagctgttcccggagacgaccatgctctgatatggaaggagccgctttgttacgcgtcagcgtgctgtgcatctggatgtccgctctatttttgggggtgggtgtaagagctgaagaagcaggggcacgcgtccagcagaatgtcccgagcggcacggacactggggatccacagtctaagcccctgggggactgggctgcaggcacgatggatcctgaatcgtcaatcttcatcgaggacgccataaagtactttaaggaaaaagtgagcacacagaacctactccttctgctgacttag

SEQ ID NO: 108489 - DNA, 426 bp, synthetic construct
  misc_feature 1..426: note = Description of Artificial Sequence: Synthetic coding sequence
  source 1..426: mol_type = other DNA
atggagggcgctgccctgctgcgcgtctccgtattgtgcatctggatgtcggcactgtttctcggagtcggtgtgcgcgcagaggaggcgggggccagagttcagcagaacgttccaagcgggacggataccggggatccgcagtcaaaaccattgggcgactgggctgctggcacgatggatccagggcctgccggcagccggggggattccggagaaccatgtacattacgtccggcttgccgagggcaacggcagcacggaggcgcaagccgaatctccgccgaagggcctgcgccaatgccacgtaggcggacaccttcgaccgctcacctgagggtgcccaagaccagcaggcgcaacctgctttgcatgagagccgtgtcgctgctgcggatgccccttagtatatcaaggaaaaagtag

SEQ ID NO: 108490 - DNA, 1014 bp, synthetic construct
  misc_feature 1..1014: note = Description of Artificial Sequence: Synthetic coding sequence
  source 1..1014: mol_type = other DNA
atgaaccccgaatcatccatttttattgaggattacctgaagtatttccaggaccaggtgtctcgggaaaacttattgcagctgctgacggacgatgaggcttggaacgggttcgtagcagcagccgagttaccacgcgacgaagctgatgagctgcggaaggccctgaacaaactcgcaagccacatggttatgaaagacaaaaatcggcatgataaggaccagcagcaccgccagtggttcttaaaagagtttcctagactaaaacgcgagctggaggatcacattagaaagttgagggccttggcagaagaagtcgaacaggtgcatagaggaaccacaatagccaacgtagtatccaactcagtgggaaccactagcggtatactgactctgctaggattggggctagcgccatttactgagggaattagcttcgtgctcctcgacacgggaatgggactaggagccgccgctgcagtggccggcattacgtgcagtgtggttgaactggtcaataaactgcgggctagagcacaggccaggaacctggaccagagcgggaccaacgtcgccaaggtcatgaaagaatttgtcggcggtaatacgcctaatgtcctcaccctcgtggacaattggtaccaggtgacccaaggaatcggacgcaacataagagctattaggcgcgccagggctaatcctcaactgggggcatacgcgccccctccacacatcatagggcgcatctcggcagaagggggggaacaggtcgaaagggtcgtggagggccctgcccaggccatgagtaggggtacaatgattgtcggggctgcaaccggagggatcctgctgctgctggatgtggttagtctggcttatgaatcgaagcatttactggagggcgcaaagagcgagtccgcagaggagctcaaaaaaagagcacaggagctcgagggcaagcttaacttcctgacaaagattcacgagatgctgcaacccggtcaggaccagtag

SEQ ID NO: 108491 - DNA, 1014 bp, synthetic construct
  misc_feature 1..1014: note = Description of Artificial Sequence: Synthetic coding sequence
  source 1..1014: mol_type = other DNA
atgaatcctgagagctctatctttattgaagattacttgaagtacttccaggaccaggtcagccgcgagaacctcttgcagctcttaaccgatgacgaagcatggaatgggtttgtggctgcagctgaactccctcgcgatgaggctgacgagctgaggaaagccctcaacaaactcgcctcccatatggtcatgaaggacaagaaccggcacgacaaggaccaacaacaccgacagtggttcctgaaggaattcccccgactgaagcgcgaattagaagaccacatccgcaaactgcgcgcactagctgaggaagtggagcaggtgcataggggtacgaccatcgcaaacgtagtttccaatagcgtgggcacaacgtccggcattctgacccttctgggcctggggcttgcacccttcaccgaggggatttccttcgtgctactggataccggcatgggactgggggcagctgctgcagtggcaggtatcacttgttccgtcgtagaattagttaacaaactgcgtgccagagcgcaggccaggaatctcgaccagagtgggactaatgtcgcaaaggtgatgaaggagtttgtagggggaaacacccctaatgtgctcacacttgttgacaattggtaccaggtgacacagggtataggacgaaacattagagcaatccgcagagcaagggccaatccgcagttaggggcttatgcaccaccccctcacattatcggtaggatctcggctgagggaggggagcaggtcgagagagtcgtggaaggacccgcacaggccatgagcagagggacgatgatcgtaggagcggccacaggcggcatcctgcttttgctcgatgtggtgtcccttgcgtatgagtcaaaacacctgcttgagggcgcaaagtcggagtccgcggaagaactgaagaagcgagcacaagaactggagggcaagctaaattttctcaccaagatccacgaaatgttgcagccaggccaggaccagtag

SEQ ID NO: 108492 - DNA, 1350 bp, synthetic construct
  misc_feature 1..1350: note = Description of Artificial Sequence: Synthetic coding sequence
  source 1..1350: mol_type = other DNA
atgcatagttggacatgggatccgcattccagcgagcaacttgacctggcacagagtctttcagaggaagaccccttatctagcctgaggggctccatccaacctcaaccaccagctgaagcacctgacaaaggcggatcacaggctaataatgaccccggcggatgggacccaggatgcagctctagccaggtactcggtcgaacccgcggaccctgcttaggcgtccgtgtgagagaagaagaggctgggacacgtgtaaaggaaaacctgcccgtttggactgtcaccggagagctccagggcaaaccactgggaaaccctgccgctggcacaatgaaccccgagtcttccatttttatcgaggattatttgaagtactttcaggatcaggttagcagggagaacctgctacagctgcttactgatgacgaagcatggaacgggttcgttgcagcggccgagttgcctagggacgaggctgacgaattgcgaaaggcgctgaataaactggcctctcacatggtgatgaaggacaaaaatcggcacgacaaagatcaacagcacaggcaatggtttctcaaagagtttcctaggctcaagagggagctcgaagaccatattagaaagctgagggctttagccgaagaggttgaacaagtccacagggggactacaatcgcaaatgtggtgtcgaacagcgtaggcaccacctctggaatactgactctgctgggtctgggattagcacccttcaccgagggtatctccttcgtgctgctcgacacaggaatgggattgggcgctgccgccgccgtggcgggcatcacctgtagtgtggtagagcttgtgaataagttgagggcccgggctcaggcaagaaacttggaccaaagtggcacaaacgtcgccaaggttatgaaggaatttgtcggaggaaatactcccaatgttctaactctcgtggacaattggtaccaggtcacccagggaattggccgcaacatcagagctattcgccgcgcgagggcgaacccccaattaggtgcatacgcccctccccctcacatcataggccggatctcagcagagggaggcgaacaagtggaaagagtggtcgaaggccctgcacaggccatgtccagaggcactatgattgttggcgccgctacagggggaattctgctgttactggacgtggtgagtctggcttacgaatcaaaacacctgcttgagggtgctaagtctgaatctgcagaggaactgaagaagcgcgcacaggagttagagggcaagcttaatttccttaccaagatccacgagatgttacaaccaggccaggaccagtag

SEQ ID NO: 108493 - DNA, 225 bp, synthetic construct
  misc_feature 1..225: note = Description of Artificial Sequence: Synthetic coding sequence
  source 1..225: mol_type = other DNA
atgaacccagagagttcgattttcatcgaagattatctgaaatatttccaggaccaggtgtcaagggagaatctgctccagctgctgaccgacgatgaagcttggaacggcttcgttgcagccgctgagctgccacgcgacgaggccgacgaactcaggaaagctctcaataagctagcctcgcatatggtaatgaaggacaaaaatagacacgataaggactag

SEQ ID NO: 108494 - DNA, 387 bp, synthetic construct
  misc_feature 1..387: note = Description of Artificial Sequence: Synthetic coding sequence
  source 1..387: mol_type = other DNA
atgaatcctgagagctcaatcttcatcgaggattacctaaagtatttccaggatcaagtgtctagggagaacctgttacaattgctgaccgacgacgaggcctggaatggcttcgtcgctgcagctgagctgccacgggacgaagctgatgagctgcgtaaggcactcaataagctcgcatcccatatggtgatgaaagacaagaaccgacacgataaagatcagcagcacagacagtggttccttaaagaattcccacggctaaagagagagctggaggatcacattcggaaactgagagctctggcagaggaggtggaacaagtgcacagaggcaccacaatagcgaacgtggtcagtaacagcgtaggtacaacctccgggtag

SEQ ID NO: 108495 - DNA, 1209 bp, synthetic construct
  misc_feature 1..1209: note = Description of Artificial Sequence: Synthetic coding sequence
  source 1..1209: mol_type = other DNA
atgggccttggccagggctgggggtgggaggccagctgcttcgcctgcttaattcgcagttgttgccaggtggttacattcacctttccctttggattccaggggatctcccagtcactggagaatgtgtccgggtattatgccgacgctaggctggaagtcgggagtactcagctacgaacagctggaagctgcagccactcattcaagaggagtttcctggagaagaaacgctttaccgaggaggcaaccaagtactttcgggaacgagtgagcccagtgcacctgcagatcctgctgacaaacaatgaagcctggaagcggtttgtgactgcggcggagctgccacgcgatgaggcagatgccctctacgaggccctcaagaaactgcgcacatatgcggccatagaggatgagtatgtgcagcagaaagacgagcagtttcgcgagtggttcctgaaggagtttcctcaggtgaagaggaagatccaggagtctattgaaaagcttcgggccctggctaacggcattgaagaggtccaccgtggctgtactattagcaatgtcgtgtcttcctccacaggggctgcgagtgggatcatgagtctggctggtttggttctcgcaccattcaccgccggaaccagcctggctctcaccgctgccggagtgggactaggtgcggcgagcgccgtgactggcatcaccacctccattgtcgagcatagctacacatcatcagccgaagccgaagccagtcgcctgaccgccacaagcatcgaccgactgaaggtatttaaggaggtaatgcgggatatcacacccaacttattgtcattgttgaataactactacgaagccacccagactatcggttcagagattcgggcgatccgccaggctagagctcgcgctagactccccgtcaccacctggcgaatcagcgctgggagtggaggccaagccgagagaacaatagcaggtacaaccagggctgtgtctagaggcgccaggattctgagcgccaccacgagcggcattttcctggctttggacgtggtcaacttggtgtacgaatcaaagcatcttcatgaaggtgcgaaatcggcctccgctgaggaactaaggcggcaagcacaggagttggaggaaaatctaatggagctcactcaaatataccagcggctgaacccttgtcacacccattag

SEQ ID NO: 108496 - DNA, 609 bp, synthetic construct
  misc_feature 1..609: note = Description of Artificial Sequence: Synthetic coding sequence
  source 1..609: mol_type = other DNA
atgtcccttgcgggtctagtgcttgctcccttcaccgccggcacctctttggccttgacggcagccggtgtgggcctaggggccgcttctgctgttacagggatcactacctctatcgtagaacactcatacacttcctctgctgaagccgaagcatccagactgacagcaactagcatagatcgcctgaaggtgttcaaagaggtgatgcgtgatatcacccctaacctgctcagcctcttgaataactactatgaagccacacagactatcggctccgagatccgcgctattcgccaggcacgggctcgcgcacgcctacccgttaccacttggaggatatcagctgggagcggggggcaggctgagcgaaccattgccggcaccacaagggccgtatcccggggggcacggatcttgagcgcgaccacctcgggcatattcttggccctggacgtggtcaacctggtgtacgagagtaaacatctgcatgagggagccaaaagcgcgagtgcggaagagctgcgccggcaggcccaggagctggaggagaacctcatggagctgactcagatttaccaacgccttaacccctgtcacacacattag

SEQ ID NO: 108497 - DNA, 609 bp, synthetic construct
  misc_feature 1..609: note = Description of Artificial Sequence: Synthetic coding sequence
  source 1..609: mol_type = other DNA
atgtcactggccgggctcgtcctcgccccttttaccgctgggacctcccttgccctcactgccgccggggtcggactaggtgcagccagcgcggtgaccgggatcactactagcatcgtggagcattcctacactagttcagccgaggcagaagcttcaagattgaccgctacctccatcgatcgtctcaaggtcttcaaagaggtgatgagagacattacaccaaacctgctgtccctgctgaataactactacgaggccacgcagacaatcggctctgaaattcgtgccattcgccaggccagagcgagggcccggctgccggttaccacctggagaatatcggccggctccgggggccaggccgagaggaccatcgccggtactaccagagctgtctcccggggagcaagaatcttatccgccactacgtctggcatattcctggccctggatgtggtgaacctggtgtatgagtccaagcacctgcatgaaggggctaagtccgcttctgccgaagagctgcgccgtcaggcccaggagctggaagagaatctgatggaactgacccagatttatcagcgactcaatccctgccatacgcactag

SEQ ID NO: 108498 - DNA, 996 bp, synthetic construct
  misc_feature 1..996: note = Description of Artificial Sequence: Synthetic coding sequence
  source 1..996: mol_type = other DNA
atggacagcgagaaaaaacggttcactgaagaagccactaaatattttagggaaagagtgagccctgtgcaccttcagatcctcttgacaaataatgaagcatggaagcggttcgttacagcggctgaattgccgagggatgaagcagatgctctttacgaggcactgaagaaacttcgtacgtacgccgcgatcgaagacgagtacgttcagcaaaaggatgaacagttcagagagtggttcctaaaggaattcccgcaggtcaagcgcaaaattcaggagagcatcgaaaaactgcgagctctggccaatggtattgaagaagttcatcgcggttgtaccatctcgaacgtcgtctccagttctactggtgccgcgtccggaatcatgtctctggccggtttggtgctcgctcctttcacagccgggacttcactggccctcacagcggccggagtgggactgggggccgcttccgctgtgactggtattaccactagcattgtggaacacagttacacatcatccgcagaagccgaagcaagccgtttaaccgccacttcaatagaccgcctaaaggttttcaaggaggtgatgcgagacattacacccaacctgctgtccctactgaataactattatgaggcgactcagacaattggcagcgaaataagagccatcaggcaggccagggctcgagcacgactcccagtgaccacatggaggatttctgctggatcaggagggcaggccgaacgaacgatcgcagggaccaccagagctgtctccagaggtgccaggatactctcggccactacttccggtatattcctggccctggatgtggtgaatttggtgtatgagagtaagcatctgcacgaaggagcaaaatctgcttccgccgaagaattgagacgtcaggcccaggaattagaagaaaacctcatggagctgactcagatctaccagcgattgaatccttgtcacacacattag

SEQ ID NO: 108499 - DNA, 609 bp, synthetic construct
  misc_feature 1..609: note = Description of Artificial Sequence: Synthetic coding sequence
  source 1..609: mol_type = other DNA
atgtcactcgcaggcctggtgttggctccattcacagcaggtacttcactcgccctcaccgctgccggggtaggcttgggagccgccagtgctgtgactggaatcacaaccagtatcgtggagcacagctataccagttcagccgaggccgaggcatcacggttaacagccacctccatagatcgacttaaggtgttcaaagaagtaatgagggacattactcccaatctgcttagcttgctgaataattattacgaagctacacagaccatagggtctgaaataagggcgatcaggcaagctagggcccgggcaaggctccctgtgacaacttggagaatcagtgctggctccgggggccaggcagagagaacgatagccgggacgactagggccgtgtcccggggggcgaggattctgtctgctaccaccagtggtattttcctcgcgttggacgtggtaaacttagtgtacgaatcaaaacatctccacgaaggggccaaaagtgcaagcgctgaggaactccggagacaggcacaggaactggaagaaaacctcatggagcttacccagatttaccagagacttaacccttgtcacacccattag

SEQ ID NO: 108500 - DNA, 324 bp, synthetic construct
  misc_feature 1..324: note = Description of Artificial Sequence: Synthetic coding sequence
  source 1..324: mol_type = other DNA
atggggtcttgggtccagctcattacttcggttggcacgagcgggctgtttctgggtgtgagagtgcgagaagagggtgcaggcatgcgctgctcaaagaccatccaggccggtcagtggctagacagttcaaaggggcctctggggccttctccgccaccagtgcctaccgcaggctactcaagctccttctgcgtgcattacgtgaacctgctccctggagtcctggtgctgagcgtgacatcccaatacccgcatctttctatggctttatgccagctggctgcccacgattggccgagactcagctgtgtctgtgtgtag

SEQ ID NO: 108501 - DNA, 1044 bp, synthetic construct
  misc_feature 1..1044: note = Description of Artificial Sequence: Synthetic coding sequence
  source 1..1044: mol_type = other DNA
atgggttcatgggtccagttaatcacttcagtgggcgtacagcaaaaccaccccgggtggaccgtggcaggccaatttcaggagaagaagcgtttcaccgaagaggtcattgagtacttccagaagaaagtgtctcctgtacacctgaagattctcctcacaagcgacgaagcctggaagaggttcgtccgcgtcgctgagctacccagagaggaagcagacgccctatacgaggctctgaagaacttgactccttacgtggccatcgaggataaggacatgcaacagaaggagcagcaatttcgtgagtggttcttgaagtttccccagatcaggtggaagatccaggagtccatcgagcgactgcgggtcatcgcgaatgagattgaaaaggtgcatcggggatgtgtaattgccaacgtggtgtctgggagcacaggcatcctctccgtgattggcgtgatgttggccccattcaccgccggcctcagtttatccattactgcagccggggtcggactgggcatcgcaagcgctacagccgggatagcgtcaagcattgtggagaacacctatacaaggagcgctgaactgaccgcgtcaaggctaacagcaactagtaccgaccagctggaggcactacgagatattttaagagatatcaccccaaatgtgctgagctttgccctcgacttcgacgaggccacaaagatgatcgctaacgatgtacatactcttcgtcgctctaaagctaccgttggccgtccacttattgcatggagatatgtgccaattaatgtagtagagactctcaggacgagaggtgctccaacacggattgtcaggaaggtggccagaaatctcggcaaagcaacgagtggcgtcctcgtcgttcttgatgttgttaacctggtgcaggattcactggatcttcacaagggtgccaaatcggagtccgccgaatccctgaggcaatgggcacaggagcttgaggagaacctgaatgagcttacccacattcatcagtccctcaaggccggttag

SEQ ID NO: 108502 - DNA, 1053 bp, synthetic construct
  misc_feature 1..1053: note = Description of Artificial Sequence: Synthetic coding sequence
  source 1..1053: mol_type = other DNA
atggagggtgctgcacttcttaagatctttgttgtgtgcatctgggtccagcaaaaccatccagggtggactgtggctggccagtttcaggagaaaaaacgcttcaccgaggaagtcattgaatatttccagaagaaggtgtcccctgtacatctgaagattctgctcacctccgatgaggcttggaagcgcttcgtacgagtggcagaactgccaagggaggaagctgacgccctgtatgaggccttgaagaaccttactccctatgttgcaattgaggacaaagatatgcagcagaaagagcagcagttccgtgagtggttccttaaattccctcagatcaggtggaaaatccaggagtctatcgagcggctaagagttattgcaaatgagattgagaaagtccatcgagggtgtgttatagccaatgtcgtaagcgggagcacaggcatcttatcagttatcggcgttatgctggcacccttcactgccggtttaagcctctcgataacagccgctggagtcggattagggatagcttccgcaactgccgggatagcaagctcgatcgtggaaaacacttataccagaagtgcggagttgactgcttctcgactgactgctacctcaactgatcagcttgaggcacttcgagatatcctgagggatattacccccaatgttctctccttcgccttagacttcgatgaggccacaaagatgatcgccaatgacgtgcatacattgagacgtagcaaagccacagttggcaggcctctaatcgcctggcggtacgtaccaataaacgtcgtggagacgcttaggaccagaggcgctcctactaggatagtgcggaaggtggccaggaatctggggaaagccacatcaggtgtactcgttgtactggacgtggttaatcttgtgcaggattcgttggaccttcacaagggcgctaagtctgaaagcgctgagtcactgaggcagtgggcccaggagttggaggagaacctgaacgaacttactcatatccatcaatccctgaaagccggatag
